United States Patent Application Publication US 2012/0157512 A1 - sequence listing, part 7

SEQ ID NO: 196132 - DNA, 19 bp, Artificial sequence
  SiRNA target sequence
aaaaaactcatgtataaat

SEQ ID NO: 196133 - DNA, 19 bp, Artificial sequence
  SiRNA target sequence
aaaaactcatgtataaata

SEQ ID NO: 196134 - DNA, 19 bp, Artificial sequence
  SiRNA target sequence
aaaactcatgtataaataa

SEQ ID NO: 196135 - DNA, 19 bp, Artificial sequence
  SiRNA target sequence
aaactcatgtataaataag

SEQ ID NO: 196136 - DNA, 19 bp, Artificial sequence
  SiRNA target sequence
aactcatgtataaataagc

SEQ ID NO: 196137 - DNA, 19 bp, Artificial sequence
  SiRNA target sequence
actcatgtataaataagcc

SEQ ID NO: 196138 - DNA, 19 bp, Artificial sequence
  SiRNA target sequence
ctcatgtataaataagcca

SEQ ID NO: 196139 - DNA, 19 bp, Artificial sequence
  SiRNA target sequence
tcatgtataaataagccat

SEQ ID NO: 196140 - DNA, 19 bp, Artificial sequence
  SiRNA target sequence
catgtataaataagccata

SEQ ID NO: 196141 - DNA, 19 bp, Artificial sequence
  SiRNA target sequence
atgtataaataagccataa

SEQ ID NO: 196142 - DNA, 19 bp, Artificial sequence
  SiRNA target sequence
tgtataaataagccataag

SEQ ID NO: 196143 - DNA, 19 bp, Artificial sequence
  SiRNA target sequence
gtataaataagccataagt

SEQ ID NO: 196144 - DNA, 19 bp, Artificial sequence
  SiRNA target sequence
tataaataagccataagta

SEQ ID NO: 196145 - DNA, 19 bp, Artificial sequence
  SiRNA target sequence
ataaataagccataagtaa

SEQ ID NO: 196146 - DNA, 19 bp, Artificial sequence
  SiRNA target sequence
taaataagccataagtaaa

SEQ ID NO: 196147 - DNA, 19 bp, Artificial sequence
  SiRNA target sequence
aaataagccataagtaaac

SEQ ID NO: 196148 - DNA, 19 bp, Artificial sequence
  SiRNA target sequence
aataagccataagtaaact

SEQ ID NO: 196149 - DNA, 19 bp, Artificial sequence
  SiRNA target sequence
ataagccataagtaaactg

SEQ ID NO: 196150 - DNA, 19 bp, Artificial sequence
  SiRNA target sequence
taagccataagtaaactgc

SEQ ID NO: 196151 - DNA, 19 bp, Artificial sequence
  SiRNA target sequence
aagccataagtaaactgcc

SEQ ID NO: 196152 - DNA, 19 bp, Artificial sequence
  SiRNA target sequence
agccataagtaaactgccc

SEQ ID NO: 196153 - DNA, 19 bp, Artificial sequence
  SiRNA target sequence
gccataagtaaactgcccc

SEQ ID NO: 196154 - DNA, 19 bp, Artificial sequence
  SiRNA target sequence
ccataagtaaactgcccca

SEQ ID NO: 196155 - DNA, 19 bp, Artificial sequence
  SiRNA target sequence
cataagtaaactgccccac

SEQ ID NO: 196156 - DNA, 19 bp, Artificial sequence
  SiRNA target sequence
ataagtaaactgccccaca

SEQ ID NO: 196157 - DNA, 19 bp, Artificial sequence
  SiRNA target sequence
taagtaaactgccccacat

SEQ ID NO: 196158 - DNA, 19 bp, Artificial sequence
  SiRNA target sequence
aagtaaactgccccacatt

SEQ ID NO: 196159 - DNA, 19 bp, Artificial sequence
  SiRNA target sequence
agtaaactgccccacattt

SEQ ID NO: 196160 - DNA, 19 bp, Artificial sequence
  SiRNA target sequence
gtaaactgccccacatttc

SEQ ID NO: 196161 - DNA, 19 bp, Artificial sequence
  SiRNA target sequence
taaactgccccacatttct

SEQ ID NO: 196162 - DNA, 19 bp, Artificial sequence
  SiRNA target sequence
aaactgccccacatttctg

SEQ ID NO: 196163 - DNA, 19 bp, Artificial sequence
  SiRNA target sequence
aactgccccacatttctgc

SEQ ID NO: 196164 - DNA, 19 bp, Artificial sequence
  SiRNA target sequence
actgccccacatttctgct

SEQ ID NO: 196165 - DNA, 19 bp, Artificial sequence
  SiRNA target sequence
ctgccccacatttctgcta

SEQ ID NO: 196166 - DNA, 19 bp, Artificial sequence
  SiRNA target sequence
tgccccacatttctgctat

SEQ ID NO: 196167 - DNA, 19 bp, Artificial sequence
  SiRNA target sequence
gccccacatttctgctatt

SEQ ID NO: 196168 - DNA, 19 bp, Artificial sequence
  SiRNA target sequence
ccccacatttctgctatta

SEQ ID NO: 196169 - DNA, 19 bp, Artificial sequence
  SiRNA target sequence
cccacatttctgctattat

SEQ ID NO: 196170 - DNA, 19 bp, Artificial sequence
  SiRNA target sequence
ccacatttctgctattata

SEQ ID NO: 196171 - DNA, 19 bp, Artificial sequence
  SiRNA target sequence
cacatttctgctattataa

SEQ ID NO: 196172 - DNA, 19 bp, Artificial sequence
  SiRNA target sequence
acatttctgctattataaa

SEQ ID NO: 196173 - DNA, 19 bp, Artificial sequence
  SiRNA target sequence
catttctgctattataaaa

SEQ ID NO: 196174 - DNA, 19 bp, Artificial sequence
  SiRNA target sequence
atttctgctattataaaaa

SEQ ID NO: 196175 - DNA, 19 bp, Artificial sequence
  SiRNA target sequence
tttctgctattataaaaat

SEQ ID NO: 196176 - DNA, 19 bp, Artificial sequence
  SiRNA target sequence
ttctgctattataaaaata

SEQ ID NO: 196177 - DNA, 19 bp, Artificial sequence
  SiRNA target sequence
tctgctattataaaaatac

SEQ ID NO: 196178 - DNA, 19 bp, Artificial sequence
  SiRNA target sequence
ctgctattataaaaataca

SEQ ID NO: 196179 - DNA, 19 bp, Artificial sequence
  SiRNA target sequence
tgctattataaaaatacaa

SEQ ID NO: 196180 - DNA, 19 bp, Artificial sequence
  SiRNA target sequence
gctattataaaaatacaag

SEQ ID NO: 196181 - DNA, 19 bp, Artificial sequence
  SiRNA target sequence
ctattataaaaatacaagt

SEQ ID NO: 196182 - DNA, 19 bp, Artificial sequence
  SiRNA target sequence
tattataaaaatacaagtt

SEQ ID NO: 196183 - DNA, 19 bp, Artificial sequence
  SiRNA target sequence
attataaaaatacaagttg

SEQ ID NO: 196184 - DNA, 19 bp, Artificial sequence
  SiRNA target sequence
ttataaaaatacaagttga

SEQ ID NO: 196185 - DNA, 19 bp, Artificial sequence
  SiRNA target sequence
tataaaaatacaagttgaa

SEQ ID NO: 196186 - DNA, 19 bp, Artificial sequence
  SiRNA target sequence
ataaaaatacaagttgaaa

SEQ ID NO: 196187 - DNA, 19 bp, Artificial sequence
  SiRNA target sequence
taaaaatacaagttgaaac

SEQ ID NO: 196188 - DNA, 19 bp, Artificial sequence
  SiRNA target sequence
aaaaatacaagttgaaacg

SEQ ID NO: 196189 - DNA, 19 bp, Artificial sequence
  SiRNA target sequence
aaaatacaagttgaaacgg

SEQ ID NO: 196190 - DNA, 19 bp, Artificial sequence
  SiRNA target sequence
aaatacaagttgaaacggg

SEQ ID NO: 196191 - DNA, 19 bp, Artificial sequence
  SiRNA target sequence
aatacaagttgaaacgggc

SEQ ID NO: 196192 - DNA, 19 bp, Artificial sequence
  SiRNA target sequence
atacaagttgaaacgggct

SEQ ID NO: 196193 - DNA, 19 bp, Artificial sequence
  SiRNA target sequence
tacaagttgaaacgggctc

SEQ ID NO: 196194 - DNA, 19 bp, Artificial sequence
  SiRNA target sequence
acaagttgaaacgggctcg

SEQ ID NO: 196195 - DNA, 19 bp, Artificial sequence
  SiRNA target sequence
caagttgaaacgggctcgt

SEQ ID NO: 196196 - DNA, 19 bp, Artificial sequence
  SiRNA target sequence
aagttgaaacgggctcgtt

SEQ ID NO: 196197 - DNA, 19 bp, Artificial sequence
  SiRNA target sequence
agttgaaacgggctcgtta

SEQ ID NO: 196198 - DNA, 19 bp, Artificial sequence
  SiRNA target sequence
gttgaaacgggctcgttag

SEQ ID NO: 196199 - DNA, 19 bp, Artificial sequence
  SiRNA target sequence
ttgaaacgggctcgttagc

SEQ ID NO: 196200 - DNA, 19 bp, Artificial sequence
  SiRNA target sequence
tgaaacgggctcgttagct

SEQ ID NO: 196201 - DNA, 19 bp, Artificial sequence
  SiRNA target sequence
gaaacgggctcgttagctg

SEQ ID NO: 196202 - DNA, 19 bp, Artificial sequence
  SiRNA target sequence
aaacgggctcgttagctgt

SEQ ID NO: 196203 - DNA, 19 bp, Artificial sequence
  SiRNA target sequence
aacgggctcgttagctgta

SEQ ID NO: 196204 - DNA, 19 bp, Artificial sequence
  SiRNA target sequence
acgggctcgttagctgtaa

SEQ ID NO: 196205 - DNA, 19 bp, Artificial sequence
  SiRNA target sequence
cgggctcgttagctgtaat

SEQ ID NO: 196206 - DNA, 19 bp, Artificial sequence
  SiRNA target sequence
gggctcgttagctgtaatt

SEQ ID NO: 196207 - DNA, 19 bp, Artificial sequence
  SiRNA target sequence
ggctcgttagctgtaatta

SEQ ID NO: 196208 - DNA, 19 bp, Artificial sequence
  SiRNA target sequence
gctcgttagctgtaattaa

SEQ ID NO: 196209 - DNA, 19 bp, Artificial sequence
  SiRNA target sequence
ctcgttagctgtaattaaa

SEQ ID NO: 196210 - DNA, 19 bp, Artificial sequence
  SiRNA target sequence
tcgttagctgtaattaaaa

SEQ ID NO: 196211 - DNA, 19 bp, Artificial sequence
  SiRNA target sequence
cgttagctgtaattaaaaa

SEQ ID NO: 196212 - DNA, 19 bp, Artificial sequence
  SiRNA target sequence
gttagctgtaattaaaaaa

SEQ ID NO: 196213 - DNA, 19 bp, Artificial sequence
  SiRNA target sequence
ttagctgtaattaaaaaat

SEQ ID NO: 196214 - DNA, 19 bp, Artificial sequence
  SiRNA target sequence
tagctgtaattaaaaaata

SEQ ID NO: 196215 - DNA, 19 bp, Artificial sequence
  SiRNA target sequence
agctgtaattaaaaaatat

SEQ ID NO: 196216 - DNA, 19 bp, Artificial sequence
  SiRNA target sequence
gctgtaattaaaaaatatt

SEQ ID NO: 196217 - DNA, 19 bp, Artificial sequence
  SiRNA target sequence
ctgtaattaaaaaatattt

SEQ ID NO: 196218 - DNA, 19 bp, Artificial sequence
  SiRNA target sequence
tgtaattaaaaaatatttt

SEQ ID NO: 196219 - DNA, 19 bp, Artificial sequence
  SiRNA target sequence
gtaattaaaaaatatttta

SEQ ID NO: 196220 - DNA, 19 bp, Artificial sequence
  SiRNA target sequence
taattaaaaaatattttat

SEQ ID NO: 196221 - DNA, 19 bp, Artificial sequence
  SiRNA target sequence
aattaaaaaatattttata

SEQ ID NO: 196222 - DNA, 19 bp, Artificial sequence
  SiRNA target sequence
attaaaaaatattttataa

SEQ ID NO: 196223 - DNA, 19 bp, Artificial sequence
  SiRNA target sequence
ttaaaaaatattttataaa

SEQ ID NO: 196224 - DNA, 19 bp, Artificial sequence
  SiRNA target sequence
taaaaaatattttataaag

SEQ ID NO: 196225 - DNA, 19 bp, Artificial sequence
  SiRNA target sequence
aaaaaatattttataaagt

SEQ ID NO: 196226 - DNA, 19 bp, Artificial sequence
  SiRNA target sequence
aaaaatattttataaagtt

SEQ ID NO: 196227 - DNA, 19 bp, Artificial sequence
  SiRNA target sequence
aaaatattttataaagttc

SEQ ID NO: 196228 - DNA, 19 bp, Artificial sequence
  SiRNA target sequence
aaatattttataaagttca

SEQ ID NO: 196229 - DNA, 19 bp, Artificial sequence
  SiRNA target sequence
aatattttataaagttcaa

SEQ ID NO: 196230 - DNA, 19 bp, Artificial sequence
  SiRNA target sequence
atattttataaagttcaat

SEQ ID NO: 196231 - DNA, 19 bp, Artificial sequence
  SiRNA target sequence
tattttataaagttcaatc

SEQ ID NO: 196232 - DNA, 19 bp, Artificial sequence
  SiRNA target sequence
attttataaagttcaatcc

SEQ ID NO: 196233 - DNA, 19 bp, Artificial sequence
  SiRNA target sequence
ttttataaagttcaatccc

SEQ ID NO: 196234 - DNA, 19 bp, Artificial sequence
  SiRNA target sequence
tttataaagttcaatccct

SEQ ID NO: 196235 - DNA, 19 bp, Artificial sequence
  SiRNA target sequence
ttataaagttcaatccctt

SEQ ID NO: 196236 - DNA, 19 bp, Artificial sequence
  SiRNA target sequence
tataaagttcaatcccttc

SEQ ID NO: 196237 - DNA, 19 bp, Artificial sequence
  SiRNA target sequence
ataaagttcaatcccttca

SEQ ID NO: 196238 - DNA, 19 bp, Artificial sequence
  SiRNA target sequence
taaagttcaatcccttcaa

SEQ ID NO: 196239 - DNA, 19 bp, Artificial sequence
  SiRNA target sequence
aaagttcaatcccttcaat

SEQ ID NO: 196240 - DNA, 19 bp, Artificial sequence
  SiRNA target sequence
aagttcaatcccttcaatg

SEQ ID NO: 196241 - DNA, 19 bp, Artificial sequence
  SiRNA target sequence
agttcaatcccttcaatgc

SEQ ID NO: 196242 - DNA, 19 bp, Artificial sequence
  SiRNA target sequence
gttcaatcccttcaatgca

SEQ ID NO: 196243 - DNA, 19 bp, Artificial sequence
  SiRNA target sequence
ttcaatcccttcaatgcac

SEQ ID NO: 196244 - DNA, 19 bp, Artificial sequence
  SiRNA target sequence
tcaatcccttcaatgcacc

SEQ ID NO: 196245 - DNA, 19 bp, Artificial sequence
  SiRNA target sequence
caatcccttcaatgcacct

SEQ ID NO: 196246 - DNA, 19 bp, Artificial sequence
  SiRNA target sequence
aatcccttcaatgcacctt

SEQ ID NO: 196247 - DNA, 19 bp, Artificial sequence
  SiRNA target sequence
atcccttcaatgcaccttt

SEQ ID NO: 196248 - DNA, 19 bp, Artificial sequence
  SiRNA target sequence
tcccttcaatgcacctttg

SEQ ID NO: 196249 - DNA, 19 bp, Artificial sequence
  SiRNA target sequence
cccttcaatgcacctttgt

SEQ ID NO: 196250 - DNA, 19 bp, Artificial sequence
  SiRNA target sequence
ccttcaatgcacctttgtt

SEQ ID NO: 196251 - DNA, 19 bp, Artificial sequence
  SiRNA target sequence
cttcaatgcacctttgtta

SEQ ID NO: 196252 - DNA, 19 bp, Artificial sequence
  SiRNA target sequence
ttcaatgcacctttgttat

SEQ ID NO: 196253 - DNA, 19 bp, Artificial sequence
  SiRNA target sequence
tcaatgcacctttgttatc

SEQ ID NO: 196254 - DNA, 19 bp, Artificial sequence
  SiRNA target sequence
caatgcacctttgttatca

SEQ ID NO: 196255 - DNA, 19 bp, Artificial sequence
  SiRNA target sequence
aatgcacctttgttatcag

SEQ ID NO: 196256 - DNA, 19 bp, Artificial sequence
  SiRNA target sequence
atgcacctttgttatcagc

SEQ ID NO: 196257 - DNA, 19 bp, Artificial sequence
  SiRNA target sequence
tgcacctttgttatcagcg

SEQ ID NO: 196258 - DNA, 19 bp, Artificial sequence
  SiRNA target sequence
gcacctttgttatcagcga

SEQ ID NO: 196259 - DNA, 19 bp, Artificial sequence
  SiRNA target sequence
cacctttgttatcagcgaa

SEQ ID NO: 196260 - DNA, 19 bp, Artificial sequence
  SiRNA target sequence
acctttgttatcagcgaaa

SEQ ID NO: 196261 - DNA, 19 bp, Artificial sequence
  SiRNA target sequence
cctttgttatcagcgaaaa

SEQ ID NO: 196262 - DNA, 19 bp, Artificial sequence
  SiRNA target sequence
ctttgttatcagcgaaaat

SEQ ID NO: 196263 - DNA, 19 bp, Artificial sequence
  SiRNA target sequence
tttgttatcagcgaaaata

SEQ ID NO: 196264 - DNA, 19 bp, Artificial sequence
  SiRNA target sequence
ttgttatcagcgaaaatat

SEQ ID NO: 196265 - DNA, 19 bp, Artificial sequence
  SiRNA target sequence
tgttatcagcgaaaatatc

SEQ ID NO: 196266 - DNA, 19 bp, Artificial sequence
  SiRNA target sequence
gttatcagcgaaaatatct

SEQ ID NO: 196267 - DNA, 19 bp, Artificial sequence
  SiRNA target sequence
ttatcagcgaaaatatctc

SEQ ID NO: 196268 - DNA, 19 bp, Artificial sequence
  SiRNA target sequence
tatcagcgaaaatatctct

SEQ ID NO: 196269 - DNA, 19 bp, Artificial sequence
  SiRNA target sequence
atcagcgaaaatatctcta

SEQ ID NO: 196270 - DNA, 19 bp, Artificial sequence
  SiRNA target sequence
tcagcgaaaatatctctaa

SEQ ID NO: 196271 - DNA, 19 bp, Artificial sequence
  SiRNA target sequence
cagcgaaaatatctctaaa

SEQ ID NO: 196272 - DNA, 19 bp, Artificial sequence
  SiRNA target sequence
agcgaaaatatctctaaat

SEQ ID NO: 196273 - DNA, 19 bp, Artificial sequence
  SiRNA target sequence
gcgaaaatatctctaaata

SEQ ID NO: 196274 - DNA, 19 bp, Artificial sequence
  SiRNA target sequence
cgaaaatatctctaaataa

SEQ ID NO: 196275 - DNA, 19 bp, Artificial sequence
  SiRNA target sequence
gaaaatatctctaaataaa

SEQ ID NO: 196276 - DNA, 19 bp, Artificial sequence
  SiRNA target sequence
aaaatatctctaaataaaa

SEQ ID NO: 196277 - DNA, 19 bp, Artificial sequence
  SiRNA target sequence
aaatatctctaaataaaaa

SEQ ID NO: 196278 - DNA, 19 bp, Artificial sequence
  SiRNA target sequence
aatatctctaaataaaaag

SEQ ID NO: 196279 - DNA, 19 bp, Artificial sequence
  SiRNA target sequence
atatctctaaataaaaagc

SEQ ID NO: 196280 - DNA, 19 bp, Artificial sequence
  SiRNA target sequence
tatctctaaataaaaagct

SEQ ID NO: 196281 - DNA, 19 bp, Artificial sequence
  SiRNA target sequence
atctctaaataaaaagcta

SEQ ID NO: 196282 - DNA, 19 bp, Artificial sequence
  SiRNA target sequence
tctctaaataaaaagctag

SEQ ID NO: 196283 - DNA, 19 bp, Artificial sequence
  SiRNA target sequence
ctctaaataaaaagctaga

SEQ ID NO: 196284 - DNA, 19 bp, Artificial sequence
  SiRNA target sequence
tctaaataaaaagctagat

SEQ ID NO: 196285 - DNA, 19 bp, Artificial sequence
  SiRNA target sequence
ctaaataaaaagctagatg

SEQ ID NO: 196286 - DNA, 19 bp, Artificial sequence
  SiRNA target sequence
taaataaaaagctagatgg

SEQ ID NO: 196287 - DNA, 19 bp, Artificial sequence
  SiRNA target sequence
aaataaaaagctagatggt

SEQ ID NO: 196288 - DNA, 19 bp, Artificial sequence
  SiRNA target sequence
aataaaaagctagatggtg

SEQ ID NO: 196289 - DNA, 19 bp, Artificial sequence
  SiRNA target sequence
ataaaaagctagatggtgt

SEQ ID NO: 196290 - DNA, 19 bp, Artificial sequence
  SiRNA target sequence
taaaaagctagatggtgtt

SEQ ID NO: 196291 - DNA, 19 bp, Artificial sequence
  SiRNA target sequence
aaaaagctagatggtgtta

SEQ ID NO: 196292 - DNA, 19 bp, Artificial sequence
  SiRNA target sequence
aaaagctagatggtgttac

SEQ ID NO: 196293 - DNA, 19 bp, Artificial sequence
  SiRNA target sequence
aaagctagatggtgttact

SEQ ID NO: 196294 - DNA, 19 bp, Artificial sequence
  SiRNA target sequence
aagctagatggtgttactt

SEQ ID NO: 196295 - DNA, 19 bp, Artificial sequence
  SiRNA target sequence
agctagatggtgttacttt

SEQ ID NO: 196296 - DNA, 19 bp, Artificial sequence
  SiRNA target sequence
gctagatggtgttactttc

SEQ ID NO: 196297 - DNA, 19 bp, Artificial sequence
  SiRNA target sequence
ctagatggtgttactttct

SEQ ID NO: 196298 - DNA, 19 bp, Artificial sequence
  SiRNA target sequence
tagatggtgttactttctc

SEQ ID NO: 196299 - DNA, 19 bp, Artificial sequence
  SiRNA target sequence
agatggtgttactttctct

SEQ ID NO: 196300 - DNA, 19 bp, Artificial sequence
  SiRNA target sequence
gatggtgttactttctctt

SEQ ID NO: 196301 - DNA, 19 bp, Artificial sequence
  SiRNA target sequence
atggtgttactttctcttc

SEQ ID NO: 196302 - DNA, 19 bp, Artificial sequence
  SiRNA target sequence
tggtgttactttctcttca

SEQ ID NO: 196303 - DNA, 19 bp, Artificial sequence
  SiRNA target sequence
ggtgttactttctcttcaa

SEQ ID NO: 196304 - DNA, 19 bp, Artificial sequence
  SiRNA target sequence
gtgttactttctcttcaaa

SEQ ID NO: 196305 - DNA, 19 bp, Artificial sequence
  SiRNA target sequence
tgttactttctcttcaaac

SEQ ID NO: 196306 - DNA, 19 bp, Artificial sequence
  SiRNA target sequence
gttactttctcttcaaaca

SEQ ID NO: 196307 - DNA, 19 bp, Artificial sequence
  SiRNA target sequence
ttactttctcttcaaacaa

SEQ ID NO: 196308 - DNA, 19 bp, Artificial sequence
  SiRNA target sequence
tactttctcttcaaacaaa

SEQ ID NO: 196309 - DNA, 19 bp, Artificial sequence
  SiRNA target sequence
actttctcttcaaacaaaa

SEQ ID NO: 196310 - DNA, 19 bp, Artificial sequence
  SiRNA target sequence
ctttctcttcaaacaaaaa

SEQ ID NO: 196311 - DNA, 19 bp, Artificial sequence
  SiRNA target sequence
tttctcttcaaacaaaaag

SEQ ID NO: 196312 - DNA, 19 bp, Artificial sequence
  SiRNA target sequence
ttctcttcaaacaaaaaga

SEQ ID NO: 196313 - DNA, 19 bp, Artificial sequence
  SiRNA target sequence
tctcttcaaacaaaaagat

SEQ ID NO: 196314 - DNA, 19 bp, Artificial sequence
  SiRNA target sequence
ctcttcaaacaaaaagatt

SEQ ID NO: 196315 - DNA, 19 bp, Artificial sequence
  SiRNA target sequence
tcttcaaacaaaaagattg

SEQ ID NO: 196316 - DNA, 19 bp, Artificial sequence
  SiRNA target sequence
cttcaaacaaaaagattgc

SEQ ID NO: 196317 - DNA, 19 bp, Artificial sequence
  SiRNA target sequence
ttcaaacaaaaagattgcc

SEQ ID NO: 196318 - DNA, 19 bp, Artificial sequence
  SiRNA target sequence
tcaaacaaaaagattgccc

SEQ ID NO: 196319 - DNA, 19 bp, Artificial sequence
  SiRNA target sequence
caaacaaaaagattgcccc

SEQ ID NO: 196320 - DNA, 19 bp, Artificial sequence
  SiRNA target sequence
aaacaaaaagattgcccct

SEQ ID NO: 196321 - DNA, 19 bp, Artificial sequence
  SiRNA target sequence
aacaaaaagattgccccta

SEQ ID NO: 196322 - DNA, 19 bp, Artificial sequence
  SiRNA target sequence
acaaaaagattgcccctag

SEQ ID NO: 196323 - DNA, 19 bp, Artificial sequence
  SiRNA target sequence
caaaaagattgcccctagt

SEQ ID NO: 196324 - DNA, 19 bp, Artificial sequence
  SiRNA target sequence
aaaaagattgcccctagtc

SEQ ID NO: 196325 - DNA, 19 bp, Artificial sequence
  SiRNA target sequence
aaaagattgcccctagtcc

SEQ ID NO: 196326 - DNA, 19 bp, Artificial sequence
  SiRNA target sequence
aaagattgcccctagtccg

SEQ ID NO: 196327 - DNA, 19 bp, Artificial sequence
  SiRNA target sequence
aagattgcccctagtccga

SEQ ID NO: 196328 - DNA, 19 bp, Artificial sequence
  SiRNA target sequence
agattgcccctagtccgaa

SEQ ID NO: 196329 - DNA, 19 bp, Artificial sequence
  SiRNA target sequence
gattgcccctagtccgaag

SEQ ID NO: 196330 - DNA, 19 bp, Artificial sequence
  SiRNA target sequence
attgcccctagtccgaaga

SEQ ID NO: 196331 - DNA, 19 bp, Artificial sequence
  SiRNA target sequence
ttgcccctagtccgaagaa

SEQ ID NO: 196332 - DNA, 19 bp, Artificial sequence
  SiRNA target sequence
tgcccctagtccgaagaaa

SEQ ID NO: 196333 - DNA, 19 bp, Artificial sequence
  SiRNA target sequence
gcccctagtccgaagaaaa

SEQ ID NO: 196334 - DNA, 19 bp, Artificial sequence
  SiRNA target sequence
cccctagtccgaagaaaaa

SEQ ID NO: 196335 - DNA, 19 bp, Artificial sequence
  SiRNA target sequence
ccctagtccgaagaaaaat

SEQ ID NO: 196336 - DNA, 19 bp, Artificial sequence
  SiRNA target sequence
cctagtccgaagaaaaatg

SEQ ID NO: 196337 - DNA, 19 bp, Artificial sequence
  SiRNA target sequence
ctagtccgaagaaaaatgc

SEQ ID NO: 196338 - DNA, 19 bp, Artificial sequence
  SiRNA target sequence
tagtccgaagaaaaatgca

SEQ ID NO: 196339 - DNA, 19 bp, Artificial sequence
  SiRNA target sequence
agtccgaagaaaaatgcag

SEQ ID NO: 196340 - DNA, 19 bp, Artificial sequence
  SiRNA target sequence
gtccgaagaaaaatgcagt

SEQ ID NO: 196341 - DNA, 19 bp, Artificial sequence
  SiRNA target sequence
tccgaagaaaaatgcagta

SEQ ID NO: 196342 - DNA, 19 bp, Artificial sequence
  SiRNA target sequence
ccgaagaaaaatgcagtaa

SEQ ID NO: 196343 - DNA, 19 bp, Artificial sequence
  SiRNA target sequence
cgaagaaaaatgcagtaaa

SEQ ID NO: 196344 - DNA, 19 bp, Artificial sequence
  SiRNA target sequence
gaagaaaaatgcagtaaaa

SEQ ID NO: 196345 - DNA, 19 bp, Artificial sequence
  SiRNA target sequence
aagaaaaatgcagtaaaaa

SEQ ID NO: 196346 - DNA, 19 bp, Artificial sequence
  SiRNA target sequence
agaaaaatgcagtaaaaat

SEQ ID NO: 196347 - DNA, 19 bp, Artificial sequence
  SiRNA target sequence
gaaaaatgcagtaaaaatt

SEQ ID NO: 196348 - DNA, 19 bp, Artificial sequence
  SiRNA target sequence
aaaaatgcagtaaaaatta

SEQ ID NO: 196349 - DNA, 19 bp, Artificial sequence
  SiRNA target sequence
aaaatgcagtaaaaattat

SEQ ID NO: 196350 - DNA, 19 bp, Artificial sequence
  SiRNA target sequence
aaatgcagtaaaaattatt

SEQ ID NO: 196351 - DNA, 19 bp, Artificial sequence
  SiRNA target sequence
aatgcagtaaaaattatta

SEQ ID NO: 196352 - DNA, 19 bp, Artificial sequence
  SiRNA target sequence
atgcagtaaaaattattag

SEQ ID NO: 196353 - DNA, 19 bp, Artificial sequence
  SiRNA target sequence
tgcagtaaaaattattaga

SEQ ID NO: 196354 - DNA, 19 bp, Artificial sequence
  SiRNA target sequence
gcagtaaaaattattagaa

SEQ ID NO: 196355 - DNA, 19 bp, Artificial sequence
  SiRNA target sequence
cagtaaaaattattagaaa

SEQ ID NO: 196356 - DNA, 19 bp, Artificial sequence
  SiRNA target sequence
agtaaaaattattagaaat

SEQ ID NO: 196357 - DNA, 19 bp, Artificial sequence
  SiRNA target sequence
gtaaaaattattagaaata

SEQ ID NO: 196358 - DNA, 19 bp, Artificial sequence
  SiRNA target sequence
taaaaattattagaaatag

SEQ ID NO: 196359 - DNA, 19 bp, Artificial sequence
  SiRNA target sequence
aaaaattattagaaataga

SEQ ID NO: 196360 - DNA, 19 bp, Artificial sequence
  SiRNA target sequence
aaaattattagaaatagat

SEQ ID NO: 196361 - DNA, 19 bp, Artificial sequence
  SiRNA target sequence
aaattattagaaatagatt

SEQ ID NO: 196362 - DNA, 19 bp, Artificial sequence
  SiRNA target sequence
aattattagaaatagatta

SEQ ID NO: 196363 - DNA, 19 bp, Artificial sequence
  SiRNA target sequence
attattagaaatagattaa

SEQ ID NO: 196364 - DNA, 19 bp, Artificial sequence
  SiRNA target sequence
ttattagaaatagattaaa

SEQ ID NO: 196365 - DNA, 19 bp, Artificial sequence
  SiRNA target sequence
tattagaaatagattaaaa

SEQ ID NO: 196366 - DNA, 19 bp, Artificial sequence
  SiRNA target sequence
attagaaatagattaaaaa

SEQ ID NO: 196367 - DNA, 19 bp, Artificial sequence
  SiRNA target sequence
ttagaaatagattaaaaat

SEQ ID NO: 196368 - DNA, 19 bp, Artificial sequence
  SiRNA target sequence
tagaaatagattaaaaatc

SEQ ID NO: 196369 - DNA, 19 bp, Artificial sequence
  SiRNA target sequence
agaaatagattaaaaatcg

SEQ ID NO: 196370 - DNA, 19 bp, Artificial sequence
  SiRNA target sequence
gaaatagattaaaaatcga

SEQ ID NO: 196371 - DNA, 19 bp, Artificial sequence
  SiRNA target sequence
aaatagattaaaaatcgat

SEQ ID NO: 196372 - DNA, 19 bp, Artificial sequence
  SiRNA target sequence
aatagattaaaaatcgatg

SEQ ID NO: 196373 - DNA, 19 bp, Artificial sequence
  SiRNA target sequence
atagattaaaaatcgatga

SEQ ID NO: 196374 - DNA, 19 bp, Artificial sequence
  SiRNA target sequence
tagattaaaaatcgatgat

SEQ ID NO: 196375 - DNA, 19 bp, Artificial sequence
  SiRNA target sequence
agattaaaaatcgatgata

SEQ ID NO: 196376 - DNA, 19 bp, Artificial sequence
  SiRNA target sequence
gattaaaaatcgatgatac

SEQ ID NO: 196377 - DNA, 19 bp, Artificial sequence
  SiRNA target sequence
attaaaaatcgatgataca

SEQ ID NO: 196378 - DNA, 19 bp, Artificial sequence
  SiRNA target sequence
ttaaaaatcgatgatacag

SEQ ID NO: 196379 - DNA, 19 bp, Artificial sequence
  SiRNA target sequence
taaaaatcgatgatacagg

SEQ ID NO: 196380 - DNA, 19 bp, Artificial sequence
  SiRNA target sequence
aaaaatcgatgatacaggt

SEQ ID NO: 196381 - DNA, 19 bp, Artificial sequence
  SiRNA target sequence
aaaatcgatgatacaggtt

SEQ ID NO: 196382 - DNA, 19 bp, Artificial sequence
  SiRNA target sequence
aaatcgatgatacaggttt

SEQ ID NO: 196383 - DNA, 19 bp, Artificial sequence
  SiRNA target sequence
aatcgatgatacaggttta

SEQ ID NO: 196384 - DNA, 19 bp, Artificial sequence
  SiRNA target sequence
atcgatgatacaggtttat

SEQ ID NO: 196385 - DNA, 19 bp, Artificial sequence
  SiRNA target sequence
tcgatgatacaggtttatt

SEQ ID NO: 196386 - DNA, 19 bp, Artificial sequence
  SiRNA target sequence
cgatgatacaggtttattt

SEQ ID NO: 196387 - DNA, 19 bp, Artificial sequence
  SiRNA target sequence
gatgatacaggtttatttt

SEQ ID NO: 196388 - DNA, 19 bp, Artificial sequence
  SiRNA target sequence
atgatacaggtttattttg

SEQ ID NO: 196389 - DNA, 19 bp, Artificial sequence
  SiRNA target sequence
tgatacaggtttattttgc

SEQ ID NO: 196390 - DNA, 19 bp, Artificial sequence
  SiRNA target sequence
gatacaggtttattttgca

SEQ ID NO: 196391 - DNA, 19 bp, Artificial sequence
  SiRNA target sequence
atacaggtttattttgcat

SEQ ID NO: 196392 - DNA, 19 bp, Artificial sequence
  SiRNA target sequence
tacaggtttattttgcata

SEQ ID NO: 196393 - DNA, 19 bp, Artificial sequence
  SiRNA target sequence
acaggtttattttgcataa

SEQ ID NO: 196394 - DNA, 19 bp, Artificial sequence
  SiRNA target sequence
caggtttattttgcataag

SEQ ID NO: 196395 - DNA, 19 bp, Artificial sequence
  SiRNA target sequence
aggtttattttgcataagc

SEQ ID NO: 196396 - DNA, 19 bp, Artificial sequence
  SiRNA target sequence
ggtttattttgcataagcc

SEQ ID NO: 196397 - DNA, 19 bp, Artificial sequence
  SiRNA target sequence
gtttattttgcataagcca

SEQ ID NO: 196398 - DNA, 19 bp, Artificial sequence
  SiRNA target sequence
tttattttgcataagccac

SEQ ID NO: 196399 - DNA, 19 bp, Artificial sequence
  SiRNA target sequence
ttattttgcataagccact

SEQ ID NO: 196400 - DNA, 19 bp, Artificial sequence
  SiRNA target sequence
tattttgcataagccactg

SEQ ID NO: 196401 - DNA, 19 bp, Artificial sequence
  SiRNA target sequence
attttgcataagccactgt

SEQ ID NO: 196402 - DNA, 19 bp, Artificial sequence
  SiRNA target sequence
ttttgcataagccactgta

SEQ ID NO: 196403 - DNA, 19 bp, Artificial sequence
  SiRNA target sequence
tttgcataagccactgtat

SEQ ID NO: 196404 - DNA, 19 bp, Artificial sequence
  SiRNA target sequence
ttgcataagccactgtatt

SEQ ID NO: 196405 - DNA, 19 bp, Artificial sequence
  SiRNA target sequence
tgcataagccactgtatta

SEQ ID NO: 196406 - DNA, 19 bp, Artificial sequence
  SiRNA target sequence
gcataagccactgtattaa

SEQ ID NO: 196407 - DNA, 19 bp, Artificial sequence
  SiRNA target sequence
cataagccactgtattaaa

SEQ ID NO: 196408 - DNA, 19 bp, Artificial sequence
  SiRNA target sequence
ataagccactgtattaaaa

SEQ ID NO: 196409 - DNA, 19 bp, Artificial sequence
  SiRNA target sequence
taagccactgtattaaaat

SEQ ID NO: 196410 - DNA, 19 bp, Artificial sequence
  SiRNA target sequence
aagccactgtattaaaatt

SEQ ID NO: 196411 - DNA, 19 bp, Artificial sequence
  SiRNA target sequence
agccactgtattaaaatta

SEQ ID NO: 196412 - DNA, 19 bp, Artificial sequence
  SiRNA target sequence
gccactgtattaaaattac

SEQ ID NO: 196413 - DNA, 19 bp, Artificial sequence
  SiRNA target sequence
ccactgtattaaaattaca

SEQ ID NO: 196414 - DNA, 19 bp, Artificial sequence
  SiRNA target sequence
cactgtattaaaattacag

SEQ ID NO: 196415 - DNA, 19 bp, Artificial sequence
  SiRNA target sequence
actgtattaaaattacaga

SEQ ID NO: 196416 - DNA, 19 bp, Artificial sequence
  SiRNA target sequence
ctgtattaaaattacagat

SEQ ID NO: 196417 - DNA, 19 bp, Artificial sequence
  SiRNA target sequence
tgtattaaaattacagatg

SEQ ID NO: 196418 - DNA, 19 bp, Artificial sequence
  SiRNA target sequence
gtattaaaattacagatgc

SEQ ID NO: 196419 - DNA, 19 bp, Artificial sequence
  SiRNA target sequence
tattaaaattacagatgca

SEQ ID NO: 196420 - DNA, 19 bp, Artificial sequence
  SiRNA target sequence
attaaaattacagatgcaa

SEQ ID NO: 196421 - DNA, 19 bp, Artificial sequence
  SiRNA target sequence
ttaaaattacagatgcaaa

SEQ ID NO: 196422 - DNA, 19 bp, Artificial sequence
  SiRNA target sequence
taaaattacagatgcaaaa

SEQ ID NO: 196423 - DNA, 19 bp, Artificial sequence
  SiRNA target sequence
aaaattacagatgcaaaag

SEQ ID NO: 196424 - DNA, 19 bp, Artificial sequence
  SiRNA target sequence
aaattacagatgcaaaaga

SEQ ID NO: 196425 - DNA, 19 bp, Artificial sequence
  SiRNA target sequence
aattacagatgcaaaagat

SEQ ID NO: 196426 - DNA, 19 bp, Artificial sequence
  SiRNA target sequence
attacagatgcaaaagata

SEQ ID NO: 196427 - DNA, 19 bp, Artificial sequence
  SiRNA target sequence
ttacagatgcaaaagatat

SEQ ID NO: 196428 - DNA, 19 bp, Artificial sequence
  SiRNA target sequence
tacagatgcaaaagatata

SEQ ID NO: 196429 - DNA, 19 bp, Artificial sequence
  SiRNA target sequence
acagatgcaaaagatatag

SEQ ID NO: 196430 - DNA, 19 bp, Artificial sequence
  SiRNA target sequence
cagatgcaaaagatatagg

SEQ ID NO: 196431 - DNA, 19 bp, Artificial sequence
  SiRNA target sequence
agatgcaaaagatatagga

SEQ ID NO: 196432 - DNA, 19 bp, Artificial sequence
  SiRNA target sequence
gatgcaaaagatataggaa

SEQ ID NO: 196433 - DNA, 19 bp, Artificial sequence
  SiRNA target sequence
atgcaaaagatataggaag

SEQ ID NO: 196434 - DNA, 19 bp, Artificial sequence
  SiRNA target sequence
tgcaaaagatataggaaga

SEQ ID NO: 196435 - DNA, 19 bp, Artificial sequence
  SiRNA target sequence
gcaaaagatataggaagaa

SEQ ID NO: 196436 - DNA, 19 bp, Artificial sequence
  SiRNA target sequence
caaaagatataggaagaac

SEQ ID NO: 196437 - DNA, 19 bp, Artificial sequence
  SiRNA target sequence
aaaagatataggaagaaca

SEQ ID NO: 196438 - DNA, 19 bp, Artificial sequence
  SiRNA target sequence
aaagatataggaagaacat

SEQ ID NO: 196439 - DNA, 19 bp, Artificial sequence
  SiRNA target sequence
aagatataggaagaacata

SEQ ID NO: 196440 - DNA, 19 bp, Artificial sequence
  SiRNA target sequence
agatataggaagaacataa

SEQ ID NO: 196441 - DNA, 19 bp, Artificial sequence
  SiRNA target sequence
gatataggaagaacataaa

SEQ ID NO: 196442 - DNA, 19 bp, Artificial sequence
  SiRNA target sequence
atataggaagaacataaaa

SEQ ID NO: 196443 - DNA, 19 bp, Artificial sequence
  SiRNA target sequence
tataggaagaacataaaaa

SEQ ID NO: 196444 - DNA, 19 bp, Artificial sequence
  SiRNA target sequence
ataggaagaacataaaaaa

SEQ ID NO: 196445 - DNA, 19 bp, Artificial sequence
  SiRNA target sequence
taggaagaacataaaaaat

SEQ ID NO: 196446 - DNA, 19 bp, Artificial sequence
  SiRNA target sequence
aggaagaacataaaaaatt

SEQ ID NO: 196447 - DNA, 19 bp, Artificial sequence
  SiRNA target sequence
ggaagaacataaaaaattt

SEQ ID NO: 196448 - DNA, 19 bp, Artificial sequence
  SiRNA target sequence
gaagaacataaaaaatttt

SEQ ID NO: 196449 - DNA, 19 bp, Artificial sequence
  SiRNA target sequence
aagaacataaaaaattttc

SEQ ID NO: 196450 - DNA, 19 bp, Artificial sequence
  SiRNA target sequence
agaacataaaaaattttca

SEQ ID NO: 196451 - DNA, 19 bp, Artificial sequence
  SiRNA target sequence
gaacataaaaaattttcat

SEQ ID NO: 196452 - DNA, 19 bp, Artificial sequence
  SiRNA target sequence
aacataaaaaattttcata

SEQ ID NO: 196453 - DNA, 19 bp, Artificial sequence
  SiRNA target sequence
acataaaaaattttcataa

SEQ ID NO: 196454 - DNA, 19 bp, Artificial sequence
  SiRNA target sequence
cataaaaaattttcataaa

SEQ ID NO: 196455 - DNA, 19 bp, Artificial sequence
  SiRNA target sequence
ataaaaaattttcataaac

SEQ ID NO: 196456 - DNA, 19 bp, Artificial sequence
  SiRNA target sequence
taaaaaattttcataaaca

SEQ ID NO: 196457 - DNA, 19 bp, Artificial sequence
  SiRNA target sequence
aaaaaattttcataaacat

SEQ ID NO: 196458 - DNA, 19 bp, Artificial sequence
  SiRNA target sequence
aaaaattttcataaacata

SEQ ID NO: 196459 - DNA, 19 bp, Artificial sequence
  SiRNA target sequence
aaaattttcataaacataa

SEQ ID NO: 196460 - DNA, 19 bp, Artificial sequence
  SiRNA target sequence
aaattttcataaacataat

SEQ ID NO: 196461 - DNA, 19 bp, Artificial sequence
  SiRNA target sequence
aattttcataaacataatt

SEQ ID NO: 196462 - DNA, 19 bp, Artificial sequence
  SiRNA target sequence
attttcataaacataattg

SEQ ID NO: 196463 - DNA, 19 bp, Artificial sequence
  SiRNA target sequence
ttttcataaacataattga

SEQ ID NO: 196464 - DNA, 19 bp, Artificial sequence
  SiRNA target sequence
tttcataaacataattgaa

SEQ ID NO: 196465 - DNA, 19 bp, Artificial sequence
  SiRNA target sequence
ttcataaacataattgaat

SEQ ID NO: 196466 - DNA, 19 bp, Artificial sequence
  SiRNA target sequence
tcataaacataattgaatt

SEQ ID NO: 196467 - DNA, 19 bp, Artificial sequence
  SiRNA target sequence
cataaacataattgaattc

SEQ ID NO: 196468 - DNA, 19 bp, Artificial sequence
  SiRNA target sequence
ataaacataattgaattct

SEQ ID NO: 196469 - DNA, 19 bp, Artificial sequence
  SiRNA target sequence
taaacataattgaattctg

SEQ ID NO: 196470 - DNA, 19 bp, Artificial sequence
  SiRNA target sequence
aaacataattgaattctga

SEQ ID NO: 196471 - DNA, 19 bp, Artificial sequence
  SiRNA target sequence
aacataattgaattctgat

SEQ ID NO: 196472 - DNA, 19 bp, Artificial sequence
  SiRNA target sequence
acataattgaattctgatc

SEQ ID NO: 196473 - DNA, 19 bp, Artificial sequence
  SiRNA target sequence
cataattgaattctgatct

SEQ ID NO: 196474 - DNA, 19 bp, Artificial sequence
  SiRNA target sequence
ataattgaattctgatctt

SEQ ID NO: 196475 - DNA, 19 bp, Artificial sequence
  SiRNA target sequence
taattgaattctgatcttg

SEQ ID NO: 196476 - DNA, 19 bp, Artificial sequence
  SiRNA target sequence
aattgaattctgatcttgc

SEQ ID NO: 196477 - DNA, 19 bp, Artificial sequence
  SiRNA target sequence
attgaattctgatcttgcc

SEQ ID NO: 196478 - DNA, 19 bp, Artificial sequence
  SiRNA target sequence
ttgaattctgatcttgcct

SEQ ID NO: 196479 - DNA, 19 bp, Artificial sequence
  SiRNA target sequence
tgaattctgatcttgcctt

SEQ ID NO: 196480 - DNA, 19 bp, Artificial sequence
  SiRNA target sequence
gaattctgatcttgcctta

SEQ ID NO: 196481 - DNA, 19 bp, Artificial sequence
  SiRNA target sequence
aattctgatcttgccttac

SEQ ID NO: 196482 - DNA, 19 bp, Artificial sequence
  SiRNA target sequence
attctgatcttgccttacc

SEQ ID NO: 196483 - DNA, 19 bp, Artificial sequence
  SiRNA target sequence
ttctgatcttgccttacca

SEQ ID NO: 196484 - DNA, 19 bp, Artificial sequence
  SiRNA target sequence
tctgatcttgccttaccat

SEQ ID NO: 196485 - DNA, 19 bp, Artificial sequence
  SiRNA target sequence
ctgatcttgccttaccatc

SEQ ID NO: 196486 - DNA, 19 bp, Artificial sequence
  SiRNA target sequence
tgatcttgccttaccatca

SEQ ID NO: 196487 - DNA, 19 bp, Artificial sequence
  SiRNA target sequence
gatcttgccttaccatcac

SEQ ID NO: 196488 - DNA, 19 bp, Artificial sequence
  SiRNA target sequence
atcttgccttaccatcaca

SEQ ID NO: 196489 - DNA, 19 bp, Artificial sequence
  SiRNA target sequence
tcttgccttaccatcacaa

SEQ ID NO: 196490 - DNA, 19 bp, Artificial sequence
  SiRNA target sequence
cttgccttaccatcacaaa

SEQ ID NO: 196491 - DNA, 19 bp, Artificial sequence
  SiRNA target sequence
ttgccttaccatcacaaat

SEQ ID NO: 196492 - DNA, 19 bp, Artificial sequence
  SiRNA target sequence
tgccttaccatcacaaata

SEQ ID NO: 196493 - DNA, 19 bp, Artificial sequence
  SiRNA target sequence
gccttaccatcacaaataa

SEQ ID NO: 196494 - DNA, 19 bp, Artificial sequence
  SiRNA target sequence
ccttaccatcacaaataaa

SEQ ID NO: 196495 - DNA, 19 bp, Artificial sequence
  SiRNA target sequence
cttaccatcacaaataaat

SEQ ID NO: 196496 - DNA, 19 bp, Artificial sequence
  SiRNA target sequence
ttaccatcacaaataaatc

SEQ ID NO: 196497 - DNA, 19 bp, Artificial sequence
  SiRNA target sequence
taccatcacaaataaatct

SEQ ID NO: 196498 - DNA, 19 bp, Artificial sequence
  SiRNA target sequence
accatcacaaataaatctt

SEQ ID NO: 196499 - DNA, 19 bp, Artificial sequence
  SiRNA target sequence
ccatcacaaataaatcttt

SEQ ID NO: 196500 - DNA, 19 bp, Artificial sequence
  SiRNA target sequence
catcacaaataaatctttt

SEQ ID NO: 196501 - DNA, 19 bp, Artificial sequence
  SiRNA target sequence
atcacaaataaatctttta

SEQ ID NO: 196502 - DNA, 19 bp, Artificial sequence
  SiRNA target sequence
tcacaaataaatcttttaa

SEQ ID NO: 196503 - DNA, 19 bp, Artificial sequence
  SiRNA target sequence
cacaaataaatcttttaaa

SEQ ID NO: 196504 - DNA, 19 bp, Artificial sequence
  SiRNA target sequence
acaaataaatcttttaaaa

SEQ ID NO: 196505 - DNA, 19 bp, Artificial sequence
  SiRNA target sequence
caaataaatcttttaaaat

SEQ ID NO: 196506 - DNA, 19 bp, Artificial sequence
  SiRNA target sequence
aaataaatcttttaaaatt

SEQ ID NO: 196507 - DNA, 19 bp, Artificial sequence
  SiRNA target sequence
aataaatcttttaaaattc

SEQ ID NO: 196508 - DNA, 19 bp, Artificial sequence
  SiRNA target sequence
ataaatcttttaaaattct

SEQ ID NO: 196509 - DNA, 19 bp, Artificial sequence
  SiRNA target sequence
taaatcttttaaaattctt

SEQ ID NO: 196510 - DNA, 19 bp, Artificial sequence
  SiRNA target sequence
aaatcttttaaaattctta

SEQ ID NO: 196511 - DNA, 19 bp, Artificial sequence
  SiRNA target sequence
aatcttttaaaattcttaa

SEQ ID NO: 196512 - DNA, 19 bp, Artificial sequence
  SiRNA target sequence
atcttttaaaattcttaaa

SEQ ID NO: 196513 - DNA, 19 bp, Artificial sequence
  SiRNA target sequence
tcttttaaaattcttaaaa

SEQ ID NO: 196514 - DNA, 19 bp, Artificial sequence
  SiRNA target sequence
cttttaaaattcttaaaaa

SEQ ID NO: 196515 - DNA, 19 bp, Artificial sequence
  SiRNA target sequence
ttttaaaattcttaaaaat

SEQ ID NO: 196516 - DNA, 19 bp, Artificial sequence
  SiRNA target sequence
tttaaaattcttaaaaatg

SEQ ID NO: 196517 - DNA, 19 bp, Artificial sequence
  SiRNA target sequence
ttaaaattcttaaaaatga

SEQ ID NO: 196518 - DNA, 19 bp, Artificial sequence
  SiRNA target sequence
taaaattcttaaaaatgaa

SEQ ID NO: 196519 - DNA, 19 bp, Artificial sequence
  SiRNA target sequence
aaaattcttaaaaatgaat

SEQ ID NO: 196520 - DNA, 19 bp, Artificial sequence
  SiRNA target sequence
aaattcttaaaaatgaata

SEQ ID NO: 196521 - DNA, 19 bp, Artificial sequence
  SiRNA target sequence
aattcttaaaaatgaatac

SEQ ID NO: 196522 - DNA, 19 bp, Artificial sequence
  SiRNA target sequence
attcttaaaaatgaataca

SEQ ID NO: 196523 - DNA, 19 bp, Artificial sequence
  SiRNA target sequence
ttcttaaaaatgaatacac

SEQ ID NO: 196524 - DNA, 19 bp, Artificial sequence
  SiRNA target sequence
tcttaaaaatgaatacaca

SEQ ID NO: 196525 - DNA, 19 bp, Artificial sequence
  SiRNA target sequence
cttaaaaatgaatacacaa

SEQ ID NO: 196526 - DNA, 19 bp, Artificial sequence
  SiRNA target sequence
ttaaaaatgaatacacaaa

SEQ ID NO: 196527 - DNA, 19 bp, Artificial sequence
  SiRNA target sequence
taaaaatgaatacacaaag

SEQ ID NO: 196528 - DNA, 19 bp, Artificial sequence
  SiRNA target sequence
aaaaatgaatacacaaagt

SEQ ID NO: 196529 - DNA, 19 bp, Artificial sequence
  SiRNA target sequence
aaaatgaatacacaaagtt

SEQ ID NO: 196530 - DNA, 19 bp, Artificial sequence
  SiRNA target sequence
aaatgaatacacaaagtta

SEQ ID NO: 196531 - DNA, 19 bp, Artificial sequence
  SiRNA target sequence
aatgaatacacaaagttaa

SEQ ID NO: 196532 - DNA, 19 bp, Artificial sequence
  SiRNA target sequence
atgaatacacaaagttaat

SEQ ID NO: 196533 - DNA, 19 bp, Artificial sequence
  SiRNA target sequence
tgaatacacaaagttaatt

SEQ ID NO: 196534 - DNA, 19 bp, Artificial sequence
  SiRNA target sequence
gaatacacaaagttaatta

SEQ ID NO: 196535 - DNA, 19 bp, Artificial sequence
  SiRNA target sequence
aatacacaaagttaattaa

SEQ ID NO: 196536 - DNA, 19 bp, Artificial sequence
  SiRNA target sequence
atacacaaagttaattaat

SEQ ID NO: 196537 - DNA, 19 bp, Artificial sequence
  SiRNA target sequence
tacacaaagttaattaatc

SEQ ID NO: 196538 - DNA, 19 bp, Artificial sequence
  SiRNA target sequence
acacaaagttaattaatcc

SEQ ID NO: 196539 - DNA, 19 bp, Artificial sequence
  SiRNA target sequence
cacaaagttaattaatcca

SEQ ID NO: 196540 - DNA, 19 bp, Artificial sequence
  SiRNA target sequence
acaaagttaattaatccaa

SEQ ID NO: 196541 - DNA, 19 bp, Artificial sequence
  SiRNA target sequence
caaagttaattaatccaaa

SEQ ID NO: 196542 - DNA, 19 bp, Artificial sequence
  SiRNA target sequence
aaagttaattaatccaaac

SEQ ID NO: 196543 - DNA, 19 bp, Artificial sequence
  SiRNA target sequence
aagttaattaatccaaaca

SEQ ID NO: 196544 - DNA, 19 bp, Artificial sequence
  SiRNA target sequence
agttaattaatccaaacat

SEQ ID NO: 196545 - DNA, 19 bp, Artificial sequence
  SiRNA target sequence
gttaattaatccaaacata

SEQ ID NO: 196546 - DNA, 19 bp, Artificial sequence
  SiRNA target sequence
ttaattaatccaaacataa

SEQ ID NO: 196547 - DNA, 19 bp, Artificial sequence
  SiRNA target sequence
taattaatccaaacataat

SEQ ID NO: 196548 - DNA, 19 bp, Artificial sequence
  SiRNA target sequence
aattaatccaaacataata

SEQ ID NO: 196549 - DNA, 19 bp, Artificial sequence
  SiRNA target sequence
attaatccaaacataatac

SEQ ID NO: 196550 - DNA, 19 bp, Artificial sequence
  SiRNA target sequence
ttaatccaaacataatacc

SEQ ID NO: 196551 - DNA, 19 bp, Artificial sequence
  SiRNA target sequence
taatccaaacataatacca

SEQ ID NO: 196552 - DNA, 19 bp, Artificial sequence
  SiRNA target sequence
aatccaaacataataccaa

SEQ ID NO: 196553 - DNA, 19 bp, Artificial sequence
  SiRNA target sequence
atccaaacataataccaag

SEQ ID NO: 196554 - DNA, 19 bp, Artificial sequence
  SiRNA target sequence
tccaaacataataccaagt

SEQ ID NO: 196555 - DNA, 19 bp, Artificial sequence
  SiRNA target sequence
ccaaacataataccaagta

SEQ ID NO: 196556 - DNA, 19 bp, Artificial sequence
  SiRNA target sequence
caaacataataccaagtat

SEQ ID NO: 196557 - DNA, 19 bp, Artificial sequence
  SiRNA target sequence
aaacataataccaagtata

SEQ ID NO: 196558 - DNA, 19 bp, Artificial sequence
  SiRNA target sequence
aacataataccaagtataa

SEQ ID NO: 196559 - DNA, 19 bp, Artificial sequence
  SiRNA target sequence
acataataccaagtataaa

SEQ ID NO: 196560 - DNA, 19 bp, Artificial sequence
  SiRNA target sequence
cataataccaagtataaaa

SEQ ID NO: 196561 - DNA, 19 bp, Artificial sequence
  SiRNA target sequence
ataataccaagtataaaaa

SEQ ID NO: 196562 - DNA, 19 bp, Artificial sequence
  SiRNA target sequence
taataccaagtataaaaaa

SEQ ID NO: 196563 - DNA, 19 bp, Artificial sequence
  SiRNA target sequence
aataccaagtataaaaaat

SEQ ID NO: 196564 - DNA, 19 bp, Artificial sequence
  SiRNA target sequence
ataccaagtataaaaaatt

SEQ ID NO: 196565 - DNA, 19 bp, Artificial sequence
  SiRNA target sequence
taccaagtataaaaaattt

SEQ ID NO: 196566 - DNA, 19 bp, Artificial sequence
  SiRNA target sequence
accaagtataaaaaattta

SEQ ID NO: 196567 - DNA, 19 bp, Artificial sequence
  SiRNA target sequence
ccaagtataaaaaatttag

SEQ ID NO: 196568 - DNA, 19 bp, Artificial sequence
  SiRNA target sequence
caagtataaaaaatttagg

SEQ ID NO: 196569 - DNA, 19 bp, Artificial sequence
  SiRNA target sequence
aagtataaaaaatttaggc

SEQ ID NO: 196570 - DNA, 19 bp, Artificial sequence
  SiRNA target sequence
agtataaaaaatttaggca

SEQ ID NO: 196571 - DNA, 19 bp, Artificial sequence
  SiRNA target sequence
gtataaaaaatttaggcat

SEQ ID NO: 196572 - DNA, 19 bp, Artificial sequence
  SiRNA target sequence
tataaaaaatttaggcatt

SEQ ID NO: 196573 - DNA, 19 bp, Artificial sequence
  SiRNA target sequence
ataaaaaatttaggcattt

SEQ ID NO: 196574 - DNA, 19 bp, Artificial sequence
  SiRNA target sequence
taaaaaatttaggcatttc

SEQ ID NO: 196575 - DNA, 19 bp, Artificial sequence
  SiRNA target sequence
aaaaaatttaggcatttca

SEQ ID NO: 196576 - DNA, 19 bp, Artificial sequence
  SiRNA target sequence
aaaaatttaggcatttcaa

SEQ ID NO: 196577 - DNA, 19 bp, Artificial sequence
  SiRNA target sequence
aaaatttaggcatttcaac

SEQ ID NO: 196578 - DNA, 19 bp, Artificial sequence
  SiRNA target sequence
aaatttaggcatttcaacc

SEQ ID NO: 196579 - DNA, 19 bp, Artificial sequence
  SiRNA target sequence
aatttaggcatttcaacct

SEQ ID NO: 196580 - DNA, 19 bp, Artificial sequence
  SiRNA target sequence
atttaggcatttcaacctt

SEQ ID NO: 196581 - DNA, 19 bp, Artificial sequence
  SiRNA target sequence
tttaggcatttcaacctta

SEQ ID NO: 196582 - DNA, 19 bp, Artificial sequence
  SiRNA target sequence
ttaggcatttcaaccttag

SEQ ID NO: 196583 - DNA, 19 bp, Artificial sequence
  SiRNA target sequence
taggcatttcaaccttagc

SEQ ID NO: 196584 - DNA, 19 bp, Artificial sequence
  SiRNA target sequence
aggcatttcaaccttagca

SEQ ID NO: 196585 - DNA, 19 bp, Artificial sequence
  SiRNA target sequence
ggcatttcaaccttagcaa

SEQ ID NO: 196586 - DNA, 19 bp, Artificial sequence
  SiRNA target sequence
gcatttcaaccttagcaac

SEQ ID NO: 196587 - DNA, 19 bp, Artificial sequence
  SiRNA target sequence
catttcaaccttagcaact

SEQ ID NO: 196588 - DNA, 19 bp, Artificial sequence
  SiRNA target sequence
atttcaaccttagcaactt

SEQ ID NO: 196589 - DNA, 19 bp, Artificial sequence
  SiRNA target sequence
tttcaaccttagcaacttt

SEQ ID NO: 196590 - DNA, 19 bp, Artificial sequence
  SiRNA target sequence
ttcaaccttagcaacttta

SEQ ID NO: 196591 - DNA, 19 bp, Artificial sequence
  SiRNA target sequence
tcaaccttagcaactttaa

SEQ ID NO: 196592 - DNA, 19 bp, Artificial sequence
  SiRNA target sequence
caaccttagcaactttaaa

SEQ ID NO: 196593 - DNA, 19 bp, Artificial sequence
  SiRNA target sequence
aaccttagcaactttaaaa

SEQ ID NO: 196594 - DNA, 19 bp, Artificial sequence
  SiRNA target sequence
accttagcaactttaaaat

SEQ ID NO: 196595 - DNA, 19 bp, Artificial sequence
  SiRNA target sequence
ccttagcaactttaaaata

SEQ ID NO: 196596 - DNA, 19 bp, Artificial sequence
  SiRNA target sequence
cttagcaactttaaaataa

SEQ ID NO: 196597 - DNA, 19 bp, Artificial sequence
  SiRNA target sequence
ttagcaactttaaaataac

SEQ ID NO: 196598 - DNA, 19 bp, Artificial sequence
  SiRNA target sequence
tagcaactttaaaataact

SEQ ID NO: 196599 - DNA, 19 bp, Artificial sequence
  SiRNA target sequence
agcaactttaaaataactc

SEQ ID NO: 196600 - DNA, 19 bp, Artificial sequence
  SiRNA target sequence
gcaactttaaaataactca

SEQ ID NO: 196601 - DNA, 19 bp, Artificial sequence
  SiRNA target sequence
caactttaaaataactcag

SEQ ID NO: 196602 - DNA, 19 bp, Artificial sequence
  SiRNA target sequence
aactttaaaataactcagt

SEQ ID NO: 196603 - DNA, 19 bp, Artificial sequence
  SiRNA target sequence
actttaaaataactcagta

SEQ ID NO: 196604 - DNA, 19 bp, Artificial sequence
  SiRNA target sequence
ctttaaaataactcagtaa

SEQ ID NO: 196605 - DNA, 19 bp, Artificial sequence
  SiRNA target sequence
tttaaaataactcagtaat

SEQ ID NO: 196606 - DNA, 19 bp, Artificial sequence
  SiRNA target sequence
ttaaaataactcagtaatc

SEQ ID NO: 196607 - DNA, 19 bp, Artificial sequence
  SiRNA target sequence
taaaataactcagtaatcc

SEQ ID NO: 196608 - DNA, 19 bp, Artificial sequence
  SiRNA target sequence
aaaataactcagtaatcct

SEQ ID NO: 196609 - DNA, 19 bp, Artificial sequence
  SiRNA target sequence
aaataactcagtaatcctg

SEQ ID NO: 196610 - DNA, 19 bp, Artificial sequence
  SiRNA target sequence
aataactcagtaatcctgt

SEQ ID NO: 196611 - DNA, 19 bp, Artificial sequence
  SiRNA target sequence
ataactcagtaatcctgtt

SEQ ID NO: 196612 - DNA, 19 bp, Artificial sequence
  SiRNA target sequence
taactcagtaatcctgttc

SEQ ID NO: 196613 - DNA, 19 bp, Artificial sequence
  SiRNA target sequence
aactcagtaatcctgttct

SEQ ID NO: 196614 - DNA, 19 bp, Artificial sequence
  SiRNA target sequence
actcagtaatcctgttctt

SEQ ID NO: 196615 - DNA, 19 bp, Artificial sequence
  SiRNA target sequence
ctcagtaatcctgttcttg

SEQ ID NO: 196616 - DNA, 19 bp, Artificial sequence
  SiRNA target sequence
tcagtaatcctgttcttga

SEQ ID NO: 196617 - DNA, 19 bp, Artificial sequence
  SiRNA target sequence
cagtaatcctgttcttgaa

SEQ ID NO: 196618 - DNA, 19 bp, Artificial sequence
  SiRNA target sequence
agtaatcctgttcttgaat

SEQ ID NO: 196619 - DNA, 19 bp, Artificial sequence
  SiRNA target sequence
gtaatcctgttcttgaatt

SEQ ID NO: 196620 - DNA, 19 bp, Artificial sequence
  SiRNA target sequence
taatcctgttcttgaattt

SEQ ID NO: 196621 - DNA, 19 bp, Artificial sequence
  SiRNA target sequence
aatcctgttcttgaatttg

SEQ ID NO: 196622 - DNA, 19 bp, Artificial sequence
  SiRNA target sequence
atcctgttcttgaatttgc

SEQ ID NO: 196623 - DNA, 19 bp, Artificial sequence
  SiRNA target sequence
tcctgttcttgaatttgct

SEQ ID NO: 196624 - DNA, 19 bp, Artificial sequence
  SiRNA target sequence
cctgttcttgaatttgcta

SEQ ID NO: 196625 - DNA, 19 bp, Artificial sequence
  SiRNA target sequence
ctgttcttgaatttgctaa

SEQ ID NO: 196626 - DNA, 19 bp, Artificial sequence
  SiRNA target sequence
tgttcttgaatttgctaat

SEQ ID NO: 196627 - DNA, 19 bp, Artificial sequence
  SiRNA target sequence
gttcttgaatttgctaatt

SEQ ID NO: 196628 - DNA, 19 bp, Artificial sequence
  SiRNA target sequence
ttcttgaatttgctaattg

SEQ ID NO: 196629 - DNA, 19 bp, Artificial sequence
  SiRNA target sequence
tcttgaatttgctaattga

SEQ ID NO: 196630 - DNA, 19 bp, Artificial sequence
  SiRNA target sequence
cttgaatttgctaattgat

SEQ ID NO: 196631 - DNA, 19 bp, Artificial sequence
  SiRNA target sequence
ttgaatttgctaattgatc

SEQ ID NO: 196632 - DNA, 19 bp, Artificial sequence
  SiRNA target sequence
tgaatttgctaattgatca

SEQ ID NO: 196633 - DNA, 19 bp, Artificial sequence
  SiRNA target sequence
gaatttgctaattgatcaa

SEQ ID NO: 196634 - DNA, 19 bp, Artificial sequence
  SiRNA target sequence
aatttgctaattgatcaat

SEQ ID NO: 196635 - DNA, 19 bp, Artificial sequence
  SiRNA target sequence
atttgctaattgatcaatc

SEQ ID NO: 196636 - DNA, 19 bp, Artificial sequence
  SiRNA target sequence
tttgctaattgatcaatct

SEQ ID NO: 196637 - DNA, 19 bp, Artificial sequence
  SiRNA target sequence
ttgctaattgatcaatctc

SEQ ID NO: 196638 - DNA, 19 bp, Artificial sequence
  SiRNA target sequence
tgctaattgatcaatctca

SEQ ID NO: 196639 - DNA, 19 bp, Artificial sequence
  SiRNA target sequence
gctaattgatcaatctcat

SEQ ID NO: 196640 - DNA, 19 bp, Artificial sequence
  SiRNA target sequence
ctaattgatcaatctcatc

SEQ ID NO: 196641 - DNA, 19 bp, Artificial sequence
  SiRNA target sequence
taattgatcaatctcatct

SEQ ID NO: 196642 - DNA, 19 bp, Artificial sequence
  SiRNA target sequence
aattgatcaatctcatctt

SEQ ID NO: 196643 - DNA, 19 bp, Artificial sequence
  SiRNA target sequence
attgatcaatctcatcttc

SEQ ID NO: 196644 - DNA, 19 bp, Artificial sequence
  SiRNA target sequence
ttgatcaatctcatcttcc

SEQ ID NO: 196645 - DNA, 19 bp, Artificial sequence
  SiRNA target sequence
tgatcaatctcatcttccg

SEQ ID NO: 196646 - DNA, 19 bp, Artificial sequence
  SiRNA target sequence
gatcaatctcatcttccgt

SEQ ID NO: 196647 - DNA, 19 bp, Artificial sequence
  SiRNA target sequence
atcaatctcatcttccgta

SEQ ID NO: 196648 - DNA, 19 bp, Artificial sequence
  SiRNA target sequence
tcaatctcatcttccgtag

SEQ ID NO: 196649 - DNA, 19 bp, Artificial sequence
  SiRNA target sequence
caatctcatcttccgtagg

SEQ ID NO: 196650 - DNA, 19 bp, Artificial sequence
  SiRNA target sequence
aatctcatcttccgtaggt

SEQ ID NO: 196651 - DNA, 19 bp, Artificial sequence
  SiRNA target sequence
atctcatcttccgtaggta

SEQ ID NO: 196652 - DNA, 19 bp, Artificial sequence
  SiRNA target sequence
tctcatcttccgtaggtaa

SEQ ID NO: 196653 - DNA, 19 bp, Artificial sequence
  SiRNA target sequence
ctcatcttccgtaggtaag

SEQ ID NO: 196654 - DNA, 19 bp, Artificial sequence
  SiRNA target sequence
tcatcttccgtaggtaagt

SEQ ID NO: 196655 - DNA, 19 bp, Artificial sequence
  SiRNA target sequence
catcttccgtaggtaagtt

SEQ ID NO: 196656 - DNA, 19 bp, Artificial sequence
  SiRNA target sequence
atcttccgtaggtaagttg

SEQ ID NO: 196657 - DNA, 19 bp, Artificial sequence
  SiRNA target sequence
tcttccgtaggtaagttgt

SEQ ID NO: 196658 - DNA, 19 bp, Artificial sequence
  SiRNA target sequence
cttccgtaggtaagttgtt

SEQ ID NO: 196659 - DNA, 19 bp, Artificial sequence
  SiRNA target sequence
ttccgtaggtaagttgttt

SEQ ID NO: 196660 - DNA, 19 bp, Artificial sequence
  SiRNA target sequence
tccgtaggtaagttgtttt

SEQ ID NO: 196661 - DNA, 19 bp, Artificial sequence
  SiRNA target sequence
ccgtaggtaagttgttttc

SEQ ID NO: 196662 - DNA, 19 bp, Artificial sequence
  SiRNA target sequence
cgtaggtaagttgttttca

SEQ ID NO: 196663 - DNA, 19 bp, Artificial sequence
  SiRNA target sequence
gtaggtaagttgttttcag

SEQ ID NO: 196664 - DNA, 19 bp, Artificial sequence
  SiRNA target sequence
taggtaagttgttttcagg

SEQ ID NO: 196665 - DNA, 19 bp, Artificial sequence
  SiRNA target sequence
aggtaagttgttttcaggt

SEQ ID NO: 196666 - DNA, 19 bp, Artificial sequence
  SiRNA target sequence
ggtaagttgttttcaggtg

SEQ ID NO: 196667 - DNA, 19 bp, Artificial sequence
  SiRNA target sequence
gtaagttgttttcaggtgt

SEQ ID NO: 196668 - DNA, 19 bp, Artificial sequence
  SiRNA target sequence
taagttgttttcaggtgtt

SEQ ID NO: 196669 - DNA, 19 bp, Artificial sequence
  SiRNA target sequence
aagttgttttcaggtgttt

SEQ ID NO: 196670 - DNA, 19 bp, Artificial sequence
  SiRNA target sequence
agttgttttcaggtgtttc

SEQ ID NO: 196671 - DNA, 19 bp, Artificial sequence
  SiRNA target sequence
gttgttttcaggtgtttca

SEQ ID NO: 196672 - DNA, 19 bp, Artificial sequence
  SiRNA target sequence
ttgttttcaggtgtttcat

SEQ ID NO: 196673 - DNA, 19 bp, Artificial sequence
  SiRNA target sequence
tgttttcaggtgtttcatt

SEQ ID NO: 196674 - DNA, 19 bp, Artificial sequence
  SiRNA target sequence
gttttcaggtgtttcattt

SEQ ID NO: 196675 - DNA, 19 bp, Artificial sequence
  SiRNA target sequence
ttttcaggtgtttcattta

SEQ ID NO: 196676 - DNA, 19 bp, Artificial sequence
  SiRNA target sequence
tttcaggtgtttcatttat

SEQ ID NO: 196677 - DNA, 19 bp, Artificial sequence
  SiRNA target sequence
ttcaggtgtttcatttatt

SEQ ID NO: 196678 - DNA, 19 bp, Artificial sequence
  SiRNA target sequence
tcaggtgtttcatttatta

SEQ ID NO: 196679 - DNA, 19 bp, Artificial sequence
  SiRNA target sequence
caggtgtttcatttattac

SEQ ID NO: 196680 - DNA, 19 bp, Artificial sequence
  SiRNA target sequence
aggtgtttcatttattaca

SEQ ID NO: 196681 - DNA, 19 bp, Artificial sequence
  SiRNA target sequence
ggtgtttcatttattacac

SEQ ID NO: 196682 - DNA, 19 bp, Artificial sequence
  SiRNA target sequence
gtgtttcatttattacact

SEQ ID NO: 196683 - DNA, 19 bp, Artificial sequence
  SiRNA target sequence
tgtttcatttattacactc

SEQ ID NO: 196684 - DNA, 19 bp, Artificial sequence
  SiRNA target sequence
gtttcatttattacactca

SEQ ID NO: 196685 - DNA, 19 bp, Artificial sequence
  SiRNA target sequence
tttcatttattacactcat

SEQ ID NO: 196686 - DNA, 20 bp, Artificial sequence
  SiRNA target sequence
ttattctgcgttttcttttt

SEQ ID NO: 196687 - DNA, 20 bp, Artificial sequence
  SiRNA target sequence
tattctgcgttttctttttt

SEQ ID NO: 196688 - DNA, 20 bp, Artificial sequence
  SiRNA target sequence
attctgcgttttcttttttg

SEQ ID NO: 196689 - DNA, 20 bp, Artificial sequence
  SiRNA target sequence
ttctgcgttttcttttttgt

SEQ ID NO: 196690 - DNA, 20 bp, Artificial sequence
  SiRNA target sequence
tctgcgttttcttttttgtc

SEQ ID NO: 196691 - DNA, 20 bp, Artificial sequence
  SiRNA target sequence
ctgcgttttcttttttgtcg

SEQ ID NO: 196692 - DNA, 20 bp, Artificial sequence
  SiRNA target sequence
tgcgttttcttttttgtcgt

SEQ ID NO: 196693 - DNA, 20 bp, Artificial sequence
  SiRNA target sequence
gcgttttcttttttgtcgtc

SEQ ID NO: 196694 - DNA, 20 bp, Artificial sequence
  SiRNA target sequence
cgttttcttttttgtcgtct

SEQ ID NO: 196695 - DNA, 20 bp, Artificial sequence
  SiRNA target sequence
gttttcttttttgtcgtctt

SEQ ID NO: 196696 - DNA, 20 bp, Artificial sequence
  SiRNA target sequence
ttttcttttttgtcgtcttt

SEQ ID NO: 196697 - DNA, 20 bp, Artificial sequence
  SiRNA target sequence
tttcttttttgtcgtctttt

SEQ ID NO: 196698 - DNA, 20 bp, Artificial sequence
  SiRNA target sequence
ttcttttttgtcgtctttta

SEQ ID NO: 196699 - DNA, 20 bp, Artificial sequence
  SiRNA target sequence
tcttttttgtcgtcttttat

SEQ ID NO: 196700 - DNA, 20 bp, Artificial sequence
  SiRNA target sequence
cttttttgtcgtcttttatt

SEQ ID NO: 196701 - DNA, 20 bp, Artificial sequence
  SiRNA target sequence
ttttttgtcgtcttttatta

SEQ ID NO: 196702 - DNA, 20 bp, Artificial sequence
  SiRNA target sequence
tttttgtcgtcttttattaa

SEQ ID NO: 196703 - DNA, 20 bp, Artificial sequence
  SiRNA target sequence
ttttgtcgtcttttattaaa

SEQ ID NO: 196704 - DNA, 20 bp, Artificial sequence
  SiRNA target sequence
tttgtcgtcttttattaaat

SEQ ID NO: 196705 - DNA, 20 bp, Artificial sequence
  SiRNA target sequence
ttgtcgtcttttattaaatc

SEQ ID NO: 196706 - DNA, 20 bp, Artificial sequence
  SiRNA target sequence
tgtcgtcttttattaaatct

SEQ ID NO: 196707 - DNA, 20 bp, Artificial sequence
  SiRNA target sequence
gtcgtcttttattaaatcta

SEQ ID NO: 196708 - DNA, 20 bp, Artificial sequence
  SiRNA target sequence
tcgtcttttattaaatctat

SEQ ID NO: 196709 - DNA, 20 bp, Artificial sequence
  SiRNA target sequence
cgtcttttattaaatctatg

SEQ ID NO: 196710 - DNA, 20 bp, Artificial sequence
  SiRNA target sequence
gtcttttattaaatctatgt

SEQ ID NO: 196711 - DNA, 20 bp, Artificial sequence
  SiRNA target sequence
tcttttattaaatctatgtc

SEQ ID NO: 196712 - DNA, 20 bp, Artificial sequence
  SiRNA target sequence
cttttattaaatctatgtct

SEQ ID NO: 196713 - DNA, 20 bp, Artificial sequence
  SiRNA target sequence
ttttattaaatctatgtcta

SEQ ID NO: 196714 - DNA, 20 bp, Artificial sequence
  SiRNA target sequence
tttattaaatctatgtctac

SEQ ID NO: 196715 - DNA, 20 bp, Artificial sequence
  SiRNA target sequence
ttattaaatctatgtctaca

SEQ ID NO: 196716 - DNA, 20 bp, Artificial sequence
  SiRNA target sequence
tattaaatctatgtctacac

SEQ ID NO: 196717 - DNA, 20 bp, Artificial sequence
  SiRNA target sequence
attaaatctatgtctacact

SEQ ID NO: 196718 - DNA, 20 bp, Artificial sequence
  SiRNA target sequence
ttaaatctatgtctacactt

SEQ ID NO: 196719 - DNA, 20 bp, Artificial sequence
  SiRNA target sequence
taaatctatgtctacacttg

SEQ ID NO: 196720 - DNA, 20 bp, Artificial sequence
  SiRNA target sequence
aaatctatgtctacacttgt

SEQ ID NO: 196721 - DNA, 20 bp, Artificial sequence
  SiRNA target sequence
aatctatgtctacacttgta

SEQ ID NO: 196722 - DNA, 20 bp, Artificial sequence
  SiRNA target sequence
atctatgtctacacttgtat

SEQ ID NO: 196723 - DNA, 20 bp, Artificial sequence
  SiRNA target sequence
tctatgtctacacttgtatt

SEQ ID NO: 196724 - DNA, 20 bp, Artificial sequence
  SiRNA target sequence
ctatgtctacacttgtatta

SEQ ID NO: 196725 - DNA, 20 bp, Artificial sequence
  SiRNA target sequence
tatgtctacacttgtattat

SEQ ID NO: 196726 - DNA, 20 bp, Artificial sequence
  SiRNA target sequence
atgtctacacttgtattatt

SEQ ID NO: 196727 - DNA, 20 bp, Artificial sequence
  SiRNA target sequence
tgtctacacttgtattattt

SEQ ID NO: 196728 - DNA, 20 bp, Artificial sequence
  SiRNA target sequence
gtctacacttgtattatttt

SEQ ID NO: 196729 - DNA, 20 bp, Artificial sequence
  SiRNA target sequence
tctacacttgtattattttt

SEQ ID NO: 196730 - DNA, 20 bp, Artificial sequence
  SiRNA target sequence
ctacacttgtattattttta

SEQ ID NO: 196731 - DNA, 20 bp, Artificial sequence
  SiRNA target sequence
tacacttgtattatttttaa

SEQ ID NO: 196732 - DNA, 20 bp, Artificial sequence
  SiRNA target sequence
acacttgtattatttttaat

SEQ ID NO: 196733 - DNA, 20 bp, Artificial sequence
  SiRNA target sequence
cacttgtattatttttaatt

SEQ ID NO: 196734 - DNA, 20 bp, Artificial sequence
  SiRNA target sequence
acttgtattatttttaattg

SEQ ID NO: 196735 - DNA, 20 bp, Artificial sequence
  SiRNA target sequence
cttgtattatttttaattga

SEQ ID NO: 196736 - DNA, 20 bp, Artificial sequence
  SiRNA target sequence
ttgtattatttttaattgaa

SEQ ID NO: 196737 - DNA, 20 bp, Artificial sequence
  SiRNA target sequence
tgtattatttttaattgaaa

SEQ ID NO: 196738 - DNA, 20 bp, Artificial sequence
  SiRNA target sequence
gtattatttttaattgaaac

SEQ ID NO: 196739 - DNA, 20 bp, Artificial sequence
  SiRNA target sequence
tattatttttaattgaaacg

SEQ ID NO: 196740 - DNA, 20 bp, Artificial sequence
  SiRNA target sequence
attatttttaattgaaacgt

SEQ ID NO: 196741 - DNA, 20 bp, Artificial sequence
  SiRNA target sequence
ttatttttaattgaaacgtt

SEQ ID NO: 196742 - DNA, 20 bp, Artificial sequence
  SiRNA target sequence
tatttttaattgaaacgtta

SEQ ID NO: 196743 - DNA, 20 bp, Artificial sequence
  SiRNA target sequence
atttttaattgaaacgttat

SEQ ID NO: 196744 - DNA, 20 bp, Artificial sequence
  SiRNA target sequence
tttttaattgaaacgttata

SEQ ID NO: 196745 - DNA, 20 bp, Artificial sequence
  SiRNA target sequence
ttttaattgaaacgttatat

SEQ ID NO: 196746 - DNA, 20 bp, Artificial sequence
  SiRNA target sequence
tttaattgaaacgttatatg

SEQ ID NO: 196747 - DNA, 20 bp, Artificial sequence
  SiRNA target sequence
ttaattgaaacgttatatgc

SEQ ID NO: 196748 - DNA, 20 bp, Artificial sequence
  SiRNA target sequence
taattgaaacgttatatgca

SEQ ID NO: 196749 - DNA, 20 bp, Artificial sequence
  SiRNA target sequence
aattgaaacgttatatgcac

SEQ ID NO: 196750 - DNA, 20 bp, Artificial sequence
  SiRNA target sequence
attgaaacgttatatgcacc

SEQ ID NO: 196751 - DNA, 20 bp, Artificial sequence
  SiRNA target sequence
ttgaaacgttatatgcaccc

SEQ ID NO: 196752 - DNA, 20 bp, Artificial sequence
  SiRNA target sequence
tgaaacgttatatgcacccg

SEQ ID NO: 196753 - DNA, 20 bp, Artificial sequence
  SiRNA target sequence
gaaacgttatatgcacccgc

SEQ ID NO: 196754 - DNA, 20 bp, Artificial sequence
  SiRNA target sequence
aaacgttatatgcacccgct

SEQ ID NO: 196755 - DNA, 20 bp, Artificial sequence
  SiRNA target sequence
aacgttatatgcacccgcta

SEQ ID NO: 196756 - DNA, 20 bp, Artificial sequence
  SiRNA target sequence
acgttatatgcacccgctaa

SEQ ID NO: 196757 - DNA, 20 bp, Artificial sequence
  SiRNA target sequence
cgttatatgcacccgctaaa

SEQ ID NO: 196758 - DNA, 20 bp, Artificial sequence
  SiRNA target sequence
gttatatgcacccgctaaat

SEQ ID NO: 196759 - DNA, 20 bp, Artificial sequence
  SiRNA target sequence
ttatatgcacccgctaaata

SEQ ID NO: 196760 - DNA, 20 bp, Artificial sequence
  SiRNA target sequence
tatatgcacccgctaaatag

SEQ ID NO: 196761 - DNA, 20 bp, Artificial sequence
  SiRNA target sequence
atatgcacccgctaaataga

SEQ ID NO: 196762 - DNA, 20 bp, Artificial sequence
  SiRNA target sequence
tatgcacccgctaaatagat

SEQ ID NO: 196763 - DNA, 20 bp, Artificial sequence
  SiRNA target sequence
atgcacccgctaaatagatt

SEQ ID NO: 196764 - DNA, 20 bp, Artificial sequence
  SiRNA target sequence
tgcacccgctaaatagatta

SEQ ID NO: 196765 - DNA, 20 bp, Artificial sequence
  SiRNA target sequence
gcacccgctaaatagattat

SEQ ID NO: 196766 - DNA, 20 bp, Artificial sequence
  SiRNA target sequence
cacccgctaaatagattata

SEQ ID NO: 196767 - DNA, 20 bp, Artificial sequence
  SiRNA target sequence
acccgctaaatagattatag

SEQ ID NO: 196768 - DNA, 20 bp, Artificial sequence
  SiRNA target sequence
cccgctaaatagattatagc

SEQ ID NO: 196769 - DNA, 20 bp, Artificial sequence
  SiRNA target sequence
ccgctaaatagattatagct

SEQ ID NO: 196770 - DNA, 20 bp, Artificial sequence
  SiRNA target sequence
cgctaaatagattatagctc

SEQ ID NO: 196771 - DNA, 20 bp, Artificial sequence
  SiRNA target sequence
gctaaatagattatagctct

SEQ ID NO: 196772 - DNA, 20 bp, Artificial sequence
  SiRNA target sequence
ctaaatagattatagctcta

SEQ ID NO: 196773 - DNA, 20 bp, Artificial sequence
  SiRNA target sequence
taaatagattatagctctaa

SEQ ID NO: 196774 - DNA, 20 bp, Artificial sequence
  SiRNA target sequence
aaatagattatagctctaat

SEQ ID NO: 196775 - DNA, 20 bp, Artificial sequence
  SiRNA target sequence
aatagattatagctctaatc

SEQ ID NO: 196776 - DNA, 20 bp, Artificial sequence
  SiRNA target sequence
atagattatagctctaatcc

SEQ ID NO: 196777 - DNA, 20 bp, Artificial sequence
  SiRNA target sequence
tagattatagctctaatcca

SEQ ID NO: 196778 - DNA, 20 bp, Artificial sequence
  SiRNA target sequence
agattatagctctaatccaa

SEQ ID NO: 196779 - DNA, 20 bp, Artificial sequence
  SiRNA target sequence
gattatagctctaatccaaa

SEQ ID NO: 196780 - DNA, 20 bp, Artificial sequence
  SiRNA target sequence
attatagctctaatccaaat

SEQ ID NO: 196781 - DNA, 20 bp, Artificial sequence
  SiRNA target sequence
ttatagctctaatccaaata

SEQ ID NO: 196782 - DNA, 20 bp, Artificial sequence
  SiRNA target sequence
tatagctctaatccaaatat

SEQ ID NO: 196783 - DNA, 20 bp, Artificial sequence
  SiRNA target sequence
atagctctaatccaaatata

SEQ ID NO: 196784 - DNA, 20 bp, Artificial sequence
  SiRNA target sequence
tagctctaatccaaatataa

SEQ ID NO: 196785 - DNA, 20 bp, Artificial sequence
  SiRNA target sequence
agctctaatccaaatataaa

SEQ ID NO: 196786 - DNA, 20 bp, Artificial sequence
  SiRNA target sequence
gctctaatccaaatataaat

SEQ ID NO: 196787 - DNA, 20 bp, Artificial sequence
  SiRNA target sequence
ctctaatccaaatataaatc

SEQ ID NO: 196788 - DNA, 20 bp, Artificial sequence
  SiRNA target sequence
tctaatccaaatataaatca

SEQ ID NO: 196789 - DNA, 20 bp, Artificial sequence
  SiRNA target sequence
ctaatccaaatataaatcaa

SEQ ID NO: 196790 - DNA, 20 bp, Artificial sequence
  SiRNA target sequence
taatccaaatataaatcaat

SEQ ID NO: 196791 - DNA, 20 bp, Artificial sequence
  SiRNA target sequence
aatccaaatataaatcaata

SEQ ID NO: 196792 - DNA, 20 bp, Artificial sequence
  SiRNA target sequence
atccaaatataaatcaatat

SEQ ID NO: 196793 - DNA, 20 bp, Artificial sequence
  SiRNA target sequence
tccaaatataaatcaatatt

SEQ ID NO: 196794 - DNA, 20 bp, Artificial sequence
  SiRNA target sequence
ccaaatataaatcaatatta

SEQ ID NO: 196795 - DNA, 20 bp, Artificial sequence
  SiRNA target sequence
caaatataaatcaatattat

SEQ ID NO: 196796 - DNA, 20 bp, Artificial sequence
  SiRNA target sequence
aaatataaatcaatattatt

SEQ ID NO: 196797 - DNA, 20 bp, Artificial sequence
  SiRNA target sequence
aatataaatcaatattattg

SEQ ID NO: 196798 - DNA, 20 bp, Artificial sequence
  SiRNA target sequence
atataaatcaatattattgc

SEQ ID NO: 196799 - DNA, 20 bp, Artificial sequence
  SiRNA target sequence
tataaatcaatattattgca

SEQ ID NO: 196800 - DNA, 20 bp, Artificial sequence
  SiRNA target sequence
ataaatcaatattattgcaa

SEQ ID NO: 196801 - DNA, 20 bp, Artificial sequence
  SiRNA target sequence
taaatcaatattattgcaat

SEQ ID NO: 196802 - DNA, 20 bp, Artificial sequence
  SiRNA target sequence
aaatcaatattattgcaatc

SEQ ID NO: 196803 - DNA, 20 bp, Artificial sequence
  SiRNA target sequence
aatcaatattattgcaatcg

SEQ ID NO: 196804 - DNA, 20 bp, Artificial sequence
  SiRNA target sequence
atcaatattattgcaatcgt

SEQ ID NO: 196805 - DNA, 20 bp, Artificial sequence
  SiRNA target sequence
tcaatattattgcaatcgtt

SEQ ID NO: 196806 - DNA, 20 bp, Artificial sequence
  SiRNA target sequence
caatattattgcaatcgtta

SEQ ID NO: 196807 - DNA, 20 bp, Artificial sequence
  SiRNA target sequence
aatattattgcaatcgttaa

SEQ ID NO: 196808 - DNA, 20 bp, Artificial sequence
  SiRNA target sequence
atattattgcaatcgttaat

SEQ ID NO: 196809 - DNA, 20 bp, Artificial sequence
  SiRNA target sequence
tattattgcaatcgttaatg

SEQ ID NO: 196810 - DNA, 20 bp, Artificial sequence
  SiRNA target sequence
attattgcaatcgttaatgt

SEQ ID NO: 196811 - DNA, 20 bp, Artificial sequence
  SiRNA target sequence
ttattgcaatcgttaatgtg

SEQ ID NO: 196812 - DNA, 20 bp, Artificial sequence
  SiRNA target sequence
tattgcaatcgttaatgtga

SEQ ID NO: 196813 - DNA, 20 bp, Artificial sequence
  SiRNA target sequence
attgcaatcgttaatgtgat

SEQ ID NO: 196814 - DNA, 20 bp, Artificial sequence
  SiRNA target sequence
ttgcaatcgttaatgtgatt

SEQ ID NO: 196815 - DNA, 20 bp, Artificial sequence
  SiRNA target sequence
tgcaatcgttaatgtgattg

SEQ ID NO: 196816 - DNA, 20 bp, Artificial sequence
  SiRNA target sequence
gcaatcgttaatgtgattgg

SEQ ID NO: 196817 - DNA, 20 bp, Artificial sequence
  SiRNA target sequence
caatcgttaatgtgattgga

SEQ ID NO: 196818 - DNA, 20 bp, Artificial sequence
  SiRNA target sequence
aatcgttaatgtgattggac

SEQ ID NO: 196819 - DNA, 20 bp, Artificial sequence
  SiRNA target sequence
atcgttaatgtgattggact

SEQ ID NO: 196820 - DNA, 20 bp, Artificial sequence
  SiRNA target sequence
tcgttaatgtgattggacta

SEQ ID NO: 196821 - DNA, 20 bp, Artificial sequence
  SiRNA target sequence
cgttaatgtgattggactac

SEQ ID NO: 196822 - DNA, 20 bp, Artificial sequence
  SiRNA target sequence
gttaatgtgattggactacc

SEQ ID NO: 196823 - DNA, 20 bp, Artificial sequence
  SiRNA target sequence
ttaatgtgattggactaccc

SEQ ID NO: 196824 - DNA, 20 bp, Artificial sequence
  SiRNA target sequence
taatgtgattggactaccct

SEQ ID NO: 196825 - DNA, 20 bp, Artificial sequence
  SiRNA target sequence
aatgtgattggactaccctt

SEQ ID NO: 196826 - DNA, 20 bp, Artificial sequence
  SiRNA target sequence
atgtgattggactacccttc

SEQ ID NO: 196827 - DNA, 20 bp, Artificial sequence
  SiRNA target sequence
tgtgattggactacccttcc

SEQ ID NO: 196828 - DNA, 20 bp, Artificial sequence
  SiRNA target sequence
gtgattggactacccttcct

SEQ ID NO: 196829 - DNA, 20 bp, Artificial sequence
  SiRNA target sequence
tgattggactacccttcctt

SEQ ID NO: 196830 - DNA, 20 bp, Artificial sequence
  SiRNA target sequence
gattggactacccttcctta

SEQ ID NO: 196831 - DNA, 20 bp, Artificial sequence
  SiRNA target sequence
attggactacccttccttac

SEQ ID NO: 196832 - DNA, 20 bp, Artificial sequence
  SiRNA target sequence
ttggactacccttccttaca

SEQ ID NO: 196833 - DNA, 20 bp, Artificial sequence
  SiRNA target sequence
tggactacccttccttacat

SEQ ID NO: 196834 - DNA, 20 bp, Artificial sequence
  SiRNA target sequence
ggactacccttccttacatt

SEQ ID NO: 196835 - DNA, 20 bp, Artificial sequence
  SiRNA target sequence
gactacccttccttacatta

SEQ ID NO: 196836 - DNA, 20 bp, Artificial sequence
  SiRNA target sequence
actacccttccttacattat

SEQ ID NO: 196837 - DNA, 20 bp, Artificial sequence
  SiRNA target sequence
ctacccttccttacattatc

SEQ ID NO: 196838 - DNA, 20 bp, Artificial sequence
  SiRNA target sequence
tacccttccttacattatca

SEQ ID NO: 196839 - DNA, 20 bp, Artificial sequence
  SiRNA target sequence
acccttccttacattatcag

SEQ ID NO: 196840 - DNA, 20 bp, Artificial sequence
  SiRNA target sequence
cccttccttacattatcagt

SEQ ID NO: 196841 - DNA, 20 bp, Artificial sequence
  SiRNA target sequence
ccttccttacattatcagta

SEQ ID NO: 196842 - DNA, 20 bp, Artificial sequence
  SiRNA target sequence
cttccttacattatcagtat

SEQ ID NO: 196843 - DNA, 20 bp, Artificial sequence
  SiRNA target sequence
ttccttacattatcagtatc

SEQ ID NO: 196844 - DNA, 20 bp, Artificial sequence
  SiRNA target sequence
tccttacattatcagtatca

SEQ ID NO: 196845 - DNA, 20 bp, Artificial sequence
  SiRNA target sequence
ccttacattatcagtatcaa

SEQ ID NO: 196846 - DNA, 20 bp, Artificial sequence
  SiRNA target sequence
cttacattatcagtatcaag

SEQ ID NO: 196847 - DNA, 20 bp, Artificial sequence
  SiRNA target sequence
ttacattatcagtatcaagt

SEQ ID NO: 196848 - DNA, 20 bp, Artificial sequence
  SiRNA target sequence
tacattatcagtatcaagtg

SEQ ID NO: 196849 - DNA, 20 bp, Artificial sequence
  SiRNA target sequence
acattatcagtatcaagtgc

SEQ ID NO: 196850 - DNA, 20 bp, Artificial sequence
  SiRNA target sequence
cattatcagtatcaagtgct

SEQ ID NO: 196851 - DNA, 20 bp, Artificial sequence
  SiRNA target sequence
attatcagtatcaagtgcta

SEQ ID NO: 196852 - DNA, 20 bp, Artificial sequence
  SiRNA target sequence
ttatcagtatcaagtgctac

SEQ ID NO: 196853 - DNA, 20 bp, Artificial sequence
  SiRNA target sequence
tatcagtatcaagtgctact

SEQ ID NO: 196854 - DNA, 20 bp, Artificial sequence
  SiRNA target sequence
atcagtatcaagtgctacta

SEQ ID NO: 196855 - DNA, 20 bp, Artificial sequence
  SiRNA target sequence
tcagtatcaagtgctactaa

SEQ ID NO: 196856 - DNA, 20 bp, Artificial sequence
  SiRNA target sequence
cagtatcaagtgctactaat

SEQ ID NO: 196857 - DNA, 20 bp, Artificial sequence
  SiRNA target sequence
agtatcaagtgctactaata

SEQ ID NO: 196858 - DNA, 20 bp, Artificial sequence
  SiRNA target sequence
gtatcaagtgctactaatat

SEQ ID NO: 196859 - DNA, 20 bp, Artificial sequence
  SiRNA target sequence
tatcaagtgctactaatatg

SEQ ID NO: 196860 - DNA, 20 bp, Artificial sequence
  SiRNA target sequence
atcaagtgctactaatatgg

SEQ ID NO: 196861 - DNA, 20 bp, Artificial sequence
  SiRNA target sequence
tcaagtgctactaatatggc

SEQ ID NO: 196862 - DNA, 20 bp, Artificial sequence
  SiRNA target sequence
caagtgctactaatatggct

SEQ ID NO: 196863 - DNA, 20 bp, Artificial sequence
  SiRNA target sequence
aagtgctactaatatggcta

SEQ ID NO: 196864 - DNA, 20 bp, Artificial sequence
  SiRNA target sequence
agtgctactaatatggctag

SEQ ID NO: 196865 - DNA, 20 bp, Artificial sequence
  SiRNA target sequence
gtgctactaatatggctagt

SEQ ID NO: 196866 - DNA, 20 bp, Artificial sequence
  SiRNA target sequence
tgctactaatatggctagtc

SEQ ID NO: 196867 - DNA, 20 bp, Artificial sequence
  SiRNA target sequence
gctactaatatggctagtcc

SEQ ID NO: 196868 - DNA, 20 bp, Artificial sequence
  SiRNA target sequence
ctactaatatggctagtcca

SEQ ID NO: 196869 - DNA, 20 bp, Artificial sequence
  SiRNA target sequence
tactaatatggctagtccat

SEQ ID NO: 196870 - DNA, 20 bp, Artificial sequence
  SiRNA target sequence
actaatatggctagtccata

SEQ ID NO: 196871 - DNA, 20 bp, Artificial sequence
  SiRNA target sequence
ctaatatggctagtccatat

SEQ ID NO: 196872 - DNA, 20 bp, Artificial sequence
  SiRNA target sequence
taatatggctagtccatata

SEQ ID NO: 196873 - DNA, 20 bp, Artificial sequence
  SiRNA target sequence
aatatggctagtccatataa

SEQ ID NO: 196874 - DNA, 20 bp, Artificial sequence
  SiRNA target sequence
atatggctagtccatataat

SEQ ID NO: 196875 - DNA, 20 bp, Artificial sequence
  SiRNA target sequence
tatggctagtccatataatg

SEQ ID NO: 196876 - DNA, 20 bp, Artificial sequence
  SiRNA target sequence
atggctagtccatataatga

SEQ ID NO: 196877 - DNA, 20 bp, Artificial sequence
  SiRNA target sequence
tggctagtccatataatgaa

SEQ ID NO: 196878 - DNA, 20 bp, Artificial sequence
  SiRNA target sequence
ggctagtccatataatgaac

SEQ ID NO: 196879 - DNA, 20 bp, Artificial sequence
  SiRNA target sequence
gctagtccatataatgaacc

SEQ ID NO: 196880 - DNA, 20 bp, Artificial sequence
  SiRNA target sequence
ctagtccatataatgaacca

SEQ ID NO: 196881 - DNA, 20 bp, Artificial sequence
  SiRNA target sequence
tagtccatataatgaaccaa

SEQ ID NO: 196882 - DNA, 20 bp, Artificial sequence
  SiRNA target sequence
agtccatataatgaaccaat

SEQ ID NO: 196883 - DNA, 20 bp, Artificial sequence
  SiRNA target sequence
gtccatataatgaaccaata

SEQ ID NO: 196884 - DNA, 20 bp, Artificial sequence
  SiRNA target sequence
tccatataatgaaccaatag

SEQ ID NO: 196885 - DNA, 20 bp, Artificial sequence
  SiRNA target sequence
ccatataatgaaccaataga

SEQ ID NO: 196886 - DNA, 20 bp, Artificial sequence
  SiRNA target sequence
catataatgaaccaatagat

SEQ ID NO: 196887 - DNA, 20 bp, Artificial sequence
  SiRNA target sequence
atataatgaaccaatagatt

SEQ ID NO: 196888 - DNA, 20 bp, Artificial sequence
  SiRNA target sequence
tataatgaaccaatagattt

SEQ ID NO: 196889 - DNA, 20 bp, Artificial sequence
  SiRNA target sequence
ataatgaaccaatagatttt

SEQ ID NO: 196890 - DNA, 20 bp, Artificial sequence
  SiRNA target sequence
taatgaaccaatagattttc

SEQ ID NO: 196891 - DNA, 20 bp, Artificial sequence
  SiRNA target sequence
aatgaaccaatagattttcc

SEQ ID NO: 196892 - DNA, 20 bp, Artificial sequence
  SiRNA target sequence
atgaaccaatagattttcct

SEQ ID NO: 196893 - DNA, 20 bp, Artificial sequence
  SiRNA target sequence
tgaaccaatagattttccta

SEQ ID NO: 196894 - DNA, 20 bp, Artificial sequence
  SiRNA target sequence
gaaccaatagattttcctaa

SEQ ID NO: 196895 - DNA, 20 bp, Artificial sequence
  SiRNA target sequence
aaccaatagattttcctaat

SEQ ID NO: 196896 - DNA, 20 bp, Artificial sequence
  SiRNA target sequence
accaatagattttcctaatt

SEQ ID NO: 196897 - DNA, 20 bp, Artificial sequence
  SiRNA target sequence
ccaatagattttcctaattt

SEQ ID NO: 196898 - DNA, 20 bp, Artificial sequence
  SiRNA target sequence
caatagattttcctaattta

SEQ ID NO: 196899 - DNA, 20 bp, Artificial sequence
  SiRNA target sequence
aatagattttcctaatttat

SEQ ID NO: 196900 - DNA, 20 bp, Artificial sequence
  SiRNA target sequence
atagattttcctaatttatt

SEQ ID NO: 196901 - DNA, 20 bp, Artificial sequence
  SiRNA target sequence
tagattttcctaatttatta

SEQ ID NO: 196902 - DNA, 20 bp, Artificial sequence
  SiRNA target sequence
agattttcctaatttattaa

SEQ ID NO: 196903 - DNA, 20 bp, Artificial sequence
  SiRNA target sequence
gattttcctaatttattaaa

SEQ ID NO: 196904 - DNA, 20 bp, Artificial sequence
  SiRNA target sequence
attttcctaatttattaaaa

SEQ ID NO: 196905 - DNA, 20 bp, Artificial sequence
  SiRNA target sequence
ttttcctaatttattaaaaa

SEQ ID NO: 196906 - DNA, 20 bp, Artificial sequence
  SiRNA target sequence
tttcctaatttattaaaaat

SEQ ID NO: 196907 - DNA, 20 bp, Artificial sequence
  SiRNA target sequence
ttcctaatttattaaaaata

SEQ ID NO: 196908 - DNA, 20 bp, Artificial sequence
  SiRNA target sequence
tcctaatttattaaaaatac

SEQ ID NO: 196909 - DNA, 20 bp, Artificial sequence
  SiRNA target sequence
cctaatttattaaaaatacc

SEQ ID NO: 196910 - DNA, 20 bp, Artificial sequence
  SiRNA target sequence
ctaatttattaaaaatacca

SEQ ID NO: 196911 - DNA, 20 bp, Artificial sequence
  SiRNA target sequence
taatttattaaaaataccat

SEQ ID NO: 196912 - DNA, 20 bp, Artificial sequence
  SiRNA target sequence
aatttattaaaaataccatc

SEQ ID NO: 196913 - DNA, 20 bp, Artificial sequence
  SiRNA target sequence
atttattaaaaataccatca

SEQ ID NO: 196914 - DNA, 20 bp, Artificial sequence
  SiRNA target sequence
tttattaaaaataccatcat

SEQ ID NO: 196915 - DNA, 20 bp, Artificial sequence
  SiRNA target sequence
ttattaaaaataccatcata

SEQ ID NO: 196916 - DNA, 20 bp, Artificial sequence
  SiRNA target sequence
tattaaaaataccatcataa

SEQ ID NO: 196917 - DNA, 20 bp, Artificial sequence
  SiRNA target sequence
attaaaaataccatcataaa

SEQ ID NO: 196918 - DNA, 20 bp, Artificial sequence
  SiRNA target sequence
ttaaaaataccatcataaac

SEQ ID NO: 196919 - DNA, 20 bp, Artificial sequence
  SiRNA target sequence
taaaaataccatcataaaca

SEQ ID NO: 196920 - DNA, 20 bp, Artificial sequence
  SiRNA target sequence
aaaaataccatcataaacac

SEQ ID NO: 196921 - DNA, 20 bp, Artificial sequence
  SiRNA target sequence
aaaataccatcataaacact

SEQ ID NO: 196922 - DNA, 20 bp, Artificial sequence
  SiRNA target sequence
aaataccatcataaacactt

SEQ ID NO: 196923 - DNA, 20 bp, Artificial sequence
  SiRNA target sequence
aataccatcataaacacttt

SEQ ID NO: 196924 - DNA, 20 bp, Artificial sequence
  SiRNA target sequence
ataccatcataaacactttt

SEQ ID NO: 196925 - DNA, 20 bp, Artificial sequence
  SiRNA target sequence
taccatcataaacactttta

SEQ ID NO: 196926 - DNA, 20 bp, Artificial sequence
  SiRNA target sequence
accatcataaacacttttaa

SEQ ID NO: 196927 - DNA, 20 bp, Artificial sequence
  SiRNA target sequence
ccatcataaacacttttaaa

SEQ ID NO: 196928 - DNA, 20 bp, Artificial sequence
  SiRNA target sequence
catcataaacacttttaaac

SEQ ID NO: 196929 - DNA, 20 bp, Artificial sequence
  SiRNA target sequence
atcataaacacttttaaacc

SEQ ID NO: 196930 - DNA, 20 bp, Artificial sequence
  SiRNA target sequence
tcataaacacttttaaaccg

SEQ ID NO: 196931 - DNA, 20 bp, Artificial sequence
  SiRNA target sequence
cataaacacttttaaaccgt

SEQ ID NO: 196932 - DNA, 20 bp, Artificial sequence
  SiRNA target sequence
ataaacacttttaaaccgtg

SEQ ID NO: 196933 - DNA, 20 bp, Artificial sequence
  SiRNA target sequence
taaacacttttaaaccgtgc

SEQ ID NO: 196934 - DNA, 20 bp, Artificial sequence
  SiRNA target sequence
aaacacttttaaaccgtgcc

SEQ ID NO: 196935 - DNA, 20 bp, Artificial sequence
  SiRNA target sequence
aacacttttaaaccgtgccc

SEQ ID NO: 196936 - DNA, 20 bp, Artificial sequence
  SiRNA target sequence
acacttttaaaccgtgccct

SEQ ID NO: 196937 - DNA, 20 bp, Artificial sequence
  SiRNA target sequence
cacttttaaaccgtgccctg

SEQ ID NO: 196938 - DNA, 20 bp, Artificial sequence
  SiRNA target sequence
acttttaaaccgtgccctgt

SEQ ID NO: 196939 - DNA, 20 bp, Artificial sequence
  SiRNA target sequence
cttttaaaccgtgccctgtg

SEQ ID NO: 196940 - DNA, 20 bp, Artificial sequence
  SiRNA target sequence
ttttaaaccgtgccctgtgt

SEQ ID NO: 196941 - DNA, 20 bp, Artificial sequence
  SiRNA target sequence
tttaaaccgtgccctgtgtg

SEQ ID NO: 196942 - DNA, 20 bp, Artificial sequence
  SiRNA target sequence
ttaaaccgtgccctgtgtgc

SEQ ID NO: 196943 - DNA, 20 bp, Artificial sequence
  SiRNA target sequence
taaaccgtgccctgtgtgca

SEQ ID NO: 196944 - DNA, 20 bp, Artificial sequence
  SiRNA target sequence
aaaccgtgccctgtgtgcag

SEQ ID NO: 196945 - DNA, 20 bp, Artificial sequence
  SiRNA target sequence
aaccgtgccctgtgtgcagg

SEQ ID NO: 196946 - DNA, 20 bp, Artificial sequence
  SiRNA target sequence
accgtgccctgtgtgcagga

SEQ ID NO: 196947 - DNA, 20 bp, Artificial sequence
  SiRNA target sequence
ccgtgccctgtgtgcaggat

SEQ ID NO: 196948 - DNA, 20 bp, Artificial sequence
  SiRNA target sequence
cgtgccctgtgtgcaggatc

SEQ ID NO: 196949 - DNA, 20 bp, Artificial sequence
  SiRNA target sequence
gtgccctgtgtgcaggatcg

SEQ ID NO: 196950 - DNA, 20 bp, Artificial sequence
  SiRNA target sequence
tgccctgtgtgcaggatcga

SEQ ID NO: 196951 - DNA, 20 bp, Artificial sequence
  SiRNA target sequence
gccctgtgtgcaggatcgat

SEQ ID NO: 196952 - DNA, 20 bp, Artificial sequence
  SiRNA target sequence
ccctgtgtgcaggatcgatt

SEQ ID NO: 196953 - DNA, 20 bp, Artificial sequence
  SiRNA target sequence
cctgtgtgcaggatcgattc

SEQ ID NO: 196954 - DNA, 20 bp, Artificial sequence
  SiRNA target sequence
ctgtgtgcaggatcgattct

SEQ ID NO: 196955 - DNA, 20 bp, Artificial sequence
  SiRNA target sequence
tgtgtgcaggatcgattctc

SEQ ID NO: 196956 - DNA, 20 bp, Artificial sequence
  SiRNA target sequence
gtgtgcaggatcgattctca

SEQ ID NO: 196957 - DNA, 20 bp, Artificial sequence
  SiRNA target sequence
tgtgcaggatcgattctcat

SEQ ID NO: 196958 - DNA, 20 bp, Artificial sequence
  SiRNA target sequence
gtgcaggatcgattctcata

SEQ ID NO: 196959 - DNA, 20 bp, Artificial sequence
  SiRNA target sequence
tgcaggatcgattctcatac

SEQ ID NO: 196960 - DNA, 20 bp, Artificial sequence
  SiRNA target sequence
gcaggatcgattctcatacc

SEQ ID NO: 196961 - DNA, 20 bp, Artificial sequence
  SiRNA target sequence
caggatcgattctcataccc

SEQ ID NO: 196962 - DNA, 20 bp, Artificial sequence
  SiRNA target sequence
aggatcgattctcataccca

SEQ ID NO: 196963 - DNA, 20 bp, Artificial sequence
  SiRNA target sequence
ggatcgattctcatacccat

SEQ ID NO: 196964 - DNA, 20 bp, Artificial sequence
  SiRNA target sequence
gatcgattctcatacccatt

SEQ ID NO: 196965 - DNA, 20 bp, Artificial sequence
  SiRNA target sequence
atcgattctcatacccattt

SEQ ID NO: 196966 - DNA, 20 bp, Artificial sequence
  SiRNA target sequence
tcgattctcatacccatttt

SEQ ID NO: 196967 - DNA, 20 bp, Artificial sequence
  SiRNA target sequence
cgattctcatacccattttc

SEQ ID NO: 196968 - DNA, 20 bp, Artificial sequence
  SiRNA target sequence
gattctcatacccattttct

SEQ ID NO: 196969 - DNA, 20 bp, Artificial sequence
  SiRNA target sequence
attctcatacccattttctc

SEQ ID NO: 196970 - DNA, 20 bp, Artificial sequence
  SiRNA target sequence
ttctcatacccattttctct

SEQ ID NO: 196971 - DNA, 20 bp, Artificial sequence
  SiRNA target sequence
tctcatacccattttctctt

SEQ ID NO: 196972 - DNA, 20 bp, Artificial sequence
  SiRNA target sequence
ctcatacccattttctcttt

SEQ ID NO: 196973 - DNA, 20 bp, Artificial sequence
  SiRNA target sequence
tcatacccattttctcttta

SEQ ID NO: 196974 - DNA, 20 bp, Artificial sequence
  SiRNA target sequence
catacccattttctctttac

SEQ ID NO: 196975 - DNA, 20 bp, Artificial sequence
  SiRNA target sequence
atacccattttctctttaca

SEQ ID NO: 196976 - DNA, 20 bp, Artificial sequence
  SiRNA target sequence
tacccattttctctttacaa

SEQ ID NO: 196977 - DNA, 20 bp, Artificial sequence
  SiRNA target sequence
acccattttctctttacaaa

SEQ ID NO: 196978 - DNA, 20 bp, Artificial sequence
  SiRNA target sequence
cccattttctctttacaaat

SEQ ID NO: 196979 - DNA, 20 bp, Artificial sequence
  SiRNA target sequence
ccattttctctttacaaata

SEQ ID NO: 196980 - DNA, 20 bp, Artificial sequence
  SiRNA target sequence
cattttctctttacaaatat

SEQ ID NO: 196981 - DNA, 20 bp, Artificial sequence
  SiRNA target sequence
attttctctttacaaatatc

SEQ ID NO: 196982 - DNA, 20 bp, Artificial sequence
  SiRNA target sequence
ttttctctttacaaatatca

SEQ ID NO: 196983 - DNA, 20 bp, Artificial sequence
  SiRNA target sequence
tttctctttacaaatatcaa

SEQ ID NO: 196984 - DNA, 20 bp, Artificial sequence
  SiRNA target sequence
ttctctttacaaatatcaaa

SEQ ID NO: 196985 - DNA, 20 bp, Artificial sequence
  SiRNA target sequence
tctctttacaaatatcaaag

SEQ ID NO: 196986 - DNA, 20 bp, Artificial sequence
  SiRNA target sequence
ctctttacaaatatcaaagg

SEQ ID NO: 196987 - DNA, 20 bp, Artificial sequence
  SiRNA target sequence
tctttacaaatatcaaaggc

SEQ ID NO: 196988 - DNA, 20 bp, Artificial sequence
  SiRNA target sequence
ctttacaaatatcaaaggct

SEQ ID NO: 196989 - DNA, 20 bp, Artificial sequence
  SiRNA target sequence
tttacaaatatcaaaggctg

SEQ ID NO: 196990 - DNA, 20 bp, Artificial sequence
  SiRNA target sequence
ttacaaatatcaaaggctga

SEQ ID NO: 196991 - DNA, 20 bp, Artificial sequence
  SiRNA target sequence
tacaaatatcaaaggctgaa

SEQ ID NO: 196992 - DNA, 20 bp, Artificial sequence
  SiRNA target sequence
acaaatatcaaaggctgaat

SEQ ID NO: 196993 - DNA, 20 bp, Artificial sequence
  SiRNA target sequence
caaatatcaaaggctgaata

SEQ ID NO: 196994 - DNA, 20 bp, Artificial sequence
  SiRNA target sequence
aaatatcaaaggctgaatat

SEQ ID NO: 196995 - DNA, 20 bp, Artificial sequence
  SiRNA target sequence
aatatcaaaggctgaatatt

SEQ ID NO: 196996 - DNA, 20 bp, Artificial sequence
  SiRNA target sequence
atatcaaaggctgaatattt

SEQ ID NO: 196997 - DNA, 20 bp, Artificial sequence
  SiRNA target sequence
tatcaaaggctgaatatttt

SEQ ID NO: 196998 - DNA, 20 bp, Artificial sequence
  SiRNA target sequence
atcaaaggctgaatatttta

SEQ ID NO: 196999 - DNA, 20 bp, Artificial sequence
  SiRNA target sequence
tcaaaggctgaatattttaa

SEQ ID NO: 197000 - DNA, 20 bp, Artificial sequence
  SiRNA target sequence
caaaggctgaatattttaat

SEQ ID NO: 197001 - DNA, 20 bp, Artificial sequence
  SiRNA target sequence
aaaggctgaatattttaata

SEQ ID NO: 197002 - DNA, 20 bp, Artificial sequence
  SiRNA target sequence
aaggctgaatattttaatac

SEQ ID NO: 197003 - DNA, 20 bp, Artificial sequence
  SiRNA target sequence
aggctgaatattttaatact

SEQ ID NO: 197004 - DNA, 20 bp, Artificial sequence
  SiRNA target sequence
ggctgaatattttaatactt

SEQ ID NO: 197005 - DNA, 20 bp, Artificial sequence
  SiRNA target sequence
gctgaatattttaatacttt

SEQ ID NO: 197006 - DNA, 20 bp, Artificial sequence
  SiRNA target sequence
ctgaatattttaatactttt

SEQ ID NO: 197007 - DNA, 20 bp, Artificial sequence
  SiRNA target sequence
tgaatattttaatactttta

SEQ ID NO: 197008 - DNA, 20 bp, Artificial sequence
  SiRNA target sequence
gaatattttaatacttttat

SEQ ID NO: 197009 - DNA, 20 bp, Artificial sequence
  SiRNA target sequence
aatattttaatacttttatg

SEQ ID NO: 197010 - DNA, 20 bp, Artificial sequence
  SiRNA target sequence
atattttaatacttttatga

SEQ ID NO: 197011 - DNA, 20 bp, Artificial sequence
  SiRNA target sequence
tattttaatacttttatgaa

SEQ ID NO: 197012 - DNA, 20 bp, Artificial sequence
  SiRNA target sequence
attttaatacttttatgaat

SEQ ID NO: 197013 - DNA, 20 bp, Artificial sequence
  SiRNA target sequence
ttttaatacttttatgaatg

SEQ ID NO: 197014 - DNA, 20 bp, Artificial sequence
  SiRNA target sequence
tttaatacttttatgaatgc

SEQ ID NO: 197015 - DNA, 20 bp, Artificial sequence
  SiRNA target sequence
ttaatacttttatgaatgct

SEQ ID NO: 197016 - DNA, 20 bp, Artificial sequence
  SiRNA target sequence
taatacttttatgaatgcta

SEQ ID NO: 197017 - DNA, 20 bp, Artificial sequence
  SiRNA target sequence
aatacttttatgaatgctaa

SEQ ID NO: 197018 - DNA, 20 bp, Artificial sequence
  SiRNA target sequence
atacttttatgaatgctaaa

SEQ ID NO: 197019 - DNA, 20 bp, Artificial sequence
  SiRNA target sequence
tacttttatgaatgctaaaa

SEQ ID NO: 197020 - DNA, 20 bp, Artificial sequence
  SiRNA target sequence
acttttatgaatgctaaaaa

SEQ ID NO: 197021 - DNA, 20 bp, Artificial sequence
  SiRNA target sequence
cttttatgaatgctaaaaag

SEQ ID NO: 197022 - DNA, 20 bp, Artificial sequence
  SiRNA target sequence
ttttatgaatgctaaaaaga

SEQ ID NO: 197023 - DNA, 20 bp, Artificial sequence
  SiRNA target sequence
tttatgaatgctaaaaagaa

SEQ ID NO: 197024 - DNA, 20 bp, Artificial sequence
  SiRNA target sequence
ttatgaatgctaaaaagaac

SEQ ID NO: 197025 - DNA, 20 bp, Artificial sequence
  SiRNA target sequence
tatgaatgctaaaaagaaca

SEQ ID NO: 197026 - DNA, 20 bp, Artificial sequence
  SiRNA target sequence
atgaatgctaaaaagaacat

SEQ ID NO: 197027 - DNA, 20 bp, Artificial sequence
  SiRNA target sequence
tgaatgctaaaaagaacatt

SEQ ID NO: 197028 - DNA, 20 bp, Artificial sequence
  SiRNA target sequence
gaatgctaaaaagaacattc

SEQ ID NO: 197029 - DNA, 20 bp, Artificial sequence
  SiRNA target sequence
aatgctaaaaagaacattcc

SEQ ID NO: 197030 - DNA, 20 bp, Artificial sequence
  SiRNA target sequence
atgctaaaaagaacattcca

SEQ ID NO: 197031 - DNA, 20 bp, Artificial sequence
  SiRNA target sequence
tgctaaaaagaacattccac

SEQ ID NO: 197032 - DNA, 20 bp, Artificial sequence
  SiRNA target sequence
gctaaaaagaacattccact

SEQ ID NO: 197033 - DNA, 20 bp, Artificial sequence
  SiRNA target sequence
ctaaaaagaacattccactg

SEQ ID NO: 197034 - DNA, 20 bp, Artificial sequence
  SiRNA target sequence
taaaaagaacattccactgt

SEQ ID NO: 197035 - DNA, 20 bp, Artificial sequence
  SiRNA target sequence
aaaaagaacattccactgta

SEQ ID NO: 197036 - DNA, 20 bp, Artificial sequence
  SiRNA target sequence
aaaagaacattccactgtaa

SEQ ID NO: 197037 - DNA, 20 bp, Artificial sequence
  SiRNA target sequence
aaagaacattccactgtaat

SEQ ID NO: 197038 - DNA, 20 bp, Artificial sequence
  SiRNA target sequence
aagaacattccactgtaatt

SEQ ID NO: 197039 - DNA, 20 bp, Artificial sequence
  SiRNA target sequence
agaacattccactgtaattt

SEQ ID NO: 197040 - DNA, 20 bp, Artificial sequence
  SiRNA target sequence
gaacattccactgtaatttt

SEQ ID NO: 197041 - DNA, 20 bp, Artificial sequence
  SiRNA target sequence
aacattccactgtaattttc

SEQ ID NO: 197042 - DNA, 20 bp, Artificial sequence
  SiRNA target sequence
acattccactgtaattttcg

SEQ ID NO: 197043 - DNA, 20 bp, Artificial sequence
  SiRNA target sequence
cattccactgtaattttcga

SEQ ID NO: 197044 - DNA, 20 bp, Artificial sequence
  SiRNA target sequence
attccactgtaattttcgat

SEQ ID NO: 197045 - DNA, 20 bp, Artificial sequence
  SiRNA target sequence
ttccactgtaattttcgatc

SEQ ID NO: 197046 - DNA, 20 bp, Artificial sequence
  SiRNA target sequence
tccactgtaattttcgatcg

SEQ ID NO: 197047 - DNA, 20 bp, Artificial sequence
  SiRNA target sequence
ccactgtaattttcgatcgt

SEQ ID NO: 197048 - DNA, 20 bp, Artificial sequence
  SiRNA target sequence
cactgtaattttcgatcgta

SEQ ID NO: 197049 - DNA, 20 bp, Artificial sequence
  SiRNA target sequence
actgtaattttcgatcgtat

SEQ ID NO: 197050 - DNA, 20 bp, Artificial sequence
  SiRNA target sequence
ctgtaattttcgatcgtata

SEQ ID NO: 197051 - DNA, 20 bp, Artificial sequence
  SiRNA target sequence
tgtaattttcgatcgtataa

SEQ ID NO: 197052 - DNA, 20 bp, Artificial sequence
  SiRNA target sequence
gtaattttcgatcgtataaa

SEQ ID NO: 197053 - DNA, 20 bp, Artificial sequence
  SiRNA target sequence
taattttcgatcgtataaat

SEQ ID NO: 197054 - DNA, 20 bp, Artificial sequence
  SiRNA target sequence
aattttcgatcgtataaatg

SEQ ID NO: 197055 - DNA, 20 bp, Artificial sequence
  SiRNA target sequence
attttcgatcgtataaatgt

SEQ ID NO: 197056 - DNA, 20 bp, Artificial sequence
  SiRNA target sequence
ttttcgatcgtataaatgta

SEQ ID NO: 197057 - DNA, 20 bp, Artificial sequence
  SiRNA target sequence
tttcgatcgtataaatgtac

SEQ ID NO: 197058 - DNA, 20 bp, Artificial sequence
  SiRNA target sequence
ttcgatcgtataaatgtacg

SEQ ID NO: 197059 - DNA, 20 bp, Artificial sequence
  SiRNA target sequence
tcgatcgtataaatgtacga

SEQ ID NO: 197060 - DNA, 20 bp, Artificial sequence
  SiRNA target sequence
cgatcgtataaatgtacgac

SEQ ID NO: 197061 - DNA, 20 bp, Artificial sequence
  SiRNA target sequence
gatcgtataaatgtacgaca

SEQ ID NO: 197062 - DNA, 20 bp, Artificial sequence
  SiRNA target sequence
atcgtataaatgtacgacat

SEQ ID NO: 197063 - DNA, 20 bp, Artificial sequence
  SiRNA target sequence
tcgtataaatgtacgacatt

SEQ ID NO: 197064 - DNA, 20 bp, Artificial sequence
  SiRNA target sequence
cgtataaatgtacgacattt

SEQ ID NO: 197065 - DNA, 20 bp, Artificial sequence
  SiRNA target sequence
gtataaatgtacgacatttt

SEQ ID NO: 197066 - DNA, 20 bp, Artificial sequence
  SiRNA target sequence
tataaatgtacgacattttt

SEQ ID NO: 197067 - DNA, 20 bp, Artificial sequence
  SiRNA target sequence
ataaatgtacgacatttttt

SEQ ID NO: 197068 - DNA, 20 bp, Artificial sequence
  SiRNA target sequence
taaatgtacgacattttttt

SEQ ID NO: 197069 - DNA, 20 bp, Artificial sequence
  SiRNA target sequence
aaatgtacgacattttttta

SEQ ID NO: 197070 - DNA, 20 bp, Artificial sequence
  SiRNA target sequence
aatgtacgacatttttttaa

SEQ ID NO: 197071 - DNA, 20 bp, Artificial sequence
  SiRNA target sequence
atgtacgacatttttttaaa

SEQ ID NO: 197072 - DNA, 20 bp, Artificial sequence
  SiRNA target sequence
tgtacgacatttttttaaaa

SEQ ID NO: 197073 - DNA, 20 bp, Artificial sequence
  SiRNA target sequence
gtacgacatttttttaaaaa

SEQ ID NO: 197074 - DNA, 20 bp, Artificial sequence
  SiRNA target sequence
tacgacatttttttaaaaaa

SEQ ID NO: 197075 - DNA, 20 bp, Artificial sequence
  SiRNA target sequence
acgacatttttttaaaaaat

SEQ ID NO: 197076 - DNA, 20 bp, Artificial sequence
  SiRNA target sequence
cgacatttttttaaaaaata

SEQ ID NO: 197077 - DNA, 20 bp, Artificial sequence
  SiRNA target sequence
gacatttttttaaaaaatac

SEQ ID NO: 197078 - DNA, 20 bp, Artificial sequence
  SiRNA target sequence
acatttttttaaaaaataca

SEQ ID NO: 197079 - DNA, 20 bp, Artificial sequence
  SiRNA target sequence
catttttttaaaaaatacag

SEQ ID NO: 197080 - DNA, 20 bp, Artificial sequence
  SiRNA target sequence
atttttttaaaaaatacaga

SEQ ID NO: 197081 - DNA, 20 bp, Artificial sequence
  SiRNA target sequence
tttttttaaaaaatacagaa

SEQ ID NO: 197082 - DNA, 20 bp, Artificial sequence
  SiRNA target sequence
ttttttaaaaaatacagaaa

SEQ ID NO: 197083 - DNA, 20 bp, Artificial sequence
  SiRNA target sequence
tttttaaaaaatacagaaat

SEQ ID NO: 197084 - DNA, 20 bp, Artificial sequence
  SiRNA target sequence
ttttaaaaaatacagaaatc

SEQ ID NO: 197085 - DNA, 20 bp, Artificial sequence
  SiRNA target sequence
tttaaaaaatacagaaatcc

SEQ ID NO: 197086 - DNA, 20 bp, Artificial sequence
  SiRNA target sequence
ttaaaaaatacagaaatcca

SEQ ID NO: 197087 - DNA, 20 bp, Artificial sequence
  SiRNA target sequence
taaaaaatacagaaatccat

SEQ ID NO: 197088 - DNA, 20 bp, Artificial sequence
  SiRNA target sequence
aaaaaatacagaaatccatg

SEQ ID NO: 197089 - DNA, 20 bp, Artificial sequence
  SiRNA target sequence
aaaaatacagaaatccatga

SEQ ID NO: 197090 - DNA, 20 bp, Artificial sequence
  SiRNA target sequence
aaaatacagaaatccatgaa

SEQ ID NO: 197091 - DNA, 20 bp, Artificial sequence
  SiRNA target sequence
aaatacagaaatccatgaaa

SEQ ID NO: 197092 - DNA, 20 bp, Artificial sequence
  SiRNA target sequence
aatacagaaatccatgaaaa

SEQ ID NO: 197093 - DNA, 20 bp, Artificial sequence
  SiRNA target sequence
atacagaaatccatgaaaaa

SEQ ID NO: 197094 - DNA, 20 bp, Artificial sequence
  SiRNA target sequence
tacagaaatccatgaaaaag

SEQ ID NO: 197095 - DNA, 20 bp, Artificial sequence
  SiRNA target sequence
acagaaatccatgaaaaagc

SEQ ID NO: 197096 - DNA, 20 bp, Artificial sequence
  SiRNA target sequence
cagaaatccatgaaaaagca

SEQ ID NO: 197097 - DNA, 20 bp, Artificial sequence
  SiRNA target sequence
agaaatccatgaaaaagcaa

SEQ ID NO: 197098 - DNA, 20 bp, Artificial sequence
  SiRNA target sequence
gaaatccatgaaaaagcaag

SEQ ID NO: 197099 - DNA, 20 bp, Artificial sequence
  SiRNA target sequence
aaatccatgaaaaagcaagt

SEQ ID NO: 197100 - DNA, 20 bp, Artificial sequence
  SiRNA target sequence
aatccatgaaaaagcaagtc

SEQ ID NO: 197101 - DNA, 20 bp, Artificial sequence
  SiRNA target sequence
atccatgaaaaagcaagtcc

SEQ ID NO: 197102 - DNA, 20 bp, Artificial sequence
  SiRNA target sequence
tccatgaaaaagcaagtcct

SEQ ID NO: 197103 - DNA, 20 bp, Artificial sequence
  SiRNA target sequence
ccatgaaaaagcaagtcctt

SEQ ID NO: 197104 - DNA, 20 bp, Artificial sequence
  SiRNA target sequence
catgaaaaagcaagtccttc

SEQ ID NO: 197105 - DNA, 20 bp, Artificial sequence
  SiRNA target sequence
atgaaaaagcaagtccttca

SEQ ID NO: 197106 - DNA, 20 bp, Artificial sequence
  SiRNA target sequence
tgaaaaagcaagtccttcaa

SEQ ID NO: 197107 - DNA, 20 bp, Artificial sequence
  SiRNA target sequence
gaaaaagcaagtccttcaat

SEQ ID NO: 197108 - DNA, 20 bp, Artificial sequence
  SiRNA target sequence
aaaaagcaagtccttcaatg

SEQ ID NO: 197109 - DNA, 20 bp, Artificial sequence
  SiRNA target sequence
aaaagcaagtccttcaatgg

SEQ ID NO: 197110 - DNA, 20 bp, Artificial sequence
  SiRNA target sequence
aaagcaagtccttcaatggc

SEQ ID NO: 197111 - DNA, 20 bp, Artificial sequence
  SiRNA target sequence
aagcaagtccttcaatggca

SEQ ID NO: 197112 - DNA, 20 bp, Artificial sequence
  SiRNA target sequence
agcaagtccttcaatggcag

SEQ ID NO: 197113 - DNA, 20 bp, Artificial sequence
  SiRNA target sequence
gcaagtccttcaatggcaga

SEQ ID NO: 197114 - DNA, 20 bp, Artificial sequence
  SiRNA target sequence
caagtccttcaatggcagaa

SEQ ID NO: 197115 - DNA, 20 bp, Artificial sequence
  SiRNA target sequence
aagtccttcaatggcagaat

SEQ ID NO: 197116 - DNA, 20 bp, Artificial sequence
  SiRNA target sequence
agtccttcaatggcagaatt

SEQ ID NO: 197117 - DNA, 20 bp, Artificial sequence
  SiRNA target sequence
gtccttcaatggcagaattg

SEQ ID NO: 197118 - DNA, 20 bp, Artificial sequence
  SiRNA target sequence
tccttcaatggcagaattgt

SEQ ID NO: 197119 - DNA, 20 bp, Artificial sequence
  SiRNA target sequence
ccttcaatggcagaattgta

SEQ ID NO: 197120 - DNA, 20 bp, Artificial sequence
  SiRNA target sequence
cttcaatggcagaattgtag

SEQ ID NO: 197121 - DNA, 20 bp, Artificial sequence
  SiRNA target sequence
ttcaatggcagaattgtaga

SEQ ID NO: 197122 - DNA, 20 bp, Artificial sequence
  SiRNA target sequence
tcaatggcagaattgtagat

SEQ ID NO: 197123 - DNA, 20 bp, Artificial sequence
  SiRNA target sequence
caatggcagaattgtagatt

SEQ ID NO: 197124 - DNA, 20 bp, Artificial sequence
  SiRNA target sequence
aatggcagaattgtagattg

SEQ ID NO: 197125 - DNA, 20 bp, Artificial sequence
  SiRNA target sequence
atggcagaattgtagattga

SEQ ID NO: 197126 - DNA, 20 bp, Artificial sequence
  SiRNA target sequence
tggcagaattgtagattgat

SEQ ID NO: 197127 - DNA, 20 bp, Artificial sequence
  SiRNA target sequence
ggcagaattgtagattgatg

SEQ ID NO: 197128 - DNA, 20 bp, Artificial sequence
  SiRNA target sequence
gcagaattgtagattgatgc

SEQ ID NO: 197129 - DNA, 20 bp, Artificial sequence
  SiRNA target sequence
cagaattgtagattgatgct

SEQ ID NO: 197130 - DNA, 20 bp, Artificial sequence
  SiRNA target sequence
agaattgtagattgatgctc

SEQ ID NO: 197131 - DNA, 20 bp, Artificial sequence
  SiRNA target sequence
gaattgtagattgatgctcc

SEQ ID NO: 197132 - DNA, 20 bp, Artificial sequence
  SiRNA target sequence
aattgtagattgatgctccc

SEQ ID NO: 197133 - DNA, 20 bp, Artificial sequence
  SiRNA target sequence
attgtagattgatgctccca

SEQ ID NO: 197134 - DNA, 20 bp, Artificial sequence
  SiRNA target sequence
ttgtagattgatgctcccat

SEQ ID NO: 197135 - DNA, 20 bp, Artificial sequence
  SiRNA target sequence
tgtagattgatgctcccata

SEQ ID NO: 197136 - DNA, 20 bp, Artificial sequence
  SiRNA target sequence
gtagattgatgctcccataa

SEQ ID NO: 197137 - DNA, 20 bp, Artificial sequence
  SiRNA target sequence
tagattgatgctcccataac

SEQ ID NO: 197138 - DNA, 20 bp, Artificial sequence
  SiRNA target sequence
agattgatgctcccataacg

SEQ ID NO: 197139 - DNA, 20 bp, Artificial sequence
  SiRNA target sequence
gattgatgctcccataacga

SEQ ID NO: 197140 - DNA, 20 bp, Artificial sequence
  SiRNA target sequence
attgatgctcccataacgat

SEQ ID NO: 197141 - DNA, 20 bp, Artificial sequence
  SiRNA target sequence
ttgatgctcccataacgatt

SEQ ID NO: 197142 - DNA, 20 bp, Artificial sequence
  SiRNA target sequence
tgatgctcccataacgatta

SEQ ID NO: 197143 - DNA, 20 bp, Artificial sequence
  SiRNA target sequence
gatgctcccataacgattat

SEQ ID NO: 197144 - DNA, 20 bp, Artificial sequence
  SiRNA target sequence
atgctcccataacgattatt

SEQ ID NO: 197145 - DNA, 20 bp, Artificial sequence
  SiRNA target sequence
tgctcccataacgattattg

SEQ ID NO: 197146 - DNA, 20 bp, Artificial sequence
  SiRNA target sequence
gctcccataacgattattga

SEQ ID NO: 197147 - DNA, 20 bp, Artificial sequence
  SiRNA target sequence
ctcccataacgattattgac

SEQ ID NO: 197148 - DNA, 20 bp, Artificial sequence
  SiRNA target sequence
tcccataacgattattgacc

SEQ ID NO: 197149 - DNA, 20 bp, Artificial sequence
  SiRNA target sequence
cccataacgattattgaccc

SEQ ID NO: 197150 - DNA, 20 bp, Artificial sequence
  SiRNA target sequence
ccataacgattattgacccc

SEQ ID NO: 197151 - DNA, 20 bp, Artificial sequence
  SiRNA target sequence
cataacgattattgacccca

SEQ ID NO: 197152 - DNA, 20 bp, Artificial sequence
  SiRNA target sequence
ataacgattattgaccccaa

SEQ ID NO: 197153 - DNA, 20 bp, Artificial sequence
  SiRNA target sequence
taacgattattgaccccaac

SEQ ID NO: 197154 - DNA, 20 bp, Artificial sequence
  SiRNA target sequence
aacgattattgaccccaaca

SEQ ID NO: 197155 - DNA, 20 bp, Artificial sequence
  SiRNA target sequence
acgattattgaccccaacaa

SEQ ID NO: 197156 - DNA, 20 bp, Artificial sequence
  SiRNA target sequence
cgattattgaccccaacaac

SEQ ID NO: 197157 - DNA, 20 bp, Artificial sequence
  SiRNA target sequence
gattattgaccccaacaaca

SEQ ID NO: 197158 - DNA, 20 bp, Artificial sequence
  SiRNA target sequence
attattgaccccaacaacaa

SEQ ID NO: 197159 - DNA, 20 bp, Artificial sequence
  SiRNA target sequence
ttattgaccccaacaacaag

SEQ ID NO: 197160 - DNA, 20 bp, Artificial sequence
  SiRNA target sequence
tattgaccccaacaacaaga

SEQ ID NO: 197161 - DNA, 20 bp, Artificial sequence
  SiRNA target sequence
attgaccccaacaacaagaa

SEQ ID NO: 197162 - DNA, 20 bp, Artificial sequence
  SiRNA target sequence
ttgaccccaacaacaagaat

SEQ ID NO: 197163 - DNA, 20 bp, Artificial sequence
  SiRNA target sequence
tgaccccaacaacaagaata

SEQ ID NO: 197164 - DNA, 20 bp, Artificial sequence
  SiRNA target sequence
gaccccaacaacaagaataa

SEQ ID NO: 197165 - DNA, 20 bp, Artificial sequence
  SiRNA target sequence
accccaacaacaagaataaa

SEQ ID NO: 197166 - DNA, 20 bp, Artificial sequence
  SiRNA target sequence
ccccaacaacaagaataaag

SEQ ID NO: 197167 - DNA, 20 bp, Artificial sequence
  SiRNA target sequence
cccaacaacaagaataaagg

SEQ ID NO: 197168 - DNA, 20 bp, Artificial sequence
  SiRNA target sequence
ccaacaacaagaataaaggt

SEQ ID NO: 197169 - DNA, 20 bp, Artificial sequence
  SiRNA target sequence
caacaacaagaataaaggtg

SEQ ID NO: 197170 - DNA, 20 bp, Artificial sequence
  SiRNA target sequence
aacaacaagaataaaggtgt

SEQ ID NO: 197171 - DNA, 20 bp, Artificial sequence
  SiRNA target sequence
acaacaagaataaaggtgtt

SEQ ID NO: 197172 - DNA, 20 bp, Artificial sequence
  SiRNA target sequence
caacaagaataaaggtgtta

SEQ ID NO: 197173 - DNA, 20 bp, Artificial sequence
  SiRNA target sequence
aacaagaataaaggtgttaa

SEQ ID NO: 197174 - DNA, 20 bp, Artificial sequence
  SiRNA target sequence
acaagaataaaggtgttaag

SEQ ID NO: 197175 - DNA, 20 bp, Artificial sequence
  SiRNA target sequence
caagaataaaggtgttaaga

SEQ ID NO: 197176 - DNA, 20 bp, Artificial sequence
  SiRNA target sequence
aagaataaaggtgttaagag

SEQ ID NO: 197177 - DNA, 20 bp, Artificial sequence
  SiRNA target sequence
agaataaaggtgttaagagt

SEQ ID NO: 197178 - DNA, 20 bp, Artificial sequence
  SiRNA target sequence
gaataaaggtgttaagagtc

SEQ ID NO: 197179 - DNA, 20 bp, Artificial sequence
  SiRNA target sequence
aataaaggtgttaagagtcc

SEQ ID NO: 197180 - DNA, 20 bp, Artificial sequence
  SiRNA target sequence
ataaaggtgttaagagtccc

SEQ ID NO: 197181 - DNA, 20 bp, Artificial sequence
  SiRNA target sequence
taaaggtgttaagagtccca

SEQ ID NO: 197182 - DNA, 20 bp, Artificial sequence
  SiRNA target sequence
aaaggtgttaagagtcccat

SEQ ID NO: 197183 - DNA, 20 bp, Artificial sequence
  SiRNA target sequence
aaggtgttaagagtcccata

SEQ ID NO: 197184 - DNA, 20 bp, Artificial sequence
  SiRNA target sequence
aggtgttaagagtcccatag

SEQ ID NO: 197185 - DNA, 20 bp, Artificial sequence
  SiRNA target sequence
ggtgttaagagtcccatagt

SEQ ID NO: 197186 - DNA, 20 bp, Artificial sequence
  SiRNA target sequence
gtgttaagagtcccatagta

SEQ ID NO: 197187 - DNA, 20 bp, Artificial sequence
  SiRNA target sequence
tgttaagagtcccatagtaa

SEQ ID NO: 197188 - DNA, 20 bp, Artificial sequence
  SiRNA target sequence
gttaagagtcccatagtaat

SEQ ID NO: 197189 - DNA, 20 bp, Artificial sequence
  SiRNA target sequence
ttaagagtcccatagtaatc

SEQ ID NO: 197190 - DNA, 20 bp, Artificial sequence
  SiRNA target sequence
taagagtcccatagtaatcc

SEQ ID NO: 197191 - DNA, 20 bp, Artificial sequence
  SiRNA target sequence
aagagtcccatagtaatcca

SEQ ID NO: 197192 - DNA, 20 bp, Artificial sequence
  SiRNA target sequence
agagtcccatagtaatccat

SEQ ID NO: 197193 - DNA, 20 bp, Artificial sequence
  SiRNA target sequence
gagtcccatagtaatccatc

SEQ ID NO: 197194 - DNA, 20 bp, Artificial sequence
  SiRNA target sequence
agtcccatagtaatccatcc

SEQ ID NO: 197195 - DNA, 20 bp, Artificial sequence
  SiRNA target sequence
gtcccatagtaatccatcca

SEQ ID NO: 197196 - DNA, 20 bp, Artificial sequence
  SiRNA target sequence
tcccatagtaatccatccac

SEQ ID NO: 197197 - DNA, 20 bp, Artificial sequence
  SiRNA target sequence
cccatagtaatccatccact

SEQ ID NO: 197198 - DNA, 20 bp, Artificial sequence
  SiRNA target sequence
ccatagtaatccatccacta

SEQ ID NO: 197199 - DNA, 20 bp, Artificial sequence
  SiRNA target sequence
catagtaatccatccactac

SEQ ID NO: 197200 - DNA, 20 bp, Artificial sequence
  SiRNA target sequence
atagtaatccatccactact

SEQ ID NO: 197201 - DNA, 20 bp, Artificial sequence
  SiRNA target sequence
tagtaatccatccactactt

SEQ ID NO: 197202 - DNA, 20 bp, Artificial sequence
  SiRNA target sequence
agtaatccatccactacttt

SEQ ID NO: 197203 - DNA, 20 bp, Artificial sequence
  SiRNA target sequence
gtaatccatccactactttc

SEQ ID NO: 197204 - DNA, 20 bp, Artificial sequence
  SiRNA target sequence
taatccatccactactttct

SEQ ID NO: 197205 - DNA, 20 bp, Artificial sequence
  SiRNA target sequence
aatccatccactactttcta

SEQ ID NO: 197206 - DNA, 20 bp, Artificial sequence
  SiRNA target sequence
atccatccactactttctac

SEQ ID NO: 197207 - DNA, 20 bp, Artificial sequence
  SiRNA target sequence
tccatccactactttctact

SEQ ID NO: 197208 - DNA, 20 bp, Artificial sequence
  SiRNA target sequence
ccatccactactttctacta

SEQ ID NO: 197209 - DNA, 20 bp, Artificial sequence
  SiRNA target sequence
catccactactttctactaa

SEQ ID NO: 197210 - DNA, 20 bp, Artificial sequence
  SiRNA target sequence
atccactactttctactaaa

SEQ ID NO: 197211 - DNA, 20 bp, Artificial sequence
  SiRNA target sequence
tccactactttctactaaag

SEQ ID NO: 197212 - DNA, 20 bp, Artificial sequence
  SiRNA target sequence
ccactactttctactaaagt

SEQ ID NO: 197213 - DNA, 20 bp, Artificial sequence
  SiRNA target sequence
cactactttctactaaagta

SEQ ID NO: 197214 - DNA, 20 bp, Artificial sequence
  SiRNA target sequence
actactttctactaaagtag

SEQ ID NO: 197215 - DNA, 20 bp, Artificial sequence
  SiRNA target sequence
ctactttctactaaagtaga

SEQ ID NO: 197216 - DNA, 20 bp, Artificial sequence
  SiRNA target sequence
tactttctactaaagtagaa

SEQ ID NO: 197217 - DNA, 20 bp, Artificial sequence
  SiRNA target sequence
actttctactaaagtagaaa

SEQ ID NO: 197218 - DNA, 20 bp, Artificial sequence
  SiRNA target sequence
ctttctactaaagtagaaaa

SEQ ID NO: 197219 - DNA, 20 bp, Artificial sequence
  SiRNA target sequence
tttctactaaagtagaaaat

SEQ ID NO: 197220 - DNA, 20 bp, Artificial sequence
  SiRNA target sequence
ttctactaaagtagaaaatg

SEQ ID NO: 197221 - DNA, 20 bp, Artificial sequence
  SiRNA target sequence
tctactaaagtagaaaatgc

SEQ ID NO: 197222 - DNA, 20 bp, Artificial sequence
  SiRNA target sequence
ctactaaagtagaaaatgct

SEQ ID NO: 197223 - DNA, 20 bp, Artificial sequence
  SiRNA target sequence
tactaaagtagaaaatgctg

SEQ ID NO: 197224 - DNA, 20 bp, Artificial sequence
  SiRNA target sequence
actaaagtagaaaatgctga

SEQ ID NO: 197225 - DNA, 20 bp, Artificial sequence
  SiRNA target sequence
ctaaagtagaaaatgctgac

SEQ ID NO: 197226 - DNA, 20 bp, Artificial sequence
  SiRNA target sequence
taaagtagaaaatgctgaca

SEQ ID NO: 197227 - DNA, 20 bp, Artificial sequence
  SiRNA target sequence
aaagtagaaaatgctgacaa

SEQ ID NO: 197228 - DNA, 20 bp, Artificial sequence
  SiRNA target sequence
aagtagaaaatgctgacaaa

SEQ ID NO: 197229 - DNA, 20 bp, Artificial sequence
  SiRNA target sequence
agtagaaaatgctgacaaat

SEQ ID NO: 197230 - DNA, 20 bp, Artificial sequence
  SiRNA target sequence
gtagaaaatgctgacaaatt

SEQ ID NO: 197231 - DNA, 20 bp, Artificial sequence
  SiRNA target sequence
tagaaaatgctgacaaatta

SEQ ID NO: 197232 - DNA, 20 bp, Artificial sequence
  SiRNA target sequence
agaaaatgctgacaaattaa

SEQ ID NO: 197233 - DNA, 20 bp, Artificial sequence
  SiRNA target sequence
gaaaatgctgacaaattaag

SEQ ID NO: 197234 - DNA, 20 bp, Artificial sequence
  SiRNA target sequence
aaaatgctgacaaattaagt

SEQ ID NO: 197235 - DNA, 20 bp, Artificial sequence
  SiRNA target sequence
aaatgctgacaaattaagtg

SEQ ID NO: 197236 - DNA, 20 bp, Artificial sequence
  SiRNA target sequence
aatgctgacaaattaagtgt

SEQ ID NO: 197237 - DNA, 20 bp, Artificial sequence
  SiRNA target sequence
atgctgacaaattaagtgtt

SEQ ID NO: 197238 - DNA, 20 bp, Artificial sequence
  SiRNA target sequence
tgctgacaaattaagtgtta

SEQ ID NO: 197239 - DNA, 20 bp, Artificial sequence
  SiRNA target sequence
gctgacaaattaagtgttat

SEQ ID NO: 197240 - DNA, 20 bp, Artificial sequence
  SiRNA target sequence
ctgacaaattaagtgttatt

SEQ ID NO: 197241 - DNA, 20 bp, Artificial sequence
  SiRNA target sequence
tgacaaattaagtgttatta

SEQ ID NO: 197242 - DNA, 20 bp, Artificial sequence
  SiRNA target sequence
gacaaattaagtgttattac

SEQ ID NO: 197243 - DNA, 20 bp, Artificial sequence
  SiRNA target sequence
acaaattaagtgttattaca

SEQ ID NO: 197244 - DNA, 20 bp, Artificial sequence
  SiRNA target sequence
caaattaagtgttattacag

SEQ ID NO: 197245 - DNA, 20 bp, Artificial sequence
  SiRNA target sequence
aaattaagtgttattacagt

SEQ ID NO: 197246 - DNA, 20 bp, Artificial sequence
  SiRNA target sequence
aattaagtgttattacagta

SEQ ID NO: 197247 - DNA, 20 bp, Artificial sequence
  SiRNA target sequence
attaagtgttattacagtaa

SEQ ID NO: 197248 - DNA, 20 bp, Artificial sequence
  SiRNA target sequence
ttaagtgttattacagtaac

SEQ ID NO: 197249 - DNA, 20 bp, Artificial sequence
  SiRNA target sequence
taagtgttattacagtaact

SEQ ID NO: 197250 - DNA, 20 bp, Artificial sequence
  SiRNA target sequence
aagtgttattacagtaactg

SEQ ID NO: 197251 - DNA, 20 bp, Artificial sequence
  SiRNA target sequence
agtgttattacagtaactgc

SEQ ID NO: 197252 - DNA, 20 bp, Artificial sequence
  SiRNA target sequence
gtgttattacagtaactgct

SEQ ID NO: 197253 - DNA, 20 bp, Artificial sequence
  SiRNA target sequence
tgttattacagtaactgcta

SEQ ID NO: 197254 - DNA, 20 bp, Artificial sequence
  SiRNA target sequence
gttattacagtaactgctac

SEQ ID NO: 197255 - DNA, 20 bp, Artificial sequence
  SiRNA target sequence
ttattacagtaactgctacc

SEQ ID NO: 197256 - DNA, 20 bp, Artificial sequence
  SiRNA target sequence
tattacagtaactgctacca

SEQ ID NO: 197257 - DNA, 20 bp, Artificial sequence
  SiRNA target sequence
attacagtaactgctaccaa

SEQ ID NO: 197258 - DNA, 20 bp, Artificial sequence
  SiRNA target sequence
ttacagtaactgctaccaat

SEQ ID NO: 197259 - DNA, 20 bp, Artificial sequence
  SiRNA target sequence
tacagtaactgctaccaata

SEQ ID NO: 197260 - DNA, 20 bp, Artificial sequence
  SiRNA target sequence
acagtaactgctaccaatat

SEQ ID NO: 197261 - DNA, 20 bp, Artificial sequence
  SiRNA target sequence
cagtaactgctaccaatatt

SEQ ID NO: 197262 - DNA, 20 bp, Artificial sequence
  SiRNA target sequence
agtaactgctaccaatattt

SEQ ID NO: 197263 - DNA, 20 bp, Artificial sequence
  SiRNA target sequence
gtaactgctaccaatatttg

SEQ ID NO: 197264 - DNA, 20 bp, Artificial sequence
  SiRNA target sequence
taactgctaccaatatttga

SEQ ID NO: 197265 - DNA, 20 bp, Artificial sequence
  SiRNA target sequence
aactgctaccaatatttgat

SEQ ID NO: 197266 - DNA, 20 bp, Artificial sequence
  SiRNA target sequence
actgctaccaatatttgatc

SEQ ID NO: 197267 - DNA, 20 bp, Artificial sequence
  SiRNA target sequence
ctgctaccaatatttgatct

SEQ ID NO: 197268 - DNA, 20 bp, Artificial sequence
  SiRNA target sequence
tgctaccaatatttgatcta

SEQ ID NO: 197269 - DNA, 20 bp, Artificial sequence
  SiRNA target sequence
gctaccaatatttgatctat

SEQ ID NO: 197270 - DNA, 20 bp, Artificial sequence
  SiRNA target sequence
ctaccaatatttgatctatt

SEQ ID NO: 197271 - DNA, 20 bp, Artificial sequence
  SiRNA target sequence
taccaatatttgatctattg

SEQ ID NO: 197272 - DNA, 20 bp, Artificial sequence
  SiRNA target sequence
accaatatttgatctattgt

SEQ ID NO: 197273 - DNA, 20 bp, Artificial sequence
  SiRNA target sequence
ccaatatttgatctattgta

SEQ ID NO: 197274 - DNA, 20 bp, Artificial sequence
  SiRNA target sequence
caatatttgatctattgtat

SEQ ID NO: 197275 - DNA, 20 bp, Artificial sequence
  SiRNA target sequence
aatatttgatctattgtatt

SEQ ID NO: 197276 - DNA, 20 bp, Artificial sequence
  SiRNA target sequence
atatttgatctattgtatta

SEQ ID NO: 197277 - DNA, 20 bp, Artificial sequence
  SiRNA target sequence
tatttgatctattgtattaa

SEQ ID NO: 197278 - DNA, 20 bp, Artificial sequence
  SiRNA target sequence
atttgatctattgtattaaa

SEQ ID NO: 197279 - DNA, 20 bp, Artificial sequence
  SiRNA target sequence
tttgatctattgtattaaat

SEQ ID NO: 197280 - DNA, 20 bp, Artificial sequence
  SiRNA target sequence
ttgatctattgtattaaatt

SEQ ID NO: 197281 - DNA, 20 bp, Artificial sequence
  SiRNA target sequence
tgatctattgtattaaattt

SEQ ID NO: 197282 - DNA, 20 bp, Artificial sequence
  SiRNA target sequence
gatctattgtattaaatttg

SEQ ID NO: 197283 - DNA, 20 bp, Artificial sequence
  SiRNA target sequence
atctattgtattaaatttgc

SEQ ID NO: 197284 - DNA, 20 bp, Artificial sequence
  SiRNA target sequence
tctattgtattaaatttgcc

SEQ ID NO: 197285 - DNA, 20 bp, Artificial sequence
  SiRNA target sequence
ctattgtattaaatttgccg

SEQ ID NO: 197286 - DNA, 20 bp, Artificial sequence
  SiRNA target sequence
tattgtattaaatttgccgg

SEQ ID NO: 197287 - DNA, 20 bp, Artificial sequence
  SiRNA target sequence
attgtattaaatttgccgga

SEQ ID NO: 197288 - DNA, 20 bp, Artificial sequence
  SiRNA target sequence
ttgtattaaatttgccggag

SEQ ID NO: 197289 - DNA, 20 bp, Artificial sequence
  SiRNA target sequence
tgtattaaatttgccggagt

SEQ ID NO: 197290 - DNA, 20 bp, Artificial sequence
  SiRNA target sequence
gtattaaatttgccggagta

SEQ ID NO: 197291 - DNA, 20 bp, Artificial sequence
  SiRNA target sequence
tattaaatttgccggagtat

SEQ ID NO: 197292 - DNA, 20 bp, Artificial sequence
  SiRNA target sequence
attaaatttgccggagtatt

SEQ ID NO: 197293 - DNA, 20 bp, Artificial sequence
  SiRNA target sequence
ttaaatttgccggagtattc

SEQ ID NO: 197294 - DNA, 20 bp, Artificial sequence
  SiRNA target sequence
taaatttgccggagtattct

SEQ ID NO: 197295 - DNA, 20 bp, Artificial sequence
  SiRNA target sequence
aaatttgccggagtattctc

SEQ ID NO: 197296 - DNA, 20 bp, Artificial sequence
  SiRNA target sequence
aatttgccggagtattctcc

SEQ ID NO: 197297 - DNA, 20 bp, Artificial sequence
  SiRNA target sequence
atttgccggagtattctcct

SEQ ID NO: 197298 - DNA, 20 bp, Artificial sequence
  SiRNA target sequence
tttgccggagtattctccta

SEQ ID NO: 197299 - DNA, 20 bp, Artificial sequence
  SiRNA target sequence
ttgccggagtattctcctac

SEQ ID NO: 197300 - DNA, 20 bp, Artificial sequence
  SiRNA target sequence
tgccggagtattctcctacc

SEQ ID NO: 197301 - DNA, 20 bp, Artificial sequence
  SiRNA target sequence
gccggagtattctcctacct

SEQ ID NO: 197302 - DNA, 20 bp, Artificial sequence
  SiRNA target sequence
ccggagtattctcctacctc

SEQ ID NO: 197303 - DNA, 20 bp, Artificial sequence
  SiRNA target sequence
cggagtattctcctacctct

SEQ ID NO: 197304 - DNA, 20 bp, Artificial sequence
  SiRNA target sequence
ggagtattctcctacctcta

SEQ ID NO: 197305 - DNA, 20 bp, Artificial sequence
  SiRNA target sequence
gagtattctcctacctctaa

SEQ ID NO: 197306 - DNA, 20 bp, Artificial sequence
  SiRNA target sequence
agtattctcctacctctaat

SEQ ID NO: 197307 - DNA, 20 bp, Artificial sequence
  SiRNA target sequence
gtattctcctacctctaatc

SEQ ID NO: 197308 - DNA, 20 bp, Artificial sequence
  SiRNA target sequence
tattctcctacctctaatcc

SEQ ID NO: 197309 - DNA, 20 bp, Artificial sequence
  SiRNA target sequence
attctcctacctctaatcct

SEQ ID NO: 197310 - DNA, 20 bp, Artificial sequence
  SiRNA target sequence
ttctcctacctctaatccta

SEQ ID NO: 197311 - DNA, 20 bp, Artificial sequence
  SiRNA target sequence
tctcctacctctaatcctaa

SEQ ID NO: 197312 - DNA, 20 bp, Artificial sequence
  SiRNA target sequence
ctcctacctctaatcctaaa

SEQ ID NO: 197313 - DNA, 20 bp, Artificial sequence
  SiRNA target sequence
tcctacctctaatcctaaac

SEQ ID NO: 197314 - DNA, 20 bp, Artificial sequence
  SiRNA target sequence
cctacctctaatcctaaact

SEQ ID NO: 197315 - DNA, 20 bp, Artificial sequence
  SiRNA target sequence
ctacctctaatcctaaactt

SEQ ID NO: 197316 - DNA, 20 bp, Artificial sequence
  SiRNA target sequence
tacctctaatcctaaacttt

SEQ ID NO: 197317 - DNA, 20 bp, Artificial sequence
  SiRNA target sequence
acctctaatcctaaactttt

SEQ ID NO: 197318 - DNA, 20 bp, Artificial sequence
  SiRNA target sequence
cctctaatcctaaacttttt

SEQ ID NO: 197319 - DNA, 20 bp, Artificial sequence
  SiRNA target sequence
ctctaatcctaaactttttg

SEQ ID NO: 197320 - DNA, 20 bp, Artificial sequence
  SiRNA target sequence
tctaatcctaaactttttga

SEQ ID NO: 197321 - DNA, 20 bp, Artificial sequence
  SiRNA target sequence
ctaatcctaaactttttgac

SEQ ID NO: 197322 - DNA, 20 bp, Artificial sequence
  SiRNA target sequence
taatcctaaactttttgacg

SEQ ID NO: 197323 - DNA, 20 bp, Artificial sequence
  SiRNA target sequence
aatcctaaactttttgacgc

SEQ ID NO: 197324 - DNA, 20 bp, Artificial sequence
  SiRNA target sequence
atcctaaactttttgacgca

SEQ ID NO: 197325 - DNA, 20 bp, Artificial sequence
  SiRNA target sequence
tcctaaactttttgacgcag

SEQ ID NO: 197326 - DNA, 20 bp, Artificial sequence
  SiRNA target sequence
cctaaactttttgacgcagc

SEQ ID NO: 197327 - DNA, 20 bp, Artificial sequence
  SiRNA target sequence
ctaaactttttgacgcagct

SEQ ID NO: 197328 - DNA, 20 bp, Artificial sequence
  SiRNA target sequence
taaactttttgacgcagctt

SEQ ID NO: 197329 - DNA, 20 bp, Artificial sequence
  SiRNA target sequence
aaactttttgacgcagcttt

SEQ ID NO: 197330 - DNA, 20 bp, Artificial sequence
  SiRNA target sequence
aactttttgacgcagcttta

SEQ ID NO: 197331 - DNA, 20 bp, Artificial sequence
  SiRNA target sequence
actttttgacgcagctttaa

SEQ ID NO: 197332 - DNA, 20 bp, Artificial sequence
  SiRNA target sequence
ctttttgacgcagctttaat

SEQ ID NO: 197333 - DNA, 20 bp, Artificial sequence
  SiRNA target sequence
tttttgacgcagctttaatt

SEQ ID NO: 197334 - DNA, 20 bp, Artificial sequence
  SiRNA target sequence
ttttgacgcagctttaattc

SEQ ID NO: 197335 - DNA, 20 bp, Artificial sequence
  SiRNA target sequence
tttgacgcagctttaattcc

SEQ ID NO: 197336 - DNA, 20 bp, Artificial sequence
  SiRNA target sequence
ttgacgcagctttaattcct

SEQ ID NO: 197337 - DNA, 20 bp, Artificial sequence
  SiRNA target sequence
tgacgcagctttaattcctg

SEQ ID NO: 197338 - DNA, 20 bp, Artificial sequence
  SiRNA target sequence
gacgcagctttaattcctgc

SEQ ID NO: 197339 - DNA, 20 bp, Artificial sequence
  SiRNA target sequence
acgcagctttaattcctgct

SEQ ID NO: 197340 - DNA, 20 bp, Artificial sequence
  SiRNA target sequence
cgcagctttaattcctgctt

SEQ ID NO: 197341 - DNA, 20 bp, Artificial sequence
  SiRNA target sequence
gcagctttaattcctgcttt

SEQ ID NO: 197342 - DNA, 20 bp, Artificial sequence
  SiRNA target sequence
cagctttaattcctgcttta

SEQ ID NO: 197343 - DNA, 20 bp, Artificial sequence
  SiRNA target sequence
agctttaattcctgctttat

SEQ ID NO: 197344 - DNA, 20 bp, Artificial sequence
  SiRNA target sequence
gctttaattcctgctttata

SEQ ID NO: 197345 - DNA, 20 bp, Artificial sequence
  SiRNA target sequence
ctttaattcctgctttatag

SEQ ID NO: 197346 - DNA, 20 bp, Artificial sequence
  SiRNA target sequence
tttaattcctgctttataga

SEQ ID NO: 197347 - DNA, 20 bp, Artificial sequence
  SiRNA target sequence
ttaattcctgctttatagac

SEQ ID NO: 197348 - DNA, 20 bp, Artificial sequence
  SiRNA target sequence
taattcctgctttatagaca

SEQ ID NO: 197349 - DNA, 20 bp, Artificial sequence
  SiRNA target sequence
aattcctgctttatagacag

SEQ ID NO: 197350 - DNA, 20 bp, Artificial sequence
  SiRNA target sequence
attcctgctttatagacaga

SEQ ID NO: 197351 - DNA, 20 bp, Artificial sequence
  SiRNA target sequence
ttcctgctttatagacagat

SEQ ID NO: 197352 - DNA, 20 bp, Artificial sequence
  SiRNA target sequence
tcctgctttatagacagatt

SEQ ID NO: 197353 - DNA, 20 bp, Artificial sequence
  SiRNA target sequence
cctgctttatagacagattc

SEQ ID NO: 197354 - DNA, 20 bp, Artificial sequence
  SiRNA target sequence
ctgctttatagacagattca

SEQ ID NO: 197355 - DNA, 20 bp, Artificial sequence
  SiRNA target sequence
tgctttatagacagattcaa

SEQ ID NO: 197356 - DNA, 20 bp, Artificial sequence
  SiRNA target sequence
gctttatagacagattcaat

SEQ ID NO: 197357 - DNA, 20 bp, Artificial sequence
  SiRNA target sequence
ctttatagacagattcaatt

SEQ ID NO: 197358 - DNA, 20 bp, Artificial sequence
  SiRNA target sequence
tttatagacagattcaatta

SEQ ID NO: 197359 - DNA, 20 bp, Artificial sequence
  SiRNA target sequence
ttatagacagattcaattaa

SEQ ID NO: 197360 - DNA, 20 bp, Artificial sequence
  SiRNA target sequence
tatagacagattcaattaaa

SEQ ID NO: 197361 - DNA, 20 bp, Artificial sequence
  SiRNA target sequence
atagacagattcaattaaat

SEQ ID NO: 197362 - DNA, 20 bp, Artificial sequence
  SiRNA target sequence
tagacagattcaattaaatt

SEQ ID NO: 197363 - DNA, 20 bp, Artificial sequence
  SiRNA target sequence
agacagattcaattaaatta

SEQ ID NO: 197364 - DNA, 20 bp, Artificial sequence
  SiRNA target sequence
gacagattcaattaaattaa

SEQ ID NO: 197365 - DNA, 20 bp, Artificial sequence
  SiRNA target sequence
acagattcaattaaattaaa

SEQ ID NO: 197366 - DNA, 20 bp, Artificial sequence
  SiRNA target sequence
cagattcaattaaattaaat

SEQ ID NO: 197367 - DNA, 20 bp, Artificial sequence
  SiRNA target sequence
agattcaattaaattaaatg

SEQ ID NO: 197368 - DNA, 20 bp, Artificial sequence
  SiRNA target sequence
gattcaattaaattaaatgt

SEQ ID NO: 197369 - DNA, 20 bp, Artificial sequence
  SiRNA target sequence
attcaattaaattaaatgtt

SEQ ID NO: 197370 - DNA, 20 bp, Artificial sequence
  SiRNA target sequence
ttcaattaaattaaatgtta

SEQ ID NO: 197371 - DNA, 20 bp, Artificial sequence
  SiRNA target sequence
tcaattaaattaaatgttat

SEQ ID NO: 197372 - DNA, 20 bp, Artificial sequence
  SiRNA target sequence
caattaaattaaatgttata

SEQ ID NO: 197373 - DNA, 20 bp, Artificial sequence
  SiRNA target sequence
aattaaattaaatgttatat

SEQ ID NO: 197374 - DNA, 20 bp, Artificial sequence
  SiRNA target sequence
attaaattaaatgttatatt

SEQ ID NO: 197375 - DNA, 20 bp, Artificial sequence
  SiRNA target sequence
ttaaattaaatgttatattg

SEQ ID NO: 197376 - DNA, 20 bp, Artificial sequence
  SiRNA target sequence
taaattaaatgttatattgt

SEQ ID NO: 197377 - DNA, 20 bp, Artificial sequence
  SiRNA target sequence
aaattaaatgttatattgta

SEQ ID NO: 197378 - DNA, 20 bp, Artificial sequence
  SiRNA target sequence
aattaaatgttatattgtaa

SEQ ID NO: 197379 - DNA, 20 bp, Artificial sequence
  SiRNA target sequence
attaaatgttatattgtaaa

SEQ ID NO: 197380 - DNA, 20 bp, Artificial sequence
  SiRNA target sequence
ttaaatgttatattgtaaaa

SEQ ID NO: 197381 - DNA, 20 bp, Artificial sequence
  SiRNA target sequence
taaatgttatattgtaaaaa

SEQ ID NO: 197382 - DNA, 20 bp, Artificial sequence
  SiRNA target sequence
aaatgttatattgtaaaaaa

SEQ ID NO: 197383 - DNA, 20 bp, Artificial sequence
  SiRNA target sequence
aatgttatattgtaaaaaaa

SEQ ID NO: 197384 - DNA, 20 bp, Artificial sequence
  SiRNA target sequence
atgttatattgtaaaaaaag

SEQ ID NO: 197385 - DNA, 20 bp, Artificial sequence
  SiRNA target sequence
tgttatattgtaaaaaaaga

SEQ ID NO: 197386 - DNA, 20 bp, Artificial sequence
  SiRNA target sequence
gttatattgtaaaaaaagac

SEQ ID NO: 197387 - DNA, 20 bp, Artificial sequence
  SiRNA target sequence
ttatattgtaaaaaaagact

SEQ ID NO: 197388 - DNA, 20 bp, Artificial sequence
  SiRNA target sequence
tatattgtaaaaaaagacta

SEQ ID NO: 197389 - DNA, 20 bp, Artificial sequence
  SiRNA target sequence
atattgtaaaaaaagactat

SEQ ID NO: 197390 - DNA, 20 bp, Artificial sequence
  SiRNA target sequence
tattgtaaaaaaagactatt

SEQ ID NO: 197391 - DNA, 20 bp, Artificial sequence
  SiRNA target sequence
attgtaaaaaaagactatta

SEQ ID NO: 197392 - DNA, 20 bp, Artificial sequence
  SiRNA target sequence
ttgtaaaaaaagactattat

SEQ ID NO: 197393 - DNA, 20 bp, Artificial sequence
  SiRNA target sequence
tgtaaaaaaagactattata

SEQ ID NO: 197394 - DNA, 20 bp, Artificial sequence
  SiRNA target sequence
gtaaaaaaagactattatac

SEQ ID NO: 197395 - DNA, 20 bp, Artificial sequence
  SiRNA target sequence
taaaaaaagactattataca

SEQ ID NO: 197396 - DNA, 20 bp, Artificial sequence
  SiRNA target sequence
aaaaaaagactattatacaa

SEQ ID NO: 197397 - DNA, 20 bp, Artificial sequence
  SiRNA target sequence
aaaaaagactattatacaaa

SEQ ID NO: 197398 - DNA, 20 bp, Artificial sequence
  SiRNA target sequence
aaaaagactattatacaaag

SEQ ID NO: 197399 - DNA, 20 bp, Artificial sequence
  SiRNA target sequence
aaaagactattatacaaagt

SEQ ID NO: 197400 - DNA, 20 bp, Artificial sequence
  SiRNA target sequence
aaagactattatacaaagtg

SEQ ID NO: 197401 - DNA, 20 bp, Artificial sequence
  SiRNA target sequence
aagactattatacaaagtga

SEQ ID NO: 197402 - DNA, 20 bp, Artificial sequence
  SiRNA target sequence
agactattatacaaagtgac

SEQ ID NO: 197403 - DNA, 20 bp, Artificial sequence
  SiRNA target sequence
gactattatacaaagtgaca

SEQ ID NO: 197404 - DNA, 20 bp, Artificial sequence
  SiRNA target sequence
actattatacaaagtgacat

SEQ ID NO: 197405 - DNA, 20 bp, Artificial sequence
  SiRNA target sequence
ctattatacaaagtgacatt

SEQ ID NO: 197406 - DNA, 20 bp, Artificial sequence
  SiRNA target sequence
tattatacaaagtgacatta

SEQ ID NO: 197407 - DNA, 20 bp, Artificial sequence
  SiRNA target sequence
attatacaaagtgacattaa

SEQ ID NO: 197408 - DNA, 20 bp, Artificial sequence
  SiRNA target sequence
ttatacaaagtgacattaat

SEQ ID NO: 197409 - DNA, 20 bp, Artificial sequence
  SiRNA target sequence
tatacaaagtgacattaata

SEQ ID NO: 197410 - DNA, 20 bp, Artificial sequence
  SiRNA target sequence
atacaaagtgacattaataa

SEQ ID NO: 197411 - DNA, 20 bp, Artificial sequence
  SiRNA target sequence
tacaaagtgacattaataat

SEQ ID NO: 197412 - DNA, 20 bp, Artificial sequence
  SiRNA target sequence
acaaagtgacattaataatt

SEQ ID NO: 197413 - DNA, 20 bp, Artificial sequence
  SiRNA target sequence
caaagtgacattaataattt

SEQ ID NO: 197414 - DNA, 20 bp, Artificial sequence
  SiRNA target sequence
aaagtgacattaataatttt

SEQ ID NO: 197415 - DNA, 20 bp, Artificial sequence
  SiRNA target sequence
aagtgacattaataattttg

SEQ ID NO: 197416 - DNA, 20 bp, Artificial sequence
  SiRNA target sequence
agtgacattaataattttga

SEQ ID NO: 197417 - DNA, 20 bp, Artificial sequence
  SiRNA target sequence
gtgacattaataattttgat

SEQ ID NO: 197418 - DNA, 20 bp, Artificial sequence
  SiRNA target sequence
tgacattaataattttgatt

SEQ ID NO: 197419 - DNA, 20 bp, Artificial sequence
  SiRNA target sequence
gacattaataattttgattt

SEQ ID NO: 197420 - DNA, 20 bp, Artificial sequence
  SiRNA target sequence
acattaataattttgatttc

SEQ ID NO: 197421 - DNA, 20 bp, Artificial sequence
  SiRNA target sequence
cattaataattttgatttca

SEQ ID NO: 197422 - DNA, 20 bp, Artificial sequence
  SiRNA target sequence
attaataattttgatttcat

SEQ ID NO: 197423 - DNA, 20 bp, Artificial sequence
  SiRNA target sequence
ttaataattttgatttcatc

SEQ ID NO: 197424 - DNA, 20 bp, Artificial sequence
  SiRNA target sequence
taataattttgatttcatca

SEQ ID NO: 197425 - DNA, 20 bp, Artificial sequence
  SiRNA target sequence
aataattttgatttcatcat

SEQ ID NO: 197426 - DNA, 20 bp, Artificial sequence
  SiRNA target sequence
ataattttgatttcatcatt

SEQ ID NO: 197427 - DNA, 20 bp, Artificial sequence
  SiRNA target sequence
taattttgatttcatcatta

SEQ ID NO: 197428 - DNA, 20 bp, Artificial sequence
  SiRNA target sequence
aattttgatttcatcattat

SEQ ID NO: 197429 - DNA, 20 bp, Artificial sequence
  SiRNA target sequence
attttgatttcatcattata

SEQ ID NO: 197430 - DNA, 20 bp, Artificial sequence
  SiRNA target sequence
ttttgatttcatcattatac

SEQ ID NO: 197431 - DNA, 20 bp, Artificial sequence
  SiRNA target sequence
tttgatttcatcattatact

SEQ ID NO: 197432 - DNA, 20 bp, Artificial sequence
  SiRNA target sequence
ttgatttcatcattatacta

SEQ ID NO: 197433 - DNA, 20 bp, Artificial sequence
  SiRNA target sequence
tgatttcatcattatactaa

SEQ ID NO: 197434 - DNA, 20 bp, Artificial sequence
  SiRNA target sequence
gatttcatcattatactaat

SEQ ID NO: 197435 - DNA, 20 bp, Artificial sequence
  SiRNA target sequence
atttcatcattatactaata

SEQ ID NO: 197436 - DNA, 20 bp, Artificial sequence
  SiRNA target sequence
tttcatcattatactaatac

SEQ ID NO: 197437 - DNA, 20 bp, Artificial sequence
  SiRNA target sequence
ttcatcattatactaatacc

SEQ ID NO: 197438 - DNA, 20 bp, Artificial sequence
  SiRNA target sequence
tcatcattatactaatacct

SEQ ID NO: 197439 - DNA, 20 bp, Artificial sequence
  SiRNA target sequence
catcattatactaatacctt

SEQ ID NO: 197440 - DNA, 20 bp, Artificial sequence
  SiRNA target sequence
atcattatactaataccttc

SEQ ID NO: 197441 - DNA, 20 bp, Artificial sequence
  SiRNA target sequence
tcattatactaataccttcg

SEQ ID NO: 197442 - DNA, 20 bp, Artificial sequence
  SiRNA target sequence
cattatactaataccttcgg

SEQ ID NO: 197443 - DNA, 20 bp, Artificial sequence
  SiRNA target sequence
attatactaataccttcgga

SEQ ID NO: 197444 - DNA, 20 bp, Artificial sequence
  SiRNA target sequence
ttatactaataccttcggag

SEQ ID NO: 197445 - DNA, 20 bp, Artificial sequence
  SiRNA target sequence
tatactaataccttcggaga

SEQ ID NO: 197446 - DNA, 20 bp, Artificial sequence
  SiRNA target sequence
atactaataccttcggagaa

SEQ ID NO: 197447 - DNA, 20 bp, Artificial sequence
  SiRNA target sequence
tactaataccttcggagaaa

SEQ ID NO: 197448 - DNA, 20 bp, Artificial sequence
  SiRNA target sequence
actaataccttcggagaaac

SEQ ID NO: 197449 - DNA, 20 bp, Artificial sequence
  SiRNA target sequence
ctaataccttcggagaaacc

SEQ ID NO: 197450 - DNA, 20 bp, Artificial sequence
  SiRNA target sequence
taataccttcggagaaacct

SEQ ID NO: 197451 - DNA, 20 bp, Artificial sequence
  SiRNA target sequence
aataccttcggagaaaccta

SEQ ID NO: 197452 - DNA, 20 bp, Artificial sequence
  SiRNA target sequence
ataccttcggagaaacctac

SEQ ID NO: 197453 - DNA, 20 bp, Artificial sequence
  SiRNA target sequence
taccttcggagaaacctaca

SEQ ID NO: 197454 - DNA, 20 bp, Artificial sequence
  SiRNA target sequence
accttcggagaaacctacac

SEQ ID NO: 197455 - DNA, 20 bp, Artificial sequence
  SiRNA target sequence
ccttcggagaaacctacact

SEQ ID NO: 197456 - DNA, 20 bp, Artificial sequence
  SiRNA target sequence
cttcggagaaacctacacta

SEQ ID NO: 197457 - DNA, 20 bp, Artificial sequence
  SiRNA target sequence
ttcggagaaacctacactaa

SEQ ID NO: 197458 - DNA, 20 bp, Artificial sequence
  SiRNA target sequence
tcggagaaacctacactaac

SEQ ID NO: 197459 - DNA, 20 bp, Artificial sequence
  SiRNA target sequence
cggagaaacctacactaact

SEQ ID NO: 197460 - DNA, 20 bp, Artificial sequence
  SiRNA target sequence
ggagaaacctacactaactt

SEQ ID NO: 197461 - DNA, 20 bp, Artificial sequence
  SiRNA target sequence
gagaaacctacactaacttt

SEQ ID NO: 197462 - DNA, 20 bp, Artificial sequence
  SiRNA target sequence
agaaacctacactaactttt

SEQ ID NO: 197463 - DNA, 20 bp, Artificial sequence
  SiRNA target sequence
gaaacctacactaacttttt

SEQ ID NO: 197464 - DNA, 20 bp, Artificial sequence
  SiRNA target sequence
aaacctacactaactttttg

SEQ ID NO: 197465 - DNA, 20 bp, Artificial sequence
  SiRNA target sequence
aacctacactaactttttgt

SEQ ID NO: 197466 - DNA, 20 bp, Artificial sequence
  SiRNA target sequence
acctacactaactttttgtt

SEQ ID NO: 197467 - DNA, 20 bp, Artificial sequence
  SiRNA target sequence
cctacactaactttttgttt

SEQ ID NO: 197468 - DNA, 20 bp, Artificial sequence
  SiRNA target sequence
ctacactaactttttgtttc

SEQ ID NO: 197469 - DNA, 20 bp, Artificial sequence
  SiRNA target sequence
tacactaactttttgtttct

SEQ ID NO: 197470 - DNA, 20 bp, Artificial sequence
  SiRNA target sequence
acactaactttttgtttctt

SEQ ID NO: 197471 - DNA, 20 bp, Artificial sequence
  SiRNA target sequence
cactaactttttgtttcttt

SEQ ID NO: 197472 - DNA, 20 bp, Artificial sequence
  SiRNA target sequence
actaactttttgtttctttt

SEQ ID NO: 197473 - DNA, 20 bp, Artificial sequence
  SiRNA target sequence
ctaactttttgtttcttttt

SEQ ID NO: 197474 - DNA, 20 bp, Artificial sequence
  SiRNA target sequence
taactttttgtttctttttt

SEQ ID NO: 197475 - DNA, 20 bp, Artificial sequence
  SiRNA target sequence
aactttttgtttctttttta

SEQ ID NO: 197476 - DNA, 20 bp, Artificial sequence
  SiRNA target sequence
actttttgtttcttttttat

SEQ ID NO: 197477 - DNA, 20 bp, Artificial sequence
  SiRNA target sequence
ctttttgtttcttttttatc

SEQ ID NO: 197478 - DNA, 20 bp, Artificial sequence
  SiRNA target sequence
tttttgtttcttttttatcg

SEQ ID NO: 197479 - DNA, 20 bp, Artificial sequence
  SiRNA target sequence
ttttgtttcttttttatcgt

SEQ ID NO: 197480 - DNA, 20 bp, Artificial sequence
  SiRNA target sequence
tttgtttcttttttatcgta

SEQ ID NO: 197481 - DNA, 20 bp, Artificial sequence
  SiRNA target sequence
ttgtttcttttttatcgtat

SEQ ID NO: 197482 - DNA, 20 bp, Artificial sequence
  SiRNA target sequence
tgtttcttttttatcgtatt

SEQ ID NO: 197483 - DNA, 20 bp, Artificial sequence
  SiRNA target sequence
gtttcttttttatcgtatta

SEQ ID NO: 197484 - DNA, 20 bp, Artificial sequence
  SiRNA target sequence
tttcttttttatcgtattag

SEQ ID NO: 197485 - DNA, 20 bp, Artificial sequence
  SiRNA target sequence
ttcttttttatcgtattaga

SEQ ID NO: 197486 - DNA, 20 bp, Artificial sequence
  SiRNA target sequence
tcttttttatcgtattagaa

SEQ ID NO: 197487 - DNA, 20 bp, Artificial sequence
  SiRNA target sequence
cttttttatcgtattagaag

SEQ ID NO: 197488 - DNA, 20 bp, Artificial sequence
  SiRNA target sequence
ttttttatcgtattagaagg

SEQ ID NO: 197489 - DNA, 20 bp, Artificial sequence
  SiRNA target sequence
tttttatcgtattagaaggt

SEQ ID NO: 197490 - DNA, 20 bp, Artificial sequence
  SiRNA target sequence
ttttatcgtattagaaggta

SEQ ID NO: 197491 - DNA, 20 bp, Artificial sequence
  SiRNA target sequence
tttatcgtattagaaggtat

SEQ ID NO: 197492 - DNA, 20 bp, Artificial sequence
  SiRNA target sequence
ttatcgtattagaaggtata

SEQ ID NO: 197493 - DNA, 20 bp, Artificial sequence
  SiRNA target sequence
tatcgtattagaaggtataa

SEQ ID NO: 197494 - DNA, 20 bp, Artificial sequence
  SiRNA target sequence
atcgtattagaaggtataaa

SEQ ID NO: 197495 - DNA, 20 bp, Artificial sequence
  SiRNA target sequence
tcgtattagaaggtataaat

SEQ ID NO: 197496 - DNA, 20 bp, Artificial sequence
  SiRNA target sequence
cgtattagaaggtataaata

SEQ ID NO: 197497 - DNA, 20 bp, Artificial sequence
  SiRNA target sequence
gtattagaaggtataaatat

SEQ ID NO: 197498 - DNA, 20 bp, Artificial sequence
  SiRNA target sequence
tattagaaggtataaatatt

SEQ ID NO: 197499 - DNA, 20 bp, Artificial sequence
  SiRNA target sequence
attagaaggtataaatattg

SEQ ID NO: 197500 - DNA, 20 bp, Artificial sequence
  SiRNA target sequence
ttagaaggtataaatattgg

SEQ ID NO: 197501 - DNA, 20 bp, Artificial sequence
  SiRNA target sequence
tagaaggtataaatattggt

SEQ ID NO: 197502 - DNA, 20 bp, Artificial sequence
  SiRNA target sequence
agaaggtataaatattggta

SEQ ID NO: 197503 - DNA, 20 bp, Artificial sequence
  SiRNA target sequence
gaaggtataaatattggtac

SEQ ID NO: 197504 - DNA, 20 bp, Artificial sequence
  SiRNA target sequence
aaggtataaatattggtaca

SEQ ID NO: 197505 - DNA, 20 bp, Artificial sequence
  SiRNA target sequence
aggtataaatattggtacac

SEQ ID NO: 197506 - DNA, 20 bp, Artificial sequence
  SiRNA target sequence
ggtataaatattggtacact

SEQ ID NO: 197507 - DNA, 20 bp, Artificial sequence
  SiRNA target sequence
gtataaatattggtacactc

SEQ ID NO: 197508 - DNA, 20 bp, Artificial sequence
  SiRNA target sequence
tataaatattggtacactca

SEQ ID NO: 197509 - DNA, 20 bp, Artificial sequence
  SiRNA target sequence
ataaatattggtacactcat

SEQ ID NO: 197510 - DNA, 20 bp, Artificial sequence
  SiRNA target sequence
taaatattggtacactcatt

SEQ ID NO: 197511 - DNA, 20 bp, Artificial sequence
  SiRNA target sequence
aaatattggtacactcatta

SEQ ID NO: 197512 - DNA, 20 bp, Artificial sequence
  SiRNA target sequence
aatattggtacactcattat

SEQ ID NO: 197513 - DNA, 20 bp, Artificial sequence
  SiRNA target sequence
atattggtacactcattatt

SEQ ID NO: 197514 - DNA, 20 bp, Artificial sequence
  SiRNA target sequence
tattggtacactcattattt

SEQ ID NO: 197515 - DNA, 20 bp, Artificial sequence
  SiRNA target sequence
attggtacactcattatttt

SEQ ID NO: 197516 - DNA, 20 bp, Artificial sequence
  SiRNA target sequence
ttggtacactcattatttta

SEQ ID NO: 197517 - DNA, 20 bp, Artificial sequence
  SiRNA target sequence
tggtacactcattattttat

SEQ ID NO: 197518 - DNA, 20 bp, Artificial sequence
  SiRNA target sequence
ggtacactcattattttatt

SEQ ID NO: 197519 - DNA, 20 bp, Artificial sequence
  SiRNA target sequence
gtacactcattattttattc

SEQ ID NO: 197520 - DNA, 20 bp, Artificial sequence
  SiRNA target sequence
tacactcattattttattct

SEQ ID NO: 197521 - DNA, 20 bp, Artificial sequence
  SiRNA target sequence
acactcattattttattctc

SEQ ID NO: 197522 - DNA, 20 bp, Artificial sequence
  SiRNA target sequence
cactcattattttattctcg

SEQ ID NO: 197523 - DNA, 20 bp, Artificial sequence
  SiRNA target sequence
actcattattttattctcga

SEQ ID NO: 197524 - DNA, 20 bp, Artificial sequence
  SiRNA target sequence
ctcattattttattctcgaa

SEQ ID NO: 197525 - DNA, 20 bp, Artificial sequence
  SiRNA target sequence
tcattattttattctcgaaa

SEQ ID NO: 197526 - DNA, 20 bp, Artificial sequence
  SiRNA target sequence
cattattttattctcgaaat

SEQ ID NO: 197527 - DNA, 20 bp, Artificial sequence
  SiRNA target sequence
attattttattctcgaaata

SEQ ID NO: 197528 - DNA, 20 bp, Artificial sequence
  SiRNA target sequence
ttattttattctcgaaataa

SEQ ID NO: 197529 - DNA, 20 bp, Artificial sequence
  SiRNA target sequence
tattttattctcgaaataat

SEQ ID NO: 197530 - DNA, 20 bp, Artificial sequence
  SiRNA target sequence
attttattctcgaaataata

SEQ ID NO: 197531 - DNA, 20 bp, Artificial sequence
  SiRNA target sequence
ttttattctcgaaataatat

SEQ ID NO: 197532 - DNA, 20 bp, Artificial sequence
  SiRNA target sequence
tttattctcgaaataatatt

SEQ ID NO: 197533 - DNA, 20 bp, Artificial sequence
  SiRNA target sequence
ttattctcgaaataatattt

SEQ ID NO: 197534 - DNA, 20 bp, Artificial sequence
  SiRNA target sequence
tattctcgaaataatatttc

SEQ ID NO: 197535 - DNA, 20 bp, Artificial sequence
  SiRNA target sequence
attctcgaaataatatttca

SEQ ID NO: 197536 - DNA, 20 bp, Artificial sequence
  SiRNA target sequence
ttctcgaaataatatttcat

SEQ ID NO: 197537 - DNA, 20 bp, Artificial sequence
  SiRNA target sequence
tctcgaaataatatttcatg

SEQ ID NO: 197538 - DNA, 20 bp, Artificial sequence
  SiRNA target sequence
ctcgaaataatatttcatgt

SEQ ID NO: 197539 - DNA, 20 bp, Artificial sequence
  SiRNA target sequence
tcgaaataatatttcatgta

SEQ ID NO: 197540 - DNA, 20 bp, Artificial sequence
  SiRNA target sequence
cgaaataatatttcatgtac

SEQ ID NO: 197541 - DNA, 20 bp, Artificial sequence
  SiRNA target sequence
gaaataatatttcatgtaca

SEQ ID NO: 197542 - DNA, 20 bp, Artificial sequence
  SiRNA target sequence
aaataatatttcatgtacat

SEQ ID NO: 197543 - DNA, 20 bp, Artificial sequence
  SiRNA target sequence
aataatatttcatgtacatt

SEQ ID NO: 197544 - DNA, 20 bp, Artificial sequence
  SiRNA target sequence
ataatatttcatgtacatta

SEQ ID NO: 197545 - DNA, 20 bp, Artificial sequence
  SiRNA target sequence
taatatttcatgtacattaa

SEQ ID NO: 197546 - DNA, 20 bp, Artificial sequence
  SiRNA target sequence
aatatttcatgtacattaat

SEQ ID NO: 197547 - DNA, 20 bp, Artificial sequence
  SiRNA target sequence
atatttcatgtacattaata

SEQ ID NO: 197548 - DNA, 20 bp, Artificial sequence
  SiRNA target sequence
tatttcatgtacattaatat

SEQ ID NO: 197549 - DNA, 20 bp, Artificial sequence
  SiRNA target sequence
atttcatgtacattaatatt

SEQ ID NO: 197550 - DNA, 20 bp, Artificial sequence
  SiRNA target sequence
tttcatgtacattaatatta

SEQ ID NO: 197551 - DNA, 20 bp, Artificial sequence
  SiRNA target sequence
ttcatgtacattaatattag

SEQ ID NO: 197552 - DNA, 20 bp, Artificial sequence
  SiRNA target sequence
tcatgtacattaatattaga

SEQ ID NO: 197553 - DNA, 20 bp, Artificial sequence
  SiRNA target sequence
catgtacattaatattagac

SEQ ID NO: 197554 - DNA, 20 bp, Artificial sequence
  SiRNA target sequence
atgtacattaatattagaca

SEQ ID NO: 197555 - DNA, 20 bp, Artificial sequence
  SiRNA target sequence
tgtacattaatattagacat

SEQ ID NO: 197556 - DNA, 20 bp, Artificial sequence
  SiRNA target sequence
gtacattaatattagacata

SEQ ID NO: 197557 - DNA, 20 bp, Artificial sequence
  SiRNA target sequence
tacattaatattagacatat

SEQ ID NO: 197558 - DNA, 20 bp, Artificial sequence
  SiRNA target sequence
acattaatattagacatata

SEQ ID NO: 197559 - DNA, 20 bp, Artificial sequence
  SiRNA target sequence
cattaatattagacatatac

SEQ ID NO: 197560 - DNA, 20 bp, Artificial sequence
  SiRNA target sequence
attaatattagacatatacc

SEQ ID NO: 197561 - DNA, 20 bp, Artificial sequence
  SiRNA target sequence
ttaatattagacatataccg

SEQ ID NO: 197562 - DNA, 20 bp, Artificial sequence
  SiRNA target sequence
taatattagacatataccgc

SEQ ID NO: 197563 - DNA, 20 bp, Artificial sequence
  SiRNA target sequence
aatattagacatataccgcc

SEQ ID NO: 197564 - DNA, 20 bp, Artificial sequence
  SiRNA target sequence
atattagacatataccgccc

SEQ ID NO: 197565 - DNA, 20 bp, Artificial sequence
  SiRNA target sequence
tattagacatataccgccca

SEQ ID NO: 197566 - DNA, 20 bp, Artificial sequence
  SiRNA target sequence
attagacatataccgcccat

SEQ ID NO: 197567 - DNA, 20 bp, Artificial sequence
  SiRNA target sequence
ttagacatataccgcccatg

SEQ ID NO: 197568 - DNA, 20 bp, Artificial sequence
  SiRNA target sequence
tagacatataccgcccatgg

SEQ ID NO: 197569 - DNA, 20 bp, Artificial sequence
  SiRNA target sequence
agacatataccgcccatggc

SEQ ID NO: 197570 - DNA, 20 bp, Artificial sequence
  SiRNA target sequence
gacatataccgcccatggca

SEQ ID NO: 197571 - DNA, 20 bp, Artificial sequence
  SiRNA target sequence
acatataccgcccatggcaa

SEQ ID NO: 197572 - DNA, 20 bp, Artificial sequence
  SiRNA target sequence
catataccgcccatggcaat

SEQ ID NO: 197573 - DNA, 20 bp, Artificial sequence
  SiRNA target sequence
atataccgcccatggcaata

SEQ ID NO: 197574 - DNA, 20 bp, Artificial sequence
  SiRNA target sequence
tataccgcccatggcaataa

SEQ ID NO: 197575 - DNA, 20 bp, Artificial sequence
  SiRNA target sequence
ataccgcccatggcaataaa

SEQ ID NO: 197576 - DNA, 20 bp, Artificial sequence
  SiRNA target sequence
taccgcccatggcaataaaa

SEQ ID NO: 197577 - DNA, 20 bp, Artificial sequence
  SiRNA target sequence
accgcccatggcaataaaaa

SEQ ID NO: 197578 - DNA, 20 bp, Artificial sequence
  SiRNA target sequence
ccgcccatggcaataaaaac

SEQ ID NO: 197579 - DNA, 20 bp, Artificial sequence
  SiRNA target sequence
cgcccatggcaataaaaacc

SEQ ID NO: 197580 - DNA, 20 bp, Artificial sequence
  SiRNA target sequence
gcccatggcaataaaaaccg

SEQ ID NO: 197581 - DNA, 20 bp, Artificial sequence
  SiRNA target sequence
cccatggcaataaaaaccga

SEQ ID NO: 197582 - DNA, 20 bp, Artificial sequence
  SiRNA target sequence
ccatggcaataaaaaccgaa

SEQ ID NO: 197583 - DNA, 20 bp, Artificial sequence
  SiRNA target sequence
catggcaataaaaaccgaag

SEQ ID NO: 197584 - DNA, 20 bp, Artificial sequence
  SiRNA target sequence
atggcaataaaaaccgaaga

SEQ ID NO: 197585 - DNA, 20 bp, Artificial sequence
  SiRNA target sequence
tggcaataaaaaccgaagaa

SEQ ID NO: 197586 - DNA, 20 bp, Artificial sequence
  SiRNA target sequence
ggcaataaaaaccgaagaat

SEQ ID NO: 197587 - DNA, 20 bp, Artificial sequence
  SiRNA target sequence
gcaataaaaaccgaagaata

SEQ ID NO: 197588 - DNA, 20 bp, Artificial sequence
  SiRNA target sequence
caataaaaaccgaagaatat

SEQ ID NO: 197589 - DNA, 20 bp, Artificial sequence
  SiRNA target sequence
aataaaaaccgaagaatata

SEQ ID NO: 197590 - DNA, 20 bp, Artificial sequence
  SiRNA target sequence
ataaaaaccgaagaatataa

SEQ ID NO: 197591 - DNA, 20 bp, Artificial sequence
  SiRNA target sequence
taaaaaccgaagaatataat

SEQ ID NO: 197592 - DNA, 20 bp, Artificial sequence
  SiRNA target sequence
aaaaaccgaagaatataata

SEQ ID NO: 197593 - DNA, 20 bp, Artificial sequence
  SiRNA target sequence
aaaaccgaagaatataataa

SEQ ID NO: 197594 - DNA, 20 bp, Artificial sequence
  SiRNA target sequence
aaaccgaagaatataataac

SEQ ID NO: 197595 - DNA, 20 bp, Artificial sequence
  SiRNA target sequence
aaccgaagaatataataact

SEQ ID NO: 197596 - DNA, 20 bp, Artificial sequence
  SiRNA target sequence
accgaagaatataataactg

SEQ ID NO: 197597 - DNA, 20 bp, Artificial sequence
  SiRNA target sequence
ccgaagaatataataactga

SEQ ID NO: 197598 - DNA, 20 bp, Artificial sequence
  SiRNA target sequence
cgaagaatataataactgat

SEQ ID NO: 197599 - DNA, 20 bp, Artificial sequence
  SiRNA target sequence
gaagaatataataactgatt

SEQ ID NO: 197600 - DNA, 20 bp, Artificial sequence
  SiRNA target sequence
aagaatataataactgattt

SEQ ID NO: 197601 - DNA, 20 bp, Artificial sequence
  SiRNA target sequence
agaatataataactgatttt

SEQ ID NO: 197602 - DNA, 20 bp, Artificial sequence
  SiRNA target sequence
gaatataataactgattttg

SEQ ID NO: 197603 - DNA, 20 bp, Artificial sequence
  SiRNA target sequence
aatataataactgattttgc

SEQ ID NO: 197604 - DNA, 20 bp, Artificial sequence
  SiRNA target sequence
atataataactgattttgct

SEQ ID NO: 197605 - DNA, 20 bp, Artificial sequence
  SiRNA target sequence
tataataactgattttgctc

SEQ ID NO: 197606 - DNA, 20 bp, Artificial sequence
  SiRNA target sequence
ataataactgattttgctca

SEQ ID NO: 197607 - DNA, 20 bp, Artificial sequence
  SiRNA target sequence
taataactgattttgctcat

SEQ ID NO: 197608 - DNA, 20 bp, Artificial sequence
  SiRNA target sequence
aataactgattttgctcata

SEQ ID NO: 197609 - DNA, 20 bp, Artificial sequence
  SiRNA target sequence
ataactgattttgctcatag

SEQ ID NO: 197610 - DNA, 20 bp, Artificial sequence
  SiRNA target sequence
taactgattttgctcatagc

SEQ ID NO: 197611 - DNA, 20 bp, Artificial sequence
  SiRNA target sequence
aactgattttgctcatagct

SEQ ID NO: 197612 - DNA, 20 bp, Artificial sequence
  SiRNA target sequence
actgattttgctcatagcta

SEQ ID NO: 197613 - DNA, 20 bp, Artificial sequence
  SiRNA target sequence
ctgattttgctcatagctaa

SEQ ID NO: 197614 - DNA, 20 bp, Artificial sequence
  SiRNA target sequence
tgattttgctcatagctaaa

SEQ ID NO: 197615 - DNA, 20 bp, Artificial sequence
  SiRNA target sequence
gattttgctcatagctaaat

SEQ ID NO: 197616 - DNA, 20 bp, Artificial sequence
  SiRNA target sequence
attttgctcatagctaaatc

SEQ ID NO: 197617 - DNA, 20 bp, Artificial sequence
  SiRNA target sequence
ttttgctcatagctaaatcc

SEQ ID NO: 197618 - DNA, 20 bp, Artificial sequence
  SiRNA target sequence
tttgctcatagctaaatcct

SEQ ID NO: 197619 - DNA, 20 bp, Artificial sequence
  SiRNA target sequence
ttgctcatagctaaatcctt

SEQ ID NO: 197620 - DNA, 20 bp, Artificial sequence
  SiRNA target sequence
tgctcatagctaaatccttt

SEQ ID NO: 197621 - DNA, 20 bp, Artificial sequence
  SiRNA target sequence
gctcatagctaaatcctttt

SEQ ID NO: 197622 - DNA, 20 bp, Artificial sequence
  SiRNA target sequence
ctcatagctaaatccttttc

SEQ ID NO: 197623 - DNA, 20 bp, Artificial sequence
  SiRNA target sequence
tcatagctaaatccttttcg

SEQ ID NO: 197624 - DNA, 20 bp, Artificial sequence
  SiRNA target sequence
catagctaaatccttttcgc

SEQ ID NO: 197625 - DNA, 20 bp, Artificial sequence
  SiRNA target sequence
atagctaaatccttttcgca

SEQ ID NO: 197626 - DNA, 20 bp, Artificial sequence
  SiRNA target sequence
tagctaaatccttttcgcaa

SEQ ID NO: 197627 - DNA, 20 bp, Artificial sequence
  SiRNA target sequence
agctaaatccttttcgcaat

SEQ ID NO: 197628 - DNA, 20 bp, Artificial sequence
  SiRNA target sequence
gctaaatccttttcgcaatt

SEQ ID NO: 197629 - DNA, 20 bp, Artificial sequence
  SiRNA target sequence
ctaaatccttttcgcaattc

SEQ ID NO: 197630 - DNA, 20 bp, Artificial sequence
  SiRNA target sequence
taaatccttttcgcaattct

SEQ ID NO: 197631 - DNA, 20 bp, Artificial sequence
  SiRNA target sequence
aaatccttttcgcaattctc

SEQ ID NO: 197632 - DNA, 20 bp, Artificial sequence
  SiRNA target sequence
aatccttttcgcaattctct

SEQ ID NO: 197633 - DNA, 20 bp, Artificial sequence
  SiRNA target sequence
atccttttcgcaattctctg

SEQ ID NO: 197634 - DNA, 20 bp, Artificial sequence
  SiRNA target sequence
tccttttcgcaattctctga

SEQ ID NO: 197635 - DNA, 20 bp, Artificial sequence
  SiRNA target sequence
ccttttcgcaattctctgaa

SEQ ID NO: 197636 - DNA, 20 bp, Artificial sequence
  SiRNA target sequence
cttttcgcaattctctgaaa

SEQ ID NO: 197637 - DNA, 20 bp, Artificial sequence
  SiRNA target sequence
ttttcgcaattctctgaaag

SEQ ID NO: 197638 - DNA, 20 bp, Artificial sequence
  SiRNA target sequence
tttcgcaattctctgaaaga

SEQ ID NO: 197639 - DNA, 20 bp, Artificial sequence
  SiRNA target sequence
ttcgcaattctctgaaagaa

SEQ ID NO: 197640 - DNA, 20 bp, Artificial sequence
  SiRNA target sequence
tcgcaattctctgaaagaac

SEQ ID NO: 197641 - DNA, 20 bp, Artificial sequence
  SiRNA target sequence
cgcaattctctgaaagaact

SEQ ID NO: 197642 - DNA, 20 bp, Artificial sequence
  SiRNA target sequence
gcaattctctgaaagaacta

SEQ ID NO: 197643 - DNA, 20 bp, Artificial sequence
  SiRNA target sequence
caattctctgaaagaactac

SEQ ID NO: 197644 - DNA, 20 bp, Artificial sequence
  SiRNA target sequence
aattctctgaaagaactact

SEQ ID NO: 197645 - DNA, 20 bp, Artificial sequence
  SiRNA target sequence
attctctgaaagaactactg

SEQ ID NO: 197646 - DNA, 20 bp, Artificial sequence
  SiRNA target sequence
ttctctgaaagaactactgg

SEQ ID NO: 197647 - DNA, 20 bp, Artificial sequence
  SiRNA target sequence
tctctgaaagaactactggc

SEQ ID NO: 197648 - DNA, 20 bp, Artificial sequence
  SiRNA target sequence
ctctgaaagaactactggct

SEQ ID NO: 197649 - DNA, 20 bp, Artificial sequence
  SiRNA target sequence
tctgaaagaactactggcta

SEQ ID NO: 197650 - DNA, 20 bp, Artificial sequence
  SiRNA target sequence
ctgaaagaactactggctaa

SEQ ID NO: 197651 - DNA, 20 bp, Artificial sequence
  SiRNA target sequence
tgaaagaactactggctaat

SEQ ID NO: 197652 - DNA, 20 bp, Artificial sequence
  SiRNA target sequence
gaaagaactactggctaatc

SEQ ID NO: 197653 - DNA, 20 bp, Artificial sequence
  SiRNA target sequence
aaagaactactggctaatcc

SEQ ID NO: 197654 - DNA, 20 bp, Artificial sequence
  SiRNA target sequence
aagaactactggctaatcca

SEQ ID NO: 197655 - DNA, 20 bp, Artificial sequence
  SiRNA target sequence
agaactactggctaatccag

SEQ ID NO: 197656 - DNA, 20 bp, Artificial sequence
  SiRNA target sequence
gaactactggctaatccaga

SEQ ID NO: 197657 - DNA, 20 bp, Artificial sequence
  SiRNA target sequence
aactactggctaatccagat

SEQ ID NO: 197658 - DNA, 20 bp, Artificial sequence
  SiRNA target sequence
actactggctaatccagata

SEQ ID NO: 197659 - DNA, 20 bp, Artificial sequence
  SiRNA target sequence
ctactggctaatccagatac

SEQ ID NO: 197660 - DNA, 20 bp, Artificial sequence
  SiRNA target sequence
tactggctaatccagatact

SEQ ID NO: 197661 - DNA, 20 bp, Artificial sequence
  SiRNA target sequence
actggctaatccagatacta

SEQ ID NO: 197662 - DNA, 20 bp, Artificial sequence
  SiRNA target sequence
ctggctaatccagatactag

SEQ ID NO: 197663 - DNA, 20 bp, Artificial sequence
  SiRNA target sequence
tggctaatccagatactagt

SEQ ID NO: 197664 - DNA, 20 bp, Artificial sequence
  SiRNA target sequence
ggctaatccagatactagta

SEQ ID NO: 197665 - DNA, 20 bp, Artificial sequence
  SiRNA target sequence
gctaatccagatactagtaa

SEQ ID NO: 197666 - DNA, 20 bp, Artificial sequence
  SiRNA target sequence
ctaatccagatactagtaaa

SEQ ID NO: 197667 - DNA, 20 bp, Artificial sequence
  SiRNA target sequence
taatccagatactagtaaag

SEQ ID NO: 197668 - DNA, 20 bp, Artificial sequence
  SiRNA target sequence
aatccagatactagtaaagc

SEQ ID NO: 197669 - DNA, 20 bp, Artificial sequence
  SiRNA target sequence
atccagatactagtaaagct

SEQ ID NO: 197670 - DNA, 20 bp, Artificial sequence
  SiRNA target sequence
tccagatactagtaaagcta

SEQ ID NO: 197671 - DNA, 20 bp, Artificial sequence
  SiRNA target sequence
ccagatactagtaaagctaa

SEQ ID NO: 197672 - DNA, 20 bp, Artificial sequence
  SiRNA target sequence
cagatactagtaaagctaaa

SEQ ID NO: 197673 - DNA, 20 bp, Artificial sequence
  SiRNA target sequence
agatactagtaaagctaaat

SEQ ID NO: 197674 - DNA, 20 bp, Artificial sequence
  SiRNA target sequence
gatactagtaaagctaaatt

SEQ ID NO: 197675 - DNA, 20 bp, Artificial sequence
  SiRNA target sequence
atactagtaaagctaaattt

SEQ ID NO: 197676 - DNA, 20 bp, Artificial sequence
  SiRNA target sequence
tactagtaaagctaaatttg

SEQ ID NO: 197677 - DNA, 20 bp, Artificial sequence
  SiRNA target sequence
actagtaaagctaaatttgc

SEQ ID NO: 197678 - DNA, 20 bp, Artificial sequence
  SiRNA target sequence
ctagtaaagctaaatttgct

SEQ ID NO: 197679 - DNA, 20 bp, Artificial sequence
  SiRNA target sequence
tagtaaagctaaatttgcta

SEQ ID NO: 197680 - DNA, 20 bp, Artificial sequence
  SiRNA target sequence
agtaaagctaaatttgctat

SEQ ID NO: 197681 - DNA, 20 bp, Artificial sequence
  SiRNA target sequence
gtaaagctaaatttgctatt

SEQ ID NO: 197682 - DNA, 20 bp, Artificial sequence
  SiRNA target sequence
taaagctaaatttgctatta

SEQ ID NO: 197683 - DNA, 20 bp, Artificial sequence
  SiRNA target sequence
aaagctaaatttgctattat

SEQ ID NO: 197684 - DNA, 20 bp, Artificial sequence
  SiRNA target sequence
aagctaaatttgctattatg

SEQ ID NO: 197685 - DNA, 20 bp, Artificial sequence
  SiRNA target sequence
agctaaatttgctattatgt

SEQ ID NO: 197686 - DNA, 20 bp, Artificial sequence
  SiRNA target sequence
gctaaatttgctattatgta

SEQ ID NO: 197687 - DNA, 20 bp, Artificial sequence
  SiRNA target sequence
ctaaatttgctattatgtaa

SEQ ID NO: 197688 - DNA, 20 bp, Artificial sequence
  SiRNA target sequence
taaatttgctattatgtaaa

SEQ ID NO: 197689 - DNA, 20 bp, Artificial sequence
  SiRNA target sequence
aaatttgctattatgtaaaa

SEQ ID NO: 197690 - DNA, 20 bp, Artificial sequence
  SiRNA target sequence
aatttgctattatgtaaaaa

SEQ ID NO: 197691 - DNA, 20 bp, Artificial sequence
  SiRNA target sequence
atttgctattatgtaaaaag

SEQ ID NO: 197692 - DNA, 20 bp, Artificial sequence
  SiRNA target sequence
tttgctattatgtaaaaagg

SEQ ID NO: 197693 - DNA, 20 bp, Artificial sequence
  SiRNA target sequence
ttgctattatgtaaaaaggt

SEQ ID NO: 197694 - DNA, 20 bp, Artificial sequence
  SiRNA target sequence
tgctattatgtaaaaaggtg

SEQ ID NO: 197695 - DNA, 20 bp, Artificial sequence
  SiRNA target sequence
gctattatgtaaaaaggtgg

SEQ ID NO: 197696 - DNA, 20 bp, Artificial sequence
  SiRNA target sequence
ctattatgtaaaaaggtggt

SEQ ID NO: 197697 - DNA, 20 bp, Artificial sequence
  SiRNA target sequence
tattatgtaaaaaggtggta

SEQ ID NO: 197698 - DNA, 20 bp, Artificial sequence
  SiRNA target sequence
attatgtaaaaaggtggtaa

SEQ ID NO: 197699 - DNA, 20 bp, Artificial sequence
  SiRNA target sequence
ttatgtaaaaaggtggtaaa

SEQ ID NO: 197700 - DNA, 20 bp, Artificial sequence
  SiRNA target sequence
tatgtaaaaaggtggtaaaa

SEQ ID NO: 197701 - DNA, 20 bp, Artificial sequence
  SiRNA target sequence
atgtaaaaaggtggtaaaaa

SEQ ID NO: 197702 - DNA, 20 bp, Artificial sequence
  SiRNA target sequence
tgtaaaaaggtggtaaaaat

SEQ ID NO: 197703 - DNA, 20 bp, Artificial sequence
  SiRNA target sequence
gtaaaaaggtggtaaaaatc

SEQ ID NO: 197704 - DNA, 20 bp, Artificial sequence
  SiRNA target sequence
taaaaaggtggtaaaaatct

SEQ ID NO: 197705 - DNA, 20 bp, Artificial sequence
  SiRNA target sequence
aaaaaggtggtaaaaatctt

SEQ ID NO: 197706 - DNA, 20 bp, Artificial sequence
  SiRNA target sequence
aaaaggtggtaaaaatcttg

SEQ ID NO: 197707 - DNA, 20 bp, Artificial sequence
  SiRNA target sequence
aaaggtggtaaaaatcttgt

SEQ ID NO: 197708 - DNA, 20 bp, Artificial sequence
  SiRNA target sequence
aaggtggtaaaaatcttgta

SEQ ID NO: 197709 - DNA, 20 bp, Artificial sequence
  SiRNA target sequence
aggtggtaaaaatcttgtaa

SEQ ID NO: 197710 - DNA, 20 bp, Artificial sequence
  SiRNA target sequence
ggtggtaaaaatcttgtaaa

SEQ ID NO: 197711 - DNA, 20 bp, Artificial sequence
  SiRNA target sequence
gtggtaaaaatcttgtaaac

SEQ ID NO: 197712 - DNA, 20 bp, Artificial sequence
  SiRNA target sequence
tggtaaaaatcttgtaaact

SEQ ID NO: 197713 - DNA, 20 bp, Artificial sequence
  SiRNA target sequence
ggtaaaaatcttgtaaactg

SEQ ID NO: 197714 - DNA, 20 bp, Artificial sequence
  SiRNA target sequence
gtaaaaatcttgtaaactgt

SEQ ID NO: 197715 - DNA, 20 bp, Artificial sequence
  SiRNA target sequence
taaaaatcttgtaaactgtc

SEQ ID NO: 197716 - DNA, 20 bp, Artificial sequence
  SiRNA target sequence
aaaaatcttgtaaactgtct

SEQ ID NO: 197717 - DNA, 20 bp, Artificial sequence
  SiRNA target sequence
aaaatcttgtaaactgtctg

SEQ ID NO: 197718 - DNA, 20 bp, Artificial sequence
  SiRNA target sequence
aaatcttgtaaactgtctga

SEQ ID NO: 197719 - DNA, 20 bp, Artificial sequence
  SiRNA target sequence
aatcttgtaaactgtctgat

SEQ ID NO: 197720 - DNA, 20 bp, Artificial sequence
  SiRNA target sequence
atcttgtaaactgtctgata

SEQ ID NO: 197721 - DNA, 20 bp, Artificial sequence
  SiRNA target sequence
tcttgtaaactgtctgatag

SEQ ID NO: 197722 - DNA, 20 bp, Artificial sequence
  SiRNA target sequence
cttgtaaactgtctgatagt

SEQ ID NO: 197723 - DNA, 20 bp, Artificial sequence
  SiRNA target sequence
ttgtaaactgtctgatagta

SEQ ID NO: 197724 - DNA, 20 bp, Artificial sequence
  SiRNA target sequence
tgtaaactgtctgatagtac

SEQ ID NO: 197725 - DNA, 20 bp, Artificial sequence
  SiRNA target sequence
gtaaactgtctgatagtaca

SEQ ID NO: 197726 - DNA, 20 bp, Artificial sequence
  SiRNA target sequence
taaactgtctgatagtacaa

SEQ ID NO: 197727 - DNA, 20 bp, Artificial sequence
  SiRNA target sequence
aaactgtctgatagtacaac

SEQ ID NO: 197728 - DNA, 20 bp, Artificial sequence
  SiRNA target sequence
aactgtctgatagtacaact

SEQ ID NO: 197729 - DNA, 20 bp, Artificial sequence
  SiRNA target sequence
actgtctgatagtacaactt

SEQ ID NO: 197730 - DNA, 20 bp, Artificial sequence
  SiRNA target sequence
ctgtctgatagtacaacttt

SEQ ID NO: 197731 - DNA, 20 bp, Artificial sequence
  SiRNA target sequence
tgtctgatagtacaactttc

SEQ ID NO: 197732 - DNA, 20 bp, Artificial sequence
  SiRNA target sequence
gtctgatagtacaactttca

SEQ ID NO: 197733 - DNA, 20 bp, Artificial sequence
  SiRNA target sequence
tctgatagtacaactttcat

SEQ ID NO: 197734 - DNA, 20 bp, Artificial sequence
  SiRNA target sequence
ctgatagtacaactttcatt

SEQ ID NO: 197735 - DNA, 20 bp, Artificial sequence
  SiRNA target sequence
tgatagtacaactttcattt

SEQ ID NO: 197736 - DNA, 20 bp, Artificial sequence
  SiRNA target sequence
gatagtacaactttcattta

SEQ ID NO: 197737 - DNA, 20 bp, Artificial sequence
  SiRNA target sequence
atagtacaactttcatttaa

SEQ ID NO: 197738 - DNA, 20 bp, Artificial sequence
  SiRNA target sequence
tagtacaactttcatttaaa

SEQ ID NO: 197739 - DNA, 20 bp, Artificial sequence
  SiRNA target sequence
agtacaactttcatttaaaa

SEQ ID NO: 197740 - DNA, 20 bp, Artificial sequence
  SiRNA target sequence
gtacaactttcatttaaaaa

SEQ ID NO: 197741 - DNA, 20 bp, Artificial sequence
  SiRNA target sequence
tacaactttcatttaaaaaa

SEQ ID NO: 197742 - DNA, 20 bp, Artificial sequence
  SiRNA target sequence
acaactttcatttaaaaaac

SEQ ID NO: 197743 - DNA, 20 bp, Artificial sequence
  SiRNA target sequence
caactttcatttaaaaaact

SEQ ID NO: 197744 - DNA, 20 bp, Artificial sequence
  SiRNA target sequence
aactttcatttaaaaaactc

SEQ ID NO: 197745 - DNA, 20 bp, Artificial sequence
  SiRNA target sequence
actttcatttaaaaaactca

SEQ ID NO: 197746 - DNA, 20 bp, Artificial sequence
  SiRNA target sequence
ctttcatttaaaaaactcat

SEQ ID NO: 197747 - DNA, 20 bp, Artificial sequence
  SiRNA target sequence
tttcatttaaaaaactcatg

SEQ ID NO: 197748 - DNA, 20 bp, Artificial sequence
  SiRNA target sequence
ttcatttaaaaaactcatgt

SEQ ID NO: 197749 - DNA, 20 bp, Artificial sequence
  SiRNA target sequence
tcatttaaaaaactcatgta

SEQ ID NO: 197750 - DNA, 20 bp, Artificial sequence
  SiRNA target sequence
catttaaaaaactcatgtat

SEQ ID NO: 197751 - DNA, 20 bp, Artificial sequence
  SiRNA target sequence
atttaaaaaactcatgtata

SEQ ID NO: 197752 - DNA, 20 bp, Artificial sequence
  SiRNA target sequence
tttaaaaaactcatgtataa

SEQ ID NO: 197753 - DNA, 20 bp, Artificial sequence
  SiRNA target sequence
ttaaaaaactcatgtataaa

SEQ ID NO: 197754 - DNA, 20 bp, Artificial sequence
  SiRNA target sequence
taaaaaactcatgtataaat

SEQ ID NO: 197755 - DNA, 20 bp, Artificial sequence
  SiRNA target sequence
aaaaaactcatgtataaata

SEQ ID NO: 197756 - DNA, 20 bp, Artificial sequence
  SiRNA target sequence
aaaaactcatgtataaataa

SEQ ID NO: 197757 - DNA, 20 bp, Artificial sequence
  SiRNA target sequence
aaaactcatgtataaataag

SEQ ID NO: 197758 - DNA, 20 bp, Artificial sequence
  SiRNA target sequence
aaactcatgtataaataagc

SEQ ID NO: 197759 - DNA, 20 bp, Artificial sequence
  SiRNA target sequence
aactcatgtataaataagcc

SEQ ID NO: 197760 - DNA, 20 bp, Artificial sequence
  SiRNA target sequence
actcatgtataaataagcca

SEQ ID NO: 197761 - DNA, 20 bp, Artificial sequence
  SiRNA target sequence
ctcatgtataaataagccat

SEQ ID NO: 197762 - DNA, 20 bp, Artificial sequence
  SiRNA target sequence
tcatgtataaataagccata

SEQ ID NO: 197763 - DNA, 20 bp, Artificial sequence
  SiRNA target sequence
catgtataaataagccataa

SEQ ID NO: 197764 - DNA, 20 bp, Artificial sequence
  SiRNA target sequence
atgtataaataagccataag

SEQ ID NO: 197765 - DNA, 20 bp, Artificial sequence
  SiRNA target sequence
tgtataaataagccataagt

SEQ ID NO: 197766 - DNA, 20 bp, Artificial sequence
  SiRNA target sequence
gtataaataagccataagta

SEQ ID NO: 197767 - DNA, 20 bp, Artificial sequence
  SiRNA target sequence
tataaataagccataagtaa

SEQ ID NO: 197768 - DNA, 20 bp, Artificial sequence
  SiRNA target sequence
ataaataagccataagtaaa

SEQ ID NO: 197769 - DNA, 20 bp, Artificial sequence
  SiRNA target sequence
taaataagccataagtaaac

SEQ ID NO: 197770 - DNA, 20 bp, Artificial sequence
  SiRNA target sequence
aaataagccataagtaaact

SEQ ID NO: 197771 - DNA, 20 bp, Artificial sequence
  SiRNA target sequence
aataagccataagtaaactg

SEQ ID NO: 197772 - DNA, 20 bp, Artificial sequence
  SiRNA target sequence
ataagccataagtaaactgc

SEQ ID NO: 197773 - DNA, 20 bp, Artificial sequence
  SiRNA target sequence
taagccataagtaaactgcc

SEQ ID NO: 197774 - DNA, 20 bp, Artificial sequence
  SiRNA target sequence
aagccataagtaaactgccc

SEQ ID NO: 197775 - DNA, 20 bp, Artificial sequence
  SiRNA target sequence
agccataagtaaactgcccc

SEQ ID NO: 197776 - DNA, 20 bp, Artificial sequence
  SiRNA target sequence
gccataagtaaactgcccca

SEQ ID NO: 197777 - DNA, 20 bp, Artificial sequence
  SiRNA target sequence
ccataagtaaactgccccac

SEQ ID NO: 197778 - DNA, 20 bp, Artificial sequence
  SiRNA target sequence
cataagtaaactgccccaca

SEQ ID NO: 197779 - DNA, 20 bp, Artificial sequence
  SiRNA target sequence
ataagtaaactgccccacat

SEQ ID NO: 197780 - DNA, 20 bp, Artificial sequence
  SiRNA target sequence
taagtaaactgccccacatt

SEQ ID NO: 197781 - DNA, 20 bp, Artificial sequence
  SiRNA target sequence
aagtaaactgccccacattt

SEQ ID NO: 197782 - DNA, 20 bp, Artificial sequence
  SiRNA target sequence
agtaaactgccccacatttc

SEQ ID NO: 197783 - DNA, 20 bp, Artificial sequence
  SiRNA target sequence
gtaaactgccccacatttct

SEQ ID NO: 197784 - DNA, 20 bp, Artificial sequence
  SiRNA target sequence
taaactgccccacatttctg

SEQ ID NO: 197785 - DNA, 20 bp, Artificial sequence
  SiRNA target sequence
aaactgccccacatttctgc

SEQ ID NO: 197786 - DNA, 20 bp, Artificial sequence
  SiRNA target sequence
aactgccccacatttctgct

SEQ ID NO: 197787 - DNA, 20 bp, Artificial sequence
  SiRNA target sequence
actgccccacatttctgcta

SEQ ID NO: 197788 - DNA, 20 bp, Artificial sequence
  SiRNA target sequence
ctgccccacatttctgctat

SEQ ID NO: 197789 - DNA, 20 bp, Artificial sequence
  SiRNA target sequence
tgccccacatttctgctatt

SEQ ID NO: 197790 - DNA, 20 bp, Artificial sequence
  SiRNA target sequence
gccccacatttctgctatta

SEQ ID NO: 197791 - DNA, 20 bp, Artificial sequence
  SiRNA target sequence
ccccacatttctgctattat

SEQ ID NO: 197792 - DNA, 20 bp, Artificial sequence
  SiRNA target sequence
cccacatttctgctattata

SEQ ID NO: 197793 - DNA, 20 bp, Artificial sequence
  SiRNA target sequence
ccacatttctgctattataa

SEQ ID NO: 197794 - DNA, 20 bp, Artificial sequence
  SiRNA target sequence
cacatttctgctattataaa

SEQ ID NO: 197795 - DNA, 20 bp, Artificial sequence
  SiRNA target sequence
acatttctgctattataaaa

SEQ ID NO: 197796 - DNA, 20 bp, Artificial sequence
  SiRNA target sequence
catttctgctattataaaaa

SEQ ID NO: 197797 - DNA, 20 bp, Artificial sequence
  SiRNA target sequence
atttctgctattataaaaat

SEQ ID NO: 197798 - DNA, 20 bp, Artificial sequence
  SiRNA target sequence
tttctgctattataaaaata

SEQ ID NO: 197799 - DNA, 20 bp, Artificial sequence
  SiRNA target sequence
ttctgctattataaaaatac

SEQ ID NO: 197800 - DNA, 20 bp, Artificial sequence
  SiRNA target sequence
tctgctattataaaaataca

SEQ ID NO: 197801 - DNA, 20 bp, Artificial sequence
  SiRNA target sequence
ctgctattataaaaatacaa

SEQ ID NO: 197802 - DNA, 20 bp, Artificial sequence
  SiRNA target sequence
tgctattataaaaatacaag

SEQ ID NO: 197803 - DNA, 20 bp, Artificial sequence
  SiRNA target sequence
gctattataaaaatacaagt

SEQ ID NO: 197804 - DNA, 20 bp, Artificial sequence
  SiRNA target sequence
ctattataaaaatacaagtt

SEQ ID NO: 197805 - DNA, 20 bp, Artificial sequence
  SiRNA target sequence
tattataaaaatacaagttg

SEQ ID NO: 197806 - DNA, 20 bp, Artificial sequence
  SiRNA target sequence
attataaaaatacaagttga

SEQ ID NO: 197807 - DNA, 20 bp, Artificial sequence
  SiRNA target sequence
ttataaaaatacaagttgaa

SEQ ID NO: 197808 - DNA, 20 bp, Artificial sequence
  SiRNA target sequence
tataaaaatacaagttgaaa

SEQ ID NO: 197809 - DNA, 20 bp, Artificial sequence
  SiRNA target sequence
ataaaaatacaagttgaaac

SEQ ID NO: 197810 - DNA, 20 bp, Artificial sequence
  SiRNA target sequence
taaaaatacaagttgaaacg

SEQ ID NO: 197811 - DNA, 20 bp, Artificial sequence
  SiRNA target sequence
aaaaatacaagttgaaacgg

SEQ ID NO: 197812 - DNA, 20 bp, Artificial sequence
  SiRNA target sequence
aaaatacaagttgaaacggg

SEQ ID NO: 197813 - DNA, 20 bp, Artificial sequence
  SiRNA target sequence
aaatacaagttgaaacgggc

SEQ ID NO: 197814 - DNA, 20 bp, Artificial sequence
  SiRNA target sequence
aatacaagttgaaacgggct

SEQ ID NO: 197815 - DNA, 20 bp, Artificial sequence
  SiRNA target sequence
atacaagttgaaacgggctc

SEQ ID NO: 197816 - DNA, 20 bp, Artificial sequence
  SiRNA target sequence
tacaagttgaaacgggctcg

SEQ ID NO: 197817 - DNA, 20 bp, Artificial sequence
  SiRNA target sequence
acaagttgaaacgggctcgt

SEQ ID NO: 197818 - DNA, 20 bp, Artificial sequence
  SiRNA target sequence
caagttgaaacgggctcgtt

SEQ ID NO: 197819 - DNA, 20 bp, Artificial sequence
  SiRNA target sequence
aagttgaaacgggctcgtta

SEQ ID NO: 197820 - DNA, 20 bp, Artificial sequence
  SiRNA target sequence
agttgaaacgggctcgttag

SEQ ID NO: 197821 - DNA, 20 bp, Artificial sequence
  SiRNA target sequence
gttgaaacgggctcgttagc

SEQ ID NO: 197822 - DNA, 20 bp, Artificial sequence
  SiRNA target sequence
ttgaaacgggctcgttagct

SEQ ID NO: 197823 - DNA, 20 bp, Artificial sequence
  SiRNA target sequence
tgaaacgggctcgttagctg

SEQ ID NO: 197824 - DNA, 20 bp, Artificial sequence
  SiRNA target sequence
gaaacgggctcgttagctgt

SEQ ID NO: 197825 - DNA, 20 bp, Artificial sequence
  SiRNA target sequence
aaacgggctcgttagctgta

SEQ ID NO: 197826 - DNA, 20 bp, Artificial sequence
  SiRNA target sequence
aacgggctcgttagctgtaa

SEQ ID NO: 197827 - DNA, 20 bp, Artificial sequence
  SiRNA target sequence
acgggctcgttagctgtaat

SEQ ID NO: 197828 - DNA, 20 bp, Artificial sequence
  SiRNA target sequence
cgggctcgttagctgtaatt

SEQ ID NO: 197829 - DNA, 20 bp, Artificial sequence
  SiRNA target sequence
gggctcgttagctgtaatta

SEQ ID NO: 197830 - DNA, 20 bp, Artificial sequence
  SiRNA target sequence
ggctcgttagctgtaattaa

SEQ ID NO: 197831 - DNA, 20 bp, Artificial sequence
  SiRNA target sequence
gctcgttagctgtaattaaa

SEQ ID NO: 197832 - DNA, 20 bp, Artificial sequence
  SiRNA target sequence
ctcgttagctgtaattaaaa

SEQ ID NO: 197833 - DNA, 20 bp, Artificial sequence
  SiRNA target sequence
tcgttagctgtaattaaaaa

SEQ ID NO: 197834 - DNA, 20 bp, Artificial sequence
  SiRNA target sequence
cgttagctgtaattaaaaaa

SEQ ID NO: 197835 - DNA, 20 bp, Artificial sequence
  SiRNA target sequence
gttagctgtaattaaaaaat

SEQ ID NO: 197836 - DNA, 20 bp, Artificial sequence
  SiRNA target sequence
ttagctgtaattaaaaaata

SEQ ID NO: 197837 - DNA, 20 bp, Artificial sequence
  SiRNA target sequence
tagctgtaattaaaaaatat

SEQ ID NO: 197838 - DNA, 20 bp, Artificial sequence
  SiRNA target sequence
agctgtaattaaaaaatatt

SEQ ID NO: 197839 - DNA, 20 bp, Artificial sequence
  SiRNA target sequence
gctgtaattaaaaaatattt

SEQ ID NO: 197840 - DNA, 20 bp, Artificial sequence
  SiRNA target sequence
ctgtaattaaaaaatatttt

SEQ ID NO: 197841 - DNA, 20 bp, Artificial sequence
  SiRNA target sequence
tgtaattaaaaaatatttta

SEQ ID NO: 197842 - DNA, 20 bp, Artificial sequence
  SiRNA target sequence
gtaattaaaaaatattttat

SEQ ID NO: 197843 - DNA, 20 bp, Artificial sequence
  SiRNA target sequence
taattaaaaaatattttata

SEQ ID NO: 197844 - DNA, 20 bp, Artificial sequence
  SiRNA target sequence
aattaaaaaatattttataa

SEQ ID NO: 197845 - DNA, 20 bp, Artificial sequence
  SiRNA target sequence
attaaaaaatattttataaa

SEQ ID NO: 197846 - DNA, 20 bp, Artificial sequence
  SiRNA target sequence
ttaaaaaatattttataaag

SEQ ID NO: 197847 - DNA, 20 bp, Artificial sequence
  SiRNA target sequence
taaaaaatattttataaagt

SEQ ID NO: 197848 - DNA, 20 bp, Artificial sequence
  SiRNA target sequence
aaaaaatattttataaagtt

SEQ ID NO: 197849 - DNA, 20 bp, Artificial sequence
  SiRNA target sequence
aaaaatattttataaagttc

SEQ ID NO: 197850 - DNA, 20 bp, Artificial sequence
  SiRNA target sequence
aaaatattttataaagttca

SEQ ID NO: 197851 - DNA, 20 bp, Artificial sequence
  SiRNA target sequence
aaatattttataaagttcaa

SEQ ID NO: 197852 - DNA, 20 bp, Artificial sequence
  SiRNA target sequence
aatattttataaagttcaat

SEQ ID NO: 197853 - DNA, 20 bp, Artificial sequence
  SiRNA target sequence
atattttataaagttcaatc

SEQ ID NO: 197854 - DNA, 20 bp, Artificial sequence
  SiRNA target sequence
tattttataaagttcaatcc

SEQ ID NO: 197855 - DNA, 20 bp, Artificial sequence
  SiRNA target sequence
attttataaagttcaatccc

SEQ ID NO: 197856 - DNA, 20 bp, Artificial sequence
  SiRNA target sequence
ttttataaagttcaatccct

SEQ ID NO: 197857 - DNA, 20 bp, Artificial sequence
  SiRNA target sequence
tttataaagttcaatccctt

SEQ ID NO: 197858 - DNA, 20 bp, Artificial sequence
  SiRNA target sequence
ttataaagttcaatcccttc

SEQ ID NO: 197859 - DNA, 20 bp, Artificial sequence
  SiRNA target sequence
tataaagttcaatcccttca

SEQ ID NO: 197860 - DNA, 20 bp, Artificial sequence
  SiRNA target sequence
ataaagttcaatcccttcaa

SEQ ID NO: 197861 - DNA, 20 bp, Artificial sequence
  SiRNA target sequence
taaagttcaatcccttcaat

SEQ ID NO: 197862 - DNA, 20 bp, Artificial sequence
  SiRNA target sequence
aaagttcaatcccttcaatg

SEQ ID NO: 197863 - DNA, 20 bp, Artificial sequence
  SiRNA target sequence
aagttcaatcccttcaatgc

SEQ ID NO: 197864 - DNA, 20 bp, Artificial sequence
  SiRNA target sequence
agttcaatcccttcaatgca

SEQ ID NO: 197865 - DNA, 20 bp, Artificial sequence
  SiRNA target sequence
gttcaatcccttcaatgcac

SEQ ID NO: 197866 - DNA, 20 bp, Artificial sequence
  SiRNA target sequence
ttcaatcccttcaatgcacc

SEQ ID NO: 197867 - DNA, 20 bp, Artificial sequence
  SiRNA target sequence
tcaatcccttcaatgcacct

SEQ ID NO: 197868 - DNA, 20 bp, Artificial sequence
  SiRNA target sequence
caatcccttcaatgcacctt

SEQ ID NO: 197869 - DNA, 20 bp, Artificial sequence
  SiRNA target sequence
aatcccttcaatgcaccttt

SEQ ID NO: 197870 - DNA, 20 bp, Artificial sequence
  SiRNA target sequence
atcccttcaatgcacctttg

SEQ ID NO: 197871 - DNA, 20 bp, Artificial sequence
  SiRNA target sequence
tcccttcaatgcacctttgt

SEQ ID NO: 197872 - DNA, 20 bp, Artificial sequence
  SiRNA target sequence
cccttcaatgcacctttgtt

SEQ ID NO: 197873 - DNA, 20 bp, Artificial sequence
  SiRNA target sequence
ccttcaatgcacctttgtta

SEQ ID NO: 197874 - DNA, 20 bp, Artificial sequence
  SiRNA target sequence
cttcaatgcacctttgttat

SEQ ID NO: 197875 - DNA, 20 bp, Artificial sequence
  SiRNA target sequence
ttcaatgcacctttgttatc

SEQ ID NO: 197876 - DNA, 20 bp, Artificial sequence
  SiRNA target sequence
tcaatgcacctttgttatca

SEQ ID NO: 197877 - DNA, 20 bp, Artificial sequence
  SiRNA target sequence
caatgcacctttgttatcag

SEQ ID NO: 197878 - DNA, 20 bp, Artificial sequence
  SiRNA target sequence
aatgcacctttgttatcagc

SEQ ID NO: 197879 - DNA, 20 bp, Artificial sequence
  SiRNA target sequence
atgcacctttgttatcagcg

SEQ ID NO: 197880 - DNA, 20 bp, Artificial sequence
  SiRNA target sequence
tgcacctttgttatcagcga

SEQ ID NO: 197881 - DNA, 20 bp, Artificial sequence
  SiRNA target sequence
gcacctttgttatcagcgaa

SEQ ID NO: 197882 - DNA, 20 bp, Artificial sequence
  SiRNA target sequence
cacctttgttatcagcgaaa

SEQ ID NO: 197883 - DNA, 20 bp, Artificial sequence
  SiRNA target sequence
acctttgttatcagcgaaaa

SEQ ID NO: 197884 - DNA, 20 bp, Artificial sequence
  SiRNA target sequence
cctttgttatcagcgaaaat

SEQ ID NO: 197885 - DNA, 20 bp, Artificial sequence
  SiRNA target sequence
ctttgttatcagcgaaaata

SEQ ID NO: 197886 - DNA, 20 bp, Artificial sequence
  SiRNA target sequence
tttgttatcagcgaaaatat

SEQ ID NO: 197887 - DNA, 20 bp, Artificial sequence
  SiRNA target sequence
ttgttatcagcgaaaatatc

SEQ ID NO: 197888 - DNA, 20 bp, Artificial sequence
  SiRNA target sequence
tgttatcagcgaaaatatct

SEQ ID NO: 197889 - DNA, 20 bp, Artificial sequence
  SiRNA target sequence
gttatcagcgaaaatatctc

SEQ ID NO: 197890 - DNA, 20 bp, Artificial sequence
  SiRNA target sequence
ttatcagcgaaaatatctct

SEQ ID NO: 197891 - DNA, 20 bp, Artificial sequence
  SiRNA target sequence
tatcagcgaaaatatctcta

SEQ ID NO: 197892 - DNA, 20 bp, Artificial sequence
  SiRNA target sequence
atcagcgaaaatatctctaa

SEQ ID NO: 197893 - DNA, 20 bp, Artificial sequence
  SiRNA target sequence
tcagcgaaaatatctctaaa

SEQ ID NO: 197894 - DNA, 20 bp, Artificial sequence
  SiRNA target sequence
cagcgaaaatatctctaaat

SEQ ID NO: 197895 - DNA, 20 bp, Artificial sequence
  SiRNA target sequence
agcgaaaatatctctaaata

SEQ ID NO: 197896 - DNA, 20 bp, Artificial sequence
  SiRNA target sequence
gcgaaaatatctctaaataa

SEQ ID NO: 197897 - DNA, 20 bp, Artificial sequence
  SiRNA target sequence
cgaaaatatctctaaataaa

SEQ ID NO: 197898 - DNA, 20 bp, Artificial sequence
  SiRNA target sequence
gaaaatatctctaaataaaa

SEQ ID NO: 197899 - DNA, 20 bp, Artificial sequence
  SiRNA target sequence
aaaatatctctaaataaaaa

SEQ ID NO: 197900 - DNA, 20 bp, Artificial sequence
  SiRNA target sequence
aaatatctctaaataaaaag

SEQ ID NO: 197901 - DNA, 20 bp, Artificial sequence
  SiRNA target sequence
aatatctctaaataaaaagc

SEQ ID NO: 197902 - DNA, 20 bp, Artificial sequence
  SiRNA target sequence
atatctctaaataaaaagct

SEQ ID NO: 197903 - DNA, 20 bp, Artificial sequence
  SiRNA target sequence
tatctctaaataaaaagcta

SEQ ID NO: 197904 - DNA, 20 bp, Artificial sequence
  SiRNA target sequence
atctctaaataaaaagctag

SEQ ID NO: 197905 - DNA, 20 bp, Artificial sequence
  SiRNA target sequence
tctctaaataaaaagctaga

SEQ ID NO: 197906 - DNA, 20 bp, Artificial sequence
  SiRNA target sequence
ctctaaataaaaagctagat

SEQ ID NO: 197907 - DNA, 20 bp, Artificial sequence
  SiRNA target sequence
tctaaataaaaagctagatg

SEQ ID NO: 197908 - DNA, 20 bp, Artificial sequence
  SiRNA target sequence
ctaaataaaaagctagatgg

SEQ ID NO: 197909 - DNA, 20 bp, Artificial sequence
  SiRNA target sequence
taaataaaaagctagatggt

SEQ ID NO: 197910 - DNA, 20 bp, Artificial sequence
  SiRNA target sequence
aaataaaaagctagatggtg

SEQ ID NO: 197911 - DNA, 20 bp, Artificial sequence
  SiRNA target sequence
aataaaaagctagatggtgt

SEQ ID NO: 197912 - DNA, 20 bp, Artificial sequence
  SiRNA target sequence
ataaaaagctagatggtgtt

SEQ ID NO: 197913 - DNA, 20 bp, Artificial sequence
  SiRNA target sequence
taaaaagctagatggtgtta

SEQ ID NO: 197914 - DNA, 20 bp, Artificial sequence
  SiRNA target sequence
aaaaagctagatggtgttac

SEQ ID NO: 197915 - DNA, 20 bp, Artificial sequence
  SiRNA target sequence
aaaagctagatggtgttact

SEQ ID NO: 197916 - DNA, 20 bp, Artificial sequence
  SiRNA target sequence
aaagctagatggtgttactt

SEQ ID NO: 197917 - DNA, 20 bp, Artificial sequence
  SiRNA target sequence
aagctagatggtgttacttt

SEQ ID NO: 197918 - DNA, 20 bp, Artificial sequence
  SiRNA target sequence
agctagatggtgttactttc

SEQ ID NO: 197919 - DNA, 20 bp, Artificial sequence
  SiRNA target sequence
gctagatggtgttactttct

SEQ ID NO: 197920 - DNA, 20 bp, Artificial sequence
  SiRNA target sequence
ctagatggtgttactttctc

SEQ ID NO: 197921 - DNA, 20 bp, Artificial sequence
  SiRNA target sequence
tagatggtgttactttctct

SEQ ID NO: 197922 - DNA, 20 bp, Artificial sequence
  SiRNA target sequence
agatggtgttactttctctt

SEQ ID NO: 197923 - DNA, 20 bp, Artificial sequence
  SiRNA target sequence
gatggtgttactttctcttc

SEQ ID NO: 197924 - DNA, 20 bp, Artificial sequence
  SiRNA target sequence
atggtgttactttctcttca

SEQ ID NO: 197925 - DNA, 20 bp, Artificial sequence
  SiRNA target sequence
tggtgttactttctcttcaa

SEQ ID NO: 197926 - DNA, 20 bp, Artificial sequence
  SiRNA target sequence
ggtgttactttctcttcaaa

SEQ ID NO: 197927 - DNA, 20 bp, Artificial sequence
  SiRNA target sequence
gtgttactttctcttcaaac

SEQ ID NO: 197928 - DNA, 20 bp, Artificial sequence
  SiRNA target sequence
tgttactttctcttcaaaca

SEQ ID NO: 197929 - DNA, 20 bp, Artificial sequence
  SiRNA target sequence
gttactttctcttcaaacaa

SEQ ID NO: 197930 - DNA, 20 bp, Artificial sequence
  SiRNA target sequence
ttactttctcttcaaacaaa

SEQ ID NO: 197931 - DNA, 20 bp, Artificial sequence
  SiRNA target sequence
tactttctcttcaaacaaaa

SEQ ID NO: 197932 - DNA, 20 bp, Artificial sequence
  SiRNA target sequence
actttctcttcaaacaaaaa

SEQ ID NO: 197933 - DNA, 20 bp, Artificial sequence
  SiRNA target sequence
ctttctcttcaaacaaaaag

SEQ ID NO: 197934 - DNA, 20 bp, Artificial sequence
  SiRNA target sequence
tttctcttcaaacaaaaaga

SEQ ID NO: 197935 - DNA, 20 bp, Artificial sequence
  SiRNA target sequence
ttctcttcaaacaaaaagat

SEQ ID NO: 197936 - DNA, 20 bp, Artificial sequence
  SiRNA target sequence
tctcttcaaacaaaaagatt

SEQ ID NO: 197937 - DNA, 20 bp, Artificial sequence
  SiRNA target sequence
ctcttcaaacaaaaagattg

SEQ ID NO: 197938 - DNA, 20 bp, Artificial sequence
  SiRNA target sequence
tcttcaaacaaaaagattgc

SEQ ID NO: 197939 - DNA, 20 bp, Artificial sequence
  SiRNA target sequence
cttcaaacaaaaagattgcc

SEQ ID NO: 197940 - DNA, 20 bp, Artificial sequence
  SiRNA target sequence
ttcaaacaaaaagattgccc

SEQ ID NO: 197941 - DNA, 20 bp, Artificial sequence
  SiRNA target sequence
tcaaacaaaaagattgcccc

SEQ ID NO: 197942 - DNA, 20 bp, Artificial sequence
  SiRNA target sequence
caaacaaaaagattgcccct

SEQ ID NO: 197943 - DNA, 20 bp, Artificial sequence
  SiRNA target sequence
aaacaaaaagattgccccta

SEQ ID NO: 197944 - DNA, 20 bp, Artificial sequence
  SiRNA target sequence
aacaaaaagattgcccctag

SEQ ID NO: 197945 - DNA, 20 bp, Artificial sequence
  SiRNA target sequence
acaaaaagattgcccctagt

SEQ ID NO: 197946 - DNA, 20 bp, Artificial sequence
  SiRNA target sequence
caaaaagattgcccctagtc

SEQ ID NO: 197947 - DNA, 20 bp, Artificial sequence
  SiRNA target sequence
aaaaagattgcccctagtcc

SEQ ID NO: 197948 - DNA, 20 bp, Artificial sequence
  SiRNA target sequence
aaaagattgcccctagtccg

SEQ ID NO: 197949 - DNA, 20 bp, Artificial sequence
  SiRNA target sequence
aaagattgcccctagtccga

SEQ ID NO: 197950 - DNA, 20 bp, Artificial sequence
  SiRNA target sequence
aagattgcccctagtccgaa

SEQ ID NO: 197951 - DNA, 20 bp, Artificial sequence
  SiRNA target sequence
agattgcccctagtccgaag

SEQ ID NO: 197952 - DNA, 20 bp, Artificial sequence
  SiRNA target sequence
gattgcccctagtccgaaga

SEQ ID NO: 197953 - DNA, 20 bp, Artificial sequence
  SiRNA target sequence
attgcccctagtccgaagaa

SEQ ID NO: 197954 - DNA, 20 bp, Artificial sequence
  SiRNA target sequence
ttgcccctagtccgaagaaa

SEQ ID NO: 197955 - DNA, 20 bp, Artificial sequence
  SiRNA target sequence
tgcccctagtccgaagaaaa

SEQ ID NO: 197956 - DNA, 20 bp, Artificial sequence
  SiRNA target sequence
gcccctagtccgaagaaaaa

SEQ ID NO: 197957 - DNA, 20 bp, Artificial sequence
  SiRNA target sequence
cccctagtccgaagaaaaat

SEQ ID NO: 197958 - DNA, 20 bp, Artificial sequence
  SiRNA target sequence
ccctagtccgaagaaaaatg

SEQ ID NO: 197959 - DNA, 20 bp, Artificial sequence
  SiRNA target sequence
cctagtccgaagaaaaatgc

SEQ ID NO: 197960 - DNA, 20 bp, Artificial sequence
  SiRNA target sequence
ctagtccgaagaaaaatgca

SEQ ID NO: 197961 - DNA, 20 bp, Artificial sequence
  SiRNA target sequence
tagtccgaagaaaaatgcag

SEQ ID NO: 197962 - DNA, 20 bp, Artificial sequence
  SiRNA target sequence
agtccgaagaaaaatgcagt

SEQ ID NO: 197963 - DNA, 20 bp, Artificial sequence
  SiRNA target sequence
gtccgaagaaaaatgcagta

SEQ ID NO: 197964 - DNA, 20 bp, Artificial sequence
  SiRNA target sequence
tccgaagaaaaatgcagtaa

SEQ ID NO: 197965 - DNA, 20 bp, Artificial sequence
  SiRNA target sequence
ccgaagaaaaatgcagtaaa

SEQ ID NO: 197966 - DNA, 20 bp, Artificial sequence
  SiRNA target sequence
cgaagaaaaatgcagtaaaa

SEQ ID NO: 197967 - DNA, 20 bp, Artificial sequence
  SiRNA target sequence
gaagaaaaatgcagtaaaaa

SEQ ID NO: 197968 - DNA, 20 bp, Artificial sequence
  SiRNA target sequence
aagaaaaatgcagtaaaaat

SEQ ID NO: 197969 - DNA, 20 bp, Artificial sequence
  SiRNA target sequence
agaaaaatgcagtaaaaatt

SEQ ID NO: 197970 - DNA, 20 bp, Artificial sequence
  SiRNA target sequence
gaaaaatgcagtaaaaatta

SEQ ID NO: 197971 - DNA, 20 bp, Artificial sequence
  SiRNA target sequence
aaaaatgcagtaaaaattat

SEQ ID NO: 197972 - DNA, 20 bp, Artificial sequence
  SiRNA target sequence
aaaatgcagtaaaaattatt

SEQ ID NO: 197973 - DNA, 20 bp, Artificial sequence
  SiRNA target sequence
aaatgcagtaaaaattatta

SEQ ID NO: 197974 - DNA, 20 bp, Artificial sequence
  SiRNA target sequence
aatgcagtaaaaattattag

SEQ ID NO: 197975 - DNA, 20 bp, Artificial sequence
  SiRNA target sequence
atgcagtaaaaattattaga

SEQ ID NO: 197976 - DNA, 20 bp, Artificial sequence
  SiRNA target sequence
tgcagtaaaaattattagaa

SEQ ID NO: 197977 - DNA, 20 bp, Artificial sequence
  SiRNA target sequence
gcagtaaaaattattagaaa

SEQ ID NO: 197978 - DNA, 20 bp, Artificial sequence
  SiRNA target sequence
cagtaaaaattattagaaat

SEQ ID NO: 197979 - DNA, 20 bp, Artificial sequence
  SiRNA target sequence
agtaaaaattattagaaata

SEQ ID NO: 197980 - DNA, 20 bp, Artificial sequence
  SiRNA target sequence
gtaaaaattattagaaatag

SEQ ID NO: 197981 - DNA, 20 bp, Artificial sequence
  SiRNA target sequence
taaaaattattagaaataga

SEQ ID NO: 197982 - DNA, 20 bp, Artificial sequence
  SiRNA target sequence
aaaaattattagaaatagat

SEQ ID NO: 197983 - DNA, 20 bp, Artificial sequence
  SiRNA target sequence
aaaattattagaaatagatt

SEQ ID NO: 197984 - DNA, 20 bp, Artificial sequence
  SiRNA target sequence
aaattattagaaatagatta

SEQ ID NO: 197985 - DNA, 20 bp, Artificial sequence
  SiRNA target sequence
aattattagaaatagattaa

SEQ ID NO: 197986 - DNA, 20 bp, Artificial sequence
  SiRNA target sequence
attattagaaatagattaaa

SEQ ID NO: 197987 - DNA, 20 bp, Artificial sequence
  SiRNA target sequence
ttattagaaatagattaaaa

SEQ ID NO: 197988 - DNA, 20 bp, Artificial sequence
  SiRNA target sequence
tattagaaatagattaaaaa

SEQ ID NO: 197989 - DNA, 20 bp, Artificial sequence
  SiRNA target sequence
attagaaatagattaaaaat

SEQ ID NO: 197990 - DNA, 20 bp, Artificial sequence
  SiRNA target sequence
ttagaaatagattaaaaatc

SEQ ID NO: 197991 - DNA, 20 bp, Artificial sequence
  SiRNA target sequence
tagaaatagattaaaaatcg

SEQ ID NO: 197992 - DNA, 20 bp, Artificial sequence
  SiRNA target sequence
agaaatagattaaaaatcga

SEQ ID NO: 197993 - DNA, 20 bp, Artificial sequence
  SiRNA target sequence
gaaatagattaaaaatcgat

SEQ ID NO: 197994 - DNA, 20 bp, Artificial sequence
  SiRNA target sequence
aaatagattaaaaatcgatg

SEQ ID NO: 197995 - DNA, 20 bp, Artificial sequence
  SiRNA target sequence
aatagattaaaaatcgatga

SEQ ID NO: 197996 - DNA, 20 bp, Artificial sequence
  SiRNA target sequence
atagattaaaaatcgatgat

SEQ ID NO: 197997 - DNA, 20 bp, Artificial sequence
  SiRNA target sequence
tagattaaaaatcgatgata

SEQ ID NO: 197998 - DNA, 20 bp, Artificial sequence
  SiRNA target sequence
agattaaaaatcgatgatac

SEQ ID NO: 197999 - DNA, 20 bp, Artificial sequence
  SiRNA target sequence
gattaaaaatcgatgataca

SEQ ID NO: 198000 - DNA, 20 bp, Artificial sequence
  SiRNA target sequence
attaaaaatcgatgatacag

SEQ ID NO: 198001 - DNA, 20 bp, Artificial sequence
  SiRNA target sequence
ttaaaaatcgatgatacagg

SEQ ID NO: 198002 - DNA, 20 bp, Artificial sequence
  SiRNA target sequence
taaaaatcgatgatacaggt

SEQ ID NO: 198003 - DNA, 20 bp, Artificial sequence
  SiRNA target sequence
aaaaatcgatgatacaggtt

SEQ ID NO: 198004 - DNA, 20 bp, Artificial sequence
  SiRNA target sequence
aaaatcgatgatacaggttt

SEQ ID NO: 198005 - DNA, 20 bp, Artificial sequence
  SiRNA target sequence
aaatcgatgatacaggttta

SEQ ID NO: 198006 - DNA, 20 bp, Artificial sequence
  SiRNA target sequence
aatcgatgatacaggtttat

SEQ ID NO: 198007 - DNA, 20 bp, Artificial sequence
  SiRNA target sequence
atcgatgatacaggtttatt

SEQ ID NO: 198008 - DNA, 20 bp, Artificial sequence
  SiRNA target sequence
tcgatgatacaggtttattt

SEQ ID NO: 198009 - DNA, 20 bp, Artificial sequence
  SiRNA target sequence
cgatgatacaggtttatttt

SEQ ID NO: 198010 - DNA, 20 bp, Artificial sequence
  SiRNA target sequence
gatgatacaggtttattttg

SEQ ID NO: 198011 - DNA, 20 bp, Artificial sequence
  SiRNA target sequence
atgatacaggtttattttgc

SEQ ID NO: 198012 - DNA, 20 bp, Artificial sequence
  SiRNA target sequence
tgatacaggtttattttgca

SEQ ID NO: 198013 - DNA, 20 bp, Artificial sequence
  SiRNA target sequence
gatacaggtttattttgcat

SEQ ID NO: 198014 - DNA, 20 bp, Artificial sequence
  SiRNA target sequence
atacaggtttattttgcata

SEQ ID NO: 198015 - DNA, 20 bp, Artificial sequence
  SiRNA target sequence
tacaggtttattttgcataa

SEQ ID NO: 198016 - DNA, 20 bp, Artificial sequence
  SiRNA target sequence
acaggtttattttgcataag

SEQ ID NO: 198017 - DNA, 20 bp, Artificial sequence
  SiRNA target sequence
caggtttattttgcataagc

SEQ ID NO: 198018 - DNA, 20 bp, Artificial sequence
  SiRNA target sequence
aggtttattttgcataagcc

SEQ ID NO: 198019 - DNA, 20 bp, Artificial sequence
  SiRNA target sequence
ggtttattttgcataagcca

SEQ ID NO: 198020 - DNA, 20 bp, Artificial sequence
  SiRNA target sequence
gtttattttgcataagccac

SEQ ID NO: 198021 - DNA, 20 bp, Artificial sequence
  SiRNA target sequence
tttattttgcataagccact

SEQ ID NO: 198022 - DNA, 20 bp, Artificial sequence
  SiRNA target sequence
ttattttgcataagccactg

SEQ ID NO: 198023 - DNA, 20 bp, Artificial sequence
  SiRNA target sequence
tattttgcataagccactgt

SEQ ID NO: 198024 - DNA, 20 bp, Artificial sequence
  SiRNA target sequence
attttgcataagccactgta

SEQ ID NO: 198025 - DNA, 20 bp, Artificial sequence
  SiRNA target sequence
ttttgcataagccactgtat

SEQ ID NO: 198026 - DNA, 20 bp, Artificial sequence
  SiRNA target sequence
tttgcataagccactgtatt

SEQ ID NO: 198027 - DNA, 20 bp, Artificial sequence
  SiRNA target sequence
ttgcataagccactgtatta

SEQ ID NO: 198028 - DNA, 20 bp, Artificial sequence
  SiRNA target sequence
tgcataagccactgtattaa

SEQ ID NO: 198029 - DNA, 20 bp, Artificial sequence
  SiRNA target sequence
gcataagccactgtattaaa

SEQ ID NO: 198030 - DNA, 20 bp, Artificial sequence
  SiRNA target sequence
cataagccactgtattaaaa

SEQ ID NO: 198031 - DNA, 20 bp, Artificial sequence
  SiRNA target sequence
ataagccactgtattaaaat

SEQ ID NO: 198032 - DNA, 20 bp, Artificial sequence
  SiRNA target sequence
taagccactgtattaaaatt

SEQ ID NO: 198033 - DNA, 20 bp, Artificial sequence
  SiRNA target sequence
aagccactgtattaaaatta

SEQ ID NO: 198034 - DNA, 20 bp, Artificial sequence
  SiRNA target sequence
agccactgtattaaaattac

SEQ ID NO: 198035 - DNA, 20 bp, Artificial sequence
  SiRNA target sequence
gccactgtattaaaattaca

SEQ ID NO: 198036 - DNA, 20 bp, Artificial sequence
  SiRNA target sequence
ccactgtattaaaattacag

SEQ ID NO: 198037 - DNA, 20 bp, Artificial sequence
  SiRNA target sequence
cactgtattaaaattacaga

SEQ ID NO: 198038 - DNA, 20 bp, Artificial sequence
  SiRNA target sequence
actgtattaaaattacagat

SEQ ID NO: 198039 - DNA, 20 bp, Artificial sequence
  SiRNA target sequence
ctgtattaaaattacagatg

SEQ ID NO: 198040 - DNA, 20 bp, Artificial sequence
  SiRNA target sequence
tgtattaaaattacagatgc

SEQ ID NO: 198041 - DNA, 20 bp, Artificial sequence
  SiRNA target sequence
gtattaaaattacagatgca

SEQ ID NO: 198042 - DNA, 20 bp, Artificial sequence
  SiRNA target sequence
tattaaaattacagatgcaa

SEQ ID NO: 198043 - DNA, 20 bp, Artificial sequence
  SiRNA target sequence
attaaaattacagatgcaaa

SEQ ID NO: 198044 - DNA, 20 bp, Artificial sequence
  SiRNA target sequence
ttaaaattacagatgcaaaa

SEQ ID NO: 198045 - DNA, 20 bp, Artificial sequence
  SiRNA target sequence
taaaattacagatgcaaaag

SEQ ID NO: 198046 - DNA, 20 bp, Artificial sequence
  SiRNA target sequence
aaaattacagatgcaaaaga

SEQ ID NO: 198047 - DNA, 20 bp, Artificial sequence
  SiRNA target sequence
aaattacagatgcaaaagat

SEQ ID NO: 198048 - DNA, 20 bp, Artificial sequence
  SiRNA target sequence
aattacagatgcaaaagata

SEQ ID NO: 198049 - DNA, 20 bp, Artificial sequence
  SiRNA target sequence
attacagatgcaaaagatat

SEQ ID NO: 198050 - DNA, 20 bp, Artificial sequence
  SiRNA target sequence
ttacagatgcaaaagatata

SEQ ID NO: 198051 - DNA, 20 bp, Artificial sequence
  SiRNA target sequence
tacagatgcaaaagatatag

SEQ ID NO: 198052 - DNA, 20 bp, Artificial sequence
  SiRNA target sequence
acagatgcaaaagatatagg

SEQ ID NO: 198053 - DNA, 20 bp, Artificial sequence
  SiRNA target sequence
cagatgcaaaagatatagga

SEQ ID NO: 198054 - DNA, 20 bp, Artificial sequence
  SiRNA target sequence
agatgcaaaagatataggaa

SEQ ID NO: 198055 - DNA, 20 bp, Artificial sequence
  SiRNA target sequence
gatgcaaaagatataggaag

SEQ ID NO: 198056 - DNA, 20 bp, Artificial sequence
  SiRNA target sequence
atgcaaaagatataggaaga

SEQ ID NO: 198057 - DNA, 20 bp, Artificial sequence
  SiRNA target sequence
tgcaaaagatataggaagaa

SEQ ID NO: 198058 - DNA, 20 bp, Artificial sequence
  SiRNA target sequence
gcaaaagatataggaagaac

SEQ ID NO: 198059 - DNA, 20 bp, Artificial sequence
  SiRNA target sequence
caaaagatataggaagaaca

SEQ ID NO: 198060 - DNA, 20 bp, Artificial sequence
  SiRNA target sequence
aaaagatataggaagaacat

SEQ ID NO: 198061 - DNA, 20 bp, Artificial sequence
  SiRNA target sequence
aaagatataggaagaacata

SEQ ID NO: 198062 - DNA, 20 bp, Artificial sequence
  SiRNA target sequence
aagatataggaagaacataa

SEQ ID NO: 198063 - DNA, 20 bp, Artificial sequence
  SiRNA target sequence
agatataggaagaacataaa

SEQ ID NO: 198064 - DNA, 20 bp, Artificial sequence
  SiRNA target sequence
gatataggaagaacataaaa

SEQ ID NO: 198065 - DNA, 20 bp, Artificial sequence
  SiRNA target sequence
atataggaagaacataaaaa

SEQ ID NO: 198066 - DNA, 20 bp, Artificial sequence
  SiRNA target sequence
tataggaagaacataaaaaa

SEQ ID NO: 198067 - DNA, 20 bp, Artificial sequence
  SiRNA target sequence
ataggaagaacataaaaaat

SEQ ID NO: 198068 - DNA, 20 bp, Artificial sequence
  SiRNA target sequence
taggaagaacataaaaaatt

SEQ ID NO: 198069 - DNA, 20 bp, Artificial sequence
  SiRNA target sequence
aggaagaacataaaaaattt

SEQ ID NO: 198070 - DNA, 20 bp, Artificial sequence
  SiRNA target sequence
ggaagaacataaaaaatttt

SEQ ID NO: 198071 - DNA, 20 bp, Artificial sequence
  SiRNA target sequence
gaagaacataaaaaattttc

SEQ ID NO: 198072 - DNA, 20 bp, Artificial sequence
  SiRNA target sequence
aagaacataaaaaattttca

SEQ ID NO: 198073 - DNA, 20 bp, Artificial sequence
  SiRNA target sequence
agaacataaaaaattttcat

SEQ ID NO: 198074 - DNA, 20 bp, Artificial sequence
  SiRNA target sequence
gaacataaaaaattttcata

SEQ ID NO: 198075 - DNA, 20 bp, Artificial sequence
  SiRNA target sequence
aacataaaaaattttcataa

SEQ ID NO: 198076 - DNA, 20 bp, Artificial sequence
  SiRNA target sequence
acataaaaaattttcataaa

SEQ ID NO: 198077 - DNA, 20 bp, Artificial sequence
  SiRNA target sequence
cataaaaaattttcataaac

SEQ ID NO: 198078 - DNA, 20 bp, Artificial sequence
  SiRNA target sequence
ataaaaaattttcataaaca

SEQ ID NO: 198079 - DNA, 20 bp, Artificial sequence
  SiRNA target sequence
taaaaaattttcataaacat

SEQ ID NO: 198080 - DNA, 20 bp, Artificial sequence
  SiRNA target sequence
aaaaaattttcataaacata

SEQ ID NO: 198081 - DNA, 20 bp, Artificial sequence
  SiRNA target sequence
aaaaattttcataaacataa

SEQ ID NO: 198082 - DNA, 20 bp, Artificial sequence
  SiRNA target sequence
aaaattttcataaacataat

SEQ ID NO: 198083 - DNA, 20 bp, Artificial sequence
  SiRNA target sequence
aaattttcataaacataatt

SEQ ID NO: 198084 - DNA, 20 bp, Artificial sequence
  SiRNA target sequence
aattttcataaacataattg

SEQ ID NO: 198085 - DNA, 20 bp, Artificial sequence
  SiRNA target sequence
attttcataaacataattga

SEQ ID NO: 198086 - DNA, 20 bp, Artificial sequence
  SiRNA target sequence
ttttcataaacataattgaa

SEQ ID NO: 198087 - DNA, 20 bp, Artificial sequence
  SiRNA target sequence
tttcataaacataattgaat

SEQ ID NO: 198088 - DNA, 20 bp, Artificial sequence
  SiRNA target sequence
ttcataaacataattgaatt

SEQ ID NO: 198089 - DNA, 20 bp, Artificial sequence
  SiRNA target sequence
tcataaacataattgaattc

SEQ ID NO: 198090 - DNA, 20 bp, Artificial sequence
  SiRNA target sequence
cataaacataattgaattct

SEQ ID NO: 198091 - DNA, 20 bp, Artificial sequence
  SiRNA target sequence
ataaacataattgaattctg

SEQ ID NO: 198092 - DNA, 20 bp, Artificial sequence
  SiRNA target sequence
taaacataattgaattctga

SEQ ID NO: 198093 - DNA, 20 bp, Artificial sequence
  SiRNA target sequence
aaacataattgaattctgat

SEQ ID NO: 198094 - DNA, 20 bp, Artificial sequence
  SiRNA target sequence
aacataattgaattctgatc

SEQ ID NO: 198095 - DNA, 20 bp, Artificial sequence
  SiRNA target sequence
acataattgaattctgatct

SEQ ID NO: 198096 - DNA, 20 bp, Artificial sequence
  SiRNA target sequence
cataattgaattctgatctt

SEQ ID NO: 198097 - DNA, 20 bp, Artificial sequence
  SiRNA target sequence
ataattgaattctgatcttg

SEQ ID NO: 198098 - DNA, 20 bp, Artificial sequence
  SiRNA target sequence
taattgaattctgatcttgc

SEQ ID NO: 198099 - DNA, 20 bp, Artificial sequence
  SiRNA target sequence
aattgaattctgatcttgcc

SEQ ID NO: 198100 - DNA, 20 bp, Artificial sequence
  SiRNA target sequence
attgaattctgatcttgcct

SEQ ID NO: 198101 - DNA, 20 bp, Artificial sequence
  SiRNA target sequence
ttgaattctgatcttgcctt

SEQ ID NO: 198102 - DNA, 20 bp, Artificial sequence
  SiRNA target sequence
tgaattctgatcttgcctta

SEQ ID NO: 198103 - DNA, 20 bp, Artificial sequence
  SiRNA target sequence
gaattctgatcttgccttac

SEQ ID NO: 198104 - DNA, 20 bp, Artificial sequence
  SiRNA target sequence
aattctgatcttgccttacc

SEQ ID NO: 198105 - DNA, 20 bp, Artificial sequence
  SiRNA target sequence
attctgatcttgccttacca

SEQ ID NO: 198106 - DNA, 20 bp, Artificial sequence
  SiRNA target sequence
ttctgatcttgccttaccat

SEQ ID NO: 198107 - DNA, 20 bp, Artificial sequence
  SiRNA target sequence
tctgatcttgccttaccatc

SEQ ID NO: 198108 - DNA, 20 bp, Artificial sequence
  SiRNA target sequence
ctgatcttgccttaccatca

SEQ ID NO: 198109 - DNA, 20 bp, Artificial sequence
  SiRNA target sequence
tgatcttgccttaccatcac

SEQ ID NO: 198110 - DNA, 20 bp, Artificial sequence
  SiRNA target sequence
gatcttgccttaccatcaca

SEQ ID NO: 198111 - DNA, 20 bp, Artificial sequence
  SiRNA target sequence
atcttgccttaccatcacaa

SEQ ID NO: 198112 - DNA, 20 bp, Artificial sequence
  SiRNA target sequence
tcttgccttaccatcacaaa

SEQ ID NO: 198113 - DNA, 20 bp, Artificial sequence
  SiRNA target sequence
cttgccttaccatcacaaat

SEQ ID NO: 198114 - DNA, 20 bp, Artificial sequence
  SiRNA target sequence
ttgccttaccatcacaaata

SEQ ID NO: 198115 - DNA, 20 bp, Artificial sequence
  SiRNA target sequence
tgccttaccatcacaaataa

SEQ ID NO: 198116 - DNA, 20 bp, Artificial sequence
  SiRNA target sequence
gccttaccatcacaaataaa

SEQ ID NO: 198117 - DNA, 20 bp, Artificial sequence
  SiRNA target sequence
ccttaccatcacaaataaat

SEQ ID NO: 198118 - DNA, 20 bp, Artificial sequence
  SiRNA target sequence
cttaccatcacaaataaatc

SEQ ID NO: 198119 - DNA, 20 bp, Artificial sequence
  SiRNA target sequence
ttaccatcacaaataaatct

SEQ ID NO: 198120 - DNA, 20 bp, Artificial sequence
  SiRNA target sequence
taccatcacaaataaatctt

SEQ ID NO: 198121 - DNA, 20 bp, Artificial sequence
  SiRNA target sequence
accatcacaaataaatcttt

SEQ ID NO: 198122 - DNA, 20 bp, Artificial sequence
  SiRNA target sequence
ccatcacaaataaatctttt

SEQ ID NO: 198123 - DNA, 20 bp, Artificial sequence
  SiRNA target sequence
catcacaaataaatctttta

SEQ ID NO: 198124 - DNA, 20 bp, Artificial sequence
  SiRNA target sequence
atcacaaataaatcttttaa

SEQ ID NO: 198125 - DNA, 20 bp, Artificial sequence
  SiRNA target sequence
tcacaaataaatcttttaaa

SEQ ID NO: 198126 - DNA, 20 bp, Artificial sequence
  SiRNA target sequence
cacaaataaatcttttaaaa

SEQ ID NO: 198127 - DNA, 20 bp, Artificial sequence
  SiRNA target sequence
acaaataaatcttttaaaat

SEQ ID NO: 198128 - DNA, 20 bp, Artificial sequence
  SiRNA target sequence
caaataaatcttttaaaatt

SEQ ID NO: 198129 - DNA, 20 bp, Artificial sequence
  SiRNA target sequence
aaataaatcttttaaaattc

SEQ ID NO: 198130 - DNA, 20 bp, Artificial sequence
  SiRNA target sequence
aataaatcttttaaaattct

SEQ ID NO: 198131 - DNA, 20 bp, Artificial sequence
  SiRNA target sequence
ataaatcttttaaaattctt

SEQ ID NO: 198132 - DNA, 20 bp, Artificial sequence
  SiRNA target sequence
taaatcttttaaaattctta

SEQ ID NO: 198133 - DNA, 20 bp, Artificial sequence
  SiRNA target sequence
aaatcttttaaaattcttaa

SEQ ID NO: 198134 - DNA, 20 bp, Artificial sequence
  SiRNA target sequence
aatcttttaaaattcttaaa

SEQ ID NO: 198135 - DNA, 20 bp, Artificial sequence
  SiRNA target sequence
atcttttaaaattcttaaaa

SEQ ID NO: 198136 - DNA, 20 bp, Artificial sequence
  SiRNA target sequence
tcttttaaaattcttaaaaa

SEQ ID NO: 198137 - DNA, 20 bp, Artificial sequence
  SiRNA target sequence
cttttaaaattcttaaaaat

SEQ ID NO: 198138 - DNA, 20 bp, Artificial sequence
  SiRNA target sequence
ttttaaaattcttaaaaatg

SEQ ID NO: 198139 - DNA, 20 bp, Artificial sequence
  SiRNA target sequence
tttaaaattcttaaaaatga

SEQ ID NO: 198140 - DNA, 20 bp, Artificial sequence
  SiRNA target sequence
ttaaaattcttaaaaatgaa

SEQ ID NO: 198141 - DNA, 20 bp, Artificial sequence
  SiRNA target sequence
taaaattcttaaaaatgaat

SEQ ID NO: 198142 - DNA, 20 bp, Artificial sequence
  SiRNA target sequence
aaaattcttaaaaatgaata

SEQ ID NO: 198143 - DNA, 20 bp, Artificial sequence
  SiRNA target sequence
aaattcttaaaaatgaatac

SEQ ID NO: 198144 - DNA, 20 bp, Artificial sequence
  SiRNA target sequence
aattcttaaaaatgaataca

SEQ ID NO: 198145 - DNA, 20 bp, Artificial sequence
  SiRNA target sequence
attcttaaaaatgaatacac

SEQ ID NO: 198146 - DNA, 20 bp, Artificial sequence
  SiRNA target sequence
ttcttaaaaatgaatacaca

SEQ ID NO: 198147 - DNA, 20 bp, Artificial sequence
  SiRNA target sequence
tcttaaaaatgaatacacaa

SEQ ID NO: 198148 - DNA, 20 bp, Artificial sequence
  SiRNA target sequence
cttaaaaatgaatacacaaa

SEQ ID NO: 198149 - DNA, 20 bp, Artificial sequence
  SiRNA target sequence
ttaaaaatgaatacacaaag

SEQ ID NO: 198150 - DNA, 20 bp, Artificial sequence
  SiRNA target sequence
taaaaatgaatacacaaagt

SEQ ID NO: 198151 - DNA, 20 bp, Artificial sequence
  SiRNA target sequence
aaaaatgaatacacaaagtt

SEQ ID NO: 198152 - DNA, 20 bp, Artificial sequence
  SiRNA target sequence
aaaatgaatacacaaagtta

SEQ ID NO: 198153 - DNA, 20 bp, Artificial sequence
  SiRNA target sequence
aaatgaatacacaaagttaa

SEQ ID NO: 198154 - DNA, 20 bp, Artificial sequence
  SiRNA target sequence
aatgaatacacaaagttaat

SEQ ID NO: 198155 - DNA, 20 bp, Artificial sequence
  SiRNA target sequence
atgaatacacaaagttaatt

SEQ ID NO: 198156 - DNA, 20 bp, Artificial sequence
  SiRNA target sequence
tgaatacacaaagttaatta

SEQ ID NO: 198157 - DNA, 20 bp, Artificial sequence
  SiRNA target sequence
gaatacacaaagttaattaa

SEQ ID NO: 198158 - DNA, 20 bp, Artificial sequence
  SiRNA target sequence
aatacacaaagttaattaat

SEQ ID NO: 198159 - DNA, 20 bp, Artificial sequence
  SiRNA target sequence
atacacaaagttaattaatc

SEQ ID NO: 198160 - DNA, 20 bp, Artificial sequence
  SiRNA target sequence
tacacaaagttaattaatcc

SEQ ID NO: 198161 - DNA, 20 bp, Artificial sequence
  SiRNA target sequence
acacaaagttaattaatcca

SEQ ID NO: 198162 - DNA, 20 bp, Artificial sequence
  SiRNA target sequence
cacaaagttaattaatccaa

SEQ ID NO: 198163 - DNA, 20 bp, Artificial sequence
  SiRNA target sequence
acaaagttaattaatccaaa

SEQ ID NO: 198164 - DNA, 20 bp, Artificial sequence
  SiRNA target sequence
caaagttaattaatccaaac

SEQ ID NO: 198165 - DNA, 20 bp, Artificial sequence
  SiRNA target sequence
aaagttaattaatccaaaca

SEQ ID NO: 198166 - DNA, 20 bp, Artificial sequence
  SiRNA target sequence
aagttaattaatccaaacat

SEQ ID NO: 198167 - DNA, 20 bp, Artificial sequence
  SiRNA target sequence
agttaattaatccaaacata

SEQ ID NO: 198168 - DNA, 20 bp, Artificial sequence
  SiRNA target sequence
gttaattaatccaaacataa

SEQ ID NO: 198169 - DNA, 20 bp, Artificial sequence
  SiRNA target sequence
ttaattaatccaaacataat

SEQ ID NO: 198170 - DNA, 20 bp, Artificial sequence
  SiRNA target sequence
taattaatccaaacataata

SEQ ID NO: 198171 - DNA, 20 bp, Artificial sequence
  SiRNA target sequence
aattaatccaaacataatac

SEQ ID NO: 198172 - DNA, 20 bp, Artificial sequence
  SiRNA target sequence
attaatccaaacataatacc

SEQ ID NO: 198173 - DNA, 20 bp, Artificial sequence
  SiRNA target sequence
ttaatccaaacataatacca

SEQ ID NO: 198174 - DNA, 20 bp, Artificial sequence
  SiRNA target sequence
taatccaaacataataccaa

SEQ ID NO: 198175 - DNA, 20 bp, Artificial sequence
  SiRNA target sequence
aatccaaacataataccaag

SEQ ID NO: 198176 - DNA, 20 bp, Artificial sequence
  SiRNA target sequence
atccaaacataataccaagt

SEQ ID NO: 198177 - DNA, 20 bp, Artificial sequence
  SiRNA target sequence
tccaaacataataccaagta

SEQ ID NO: 198178 - DNA, 20 bp, Artificial sequence
  SiRNA target sequence
ccaaacataataccaagtat

SEQ ID NO: 198179 - DNA, 20 bp, Artificial sequence
  SiRNA target sequence
caaacataataccaagtata

SEQ ID NO: 198180 - DNA, 20 bp, Artificial sequence
  SiRNA target sequence
aaacataataccaagtataa

SEQ ID NO: 198181 - DNA, 20 bp, Artificial sequence
  SiRNA target sequence
aacataataccaagtataaa

SEQ ID NO: 198182 - DNA, 20 bp, Artificial sequence
  SiRNA target sequence
acataataccaagtataaaa

SEQ ID NO: 198183 - DNA, 20 bp, Artificial sequence
  SiRNA target sequence
cataataccaagtataaaaa

SEQ ID NO: 198184 - DNA, 20 bp, Artificial sequence
  SiRNA target sequence
ataataccaagtataaaaaa

SEQ ID NO: 198185 - DNA, 20 bp, Artificial sequence
  SiRNA target sequence
taataccaagtataaaaaat

SEQ ID NO: 198186 - DNA, 20 bp, Artificial sequence
  SiRNA target sequence
aataccaagtataaaaaatt

SEQ ID NO: 198187 - DNA, 20 bp, Artificial sequence
  SiRNA target sequence
ataccaagtataaaaaattt

SEQ ID NO: 198188 - DNA, 20 bp, Artificial sequence
  SiRNA target sequence
taccaagtataaaaaattta

SEQ ID NO: 198189 - DNA, 20 bp, Artificial sequence
  SiRNA target sequence
accaagtataaaaaatttag

SEQ ID NO: 198190 - DNA, 20 bp, Artificial sequence
  SiRNA target sequence
ccaagtataaaaaatttagg

SEQ ID NO: 198191 - DNA, 20 bp, Artificial sequence
  SiRNA target sequence
caagtataaaaaatttaggc

SEQ ID NO: 198192 - DNA, 20 bp, Artificial sequence
  SiRNA target sequence
aagtataaaaaatttaggca

SEQ ID NO: 198193 - DNA, 20 bp, Artificial sequence
  SiRNA target sequence
agtataaaaaatttaggcat

SEQ ID NO: 198194 - DNA, 20 bp, Artificial sequence
  SiRNA target sequence
gtataaaaaatttaggcatt

SEQ ID NO: 198195 - DNA, 20 bp, Artificial sequence
  SiRNA target sequence
tataaaaaatttaggcattt

SEQ ID NO: 198196 - DNA, 20 bp, Artificial sequence
  SiRNA target sequence
ataaaaaatttaggcatttc

SEQ ID NO: 198197 - DNA, 20 bp, Artificial sequence
  SiRNA target sequence
taaaaaatttaggcatttca

SEQ ID NO: 198198 - DNA, 20 bp, Artificial sequence
  SiRNA target sequence
aaaaaatttaggcatttcaa

SEQ ID NO: 198199 - DNA, 20 bp, Artificial sequence
  SiRNA target sequence
aaaaatttaggcatttcaac

SEQ ID NO: 198200 - DNA, 20 bp, Artificial sequence
  SiRNA target sequence
aaaatttaggcatttcaacc

SEQ ID NO: 198201 - DNA, 20 bp, Artificial sequence
  SiRNA target sequence
aaatttaggcatttcaacct

SEQ ID NO: 198202 - DNA, 20 bp, Artificial sequence
  SiRNA target sequence
aatttaggcatttcaacctt

SEQ ID NO: 198203 - DNA, 20 bp, Artificial sequence
  SiRNA target sequence
atttaggcatttcaacctta

SEQ ID NO: 198204 - DNA, 20 bp, Artificial sequence
  SiRNA target sequence
tttaggcatttcaaccttag

SEQ ID NO: 198205 - DNA, 20 bp, Artificial sequence
  SiRNA target sequence
ttaggcatttcaaccttagc

SEQ ID NO: 198206 - DNA, 20 bp, Artificial sequence
  SiRNA target sequence
taggcatttcaaccttagca

SEQ ID NO: 198207 - DNA, 20 bp, Artificial sequence
  SiRNA target sequence
aggcatttcaaccttagcaa

SEQ ID NO: 198208 - DNA, 20 bp, Artificial sequence
  SiRNA target sequence
ggcatttcaaccttagcaac

SEQ ID NO: 198209 - DNA, 20 bp, Artificial sequence
  SiRNA target sequence
gcatttcaaccttagcaact

SEQ ID NO: 198210 - DNA, 20 bp, Artificial sequence
  SiRNA target sequence
catttcaaccttagcaactt

SEQ ID NO: 198211 - DNA, 20 bp, Artificial sequence
  SiRNA target sequence
atttcaaccttagcaacttt

SEQ ID NO: 198212 - DNA, 20 bp, Artificial sequence
  SiRNA target sequence
tttcaaccttagcaacttta

SEQ ID NO: 198213 - DNA, 20 bp, Artificial sequence
  SiRNA target sequence
ttcaaccttagcaactttaa

SEQ ID NO: 198214 - DNA, 20 bp, Artificial sequence
  SiRNA target sequence
tcaaccttagcaactttaaa

SEQ ID NO: 198215 - DNA, 20 bp, Artificial sequence
  SiRNA target sequence
caaccttagcaactttaaaa

SEQ ID NO: 198216 - DNA, 20 bp, Artificial sequence
  SiRNA target sequence
aaccttagcaactttaaaat

SEQ ID NO: 198217 - DNA, 20 bp, Artificial sequence
  SiRNA target sequence
accttagcaactttaaaata

SEQ ID NO: 198218 - DNA, 20 bp, Artificial sequence
  SiRNA target sequence
ccttagcaactttaaaataa

SEQ ID NO: 198219 - DNA, 20 bp, Artificial sequence
  SiRNA target sequence
cttagcaactttaaaataac

SEQ ID NO: 198220 - DNA, 20 bp, Artificial sequence
  SiRNA target sequence
ttagcaactttaaaataact

SEQ ID NO: 198221 - DNA, 20 bp, Artificial sequence
  SiRNA target sequence
tagcaactttaaaataactc

SEQ ID NO: 198222 - DNA, 20 bp, Artificial sequence
  SiRNA target sequence
agcaactttaaaataactca

SEQ ID NO: 198223 - DNA, 20 bp, Artificial sequence
  SiRNA target sequence
gcaactttaaaataactcag

SEQ ID NO: 198224 - DNA, 20 bp, Artificial sequence
  SiRNA target sequence
caactttaaaataactcagt

SEQ ID NO: 198225 - DNA, 20 bp, Artificial sequence
  SiRNA target sequence
aactttaaaataactcagta

SEQ ID NO: 198226 - DNA, 20 bp, Artificial sequence
  SiRNA target sequence
actttaaaataactcagtaa

SEQ ID NO: 198227 - DNA, 20 bp, Artificial sequence
  SiRNA target sequence
ctttaaaataactcagtaat

SEQ ID NO: 198228 - DNA, 20 bp, Artificial sequence
  SiRNA target sequence
tttaaaataactcagtaatc

SEQ ID NO: 198229 - DNA, 20 bp, Artificial sequence
  SiRNA target sequence
ttaaaataactcagtaatcc

SEQ ID NO: 198230 - DNA, 20 bp, Artificial sequence
  SiRNA target sequence
taaaataactcagtaatcct

SEQ ID NO: 198231 - DNA, 20 bp, Artificial sequence
  SiRNA target sequence
aaaataactcagtaatcctg

SEQ ID NO: 198232 - DNA, 20 bp, Artificial sequence
  SiRNA target sequence
aaataactcagtaatcctgt

SEQ ID NO: 198233 - DNA, 20 bp, Artificial sequence
  SiRNA target sequence
aataactcagtaatcctgtt

SEQ ID NO: 198234 - DNA, 20 bp, Artificial sequence
  SiRNA target sequence
ataactcagtaatcctgttc

SEQ ID NO: 198235 - DNA, 20 bp, Artificial sequence
  SiRNA target sequence
taactcagtaatcctgttct

SEQ ID NO: 198236 - DNA, 20 bp, Artificial sequence
  SiRNA target sequence
aactcagtaatcctgttctt

SEQ ID NO: 198237 - DNA, 20 bp, Artificial sequence
  SiRNA target sequence
actcagtaatcctgttcttg

SEQ ID NO: 198238 - DNA, 20 bp, Artificial sequence
  SiRNA target sequence
ctcagtaatcctgttcttga

SEQ ID NO: 198239 - DNA, 20 bp, Artificial sequence
  SiRNA target sequence
tcagtaatcctgttcttgaa

SEQ ID NO: 198240 - DNA, 20 bp, Artificial sequence
  SiRNA target sequence
cagtaatcctgttcttgaat

SEQ ID NO: 198241 - DNA, 20 bp, Artificial sequence
  SiRNA target sequence
agtaatcctgttcttgaatt

SEQ ID NO: 198242 - DNA, 20 bp, Artificial sequence
  SiRNA target sequence
gtaatcctgttcttgaattt

SEQ ID NO: 198243 - DNA, 20 bp, Artificial sequence
  SiRNA target sequence
taatcctgttcttgaatttg

SEQ ID NO: 198244 - DNA, 20 bp, Artificial sequence
  SiRNA target sequence
aatcctgttcttgaatttgc

SEQ ID NO: 198245 - DNA, 20 bp, Artificial sequence
  SiRNA target sequence
atcctgttcttgaatttgct

SEQ ID NO: 198246 - DNA, 20 bp, Artificial sequence
  SiRNA target sequence
tcctgttcttgaatttgcta

SEQ ID NO: 198247 - DNA, 20 bp, Artificial sequence
  SiRNA target sequence
cctgttcttgaatttgctaa

SEQ ID NO: 198248 - DNA, 20 bp, Artificial sequence
  SiRNA target sequence
ctgttcttgaatttgctaat

SEQ ID NO: 198249 - DNA, 20 bp, Artificial sequence
  SiRNA target sequence
tgttcttgaatttgctaatt

SEQ ID NO: 198250 - DNA, 20 bp, Artificial sequence
  SiRNA target sequence
gttcttgaatttgctaattg

SEQ ID NO: 198251 - DNA, 20 bp, Artificial sequence
  SiRNA target sequence
ttcttgaatttgctaattga

SEQ ID NO: 198252 - DNA, 20 bp, Artificial sequence
  SiRNA target sequence
tcttgaatttgctaattgat

SEQ ID NO: 198253 - DNA, 20 bp, Artificial sequence
  SiRNA target sequence
cttgaatttgctaattgatc

SEQ ID NO: 198254 - DNA, 20 bp, Artificial sequence
  SiRNA target sequence
ttgaatttgctaattgatca

SEQ ID NO: 198255 - DNA, 20 bp, Artificial sequence
  SiRNA target sequence
tgaatttgctaattgatcaa

SEQ ID NO: 198256 - DNA, 20 bp, Artificial sequence
  SiRNA target sequence
gaatttgctaattgatcaat

SEQ ID NO: 198257 - DNA, 20 bp, Artificial sequence
  SiRNA target sequence
aatttgctaattgatcaatc

SEQ ID NO: 198258 - DNA, 20 bp, Artificial sequence
  SiRNA target sequence
atttgctaattgatcaatct

SEQ ID NO: 198259 - DNA, 20 bp, Artificial sequence
  SiRNA target sequence
tttgctaattgatcaatctc

SEQ ID NO: 198260 - DNA, 20 bp, Artificial sequence
  SiRNA target sequence
ttgctaattgatcaatctca

SEQ ID NO: 198261 - DNA, 20 bp, Artificial sequence
  SiRNA target sequence
tgctaattgatcaatctcat

SEQ ID NO: 198262 - DNA, 20 bp, Artificial sequence
  SiRNA target sequence
gctaattgatcaatctcatc

SEQ ID NO: 198263 - DNA, 20 bp, Artificial sequence
  SiRNA target sequence
ctaattgatcaatctcatct

SEQ ID NO: 198264 - DNA, 20 bp, Artificial sequence
  SiRNA target sequence
taattgatcaatctcatctt

SEQ ID NO: 198265 - DNA, 20 bp, Artificial sequence
  SiRNA target sequence
aattgatcaatctcatcttc

SEQ ID NO: 198266 - DNA, 20 bp, Artificial sequence
  SiRNA target sequence
attgatcaatctcatcttcc

SEQ ID NO: 198267 - DNA, 20 bp, Artificial sequence
  SiRNA target sequence
ttgatcaatctcatcttccg

SEQ ID NO: 198268 - DNA, 20 bp, Artificial sequence
  SiRNA target sequence
tgatcaatctcatcttccgt

SEQ ID NO: 198269 - DNA, 20 bp, Artificial sequence
  SiRNA target sequence
gatcaatctcatcttccgta

SEQ ID NO: 198270 - DNA, 20 bp, Artificial sequence
  SiRNA target sequence
atcaatctcatcttccgtag

SEQ ID NO: 198271 - DNA, 20 bp, Artificial sequence
  SiRNA target sequence
tcaatctcatcttccgtagg

SEQ ID NO: 198272 - DNA, 20 bp, Artificial sequence
  SiRNA target sequence
caatctcatcttccgtaggt

SEQ ID NO: 198273 - DNA, 20 bp, Artificial sequence
  SiRNA target sequence
aatctcatcttccgtaggta

SEQ ID NO: 198274 - DNA, 20 bp, Artificial sequence
  SiRNA target sequence
atctcatcttccgtaggtaa

SEQ ID NO: 198275 - DNA, 20 bp, Artificial sequence
  SiRNA target sequence
tctcatcttccgtaggtaag

SEQ ID NO: 198276 - DNA, 20 bp, Artificial sequence
  SiRNA target sequence
ctcatcttccgtaggtaagt

SEQ ID NO: 198277 - DNA, 20 bp, Artificial sequence
  SiRNA target sequence
tcatcttccgtaggtaagtt

SEQ ID NO: 198278 - DNA, 20 bp, Artificial sequence
  SiRNA target sequence
catcttccgtaggtaagttg

SEQ ID NO: 198279 - DNA, 20 bp, Artificial sequence
  SiRNA target sequence
atcttccgtaggtaagttgt

SEQ ID NO: 198280 - DNA, 20 bp, Artificial sequence
  SiRNA target sequence
tcttccgtaggtaagttgtt

SEQ ID NO: 198281 - DNA, 20 bp, Artificial sequence
  SiRNA target sequence
cttccgtaggtaagttgttt

SEQ ID NO: 198282 - DNA, 20 bp, Artificial sequence
  SiRNA target sequence
ttccgtaggtaagttgtttt

SEQ ID NO: 198283 - DNA, 20 bp, Artificial sequence
  SiRNA target sequence
tccgtaggtaagttgttttc

SEQ ID NO: 198284 - DNA, 20 bp, Artificial sequence
  SiRNA target sequence
ccgtaggtaagttgttttca

SEQ ID NO: 198285 - DNA, 20 bp, Artificial sequence
  SiRNA target sequence
cgtaggtaagttgttttcag

SEQ ID NO: 198286 - DNA, 20 bp, Artificial sequence
  SiRNA target sequence
gtaggtaagttgttttcagg

SEQ ID NO: 198287 - DNA, 20 bp, Artificial sequence
  SiRNA target sequence
taggtaagttgttttcaggt

SEQ ID NO: 198288 - DNA, 20 bp, Artificial sequence
  SiRNA target sequence
aggtaagttgttttcaggtg

SEQ ID NO: 198289 - DNA, 20 bp, Artificial sequence
  SiRNA target sequence
ggtaagttgttttcaggtgt

SEQ ID NO: 198290 - DNA, 20 bp, Artificial sequence
  SiRNA target sequence
gtaagttgttttcaggtgtt

SEQ ID NO: 198291 - DNA, 20 bp, Artificial sequence
  SiRNA target sequence
taagttgttttcaggtgttt

SEQ ID NO: 198292 - DNA, 20 bp, Artificial sequence
  SiRNA target sequence
aagttgttttcaggtgtttc

SEQ ID NO: 198293 - DNA, 20 bp, Artificial sequence
  SiRNA target sequence
agttgttttcaggtgtttca

SEQ ID NO: 198294 - DNA, 20 bp, Artificial sequence
  SiRNA target sequence
gttgttttcaggtgtttcat

SEQ ID NO: 198295 - DNA, 20 bp, Artificial sequence
  SiRNA target sequence
ttgttttcaggtgtttcatt

SEQ ID NO: 198296 - DNA, 20 bp, Artificial sequence
  SiRNA target sequence
tgttttcaggtgtttcattt

SEQ ID NO: 198297 - DNA, 20 bp, Artificial sequence
  SiRNA target sequence
gttttcaggtgtttcattta

SEQ ID NO: 198298 - DNA, 20 bp, Artificial sequence
  SiRNA target sequence
ttttcaggtgtttcatttat

SEQ ID NO: 198299 - DNA, 20 bp, Artificial sequence
  SiRNA target sequence
tttcaggtgtttcatttatt

SEQ ID NO: 198300 - DNA, 20 bp, Artificial sequence
  SiRNA target sequence
ttcaggtgtttcatttatta

SEQ ID NO: 198301 - DNA, 20 bp, Artificial sequence
  SiRNA target sequence
tcaggtgtttcatttattac

SEQ ID NO: 198302 - DNA, 20 bp, Artificial sequence
  SiRNA target sequence
caggtgtttcatttattaca

SEQ ID NO: 198303 - DNA, 20 bp, Artificial sequence
  SiRNA target sequence
aggtgtttcatttattacac

SEQ ID NO: 198304 - DNA, 20 bp, Artificial sequence
  SiRNA target sequence
ggtgtttcatttattacact

SEQ ID NO: 198305 - DNA, 20 bp, Artificial sequence
  SiRNA target sequence
gtgtttcatttattacactc

SEQ ID NO: 198306 - DNA, 20 bp, Artificial sequence
  SiRNA target sequence
tgtttcatttattacactca

SEQ ID NO: 198307 - DNA, 20 bp, Artificial sequence
  SiRNA target sequence
gtttcatttattacactcat

SEQ ID NO: 198308 - DNA, 21 bp, Artificial sequence
  SiRNA target sequence
ttattctgcgttttctttttt

SEQ ID NO: 198309 - DNA, 21 bp, Artificial sequence
  SiRNA target sequence
tattctgcgttttcttttttg

SEQ ID NO: 198310 - DNA, 21 bp, Artificial sequence
  SiRNA target sequence
attctgcgttttcttttttgt

SEQ ID NO: 198311 - DNA, 21 bp, Artificial sequence
  SiRNA target sequence
ttctgcgttttcttttttgtc

SEQ ID NO: 198312 - DNA, 21 bp, Artificial sequence
  SiRNA target sequence
tctgcgttttcttttttgtcg

SEQ ID NO: 198313 - DNA, 21 bp, Artificial sequence
  SiRNA target sequence
ctgcgttttcttttttgtcgt

SEQ ID NO: 198314 - DNA, 21 bp, Artificial sequence
  SiRNA target sequence
tgcgttttcttttttgtcgtc

SEQ ID NO: 198315 - DNA, 21 bp, Artificial sequence
  SiRNA target sequence
gcgttttcttttttgtcgtct

SEQ ID NO: 198316 - DNA, 21 bp, Artificial sequence
  SiRNA target sequence
cgttttcttttttgtcgtctt

SEQ ID NO: 198317 - DNA, 21 bp, Artificial sequence
  SiRNA target sequence
gttttcttttttgtcgtcttt

SEQ ID NO: 198318 - DNA, 21 bp, Artificial sequence
  SiRNA target sequence
ttttcttttttgtcgtctttt

SEQ ID NO: 198319 - DNA, 21 bp, Artificial sequence
  SiRNA target sequence
tttcttttttgtcgtctttta

SEQ ID NO: 198320 - DNA, 21 bp, Artificial sequence
  SiRNA target sequence
ttcttttttgtcgtcttttat

SEQ ID NO: 198321 - DNA, 21 bp, Artificial sequence
  SiRNA target sequence
tcttttttgtcgtcttttatt

SEQ ID NO: 198322 - DNA, 21 bp, Artificial sequence
  SiRNA target sequence
cttttttgtcgtcttttatta

SEQ ID NO: 198323 - DNA, 21 bp, Artificial sequence
  SiRNA target sequence
ttttttgtcgtcttttattaa

SEQ ID NO: 198324 - DNA, 21 bp, Artificial sequence
  SiRNA target sequence
tttttgtcgtcttttattaaa

SEQ ID NO: 198325 - DNA, 21 bp, Artificial sequence
  SiRNA target sequence
ttttgtcgtcttttattaaat

SEQ ID NO: 198326 - DNA, 21 bp, Artificial sequence
  SiRNA target sequence
tttgtcgtcttttattaaatc

SEQ ID NO: 198327 - DNA, 21 bp, Artificial sequence
  SiRNA target sequence
ttgtcgtcttttattaaatct

SEQ ID NO: 198328 - DNA, 21 bp, Artificial sequence
  SiRNA target sequence
tgtcgtcttttattaaatcta

SEQ ID NO: 198329 - DNA, 21 bp, Artificial sequence
  SiRNA target sequence
gtcgtcttttattaaatctat

SEQ ID NO: 198330 - DNA, 21 bp, Artificial sequence
  SiRNA target sequence
tcgtcttttattaaatctatg

SEQ ID NO: 198331 - DNA, 21 bp, Artificial sequence
  SiRNA target sequence
cgtcttttattaaatctatgt

SEQ ID NO: 198332 - DNA, 21 bp, Artificial sequence
  SiRNA target sequence
gtcttttattaaatctatgtc

SEQ ID NO: 198333 - DNA, 21 bp, Artificial sequence
  SiRNA target sequence
tcttttattaaatctatgtct

SEQ ID NO: 198334 - DNA, 21 bp, Artificial sequence
  SiRNA target sequence
cttttattaaatctatgtcta

SEQ ID NO: 198335 - DNA, 21 bp, Artificial sequence
  SiRNA target sequence
ttttattaaatctatgtctac

SEQ ID NO: 198336 - DNA, 21 bp, Artificial sequence
  SiRNA target sequence
tttattaaatctatgtctaca

SEQ ID NO: 198337 - DNA, 21 bp, Artificial sequence
  SiRNA target sequence
ttattaaatctatgtctacac

SEQ ID NO: 198338 - DNA, 21 bp, Artificial sequence
  SiRNA target sequence
tattaaatctatgtctacact

SEQ ID NO: 198339 - DNA, 21 bp, Artificial sequence
  SiRNA target sequence
attaaatctatgtctacactt

SEQ ID NO: 198340 - DNA, 21 bp, Artificial sequence
  SiRNA target sequence
ttaaatctatgtctacacttg

SEQ ID NO: 198341 - DNA, 21 bp, Artificial sequence
  SiRNA target sequence
taaatctatgtctacacttgt

SEQ ID NO: 198342 - DNA, 21 bp, Artificial sequence
  SiRNA target sequence
aaatctatgtctacacttgta

SEQ ID NO: 198343 - DNA, 21 bp, Artificial sequence
  SiRNA target sequence
aatctatgtctacacttgtat

SEQ ID NO: 198344 - DNA, 21 bp, Artificial sequence
  SiRNA target sequence
atctatgtctacacttgtatt

SEQ ID NO: 198345 - DNA, 21 bp, Artificial sequence
  SiRNA target sequence
tctatgtctacacttgtatta

SEQ ID NO: 198346 - DNA, 21 bp, Artificial sequence
  SiRNA target sequence
ctatgtctacacttgtattat

SEQ ID NO: 198347 - DNA, 21 bp, Artificial sequence
  SiRNA target sequence
tatgtctacacttgtattatt

SEQ ID NO: 198348 - DNA, 21 bp, Artificial sequence
  SiRNA target sequence
atgtctacacttgtattattt

SEQ ID NO: 198349 - DNA, 21 bp, Artificial sequence
  SiRNA target sequence
tgtctacacttgtattatttt

SEQ ID NO: 198350 - DNA, 21 bp, Artificial sequence
  SiRNA target sequence
gtctacacttgtattattttt

SEQ ID NO: 198351 - DNA, 21 bp, Artificial sequence
  SiRNA target sequence
tctacacttgtattattttta

SEQ ID NO: 198352 - DNA, 21 bp, Artificial sequence
  SiRNA target sequence
ctacacttgtattatttttaa

SEQ ID NO: 198353 - DNA, 21 bp, Artificial sequence
  SiRNA target sequence
tacacttgtattatttttaat

SEQ ID NO: 198354 - DNA, 21 bp, Artificial sequence
  SiRNA target sequence
acacttgtattatttttaatt

SEQ ID NO: 198355 - DNA, 21 bp, Artificial sequence
  SiRNA target sequence
cacttgtattatttttaattg

SEQ ID NO: 198356 - DNA, 21 bp, Artificial sequence
  SiRNA target sequence
acttgtattatttttaattga

SEQ ID NO: 198357 - DNA, 21 bp, Artificial sequence
  SiRNA target sequence
cttgtattatttttaattgaa

SEQ ID NO: 198358 - DNA, 21 bp, Artificial sequence
  SiRNA target sequence
ttgtattatttttaattgaaa

SEQ ID NO: 198359 - DNA, 21 bp, Artificial sequence
  SiRNA target sequence
tgtattatttttaattgaaac

SEQ ID NO: 198360 - DNA, 21 bp, Artificial sequence
  SiRNA target sequence
gtattatttttaattgaaacg

SEQ ID NO: 198361 - DNA, 21 bp, Artificial sequence
  SiRNA target sequence
tattatttttaattgaaacgt

SEQ ID NO: 198362 - DNA, 21 bp, Artificial sequence
  SiRNA target sequence
attatttttaattgaaacgtt

SEQ ID NO: 198363 - DNA, 21 bp, Artificial sequence
  SiRNA target sequence
ttatttttaattgaaacgtta

SEQ ID NO: 198364 - DNA, 21 bp, Artificial sequence
  SiRNA target sequence
tatttttaattgaaacgttat

SEQ ID NO: 198365 - DNA, 21 bp, Artificial sequence
  SiRNA target sequence
atttttaattgaaacgttata

SEQ ID NO: 198366 - DNA, 21 bp, Artificial sequence
  SiRNA target sequence
tttttaattgaaacgttatat

SEQ ID NO: 198367 - DNA, 21 bp, Artificial sequence
  SiRNA target sequence
ttttaattgaaacgttatatg

SEQ ID NO: 198368 - DNA, 21 bp, Artificial sequence
  SiRNA target sequence
tttaattgaaacgttatatgc

SEQ ID NO: 198369 - DNA, 21 bp, Artificial sequence
  SiRNA target sequence
ttaattgaaacgttatatgca

SEQ ID NO: 198370 - DNA, 21 bp, Artificial sequence
  SiRNA target sequence
taattgaaacgttatatgcac

SEQ ID NO: 198371 - DNA, 21 bp, Artificial sequence
  SiRNA target sequence
aattgaaacgttatatgcacc

SEQ ID NO: 198372 - DNA, 21 bp, Artificial sequence
  SiRNA target sequence
attgaaacgttatatgcaccc

SEQ ID NO: 198373 - DNA, 21 bp, Artificial sequence
  SiRNA target sequence
ttgaaacgttatatgcacccg

SEQ ID NO: 198374 - DNA, 21 bp, Artificial sequence
  SiRNA target sequence
tgaaacgttatatgcacccgc

SEQ ID NO: 198375 - DNA, 21 bp, Artificial sequence
  SiRNA target sequence
gaaacgttatatgcacccgct

SEQ ID NO: 198376 - DNA, 21 bp, Artificial sequence
  SiRNA target sequence
aaacgttatatgcacccgcta

SEQ ID NO: 198377 - DNA, 21 bp, Artificial sequence
  SiRNA target sequence
aacgttatatgcacccgctaa

SEQ ID NO: 198378 - DNA, 21 bp, Artificial sequence
  SiRNA target sequence
acgttatatgcacccgctaaa

SEQ ID NO: 198379 - DNA, 21 bp, Artificial sequence
  SiRNA target sequence
cgttatatgcacccgctaaat

SEQ ID NO: 198380 - DNA, 21 bp, Artificial sequence
  SiRNA target sequence
gttatatgcacccgctaaata

SEQ ID NO: 198381 - DNA, 21 bp, Artificial sequence
  SiRNA target sequence
ttatatgcacccgctaaatag

SEQ ID NO: 198382 - DNA, 21 bp, Artificial sequence
  SiRNA target sequence
tatatgcacccgctaaataga

SEQ ID NO: 198383 - DNA, 21 bp, Artificial sequence
  SiRNA target sequence
atatgcacccgctaaatagat

SEQ ID NO: 198384 - DNA, 21 bp, Artificial sequence
  SiRNA target sequence
tatgcacccgctaaatagatt

SEQ ID NO: 198385 - DNA, 21 bp, Artificial sequence
  SiRNA target sequence
atgcacccgctaaatagatta

SEQ ID NO: 198386 - DNA, 21 bp, Artificial sequence
  SiRNA target sequence
tgcacccgctaaatagattat

SEQ ID NO: 198387 - DNA, 21 bp, Artificial sequence
  SiRNA target sequence
gcacccgctaaatagattata

SEQ ID NO: 198388 - DNA, 21 bp, Artificial sequence
  SiRNA target sequence
cacccgctaaatagattatag

SEQ ID NO: 198389 - DNA, 21 bp, Artificial sequence
  SiRNA target sequence
acccgctaaatagattatagc

SEQ ID NO: 198390 - DNA, 21 bp, Artificial sequence
  SiRNA target sequence
cccgctaaatagattatagct

SEQ ID NO: 198391 - DNA, 21 bp, Artificial sequence
  SiRNA target sequence
ccgctaaatagattatagctc

SEQ ID NO: 198392 - DNA, 21 bp, Artificial sequence
  SiRNA target sequence
cgctaaatagattatagctct

SEQ ID NO: 198393 - DNA, 21 bp, Artificial sequence
  SiRNA target sequence
gctaaatagattatagctcta

SEQ ID NO: 198394 - DNA, 21 bp, Artificial sequence
  SiRNA target sequence
ctaaatagattatagctctaa

SEQ ID NO: 198395 - DNA, 21 bp, Artificial sequence
  SiRNA target sequence
taaatagattatagctctaat

SEQ ID NO: 198396 - DNA, 21 bp, Artificial sequence
  SiRNA target sequence
aaatagattatagctctaatc

SEQ ID NO: 198397 - DNA, 21 bp, Artificial sequence
  SiRNA target sequence
aatagattatagctctaatcc

SEQ ID NO: 198398 - DNA, 21 bp, Artificial sequence
  SiRNA target sequence
atagattatagctctaatcca

SEQ ID NO: 198399 - DNA, 21 bp, Artificial sequence
  SiRNA target sequence
tagattatagctctaatccaa

SEQ ID NO: 198400 - DNA, 21 bp, Artificial sequence
  SiRNA target sequence
agattatagctctaatccaaa

SEQ ID NO: 198401 - DNA, 21 bp, Artificial sequence
  SiRNA target sequence
gattatagctctaatccaaat

SEQ ID NO: 198402 - DNA, 21 bp, Artificial sequence
  SiRNA target sequence
attatagctctaatccaaata

SEQ ID NO: 198403 - DNA, 21 bp, Artificial sequence
  SiRNA target sequence
ttatagctctaatccaaatat

SEQ ID NO: 198404 - DNA, 21 bp, Artificial sequence
  SiRNA target sequence
tatagctctaatccaaatata

SEQ ID NO: 198405 - DNA, 21 bp, Artificial sequence
  SiRNA target sequence
atagctctaatccaaatataa

SEQ ID NO: 198406 - DNA, 21 bp, Artificial sequence
  SiRNA target sequence
tagctctaatccaaatataaa

SEQ ID NO: 198407 - DNA, 21 bp, Artificial sequence
  SiRNA target sequence
agctctaatccaaatataaat

SEQ ID NO: 198408 - DNA, 21 bp, Artificial sequence
  SiRNA target sequence
gctctaatccaaatataaatc

SEQ ID NO: 198409 - DNA, 21 bp, Artificial sequence
  SiRNA target sequence
ctctaatccaaatataaatca

SEQ ID NO: 198410 - DNA, 21 bp, Artificial sequence
  SiRNA target sequence
tctaatccaaatataaatcaa

SEQ ID NO: 198411 - DNA, 21 bp, Artificial sequence
  SiRNA target sequence
ctaatccaaatataaatcaat

SEQ ID NO: 198412 - DNA, 21 bp, Artificial sequence
  SiRNA target sequence
taatccaaatataaatcaata

SEQ ID NO: 198413 - DNA, 21 bp, Artificial sequence
  SiRNA target sequence
aatccaaatataaatcaatat

SEQ ID NO: 198414 - DNA, 21 bp, Artificial sequence
  SiRNA target sequence
atccaaatataaatcaatatt

SEQ ID NO: 198415 - DNA, 21 bp, Artificial sequence
  SiRNA target sequence
tccaaatataaatcaatatta

SEQ ID NO: 198416 - DNA, 21 bp, Artificial sequence
  SiRNA target sequence
ccaaatataaatcaatattat

SEQ ID NO: 198417 - DNA, 21 bp, Artificial sequence
  SiRNA target sequence
caaatataaatcaatattatt

SEQ ID NO: 198418 - DNA, 21 bp, Artificial sequence
  SiRNA target sequence
aaatataaatcaatattattg

SEQ ID NO: 198419 - DNA, 21 bp, Artificial sequence
  SiRNA target sequence
aatataaatcaatattattgc

SEQ ID NO: 198420 - DNA, 21 bp, Artificial sequence
  SiRNA target sequence
atataaatcaatattattgca

SEQ ID NO: 198421 - DNA, 21 bp, Artificial sequence
  SiRNA target sequence
tataaatcaatattattgcaa

SEQ ID NO: 198422 - DNA, 21 bp, Artificial sequence
  SiRNA target sequence
ataaatcaatattattgcaat

SEQ ID NO: 198423 - DNA, 21 bp, Artificial sequence
  SiRNA target sequence
taaatcaatattattgcaatc

SEQ ID NO: 198424 - DNA, 21 bp, Artificial sequence
  SiRNA target sequence
aaatcaatattattgcaatcg

SEQ ID NO: 198425 - DNA, 21 bp, Artificial sequence
  SiRNA target sequence
aatcaatattattgcaatcgt

SEQ ID NO: 198426 - DNA, 21 bp, Artificial sequence
  SiRNA target sequence
atcaatattattgcaatcgtt

SEQ ID NO: 198427 - DNA, 21 bp, Artificial sequence
  SiRNA target sequence
tcaatattattgcaatcgtta

SEQ ID NO: 198428 - DNA, 21 bp, Artificial sequence
  SiRNA target sequence
caatattattgcaatcgttaa

SEQ ID NO: 198429 - DNA, 21 bp, Artificial sequence
  SiRNA target sequence
aatattattgcaatcgttaat

SEQ ID NO: 198430 - DNA, 21 bp, Artificial sequence
  SiRNA target sequence
atattattgcaatcgttaatg

SEQ ID NO: 198431 - DNA, 21 bp, Artificial sequence
  SiRNA target sequence
tattattgcaatcgttaatgt

SEQ ID NO: 198432 - DNA, 21 bp, Artificial sequence
  SiRNA target sequence
attattgcaatcgttaatgtg

SEQ ID NO: 198433 - DNA, 21 bp, Artificial sequence
  SiRNA target sequence
ttattgcaatcgttaatgtga

SEQ ID NO: 198434 - DNA, 21 bp, Artificial sequence
  SiRNA target sequence
tattgcaatcgttaatgtgat

SEQ ID NO: 198435 - DNA, 21 bp, Artificial sequence
  SiRNA target sequence
attgcaatcgttaatgtgatt

SEQ ID NO: 198436 - DNA, 21 bp, Artificial sequence
  SiRNA target sequence
ttgcaatcgttaatgtgattg

SEQ ID NO: 198437 - DNA, 21 bp, Artificial sequence
  SiRNA target sequence
tgcaatcgttaatgtgattgg

SEQ ID NO: 198438 - DNA, 21 bp, Artificial sequence
  SiRNA target sequence
gcaatcgttaatgtgattgga

SEQ ID NO: 198439 - DNA, 21 bp, Artificial sequence
  SiRNA target sequence
caatcgttaatgtgattggac

SEQ ID NO: 198440 - DNA, 21 bp, Artificial sequence
  SiRNA target sequence
aatcgttaatgtgattggact

SEQ ID NO: 198441 - DNA, 21 bp, Artificial sequence
  SiRNA target sequence
atcgttaatgtgattggacta

SEQ ID NO: 198442 - DNA, 21 bp, Artificial sequence
  SiRNA target sequence
tcgttaatgtgattggactac

SEQ ID NO: 198443 - DNA, 21 bp, Artificial sequence
  SiRNA target sequence
cgttaatgtgattggactacc

SEQ ID NO: 198444 - DNA, 21 bp, Artificial sequence
  SiRNA target sequence
gttaatgtgattggactaccc

SEQ ID NO: 198445 - DNA, 21 bp, Artificial sequence
  SiRNA target sequence
ttaatgtgattggactaccct

SEQ ID NO: 198446 - DNA, 21 bp, Artificial sequence
  SiRNA target sequence
taatgtgattggactaccctt

SEQ ID NO: 198447 - DNA, 21 bp, Artificial sequence
  SiRNA target sequence
aatgtgattggactacccttc

SEQ ID NO: 198448 - DNA, 21 bp, Artificial sequence
  SiRNA target sequence
atgtgattggactacccttcc

SEQ ID NO: 198449 - DNA, 21 bp, Artificial sequence
  SiRNA target sequence
tgtgattggactacccttcct

SEQ ID NO: 198450 - DNA, 21 bp, Artificial sequence
  SiRNA target sequence
gtgattggactacccttcctt

SEQ ID NO: 198451 - DNA, 21 bp, Artificial sequence
  SiRNA target sequence
tgattggactacccttcctta

SEQ ID NO: 198452 - DNA, 21 bp, Artificial sequence
  SiRNA target sequence
gattggactacccttccttac

SEQ ID NO: 198453 - DNA, 21 bp, Artificial sequence
  SiRNA target sequence
attggactacccttccttaca

SEQ ID NO: 198454 - DNA, 21 bp, Artificial sequence
  SiRNA target sequence
ttggactacccttccttacat

SEQ ID NO: 198455 - DNA, 21 bp, Artificial sequence
  SiRNA target sequence
tggactacccttccttacatt

SEQ ID NO: 198456 - DNA, 21 bp, Artificial sequence
  SiRNA target sequence
ggactacccttccttacatta

SEQ ID NO: 198457 - DNA, 21 bp, Artificial sequence
  SiRNA target sequence
gactacccttccttacattat

SEQ ID NO: 198458 - DNA, 21 bp, Artificial sequence
  SiRNA target sequence
actacccttccttacattatc

SEQ ID NO: 198459 - DNA, 21 bp, Artificial sequence
  SiRNA target sequence
ctacccttccttacattatca

SEQ ID NO: 198460 - DNA, 21 bp, Artificial sequence
  SiRNA target sequence
tacccttccttacattatcag

SEQ ID NO: 198461 - DNA, 21 bp, Artificial sequence
  SiRNA target sequence
acccttccttacattatcagt

SEQ ID NO: 198462 - DNA, 21 bp, Artificial sequence
  SiRNA target sequence
cccttccttacattatcagta

SEQ ID NO: 198463 - DNA, 21 bp, Artificial sequence
  SiRNA target sequence
ccttccttacattatcagtat

SEQ ID NO: 198464 - DNA, 21 bp, Artificial sequence
  SiRNA target sequence
cttccttacattatcagtatc

SEQ ID NO: 198465 - DNA, 21 bp, Artificial sequence
  SiRNA target sequence
ttccttacattatcagtatca

SEQ ID NO: 198466 - DNA, 21 bp, Artificial sequence
  SiRNA target sequence
tccttacattatcagtatcaa

SEQ ID NO: 198467 - DNA, 21 bp, Artificial sequence
  SiRNA target sequence
ccttacattatcagtatcaag

SEQ ID NO: 198468 - DNA, 21 bp, Artificial sequence
  SiRNA target sequence
cttacattatcagtatcaagt

SEQ ID NO: 198469 - DNA, 21 bp, Artificial sequence
  SiRNA target sequence
ttacattatcagtatcaagtg

SEQ ID NO: 198470 - DNA, 21 bp, Artificial sequence
  SiRNA target sequence
tacattatcagtatcaagtgc

SEQ ID NO: 198471 - DNA, 21 bp, Artificial sequence
  SiRNA target sequence
acattatcagtatcaagtgct

SEQ ID NO: 198472 - DNA, 21 bp, Artificial sequence
  SiRNA target sequence
cattatcagtatcaagtgcta

SEQ ID NO: 198473 - DNA, 21 bp, Artificial sequence
  SiRNA target sequence
attatcagtatcaagtgctac

SEQ ID NO: 198474 - DNA, 21 bp, Artificial sequence
  SiRNA target sequence
ttatcagtatcaagtgctact

SEQ ID NO: 198475 - DNA, 21 bp, Artificial sequence
  SiRNA target sequence
tatcagtatcaagtgctacta

SEQ ID NO: 198476 - DNA, 21 bp, Artificial sequence
  SiRNA target sequence
atcagtatcaagtgctactaa

SEQ ID NO: 198477 - DNA, 21 bp, Artificial sequence
  SiRNA target sequence
tcagtatcaagtgctactaat

SEQ ID NO: 198478 - DNA, 21 bp, Artificial sequence
  SiRNA target sequence
cagtatcaagtgctactaata

SEQ ID NO: 198479 - DNA, 21 bp, Artificial sequence
  SiRNA target sequence
agtatcaagtgctactaatat

SEQ ID NO: 198480 - DNA, 21 bp, Artificial sequence
  SiRNA target sequence
gtatcaagtgctactaatatg

SEQ ID NO: 198481 - DNA, 21 bp, Artificial sequence
  SiRNA target sequence
tatcaagtgctactaatatgg

SEQ ID NO: 198482 - DNA, 21 bp, Artificial sequence
  SiRNA target sequence
atcaagtgctactaatatggc

SEQ ID NO: 198483 - DNA, 21 bp, Artificial sequence
  SiRNA target sequence
tcaagtgctactaatatggct

SEQ ID NO: 198484 - DNA, 21 bp, Artificial sequence
  SiRNA target sequence
caagtgctactaatatggcta

SEQ ID NO: 198485 - DNA, 21 bp, Artificial sequence
  SiRNA target sequence
aagtgctactaatatggctag

SEQ ID NO: 198486 - DNA, 21 bp, Artificial sequence
  SiRNA target sequence
agtgctactaatatggctagt

SEQ ID NO: 198487 - DNA, 21 bp, Artificial sequence
  SiRNA target sequence
gtgctactaatatggctagtc

SEQ ID NO: 198488 - DNA, 21 bp, Artificial sequence
  SiRNA target sequence
tgctactaatatggctagtcc

SEQ ID NO: 198489 - DNA, 21 bp, Artificial sequence
  SiRNA target sequence
gctactaatatggctagtcca

SEQ ID NO: 198490 - DNA, 21 bp, Artificial sequence
  SiRNA target sequence
ctactaatatggctagtccat

SEQ ID NO: 198491 - DNA, 21 bp, Artificial sequence
  SiRNA target sequence
tactaatatggctagtccata

SEQ ID NO: 198492 - DNA, 21 bp, Artificial sequence
  SiRNA target sequence
actaatatggctagtccatat

SEQ ID NO: 198493 - DNA, 21 bp, Artificial sequence
  SiRNA target sequence
ctaatatggctagtccatata

SEQ ID NO: 198494 - DNA, 21 bp, Artificial sequence
  SiRNA target sequence
taatatggctagtccatataa

SEQ ID NO: 198495 - DNA, 21 bp, Artificial sequence
  SiRNA target sequence
aatatggctagtccatataat

SEQ ID NO: 198496 - DNA, 21 bp, Artificial sequence
  SiRNA target sequence
atatggctagtccatataatg

SEQ ID NO: 198497 - DNA, 21 bp, Artificial sequence
  SiRNA target sequence
tatggctagtccatataatga

SEQ ID NO: 198498 - DNA, 21 bp, Artificial sequence
  SiRNA target sequence
atggctagtccatataatgaa

SEQ ID NO: 198499 - DNA, 21 bp, Artificial sequence
  SiRNA target sequence
tggctagtccatataatgaac

SEQ ID NO: 198500 - DNA, 21 bp, Artificial sequence
  SiRNA target sequence
ggctagtccatataatgaacc

SEQ ID NO: 198501 - DNA, 21 bp, Artificial sequence
  SiRNA target sequence
gctagtccatataatgaacca

SEQ ID NO: 198502 - DNA, 21 bp, Artificial sequence
  SiRNA target sequence
ctagtccatataatgaaccaa

SEQ ID NO: 198503 - DNA, 21 bp, Artificial sequence
  SiRNA target sequence
tagtccatataatgaaccaat

SEQ ID NO: 198504 - DNA, 21 bp, Artificial sequence
  SiRNA target sequence
agtccatataatgaaccaata

SEQ ID NO: 198505 - DNA, 21 bp, Artificial sequence
  SiRNA target sequence
gtccatataatgaaccaatag

SEQ ID NO: 198506 - DNA, 21 bp, Artificial sequence
  SiRNA target sequence
tccatataatgaaccaataga

SEQ ID NO: 198507 - DNA, 21 bp, Artificial sequence
  SiRNA target sequence
ccatataatgaaccaatagat

SEQ ID NO: 198508 - DNA, 21 bp, Artificial sequence
  SiRNA target sequence
catataatgaaccaatagatt

SEQ ID NO: 198509 - DNA, 21 bp, Artificial sequence
  SiRNA target sequence
atataatgaaccaatagattt

SEQ ID NO: 198510 - DNA, 21 bp, Artificial sequence
  SiRNA target sequence
tataatgaaccaatagatttt

SEQ ID NO: 198511 - DNA, 21 bp, Artificial sequence
  SiRNA target sequence
ataatgaaccaatagattttc

SEQ ID NO: 198512 - DNA, 21 bp, Artificial sequence
  SiRNA target sequence
taatgaaccaatagattttcc

SEQ ID NO: 198513 - DNA, 21 bp, Artificial sequence
  SiRNA target sequence
aatgaaccaatagattttcct

SEQ ID NO: 198514 - DNA, 21 bp, Artificial sequence
  SiRNA target sequence
atgaaccaatagattttccta

SEQ ID NO: 198515 - DNA, 21 bp, Artificial sequence
  SiRNA target sequence
tgaaccaatagattttcctaa

SEQ ID NO: 198516 - DNA, 21 bp, Artificial sequence
  SiRNA target sequence
gaaccaatagattttcctaat

SEQ ID NO: 198517 - DNA, 21 bp, Artificial sequence
  SiRNA target sequence
aaccaatagattttcctaatt

SEQ ID NO: 198518 - DNA, 21 bp, Artificial sequence
  SiRNA target sequence
accaatagattttcctaattt

SEQ ID NO: 198519 - DNA, 21 bp, Artificial sequence
  SiRNA target sequence
ccaatagattttcctaattta

SEQ ID NO: 198520 - DNA, 21 bp, Artificial sequence
  SiRNA target sequence
caatagattttcctaatttat

SEQ ID NO: 198521 - DNA, 21 bp, Artificial sequence
  SiRNA target sequence
aatagattttcctaatttatt

SEQ ID NO: 198522 - DNA, 21 bp, Artificial sequence
  SiRNA target sequence
atagattttcctaatttatta

SEQ ID NO: 198523 - DNA, 21 bp, Artificial sequence
  SiRNA target sequence
tagattttcctaatttattaa

SEQ ID NO: 198524 - DNA, 21 bp, Artificial sequence
  SiRNA target sequence
agattttcctaatttattaaa

SEQ ID NO: 198525 - DNA, 21 bp, Artificial sequence
  SiRNA target sequence
gattttcctaatttattaaaa

SEQ ID NO: 198526 - DNA, 21 bp, Artificial sequence
  SiRNA target sequence
attttcctaatttattaaaaa

SEQ ID NO: 198527 - DNA, 21 bp, Artificial sequence
  SiRNA target sequence
ttttcctaatttattaaaaat

SEQ ID NO: 198528 - DNA, 21 bp, Artificial sequence
  SiRNA target sequence
tttcctaatttattaaaaata

SEQ ID NO: 198529 - DNA, 21 bp, Artificial sequence
  SiRNA target sequence
ttcctaatttattaaaaatac

SEQ ID NO: 198530 - DNA, 21 bp, Artificial sequence
  SiRNA target sequence
tcctaatttattaaaaatacc

SEQ ID NO: 198531 - DNA, 21 bp, Artificial sequence
  SiRNA target sequence
cctaatttattaaaaatacca

SEQ ID NO: 198532 - DNA, 21 bp, Artificial sequence
  SiRNA target sequence
ctaatttattaaaaataccat

SEQ ID NO: 198533 - DNA, 21 bp, Artificial sequence
  SiRNA target sequence
taatttattaaaaataccatc

SEQ ID NO: 198534 - DNA, 21 bp, Artificial sequence
  SiRNA target sequence
aatttattaaaaataccatca

SEQ ID NO: 198535 - DNA, 21 bp, Artificial sequence
  SiRNA target sequence
atttattaaaaataccatcat

SEQ ID NO: 198536 - DNA, 21 bp, Artificial sequence
  SiRNA target sequence
tttattaaaaataccatcata

SEQ ID NO: 198537 - DNA, 21 bp, Artificial sequence
  SiRNA target sequence
ttattaaaaataccatcataa

SEQ ID NO: 198538 - DNA, 21 bp, Artificial sequence
  SiRNA target sequence
tattaaaaataccatcataaa

SEQ ID NO: 198539 - DNA, 21 bp, Artificial sequence
  SiRNA target sequence
attaaaaataccatcataaac

SEQ ID NO: 198540 - DNA, 21 bp, Artificial sequence
  SiRNA target sequence
ttaaaaataccatcataaaca

SEQ ID NO: 198541 - DNA, 21 bp, Artificial sequence
  SiRNA target sequence
taaaaataccatcataaacac

SEQ ID NO: 198542 - DNA, 21 bp, Artificial sequence
  SiRNA target sequence
aaaaataccatcataaacact

SEQ ID NO: 198543 - DNA, 21 bp, Artificial sequence
  SiRNA target sequence
aaaataccatcataaacactt

SEQ ID NO: 198544 - DNA, 21 bp, Artificial sequence
  SiRNA target sequence
aaataccatcataaacacttt

SEQ ID NO: 198545 - DNA, 21 bp, Artificial sequence
  SiRNA target sequence
aataccatcataaacactttt

SEQ ID NO: 198546 - DNA, 21 bp, Artificial sequence
  SiRNA target sequence
ataccatcataaacactttta

SEQ ID NO: 198547 - DNA, 21 bp, Artificial sequence
  SiRNA target sequence
taccatcataaacacttttaa

SEQ ID NO: 198548 - DNA, 21 bp, Artificial sequence
  SiRNA target sequence
accatcataaacacttttaaa

SEQ ID NO: 198549 - DNA, 21 bp, Artificial sequence
  SiRNA target sequence
ccatcataaacacttttaaac

SEQ ID NO: 198550 - DNA, 21 bp, Artificial sequence
  SiRNA target sequence
catcataaacacttttaaacc

SEQ ID NO: 198551 - DNA, 21 bp, Artificial sequence
  SiRNA target sequence
atcataaacacttttaaaccg

SEQ ID NO: 198552 - DNA, 21 bp, Artificial sequence
  SiRNA target sequence
tcataaacacttttaaaccgt

SEQ ID NO: 198553 - DNA, 21 bp, Artificial sequence
  SiRNA target sequence
cataaacacttttaaaccgtg

SEQ ID NO: 198554 - DNA, 21 bp, Artificial sequence
  SiRNA target sequence
ataaacacttttaaaccgtgc

SEQ ID NO: 198555 - DNA, 21 bp, Artificial sequence
  SiRNA target sequence
taaacacttttaaaccgtgcc

SEQ ID NO: 198556 - DNA, 21 bp, Artificial sequence
  SiRNA target sequence
aaacacttttaaaccgtgccc

SEQ ID NO: 198557 - DNA, 21 bp, Artificial sequence
  SiRNA target sequence
aacacttttaaaccgtgccct

SEQ ID NO: 198558 - DNA, 21 bp, Artificial sequence
  SiRNA target sequence
acacttttaaaccgtgccctg

SEQ ID NO: 198559 - DNA, 21 bp, Artificial sequence
  SiRNA target sequence
cacttttaaaccgtgccctgt

SEQ ID NO: 198560 - DNA, 21 bp, Artificial sequence
  SiRNA target sequence
acttttaaaccgtgccctgtg

SEQ ID NO: 198561 - DNA, 21 bp, Artificial sequence
  SiRNA target sequence
cttttaaaccgtgccctgtgt

SEQ ID NO: 198562 - DNA, 21 bp, Artificial sequence
  SiRNA target sequence
ttttaaaccgtgccctgtgtg

SEQ ID NO: 198563 - DNA, 21 bp, Artificial sequence
  SiRNA target sequence
tttaaaccgtgccctgtgtgc

SEQ ID NO: 198564 - DNA, 21 bp, Artificial sequence
  SiRNA target sequence
ttaaaccgtgccctgtgtgca

SEQ ID NO: 198565 - DNA, 21 bp, Artificial sequence
  SiRNA target sequence
taaaccgtgccctgtgtgcag

SEQ ID NO: 198566 - DNA, 21 bp, Artificial sequence
  SiRNA target sequence
aaaccgtgccctgtgtgcagg

SEQ ID NO: 198567 - DNA, 21 bp, Artificial sequence
  SiRNA target sequence
aaccgtgccctgtgtgcagga

SEQ ID NO: 198568 - DNA, 21 bp, Artificial sequence
  SiRNA target sequence
accgtgccctgtgtgcaggat

SEQ ID NO: 198569 - DNA, 21 bp, Artificial sequence
  SiRNA target sequence
ccgtgccctgtgtgcaggatc

SEQ ID NO: 198570 - DNA, 21 bp, Artificial sequence
  SiRNA target sequence
cgtgccctgtgtgcaggatcg

SEQ ID NO: 198571 - DNA, 21 bp, Artificial sequence
  SiRNA target sequence
gtgccctgtgtgcaggatcga

SEQ ID NO: 198572 - DNA, 21 bp, Artificial sequence
  SiRNA target sequence
tgccctgtgtgcaggatcgat

SEQ ID NO: 198573 - DNA, 21 bp, Artificial sequence
  SiRNA target sequence
gccctgtgtgcaggatcgatt

SEQ ID NO: 198574 - DNA, 21 bp, Artificial sequence
  SiRNA target sequence
ccctgtgtgcaggatcgattc

SEQ ID NO: 198575 - DNA, 21 bp, Artificial sequence
  SiRNA target sequence
cctgtgtgcaggatcgattct

SEQ ID NO: 198576 - DNA, 21 bp, Artificial sequence
  SiRNA target sequence
ctgtgtgcaggatcgattctc

SEQ ID NO: 198577 - DNA, 21 bp, Artificial sequence
  SiRNA target sequence
tgtgtgcaggatcgattctca

SEQ ID NO: 198578 - DNA, 21 bp, Artificial sequence
  SiRNA target sequence
gtgtgcaggatcgattctcat

SEQ ID NO: 198579 - DNA, 21 bp, Artificial sequence
  SiRNA target sequence
tgtgcaggatcgattctcata

SEQ ID NO: 198580 - DNA, 21 bp, Artificial sequence
  SiRNA target sequence
gtgcaggatcgattctcatac

SEQ ID NO: 198581 - DNA, 21 bp, Artificial sequence
  SiRNA target sequence
tgcaggatcgattctcatacc

SEQ ID NO: 198582 - DNA, 21 bp, Artificial sequence
  SiRNA target sequence
gcaggatcgattctcataccc

SEQ ID NO: 198583 - DNA, 21 bp, Artificial sequence
  SiRNA target sequence
caggatcgattctcataccca

SEQ ID NO: 198584 - DNA, 21 bp, Artificial sequence
  SiRNA target sequence
aggatcgattctcatacccat

SEQ ID NO: 198585 - DNA, 21 bp, Artificial sequence
  SiRNA target sequence
ggatcgattctcatacccatt

SEQ ID NO: 198586 - DNA, 21 bp, Artificial sequence
  SiRNA target sequence
gatcgattctcatacccattt

SEQ ID NO: 198587 - DNA, 21 bp, Artificial sequence
  SiRNA target sequence
atcgattctcatacccatttt

SEQ ID NO: 198588 - DNA, 21 bp, Artificial sequence
  SiRNA target sequence
tcgattctcatacccattttc

SEQ ID NO: 198589 - DNA, 21 bp, Artificial sequence
  SiRNA target sequence
cgattctcatacccattttct

SEQ ID NO: 198590 - DNA, 21 bp, Artificial sequence
  SiRNA target sequence
gattctcatacccattttctc

SEQ ID NO: 198591 - DNA, 21 bp, Artificial sequence
  SiRNA target sequence
attctcatacccattttctct

SEQ ID NO: 198592 - DNA, 21 bp, Artificial sequence
  SiRNA target sequence
ttctcatacccattttctctt

SEQ ID NO: 198593 - DNA, 21 bp, Artificial sequence
  SiRNA target sequence
tctcatacccattttctcttt

SEQ ID NO: 198594 - DNA, 21 bp, Artificial sequence
  SiRNA target sequence
ctcatacccattttctcttta

SEQ ID NO: 198595 - DNA, 21 bp, Artificial sequence
  SiRNA target sequence
tcatacccattttctctttac

SEQ ID NO: 198596 - DNA, 21 bp, Artificial sequence
  SiRNA target sequence
catacccattttctctttaca

SEQ ID NO: 198597 - DNA, 21 bp, Artificial sequence
  SiRNA target sequence
atacccattttctctttacaa

SEQ ID NO: 198598 - DNA, 21 bp, Artificial sequence
  SiRNA target sequence
tacccattttctctttacaaa

SEQ ID NO: 198599 - DNA, 21 bp, Artificial sequence
  SiRNA target sequence
acccattttctctttacaaat

SEQ ID NO: 198600 - DNA, 21 bp, Artificial sequence
  SiRNA target sequence
cccattttctctttacaaata

SEQ ID NO: 198601 - DNA, 21 bp, Artificial sequence
  SiRNA target sequence
ccattttctctttacaaatat

SEQ ID NO: 198602 - DNA, 21 bp, Artificial sequence
  SiRNA target sequence
cattttctctttacaaatatc

SEQ ID NO: 198603 - DNA, 21 bp, Artificial sequence
  SiRNA target sequence
attttctctttacaaatatca

SEQ ID NO: 198604 - DNA, 21 bp, Artificial sequence
  SiRNA target sequence
ttttctctttacaaatatcaa

SEQ ID NO: 198605 - DNA, 21 bp, Artificial sequence
  SiRNA target sequence
tttctctttacaaatatcaaa

SEQ ID NO: 198606 - DNA, 21 bp, Artificial sequence
  SiRNA target sequence
ttctctttacaaatatcaaag

SEQ ID NO: 198607 - DNA, 21 bp, Artificial sequence
  SiRNA target sequence
tctctttacaaatatcaaagg

SEQ ID NO: 198608 - DNA, 21 bp, Artificial sequence
  SiRNA target sequence
ctctttacaaatatcaaaggc

SEQ ID NO: 198609 - DNA, 21 bp, Artificial sequence
  SiRNA target sequence
tctttacaaatatcaaaggct

SEQ ID NO: 198610 - DNA, 21 bp, Artificial sequence
  SiRNA target sequence
ctttacaaatatcaaaggctg

SEQ ID NO: 198611 - DNA, 21 bp, Artificial sequence
  SiRNA target sequence
tttacaaatatcaaaggctga

SEQ ID NO: 198612 - DNA, 21 bp, Artificial sequence
  SiRNA target sequence
ttacaaatatcaaaggctgaa

SEQ ID NO: 198613 - DNA, 21 bp, Artificial sequence
  SiRNA target sequence
tacaaatatcaaaggctgaat

SEQ ID NO: 198614 - DNA, 21 bp, Artificial sequence
  SiRNA target sequence
acaaatatcaaaggctgaata

SEQ ID NO: 198615 - DNA, 21 bp, Artificial sequence
  SiRNA target sequence
caaatatcaaaggctgaatat

SEQ ID NO: 198616 - DNA, 21 bp, Artificial sequence
  SiRNA target sequence
aaatatcaaaggctgaatatt

SEQ ID NO: 198617 - DNA, 21 bp, Artificial sequence
  SiRNA target sequence
aatatcaaaggctgaatattt

SEQ ID NO: 198618 - DNA, 21 bp, Artificial sequence
  SiRNA target sequence
atatcaaaggctgaatatttt

SEQ ID NO: 198619 - DNA, 21 bp, Artificial sequence
  SiRNA target sequence
tatcaaaggctgaatatttta

SEQ ID NO: 198620 - DNA, 21 bp, Artificial sequence
  SiRNA target sequence
atcaaaggctgaatattttaa

SEQ ID NO: 198621 - DNA, 21 bp, Artificial sequence
  SiRNA target sequence
tcaaaggctgaatattttaat

SEQ ID NO: 198622 - DNA, 21 bp, Artificial sequence
  SiRNA target sequence
caaaggctgaatattttaata

SEQ ID NO: 198623 - DNA, 21 bp, Artificial sequence
  SiRNA target sequence
aaaggctgaatattttaatac

SEQ ID NO: 198624 - DNA, 21 bp, Artificial sequence
  SiRNA target sequence
aaggctgaatattttaatact

SEQ ID NO: 198625 - DNA, 21 bp, Artificial sequence
  SiRNA target sequence
aggctgaatattttaatactt

SEQ ID NO: 198626 - DNA, 21 bp, Artificial sequence
  SiRNA target sequence
ggctgaatattttaatacttt

SEQ ID NO: 198627 - DNA, 21 bp, Artificial sequence
  SiRNA target sequence
gctgaatattttaatactttt

SEQ ID NO: 198628 - DNA, 21 bp, Artificial sequence
  SiRNA target sequence
ctgaatattttaatactttta

SEQ ID NO: 198629 - DNA, 21 bp, Artificial sequence
  SiRNA target sequence
tgaatattttaatacttttat

SEQ ID NO: 198630 - DNA, 21 bp, Artificial sequence
  SiRNA target sequence
gaatattttaatacttttatg

SEQ ID NO: 198631 - DNA, 21 bp, Artificial sequence
  SiRNA target sequence
aatattttaatacttttatga

SEQ ID NO: 198632 - DNA, 21 bp, Artificial sequence
  SiRNA target sequence
atattttaatacttttatgaa

SEQ ID NO: 198633 - DNA, 21 bp, Artificial sequence
  SiRNA target sequence
tattttaatacttttatgaat

SEQ ID NO: 198634 - DNA, 21 bp, Artificial sequence
  SiRNA target sequence
attttaatacttttatgaatg

SEQ ID NO: 198635 - DNA, 21 bp, Artificial sequence
  SiRNA target sequence
ttttaatacttttatgaatgc

SEQ ID NO: 198636 - DNA, 21 bp, Artificial sequence
  SiRNA target sequence
tttaatacttttatgaatgct

SEQ ID NO: 198637 - DNA, 21 bp, Artificial sequence
  SiRNA target sequence
ttaatacttttatgaatgcta

SEQ ID NO: 198638 - DNA, 21 bp, Artificial sequence
  SiRNA target sequence
taatacttttatgaatgctaa

SEQ ID NO: 198639 - DNA, 21 bp, Artificial sequence
  SiRNA target sequence
aatacttttatgaatgctaaa

SEQ ID NO: 198640 - DNA, 21 bp, Artificial sequence
  SiRNA target sequence
atacttttatgaatgctaaaa

SEQ ID NO: 198641 - DNA, 21 bp, Artificial sequence
  SiRNA target sequence
tacttttatgaatgctaaaaa

SEQ ID NO: 198642 - DNA, 21 bp, Artificial sequence
  SiRNA target sequence
acttttatgaatgctaaaaag

SEQ ID NO: 198643 - DNA, 21 bp, Artificial sequence
  SiRNA target sequence
cttttatgaatgctaaaaaga

SEQ ID NO: 198644 - DNA, 21 bp, Artificial sequence
  SiRNA target sequence
ttttatgaatgctaaaaagaa

SEQ ID NO: 198645 - DNA, 21 bp, Artificial sequence
  SiRNA target sequence
tttatgaatgctaaaaagaac

SEQ ID NO: 198646 - DNA, 21 bp, Artificial sequence
  SiRNA target sequence
ttatgaatgctaaaaagaaca

SEQ ID NO: 198647 - DNA, 21 bp, Artificial sequence
  SiRNA target sequence
tatgaatgctaaaaagaacat

SEQ ID NO: 198648 - DNA, 21 bp, Artificial sequence
  SiRNA target sequence
atgaatgctaaaaagaacatt

SEQ ID NO: 198649 - DNA, 21 bp, Artificial sequence
  SiRNA target sequence
tgaatgctaaaaagaacattc

SEQ ID NO: 198650 - DNA, 21 bp, Artificial sequence
  SiRNA target sequence
gaatgctaaaaagaacattcc

SEQ ID NO: 198651 - DNA, 21 bp, Artificial sequence
  SiRNA target sequence
aatgctaaaaagaacattcca

SEQ ID NO: 198652 - DNA, 21 bp, Artificial sequence
  SiRNA target sequence
atgctaaaaagaacattccac

SEQ ID NO: 198653 - DNA, 21 bp, Artificial sequence
  SiRNA target sequence
tgctaaaaagaacattccact

SEQ ID NO: 198654 - DNA, 21 bp, Artificial sequence
  SiRNA target sequence
gctaaaaagaacattccactg

SEQ ID NO: 198655 - DNA, 21 bp, Artificial sequence
  SiRNA target sequence
ctaaaaagaacattccactgt

SEQ ID NO: 198656 - DNA, 21 bp, Artificial sequence
  SiRNA target sequence
taaaaagaacattccactgta

SEQ ID NO: 198657 - DNA, 21 bp, Artificial sequence
  SiRNA target sequence
aaaaagaacattccactgtaa

SEQ ID NO: 198658 - DNA, 21 bp, Artificial sequence
  SiRNA target sequence
aaaagaacattccactgtaat

SEQ ID NO: 198659 - DNA, 21 bp, Artificial sequence
  SiRNA target sequence
aaagaacattccactgtaatt

SEQ ID NO: 198660 - DNA, 21 bp, Artificial sequence
  SiRNA target sequence
aagaacattccactgtaattt

SEQ ID NO: 198661 - DNA, 21 bp, Artificial sequence
  SiRNA target sequence
agaacattccactgtaatttt

SEQ ID NO: 198662 - DNA, 21 bp, Artificial sequence
  SiRNA target sequence
gaacattccactgtaattttc

SEQ ID NO: 198663 - DNA, 21 bp, Artificial sequence
  SiRNA target sequence
aacattccactgtaattttcg

SEQ ID NO: 198664 - DNA, 21 bp, Artificial sequence
  SiRNA target sequence
acattccactgtaattttcga

SEQ ID NO: 198665 - DNA, 21 bp, Artificial sequence
  SiRNA target sequence
cattccactgtaattttcgat

SEQ ID NO: 198666 - DNA, 21 bp, Artificial sequence
  SiRNA target sequence
attccactgtaattttcgatc

SEQ ID NO: 198667 - DNA, 21 bp, Artificial sequence
  SiRNA target sequence
ttccactgtaattttcgatcg

SEQ ID NO: 198668 - DNA, 21 bp, Artificial sequence
  SiRNA target sequence
tccactgtaattttcgatcgt

SEQ ID NO: 198669 - DNA, 21 bp, Artificial sequence
  SiRNA target sequence
ccactgtaattttcgatcgta

SEQ ID NO: 198670 - DNA, 21 bp, Artificial sequence
  SiRNA target sequence
cactgtaattttcgatcgtat

SEQ ID NO: 198671 - DNA, 21 bp, Artificial sequence
  SiRNA target sequence
actgtaattttcgatcgtata

SEQ ID NO: 198672 - DNA, 21 bp, Artificial sequence
  SiRNA target sequence
ctgtaattttcgatcgtataa

SEQ ID NO: 198673 - DNA, 21 bp, Artificial sequence
  SiRNA target sequence
tgtaattttcgatcgtataaa

SEQ ID NO: 198674 - DNA, 21 bp, Artificial sequence
  SiRNA target sequence
gtaattttcgatcgtataaat

SEQ ID NO: 198675 - DNA, 21 bp, Artificial sequence
  SiRNA target sequence
taattttcgatcgtataaatg

SEQ ID NO: 198676 - DNA, 21 bp, Artificial sequence
  SiRNA target sequence
aattttcgatcgtataaatgt

SEQ ID NO: 198677 - DNA, 21 bp, Artificial sequence
  SiRNA target sequence
attttcgatcgtataaatgta

SEQ ID NO: 198678 - DNA, 21 bp, Artificial sequence
  SiRNA target sequence
ttttcgatcgtataaatgtac

SEQ ID NO: 198679 - DNA, 21 bp, Artificial sequence
  SiRNA target sequence
tttcgatcgtataaatgtacg

SEQ ID NO: 198680 - DNA, 21 bp, Artificial sequence
  SiRNA target sequence
ttcgatcgtataaatgtacga

SEQ ID NO: 198681 - DNA, 21 bp, Artificial sequence
  SiRNA target sequence
tcgatcgtataaatgtacgac

SEQ ID NO: 198682 - DNA, 21 bp, Artificial sequence
  SiRNA target sequence
cgatcgtataaatgtacgaca

SEQ ID NO: 198683 - DNA, 21 bp, Artificial sequence
  SiRNA target sequence
gatcgtataaatgtacgacat

SEQ ID NO: 198684 - DNA, 21 bp, Artificial sequence
  SiRNA target sequence
atcgtataaatgtacgacatt

SEQ ID NO: 198685 - DNA, 21 bp, Artificial sequence
  SiRNA target sequence
tcgtataaatgtacgacattt

SEQ ID NO: 198686 - DNA, 21 bp, Artificial sequence
  SiRNA target sequence
cgtataaatgtacgacatttt

SEQ ID NO: 198687 - DNA, 21 bp, Artificial sequence
  SiRNA target sequence
gtataaatgtacgacattttt

SEQ ID NO: 198688 - DNA, 21 bp, Artificial sequence
  SiRNA target sequence
tataaatgtacgacatttttt

SEQ ID NO: 198689 - DNA, 21 bp, Artificial sequence
  SiRNA target sequence
ataaatgtacgacattttttt

SEQ ID NO: 198690 - DNA, 21 bp, Artificial sequence
  SiRNA target sequence
taaatgtacgacattttttta

SEQ ID NO: 198691 - DNA, 21 bp, Artificial sequence
  SiRNA target sequence
aaatgtacgacatttttttaa

SEQ ID NO: 198692 - DNA, 21 bp, Artificial sequence
  SiRNA target sequence
aatgtacgacatttttttaaa

SEQ ID NO: 198693 - DNA, 21 bp, Artificial sequence
  SiRNA target sequence
atgtacgacatttttttaaaa

SEQ ID NO: 198694 - DNA, 21 bp, Artificial sequence
  SiRNA target sequence
tgtacgacatttttttaaaaa

SEQ ID NO: 198695 - DNA, 21 bp, Artificial sequence
  SiRNA target sequence
gtacgacatttttttaaaaaa

SEQ ID NO: 198696 - DNA, 21 bp, Artificial sequence
  SiRNA target sequence
tacgacatttttttaaaaaat

SEQ ID NO: 198697 - DNA, 21 bp, Artificial sequence
  SiRNA target sequence
acgacatttttttaaaaaata

SEQ ID NO: 198698 - DNA, 21 bp, Artificial sequence
  SiRNA target sequence
cgacatttttttaaaaaatac

SEQ ID NO: 198699 - DNA, 21 bp, Artificial sequence
  SiRNA target sequence
gacatttttttaaaaaataca

SEQ ID NO: 198700 - DNA, 21 bp, Artificial sequence
  SiRNA target sequence
acatttttttaaaaaatacag

SEQ ID NO: 198701 - DNA, 21 bp, Artificial sequence
  SiRNA target sequence
catttttttaaaaaatacaga

SEQ ID NO: 198702 - DNA, 21 bp, Artificial sequence
  SiRNA target sequence
atttttttaaaaaatacagaa

SEQ ID NO: 198703 - DNA, 21 bp, Artificial sequence
  SiRNA target sequence
tttttttaaaaaatacagaaa

SEQ ID NO: 198704 - DNA, 21 bp, Artificial sequence
  SiRNA target sequence
ttttttaaaaaatacagaaat

SEQ ID NO: 198705 - DNA, 21 bp, Artificial sequence
  SiRNA target sequence
tttttaaaaaatacagaaatc

SEQ ID NO: 198706 - DNA, 21 bp, Artificial sequence
  SiRNA target sequence
ttttaaaaaatacagaaatcc

SEQ ID NO: 198707 - DNA, 21 bp, Artificial sequence
  SiRNA target sequence
tttaaaaaatacagaaatcca

SEQ ID NO: 198708 - DNA, 21 bp, Artificial sequence
  SiRNA target sequence
ttaaaaaatacagaaatccat

SEQ ID NO: 198709 - DNA, 21 bp, Artificial sequence
  SiRNA target sequence
taaaaaatacagaaatccatg

SEQ ID NO: 198710 - DNA, 21 bp, Artificial sequence
  SiRNA target sequence
aaaaaatacagaaatccatga

SEQ ID NO: 198711 - DNA, 21 bp, Artificial sequence
  SiRNA target sequence
aaaaatacagaaatccatgaa

SEQ ID NO: 198712 - DNA, 21 bp, Artificial sequence
  SiRNA target sequence
aaaatacagaaatccatgaaa

SEQ ID NO: 198713 - DNA, 21 bp, Artificial sequence
  SiRNA target sequence
aaatacagaaatccatgaaaa

SEQ ID NO: 198714 - DNA, 21 bp, Artificial sequence
  SiRNA target sequence
aatacagaaatccatgaaaaa

SEQ ID NO: 198715 - DNA, 21 bp, Artificial sequence
  SiRNA target sequence
atacagaaatccatgaaaaag

SEQ ID NO: 198716 - DNA, 21 bp, Artificial sequence
  SiRNA target sequence
tacagaaatccatgaaaaagc

SEQ ID NO: 198717 - DNA, 21 bp, Artificial sequence
  SiRNA target sequence
acagaaatccatgaaaaagca

SEQ ID NO: 198718 - DNA, 21 bp, Artificial sequence
  SiRNA target sequence
cagaaatccatgaaaaagcaa

SEQ ID NO: 198719 - DNA, 21 bp, Artificial sequence
  SiRNA target sequence
agaaatccatgaaaaagcaag

SEQ ID NO: 198720 - DNA, 21 bp, Artificial sequence
  SiRNA target sequence
gaaatccatgaaaaagcaagt

SEQ ID NO: 198721 - DNA, 21 bp, Artificial sequence
  SiRNA target sequence
aaatccatgaaaaagcaagtc

SEQ ID NO: 198722 - DNA, 21 bp, Artificial sequence
  SiRNA target sequence
aatccatgaaaaagcaagtcc

SEQ ID NO: 198723 - DNA, 21 bp, Artificial sequence
  SiRNA target sequence
atccatgaaaaagcaagtcct

SEQ ID NO: 198724 - DNA, 21 bp, Artificial sequence
  SiRNA target sequence
tccatgaaaaagcaagtcctt

SEQ ID NO: 198725 - DNA, 21 bp, Artificial sequence
  SiRNA target sequence
ccatgaaaaagcaagtccttc

SEQ ID NO: 198726 - DNA, 21 bp, Artificial sequence
  SiRNA target sequence
catgaaaaagcaagtccttca

SEQ ID NO: 198727 - DNA, 21 bp, Artificial sequence
  SiRNA target sequence
atgaaaaagcaagtccttcaa

SEQ ID NO: 198728 - DNA, 21 bp, Artificial sequence
  SiRNA target sequence
tgaaaaagcaagtccttcaat

SEQ ID NO: 198729 - DNA, 21 bp, Artificial sequence
  SiRNA target sequence
gaaaaagcaagtccttcaatg

SEQ ID NO: 198730 - DNA, 21 bp, Artificial sequence
  SiRNA target sequence
aaaaagcaagtccttcaatgg

SEQ ID NO: 198731 - DNA, 21 bp, Artificial sequence
  SiRNA target sequence
aaaagcaagtccttcaatggc

SEQ ID NO: 198732 - DNA, 21 bp, Artificial sequence
  SiRNA target sequence
aaagcaagtccttcaatggca

SEQ ID NO: 198733 - DNA, 21 bp, Artificial sequence
  SiRNA target sequence
aagcaagtccttcaatggcag

SEQ ID NO: 198734 - DNA, 21 bp, Artificial sequence
  SiRNA target sequence
agcaagtccttcaatggcaga

SEQ ID NO: 198735 - DNA, 21 bp, Artificial sequence
  SiRNA target sequence
gcaagtccttcaatggcagaa

SEQ ID NO: 198736 - DNA, 21 bp, Artificial sequence
  SiRNA target sequence
caagtccttcaatggcagaat

SEQ ID NO: 198737 - DNA, 21 bp, Artificial sequence
  SiRNA target sequence
aagtccttcaatggcagaatt

SEQ ID NO: 198738 - DNA, 21 bp, Artificial sequence
  SiRNA target sequence
agtccttcaatggcagaattg

SEQ ID NO: 198739 - DNA, 21 bp, Artificial sequence
  SiRNA target sequence
gtccttcaatggcagaattgt

SEQ ID NO: 198740 - DNA, 21 bp, Artificial sequence
  SiRNA target sequence
tccttcaatggcagaattgta

SEQ ID NO: 198741 - DNA, 21 bp, Artificial sequence
  SiRNA target sequence
ccttcaatggcagaattgtag

SEQ ID NO: 198742 - DNA, 21 bp, Artificial sequence
  SiRNA target sequence
cttcaatggcagaattgtaga

SEQ ID NO: 198743 - DNA, 21 bp, Artificial sequence
  SiRNA target sequence
ttcaatggcagaattgtagat

SEQ ID NO: 198744 - DNA, 21 bp, Artificial sequence
  SiRNA target sequence
tcaatggcagaattgtagatt

SEQ ID NO: 198745 - DNA, 21 bp, Artificial sequence
  SiRNA target sequence
caatggcagaattgtagattg

SEQ ID NO: 198746 - DNA, 21 bp, Artificial sequence
  SiRNA target sequence
aatggcagaattgtagattga

SEQ ID NO: 198747 - DNA, 21 bp, Artificial sequence
  SiRNA target sequence
atggcagaattgtagattgat

SEQ ID NO: 198748 - DNA, 21 bp, Artificial sequence
  SiRNA target sequence
tggcagaattgtagattgatg

SEQ ID NO: 198749 - DNA, 21 bp, Artificial sequence
  SiRNA target sequence
ggcagaattgtagattgatgc

SEQ ID NO: 198750 - DNA, 21 bp, Artificial sequence
  SiRNA target sequence
gcagaattgtagattgatgct

SEQ ID NO: 198751 - DNA, 21 bp, Artificial sequence
  SiRNA target sequence
cagaattgtagattgatgctc

SEQ ID NO: 198752 - DNA, 21 bp, Artificial sequence
  SiRNA target sequence
agaattgtagattgatgctcc

SEQ ID NO: 198753 - DNA, 21 bp, Artificial sequence
  SiRNA target sequence
gaattgtagattgatgctccc

SEQ ID NO: 198754 - DNA, 21 bp, Artificial sequence
  SiRNA target sequence
aattgtagattgatgctccca

SEQ ID NO: 198755 - DNA, 21 bp, Artificial sequence
  SiRNA target sequence
attgtagattgatgctcccat

SEQ ID NO: 198756 - DNA, 21 bp, Artificial sequence
  SiRNA target sequence
ttgtagattgatgctcccata

SEQ ID NO: 198757 - DNA, 21 bp, Artificial sequence
  SiRNA target sequence
tgtagattgatgctcccataa

SEQ ID NO: 198758 - DNA, 21 bp, Artificial sequence
  SiRNA target sequence
gtagattgatgctcccataac

SEQ ID NO: 198759 - DNA, 21 bp, Artificial sequence
  SiRNA target sequence
tagattgatgctcccataacg

SEQ ID NO: 198760 - DNA, 21 bp, Artificial sequence
  SiRNA target sequence
agattgatgctcccataacga

SEQ ID NO: 198761 - DNA, 21 bp, Artificial sequence
  SiRNA target sequence
gattgatgctcccataacgat

SEQ ID NO: 198762 - DNA, 21 bp, Artificial sequence
  SiRNA target sequence
attgatgctcccataacgatt

SEQ ID NO: 198763 - DNA, 21 bp, Artificial sequence
  SiRNA target sequence
ttgatgctcccataacgatta

SEQ ID NO: 198764 - DNA, 21 bp, Artificial sequence
  SiRNA target sequence
tgatgctcccataacgattat

SEQ ID NO: 198765 - DNA, 21 bp, Artificial sequence
  SiRNA target sequence
gatgctcccataacgattatt

SEQ ID NO: 198766 - DNA, 21 bp, Artificial sequence
  SiRNA target sequence
atgctcccataacgattattg

SEQ ID NO: 198767 - DNA, 21 bp, Artificial sequence
  SiRNA target sequence
tgctcccataacgattattga

SEQ ID NO: 198768 - DNA, 21 bp, Artificial sequence
  SiRNA target sequence
gctcccataacgattattgac

SEQ ID NO: 198769 - DNA, 21 bp, Artificial sequence
  SiRNA target sequence
ctcccataacgattattgacc

SEQ ID NO: 198770 - DNA, 21 bp, Artificial sequence
  SiRNA target sequence
tcccataacgattattgaccc

SEQ ID NO: 198771 - DNA, 21 bp, Artificial sequence
  SiRNA target sequence
cccataacgattattgacccc

SEQ ID NO: 198772 - DNA, 21 bp, Artificial sequence
  SiRNA target sequence
ccataacgattattgacccca

SEQ ID NO: 198773 - DNA, 21 bp, Artificial sequence
  SiRNA target sequence
cataacgattattgaccccaa

SEQ ID NO: 198774 - DNA, 21 bp, Artificial sequence
  SiRNA target sequence
ataacgattattgaccccaac

SEQ ID NO: 198775 - DNA, 21 bp, Artificial sequence
  SiRNA target sequence
taacgattattgaccccaaca

SEQ ID NO: 198776 - DNA, 21 bp, Artificial sequence
  SiRNA target sequence
aacgattattgaccccaacaa

SEQ ID NO: 198777 - DNA, 21 bp, Artificial sequence
  SiRNA target sequence
acgattattgaccccaacaac

SEQ ID NO: 198778 - DNA, 21 bp, Artificial sequence
  SiRNA target sequence
cgattattgaccccaacaaca

SEQ ID NO: 198779 - DNA, 21 bp, Artificial sequence
  SiRNA target sequence
gattattgaccccaacaacaa

SEQ ID NO: 198780 - DNA, 21 bp, Artificial sequence
  SiRNA target sequence
attattgaccccaacaacaag

SEQ ID NO: 198781 - DNA, 21 bp, Artificial sequence
  SiRNA target sequence
ttattgaccccaacaacaaga

SEQ ID NO: 198782 - DNA, 21 bp, Artificial sequence
  SiRNA target sequence
tattgaccccaacaacaagaa

SEQ ID NO: 198783 - DNA, 21 bp, Artificial sequence
  SiRNA target sequence
attgaccccaacaacaagaat

SEQ ID NO: 198784 - DNA, 21 bp, Artificial sequence
  SiRNA target sequence
ttgaccccaacaacaagaata

SEQ ID NO: 198785 - DNA, 21 bp, Artificial sequence
  SiRNA target sequence
tgaccccaacaacaagaataa

SEQ ID NO: 198786 - DNA, 21 bp, Artificial sequence
  SiRNA target sequence
gaccccaacaacaagaataaa

SEQ ID NO: 198787 - DNA, 21 bp, Artificial sequence
  SiRNA target sequence
accccaacaacaagaataaag

SEQ ID NO: 198788 - DNA, 21 bp, Artificial sequence
  SiRNA target sequence
ccccaacaacaagaataaagg

SEQ ID NO: 198789 - DNA, 21 bp, Artificial sequence
  SiRNA target sequence
cccaacaacaagaataaaggt

SEQ ID NO: 198790 - DNA, 21 bp, Artificial sequence
  SiRNA target sequence
ccaacaacaagaataaaggtg

SEQ ID NO: 198791 - DNA, 21 bp, Artificial sequence
  SiRNA target sequence
caacaacaagaataaaggtgt

SEQ ID NO: 198792 - DNA, 21 bp, Artificial sequence
  SiRNA target sequence
aacaacaagaataaaggtgtt

SEQ ID NO: 198793 - DNA, 21 bp, Artificial sequence
  SiRNA target sequence
acaacaagaataaaggtgtta

SEQ ID NO: 198794 - DNA, 21 bp, Artificial sequence
  SiRNA target sequence
caacaagaataaaggtgttaa

SEQ ID NO: 198795 - DNA, 21 bp, Artificial sequence
  SiRNA target sequence
aacaagaataaaggtgttaag

SEQ ID NO: 198796 - DNA, 21 bp, Artificial sequence
  SiRNA target sequence
acaagaataaaggtgttaaga

SEQ ID NO: 198797 - DNA, 21 bp, Artificial sequence
  SiRNA target sequence
caagaataaaggtgttaagag

SEQ ID NO: 198798 - DNA, 21 bp, Artificial sequence
  SiRNA target sequence
aagaataaaggtgttaagagt

SEQ ID NO: 198799 - DNA, 21 bp, Artificial sequence
  SiRNA target sequence
agaataaaggtgttaagagtc

SEQ ID NO: 198800 - DNA, 21 bp, Artificial sequence
  SiRNA target sequence
gaataaaggtgttaagagtcc

SEQ ID NO: 198801 - DNA, 21 bp, Artificial sequence
  SiRNA target sequence
aataaaggtgttaagagtccc

SEQ ID NO: 198802 - DNA, 21 bp, Artificial sequence
  SiRNA target sequence
ataaaggtgttaagagtccca

SEQ ID NO: 198803 - DNA, 21 bp, Artificial sequence
  SiRNA target sequence
taaaggtgttaagagtcccat

SEQ ID NO: 198804 - DNA, 21 bp, Artificial sequence
  SiRNA target sequence
aaaggtgttaagagtcccata

SEQ ID NO: 198805 - DNA, 21 bp, Artificial sequence
  SiRNA target sequence
aaggtgttaagagtcccatag

SEQ ID NO: 198806 - DNA, 21 bp, Artificial sequence
  SiRNA target sequence
aggtgttaagagtcccatagt

SEQ ID NO: 198807 - DNA, 21 bp, Artificial sequence
  SiRNA target sequence
ggtgttaagagtcccatagta

SEQ ID NO: 198808 - DNA, 21 bp, Artificial sequence
  SiRNA target sequence
gtgttaagagtcccatagtaa

SEQ ID NO: 198809 - DNA, 21 bp, Artificial sequence
  SiRNA target sequence
tgttaagagtcccatagtaat

SEQ ID NO: 198810 - DNA, 21 bp, Artificial sequence
  SiRNA target sequence
gttaagagtcccatagtaatc

SEQ ID NO: 198811 - DNA, 21 bp, Artificial sequence
  SiRNA target sequence
ttaagagtcccatagtaatcc

SEQ ID NO: 198812 - DNA, 21 bp, Artificial sequence
  SiRNA target sequence
taagagtcccatagtaatcca

SEQ ID NO: 198813 - DNA, 21 bp, Artificial sequence
  SiRNA target sequence
aagagtcccatagtaatccat

SEQ ID NO: 198814 - DNA, 21 bp, Artificial sequence
  SiRNA target sequence
agagtcccatagtaatccatc

SEQ ID NO: 198815 - DNA, 21 bp, Artificial sequence
  SiRNA target sequence
gagtcccatagtaatccatcc

SEQ ID NO: 198816 - DNA, 21 bp, Artificial sequence
  SiRNA target sequence
agtcccatagtaatccatcca

SEQ ID NO: 198817 - DNA, 21 bp, Artificial sequence
  SiRNA target sequence
gtcccatagtaatccatccac

SEQ ID NO: 198818 - DNA, 21 bp, Artificial sequence
  SiRNA target sequence
tcccatagtaatccatccact

SEQ ID NO: 198819 - DNA, 21 bp, Artificial sequence
  SiRNA target sequence
cccatagtaatccatccacta

SEQ ID NO: 198820 - DNA, 21 bp, Artificial sequence
  SiRNA target sequence
ccatagtaatccatccactac

SEQ ID NO: 198821 - DNA, 21 bp, Artificial sequence
  SiRNA target sequence
catagtaatccatccactact

SEQ ID NO: 198822 - DNA, 21 bp, Artificial sequence
  SiRNA target sequence
atagtaatccatccactactt

SEQ ID NO: 198823 - DNA, 21 bp, Artificial sequence
  SiRNA target sequence
tagtaatccatccactacttt

SEQ ID NO: 198824 - DNA, 21 bp, Artificial sequence
  SiRNA target sequence
agtaatccatccactactttc

SEQ ID NO: 198825 - DNA, 21 bp, Artificial sequence
  SiRNA target sequence
gtaatccatccactactttct

SEQ ID NO: 198826 - DNA, 21 bp, Artificial sequence
  SiRNA target sequence
taatccatccactactttcta

SEQ ID NO: 198827 - DNA, 21 bp, Artificial sequence
  SiRNA target sequence
aatccatccactactttctac

SEQ ID NO: 198828 - DNA, 21 bp, Artificial sequence
  SiRNA target sequence
atccatccactactttctact

SEQ ID NO: 198829 - DNA, 21 bp, Artificial sequence
  SiRNA target sequence
tccatccactactttctacta

SEQ ID NO: 198830 - DNA, 21 bp, Artificial sequence
  SiRNA target sequence
ccatccactactttctactaa

SEQ ID NO: 198831 - DNA, 21 bp, Artificial sequence
  SiRNA target sequence
catccactactttctactaaa

SEQ ID NO: 198832 - DNA, 21 bp, Artificial sequence
  SiRNA target sequence
atccactactttctactaaag

SEQ ID NO: 198833 - DNA, 21 bp, Artificial sequence
  SiRNA target sequence
tccactactttctactaaagt

SEQ ID NO: 198834 - DNA, 21 bp, Artificial sequence
  SiRNA target sequence
ccactactttctactaaagta

SEQ ID NO: 198835 - DNA, 21 bp, Artificial sequence
  SiRNA target sequence
cactactttctactaaagtag

SEQ ID NO: 198836 - DNA, 21 bp, Artificial sequence
  SiRNA target sequence
actactttctactaaagtaga

SEQ ID NO: 198837 - DNA, 21 bp, Artificial sequence
  SiRNA target sequence
ctactttctactaaagtagaa

SEQ ID NO: 198838 - DNA, 21 bp, Artificial sequence
  SiRNA target sequence
tactttctactaaagtagaaa

SEQ ID NO: 198839 - DNA, 21 bp, Artificial sequence
  SiRNA target sequence
actttctactaaagtagaaaa

SEQ ID NO: 198840 - DNA, 21 bp, Artificial sequence
  SiRNA target sequence
ctttctactaaagtagaaaat

SEQ ID NO: 198841 - DNA, 21 bp, Artificial sequence
  SiRNA target sequence
tttctactaaagtagaaaatg

SEQ ID NO: 198842 - DNA, 21 bp, Artificial sequence
  SiRNA target sequence
ttctactaaagtagaaaatgc

SEQ ID NO: 198843 - DNA, 21 bp, Artificial sequence
  SiRNA target sequence
tctactaaagtagaaaatgct

SEQ ID NO: 198844 - DNA, 21 bp, Artificial sequence
  SiRNA target sequence
ctactaaagtagaaaatgctg

SEQ ID NO: 198845 - DNA, 21 bp, Artificial sequence
  SiRNA target sequence
tactaaagtagaaaatgctga

SEQ ID NO: 198846 - DNA, 21 bp, Artificial sequence
  SiRNA target sequence
actaaagtagaaaatgctgac

SEQ ID NO: 198847 - DNA, 21 bp, Artificial sequence
  SiRNA target sequence
ctaaagtagaaaatgctgaca

SEQ ID NO: 198848 - DNA, 21 bp, Artificial sequence
  SiRNA target sequence
taaagtagaaaatgctgacaa

SEQ ID NO: 198849 - DNA, 21 bp, Artificial sequence
  SiRNA target sequence
aaagtagaaaatgctgacaaa

SEQ ID NO: 198850 - DNA, 21 bp, Artificial sequence
  SiRNA target sequence
aagtagaaaatgctgacaaat

SEQ ID NO: 198851 - DNA, 21 bp, Artificial sequence
  SiRNA target sequence
agtagaaaatgctgacaaatt

SEQ ID NO: 198852 - DNA, 21 bp, Artificial sequence
  SiRNA target sequence
gtagaaaatgctgacaaatta

SEQ ID NO: 198853 - DNA, 21 bp, Artificial sequence
  SiRNA target sequence
tagaaaatgctgacaaattaa

SEQ ID NO: 198854 - DNA, 21 bp, Artificial sequence
  SiRNA target sequence
agaaaatgctgacaaattaag

SEQ ID NO: 198855 - DNA, 21 bp, Artificial sequence
  SiRNA target sequence
gaaaatgctgacaaattaagt

SEQ ID NO: 198856 - DNA, 21 bp, Artificial sequence
  SiRNA target sequence
aaaatgctgacaaattaagtg

SEQ ID NO: 198857 - DNA, 21 bp, Artificial sequence
  SiRNA target sequence
aaatgctgacaaattaagtgt

SEQ ID NO: 198858 - DNA, 21 bp, Artificial sequence
  SiRNA target sequence
aatgctgacaaattaagtgtt

SEQ ID NO: 198859 - DNA, 21 bp, Artificial sequence
  SiRNA target sequence
atgctgacaaattaagtgtta

SEQ ID NO: 198860 - DNA, 21 bp, Artificial sequence
  SiRNA target sequence
tgctgacaaattaagtgttat

SEQ ID NO: 198861 - DNA, 21 bp, Artificial sequence
  SiRNA target sequence
gctgacaaattaagtgttatt

SEQ ID NO: 198862 - DNA, 21 bp, Artificial sequence
  SiRNA target sequence
ctgacaaattaagtgttatta

SEQ ID NO: 198863 - DNA, 21 bp, Artificial sequence
  SiRNA target sequence
tgacaaattaagtgttattac

SEQ ID NO: 198864 - DNA, 21 bp, Artificial sequence
  SiRNA target sequence
gacaaattaagtgttattaca

SEQ ID NO: 198865 - DNA, 21 bp, Artificial sequence
  SiRNA target sequence
acaaattaagtgttattacag

SEQ ID NO: 198866 - DNA, 21 bp, Artificial sequence
  SiRNA target sequence
caaattaagtgttattacagt

SEQ ID NO: 198867 - DNA, 21 bp, Artificial sequence
  SiRNA target sequence
aaattaagtgttattacagta

SEQ ID NO: 198868 - DNA, 21 bp, Artificial sequence
  SiRNA target sequence
aattaagtgttattacagtaa

SEQ ID NO: 198869 - DNA, 21 bp, Artificial sequence
  SiRNA target sequence
attaagtgttattacagtaac

SEQ ID NO: 198870 - DNA, 21 bp, Artificial sequence
  SiRNA target sequence
ttaagtgttattacagtaact

SEQ ID NO: 198871 - DNA, 21 bp, Artificial sequence
  SiRNA target sequence
taagtgttattacagtaactg

SEQ ID NO: 198872 - DNA, 21 bp, Artificial sequence
  SiRNA target sequence
aagtgttattacagtaactgc

SEQ ID NO: 198873 - DNA, 21 bp, Artificial sequence
  SiRNA target sequence
agtgttattacagtaactgct

SEQ ID NO: 198874 - DNA, 21 bp, Artificial sequence
  SiRNA target sequence
gtgttattacagtaactgcta

SEQ ID NO: 198875 - DNA, 21 bp, Artificial sequence
  SiRNA target sequence
tgttattacagtaactgctac

SEQ ID NO: 198876 - DNA, 21 bp, Artificial sequence
  SiRNA target sequence
gttattacagtaactgctacc

SEQ ID NO: 198877 - DNA, 21 bp, Artificial sequence
  SiRNA target sequence
ttattacagtaactgctacca

SEQ ID NO: 198878 - DNA, 21 bp, Artificial sequence
  SiRNA target sequence
tattacagtaactgctaccaa

SEQ ID NO: 198879 - DNA, 21 bp, Artificial sequence
  SiRNA target sequence
attacagtaactgctaccaat

SEQ ID NO: 198880 - DNA, 21 bp, Artificial sequence
  SiRNA target sequence
ttacagtaactgctaccaata

SEQ ID NO: 198881 - DNA, 21 bp, Artificial sequence
  SiRNA target sequence
tacagtaactgctaccaatat

SEQ ID NO: 198882 - DNA, 21 bp, Artificial sequence
  SiRNA target sequence
acagtaactgctaccaatatt

SEQ ID NO: 198883 - DNA, 21 bp, Artificial sequence
  SiRNA target sequence
cagtaactgctaccaatattt

SEQ ID NO: 198884 - DNA, 21 bp, Artificial sequence
  SiRNA target sequence
agtaactgctaccaatatttg

SEQ ID NO: 198885 - DNA, 21 bp, Artificial sequence
  SiRNA target sequence
gtaactgctaccaatatttga

SEQ ID NO: 198886 - DNA, 21 bp, Artificial sequence
  SiRNA target sequence
taactgctaccaatatttgat

SEQ ID NO: 198887 - DNA, 21 bp, Artificial sequence
  SiRNA target sequence
aactgctaccaatatttgatc

SEQ ID NO: 198888 - DNA, 21 bp, Artificial sequence
  SiRNA target sequence
actgctaccaatatttgatct

SEQ ID NO: 198889 - DNA, 21 bp, Artificial sequence
  SiRNA target sequence
ctgctaccaatatttgatcta

SEQ ID NO: 198890 - DNA, 21 bp, Artificial sequence
  SiRNA target sequence
tgctaccaatatttgatctat

SEQ ID NO: 198891 - DNA, 21 bp, Artificial sequence
  SiRNA target sequence
gctaccaatatttgatctatt

SEQ ID NO: 198892 - DNA, 21 bp, Artificial sequence
  SiRNA target sequence
ctaccaatatttgatctattg

SEQ ID NO: 198893 - DNA, 21 bp, Artificial sequence
  SiRNA target sequence
taccaatatttgatctattgt

SEQ ID NO: 198894 - DNA, 21 bp, Artificial sequence
  SiRNA target sequence
accaatatttgatctattgta

SEQ ID NO: 198895 - DNA, 21 bp, Artificial sequence
  SiRNA target sequence
ccaatatttgatctattgtat

SEQ ID NO: 198896 - DNA, 21 bp, Artificial sequence
  SiRNA target sequence
caatatttgatctattgtatt

SEQ ID NO: 198897 - DNA, 21 bp, Artificial sequence
  SiRNA target sequence
aatatttgatctattgtatta

SEQ ID NO: 198898 - DNA, 21 bp, Artificial sequence
  SiRNA target sequence
atatttgatctattgtattaa

SEQ ID NO: 198899 - DNA, 21 bp, Artificial sequence
  SiRNA target sequence
tatttgatctattgtattaaa

SEQ ID NO: 198900 - DNA, 21 bp, Artificial sequence
  SiRNA target sequence
atttgatctattgtattaaat

SEQ ID NO: 198901 - DNA, 21 bp, Artificial sequence
  SiRNA target sequence
tttgatctattgtattaaatt

SEQ ID NO: 198902 - DNA, 21 bp, Artificial sequence
  SiRNA target sequence
ttgatctattgtattaaattt

SEQ ID NO: 198903 - DNA, 21 bp, Artificial sequence
  SiRNA target sequence
tgatctattgtattaaatttg

SEQ ID NO: 198904 - DNA, 21 bp, Artificial sequence
  SiRNA target sequence
gatctattgtattaaatttgc

SEQ ID NO: 198905 - DNA, 21 bp, Artificial sequence
  SiRNA target sequence
atctattgtattaaatttgcc

SEQ ID NO: 198906 - DNA, 21 bp, Artificial sequence
  SiRNA target sequence
tctattgtattaaatttgccg

SEQ ID NO: 198907 - DNA, 21 bp, Artificial sequence
  SiRNA target sequence
ctattgtattaaatttgccgg

SEQ ID NO: 198908 - DNA, 21 bp, Artificial sequence
  SiRNA target sequence
tattgtattaaatttgccgga

SEQ ID NO: 198909 - DNA, 21 bp, Artificial sequence
  SiRNA target sequence
attgtattaaatttgccggag

SEQ ID NO: 198910 - DNA, 21 bp, Artificial sequence
  SiRNA target sequence
ttgtattaaatttgccggagt

SEQ ID NO: 198911 - DNA, 21 bp, Artificial sequence
  SiRNA target sequence
tgtattaaatttgccggagta

SEQ ID NO: 198912 - DNA, 21 bp, Artificial sequence
  SiRNA target sequence
gtattaaatttgccggagtat

SEQ ID NO: 198913 - DNA, 21 bp, Artificial sequence
  SiRNA target sequence
tattaaatttgccggagtatt

SEQ ID NO: 198914 - DNA, 21 bp, Artificial sequence
  SiRNA target sequence
attaaatttgccggagtattc

SEQ ID NO: 198915 - DNA, 21 bp, Artificial sequence
  SiRNA target sequence
ttaaatttgccggagtattct

SEQ ID NO: 198916 - DNA, 21 bp, Artificial sequence
  SiRNA target sequence
taaatttgccggagtattctc

SEQ ID NO: 198917 - DNA, 21 bp, Artificial sequence
  SiRNA target sequence
aaatttgccggagtattctcc

SEQ ID NO: 198918 - DNA, 21 bp, Artificial sequence
  SiRNA target sequence
aatttgccggagtattctcct

SEQ ID NO: 198919 - DNA, 21 bp, Artificial sequence
  SiRNA target sequence
atttgccggagtattctccta

SEQ ID NO: 198920 - DNA, 21 bp, Artificial sequence
  SiRNA target sequence
tttgccggagtattctcctac

SEQ ID NO: 198921 - DNA, 21 bp, Artificial sequence
  SiRNA target sequence
ttgccggagtattctcctacc

SEQ ID NO: 198922 - DNA, 21 bp, Artificial sequence
  SiRNA target sequence
tgccggagtattctcctacct

SEQ ID NO: 198923 - DNA, 21 bp, Artificial sequence
  SiRNA target sequence
gccggagtattctcctacctc

SEQ ID NO: 198924 - DNA, 21 bp, Artificial sequence
  SiRNA target sequence
ccggagtattctcctacctct

SEQ ID NO: 198925 - DNA, 21 bp, Artificial sequence
  SiRNA target sequence
cggagtattctcctacctcta

SEQ ID NO: 198926 - DNA, 21 bp, Artificial sequence
  SiRNA target sequence
ggagtattctcctacctctaa

SEQ ID NO: 198927 - DNA, 21 bp, Artificial sequence
  SiRNA target sequence
gagtattctcctacctctaat

SEQ ID NO: 198928 - DNA, 21 bp, Artificial sequence
  SiRNA target sequence
agtattctcctacctctaatc

SEQ ID NO: 198929 - DNA, 21 bp, Artificial sequence
  SiRNA target sequence
gtattctcctacctctaatcc

SEQ ID NO: 198930 - DNA, 21 bp, Artificial sequence
  SiRNA target sequence
tattctcctacctctaatcct

SEQ ID NO: 198931 - DNA, 21 bp, Artificial sequence
  SiRNA target sequence
attctcctacctctaatccta

SEQ ID NO: 198932 - DNA, 21 bp, Artificial sequence
  SiRNA target sequence
ttctcctacctctaatcctaa

SEQ ID NO: 198933 - DNA, 21 bp, Artificial sequence
  SiRNA target sequence
tctcctacctctaatcctaaa

SEQ ID NO: 198934 - DNA, 21 bp, Artificial sequence
  SiRNA target sequence
ctcctacctctaatcctaaac

SEQ ID NO: 198935 - DNA, 21 bp, Artificial sequence
  SiRNA target sequence
tcctacctctaatcctaaact

SEQ ID NO: 198936 - DNA, 21 bp, Artificial sequence
  SiRNA target sequence
cctacctctaatcctaaactt

SEQ ID NO: 198937 - DNA, 21 bp, Artificial sequence
  SiRNA target sequence
ctacctctaatcctaaacttt

SEQ ID NO: 198938 - DNA, 21 bp, Artificial sequence
  SiRNA target sequence
tacctctaatcctaaactttt

SEQ ID NO: 198939 - DNA, 21 bp, Artificial sequence
  SiRNA target sequence
acctctaatcctaaacttttt

SEQ ID NO: 198940 - DNA, 21 bp, Artificial sequence
  SiRNA target sequence
cctctaatcctaaactttttg

SEQ ID NO: 198941 - DNA, 21 bp, Artificial sequence
  SiRNA target sequence
ctctaatcctaaactttttga

SEQ ID NO: 198942 - DNA, 21 bp, Artificial sequence
  SiRNA target sequence
tctaatcctaaactttttgac

SEQ ID NO: 198943 - DNA, 21 bp, Artificial sequence
  SiRNA target sequence
ctaatcctaaactttttgacg

SEQ ID NO: 198944 - DNA, 21 bp, Artificial sequence
  SiRNA target sequence
taatcctaaactttttgacgc

SEQ ID NO: 198945 - DNA, 21 bp, Artificial sequence
  SiRNA target sequence
aatcctaaactttttgacgca

SEQ ID NO: 198946 - DNA, 21 bp, Artificial sequence
  SiRNA target sequence
atcctaaactttttgacgcag

SEQ ID NO: 198947 - DNA, 21 bp, Artificial sequence
  SiRNA target sequence
tcctaaactttttgacgcagc

SEQ ID NO: 198948 - DNA, 21 bp, Artificial sequence
  SiRNA target sequence
cctaaactttttgacgcagct

SEQ ID NO: 198949 - DNA, 21 bp, Artificial sequence
  SiRNA target sequence
ctaaactttttgacgcagctt

SEQ ID NO: 198950 - DNA, 21 bp, Artificial sequence
  SiRNA target sequence
taaactttttgacgcagcttt

SEQ ID NO: 198951 - DNA, 21 bp, Artificial sequence
  SiRNA target sequence
aaactttttgacgcagcttta

SEQ ID NO: 198952 - DNA, 21 bp, Artificial sequence
  SiRNA target sequence
aactttttgacgcagctttaa

SEQ ID NO: 198953 - DNA, 21 bp, Artificial sequence
  SiRNA target sequence
actttttgacgcagctttaat

SEQ ID NO: 198954 - DNA, 21 bp, Artificial sequence
  SiRNA target sequence
ctttttgacgcagctttaatt

SEQ ID NO: 198955 - DNA, 21 bp, Artificial sequence
  SiRNA target sequence
tttttgacgcagctttaattc

SEQ ID NO: 198956 - DNA, 21 bp, Artificial sequence
  SiRNA target sequence
ttttgacgcagctttaattcc

SEQ ID NO: 198957 - DNA, 21 bp, Artificial sequence
  SiRNA target sequence
tttgacgcagctttaattcct

SEQ ID NO: 198958 - DNA, 21 bp, Artificial sequence
  SiRNA target sequence
ttgacgcagctttaattcctg

SEQ ID NO: 198959 - DNA, 21 bp, Artificial sequence
  SiRNA target sequence
tgacgcagctttaattcctgc

SEQ ID NO: 198960 - DNA, 21 bp, Artificial sequence
  SiRNA target sequence
gacgcagctttaattcctgct

SEQ ID NO: 198961 - DNA, 21 bp, Artificial sequence
  SiRNA target sequence
acgcagctttaattcctgctt

SEQ ID NO: 198962 - DNA, 21 bp, Artificial sequence
  SiRNA target sequence
cgcagctttaattcctgcttt

SEQ ID NO: 198963 - DNA, 21 bp, Artificial sequence
  SiRNA target sequence
gcagctttaattcctgcttta

SEQ ID NO: 198964 - DNA, 21 bp, Artificial sequence
  SiRNA target sequence
cagctttaattcctgctttat

SEQ ID NO: 198965 - DNA, 21 bp, Artificial sequence
  SiRNA target sequence
agctttaattcctgctttata

SEQ ID NO: 198966 - DNA, 21 bp, Artificial sequence
  SiRNA target sequence
gctttaattcctgctttatag

SEQ ID NO: 198967 - DNA, 21 bp, Artificial sequence
  SiRNA target sequence
ctttaattcctgctttataga

SEQ ID NO: 198968 - DNA, 21 bp, Artificial sequence
  SiRNA target sequence
tttaattcctgctttatagac

SEQ ID NO: 198969 - DNA, 21 bp, Artificial sequence
  SiRNA target sequence
ttaattcctgctttatagaca

SEQ ID NO: 198970 - DNA, 21 bp, Artificial sequence
  SiRNA target sequence
taattcctgctttatagacag

SEQ ID NO: 198971 - DNA, 21 bp, Artificial sequence
  SiRNA target sequence
aattcctgctttatagacaga

SEQ ID NO: 198972 - DNA, 21 bp, Artificial sequence
  SiRNA target sequence
attcctgctttatagacagat

SEQ ID NO: 198973 - DNA, 21 bp, Artificial sequence
  SiRNA target sequence
ttcctgctttatagacagatt

SEQ ID NO: 198974 - DNA, 21 bp, Artificial sequence
  SiRNA target sequence
tcctgctttatagacagattc

SEQ ID NO: 198975 - DNA, 21 bp, Artificial sequence
  SiRNA target sequence
cctgctttatagacagattca

SEQ ID NO: 198976 - DNA, 21 bp, Artificial sequence
  SiRNA target sequence
ctgctttatagacagattcaa

SEQ ID NO: 198977 - DNA, 21 bp, Artificial sequence
  SiRNA target sequence
tgctttatagacagattcaat

SEQ ID NO: 198978 - DNA, 21 bp, Artificial sequence
  SiRNA target sequence
gctttatagacagattcaatt

SEQ ID NO: 198979 - DNA, 21 bp, Artificial sequence
  SiRNA target sequence
ctttatagacagattcaatta

SEQ ID NO: 198980 - DNA, 21 bp, Artificial sequence
  SiRNA target sequence
tttatagacagattcaattaa

SEQ ID NO: 198981 - DNA, 21 bp, Artificial sequence
  SiRNA target sequence
ttatagacagattcaattaaa

SEQ ID NO: 198982 - DNA, 21 bp, Artificial sequence
  SiRNA target sequence
tatagacagattcaattaaat

SEQ ID NO: 198983 - DNA, 21 bp, Artificial sequence
  SiRNA target sequence
atagacagattcaattaaatt

SEQ ID NO: 198984 - DNA, 21 bp, Artificial sequence
  SiRNA target sequence
tagacagattcaattaaatta

SEQ ID NO: 198985 - DNA, 21 bp, Artificial sequence
  SiRNA target sequence
agacagattcaattaaattaa

SEQ ID NO: 198986 - DNA, 21 bp, Artificial sequence
  SiRNA target sequence
gacagattcaattaaattaaa

SEQ ID NO: 198987 - DNA, 21 bp, Artificial sequence
  SiRNA target sequence
acagattcaattaaattaaat

SEQ ID NO: 198988 - DNA, 21 bp, Artificial sequence
  SiRNA target sequence
cagattcaattaaattaaatg

SEQ ID NO: 198989 - DNA, 21 bp, Artificial sequence
  SiRNA target sequence
agattcaattaaattaaatgt

SEQ ID NO: 198990 - DNA, 21 bp, Artificial sequence
  SiRNA target sequence
gattcaattaaattaaatgtt

SEQ ID NO: 198991 - DNA, 21 bp, Artificial sequence
  SiRNA target sequence
attcaattaaattaaatgtta

SEQ ID NO: 198992 - DNA, 21 bp, Artificial sequence
  SiRNA target sequence
ttcaattaaattaaatgttat

SEQ ID NO: 198993 - DNA, 21 bp, Artificial sequence
  SiRNA target sequence
tcaattaaattaaatgttata

SEQ ID NO: 198994 - DNA, 21 bp, Artificial sequence
  SiRNA target sequence
caattaaattaaatgttatat

SEQ ID NO: 198995 - DNA, 21 bp, Artificial sequence
  SiRNA target sequence
aattaaattaaatgttatatt

SEQ ID NO: 198996 - DNA, 21 bp, Artificial sequence
  SiRNA target sequence
attaaattaaatgttatattg

SEQ ID NO: 198997 - DNA, 21 bp, Artificial sequence
  SiRNA target sequence
ttaaattaaatgttatattgt

SEQ ID NO: 198998 - DNA, 21 bp, Artificial sequence
  SiRNA target sequence
taaattaaatgttatattgta

SEQ ID NO: 198999 - DNA, 21 bp, Artificial sequence
  SiRNA target sequence
aaattaaatgttatattgtaa

SEQ ID NO: 199000 - DNA, 21 bp, Artificial sequence
  SiRNA target sequence
aattaaatgttatattgtaaa

SEQ ID NO: 199001 - DNA, 21 bp, Artificial sequence
  SiRNA target sequence
attaaatgttatattgtaaaa

SEQ ID NO: 199002 - DNA, 21 bp, Artificial sequence
  SiRNA target sequence
ttaaatgttatattgtaaaaa

SEQ ID NO: 199003 - DNA, 21 bp, Artificial sequence
  SiRNA target sequence
taaatgttatattgtaaaaaa

SEQ ID NO: 199004 - DNA, 21 bp, Artificial sequence
  SiRNA target sequence
aaatgttatattgtaaaaaaa

SEQ ID NO: 199005 - DNA, 21 bp, Artificial sequence
  SiRNA target sequence
aatgttatattgtaaaaaaag

SEQ ID NO: 199006 - DNA, 21 bp, Artificial sequence
  SiRNA target sequence
atgttatattgtaaaaaaaga

SEQ ID NO: 199007 - DNA, 21 bp, Artificial sequence
  SiRNA target sequence
tgttatattgtaaaaaaagac

SEQ ID NO: 199008 - DNA, 21 bp, Artificial sequence
  SiRNA target sequence
gttatattgtaaaaaaagact

SEQ ID NO: 199009 - DNA, 21 bp, Artificial sequence
  SiRNA target sequence
ttatattgtaaaaaaagacta

SEQ ID NO: 199010 - DNA, 21 bp, Artificial sequence
  SiRNA target sequence
tatattgtaaaaaaagactat

SEQ ID NO: 199011 - DNA, 21 bp, Artificial sequence
  SiRNA target sequence
atattgtaaaaaaagactatt

SEQ ID NO: 199012 - DNA, 21 bp, Artificial sequence
  SiRNA target sequence
tattgtaaaaaaagactatta

SEQ ID NO: 199013 - DNA, 21 bp, Artificial sequence
  SiRNA target sequence
attgtaaaaaaagactattat

SEQ ID NO: 199014 - DNA, 21 bp, Artificial sequence
  SiRNA target sequence
ttgtaaaaaaagactattata

SEQ ID NO: 199015 - DNA, 21 bp, Artificial sequence
  SiRNA target sequence
tgtaaaaaaagactattatac

SEQ ID NO: 199016 - DNA, 21 bp, Artificial sequence
  SiRNA target sequence
gtaaaaaaagactattataca

SEQ ID NO: 199017 - DNA, 21 bp, Artificial sequence
  SiRNA target sequence
taaaaaaagactattatacaa

SEQ ID NO: 199018 - DNA, 21 bp, Artificial sequence
  SiRNA target sequence
aaaaaaagactattatacaaa

SEQ ID NO: 199019 - DNA, 21 bp, Artificial sequence
  SiRNA target sequence
aaaaaagactattatacaaag

SEQ ID NO: 199020 - DNA, 21 bp, Artificial sequence
  SiRNA target sequence
aaaaagactattatacaaagt

SEQ ID NO: 199021 - DNA, 21 bp, Artificial sequence
  SiRNA target sequence
aaaagactattatacaaagtg

SEQ ID NO: 199022 - DNA, 21 bp, Artificial sequence
  SiRNA target sequence
aaagactattatacaaagtga

SEQ ID NO: 199023 - DNA, 21 bp, Artificial sequence
  SiRNA target sequence
aagactattatacaaagtgac

SEQ ID NO: 199024 - DNA, 21 bp, Artificial sequence
  SiRNA target sequence
agactattatacaaagtgaca

SEQ ID NO: 199025 - DNA, 21 bp, Artificial sequence
  SiRNA target sequence
gactattatacaaagtgacat

SEQ ID NO: 199026 - DNA, 21 bp, Artificial sequence
  SiRNA target sequence
actattatacaaagtgacatt

SEQ ID NO: 199027 - DNA, 21 bp, Artificial sequence
  SiRNA target sequence
ctattatacaaagtgacatta

SEQ ID NO: 199028 - DNA, 21 bp, Artificial sequence
  SiRNA target sequence
tattatacaaagtgacattaa

SEQ ID NO: 199029 - DNA, 21 bp, Artificial sequence
  SiRNA target sequence
attatacaaagtgacattaat

SEQ ID NO: 199030 - DNA, 21 bp, Artificial sequence
  SiRNA target sequence
ttatacaaagtgacattaata

SEQ ID NO: 199031 - DNA, 21 bp, Artificial sequence
  SiRNA target sequence
tatacaaagtgacattaataa

SEQ ID NO: 199032 - DNA, 21 bp, Artificial sequence
  SiRNA target sequence
atacaaagtgacattaataat

SEQ ID NO: 199033 - DNA, 21 bp, Artificial sequence
  SiRNA target sequence
tacaaagtgacattaataatt

SEQ ID NO: 199034 - DNA, 21 bp, Artificial sequence
  SiRNA target sequence
acaaagtgacattaataattt

SEQ ID NO: 199035 - DNA, 21 bp, Artificial sequence
  SiRNA target sequence
caaagtgacattaataatttt

SEQ ID NO: 199036 - DNA, 21 bp, Artificial sequence
  SiRNA target sequence
aaagtgacattaataattttg

SEQ ID NO: 199037 - DNA, 21 bp, Artificial sequence
  SiRNA target sequence
aagtgacattaataattttga

SEQ ID NO: 199038 - DNA, 21 bp, Artificial sequence
  SiRNA target sequence
agtgacattaataattttgat

SEQ ID NO: 199039 - DNA, 21 bp, Artificial sequence
  SiRNA target sequence
gtgacattaataattttgatt

SEQ ID NO: 199040 - DNA, 21 bp, Artificial sequence
  SiRNA target sequence
tgacattaataattttgattt

SEQ ID NO: 199041 - DNA, 21 bp, Artificial sequence
  SiRNA target sequence
gacattaataattttgatttc

SEQ ID NO: 199042 - DNA, 21 bp, Artificial sequence
  SiRNA target sequence
acattaataattttgatttca

SEQ ID NO: 199043 - DNA, 21 bp, Artificial sequence
  SiRNA target sequence
cattaataattttgatttcat

SEQ ID NO: 199044 - DNA, 21 bp, Artificial sequence
  SiRNA target sequence
attaataattttgatttcatc

SEQ ID NO: 199045 - DNA, 21 bp, Artificial sequence
  SiRNA target sequence
ttaataattttgatttcatca

SEQ ID NO: 199046 - DNA, 21 bp, Artificial sequence
  SiRNA target sequence
taataattttgatttcatcat

SEQ ID NO: 199047 - DNA, 21 bp, Artificial sequence
  SiRNA target sequence
aataattttgatttcatcatt

SEQ ID NO: 199048 - DNA, 21 bp, Artificial sequence
  SiRNA target sequence
ataattttgatttcatcatta

SEQ ID NO: 199049 - DNA, 21 bp, Artificial sequence
  SiRNA target sequence
taattttgatttcatcattat

SEQ ID NO: 199050 - DNA, 21 bp, Artificial sequence
  SiRNA target sequence
aattttgatttcatcattata

SEQ ID NO: 199051 - DNA, 21 bp, Artificial sequence
  SiRNA target sequence
attttgatttcatcattatac

SEQ ID NO: 199052 - DNA, 21 bp, Artificial sequence
  SiRNA target sequence
ttttgatttcatcattatact

SEQ ID NO: 199053 - DNA, 21 bp, Artificial sequence
  SiRNA target sequence
tttgatttcatcattatacta

SEQ ID NO: 199054 - DNA, 21 bp, Artificial sequence
  SiRNA target sequence
ttgatttcatcattatactaa

SEQ ID NO: 199055 - DNA, 21 bp, Artificial sequence
  SiRNA target sequence
tgatttcatcattatactaat

SEQ ID NO: 199056 - DNA, 21 bp, Artificial sequence
  SiRNA target sequence
gatttcatcattatactaata

SEQ ID NO: 199057 - DNA, 21 bp, Artificial sequence
  SiRNA target sequence
atttcatcattatactaatac

SEQ ID NO: 199058 - DNA, 21 bp, Artificial sequence
  SiRNA target sequence
tttcatcattatactaatacc

SEQ ID NO: 199059 - DNA, 21 bp, Artificial sequence
  SiRNA target sequence
ttcatcattatactaatacct

SEQ ID NO: 199060 - DNA, 21 bp, Artificial sequence
  SiRNA target sequence
tcatcattatactaatacctt

SEQ ID NO: 199061 - DNA, 21 bp, Artificial sequence
  SiRNA target sequence
catcattatactaataccttc

SEQ ID NO: 199062 - DNA, 21 bp, Artificial sequence
  SiRNA target sequence
atcattatactaataccttcg

SEQ ID NO: 199063 - DNA, 21 bp, Artificial sequence
  SiRNA target sequence
tcattatactaataccttcgg

SEQ ID NO: 199064 - DNA, 21 bp, Artificial sequence
  SiRNA target sequence
cattatactaataccttcgga

SEQ ID NO: 199065 - DNA, 21 bp, Artificial sequence
  SiRNA target sequence
attatactaataccttcggag

SEQ ID NO: 199066 - DNA, 21 bp, Artificial sequence
  SiRNA target sequence
ttatactaataccttcggaga

SEQ ID NO: 199067 - DNA, 21 bp, Artificial sequence
  SiRNA target sequence
tatactaataccttcggagaa

SEQ ID NO: 199068 - DNA, 21 bp, Artificial sequence
  SiRNA target sequence
atactaataccttcggagaaa

SEQ ID NO: 199069 - DNA, 21 bp, Artificial sequence
  SiRNA target sequence
tactaataccttcggagaaac

SEQ ID NO: 199070 - DNA, 21 bp, Artificial sequence
  SiRNA target sequence
actaataccttcggagaaacc

SEQ ID NO: 199071 - DNA, 21 bp, Artificial sequence
  SiRNA target sequence
ctaataccttcggagaaacct

SEQ ID NO: 199072 - DNA, 21 bp, Artificial sequence
  SiRNA target sequence
taataccttcggagaaaccta

SEQ ID NO: 199073 - DNA, 21 bp, Artificial sequence
  SiRNA target sequence
aataccttcggagaaacctac

SEQ ID NO: 199074 - DNA, 21 bp, Artificial sequence
  SiRNA target sequence
ataccttcggagaaacctaca

SEQ ID NO: 199075 - DNA, 21 bp, Artificial sequence
  SiRNA target sequence
taccttcggagaaacctacac

SEQ ID NO: 199076 - DNA, 21 bp, Artificial sequence
  SiRNA target sequence
accttcggagaaacctacact

SEQ ID NO: 199077 - DNA, 21 bp, Artificial sequence
  SiRNA target sequence
ccttcggagaaacctacacta

SEQ ID NO: 199078 - DNA, 21 bp, Artificial sequence
  SiRNA target sequence
cttcggagaaacctacactaa

SEQ ID NO: 199079 - DNA, 21 bp, Artificial sequence
  SiRNA target sequence
ttcggagaaacctacactaac

SEQ ID NO: 199080 - DNA, 21 bp, Artificial sequence
  SiRNA target sequence
tcggagaaacctacactaact

SEQ ID NO: 199081 - DNA, 21 bp, Artificial sequence
  SiRNA target sequence
cggagaaacctacactaactt

SEQ ID NO: 199082 - DNA, 21 bp, Artificial sequence
  SiRNA target sequence
ggagaaacctacactaacttt

SEQ ID NO: 199083 - DNA, 21 bp, Artificial sequence
  SiRNA target sequence
gagaaacctacactaactttt

SEQ ID NO: 199084 - DNA, 21 bp, Artificial sequence
  SiRNA target sequence
agaaacctacactaacttttt

SEQ ID NO: 199085 - DNA, 21 bp, Artificial sequence
  SiRNA target sequence
gaaacctacactaactttttg

SEQ ID NO: 199086 - DNA, 21 bp, Artificial sequence
  SiRNA target sequence
aaacctacactaactttttgt

SEQ ID NO: 199087 - DNA, 21 bp, Artificial sequence
  SiRNA target sequence
aacctacactaactttttgtt

SEQ ID NO: 199088 - DNA, 21 bp, Artificial sequence
  SiRNA target sequence
acctacactaactttttgttt

SEQ ID NO: 199089 - DNA, 21 bp, Artificial sequence
  SiRNA target sequence
cctacactaactttttgtttc

SEQ ID NO: 199090 - DNA, 21 bp, Artificial sequence
  SiRNA target sequence
ctacactaactttttgtttct

SEQ ID NO: 199091 - DNA, 21 bp, Artificial sequence
  SiRNA target sequence
tacactaactttttgtttctt

SEQ ID NO: 199092 - DNA, 21 bp, Artificial sequence
  SiRNA target sequence
acactaactttttgtttcttt

SEQ ID NO: 199093 - DNA, 21 bp, Artificial sequence
  SiRNA target sequence
cactaactttttgtttctttt

SEQ ID NO: 199094 - DNA, 21 bp, Artificial sequence
  SiRNA target sequence
actaactttttgtttcttttt

SEQ ID NO: 199095 - DNA, 21 bp, Artificial sequence
  SiRNA target sequence
ctaactttttgtttctttttt

SEQ ID NO: 199096 - DNA, 21 bp, Artificial sequence
  SiRNA target sequence
taactttttgtttctttttta

SEQ ID NO: 199097 - DNA, 21 bp, Artificial sequence
  SiRNA target sequence
aactttttgtttcttttttat

SEQ ID NO: 199098 - DNA, 21 bp, Artificial sequence
  SiRNA target sequence
actttttgtttcttttttatc

SEQ ID NO: 199099 - DNA, 21 bp, Artificial sequence
  SiRNA target sequence
ctttttgtttcttttttatcg

SEQ ID NO: 199100 - DNA, 21 bp, Artificial sequence
  SiRNA target sequence
tttttgtttcttttttatcgt

SEQ ID NO: 199101 - DNA, 21 bp, Artificial sequence
  SiRNA target sequence
ttttgtttcttttttatcgta

SEQ ID NO: 199102 - DNA, 21 bp, Artificial sequence
  SiRNA target sequence
tttgtttcttttttatcgtat

SEQ ID NO: 199103 - DNA, 21 bp, Artificial sequence
  SiRNA target sequence
ttgtttcttttttatcgtatt

SEQ ID NO: 199104 - DNA, 21 bp, Artificial sequence
  SiRNA target sequence
tgtttcttttttatcgtatta

SEQ ID NO: 199105 - DNA, 21 bp, Artificial sequence
  SiRNA target sequence
gtttcttttttatcgtattag

SEQ ID NO: 199106 - DNA, 21 bp, Artificial sequence
  SiRNA target sequence
tttcttttttatcgtattaga

SEQ ID NO: 199107 - DNA, 21 bp, Artificial sequence
  SiRNA target sequence
ttcttttttatcgtattagaa

SEQ ID NO: 199108 - DNA, 21 bp, Artificial sequence
  SiRNA target sequence
tcttttttatcgtattagaag

SEQ ID NO: 199109 - DNA, 21 bp, Artificial sequence
  SiRNA target sequence
cttttttatcgtattagaagg

SEQ ID NO: 199110 - DNA, 21 bp, Artificial sequence
  SiRNA target sequence
ttttttatcgtattagaaggt

SEQ ID NO: 199111 - DNA, 21 bp, Artificial sequence
  SiRNA target sequence
tttttatcgtattagaaggta

SEQ ID NO: 199112 - DNA, 21 bp, Artificial sequence
  SiRNA target sequence
ttttatcgtattagaaggtat

SEQ ID NO: 199113 - DNA, 21 bp, Artificial sequence
  SiRNA target sequence
tttatcgtattagaaggtata

SEQ ID NO: 199114 - DNA, 21 bp, Artificial sequence
  SiRNA target sequence
ttatcgtattagaaggtataa

SEQ ID NO: 199115 - DNA, 21 bp, Artificial sequence
  SiRNA target sequence
tatcgtattagaaggtataaa

SEQ ID NO: 199116 - DNA, 21 bp, Artificial sequence
  SiRNA target sequence
atcgtattagaaggtataaat

SEQ ID NO: 199117 - DNA, 21 bp, Artificial sequence
  SiRNA target sequence
tcgtattagaaggtataaata

SEQ ID NO: 199118 - DNA, 21 bp, Artificial sequence
  SiRNA target sequence
cgtattagaaggtataaatat

SEQ ID NO: 199119 - DNA, 21 bp, Artificial sequence
  SiRNA target sequence
gtattagaaggtataaatatt

SEQ ID NO: 199120 - DNA, 21 bp, Artificial sequence
  SiRNA target sequence
tattagaaggtataaatattg

SEQ ID NO: 199121 - DNA, 21 bp, Artificial sequence
  SiRNA target sequence
attagaaggtataaatattgg

SEQ ID NO: 199122 - DNA, 21 bp, Artificial sequence
  SiRNA target sequence
ttagaaggtataaatattggt

SEQ ID NO: 199123 - DNA, 21 bp, Artificial sequence
  SiRNA target sequence
tagaaggtataaatattggta

SEQ ID NO: 199124 - DNA, 21 bp, Artificial sequence
  SiRNA target sequence
agaaggtataaatattggtac

SEQ ID NO: 199125 - DNA, 21 bp, Artificial sequence
  SiRNA target sequence
gaaggtataaatattggtaca

SEQ ID NO: 199126 - DNA, 21 bp, Artificial sequence
  SiRNA target sequence
aaggtataaatattggtacac

SEQ ID NO: 199127 - DNA, 21 bp, Artificial sequence
  SiRNA target sequence
aggtataaatattggtacact

SEQ ID NO: 199128 - DNA, 21 bp, Artificial sequence
  SiRNA target sequence
ggtataaatattggtacactc

SEQ ID NO: 199129 - DNA, 21 bp, Artificial sequence
  SiRNA target sequence
gtataaatattggtacactca

SEQ ID NO: 199130 - DNA, 21 bp, Artificial sequence
  SiRNA target sequence
tataaatattggtacactcat

SEQ ID NO: 199131 - DNA, 21 bp, Artificial sequence
  SiRNA target sequence
ataaatattggtacactcatt

SEQ ID NO: 199132 - DNA, 21 bp, Artificial sequence
  SiRNA target sequence
taaatattggtacactcatta

SEQ ID NO: 199133 - DNA, 21 bp, Artificial sequence
  SiRNA target sequence
aaatattggtacactcattat

SEQ ID NO: 199134 - DNA, 21 bp, Artificial sequence
  SiRNA target sequence
aatattggtacactcattatt

SEQ ID NO: 199135 - DNA, 21 bp, Artificial sequence
  SiRNA target sequence
atattggtacactcattattt

SEQ ID NO: 199136 - DNA, 21 bp, Artificial sequence
  SiRNA target sequence
tattggtacactcattatttt

SEQ ID NO: 199137 - DNA, 21 bp, Artificial sequence
  SiRNA target sequence
attggtacactcattatttta

SEQ ID NO: 199138 - DNA, 21 bp, Artificial sequence
  SiRNA target sequence
ttggtacactcattattttat

SEQ ID NO: 199139 - DNA, 21 bp, Artificial sequence
  SiRNA target sequence
tggtacactcattattttatt

SEQ ID NO: 199140 - DNA, 21 bp, Artificial sequence
  SiRNA target sequence
ggtacactcattattttattc

SEQ ID NO: 199141 - DNA, 21 bp, Artificial sequence
  SiRNA target sequence
gtacactcattattttattct

SEQ ID NO: 199142 - DNA, 21 bp, Artificial sequence
  SiRNA target sequence
tacactcattattttattctc

SEQ ID NO: 199143 - DNA, 21 bp, Artificial sequence
  SiRNA target sequence
acactcattattttattctcg

SEQ ID NO: 199144 - DNA, 21 bp, Artificial sequence
  SiRNA target sequence
cactcattattttattctcga

SEQ ID NO: 199145 - DNA, 21 bp, Artificial sequence
  SiRNA target sequence
actcattattttattctcgaa

SEQ ID NO: 199146 - DNA, 21 bp, Artificial sequence
  SiRNA target sequence
ctcattattttattctcgaaa

SEQ ID NO: 199147 - DNA, 21 bp, Artificial sequence
  SiRNA target sequence
tcattattttattctcgaaat

SEQ ID NO: 199148 - DNA, 21 bp, Artificial sequence
  SiRNA target sequence
cattattttattctcgaaata

SEQ ID NO: 199149 - DNA, 21 bp, Artificial sequence
  SiRNA target sequence
attattttattctcgaaataa

SEQ ID NO: 199150 - DNA, 21 bp, Artificial sequence
  SiRNA target sequence
ttattttattctcgaaataat

SEQ ID NO: 199151 - DNA, 21 bp, Artificial sequence
  SiRNA target sequence
tattttattctcgaaataata

SEQ ID NO: 199152 - DNA, 21 bp, Artificial sequence
  SiRNA target sequence
attttattctcgaaataatat

SEQ ID NO: 199153 - DNA, 21 bp, Artificial sequence
  SiRNA target sequence
ttttattctcgaaataatatt

SEQ ID NO: 199154 - DNA, 21 bp, Artificial sequence
  SiRNA target sequence
tttattctcgaaataatattt

SEQ ID NO: 199155 - DNA, 21 bp, Artificial sequence
  SiRNA target sequence
ttattctcgaaataatatttc

SEQ ID NO: 199156 - DNA, 21 bp, Artificial sequence
  SiRNA target sequence
tattctcgaaataatatttca

SEQ ID NO: 199157 - DNA, 21 bp, Artificial sequence
  SiRNA target sequence
attctcgaaataatatttcat

SEQ ID NO: 199158 - DNA, 21 bp, Artificial sequence
  SiRNA target sequence
ttctcgaaataatatttcatg

SEQ ID NO: 199159 - DNA, 21 bp, Artificial sequence
  SiRNA target sequence
tctcgaaataatatttcatgt

SEQ ID NO: 199160 - DNA, 21 bp, Artificial sequence
  SiRNA target sequence
ctcgaaataatatttcatgta

SEQ ID NO: 199161 - DNA, 21 bp, Artificial sequence
  SiRNA target sequence
tcgaaataatatttcatgtac

SEQ ID NO: 199162 - DNA, 21 bp, Artificial sequence
  SiRNA target sequence
cgaaataatatttcatgtaca

SEQ ID NO: 199163 - DNA, 21 bp, Artificial sequence
  SiRNA target sequence
gaaataatatttcatgtacat

SEQ ID NO: 199164 - DNA, 21 bp, Artificial sequence
  SiRNA target sequence
aaataatatttcatgtacatt

SEQ ID NO: 199165 - DNA, 21 bp, Artificial sequence
  SiRNA target sequence
aataatatttcatgtacatta

SEQ ID NO: 199166 - DNA, 21 bp, Artificial sequence
  SiRNA target sequence
ataatatttcatgtacattaa

SEQ ID NO: 199167 - DNA, 21 bp, Artificial sequence
  SiRNA target sequence
taatatttcatgtacattaat

SEQ ID NO: 199168 - DNA, 21 bp, Artificial sequence
  SiRNA target sequence
aatatttcatgtacattaata

SEQ ID NO: 199169 - DNA, 21 bp, Artificial sequence
  SiRNA target sequence
atatttcatgtacattaatat

SEQ ID NO: 199170 - DNA, 21 bp, Artificial sequence
  SiRNA target sequence
tatttcatgtacattaatatt

SEQ ID NO: 199171 - DNA, 21 bp, Artificial sequence
  SiRNA target sequence
atttcatgtacattaatatta

SEQ ID NO: 199172 - DNA, 21 bp, Artificial sequence
  SiRNA target sequence
tttcatgtacattaatattag

SEQ ID NO: 199173 - DNA, 21 bp, Artificial sequence
  SiRNA target sequence
ttcatgtacattaatattaga

SEQ ID NO: 199174 - DNA, 21 bp, Artificial sequence
  SiRNA target sequence
tcatgtacattaatattagac

SEQ ID NO: 199175 - DNA, 21 bp, Artificial sequence
  SiRNA target sequence
catgtacattaatattagaca

SEQ ID NO: 199176 - DNA, 21 bp, Artificial sequence
  SiRNA target sequence
atgtacattaatattagacat

SEQ ID NO: 199177 - DNA, 21 bp, Artificial sequence
  SiRNA target sequence
tgtacattaatattagacata

SEQ ID NO: 199178 - DNA, 21 bp, Artificial sequence
  SiRNA target sequence
gtacattaatattagacatat

SEQ ID NO: 199179 - DNA, 21 bp, Artificial sequence
  SiRNA target sequence
tacattaatattagacatata

SEQ ID NO: 199180 - DNA, 21 bp, Artificial sequence
  SiRNA target sequence
acattaatattagacatatac

SEQ ID NO: 199181 - DNA, 21 bp, Artificial sequence
  SiRNA target sequence
cattaatattagacatatacc

SEQ ID NO: 199182 - DNA, 21 bp, Artificial sequence
  SiRNA target sequence
attaatattagacatataccg

SEQ ID NO: 199183 - DNA, 21 bp, Artificial sequence
  SiRNA target sequence
ttaatattagacatataccgc

SEQ ID NO: 199184 - DNA, 21 bp, Artificial sequence
  SiRNA target sequence
taatattagacatataccgcc

SEQ ID NO: 199185 - DNA, 21 bp, Artificial sequence
  SiRNA target sequence
aatattagacatataccgccc

SEQ ID NO: 199186 - DNA, 21 bp, Artificial sequence
  SiRNA target sequence
atattagacatataccgccca

SEQ ID NO: 199187 - DNA, 21 bp, Artificial sequence
  SiRNA target sequence
tattagacatataccgcccat

SEQ ID NO: 199188 - DNA, 21 bp, Artificial sequence
  SiRNA target sequence
attagacatataccgcccatg

SEQ ID NO: 199189 - DNA, 21 bp, Artificial sequence
  SiRNA target sequence
ttagacatataccgcccatgg

SEQ ID NO: 199190 - DNA, 21 bp, Artificial sequence
  SiRNA target sequence
tagacatataccgcccatggc

SEQ ID NO: 199191 - DNA, 21 bp, Artificial sequence
  SiRNA target sequence
agacatataccgcccatggca

SEQ ID NO: 199192 - DNA, 21 bp, Artificial sequence
  SiRNA target sequence
gacatataccgcccatggcaa

SEQ ID NO: 199193 - DNA, 21 bp, Artificial sequence
  SiRNA target sequence
acatataccgcccatggcaat

SEQ ID NO: 199194 - DNA, 21 bp, Artificial sequence
  SiRNA target sequence
catataccgcccatggcaata

SEQ ID NO: 199195 - DNA, 21 bp, Artificial sequence
  SiRNA target sequence
atataccgcccatggcaataa

SEQ ID NO: 199196 - DNA, 21 bp, Artificial sequence
  SiRNA target sequence
tataccgcccatggcaataaa

SEQ ID NO: 199197 - DNA, 21 bp, Artificial sequence
  SiRNA target sequence
ataccgcccatggcaataaaa

SEQ ID NO: 199198 - DNA, 21 bp, Artificial sequence
  SiRNA target sequence
taccgcccatggcaataaaaa

SEQ ID NO: 199199 - DNA, 21 bp, Artificial sequence
  SiRNA target sequence
accgcccatggcaataaaaac

SEQ ID NO: 199200 - DNA, 21 bp, Artificial sequence
  SiRNA target sequence
ccgcccatggcaataaaaacc

SEQ ID NO: 199201 - DNA, 21 bp, Artificial sequence
  SiRNA target sequence
cgcccatggcaataaaaaccg

SEQ ID NO: 199202 - DNA, 21 bp, Artificial sequence
  SiRNA target sequence
gcccatggcaataaaaaccga

SEQ ID NO: 199203 - DNA, 21 bp, Artificial sequence
  SiRNA target sequence
cccatggcaataaaaaccgaa

SEQ ID NO: 199204 - DNA, 21 bp, Artificial sequence
  SiRNA target sequence
ccatggcaataaaaaccgaag

SEQ ID NO: 199205 - DNA, 21 bp, Artificial sequence
  SiRNA target sequence
catggcaataaaaaccgaaga

SEQ ID NO: 199206 - DNA, 21 bp, Artificial sequence
  SiRNA target sequence
atggcaataaaaaccgaagaa

SEQ ID NO: 199207 - DNA, 21 bp, Artificial sequence
  SiRNA target sequence
tggcaataaaaaccgaagaat

SEQ ID NO: 199208 - DNA, 21 bp, Artificial sequence
  SiRNA target sequence
ggcaataaaaaccgaagaata

SEQ ID NO: 199209 - DNA, 21 bp, Artificial sequence
  SiRNA target sequence
gcaataaaaaccgaagaatat

SEQ ID NO: 199210 - DNA, 21 bp, Artificial sequence
  SiRNA target sequence
caataaaaaccgaagaatata

SEQ ID NO: 199211 - DNA, 21 bp, Artificial sequence
  SiRNA target sequence
aataaaaaccgaagaatataa

SEQ ID NO: 199212 - DNA, 21 bp, Artificial sequence
  SiRNA target sequence
ataaaaaccgaagaatataat

SEQ ID NO: 199213 - DNA, 21 bp, Artificial sequence
  SiRNA target sequence
taaaaaccgaagaatataata

SEQ ID NO: 199214 - DNA, 21 bp, Artificial sequence
  SiRNA target sequence
aaaaaccgaagaatataataa

SEQ ID NO: 199215 - DNA, 21 bp, Artificial sequence
  SiRNA target sequence
aaaaccgaagaatataataac

SEQ ID NO: 199216 - DNA, 21 bp, Artificial sequence
  SiRNA target sequence
aaaccgaagaatataataact

SEQ ID NO: 199217 - DNA, 21 bp, Artificial sequence
  SiRNA target sequence
aaccgaagaatataataactg

SEQ ID NO: 199218 - DNA, 21 bp, Artificial sequence
  SiRNA target sequence
accgaagaatataataactga

SEQ ID NO: 199219 - DNA, 21 bp, Artificial sequence
  SiRNA target sequence
ccgaagaatataataactgat

SEQ ID NO: 199220 - DNA, 21 bp, Artificial sequence
  SiRNA target sequence
cgaagaatataataactgatt

SEQ ID NO: 199221 - DNA, 21 bp, Artificial sequence
  SiRNA target sequence
gaagaatataataactgattt

SEQ ID NO: 199222 - DNA, 21 bp, Artificial sequence
  SiRNA target sequence
aagaatataataactgatttt

SEQ ID NO: 199223 - DNA, 21 bp, Artificial sequence
  SiRNA target sequence
agaatataataactgattttg

SEQ ID NO: 199224 - DNA, 21 bp, Artificial sequence
  SiRNA target sequence
gaatataataactgattttgc

SEQ ID NO: 199225 - DNA, 21 bp, Artificial sequence
  SiRNA target sequence
aatataataactgattttgct

SEQ ID NO: 199226 - DNA, 21 bp, Artificial sequence
  SiRNA target sequence
atataataactgattttgctc

SEQ ID NO: 199227 - DNA, 21 bp, Artificial sequence
  SiRNA target sequence
tataataactgattttgctca

SEQ ID NO: 199228 - DNA, 21 bp, Artificial sequence
  SiRNA target sequence
ataataactgattttgctcat

SEQ ID NO: 199229 - DNA, 21 bp, Artificial sequence
  SiRNA target sequence
taataactgattttgctcata

SEQ ID NO: 199230 - DNA, 21 bp, Artificial sequence
  SiRNA target sequence
aataactgattttgctcatag

SEQ ID NO: 199231 - DNA, 21 bp, Artificial sequence
  SiRNA target sequence
ataactgattttgctcatagc

SEQ ID NO: 199232 - DNA, 21 bp, Artificial sequence
  SiRNA target sequence
taactgattttgctcatagct

SEQ ID NO: 199233 - DNA, 21 bp, Artificial sequence
  SiRNA target sequence
aactgattttgctcatagcta

SEQ ID NO: 199234 - DNA, 21 bp, Artificial sequence
  SiRNA target sequence
actgattttgctcatagctaa

SEQ ID NO: 199235 - DNA, 21 bp, Artificial sequence
  SiRNA target sequence
ctgattttgctcatagctaaa

SEQ ID NO: 199236 - DNA, 21 bp, Artificial sequence
  SiRNA target sequence
tgattttgctcatagctaaat

SEQ ID NO: 199237 - DNA, 21 bp, Artificial sequence
  SiRNA target sequence
gattttgctcatagctaaatc

SEQ ID NO: 199238 - DNA, 21 bp, Artificial sequence
  SiRNA target sequence
attttgctcatagctaaatcc

SEQ ID NO: 199239 - DNA, 21 bp, Artificial sequence
  SiRNA target sequence
ttttgctcatagctaaatcct

SEQ ID NO: 199240 - DNA, 21 bp, Artificial sequence
  SiRNA target sequence
tttgctcatagctaaatcctt

SEQ ID NO: 199241 - DNA, 21 bp, Artificial sequence
  SiRNA target sequence
ttgctcatagctaaatccttt

SEQ ID NO: 199242 - DNA, 21 bp, Artificial sequence
  SiRNA target sequence
tgctcatagctaaatcctttt

SEQ ID NO: 199243 - DNA, 21 bp, Artificial sequence
  SiRNA target sequence
gctcatagctaaatccttttc

SEQ ID NO: 199244 - DNA, 21 bp, Artificial sequence
  SiRNA target sequence
ctcatagctaaatccttttcg

SEQ ID NO: 199245 - DNA, 21 bp, Artificial sequence
  SiRNA target sequence
tcatagctaaatccttttcgc

SEQ ID NO: 199246 - DNA, 21 bp, Artificial sequence
  SiRNA target sequence
catagctaaatccttttcgca

SEQ ID NO: 199247 - DNA, 21 bp, Artificial sequence
  SiRNA target sequence
atagctaaatccttttcgcaa

SEQ ID NO: 199248 - DNA, 21 bp, Artificial sequence
  SiRNA target sequence
tagctaaatccttttcgcaat

SEQ ID NO: 199249 - DNA, 21 bp, Artificial sequence
  SiRNA target sequence
agctaaatccttttcgcaatt

SEQ ID NO: 199250 - DNA, 21 bp, Artificial sequence
  SiRNA target sequence
gctaaatccttttcgcaattc

SEQ ID NO: 199251 - DNA, 21 bp, Artificial sequence
  SiRNA target sequence
ctaaatccttttcgcaattct

SEQ ID NO: 199252 - DNA, 21 bp, Artificial sequence
  SiRNA target sequence
taaatccttttcgcaattctc

SEQ ID NO: 199253 - DNA, 21 bp, Artificial sequence
  SiRNA target sequence
aaatccttttcgcaattctct

SEQ ID NO: 199254 - DNA, 21 bp, Artificial sequence
  SiRNA target sequence
aatccttttcgcaattctctg

SEQ ID NO: 199255 - DNA, 21 bp, Artificial sequence
  SiRNA target sequence
atccttttcgcaattctctga

SEQ ID NO: 199256 - DNA, 21 bp, Artificial sequence
  SiRNA target sequence
tccttttcgcaattctctgaa

SEQ ID NO: 199257 - DNA, 21 bp, Artificial sequence
  SiRNA target sequence
ccttttcgcaattctctgaaa

SEQ ID NO: 199258 - DNA, 21 bp, Artificial sequence
  SiRNA target sequence
cttttcgcaattctctgaaag

SEQ ID NO: 199259 - DNA, 21 bp, Artificial sequence
  SiRNA target sequence
ttttcgcaattctctgaaaga

SEQ ID NO: 199260 - DNA, 21 bp, Artificial sequence
  SiRNA target sequence
tttcgcaattctctgaaagaa

SEQ ID NO: 199261 - DNA, 21 bp, Artificial sequence
  SiRNA target sequence
ttcgcaattctctgaaagaac

SEQ ID NO: 199262 - DNA, 21 bp, Artificial sequence
  SiRNA target sequence
tcgcaattctctgaaagaact

SEQ ID NO: 199263 - DNA, 21 bp, Artificial sequence
  SiRNA target sequence
cgcaattctctgaaagaacta

SEQ ID NO: 199264 - DNA, 21 bp, Artificial sequence
  SiRNA target sequence
gcaattctctgaaagaactac

SEQ ID NO: 199265 - DNA, 21 bp, Artificial sequence
  SiRNA target sequence
caattctctgaaagaactact

SEQ ID NO: 199266 - DNA, 21 bp, Artificial sequence
  SiRNA target sequence
aattctctgaaagaactactg

SEQ ID NO: 199267 - DNA, 21 bp, Artificial sequence
  SiRNA target sequence
attctctgaaagaactactgg

SEQ ID NO: 199268 - DNA, 21 bp, Artificial sequence
  SiRNA target sequence
ttctctgaaagaactactggc

SEQ ID NO: 199269 - DNA, 21 bp, Artificial sequence
  SiRNA target sequence
tctctgaaagaactactggct

SEQ ID NO: 199270 - DNA, 21 bp, Artificial sequence
  SiRNA target sequence
ctctgaaagaactactggcta

SEQ ID NO: 199271 - DNA, 21 bp, Artificial sequence
  SiRNA target sequence
tctgaaagaactactggctaa

SEQ ID NO: 199272 - DNA, 21 bp, Artificial sequence
  SiRNA target sequence
ctgaaagaactactggctaat

SEQ ID NO: 199273 - DNA, 21 bp, Artificial sequence
  SiRNA target sequence
tgaaagaactactggctaatc

SEQ ID NO: 199274 - DNA, 21 bp, Artificial sequence
  SiRNA target sequence
gaaagaactactggctaatcc

SEQ ID NO: 199275 - DNA, 21 bp, Artificial sequence
  SiRNA target sequence
aaagaactactggctaatcca

SEQ ID NO: 199276 - DNA, 21 bp, Artificial sequence
  SiRNA target sequence
aagaactactggctaatccag

SEQ ID NO: 199277 - DNA, 21 bp, Artificial sequence
  SiRNA target sequence
agaactactggctaatccaga

SEQ ID NO: 199278 - DNA, 21 bp, Artificial sequence
  SiRNA target sequence
gaactactggctaatccagat

SEQ ID NO: 199279 - DNA, 21 bp, Artificial sequence
  SiRNA target sequence
aactactggctaatccagata

SEQ ID NO: 199280 - DNA, 21 bp, Artificial sequence
  SiRNA target sequence
actactggctaatccagatac

SEQ ID NO: 199281 - DNA, 21 bp, Artificial sequence
  SiRNA target sequence
ctactggctaatccagatact

SEQ ID NO: 199282 - DNA, 21 bp, Artificial sequence
  SiRNA target sequence
tactggctaatccagatacta

SEQ ID NO: 199283 - DNA, 21 bp, Artificial sequence
  SiRNA target sequence
actggctaatccagatactag

SEQ ID NO: 199284 - DNA, 21 bp, Artificial sequence
  SiRNA target sequence
ctggctaatccagatactagt

SEQ ID NO: 199285 - DNA, 21 bp, Artificial sequence
  SiRNA target sequence
tggctaatccagatactagta

SEQ ID NO: 199286 - DNA, 21 bp, Artificial sequence
  SiRNA target sequence
ggctaatccagatactagtaa

SEQ ID NO: 199287 - DNA, 21 bp, Artificial sequence
  SiRNA target sequence
gctaatccagatactagtaaa

SEQ ID NO: 199288 - DNA, 21 bp, Artificial sequence
  SiRNA target sequence
ctaatccagatactagtaaag

SEQ ID NO: 199289 - DNA, 21 bp, Artificial sequence
  SiRNA target sequence
taatccagatactagtaaagc

SEQ ID NO: 199290 - DNA, 21 bp, Artificial sequence
  SiRNA target sequence
aatccagatactagtaaagct

SEQ ID NO: 199291 - DNA, 21 bp, Artificial sequence
  SiRNA target sequence
atccagatactagtaaagcta

SEQ ID NO: 199292 - DNA, 21 bp, Artificial sequence
  SiRNA target sequence
tccagatactagtaaagctaa

SEQ ID NO: 199293 - DNA, 21 bp, Artificial sequence
  SiRNA target sequence
ccagatactagtaaagctaaa

SEQ ID NO: 199294 - DNA, 21 bp, Artificial sequence
  SiRNA target sequence
cagatactagtaaagctaaat

SEQ ID NO: 199295 - DNA, 21 bp, Artificial sequence
  SiRNA target sequence
agatactagtaaagctaaatt

SEQ ID NO: 199296 - DNA, 21 bp, Artificial sequence
  SiRNA target sequence
gatactagtaaagctaaattt

SEQ ID NO: 199297 - DNA, 21 bp, Artificial sequence
  SiRNA target sequence
atactagtaaagctaaatttg

SEQ ID NO: 199298 - DNA, 21 bp, Artificial sequence
  SiRNA target sequence
tactagtaaagctaaatttgc

SEQ ID NO: 199299 - DNA, 21 bp, Artificial sequence
  SiRNA target sequence
actagtaaagctaaatttgct

SEQ ID NO: 199300 - DNA, 21 bp, Artificial sequence
  SiRNA target sequence
ctagtaaagctaaatttgcta

SEQ ID NO: 199301 - DNA, 21 bp, Artificial sequence
  SiRNA target sequence
tagtaaagctaaatttgctat

SEQ ID NO: 199302 - DNA, 21 bp, Artificial sequence
  SiRNA target sequence
agtaaagctaaatttgctatt

SEQ ID NO: 199303 - DNA, 21 bp, Artificial sequence
  SiRNA target sequence
gtaaagctaaatttgctatta

SEQ ID NO: 199304 - DNA, 21 bp, Artificial sequence
  SiRNA target sequence
taaagctaaatttgctattat

SEQ ID NO: 199305 - DNA, 21 bp, Artificial sequence
  SiRNA target sequence
aaagctaaatttgctattatg

SEQ ID NO: 199306 - DNA, 21 bp, Artificial sequence
  SiRNA target sequence
aagctaaatttgctattatgt

SEQ ID NO: 199307 - DNA, 21 bp, Artificial sequence
  SiRNA target sequence
agctaaatttgctattatgta

SEQ ID NO: 199308 - DNA, 21 bp, Artificial sequence
  SiRNA target sequence
gctaaatttgctattatgtaa

SEQ ID NO: 199309 - DNA, 21 bp, Artificial sequence
  SiRNA target sequence
ctaaatttgctattatgtaaa

SEQ ID NO: 199310 - DNA, 21 bp, Artificial sequence
  SiRNA target sequence
taaatttgctattatgtaaaa

SEQ ID NO: 199311 - DNA, 21 bp, Artificial sequence
  SiRNA target sequence
aaatttgctattatgtaaaaa

SEQ ID NO: 199312 - DNA, 21 bp, Artificial sequence
  SiRNA target sequence
aatttgctattatgtaaaaag

SEQ ID NO: 199313 - DNA, 21 bp, Artificial sequence
  SiRNA target sequence
atttgctattatgtaaaaagg

SEQ ID NO: 199314 - DNA, 21 bp, Artificial sequence
  SiRNA target sequence
tttgctattatgtaaaaaggt

SEQ ID NO: 199315 - DNA, 21 bp, Artificial sequence
  SiRNA target sequence
ttgctattatgtaaaaaggtg

SEQ ID NO: 199316 - DNA, 21 bp, Artificial sequence
  SiRNA target sequence
tgctattatgtaaaaaggtgg

SEQ ID NO: 199317 - DNA, 21 bp, Artificial sequence
  SiRNA target sequence
gctattatgtaaaaaggtggt

SEQ ID NO: 199318 - DNA, 21 bp, Artificial sequence
  SiRNA target sequence
ctattatgtaaaaaggtggta

SEQ ID NO: 199319 - DNA, 21 bp, Artificial sequence
  SiRNA target sequence
tattatgtaaaaaggtggtaa

SEQ ID NO: 199320 - DNA, 21 bp, Artificial sequence
  SiRNA target sequence
attatgtaaaaaggtggtaaa

SEQ ID NO: 199321 - DNA, 21 bp, Artificial sequence
  SiRNA target sequence
ttatgtaaaaaggtggtaaaa

SEQ ID NO: 199322 - DNA, 21 bp, Artificial sequence
  SiRNA target sequence
tatgtaaaaaggtggtaaaaa

SEQ ID NO: 199323 - DNA, 21 bp, Artificial sequence
  SiRNA target sequence
atgtaaaaaggtggtaaaaat

SEQ ID NO: 199324 - DNA, 21 bp, Artificial sequence
  SiRNA target sequence
tgtaaaaaggtggtaaaaatc

SEQ ID NO: 199325 - DNA, 21 bp, Artificial sequence
  SiRNA target sequence
gtaaaaaggtggtaaaaatct

SEQ ID NO: 199326 - DNA, 21 bp, Artificial sequence
  SiRNA target sequence
taaaaaggtggtaaaaatctt

SEQ ID NO: 199327 - DNA, 21 bp, Artificial sequence
  SiRNA target sequence
aaaaaggtggtaaaaatcttg

SEQ ID NO: 199328 - DNA, 21 bp, Artificial sequence
  SiRNA target sequence
aaaaggtggtaaaaatcttgt

SEQ ID NO: 199329 - DNA, 21 bp, Artificial sequence
  SiRNA target sequence
aaaggtggtaaaaatcttgta

SEQ ID NO: 199330 - DNA, 21 bp, Artificial sequence
  SiRNA target sequence
aaggtggtaaaaatcttgtaa

SEQ ID NO: 199331 - DNA, 21 bp, Artificial sequence
  SiRNA target sequence
aggtggtaaaaatcttgtaaa

SEQ ID NO: 199332 - DNA, 21 bp, Artificial sequence
  SiRNA target sequence
ggtggtaaaaatcttgtaaac

SEQ ID NO: 199333 - DNA, 21 bp, Artificial sequence
  SiRNA target sequence
gtggtaaaaatcttgtaaact

SEQ ID NO: 199334 - DNA, 21 bp, Artificial sequence
  SiRNA target sequence
tggtaaaaatcttgtaaactg

SEQ ID NO: 199335 - DNA, 21 bp, Artificial sequence
  SiRNA target sequence
ggtaaaaatcttgtaaactgt

SEQ ID NO: 199336 - DNA, 21 bp, Artificial sequence
  SiRNA target sequence
gtaaaaatcttgtaaactgtc

SEQ ID NO: 199337 - DNA, 21 bp, Artificial sequence
  SiRNA target sequence
taaaaatcttgtaaactgtct

SEQ ID NO: 199338 - DNA, 21 bp, Artificial sequence
  SiRNA target sequence
aaaaatcttgtaaactgtctg

SEQ ID NO: 199339 - DNA, 21 bp, Artificial sequence
  SiRNA target sequence
aaaatcttgtaaactgtctga

SEQ ID NO: 199340 - DNA, 21 bp, Artificial sequence
  SiRNA target sequence
aaatcttgtaaactgtctgat

SEQ ID NO: 199341 - DNA, 21 bp, Artificial sequence
  SiRNA target sequence
aatcttgtaaactgtctgata

SEQ ID NO: 199342 - DNA, 21 bp, Artificial sequence
  SiRNA target sequence
atcttgtaaactgtctgatag

SEQ ID NO: 199343 - DNA, 21 bp, Artificial sequence
  SiRNA target sequence
tcttgtaaactgtctgatagt

SEQ ID NO: 199344 - DNA, 21 bp, Artificial sequence
  SiRNA target sequence
cttgtaaactgtctgatagta

SEQ ID NO: 199345 - DNA, 21 bp, Artificial sequence
  SiRNA target sequence
ttgtaaactgtctgatagtac

SEQ ID NO: 199346 - DNA, 21 bp, Artificial sequence
  SiRNA target sequence
tgtaaactgtctgatagtaca

SEQ ID NO: 199347 - DNA, 21 bp, Artificial sequence
  SiRNA target sequence
gtaaactgtctgatagtacaa

SEQ ID NO: 199348 - DNA, 21 bp, Artificial sequence
  SiRNA target sequence
taaactgtctgatagtacaac

SEQ ID NO: 199349 - DNA, 21 bp, Artificial sequence
  SiRNA target sequence
aaactgtctgatagtacaact

SEQ ID NO: 199350 - DNA, 21 bp, Artificial sequence
  SiRNA target sequence
aactgtctgatagtacaactt

SEQ ID NO: 199351 - DNA, 21 bp, Artificial sequence
  SiRNA target sequence
actgtctgatagtacaacttt

SEQ ID NO: 199352 - DNA, 21 bp, Artificial sequence
  SiRNA target sequence
ctgtctgatagtacaactttc

SEQ ID NO: 199353 - DNA, 21 bp, Artificial sequence
  SiRNA target sequence
tgtctgatagtacaactttca

SEQ ID NO: 199354 - DNA, 21 bp, Artificial sequence
  SiRNA target sequence
gtctgatagtacaactttcat

SEQ ID NO: 199355 - DNA, 21 bp, Artificial sequence
  SiRNA target sequence
tctgatagtacaactttcatt

SEQ ID NO: 199356 - DNA, 21 bp, Artificial sequence
  SiRNA target sequence
ctgatagtacaactttcattt

SEQ ID NO: 199357 - DNA, 21 bp, Artificial sequence
  SiRNA target sequence
tgatagtacaactttcattta

SEQ ID NO: 199358 - DNA, 21 bp, Artificial sequence
  SiRNA target sequence
gatagtacaactttcatttaa

SEQ ID NO: 199359 - DNA, 21 bp, Artificial sequence
  SiRNA target sequence
atagtacaactttcatttaaa

SEQ ID NO: 199360 - DNA, 21 bp, Artificial sequence
  SiRNA target sequence
tagtacaactttcatttaaaa

SEQ ID NO: 199361 - DNA, 21 bp, Artificial sequence
  SiRNA target sequence
agtacaactttcatttaaaaa

SEQ ID NO: 199362 - DNA, 21 bp, Artificial sequence
  SiRNA target sequence
gtacaactttcatttaaaaaa

SEQ ID NO: 199363 - DNA, 21 bp, Artificial sequence
  SiRNA target sequence
tacaactttcatttaaaaaac

SEQ ID NO: 199364 - DNA, 21 bp, Artificial sequence
  SiRNA target sequence
acaactttcatttaaaaaact

SEQ ID NO: 199365 - DNA, 21 bp, Artificial sequence
  SiRNA target sequence
caactttcatttaaaaaactc

SEQ ID NO: 199366 - DNA, 21 bp, Artificial sequence
  SiRNA target sequence
aactttcatttaaaaaactca

SEQ ID NO: 199367 - DNA, 21 bp, Artificial sequence
  SiRNA target sequence
actttcatttaaaaaactcat

SEQ ID NO: 199368 - DNA, 21 bp, Artificial sequence
  SiRNA target sequence
ctttcatttaaaaaactcatg

SEQ ID NO: 199369 - DNA, 21 bp, Artificial sequence
  SiRNA target sequence
tttcatttaaaaaactcatgt

SEQ ID NO: 199370 - DNA, 21 bp, Artificial sequence
  SiRNA target sequence
ttcatttaaaaaactcatgta

SEQ ID NO: 199371 - DNA, 21 bp, Artificial sequence
  SiRNA target sequence
tcatttaaaaaactcatgtat

SEQ ID NO: 199372 - DNA, 21 bp, Artificial sequence
  SiRNA target sequence
catttaaaaaactcatgtata

SEQ ID NO: 199373 - DNA, 21 bp, Artificial sequence
  SiRNA target sequence
atttaaaaaactcatgtataa

SEQ ID NO: 199374 - DNA, 21 bp, Artificial sequence
  SiRNA target sequence
tttaaaaaactcatgtataaa

SEQ ID NO: 199375 - DNA, 21 bp, Artificial sequence
  SiRNA target sequence
ttaaaaaactcatgtataaat

SEQ ID NO: 199376 - DNA, 21 bp, Artificial sequence
  SiRNA target sequence
taaaaaactcatgtataaata

SEQ ID NO: 199377 - DNA, 21 bp, Artificial sequence
  SiRNA target sequence
aaaaaactcatgtataaataa

SEQ ID NO: 199378 - DNA, 21 bp, Artificial sequence
  SiRNA target sequence
aaaaactcatgtataaataag

SEQ ID NO: 199379 - DNA, 21 bp, Artificial sequence
  SiRNA target sequence
aaaactcatgtataaataagc

SEQ ID NO: 199380 - DNA, 21 bp, Artificial sequence
  SiRNA target sequence
aaactcatgtataaataagcc

SEQ ID NO: 199381 - DNA, 21 bp, Artificial sequence
  SiRNA target sequence
aactcatgtataaataagcca

SEQ ID NO: 199382 - DNA, 21 bp, Artificial sequence
  SiRNA target sequence
actcatgtataaataagccat

SEQ ID NO: 199383 - DNA, 21 bp, Artificial sequence
  SiRNA target sequence
ctcatgtataaataagccata

SEQ ID NO: 199384 - DNA, 21 bp, Artificial sequence
  SiRNA target sequence
tcatgtataaataagccataa

SEQ ID NO: 199385 - DNA, 21 bp, Artificial sequence
  SiRNA target sequence
catgtataaataagccataag

SEQ ID NO: 199386 - DNA, 21 bp, Artificial sequence
  SiRNA target sequence
atgtataaataagccataagt

SEQ ID NO: 199387 - DNA, 21 bp, Artificial sequence
  SiRNA target sequence
tgtataaataagccataagta

SEQ ID NO: 199388 - DNA, 21 bp, Artificial sequence
  SiRNA target sequence
gtataaataagccataagtaa

SEQ ID NO: 199389 - DNA, 21 bp, Artificial sequence
  SiRNA target sequence
tataaataagccataagtaaa

SEQ ID NO: 199390 - DNA, 21 bp, Artificial sequence
  SiRNA target sequence
ataaataagccataagtaaac

SEQ ID NO: 199391 - DNA, 21 bp, Artificial sequence
  SiRNA target sequence
taaataagccataagtaaact

SEQ ID NO: 199392 - DNA, 21 bp, Artificial sequence
  SiRNA target sequence
aaataagccataagtaaactg

SEQ ID NO: 199393 - DNA, 21 bp, Artificial sequence
  SiRNA target sequence
aataagccataagtaaactgc

SEQ ID NO: 199394 - DNA, 21 bp, Artificial sequence
  SiRNA target sequence
ataagccataagtaaactgcc

SEQ ID NO: 199395 - DNA, 21 bp, Artificial sequence
  SiRNA target sequence
taagccataagtaaactgccc

SEQ ID NO: 199396 - DNA, 21 bp, Artificial sequence
  SiRNA target sequence
aagccataagtaaactgcccc

SEQ ID NO: 199397 - DNA, 21 bp, Artificial sequence
  SiRNA target sequence
agccataagtaaactgcccca

SEQ ID NO: 199398 - DNA, 21 bp, Artificial sequence
  SiRNA target sequence
gccataagtaaactgccccac

SEQ ID NO: 199399 - DNA, 21 bp, Artificial sequence
  SiRNA target sequence
ccataagtaaactgccccaca

SEQ ID NO: 199400 - DNA, 21 bp, Artificial sequence
  SiRNA target sequence
cataagtaaactgccccacat

SEQ ID NO: 199401 - DNA, 21 bp, Artificial sequence
  SiRNA target sequence
ataagtaaactgccccacatt

SEQ ID NO: 199402 - DNA, 21 bp, Artificial sequence
  SiRNA target sequence
taagtaaactgccccacattt

SEQ ID NO: 199403 - DNA, 21 bp, Artificial sequence
  SiRNA target sequence
aagtaaactgccccacatttc

SEQ ID NO: 199404 - DNA, 21 bp, Artificial sequence
  SiRNA target sequence
agtaaactgccccacatttct

SEQ ID NO: 199405 - DNA, 21 bp, Artificial sequence
  SiRNA target sequence
gtaaactgccccacatttctg

SEQ ID NO: 199406 - DNA, 21 bp, Artificial sequence
  SiRNA target sequence
taaactgccccacatttctgc

SEQ ID NO: 199407 - DNA, 21 bp, Artificial sequence
  SiRNA target sequence
aaactgccccacatttctgct

SEQ ID NO: 199408 - DNA, 21 bp, Artificial sequence
  SiRNA target sequence
aactgccccacatttctgcta

SEQ ID NO: 199409 - DNA, 21 bp, Artificial sequence
  SiRNA target sequence
actgccccacatttctgctat

SEQ ID NO: 199410 - DNA, 21 bp, Artificial sequence
  SiRNA target sequence
ctgccccacatttctgctatt

SEQ ID NO: 199411 - DNA, 21 bp, Artificial sequence
  SiRNA target sequence
tgccccacatttctgctatta

SEQ ID NO: 199412 - DNA, 21 bp, Artificial sequence
  SiRNA target sequence
gccccacatttctgctattat

SEQ ID NO: 199413 - DNA, 21 bp, Artificial sequence
  SiRNA target sequence
ccccacatttctgctattata

SEQ ID NO: 199414 - DNA, 21 bp, Artificial sequence
  SiRNA target sequence
cccacatttctgctattataa

SEQ ID NO: 199415 - DNA, 21 bp, Artificial sequence
  SiRNA target sequence
ccacatttctgctattataaa

SEQ ID NO: 199416 - DNA, 21 bp, Artificial sequence
  SiRNA target sequence
cacatttctgctattataaaa

SEQ ID NO: 199417 - DNA, 21 bp, Artificial sequence
  SiRNA target sequence
acatttctgctattataaaaa

SEQ ID NO: 199418 - DNA, 21 bp, Artificial sequence
  SiRNA target sequence
catttctgctattataaaaat

SEQ ID NO: 199419 - DNA, 21 bp, Artificial sequence
  SiRNA target sequence
atttctgctattataaaaata

SEQ ID NO: 199420 - DNA, 21 bp, Artificial sequence
  SiRNA target sequence
tttctgctattataaaaatac

SEQ ID NO: 199421 - DNA, 21 bp, Artificial sequence
  SiRNA target sequence
ttctgctattataaaaataca

SEQ ID NO: 199422 - DNA, 21 bp, Artificial sequence
  SiRNA target sequence
tctgctattataaaaatacaa

SEQ ID NO: 199423 - DNA, 21 bp, Artificial sequence
  SiRNA target sequence
ctgctattataaaaatacaag

SEQ ID NO: 199424 - DNA, 21 bp, Artificial sequence
  SiRNA target sequence
tgctattataaaaatacaagt

SEQ ID NO: 199425 - DNA, 21 bp, Artificial sequence
  SiRNA target sequence
gctattataaaaatacaagtt

SEQ ID NO: 199426 - DNA, 21 bp, Artificial sequence
  SiRNA target sequence
ctattataaaaatacaagttg

SEQ ID NO: 199427 - DNA, 21 bp, Artificial sequence
  SiRNA target sequence
tattataaaaatacaagttga

SEQ ID NO: 199428 - DNA, 21 bp, Artificial sequence
  SiRNA target sequence
attataaaaatacaagttgaa

SEQ ID NO: 199429 - DNA, 21 bp, Artificial sequence
  SiRNA target sequence
ttataaaaatacaagttgaaa

SEQ ID NO: 199430 - DNA, 21 bp, Artificial sequence
  SiRNA target sequence
tataaaaatacaagttgaaac

SEQ ID NO: 199431 - DNA, 21 bp, Artificial sequence
  SiRNA target sequence
ataaaaatacaagttgaaacg

SEQ ID NO: 199432 - DNA, 21 bp, Artificial sequence
  SiRNA target sequence
taaaaatacaagttgaaacgg

SEQ ID NO: 199433 - DNA, 21 bp, Artificial sequence
  SiRNA target sequence
aaaaatacaagttgaaacggg

SEQ ID NO: 199434 - DNA, 21 bp, Artificial sequence
  SiRNA target sequence
aaaatacaagttgaaacgggc

SEQ ID NO: 199435 - DNA, 21 bp, Artificial sequence
  SiRNA target sequence
aaatacaagttgaaacgggct

SEQ ID NO: 199436 - DNA, 21 bp, Artificial sequence
  SiRNA target sequence
aatacaagttgaaacgggctc

SEQ ID NO: 199437 - DNA, 21 bp, Artificial sequence
  SiRNA target sequence
atacaagttgaaacgggctcg

SEQ ID NO: 199438 - DNA, 21 bp, Artificial sequence
  SiRNA target sequence
tacaagttgaaacgggctcgt

SEQ ID NO: 199439 - DNA, 21 bp, Artificial sequence
  SiRNA target sequence
acaagttgaaacgggctcgtt

SEQ ID NO: 199440 - DNA, 21 bp, Artificial sequence
  SiRNA target sequence
caagttgaaacgggctcgtta

SEQ ID NO: 199441 - DNA, 21 bp, Artificial sequence
  SiRNA target sequence
aagttgaaacgggctcgttag

SEQ ID NO: 199442 - DNA, 21 bp, Artificial sequence
  SiRNA target sequence
agttgaaacgggctcgttagc

SEQ ID NO: 199443 - DNA, 21 bp, Artificial sequence
  SiRNA target sequence
gttgaaacgggctcgttagct

SEQ ID NO: 199444 - DNA, 21 bp, Artificial sequence
  SiRNA target sequence
ttgaaacgggctcgttagctg

SEQ ID NO: 199445 - DNA, 21 bp, Artificial sequence
  SiRNA target sequence
tgaaacgggctcgttagctgt

SEQ ID NO: 199446 - DNA, 21 bp, Artificial sequence
  SiRNA target sequence
gaaacgggctcgttagctgta

SEQ ID NO: 199447 - DNA, 21 bp, Artificial sequence
  SiRNA target sequence
aaacgggctcgttagctgtaa

SEQ ID NO: 199448 - DNA, 21 bp, Artificial sequence
  SiRNA target sequence
aacgggctcgttagctgtaat

SEQ ID NO: 199449 - DNA, 21 bp, Artificial sequence
  SiRNA target sequence
acgggctcgttagctgtaatt

SEQ ID NO: 199450 - DNA, 21 bp, Artificial sequence
  SiRNA target sequence
cgggctcgttagctgtaatta

SEQ ID NO: 199451 - DNA, 21 bp, Artificial sequence
  SiRNA target sequence
gggctcgttagctgtaattaa

SEQ ID NO: 199452 - DNA, 21 bp, Artificial sequence
  SiRNA target sequence
ggctcgttagctgtaattaaa

SEQ ID NO: 199453 - DNA, 21 bp, Artificial sequence
  SiRNA target sequence
gctcgttagctgtaattaaaa

SEQ ID NO: 199454 - DNA, 21 bp, Artificial sequence
  SiRNA target sequence
ctcgttagctgtaattaaaaa

SEQ ID NO: 199455 - DNA, 21 bp, Artificial sequence
  SiRNA target sequence
tcgttagctgtaattaaaaaa

SEQ ID NO: 199456 - DNA, 21 bp, Artificial sequence
  SiRNA target sequence
cgttagctgtaattaaaaaat

SEQ ID NO: 199457 - DNA, 21 bp, Artificial sequence
  SiRNA target sequence
gttagctgtaattaaaaaata

SEQ ID NO: 199458 - DNA, 21 bp, Artificial sequence
  SiRNA target sequence
ttagctgtaattaaaaaatat

SEQ ID NO: 199459 - DNA, 21 bp, Artificial sequence
  SiRNA target sequence
tagctgtaattaaaaaatatt

SEQ ID NO: 199460 - DNA, 21 bp, Artificial sequence
  SiRNA target sequence
agctgtaattaaaaaatattt

SEQ ID NO: 199461 - DNA, 21 bp, Artificial sequence
  SiRNA target sequence
gctgtaattaaaaaatatttt

SEQ ID NO: 199462 - DNA, 21 bp, Artificial sequence
  SiRNA target sequence
ctgtaattaaaaaatatttta

SEQ ID NO: 199463 - DNA, 21 bp, Artificial sequence
  SiRNA target sequence
tgtaattaaaaaatattttat

SEQ ID NO: 199464 - DNA, 21 bp, Artificial sequence
  SiRNA target sequence
gtaattaaaaaatattttata

SEQ ID NO: 199465 - DNA, 21 bp, Artificial sequence
  SiRNA target sequence
taattaaaaaatattttataa

SEQ ID NO: 199466 - DNA, 21 bp, Artificial sequence
  SiRNA target sequence
aattaaaaaatattttataaa

SEQ ID NO: 199467 - DNA, 21 bp, Artificial sequence
  SiRNA target sequence
attaaaaaatattttataaag

SEQ ID NO: 199468 - DNA, 21 bp, Artificial sequence
  SiRNA target sequence
ttaaaaaatattttataaagt

SEQ ID NO: 199469 - DNA, 21 bp, Artificial sequence
  SiRNA target sequence
taaaaaatattttataaagtt

SEQ ID NO: 199470 - DNA, 21 bp, Artificial sequence
  SiRNA target sequence
aaaaaatattttataaagttc

SEQ ID NO: 199471 - DNA, 21 bp, Artificial sequence
  SiRNA target sequence
aaaaatattttataaagttca

SEQ ID NO: 199472 - DNA, 21 bp, Artificial sequence
  SiRNA target sequence
aaaatattttataaagttcaa

SEQ ID NO: 199473 - DNA, 21 bp, Artificial sequence
  SiRNA target sequence
aaatattttataaagttcaat

SEQ ID NO: 199474 - DNA, 21 bp, Artificial sequence
  SiRNA target sequence
aatattttataaagttcaatc

SEQ ID NO: 199475 - DNA, 21 bp, Artificial sequence
  SiRNA target sequence
atattttataaagttcaatcc

SEQ ID NO: 199476 - DNA, 21 bp, Artificial sequence
  SiRNA target sequence
tattttataaagttcaatccc

SEQ ID NO: 199477 - DNA, 21 bp, Artificial sequence
  SiRNA target sequence
attttataaagttcaatccct

SEQ ID NO: 199478 - DNA, 21 bp, Artificial sequence
  SiRNA target sequence
ttttataaagttcaatccctt

SEQ ID NO: 199479 - DNA, 21 bp, Artificial sequence
  SiRNA target sequence
tttataaagttcaatcccttc

SEQ ID NO: 199480 - DNA, 21 bp, Artificial sequence
  SiRNA target sequence
ttataaagttcaatcccttca

SEQ ID NO: 199481 - DNA, 21 bp, Artificial sequence
  SiRNA target sequence
tataaagttcaatcccttcaa

SEQ ID NO: 199482 - DNA, 21 bp, Artificial sequence
  SiRNA target sequence
ataaagttcaatcccttcaat

SEQ ID NO: 199483 - DNA, 21 bp, Artificial sequence
  SiRNA target sequence
taaagttcaatcccttcaatg

SEQ ID NO: 199484 - DNA, 21 bp, Artificial sequence
  SiRNA target sequence
aaagttcaatcccttcaatgc

SEQ ID NO: 199485 - DNA, 21 bp, Artificial sequence
  SiRNA target sequence
aagttcaatcccttcaatgca

SEQ ID NO: 199486 - DNA, 21 bp, Artificial sequence
  SiRNA target sequence
agttcaatcccttcaatgcac

SEQ ID NO: 199487 - DNA, 21 bp, Artificial sequence
  SiRNA target sequence
gttcaatcccttcaatgcacc

SEQ ID NO: 199488 - DNA, 21 bp, Artificial sequence
  SiRNA target sequence
ttcaatcccttcaatgcacct

SEQ ID NO: 199489 - DNA, 21 bp, Artificial sequence
  SiRNA target sequence
tcaatcccttcaatgcacctt

SEQ ID NO: 199490 - DNA, 21 bp, Artificial sequence
  SiRNA target sequence
caatcccttcaatgcaccttt

SEQ ID NO: 199491 - DNA, 21 bp, Artificial sequence
  SiRNA target sequence
aatcccttcaatgcacctttg

SEQ ID NO: 199492 - DNA, 21 bp, Artificial sequence
  SiRNA target sequence
atcccttcaatgcacctttgt

SEQ ID NO: 199493 - DNA, 21 bp, Artificial sequence
  SiRNA target sequence
tcccttcaatgcacctttgtt

SEQ ID NO: 199494 - DNA, 21 bp, Artificial sequence
  SiRNA target sequence
cccttcaatgcacctttgtta

SEQ ID NO: 199495 - DNA, 21 bp, Artificial sequence
  SiRNA target sequence
ccttcaatgcacctttgttat

SEQ ID NO: 199496 - DNA, 21 bp, Artificial sequence
  SiRNA target sequence
cttcaatgcacctttgttatc

SEQ ID NO: 199497 - DNA, 21 bp, Artificial sequence
  SiRNA target sequence
ttcaatgcacctttgttatca

SEQ ID NO: 199498 - DNA, 21 bp, Artificial sequence
  SiRNA target sequence
tcaatgcacctttgttatcag

SEQ ID NO: 199499 - DNA, 21 bp, Artificial sequence
  SiRNA target sequence
caatgcacctttgttatcagc

SEQ ID NO: 199500 - DNA, 21 bp, Artificial sequence
  SiRNA target sequence
aatgcacctttgttatcagcg

SEQ ID NO: 199501 - DNA, 21 bp, Artificial sequence
  SiRNA target sequence
atgcacctttgttatcagcga

SEQ ID NO: 199502 - DNA, 21 bp, Artificial sequence
  SiRNA target sequence
tgcacctttgttatcagcgaa

SEQ ID NO: 199503 - DNA, 21 bp, Artificial sequence
  SiRNA target sequence
gcacctttgttatcagcgaaa

SEQ ID NO: 199504 - DNA, 21 bp, Artificial sequence
  SiRNA target sequence
cacctttgttatcagcgaaaa

SEQ ID NO: 199505 - DNA, 21 bp, Artificial sequence
  SiRNA target sequence
acctttgttatcagcgaaaat

SEQ ID NO: 199506 - DNA, 21 bp, Artificial sequence
  SiRNA target sequence
cctttgttatcagcgaaaata

SEQ ID NO: 199507 - DNA, 21 bp, Artificial sequence
  SiRNA target sequence
ctttgttatcagcgaaaatat

SEQ ID NO: 199508 - DNA, 21 bp, Artificial sequence
  SiRNA target sequence
tttgttatcagcgaaaatatc

SEQ ID NO: 199509 - DNA, 21 bp, Artificial sequence
  SiRNA target sequence
ttgttatcagcgaaaatatct

SEQ ID NO: 199510 - DNA, 21 bp, Artificial sequence
  SiRNA target sequence
tgttatcagcgaaaatatctc

SEQ ID NO: 199511 - DNA, 21 bp, Artificial sequence
  SiRNA target sequence
gttatcagcgaaaatatctct

SEQ ID NO: 199512 - DNA, 21 bp, Artificial sequence
  SiRNA target sequence
ttatcagcgaaaatatctcta

SEQ ID NO: 199513 - DNA, 21 bp, Artificial sequence
  SiRNA target sequence
tatcagcgaaaatatctctaa

SEQ ID NO: 199514 - DNA, 21 bp, Artificial sequence
  SiRNA target sequence
atcagcgaaaatatctctaaa

SEQ ID NO: 199515 - DNA, 21 bp, Artificial sequence
  SiRNA target sequence
tcagcgaaaatatctctaaat

SEQ ID NO: 199516 - DNA, 21 bp, Artificial sequence
  SiRNA target sequence
cagcgaaaatatctctaaata

SEQ ID NO: 199517 - DNA, 21 bp, Artificial sequence
  SiRNA target sequence
agcgaaaatatctctaaataa

SEQ ID NO: 199518 - DNA, 21 bp, Artificial sequence
  SiRNA target sequence
gcgaaaatatctctaaataaa

SEQ ID NO: 199519 - DNA, 21 bp, Artificial sequence
  SiRNA target sequence
cgaaaatatctctaaataaaa

SEQ ID NO: 199520 - DNA, 21 bp, Artificial sequence
  SiRNA target sequence
gaaaatatctctaaataaaaa

SEQ ID NO: 199521 - DNA, 21 bp, Artificial sequence
  SiRNA target sequence
aaaatatctctaaataaaaag

SEQ ID NO: 199522 - DNA, 21 bp, Artificial sequence
  SiRNA target sequence
aaatatctctaaataaaaagc

SEQ ID NO: 199523 - DNA, 21 bp, Artificial sequence
  SiRNA target sequence
aatatctctaaataaaaagct

SEQ ID NO: 199524 - DNA, 21 bp, Artificial sequence
  SiRNA target sequence
atatctctaaataaaaagcta

SEQ ID NO: 199525 - DNA, 21 bp, Artificial sequence
  SiRNA target sequence
tatctctaaataaaaagctag

SEQ ID NO: 199526 - DNA, 21 bp, Artificial sequence
  SiRNA target sequence
atctctaaataaaaagctaga

SEQ ID NO: 199527 - DNA, 21 bp, Artificial sequence
  SiRNA target sequence
tctctaaataaaaagctagat

SEQ ID NO: 199528 - DNA, 21 bp, Artificial sequence
  SiRNA target sequence
ctctaaataaaaagctagatg

SEQ ID NO: 199529 - DNA, 21 bp, Artificial sequence
  SiRNA target sequence
tctaaataaaaagctagatgg

SEQ ID NO: 199530 - DNA, 21 bp, Artificial sequence
  SiRNA target sequence
ctaaataaaaagctagatggt

SEQ ID NO: 199531 - DNA, 21 bp, Artificial sequence
  SiRNA target sequence
taaataaaaagctagatggtg

SEQ ID NO: 199532 - DNA, 21 bp, Artificial sequence
  SiRNA target sequence
aaataaaaagctagatggtgt

SEQ ID NO: 199533 - DNA, 21 bp, Artificial sequence
  SiRNA target sequence
aataaaaagctagatggtgtt

SEQ ID NO: 199534 - DNA, 21 bp, Artificial sequence
  SiRNA target sequence
ataaaaagctagatggtgtta

SEQ ID NO: 199535 - DNA, 21 bp, Artificial sequence
  SiRNA target sequence
taaaaagctagatggtgttac

SEQ ID NO: 199536 - DNA, 21 bp, Artificial sequence
  SiRNA target sequence
aaaaagctagatggtgttact

SEQ ID NO: 199537 - DNA, 21 bp, Artificial sequence
  SiRNA target sequence
aaaagctagatggtgttactt

SEQ ID NO: 199538 - DNA, 21 bp, Artificial sequence
  SiRNA target sequence
aaagctagatggtgttacttt

SEQ ID NO: 199539 - DNA, 21 bp, Artificial sequence
  SiRNA target sequence
aagctagatggtgttactttc

SEQ ID NO: 199540 - DNA, 21 bp, Artificial sequence
  SiRNA target sequence
agctagatggtgttactttct

SEQ ID NO: 199541 - DNA, 21 bp, Artificial sequence
  SiRNA target sequence
gctagatggtgttactttctc

SEQ ID NO: 199542 - DNA, 21 bp, Artificial sequence
  SiRNA target sequence
ctagatggtgttactttctct

SEQ ID NO: 199543 - DNA, 21 bp, Artificial sequence
  SiRNA target sequence
tagatggtgttactttctctt

SEQ ID NO: 199544 - DNA, 21 bp, Artificial sequence
  SiRNA target sequence
agatggtgttactttctcttc

SEQ ID NO: 199545 - DNA, 21 bp, Artificial sequence
  SiRNA target sequence
gatggtgttactttctcttca

SEQ ID NO: 199546 - DNA, 21 bp, Artificial sequence
  SiRNA target sequence
atggtgttactttctcttcaa

SEQ ID NO: 199547 - DNA, 21 bp, Artificial sequence
  SiRNA target sequence
tggtgttactttctcttcaaa

SEQ ID NO: 199548 - DNA, 21 bp, Artificial sequence
  SiRNA target sequence
ggtgttactttctcttcaaac

SEQ ID NO: 199549 - DNA, 21 bp, Artificial sequence
  SiRNA target sequence
gtgttactttctcttcaaaca

SEQ ID NO: 199550 - DNA, 21 bp, Artificial sequence
  SiRNA target sequence
tgttactttctcttcaaacaa

SEQ ID NO: 199551 - DNA, 21 bp, Artificial sequence
  SiRNA target sequence
gttactttctcttcaaacaaa

SEQ ID NO: 199552 - DNA, 21 bp, Artificial sequence
  SiRNA target sequence
ttactttctcttcaaacaaaa

SEQ ID NO: 199553 - DNA, 21 bp, Artificial sequence
  SiRNA target sequence
tactttctcttcaaacaaaaa

SEQ ID NO: 199554 - DNA, 21 bp, Artificial sequence
  SiRNA target sequence
actttctcttcaaacaaaaag

SEQ ID NO: 199555 - DNA, 21 bp, Artificial sequence
  SiRNA target sequence
ctttctcttcaaacaaaaaga

SEQ ID NO: 199556 - DNA, 21 bp, Artificial sequence
  SiRNA target sequence
tttctcttcaaacaaaaagat

SEQ ID NO: 199557 - DNA, 21 bp, Artificial sequence
  SiRNA target sequence
ttctcttcaaacaaaaagatt

SEQ ID NO: 199558 - DNA, 21 bp, Artificial sequence
  SiRNA target sequence
tctcttcaaacaaaaagattg

SEQ ID NO: 199559 - DNA, 21 bp, Artificial sequence
  SiRNA target sequence
ctcttcaaacaaaaagattgc

SEQ ID NO: 199560 - DNA, 21 bp, Artificial sequence
  SiRNA target sequence
tcttcaaacaaaaagattgcc

SEQ ID NO: 199561 - DNA, 21 bp, Artificial sequence
  SiRNA target sequence
cttcaaacaaaaagattgccc

SEQ ID NO: 199562 - DNA, 21 bp, Artificial sequence
  SiRNA target sequence
ttcaaacaaaaagattgcccc

SEQ ID NO: 199563 - DNA, 21 bp, Artificial sequence
  SiRNA target sequence
tcaaacaaaaagattgcccct

SEQ ID NO: 199564 - DNA, 21 bp, Artificial sequence
  SiRNA target sequence
caaacaaaaagattgccccta

SEQ ID NO: 199565 - DNA, 21 bp, Artificial sequence
  SiRNA target sequence
aaacaaaaagattgcccctag

SEQ ID NO: 199566 - DNA, 21 bp, Artificial sequence
  SiRNA target sequence
aacaaaaagattgcccctagt

SEQ ID NO: 199567 - DNA, 21 bp, Artificial sequence
  SiRNA target sequence
acaaaaagattgcccctagtc

SEQ ID NO: 199568 - DNA, 21 bp, Artificial sequence
  SiRNA target sequence
caaaaagattgcccctagtcc

SEQ ID NO: 199569 - DNA, 21 bp, Artificial sequence
  SiRNA target sequence
aaaaagattgcccctagtccg

SEQ ID NO: 199570 - DNA, 21 bp, Artificial sequence
  SiRNA target sequence
aaaagattgcccctagtccga

SEQ ID NO: 199571 - DNA, 21 bp, Artificial sequence
  SiRNA target sequence
aaagattgcccctagtccgaa

SEQ ID NO: 199572 - DNA, 21 bp, Artificial sequence
  SiRNA target sequence
aagattgcccctagtccgaag

SEQ ID NO: 199573 - DNA, 21 bp, Artificial sequence
  SiRNA target sequence
agattgcccctagtccgaaga

SEQ ID NO: 199574 - DNA, 21 bp, Artificial sequence
  SiRNA target sequence
gattgcccctagtccgaagaa

SEQ ID NO: 199575 - DNA, 21 bp, Artificial sequence
  SiRNA target sequence
attgcccctagtccgaagaaa

SEQ ID NO: 199576 - DNA, 21 bp, Artificial sequence
  SiRNA target sequence
ttgcccctagtccgaagaaaa

SEQ ID NO: 199577 - DNA, 21 bp, Artificial sequence
  SiRNA target sequence
tgcccctagtccgaagaaaaa

SEQ ID NO: 199578 - DNA, 21 bp, Artificial sequence
  SiRNA target sequence
gcccctagtccgaagaaaaat

SEQ ID NO: 199579 - DNA, 21 bp, Artificial sequence
  SiRNA target sequence
cccctagtccgaagaaaaatg

SEQ ID NO: 199580 - DNA, 21 bp, Artificial sequence
  SiRNA target sequence
ccctagtccgaagaaaaatgc

SEQ ID NO: 199581 - DNA, 21 bp, Artificial sequence
  SiRNA target sequence
cctagtccgaagaaaaatgca

SEQ ID NO: 199582 - DNA, 21 bp, Artificial sequence
  SiRNA target sequence
ctagtccgaagaaaaatgcag

SEQ ID NO: 199583 - DNA, 21 bp, Artificial sequence
  SiRNA target sequence
tagtccgaagaaaaatgcagt

SEQ ID NO: 199584 - DNA, 21 bp, Artificial sequence
  SiRNA target sequence
agtccgaagaaaaatgcagta

SEQ ID NO: 199585 - DNA, 21 bp, Artificial sequence
  SiRNA target sequence
gtccgaagaaaaatgcagtaa

SEQ ID NO: 199586 - DNA, 21 bp, Artificial sequence
  SiRNA target sequence
tccgaagaaaaatgcagtaaa

SEQ ID NO: 199587 - DNA, 21 bp, Artificial sequence
  SiRNA target sequence
ccgaagaaaaatgcagtaaaa

SEQ ID NO: 199588 - DNA, 21 bp, Artificial sequence
  SiRNA target sequence
cgaagaaaaatgcagtaaaaa

SEQ ID NO: 199589 - DNA, 21 bp, Artificial sequence
  SiRNA target sequence
gaagaaaaatgcagtaaaaat

SEQ ID NO: 199590 - DNA, 21 bp, Artificial sequence
  SiRNA target sequence
aagaaaaatgcagtaaaaatt

SEQ ID NO: 199591 - DNA, 21 bp, Artificial sequence
  SiRNA target sequence
agaaaaatgcagtaaaaatta

SEQ ID NO: 199592 - DNA, 21 bp, Artificial sequence
  SiRNA target sequence
gaaaaatgcagtaaaaattat

SEQ ID NO: 199593 - DNA, 21 bp, Artificial sequence
  SiRNA target sequence
aaaaatgcagtaaaaattatt

SEQ ID NO: 199594 - DNA, 21 bp, Artificial sequence
  SiRNA target sequence
aaaatgcagtaaaaattatta

SEQ ID NO: 199595 - DNA, 21 bp, Artificial sequence
  SiRNA target sequence
aaatgcagtaaaaattattag

SEQ ID NO: 199596 - DNA, 21 bp, Artificial sequence
  SiRNA target sequence
aatgcagtaaaaattattaga

SEQ ID NO: 199597 - DNA, 21 bp, Artificial sequence
  SiRNA target sequence
atgcagtaaaaattattagaa

SEQ ID NO: 199598 - DNA, 21 bp, Artificial sequence
  SiRNA target sequence
tgcagtaaaaattattagaaa

SEQ ID NO: 199599 - DNA, 21 bp, Artificial sequence
  SiRNA target sequence
gcagtaaaaattattagaaat

SEQ ID NO: 199600 - DNA, 21 bp, Artificial sequence
  SiRNA target sequence
cagtaaaaattattagaaata

SEQ ID NO: 199601 - DNA, 21 bp, Artificial sequence
  SiRNA target sequence
agtaaaaattattagaaatag

SEQ ID NO: 199602 - DNA, 21 bp, Artificial sequence
  SiRNA target sequence
gtaaaaattattagaaataga

SEQ ID NO: 199603 - DNA, 21 bp, Artificial sequence
  SiRNA target sequence
taaaaattattagaaatagat

SEQ ID NO: 199604 - DNA, 21 bp, Artificial sequence
  SiRNA target sequence
aaaaattattagaaatagatt

SEQ ID NO: 199605 - DNA, 21 bp, Artificial sequence
  SiRNA target sequence
aaaattattagaaatagatta

SEQ ID NO: 199606 - DNA, 21 bp, Artificial sequence
  SiRNA target sequence
aaattattagaaatagattaa

SEQ ID NO: 199607 - DNA, 21 bp, Artificial sequence
  SiRNA target sequence
aattattagaaatagattaaa

SEQ ID NO: 199608 - DNA, 21 bp, Artificial sequence
  SiRNA target sequence
attattagaaatagattaaaa

SEQ ID NO: 199609 - DNA, 21 bp, Artificial sequence
  SiRNA target sequence
ttattagaaatagattaaaaa

SEQ ID NO: 199610 - DNA, 21 bp, Artificial sequence
  SiRNA target sequence
tattagaaatagattaaaaat

SEQ ID NO: 199611 - DNA, 21 bp, Artificial sequence
  SiRNA target sequence
attagaaatagattaaaaatc

SEQ ID NO: 199612 - DNA, 21 bp, Artificial sequence
  SiRNA target sequence
ttagaaatagattaaaaatcg

SEQ ID NO: 199613 - DNA, 21 bp, Artificial sequence
  SiRNA target sequence
tagaaatagattaaaaatcga

SEQ ID NO: 199614 - DNA, 21 bp, Artificial sequence
  SiRNA target sequence
agaaatagattaaaaatcgat

SEQ ID NO: 199615 - DNA, 21 bp, Artificial sequence
  SiRNA target sequence
gaaatagattaaaaatcgatg

SEQ ID NO: 199616 - DNA, 21 bp, Artificial sequence
  SiRNA target sequence
aaatagattaaaaatcgatga

SEQ ID NO: 199617 - DNA, 21 bp, Artificial sequence
  SiRNA target sequence
aatagattaaaaatcgatgat

SEQ ID NO: 199618 - DNA, 21 bp, Artificial sequence
  SiRNA target sequence
atagattaaaaatcgatgata

SEQ ID NO: 199619 - DNA, 21 bp, Artificial sequence
  SiRNA target sequence
tagattaaaaatcgatgatac

SEQ ID NO: 199620 - DNA, 21 bp, Artificial sequence
  SiRNA target sequence
agattaaaaatcgatgataca

SEQ ID NO: 199621 - DNA, 21 bp, Artificial sequence
  SiRNA target sequence
gattaaaaatcgatgatacag

SEQ ID NO: 199622 - DNA, 21 bp, Artificial sequence
  SiRNA target sequence
attaaaaatcgatgatacagg

SEQ ID NO: 199623 - DNA, 21 bp, Artificial sequence
  SiRNA target sequence
ttaaaaatcgatgatacaggt

SEQ ID NO: 199624 - DNA, 21 bp, Artificial sequence
  SiRNA target sequence
taaaaatcgatgatacaggtt

SEQ ID NO: 199625 - DNA, 21 bp, Artificial sequence
  SiRNA target sequence
aaaaatcgatgatacaggttt

SEQ ID NO: 199626 - DNA, 21 bp, Artificial sequence
  SiRNA target sequence
aaaatcgatgatacaggttta

SEQ ID NO: 199627 - DNA, 21 bp, Artificial sequence
  SiRNA target sequence
aaatcgatgatacaggtttat

SEQ ID NO: 199628 - DNA, 21 bp, Artificial sequence
  SiRNA target sequence
aatcgatgatacaggtttatt

SEQ ID NO: 199629 - DNA, 21 bp, Artificial sequence
  SiRNA target sequence
atcgatgatacaggtttattt

SEQ ID NO: 199630 - DNA, 21 bp, Artificial sequence
  SiRNA target sequence
tcgatgatacaggtttatttt

SEQ ID NO: 199631 - DNA, 21 bp, Artificial sequence
  SiRNA target sequence
cgatgatacaggtttattttg

SEQ ID NO: 199632 - DNA, 21 bp, Artificial sequence
  SiRNA target sequence
gatgatacaggtttattttgc

SEQ ID NO: 199633 - DNA, 21 bp, Artificial sequence
  SiRNA target sequence
atgatacaggtttattttgca

SEQ ID NO: 199634 - DNA, 21 bp, Artificial sequence
  SiRNA target sequence
tgatacaggtttattttgcat

SEQ ID NO: 199635 - DNA, 21 bp, Artificial sequence
  SiRNA target sequence
gatacaggtttattttgcata

SEQ ID NO: 199636 - DNA, 21 bp, Artificial sequence
  SiRNA target sequence
atacaggtttattttgcataa

SEQ ID NO: 199637 - DNA, 21 bp, Artificial sequence
  SiRNA target sequence
tacaggtttattttgcataag

SEQ ID NO: 199638 - DNA, 21 bp, Artificial sequence
  SiRNA target sequence
acaggtttattttgcataagc

SEQ ID NO: 199639 - DNA, 21 bp, Artificial sequence
  SiRNA target sequence
caggtttattttgcataagcc

SEQ ID NO: 199640 - DNA, 21 bp, Artificial sequence
  SiRNA target sequence
aggtttattttgcataagcca

SEQ ID NO: 199641 - DNA, 21 bp, Artificial sequence
  SiRNA target sequence
ggtttattttgcataagccac

SEQ ID NO: 199642 - DNA, 21 bp, Artificial sequence
  SiRNA target sequence
gtttattttgcataagccact

SEQ ID NO: 199643 - DNA, 21 bp, Artificial sequence
  SiRNA target sequence
tttattttgcataagccactg

SEQ ID NO: 199644 - DNA, 21 bp, Artificial sequence
  SiRNA target sequence
ttattttgcataagccactgt

SEQ ID NO: 199645 - DNA, 21 bp, Artificial sequence
  SiRNA target sequence
tattttgcataagccactgta

SEQ ID NO: 199646 - DNA, 21 bp, Artificial sequence
  SiRNA target sequence
attttgcataagccactgtat

SEQ ID NO: 199647 - DNA, 21 bp, Artificial sequence
  SiRNA target sequence
ttttgcataagccactgtatt

SEQ ID NO: 199648 - DNA, 21 bp, Artificial sequence
  SiRNA target sequence
tttgcataagccactgtatta

SEQ ID NO: 199649 - DNA, 21 bp, Artificial sequence
  SiRNA target sequence
ttgcataagccactgtattaa

SEQ ID NO: 199650 - DNA, 21 bp, Artificial sequence
  SiRNA target sequence
tgcataagccactgtattaaa

SEQ ID NO: 199651 - DNA, 21 bp, Artificial sequence
  SiRNA target sequence
gcataagccactgtattaaaa

SEQ ID NO: 199652 - DNA, 21 bp, Artificial sequence
  SiRNA target sequence
cataagccactgtattaaaat

SEQ ID NO: 199653 - DNA, 21 bp, Artificial sequence
  SiRNA target sequence
ataagccactgtattaaaatt

SEQ ID NO: 199654 - DNA, 21 bp, Artificial sequence
  SiRNA target sequence
taagccactgtattaaaatta

SEQ ID NO: 199655 - DNA, 21 bp, Artificial sequence
  SiRNA target sequence
aagccactgtattaaaattac

SEQ ID NO: 199656 - DNA, 21 bp, Artificial sequence
  SiRNA target sequence
agccactgtattaaaattaca

SEQ ID NO: 199657 - DNA, 21 bp, Artificial sequence
  SiRNA target sequence
gccactgtattaaaattacag

SEQ ID NO: 199658 - DNA, 21 bp, Artificial sequence
  SiRNA target sequence
ccactgtattaaaattacaga

SEQ ID NO: 199659 - DNA, 21 bp, Artificial sequence
  SiRNA target sequence
cactgtattaaaattacagat

SEQ ID NO: 199660 - DNA, 21 bp, Artificial sequence
  SiRNA target sequence
actgtattaaaattacagatg

SEQ ID NO: 199661 - DNA, 21 bp, Artificial sequence
  SiRNA target sequence
ctgtattaaaattacagatgc

SEQ ID NO: 199662 - DNA, 21 bp, Artificial sequence
  SiRNA target sequence
tgtattaaaattacagatgca

SEQ ID NO: 199663 - DNA, 21 bp, Artificial sequence
  SiRNA target sequence
gtattaaaattacagatgcaa

SEQ ID NO: 199664 - DNA, 21 bp, Artificial sequence
  SiRNA target sequence
tattaaaattacagatgcaaa

SEQ ID NO: 199665 - DNA, 21 bp, Artificial sequence
  SiRNA target sequence
attaaaattacagatgcaaaa

SEQ ID NO: 199666 - DNA, 21 bp, Artificial sequence
  SiRNA target sequence
ttaaaattacagatgcaaaag

SEQ ID NO: 199667 - DNA, 21 bp, Artificial sequence
  SiRNA target sequence
taaaattacagatgcaaaaga

SEQ ID NO: 199668 - DNA, 21 bp, Artificial sequence
  SiRNA target sequence
aaaattacagatgcaaaagat

SEQ ID NO: 199669 - DNA, 21 bp, Artificial sequence
  SiRNA target sequence
aaattacagatgcaaaagata

SEQ ID NO: 199670 - DNA, 21 bp, Artificial sequence
  SiRNA target sequence
aattacagatgcaaaagatat

SEQ ID NO: 199671 - DNA, 21 bp, Artificial sequence
  SiRNA target sequence
attacagatgcaaaagatata

SEQ ID NO: 199672 - DNA, 21 bp, Artificial sequence
  SiRNA target sequence
ttacagatgcaaaagatatag

SEQ ID NO: 199673 - DNA, 21 bp, Artificial sequence
  SiRNA target sequence
tacagatgcaaaagatatagg

SEQ ID NO: 199674 - DNA, 21 bp, Artificial sequence
  SiRNA target sequence
acagatgcaaaagatatagga

SEQ ID NO: 199675 - DNA, 21 bp, Artificial sequence
  SiRNA target sequence
cagatgcaaaagatataggaa

SEQ ID NO: 199676 - DNA, 21 bp, Artificial sequence
  SiRNA target sequence
agatgcaaaagatataggaag

SEQ ID NO: 199677 - DNA, 21 bp, Artificial sequence
  SiRNA target sequence
gatgcaaaagatataggaaga

SEQ ID NO: 199678 - DNA, 21 bp, Artificial sequence
  SiRNA target sequence
atgcaaaagatataggaagaa

SEQ ID NO: 199679 - DNA, 21 bp, Artificial sequence
  SiRNA target sequence
tgcaaaagatataggaagaac

SEQ ID NO: 199680 - DNA, 21 bp, Artificial sequence
  SiRNA target sequence
gcaaaagatataggaagaaca

SEQ ID NO: 199681 - DNA, 21 bp, Artificial sequence
  SiRNA target sequence
caaaagatataggaagaacat

SEQ ID NO: 199682 - DNA, 21 bp, Artificial sequence
  SiRNA target sequence
aaaagatataggaagaacata

SEQ ID NO: 199683 - DNA, 21 bp, Artificial sequence
  SiRNA target sequence
aaagatataggaagaacataa

SEQ ID NO: 199684 - DNA, 21 bp, Artificial sequence
  SiRNA target sequence
aagatataggaagaacataaa

SEQ ID NO: 199685 - DNA, 21 bp, Artificial sequence
  SiRNA target sequence
agatataggaagaacataaaa

SEQ ID NO: 199686 - DNA, 21 bp, Artificial sequence
  SiRNA target sequence
gatataggaagaacataaaaa

SEQ ID NO: 199687 - DNA, 21 bp, Artificial sequence
  SiRNA target sequence
atataggaagaacataaaaaa

SEQ ID NO: 199688 - DNA, 21 bp, Artificial sequence
  SiRNA target sequence
tataggaagaacataaaaaat

SEQ ID NO: 199689 - DNA, 21 bp, Artificial sequence
  SiRNA target sequence
ataggaagaacataaaaaatt

SEQ ID NO: 199690 - DNA, 21 bp, Artificial sequence
  SiRNA target sequence
taggaagaacataaaaaattt

SEQ ID NO: 199691 - DNA, 21 bp, Artificial sequence
  SiRNA target sequence
aggaagaacataaaaaatttt

SEQ ID NO: 199692 - DNA, 21 bp, Artificial sequence
  SiRNA target sequence
ggaagaacataaaaaattttc

SEQ ID NO: 199693 - DNA, 21 bp, Artificial sequence
  SiRNA target sequence
gaagaacataaaaaattttca

SEQ ID NO: 199694 - DNA, 21 bp, Artificial sequence
  SiRNA target sequence
aagaacataaaaaattttcat

SEQ ID NO: 199695 - DNA, 21 bp, Artificial sequence
  SiRNA target sequence
agaacataaaaaattttcata

SEQ ID NO: 199696 - DNA, 21 bp, Artificial sequence
  SiRNA target sequence
gaacataaaaaattttcataa

SEQ ID NO: 199697 - DNA, 21 bp, Artificial sequence
  SiRNA target sequence
aacataaaaaattttcataaa

SEQ ID NO: 199698 - DNA, 21 bp, Artificial sequence
  SiRNA target sequence
acataaaaaattttcataaac

SEQ ID NO: 199699 - DNA, 21 bp, Artificial sequence
  SiRNA target sequence
cataaaaaattttcataaaca

SEQ ID NO: 199700 - DNA, 21 bp, Artificial sequence
  SiRNA target sequence
ataaaaaattttcataaacat

SEQ ID NO: 199701 - DNA, 21 bp, Artificial sequence
  SiRNA target sequence
taaaaaattttcataaacata

SEQ ID NO: 199702 - DNA, 21 bp, Artificial sequence
  SiRNA target sequence
aaaaaattttcataaacataa

SEQ ID NO: 199703 - DNA, 21 bp, Artificial sequence
  SiRNA target sequence
aaaaattttcataaacataat

SEQ ID NO: 199704 - DNA, 21 bp, Artificial sequence
  SiRNA target sequence
aaaattttcataaacataatt

SEQ ID NO: 199705 - DNA, 21 bp, Artificial sequence
  SiRNA target sequence
aaattttcataaacataattg

SEQ ID NO: 199706 - DNA, 21 bp, Artificial sequence
  SiRNA target sequence
aattttcataaacataattga

SEQ ID NO: 199707 - DNA, 21 bp, Artificial sequence
  SiRNA target sequence
attttcataaacataattgaa

SEQ ID NO: 199708 - DNA, 21 bp, Artificial sequence
  SiRNA target sequence
ttttcataaacataattgaat

SEQ ID NO: 199709 - DNA, 21 bp, Artificial sequence
  SiRNA target sequence
tttcataaacataattgaatt

SEQ ID NO: 199710 - DNA, 21 bp, Artificial sequence
  SiRNA target sequence
ttcataaacataattgaattc

SEQ ID NO: 199711 - DNA, 21 bp, Artificial sequence
  SiRNA target sequence
tcataaacataattgaattct

SEQ ID NO: 199712 - DNA, 21 bp, Artificial sequence
  SiRNA target sequence
cataaacataattgaattctg

SEQ ID NO: 199713 - DNA, 21 bp, Artificial sequence
  SiRNA target sequence
ataaacataattgaattctga

SEQ ID NO: 199714 - DNA, 21 bp, Artificial sequence
  SiRNA target sequence
taaacataattgaattctgat

SEQ ID NO: 199715 - DNA, 21 bp, Artificial sequence
  SiRNA target sequence
aaacataattgaattctgatc

SEQ ID NO: 199716 - DNA, 21 bp, Artificial sequence
  SiRNA target sequence
aacataattgaattctgatct

SEQ ID NO: 199717 - DNA, 21 bp, Artificial sequence
  SiRNA target sequence
acataattgaattctgatctt

SEQ ID NO: 199718 - DNA, 21 bp, Artificial sequence
  SiRNA target sequence
cataattgaattctgatcttg

SEQ ID NO: 199719 - DNA, 21 bp, Artificial sequence
  SiRNA target sequence
ataattgaattctgatcttgc

SEQ ID NO: 199720 - DNA, 21 bp, Artificial sequence
  SiRNA target sequence
taattgaattctgatcttgcc

SEQ ID NO: 199721 - DNA, 21 bp, Artificial sequence
  SiRNA target sequence
aattgaattctgatcttgcct

SEQ ID NO: 199722 - DNA, 21 bp, Artificial sequence
  SiRNA target sequence
attgaattctgatcttgcctt

SEQ ID NO: 199723 - DNA, 21 bp, Artificial sequence
  SiRNA target sequence
ttgaattctgatcttgcctta

SEQ ID NO: 199724 - DNA, 21 bp, Artificial sequence
  SiRNA target sequence
tgaattctgatcttgccttac

SEQ ID NO: 199725 - DNA, 21 bp, Artificial sequence
  SiRNA target sequence
gaattctgatcttgccttacc

SEQ ID NO: 199726 - DNA, 21 bp, Artificial sequence
  SiRNA target sequence
aattctgatcttgccttacca

SEQ ID NO: 199727 - DNA, 21 bp, Artificial sequence
  SiRNA target sequence
attctgatcttgccttaccat

SEQ ID NO: 199728 - DNA, 21 bp, Artificial sequence
  SiRNA target sequence
ttctgatcttgccttaccatc

SEQ ID NO: 199729 - DNA, 21 bp, Artificial sequence
  SiRNA target sequence
tctgatcttgccttaccatca

SEQ ID NO: 199730 - DNA, 21 bp, Artificial sequence
  SiRNA target sequence
ctgatcttgccttaccatcac

SEQ ID NO: 199731 - DNA, 21 bp, Artificial sequence
  SiRNA target sequence
tgatcttgccttaccatcaca

SEQ ID NO: 199732 - DNA, 21 bp, Artificial sequence
  SiRNA target sequence
gatcttgccttaccatcacaa

SEQ ID NO: 199733 - DNA, 21 bp, Artificial sequence
  SiRNA target sequence
atcttgccttaccatcacaaa

SEQ ID NO: 199734 - DNA, 21 bp, Artificial sequence
  SiRNA target sequence
tcttgccttaccatcacaaat

SEQ ID NO: 199735 - DNA, 21 bp, Artificial sequence
  SiRNA target sequence
cttgccttaccatcacaaata

SEQ ID NO: 199736 - DNA, 21 bp, Artificial sequence
  SiRNA target sequence
ttgccttaccatcacaaataa

SEQ ID NO: 199737 - DNA, 21 bp, Artificial sequence
  SiRNA target sequence
tgccttaccatcacaaataaa

SEQ ID NO: 199738 - DNA, 21 bp, Artificial sequence
  SiRNA target sequence
gccttaccatcacaaataaat

SEQ ID NO: 199739 - DNA, 21 bp, Artificial sequence
  SiRNA target sequence
ccttaccatcacaaataaatc

SEQ ID NO: 199740 - DNA, 21 bp, Artificial sequence
  SiRNA target sequence
cttaccatcacaaataaatct

SEQ ID NO: 199741 - DNA, 21 bp, Artificial sequence
  SiRNA target sequence
ttaccatcacaaataaatctt

SEQ ID NO: 199742 - DNA, 21 bp, Artificial sequence
  SiRNA target sequence
taccatcacaaataaatcttt

SEQ ID NO: 199743 - DNA, 21 bp, Artificial sequence
  SiRNA target sequence
accatcacaaataaatctttt

SEQ ID NO: 199744 - DNA, 21 bp, Artificial sequence
  SiRNA target sequence
ccatcacaaataaatctttta

SEQ ID NO: 199745 - DNA, 21 bp, Artificial sequence
  SiRNA target sequence
catcacaaataaatcttttaa

SEQ ID NO: 199746 - DNA, 21 bp, Artificial sequence
  SiRNA target sequence
atcacaaataaatcttttaaa

SEQ ID NO: 199747 - DNA, 21 bp, Artificial sequence
  SiRNA target sequence
tcacaaataaatcttttaaaa

SEQ ID NO: 199748 - DNA, 21 bp, Artificial sequence
  SiRNA target sequence
cacaaataaatcttttaaaat

SEQ ID NO: 199749 - DNA, 21 bp, Artificial sequence
  SiRNA target sequence
acaaataaatcttttaaaatt

SEQ ID NO: 199750 - DNA, 21 bp, Artificial sequence
  SiRNA target sequence
caaataaatcttttaaaattc

SEQ ID NO: 199751 - DNA, 21 bp, Artificial sequence
  SiRNA target sequence
aaataaatcttttaaaattct

SEQ ID NO: 199752 - DNA, 21 bp, Artificial sequence
  SiRNA target sequence
aataaatcttttaaaattctt

SEQ ID NO: 199753 - DNA, 21 bp, Artificial sequence
  SiRNA target sequence
ataaatcttttaaaattctta

SEQ ID NO: 199754 - DNA, 21 bp, Artificial sequence
  SiRNA target sequence
taaatcttttaaaattcttaa

SEQ ID NO: 199755 - DNA, 21 bp, Artificial sequence
  SiRNA target sequence
aaatcttttaaaattcttaaa

SEQ ID NO: 199756 - DNA, 21 bp, Artificial sequence
  SiRNA target sequence
aatcttttaaaattcttaaaa

SEQ ID NO: 199757 - DNA, 21 bp, Artificial sequence
  SiRNA target sequence
atcttttaaaattcttaaaaa

SEQ ID NO: 199758 - DNA, 21 bp, Artificial sequence
  SiRNA target sequence
tcttttaaaattcttaaaaat

SEQ ID NO: 199759 - DNA, 21 bp, Artificial sequence
  SiRNA target sequence
cttttaaaattcttaaaaatg

SEQ ID NO: 199760 - DNA, 21 bp, Artificial sequence
  SiRNA target sequence
ttttaaaattcttaaaaatga

SEQ ID NO: 199761 - DNA, 21 bp, Artificial sequence
  SiRNA target sequence
tttaaaattcttaaaaatgaa

SEQ ID NO: 199762 - DNA, 21 bp, Artificial sequence
  SiRNA target sequence
ttaaaattcttaaaaatgaat

SEQ ID NO: 199763 - DNA, 21 bp, Artificial sequence
  SiRNA target sequence
taaaattcttaaaaatgaata

SEQ ID NO: 199764 - DNA, 21 bp, Artificial sequence
  SiRNA target sequence
aaaattcttaaaaatgaatac

SEQ ID NO: 199765 - DNA, 21 bp, Artificial sequence
  SiRNA target sequence
aaattcttaaaaatgaataca

SEQ ID NO: 199766 - DNA, 21 bp, Artificial sequence
  SiRNA target sequence
aattcttaaaaatgaatacac

SEQ ID NO: 199767 - DNA, 21 bp, Artificial sequence
  SiRNA target sequence
attcttaaaaatgaatacaca

SEQ ID NO: 199768 - DNA, 21 bp, Artificial sequence
  SiRNA target sequence
ttcttaaaaatgaatacacaa

SEQ ID NO: 199769 - DNA, 21 bp, Artificial sequence
  SiRNA target sequence
tcttaaaaatgaatacacaaa

SEQ ID NO: 199770 - DNA, 21 bp, Artificial sequence
  SiRNA target sequence
cttaaaaatgaatacacaaag

SEQ ID NO: 199771 - DNA, 21 bp, Artificial sequence
  SiRNA target sequence
ttaaaaatgaatacacaaagt

SEQ ID NO: 199772 - DNA, 21 bp, Artificial sequence
  SiRNA target sequence
taaaaatgaatacacaaagtt

SEQ ID NO: 199773 - DNA, 21 bp, Artificial sequence
  SiRNA target sequence
aaaaatgaatacacaaagtta

SEQ ID NO: 199774 - DNA, 21 bp, Artificial sequence
  SiRNA target sequence
aaaatgaatacacaaagttaa

SEQ ID NO: 199775 - DNA, 21 bp, Artificial sequence
  SiRNA target sequence
aaatgaatacacaaagttaat

SEQ ID NO: 199776 - DNA, 21 bp, Artificial sequence
  SiRNA target sequence
aatgaatacacaaagttaatt

SEQ ID NO: 199777 - DNA, 21 bp, Artificial sequence
  SiRNA target sequence
atgaatacacaaagttaatta

SEQ ID NO: 199778 - DNA, 21 bp, Artificial sequence
  SiRNA target sequence
tgaatacacaaagttaattaa

SEQ ID NO: 199779 - DNA, 21 bp, Artificial sequence
  SiRNA target sequence
gaatacacaaagttaattaat

SEQ ID NO: 199780 - DNA, 21 bp, Artificial sequence
  SiRNA target sequence
aatacacaaagttaattaatc

SEQ ID NO: 199781 - DNA, 21 bp, Artificial sequence
  SiRNA target sequence
atacacaaagttaattaatcc

SEQ ID NO: 199782 - DNA, 21 bp, Artificial sequence
  SiRNA target sequence
tacacaaagttaattaatcca

SEQ ID NO: 199783 - DNA, 21 bp, Artificial sequence
  SiRNA target sequence
acacaaagttaattaatccaa

SEQ ID NO: 199784 - DNA, 21 bp, Artificial sequence
  SiRNA target sequence
cacaaagttaattaatccaaa

SEQ ID NO: 199785 - DNA, 21 bp, Artificial sequence
  SiRNA target sequence
acaaagttaattaatccaaac

SEQ ID NO: 199786 - DNA, 21 bp, Artificial sequence
  SiRNA target sequence
caaagttaattaatccaaaca

SEQ ID NO: 199787 - DNA, 21 bp, Artificial sequence
  SiRNA target sequence
aaagttaattaatccaaacat

SEQ ID NO: 199788 - DNA, 21 bp, Artificial sequence
  SiRNA target sequence
aagttaattaatccaaacata

SEQ ID NO: 199789 - DNA, 21 bp, Artificial sequence
  SiRNA target sequence
agttaattaatccaaacataa

SEQ ID NO: 199790 - DNA, 21 bp, Artificial sequence
  SiRNA target sequence
gttaattaatccaaacataat

SEQ ID NO: 199791 - DNA, 21 bp, Artificial sequence
  SiRNA target sequence
ttaattaatccaaacataata

SEQ ID NO: 199792 - DNA, 21 bp, Artificial sequence
  SiRNA target sequence
taattaatccaaacataatac

SEQ ID NO: 199793 - DNA, 21 bp, Artificial sequence
  SiRNA target sequence
aattaatccaaacataatacc

SEQ ID NO: 199794 - DNA, 21 bp, Artificial sequence
  SiRNA target sequence
attaatccaaacataatacca

SEQ ID NO: 199795 - DNA, 21 bp, Artificial sequence
  SiRNA target sequence
ttaatccaaacataataccaa

SEQ ID NO: 199796 - DNA, 21 bp, Artificial sequence
  SiRNA target sequence
taatccaaacataataccaag

SEQ ID NO: 199797 - DNA, 21 bp, Artificial sequence
  SiRNA target sequence
aatccaaacataataccaagt

SEQ ID NO: 199798 - DNA, 21 bp, Artificial sequence
  SiRNA target sequence
atccaaacataataccaagta

SEQ ID NO: 199799 - DNA, 21 bp, Artificial sequence
  SiRNA target sequence
tccaaacataataccaagtat

SEQ ID NO: 199800 - DNA, 21 bp, Artificial sequence
  SiRNA target sequence
ccaaacataataccaagtata

SEQ ID NO: 199801 - DNA, 21 bp, Artificial sequence
  SiRNA target sequence
caaacataataccaagtataa

SEQ ID NO: 199802 - DNA, 21 bp, Artificial sequence
  SiRNA target sequence
aaacataataccaagtataaa

SEQ ID NO: 199803 - DNA, 21 bp, Artificial sequence
  SiRNA target sequence
aacataataccaagtataaaa

SEQ ID NO: 199804 - DNA, 21 bp, Artificial sequence
  SiRNA target sequence
acataataccaagtataaaaa

SEQ ID NO: 199805 - DNA, 21 bp, Artificial sequence
  SiRNA target sequence
cataataccaagtataaaaaa

SEQ ID NO: 199806 - DNA, 21 bp, Artificial sequence
  SiRNA target sequence
ataataccaagtataaaaaat

SEQ ID NO: 199807 - DNA, 21 bp, Artificial sequence
  SiRNA target sequence
taataccaagtataaaaaatt

SEQ ID NO: 199808 - DNA, 21 bp, Artificial sequence
  SiRNA target sequence
aataccaagtataaaaaattt

SEQ ID NO: 199809 - DNA, 21 bp, Artificial sequence
  SiRNA target sequence
ataccaagtataaaaaattta

SEQ ID NO: 199810 - DNA, 21 bp, Artificial sequence
  SiRNA target sequence
taccaagtataaaaaatttag

SEQ ID NO: 199811 - DNA, 21 bp, Artificial sequence
  SiRNA target sequence
accaagtataaaaaatttagg

SEQ ID NO: 199812 - DNA, 21 bp, Artificial sequence
  SiRNA target sequence
ccaagtataaaaaatttaggc

SEQ ID NO: 199813 - DNA, 21 bp, Artificial sequence
  SiRNA target sequence
caagtataaaaaatttaggca

SEQ ID NO: 199814 - DNA, 21 bp, Artificial sequence
  SiRNA target sequence
aagtataaaaaatttaggcat

SEQ ID NO: 199815 - DNA, 21 bp, Artificial sequence
  SiRNA target sequence
agtataaaaaatttaggcatt

SEQ ID NO: 199816 - DNA, 21 bp, Artificial sequence
  SiRNA target sequence
gtataaaaaatttaggcattt

SEQ ID NO: 199817 - DNA, 21 bp, Artificial sequence
  SiRNA target sequence
tataaaaaatttaggcatttc

SEQ ID NO: 199818 - DNA, 21 bp, Artificial sequence
  SiRNA target sequence
ataaaaaatttaggcatttca

SEQ ID NO: 199819 - DNA, 21 bp, Artificial sequence
  SiRNA target sequence
taaaaaatttaggcatttcaa

SEQ ID NO: 199820 - DNA, 21 bp, Artificial sequence
  SiRNA target sequence
aaaaaatttaggcatttcaac

SEQ ID NO: 199821 - DNA, 21 bp, Artificial sequence
  SiRNA target sequence
aaaaatttaggcatttcaacc

SEQ ID NO: 199822 - DNA, 21 bp, Artificial sequence
  SiRNA target sequence
aaaatttaggcatttcaacct

SEQ ID NO: 199823 - DNA, 21 bp, Artificial sequence
  SiRNA target sequence
aaatttaggcatttcaacctt

SEQ ID NO: 199824 - DNA, 21 bp, Artificial sequence
  SiRNA target sequence
aatttaggcatttcaacctta

SEQ ID NO: 199825 - DNA, 21 bp, Artificial sequence
  SiRNA target sequence
atttaggcatttcaaccttag

SEQ ID NO: 199826 - DNA, 21 bp, Artificial sequence
  SiRNA target sequence
tttaggcatttcaaccttagc

SEQ ID NO: 199827 - DNA, 21 bp, Artificial sequence
  SiRNA target sequence
ttaggcatttcaaccttagca

SEQ ID NO: 199828 - DNA, 21 bp, Artificial sequence
  SiRNA target sequence
taggcatttcaaccttagcaa

SEQ ID NO: 199829 - DNA, 21 bp, Artificial sequence
  SiRNA target sequence
aggcatttcaaccttagcaac

SEQ ID NO: 199830 - DNA, 21 bp, Artificial sequence
  SiRNA target sequence
ggcatttcaaccttagcaact

SEQ ID NO: 199831 - DNA, 21 bp, Artificial sequence
  SiRNA target sequence
gcatttcaaccttagcaactt

SEQ ID NO: 199832 - DNA, 21 bp, Artificial sequence
  SiRNA target sequence
catttcaaccttagcaacttt

SEQ ID NO: 199833 - DNA, 21 bp, Artificial sequence
  SiRNA target sequence
atttcaaccttagcaacttta

SEQ ID NO: 199834 - DNA, 21 bp, Artificial sequence
  SiRNA target sequence
tttcaaccttagcaactttaa

SEQ ID NO: 199835 - DNA, 21 bp, Artificial sequence
  SiRNA target sequence
ttcaaccttagcaactttaaa

SEQ ID NO: 199836 - DNA, 21 bp, Artificial sequence
  SiRNA target sequence
tcaaccttagcaactttaaaa

SEQ ID NO: 199837 - DNA, 21 bp, Artificial sequence
  SiRNA target sequence
caaccttagcaactttaaaat

SEQ ID NO: 199838 - DNA, 21 bp, Artificial sequence
  SiRNA target sequence
aaccttagcaactttaaaata

SEQ ID NO: 199839 - DNA, 21 bp, Artificial sequence
  SiRNA target sequence
accttagcaactttaaaataa

SEQ ID NO: 199840 - DNA, 21 bp, Artificial sequence
  SiRNA target sequence
ccttagcaactttaaaataac

SEQ ID NO: 199841 - DNA, 21 bp, Artificial sequence
  SiRNA target sequence
cttagcaactttaaaataact

SEQ ID NO: 199842 - DNA, 21 bp, Artificial sequence
  SiRNA target sequence
ttagcaactttaaaataactc

SEQ ID NO: 199843 - DNA, 21 bp, Artificial sequence
  SiRNA target sequence
tagcaactttaaaataactca

SEQ ID NO: 199844 - DNA, 21 bp, Artificial sequence
  SiRNA target sequence
agcaactttaaaataactcag

SEQ ID NO: 199845 - DNA, 21 bp, Artificial sequence
  SiRNA target sequence
gcaactttaaaataactcagt

SEQ ID NO: 199846 - DNA, 21 bp, Artificial sequence
  SiRNA target sequence
caactttaaaataactcagta

SEQ ID NO: 199847 - DNA, 21 bp, Artificial sequence
  SiRNA target sequence
aactttaaaataactcagtaa

SEQ ID NO: 199848 - DNA, 21 bp, Artificial sequence
  SiRNA target sequence
actttaaaataactcagtaat

SEQ ID NO: 199849 - DNA, 21 bp, Artificial sequence
  SiRNA target sequence
ctttaaaataactcagtaatc

SEQ ID NO: 199850 - DNA, 21 bp, Artificial sequence
  SiRNA target sequence
tttaaaataactcagtaatcc

SEQ ID NO: 199851 - DNA, 21 bp, Artificial sequence
  SiRNA target sequence
ttaaaataactcagtaatcct

SEQ ID NO: 199852 - DNA, 21 bp, Artificial sequence
  SiRNA target sequence
taaaataactcagtaatcctg

SEQ ID NO: 199853 - DNA, 21 bp, Artificial sequence
  SiRNA target sequence
aaaataactcagtaatcctgt

SEQ ID NO: 199854 - DNA, 21 bp, Artificial sequence
  SiRNA target sequence
aaataactcagtaatcctgtt

SEQ ID NO: 199855 - DNA, 21 bp, Artificial sequence
  SiRNA target sequence
aataactcagtaatcctgttc

SEQ ID NO: 199856 - DNA, 21 bp, Artificial sequence
  SiRNA target sequence
ataactcagtaatcctgttct

SEQ ID NO: 199857 - DNA, 21 bp, Artificial sequence
  SiRNA target sequence
taactcagtaatcctgttctt

SEQ ID NO: 199858 - DNA, 21 bp, Artificial sequence
  SiRNA target sequence
aactcagtaatcctgttcttg

SEQ ID NO: 199859 - DNA, 21 bp, Artificial sequence
  SiRNA target sequence
actcagtaatcctgttcttga

SEQ ID NO: 199860 - DNA, 21 bp, Artificial sequence
  SiRNA target sequence
ctcagtaatcctgttcttgaa

SEQ ID NO: 199861 - DNA, 21 bp, Artificial sequence
  SiRNA target sequence
tcagtaatcctgttcttgaat

SEQ ID NO: 199862 - DNA, 21 bp, Artificial sequence
  SiRNA target sequence
cagtaatcctgttcttgaatt

SEQ ID NO: 199863 - DNA, 21 bp, Artificial sequence
  SiRNA target sequence
agtaatcctgttcttgaattt

SEQ ID NO: 199864 - DNA, 21 bp, Artificial sequence
  SiRNA target sequence
gtaatcctgttcttgaatttg

SEQ ID NO: 199865 - DNA, 21 bp, Artificial sequence
  SiRNA target sequence
taatcctgttcttgaatttgc

SEQ ID NO: 199866 - DNA, 21 bp, Artificial sequence
  SiRNA target sequence
aatcctgttcttgaatttgct

SEQ ID NO: 199867 - DNA, 21 bp, Artificial sequence
  SiRNA target sequence
atcctgttcttgaatttgcta

SEQ ID NO: 199868 - DNA, 21 bp, Artificial sequence
  SiRNA target sequence
tcctgttcttgaatttgctaa

SEQ ID NO: 199869 - DNA, 21 bp, Artificial sequence
  SiRNA target sequence
cctgttcttgaatttgctaat

SEQ ID NO: 199870 - DNA, 21 bp, Artificial sequence
  SiRNA target sequence
ctgttcttgaatttgctaatt

SEQ ID NO: 199871 - DNA, 21 bp, Artificial sequence
  SiRNA target sequence
tgttcttgaatttgctaattg

SEQ ID NO: 199872 - DNA, 21 bp, Artificial sequence
  SiRNA target sequence
gttcttgaatttgctaattga

SEQ ID NO: 199873 - DNA, 21 bp, Artificial sequence
  SiRNA target sequence
ttcttgaatttgctaattgat

SEQ ID NO: 199874 - DNA, 21 bp, Artificial sequence
  SiRNA target sequence
tcttgaatttgctaattgatc

SEQ ID NO: 199875 - DNA, 21 bp, Artificial sequence
  SiRNA target sequence
cttgaatttgctaattgatca

SEQ ID NO: 199876 - DNA, 21 bp, Artificial sequence
  SiRNA target sequence
ttgaatttgctaattgatcaa

SEQ ID NO: 199877 - DNA, 21 bp, Artificial sequence
  SiRNA target sequence
tgaatttgctaattgatcaat

SEQ ID NO: 199878 - DNA, 21 bp, Artificial sequence
  SiRNA target sequence
gaatttgctaattgatcaatc

SEQ ID NO: 199879 - DNA, 21 bp, Artificial sequence
  SiRNA target sequence
aatttgctaattgatcaatct

SEQ ID NO: 199880 - DNA, 21 bp, Artificial sequence
  SiRNA target sequence
atttgctaattgatcaatctc

SEQ ID NO: 199881 - DNA, 21 bp, Artificial sequence
  SiRNA target sequence
tttgctaattgatcaatctca

SEQ ID NO: 199882 - DNA, 21 bp, Artificial sequence
  SiRNA target sequence
ttgctaattgatcaatctcat

SEQ ID NO: 199883 - DNA, 21 bp, Artificial sequence
  SiRNA target sequence
tgctaattgatcaatctcatc

SEQ ID NO: 199884 - DNA, 21 bp, Artificial sequence
  SiRNA target sequence
gctaattgatcaatctcatct

SEQ ID NO: 199885 - DNA, 21 bp, Artificial sequence
  SiRNA target sequence
ctaattgatcaatctcatctt

SEQ ID NO: 199886 - DNA, 21 bp, Artificial sequence
  SiRNA target sequence
taattgatcaatctcatcttc

SEQ ID NO: 199887 - DNA, 21 bp, Artificial sequence
  SiRNA target sequence
aattgatcaatctcatcttcc

SEQ ID NO: 199888 - DNA, 21 bp, Artificial sequence
  SiRNA target sequence
attgatcaatctcatcttccg

SEQ ID NO: 199889 - DNA, 21 bp, Artificial sequence
  SiRNA target sequence
ttgatcaatctcatcttccgt

SEQ ID NO: 199890 - DNA, 21 bp, Artificial sequence
  SiRNA target sequence
tgatcaatctcatcttccgta

SEQ ID NO: 199891 - DNA, 21 bp, Artificial sequence
  SiRNA target sequence
gatcaatctcatcttccgtag

SEQ ID NO: 199892 - DNA, 21 bp, Artificial sequence
  SiRNA target sequence
atcaatctcatcttccgtagg

SEQ ID NO: 199893 - DNA, 21 bp, Artificial sequence
  SiRNA target sequence
tcaatctcatcttccgtaggt

SEQ ID NO: 199894 - DNA, 21 bp, Artificial sequence
  SiRNA target sequence
caatctcatcttccgtaggta

SEQ ID NO: 199895 - DNA, 21 bp, Artificial sequence
  SiRNA target sequence
aatctcatcttccgtaggtaa

SEQ ID NO: 199896 - DNA, 21 bp, Artificial sequence
  SiRNA target sequence
atctcatcttccgtaggtaag

SEQ ID NO: 199897 - DNA, 21 bp, Artificial sequence
  SiRNA target sequence
tctcatcttccgtaggtaagt

SEQ ID NO: 199898 - DNA, 21 bp, Artificial sequence
  SiRNA target sequence
ctcatcttccgtaggtaagtt

SEQ ID NO: 199899 - DNA, 21 bp, Artificial sequence
  SiRNA target sequence
tcatcttccgtaggtaagttg

SEQ ID NO: 199900 - DNA, 21 bp, Artificial sequence
  SiRNA target sequence
catcttccgtaggtaagttgt

SEQ ID NO: 199901 - DNA, 21 bp, Artificial sequence
  SiRNA target sequence
atcttccgtaggtaagttgtt

SEQ ID NO: 199902 - DNA, 21 bp, Artificial sequence
  SiRNA target sequence
tcttccgtaggtaagttgttt

SEQ ID NO: 199903 - DNA, 21 bp, Artificial sequence
  SiRNA target sequence
cttccgtaggtaagttgtttt

SEQ ID NO: 199904 - DNA, 21 bp, Artificial sequence
  SiRNA target sequence
ttccgtaggtaagttgttttc

SEQ ID NO: 199905 - DNA, 21 bp, Artificial sequence
  SiRNA target sequence
tccgtaggtaagttgttttca

SEQ ID NO: 199906 - DNA, 21 bp, Artificial sequence
  SiRNA target sequence
ccgtaggtaagttgttttcag

SEQ ID NO: 199907 - DNA, 21 bp, Artificial sequence
  SiRNA target sequence
cgtaggtaagttgttttcagg

SEQ ID NO: 199908 - DNA, 21 bp, Artificial sequence
  SiRNA target sequence
gtaggtaagttgttttcaggt

SEQ ID NO: 199909 - DNA, 21 bp, Artificial sequence
  SiRNA target sequence
taggtaagttgttttcaggtg

SEQ ID NO: 199910 - DNA, 21 bp, Artificial sequence
  SiRNA target sequence
aggtaagttgttttcaggtgt

SEQ ID NO: 199911 - DNA, 21 bp, Artificial sequence
  SiRNA target sequence
ggtaagttgttttcaggtgtt

SEQ ID NO: 199912 - DNA, 21 bp, Artificial sequence
  SiRNA target sequence
gtaagttgttttcaggtgttt

SEQ ID NO: 199913 - DNA, 21 bp, Artificial sequence
  SiRNA target sequence
taagttgttttcaggtgtttc

SEQ ID NO: 199914 - DNA, 21 bp, Artificial sequence
  SiRNA target sequence
aagttgttttcaggtgtttca

SEQ ID NO: 199915 - DNA, 21 bp, Artificial sequence
  SiRNA target sequence
agttgttttcaggtgtttcat

SEQ ID NO: 199916 - DNA, 21 bp, Artificial sequence
  SiRNA target sequence
gttgttttcaggtgtttcatt

SEQ ID NO: 199917 - DNA, 21 bp, Artificial sequence
  SiRNA target sequence
ttgttttcaggtgtttcattt

SEQ ID NO: 199918 - DNA, 21 bp, Artificial sequence
  SiRNA target sequence
tgttttcaggtgtttcattta

SEQ ID NO: 199919 - DNA, 21 bp, Artificial sequence
  SiRNA target sequence
gttttcaggtgtttcatttat

SEQ ID NO: 199920 - DNA, 21 bp, Artificial sequence
  SiRNA target sequence
ttttcaggtgtttcatttatt

SEQ ID NO: 199921 - DNA, 21 bp, Artificial sequence
  SiRNA target sequence
tttcaggtgtttcatttatta

SEQ ID NO: 199922 - DNA, 21 bp, Artificial sequence
  SiRNA target sequence
ttcaggtgtttcatttattac

SEQ ID NO: 199923 - DNA, 21 bp, Artificial sequence
  SiRNA target sequence
tcaggtgtttcatttattaca

SEQ ID NO: 199924 - DNA, 21 bp, Artificial sequence
  SiRNA target sequence
caggtgtttcatttattacac

SEQ ID NO: 199925 - DNA, 21 bp, Artificial sequence
  SiRNA target sequence
aggtgtttcatttattacact

SEQ ID NO: 199926 - DNA, 21 bp, Artificial sequence
  SiRNA target sequence
ggtgtttcatttattacactc

SEQ ID NO: 199927 - DNA, 21 bp, Artificial sequence
  SiRNA target sequence
gtgtttcatttattacactca

SEQ ID NO: 199928 - DNA, 21 bp, Artificial sequence
  SiRNA target sequence
tgtttcatttattacactcat

SEQ ID NO: 199929 - DNA, 22 bp, Artificial sequence
  SiRNA target sequence
ttattctgcgttttcttttttg

SEQ ID NO: 199930 - DNA, 22 bp, Artificial sequence
  SiRNA target sequence
tattctgcgttttcttttttgt

SEQ ID NO: 199931 - DNA, 22 bp, Artificial sequence
  SiRNA target sequence
attctgcgttttcttttttgtc

SEQ ID NO: 199932 - DNA, 22 bp, Artificial sequence
  SiRNA target sequence
ttctgcgttttcttttttgtcg

SEQ ID NO: 199933 - DNA, 22 bp, Artificial sequence
  SiRNA target sequence
tctgcgttttcttttttgtcgt

SEQ ID NO: 199934 - DNA, 22 bp, Artificial sequence
  SiRNA target sequence
ctgcgttttcttttttgtcgtc

SEQ ID NO: 199935 - DNA, 22 bp, Artificial sequence
  SiRNA target sequence
tgcgttttcttttttgtcgtct

SEQ ID NO: 199936 - DNA, 22 bp, Artificial sequence
  SiRNA target sequence
gcgttttcttttttgtcgtctt

SEQ ID NO: 199937 - DNA, 22 bp, Artificial sequence
  SiRNA target sequence
cgttttcttttttgtcgtcttt

SEQ ID NO: 199938 - DNA, 22 bp, Artificial sequence
  SiRNA target sequence
gttttcttttttgtcgtctttt

SEQ ID NO: 199939 - DNA, 22 bp, Artificial sequence
  SiRNA target sequence
ttttcttttttgtcgtctttta

SEQ ID NO: 199940 - DNA, 22 bp, Artificial sequence
  SiRNA target sequence
tttcttttttgtcgtcttttat

SEQ ID NO: 199941 - DNA, 22 bp, Artificial sequence
  SiRNA target sequence
ttcttttttgtcgtcttttatt

SEQ ID NO: 199942 - DNA, 22 bp, Artificial sequence
  SiRNA target sequence
tcttttttgtcgtcttttatta

SEQ ID NO: 199943 - DNA, 22 bp, Artificial sequence
  SiRNA target sequence
cttttttgtcgtcttttattaa

SEQ ID NO: 199944 - DNA, 22 bp, Artificial sequence
  SiRNA target sequence
ttttttgtcgtcttttattaaa

SEQ ID NO: 199945 - DNA, 22 bp, Artificial sequence
  SiRNA target sequence
tttttgtcgtcttttattaaat

SEQ ID NO: 199946 - DNA, 22 bp, Artificial sequence
  SiRNA target sequence
ttttgtcgtcttttattaaatc

SEQ ID NO: 199947 - DNA, 22 bp, Artificial sequence
  SiRNA target sequence
tttgtcgtcttttattaaatct

SEQ ID NO: 199948 - DNA, 22 bp, Artificial sequence
  SiRNA target sequence
ttgtcgtcttttattaaatcta

SEQ ID NO: 199949 - DNA, 22 bp, Artificial sequence
  SiRNA target sequence
tgtcgtcttttattaaatctat

SEQ ID NO: 199950 - DNA, 22 bp, Artificial sequence
  SiRNA target sequence
gtcgtcttttattaaatctatg

SEQ ID NO: 199951 - DNA, 22 bp, Artificial sequence
  SiRNA target sequence
tcgtcttttattaaatctatgt

SEQ ID NO: 199952 - DNA, 22 bp, Artificial sequence
  SiRNA target sequence
cgtcttttattaaatctatgtc

SEQ ID NO: 199953 - DNA, 22 bp, Artificial sequence
  SiRNA target sequence
gtcttttattaaatctatgtct

SEQ ID NO: 199954 - DNA, 22 bp, Artificial sequence
  SiRNA target sequence
tcttttattaaatctatgtcta

SEQ ID NO: 199955 - DNA, 22 bp, Artificial sequence
  SiRNA target sequence
cttttattaaatctatgtctac

SEQ ID NO: 199956 - DNA, 22 bp, Artificial sequence
  SiRNA target sequence
ttttattaaatctatgtctaca

SEQ ID NO: 199957 - DNA, 22 bp, Artificial sequence
  SiRNA target sequence
tttattaaatctatgtctacac

SEQ ID NO: 199958 - DNA, 22 bp, Artificial sequence
  SiRNA target sequence
ttattaaatctatgtctacact

SEQ ID NO: 199959 - DNA, 22 bp, Artificial sequence
  SiRNA target sequence
tattaaatctatgtctacactt

SEQ ID NO: 199960 - DNA, 22 bp, Artificial sequence
  SiRNA target sequence
attaaatctatgtctacacttg

SEQ ID NO: 199961 - DNA, 22 bp, Artificial sequence
  SiRNA target sequence
ttaaatctatgtctacacttgt

SEQ ID NO: 199962 - DNA, 22 bp, Artificial sequence
  SiRNA target sequence
taaatctatgtctacacttgta

SEQ ID NO: 199963 - DNA, 22 bp, Artificial sequence
  SiRNA target sequence
aaatctatgtctacacttgtat

SEQ ID NO: 199964 - DNA, 22 bp, Artificial sequence
  SiRNA target sequence
aatctatgtctacacttgtatt

SEQ ID NO: 199965 - DNA, 22 bp, Artificial sequence
  SiRNA target sequence
atctatgtctacacttgtatta

SEQ ID NO: 199966 - DNA, 22 bp, Artificial sequence
  SiRNA target sequence
tctatgtctacacttgtattat

SEQ ID NO: 199967 - DNA, 22 bp, Artificial sequence
  SiRNA target sequence
ctatgtctacacttgtattatt

SEQ ID NO: 199968 - DNA, 22 bp, Artificial sequence
  SiRNA target sequence
tatgtctacacttgtattattt

SEQ ID NO: 199969 - DNA, 22 bp, Artificial sequence
  SiRNA target sequence
atgtctacacttgtattatttt

SEQ ID NO: 199970 - DNA, 22 bp, Artificial sequence
  SiRNA target sequence
tgtctacacttgtattattttt

SEQ ID NO: 199971 - DNA, 22 bp, Artificial sequence
  SiRNA target sequence
gtctacacttgtattattttta

SEQ ID NO: 199972 - DNA, 22 bp, Artificial sequence
  SiRNA target sequence
tctacacttgtattatttttaa

SEQ ID NO: 199973 - DNA, 22 bp, Artificial sequence
  SiRNA target sequence
ctacacttgtattatttttaat

SEQ ID NO: 199974 - DNA, 22 bp, Artificial sequence
  SiRNA target sequence
tacacttgtattatttttaatt

SEQ ID NO: 199975 - DNA, 22 bp, Artificial sequence
  SiRNA target sequence
acacttgtattatttttaattg

SEQ ID NO: 199976 - DNA, 22 bp, Artificial sequence
  SiRNA target sequence
cacttgtattatttttaattga

SEQ ID NO: 199977 - DNA, 22 bp, Artificial sequence
  SiRNA target sequence
acttgtattatttttaattgaa

SEQ ID NO: 199978 - DNA, 22 bp, Artificial sequence
  SiRNA target sequence
cttgtattatttttaattgaaa

SEQ ID NO: 199979 - DNA, 22 bp, Artificial sequence
  SiRNA target sequence
ttgtattatttttaattgaaac

SEQ ID NO: 199980 - DNA, 22 bp, Artificial sequence
  SiRNA target sequence
tgtattatttttaattgaaacg

SEQ ID NO: 199981 - DNA, 22 bp, Artificial sequence
  SiRNA target sequence
gtattatttttaattgaaacgt

SEQ ID NO: 199982 - DNA, 22 bp, Artificial sequence
  SiRNA target sequence
tattatttttaattgaaacgtt

SEQ ID NO: 199983 - DNA, 22 bp, Artificial sequence
  SiRNA target sequence
attatttttaattgaaacgtta

SEQ ID NO: 199984 - DNA, 22 bp, Artificial sequence
  SiRNA target sequence
ttatttttaattgaaacgttat

SEQ ID NO: 199985 - DNA, 22 bp, Artificial sequence
  SiRNA target sequence
tatttttaattgaaacgttata

SEQ ID NO: 199986 - DNA, 22 bp, Artificial sequence
  SiRNA target sequence
atttttaattgaaacgttatat

SEQ ID NO: 199987 - DNA, 22 bp, Artificial sequence
  SiRNA target sequence
tttttaattgaaacgttatatg

SEQ ID NO: 199988 - DNA, 22 bp, Artificial sequence
  SiRNA target sequence
ttttaattgaaacgttatatgc

SEQ ID NO: 199989 - DNA, 22 bp, Artificial sequence
  SiRNA target sequence
tttaattgaaacgttatatgca

SEQ ID NO: 199990 - DNA, 22 bp, Artificial sequence
  SiRNA target sequence
ttaattgaaacgttatatgcac

SEQ ID NO: 199991 - DNA, 22 bp, Artificial sequence
  SiRNA target sequence
taattgaaacgttatatgcacc

SEQ ID NO: 199992 - DNA, 22 bp, Artificial sequence
  SiRNA target sequence
aattgaaacgttatatgcaccc

SEQ ID NO: 199993 - DNA, 22 bp, Artificial sequence
  SiRNA target sequence
attgaaacgttatatgcacccg

SEQ ID NO: 199994 - DNA, 22 bp, Artificial sequence
  SiRNA target sequence
ttgaaacgttatatgcacccgc

SEQ ID NO: 199995 - DNA, 22 bp, Artificial sequence
  SiRNA target sequence
tgaaacgttatatgcacccgct

SEQ ID NO: 199996 - DNA, 22 bp, Artificial sequence
  SiRNA target sequence
gaaacgttatatgcacccgcta

SEQ ID NO: 199997 - DNA, 22 bp, Artificial sequence
  SiRNA target sequence
aaacgttatatgcacccgctaa

SEQ ID NO: 199998 - DNA, 22 bp, Artificial sequence
  SiRNA target sequence
aacgttatatgcacccgctaaa

SEQ ID NO: 199999 - DNA, 22 bp, Artificial sequence
  SiRNA target sequence
acgttatatgcacccgctaaat

SEQ ID NO: 200000 - DNA, 22 bp, Artificial sequence
  SiRNA target sequence
cgttatatgcacccgctaaata

SEQ ID NO: 200001 - DNA, 22 bp, Artificial sequence
  SiRNA target sequence
gttatatgcacccgctaaatag

SEQ ID NO: 200002 - DNA, 22 bp, Artificial sequence
  SiRNA target sequence
ttatatgcacccgctaaataga

SEQ ID NO: 200003 - DNA, 22 bp, Artificial sequence
  SiRNA target sequence
tatatgcacccgctaaatagat

SEQ ID NO: 200004 - DNA, 22 bp, Artificial sequence
  SiRNA target sequence
atatgcacccgctaaatagatt

SEQ ID NO: 200005 - DNA, 22 bp, Artificial sequence
  SiRNA target sequence
tatgcacccgctaaatagatta

SEQ ID NO: 200006 - DNA, 22 bp, Artificial sequence
  SiRNA target sequence
atgcacccgctaaatagattat

SEQ ID NO: 200007 - DNA, 22 bp, Artificial sequence
  SiRNA target sequence
tgcacccgctaaatagattata

SEQ ID NO: 200008 - DNA, 22 bp, Artificial sequence
  SiRNA target sequence
gcacccgctaaatagattatag

SEQ ID NO: 200009 - DNA, 22 bp, Artificial sequence
  SiRNA target sequence
cacccgctaaatagattatagc

SEQ ID NO: 200010 - DNA, 22 bp, Artificial sequence
  SiRNA target sequence
acccgctaaatagattatagct

SEQ ID NO: 200011 - DNA, 22 bp, Artificial sequence
  SiRNA target sequence
cccgctaaatagattatagctc

SEQ ID NO: 200012 - DNA, 22 bp, Artificial sequence
  SiRNA target sequence
ccgctaaatagattatagctct

SEQ ID NO: 200013 - DNA, 22 bp, Artificial sequence
  SiRNA target sequence
cgctaaatagattatagctcta

SEQ ID NO: 200014 - DNA, 22 bp, Artificial sequence
  SiRNA target sequence
gctaaatagattatagctctaa

SEQ ID NO: 200015 - DNA, 22 bp, Artificial sequence
  SiRNA target sequence
ctaaatagattatagctctaat

SEQ ID NO: 200016 - DNA, 22 bp, Artificial sequence
  SiRNA target sequence
taaatagattatagctctaatc

SEQ ID NO: 200017 - DNA, 22 bp, Artificial sequence
  SiRNA target sequence
aaatagattatagctctaatcc

SEQ ID NO: 200018 - DNA, 22 bp, Artificial sequence
  SiRNA target sequence
aatagattatagctctaatcca

SEQ ID NO: 200019 - DNA, 22 bp, Artificial sequence
  SiRNA target sequence
atagattatagctctaatccaa

SEQ ID NO: 200020 - DNA, 22 bp, Artificial sequence
  SiRNA target sequence
tagattatagctctaatccaaa

SEQ ID NO: 200021 - DNA, 22 bp, Artificial sequence
  SiRNA target sequence
agattatagctctaatccaaat

SEQ ID NO: 200022 - DNA, 22 bp, Artificial sequence
  SiRNA target sequence
gattatagctctaatccaaata

SEQ ID NO: 200023 - DNA, 22 bp, Artificial sequence
  SiRNA target sequence
attatagctctaatccaaatat

SEQ ID NO: 200024 - DNA, 22 bp, Artificial sequence
  SiRNA target sequence
ttatagctctaatccaaatata

SEQ ID NO: 200025 - DNA, 22 bp, Artificial sequence
  SiRNA target sequence
tatagctctaatccaaatataa

SEQ ID NO: 200026 - DNA, 22 bp, Artificial sequence
  SiRNA target sequence
atagctctaatccaaatataaa

SEQ ID NO: 200027 - DNA, 22 bp, Artificial sequence
  SiRNA target sequence
tagctctaatccaaatataaat

SEQ ID NO: 200028 - DNA, 22 bp, Artificial sequence
  SiRNA target sequence
agctctaatccaaatataaatc

SEQ ID NO: 200029 - DNA, 22 bp, Artificial sequence
  SiRNA target sequence
gctctaatccaaatataaatca

SEQ ID NO: 200030 - DNA, 22 bp, Artificial sequence
  SiRNA target sequence
ctctaatccaaatataaatcaa

SEQ ID NO: 200031 - DNA, 22 bp, Artificial sequence
  SiRNA target sequence
tctaatccaaatataaatcaat

SEQ ID NO: 200032 - DNA, 22 bp, Artificial sequence
  SiRNA target sequence
ctaatccaaatataaatcaata

SEQ ID NO: 200033 - DNA, 22 bp, Artificial sequence
  SiRNA target sequence
taatccaaatataaatcaatat

SEQ ID NO: 200034 - DNA, 22 bp, Artificial sequence
  SiRNA target sequence
aatccaaatataaatcaatatt

SEQ ID NO: 200035 - DNA, 22 bp, Artificial sequence
  SiRNA target sequence
atccaaatataaatcaatatta

SEQ ID NO: 200036 - DNA, 22 bp, Artificial sequence
  SiRNA target sequence
tccaaatataaatcaatattat

SEQ ID NO: 200037 - DNA, 22 bp, Artificial sequence
  SiRNA target sequence
ccaaatataaatcaatattatt

SEQ ID NO: 200038 - DNA, 22 bp, Artificial sequence
  SiRNA target sequence
caaatataaatcaatattattg

SEQ ID NO: 200039 - DNA, 22 bp, Artificial sequence
  SiRNA target sequence
aaatataaatcaatattattgc

SEQ ID NO: 200040 - DNA, 22 bp, Artificial sequence
  SiRNA target sequence
aatataaatcaatattattgca

SEQ ID NO: 200041 - DNA, 22 bp, Artificial sequence
  SiRNA target sequence
atataaatcaatattattgcaa

SEQ ID NO: 200042 - DNA, 22 bp, Artificial sequence
  SiRNA target sequence
tataaatcaatattattgcaat

SEQ ID NO: 200043 - DNA, 22 bp, Artificial sequence
  SiRNA target sequence
ataaatcaatattattgcaatc

SEQ ID NO: 200044 - DNA, 22 bp, Artificial sequence
  SiRNA target sequence
taaatcaatattattgcaatcg

SEQ ID NO: 200045 - DNA, 22 bp, Artificial sequence
  SiRNA target sequence
aaatcaatattattgcaatcgt

SEQ ID NO: 200046 - DNA, 22 bp, Artificial sequence
  SiRNA target sequence
aatcaatattattgcaatcgtt

SEQ ID NO: 200047 - DNA, 22 bp, Artificial sequence
  SiRNA target sequence
atcaatattattgcaatcgtta

SEQ ID NO: 200048 - DNA, 22 bp, Artificial sequence
  SiRNA target sequence
tcaatattattgcaatcgttaa

SEQ ID NO: 200049 - DNA, 22 bp, Artificial sequence
  SiRNA target sequence
caatattattgcaatcgttaat

SEQ ID NO: 200050 - DNA, 22 bp, Artificial sequence
  SiRNA target sequence
aatattattgcaatcgttaatg

SEQ ID NO: 200051 - DNA, 22 bp, Artificial sequence
  SiRNA target sequence
atattattgcaatcgttaatgt

SEQ ID NO: 200052 - DNA, 22 bp, Artificial sequence
  SiRNA target sequence
tattattgcaatcgttaatgtg

SEQ ID NO: 200053 - DNA, 22 bp, Artificial sequence
  SiRNA target sequence
attattgcaatcgttaatgtga

SEQ ID NO: 200054 - DNA, 22 bp, Artificial sequence
  SiRNA target sequence
ttattgcaatcgttaatgtgat

SEQ ID NO: 200055 - DNA, 22 bp, Artificial sequence
  SiRNA target sequence
tattgcaatcgttaatgtgatt

SEQ ID NO: 200056 - DNA, 22 bp, Artificial sequence
  SiRNA target sequence
attgcaatcgttaatgtgattg

SEQ ID NO: 200057 - DNA, 22 bp, Artificial sequence
  SiRNA target sequence
ttgcaatcgttaatgtgattgg

SEQ ID NO: 200058 - DNA, 22 bp, Artificial sequence
  SiRNA target sequence
tgcaatcgttaatgtgattgga

SEQ ID NO: 200059 - DNA, 22 bp, Artificial sequence
  SiRNA target sequence
gcaatcgttaatgtgattggac

SEQ ID NO: 200060 - DNA, 22 bp, Artificial sequence
  SiRNA target sequence
caatcgttaatgtgattggact

SEQ ID NO: 200061 - DNA, 22 bp, Artificial sequence
  SiRNA target sequence
aatcgttaatgtgattggacta

SEQ ID NO: 200062 - DNA, 22 bp, Artificial sequence
  SiRNA target sequence
atcgttaatgtgattggactac

SEQ ID NO: 200063 - DNA, 22 bp, Artificial sequence
  SiRNA target sequence
tcgttaatgtgattggactacc

SEQ ID NO: 200064 - DNA, 22 bp, Artificial sequence
  SiRNA target sequence
cgttaatgtgattggactaccc

SEQ ID NO: 200065 - DNA, 22 bp, Artificial sequence
  SiRNA target sequence
gttaatgtgattggactaccct

SEQ ID NO: 200066 - DNA, 22 bp, Artificial sequence
  SiRNA target sequence
ttaatgtgattggactaccctt

SEQ ID NO: 200067 - DNA, 22 bp, Artificial sequence
  SiRNA target sequence
taatgtgattggactacccttc

SEQ ID NO: 200068 - DNA, 22 bp, Artificial sequence
  SiRNA target sequence
aatgtgattggactacccttcc

SEQ ID NO: 200069 - DNA, 22 bp, Artificial sequence
  SiRNA target sequence
atgtgattggactacccttcct

SEQ ID NO: 200070 - DNA, 22 bp, Artificial sequence
  SiRNA target sequence
tgtgattggactacccttcctt

SEQ ID NO: 200071 - DNA, 22 bp, Artificial sequence
  SiRNA target sequence
gtgattggactacccttcctta

SEQ ID NO: 200072 - DNA, 22 bp, Artificial sequence
  SiRNA target sequence
tgattggactacccttccttac

SEQ ID NO: 200073 - DNA, 22 bp, Artificial sequence
  SiRNA target sequence
gattggactacccttccttaca

SEQ ID NO: 200074 - DNA, 22 bp, Artificial sequence
  SiRNA target sequence
attggactacccttccttacat

SEQ ID NO: 200075 - DNA, 22 bp, Artificial sequence
  SiRNA target sequence
ttggactacccttccttacatt

SEQ ID NO: 200076 - DNA, 22 bp, Artificial sequence
  SiRNA target sequence
tggactacccttccttacatta

SEQ ID NO: 200077 - DNA, 22 bp, Artificial sequence
  SiRNA target sequence
ggactacccttccttacattat

SEQ ID NO: 200078 - DNA, 22 bp, Artificial sequence
  SiRNA target sequence
gactacccttccttacattatc

SEQ ID NO: 200079 - DNA, 22 bp, Artificial sequence
  SiRNA target sequence
actacccttccttacattatca

SEQ ID NO: 200080 - DNA, 22 bp, Artificial sequence
  SiRNA target sequence
ctacccttccttacattatcag

SEQ ID NO: 200081 - DNA, 22 bp, Artificial sequence
  SiRNA target sequence
tacccttccttacattatcagt

SEQ ID NO: 200082 - DNA, 22 bp, Artificial sequence
  SiRNA target sequence
acccttccttacattatcagta

SEQ ID NO: 200083 - DNA, 22 bp, Artificial sequence
  SiRNA target sequence
cccttccttacattatcagtat

SEQ ID NO: 200084 - DNA, 22 bp, Artificial sequence
  SiRNA target sequence
ccttccttacattatcagtatc

SEQ ID NO: 200085 - DNA, 22 bp, Artificial sequence
  SiRNA target sequence
cttccttacattatcagtatca

SEQ ID NO: 200086 - DNA, 22 bp, Artificial sequence
  SiRNA target sequence
ttccttacattatcagtatcaa

SEQ ID NO: 200087 - DNA, 22 bp, Artificial sequence
  SiRNA target sequence
tccttacattatcagtatcaag

SEQ ID NO: 200088 - DNA, 22 bp, Artificial sequence
  SiRNA target sequence
ccttacattatcagtatcaagt

SEQ ID NO: 200089 - DNA, 22 bp, Artificial sequence
  SiRNA target sequence
cttacattatcagtatcaagtg

SEQ ID NO: 200090 - DNA, 22 bp, Artificial sequence
  SiRNA target sequence
ttacattatcagtatcaagtgc

SEQ ID NO: 200091 - DNA, 22 bp, Artificial sequence
  SiRNA target sequence
tacattatcagtatcaagtgct

SEQ ID NO: 200092 - DNA, 22 bp, Artificial sequence
  SiRNA target sequence
acattatcagtatcaagtgcta

SEQ ID NO: 200093 - DNA, 22 bp, Artificial sequence
  SiRNA target sequence
cattatcagtatcaagtgctac

SEQ ID NO: 200094 - DNA, 22 bp, Artificial sequence
  SiRNA target sequence
attatcagtatcaagtgctact

SEQ ID NO: 200095 - DNA, 22 bp, Artificial sequence
  SiRNA target sequence
ttatcagtatcaagtgctacta

SEQ ID NO: 200096 - DNA, 22 bp, Artificial sequence
  SiRNA target sequence
tatcagtatcaagtgctactaa

SEQ ID NO: 200097 - DNA, 22 bp, Artificial sequence
  SiRNA target sequence
atcagtatcaagtgctactaat

SEQ ID NO: 200098 - DNA, 22 bp, Artificial sequence
  SiRNA target sequence
tcagtatcaagtgctactaata

SEQ ID NO: 200099 - DNA, 22 bp, Artificial sequence
  SiRNA target sequence
cagtatcaagtgctactaatat

SEQ ID NO: 200100 - DNA, 22 bp, Artificial sequence
  SiRNA target sequence
agtatcaagtgctactaatatg

SEQ ID NO: 200101 - DNA, 22 bp, Artificial sequence
  SiRNA target sequence
gtatcaagtgctactaatatgg

SEQ ID NO: 200102 - DNA, 22 bp, Artificial sequence
  SiRNA target sequence
tatcaagtgctactaatatggc

SEQ ID NO: 200103 - DNA, 22 bp, Artificial sequence
  SiRNA target sequence
atcaagtgctactaatatggct

SEQ ID NO: 200104 - DNA, 22 bp, Artificial sequence
  SiRNA target sequence
tcaagtgctactaatatggcta

SEQ ID NO: 200105 - DNA, 22 bp, Artificial sequence
  SiRNA target sequence
caagtgctactaatatggctag

SEQ ID NO: 200106 - DNA, 22 bp, Artificial sequence
  SiRNA target sequence
aagtgctactaatatggctagt

SEQ ID NO: 200107 - DNA, 22 bp, Artificial sequence
  SiRNA target sequence
agtgctactaatatggctagtc

SEQ ID NO: 200108 - DNA, 22 bp, Artificial sequence
  SiRNA target sequence
gtgctactaatatggctagtcc

SEQ ID NO: 200109 - DNA, 22 bp, Artificial sequence
  SiRNA target sequence
tgctactaatatggctagtcca

SEQ ID NO: 200110 - DNA, 22 bp, Artificial sequence
  SiRNA target sequence
gctactaatatggctagtccat

SEQ ID NO: 200111 - DNA, 22 bp, Artificial sequence
  SiRNA target sequence
ctactaatatggctagtccata

SEQ ID NO: 200112 - DNA, 22 bp, Artificial sequence
  SiRNA target sequence
tactaatatggctagtccatat

SEQ ID NO: 200113 - DNA, 22 bp, Artificial sequence
  SiRNA target sequence
actaatatggctagtccatata

SEQ ID NO: 200114 - DNA, 22 bp, Artificial sequence
  SiRNA target sequence
ctaatatggctagtccatataa

SEQ ID NO: 200115 - DNA, 22 bp, Artificial sequence
  SiRNA target sequence
taatatggctagtccatataat

SEQ ID NO: 200116 - DNA, 22 bp, Artificial sequence
  SiRNA target sequence
aatatggctagtccatataatg

SEQ ID NO: 200117 - DNA, 22 bp, Artificial sequence
  SiRNA target sequence
atatggctagtccatataatga

SEQ ID NO: 200118 - DNA, 22 bp, Artificial sequence
  SiRNA target sequence
tatggctagtccatataatgaa

SEQ ID NO: 200119 - DNA, 22 bp, Artificial sequence
  SiRNA target sequence
atggctagtccatataatgaac

SEQ ID NO: 200120 - DNA, 22 bp, Artificial sequence
  SiRNA target sequence
tggctagtccatataatgaacc

SEQ ID NO: 200121 - DNA, 22 bp, Artificial sequence
  SiRNA target sequence
ggctagtccatataatgaacca

SEQ ID NO: 200122 - DNA, 22 bp, Artificial sequence
  SiRNA target sequence
gctagtccatataatgaaccaa

SEQ ID NO: 200123 - DNA, 22 bp, Artificial sequence
  SiRNA target sequence
ctagtccatataatgaaccaat

SEQ ID NO: 200124 - DNA, 22 bp, Artificial sequence
  SiRNA target sequence
tagtccatataatgaaccaata

SEQ ID NO: 200125 - DNA, 22 bp, Artificial sequence
  SiRNA target sequence
agtccatataatgaaccaatag

SEQ ID NO: 200126 - DNA, 22 bp, Artificial sequence
  SiRNA target sequence
gtccatataatgaaccaataga

SEQ ID NO: 200127 - DNA, 22 bp, Artificial sequence
  SiRNA target sequence
tccatataatgaaccaatagat

SEQ ID NO: 200128 - DNA, 22 bp, Artificial sequence
  SiRNA target sequence
ccatataatgaaccaatagatt

SEQ ID NO: 200129 - DNA, 22 bp, Artificial sequence
  SiRNA target sequence
catataatgaaccaatagattt

SEQ ID NO: 200130 - DNA, 22 bp, Artificial sequence
  SiRNA target sequence
atataatgaaccaatagatttt

SEQ ID NO: 200131 - DNA, 22 bp, Artificial sequence
  SiRNA target sequence
tataatgaaccaatagattttc

SEQ ID NO: 200132 - DNA, 22 bp, Artificial sequence
  SiRNA target sequence
ataatgaaccaatagattttcc

SEQ ID NO: 200133 - DNA, 22 bp, Artificial sequence
  SiRNA target sequence
taatgaaccaatagattttcct

SEQ ID NO: 200134 - DNA, 22 bp, Artificial sequence
  SiRNA target sequence
aatgaaccaatagattttccta

SEQ ID NO: 200135 - DNA, 22 bp, Artificial sequence
  SiRNA target sequence
atgaaccaatagattttcctaa

SEQ ID NO: 200136 - DNA, 22 bp, Artificial sequence
  SiRNA target sequence
tgaaccaatagattttcctaat

SEQ ID NO: 200137 - DNA, 22 bp, Artificial sequence
  SiRNA target sequence
gaaccaatagattttcctaatt

SEQ ID NO: 200138 - DNA, 22 bp, Artificial sequence
  SiRNA target sequence
aaccaatagattttcctaattt

SEQ ID NO: 200139 - DNA, 22 bp, Artificial sequence
  SiRNA target sequence
accaatagattttcctaattta

SEQ ID NO: 200140 - DNA, 22 bp, Artificial sequence
  SiRNA target sequence
ccaatagattttcctaatttat

SEQ ID NO: 200141 - DNA, 22 bp, Artificial sequence
  SiRNA target sequence
caatagattttcctaatttatt

SEQ ID NO: 200142 - DNA, 22 bp, Artificial sequence
  SiRNA target sequence
aatagattttcctaatttatta

SEQ ID NO: 200143 - DNA, 22 bp, Artificial sequence
  SiRNA target sequence
atagattttcctaatttattaa

SEQ ID NO: 200144 - DNA, 22 bp, Artificial sequence
  SiRNA target sequence
tagattttcctaatttattaaa

SEQ ID NO: 200145 - DNA, 22 bp, Artificial sequence
  SiRNA target sequence
agattttcctaatttattaaaa

SEQ ID NO: 200146 - DNA, 22 bp, Artificial sequence
  SiRNA target sequence
gattttcctaatttattaaaaa

SEQ ID NO: 200147 - DNA, 22 bp, Artificial sequence
  SiRNA target sequence
attttcctaatttattaaaaat

SEQ ID NO: 200148 - DNA, 22 bp, Artificial sequence
  SiRNA target sequence
ttttcctaatttattaaaaata

SEQ ID NO: 200149 - DNA, 22 bp, Artificial sequence
  SiRNA target sequence
tttcctaatttattaaaaatac

SEQ ID NO: 200150 - DNA, 22 bp, Artificial sequence
  SiRNA target sequence
ttcctaatttattaaaaatacc

SEQ ID NO: 200151 - DNA, 22 bp, Artificial sequence
  SiRNA target sequence
tcctaatttattaaaaatacca

SEQ ID NO: 200152 - DNA, 22 bp, Artificial sequence
  SiRNA target sequence
cctaatttattaaaaataccat

SEQ ID NO: 200153 - DNA, 22 bp, Artificial sequence
  SiRNA target sequence
ctaatttattaaaaataccatc

SEQ ID NO: 200154 - DNA, 22 bp, Artificial sequence
  SiRNA target sequence
taatttattaaaaataccatca

SEQ ID NO: 200155 - DNA, 22 bp, Artificial sequence
  SiRNA target sequence
aatttattaaaaataccatcat

SEQ ID NO: 200156 - DNA, 22 bp, Artificial sequence
  SiRNA target sequence
atttattaaaaataccatcata

SEQ ID NO: 200157 - DNA, 22 bp, Artificial sequence
  SiRNA target sequence
tttattaaaaataccatcataa

SEQ ID NO: 200158 - DNA, 22 bp, Artificial sequence
  SiRNA target sequence
ttattaaaaataccatcataaa

SEQ ID NO: 200159 - DNA, 22 bp, Artificial sequence
  SiRNA target sequence
tattaaaaataccatcataaac

SEQ ID NO: 200160 - DNA, 22 bp, Artificial sequence
  SiRNA target sequence
attaaaaataccatcataaaca

SEQ ID NO: 200161 - DNA, 22 bp, Artificial sequence
  SiRNA target sequence
ttaaaaataccatcataaacac

SEQ ID NO: 200162 - DNA, 22 bp, Artificial sequence
  SiRNA target sequence
taaaaataccatcataaacact

SEQ ID NO: 200163 - DNA, 22 bp, Artificial sequence
  SiRNA target sequence
aaaaataccatcataaacactt

SEQ ID NO: 200164 - DNA, 22 bp, Artificial sequence
  SiRNA target sequence
aaaataccatcataaacacttt

SEQ ID NO: 200165 - DNA, 22 bp, Artificial sequence
  SiRNA target sequence
aaataccatcataaacactttt

SEQ ID NO: 200166 - DNA, 22 bp, Artificial sequence
  SiRNA target sequence
aataccatcataaacactttta

SEQ ID NO: 200167 - DNA, 22 bp, Artificial sequence
  SiRNA target sequence
ataccatcataaacacttttaa

SEQ ID NO: 200168 - DNA, 22 bp, Artificial sequence
  SiRNA target sequence
taccatcataaacacttttaaa

SEQ ID NO: 200169 - DNA, 22 bp, Artificial sequence
  SiRNA target sequence
accatcataaacacttttaaac

SEQ ID NO: 200170 - DNA, 22 bp, Artificial sequence
  SiRNA target sequence
ccatcataaacacttttaaacc

SEQ ID NO: 200171 - DNA, 22 bp, Artificial sequence
  SiRNA target sequence
catcataaacacttttaaaccg

SEQ ID NO: 200172 - DNA, 22 bp, Artificial sequence
  SiRNA target sequence
atcataaacacttttaaaccgt

SEQ ID NO: 200173 - DNA, 22 bp, Artificial sequence
  SiRNA target sequence
tcataaacacttttaaaccgtg

SEQ ID NO: 200174 - DNA, 22 bp, Artificial sequence
  SiRNA target sequence
cataaacacttttaaaccgtgc

SEQ ID NO: 200175 - DNA, 22 bp, Artificial sequence
  SiRNA target sequence
ataaacacttttaaaccgtgcc

SEQ ID NO: 200176 - DNA, 22 bp, Artificial sequence
  SiRNA target sequence
taaacacttttaaaccgtgccc

SEQ ID NO: 200177 - DNA, 22 bp, Artificial sequence
  SiRNA target sequence
aaacacttttaaaccgtgccct

SEQ ID NO: 200178 - DNA, 22 bp, Artificial sequence
  SiRNA target sequence
aacacttttaaaccgtgccctg

SEQ ID NO: 200179 - DNA, 22 bp, Artificial sequence
  SiRNA target sequence
acacttttaaaccgtgccctgt

SEQ ID NO: 200180 - DNA, 22 bp, Artificial sequence
  SiRNA target sequence
cacttttaaaccgtgccctgtg

SEQ ID NO: 200181 - DNA, 22 bp, Artificial sequence
  SiRNA target sequence
acttttaaaccgtgccctgtgt

SEQ ID NO: 200182 - DNA, 22 bp, Artificial sequence
  SiRNA target sequence
cttttaaaccgtgccctgtgtg

SEQ ID NO: 200183 - DNA, 22 bp, Artificial sequence
  SiRNA target sequence
ttttaaaccgtgccctgtgtgc

SEQ ID NO: 200184 - DNA, 22 bp, Artificial sequence
  SiRNA target sequence
tttaaaccgtgccctgtgtgca

SEQ ID NO: 200185 - DNA, 22 bp, Artificial sequence
  SiRNA target sequence
ttaaaccgtgccctgtgtgcag

SEQ ID NO: 200186 - DNA, 22 bp, Artificial sequence
  SiRNA target sequence
taaaccgtgccctgtgtgcagg

SEQ ID NO: 200187 - DNA, 22 bp, Artificial sequence
  SiRNA target sequence
aaaccgtgccctgtgtgcagga

SEQ ID NO: 200188 - DNA, 22 bp, Artificial sequence
  SiRNA target sequence
aaccgtgccctgtgtgcaggat

SEQ ID NO: 200189 - DNA, 22 bp, Artificial sequence
  SiRNA target sequence
accgtgccctgtgtgcaggatc

SEQ ID NO: 200190 - DNA, 22 bp, Artificial sequence
  SiRNA target sequence
ccgtgccctgtgtgcaggatcg

SEQ ID NO: 200191 - DNA, 22 bp, Artificial sequence
  SiRNA target sequence
cgtgccctgtgtgcaggatcga

SEQ ID NO: 200192 - DNA, 22 bp, Artificial sequence
  SiRNA target sequence
gtgccctgtgtgcaggatcgat

SEQ ID NO: 200193 - DNA, 22 bp, Artificial sequence
  SiRNA target sequence
tgccctgtgtgcaggatcgatt

SEQ ID NO: 200194 - DNA, 22 bp, Artificial sequence
  SiRNA target sequence
gccctgtgtgcaggatcgattc

SEQ ID NO: 200195 - DNA, 22 bp, Artificial sequence
  SiRNA target sequence
ccctgtgtgcaggatcgattct

SEQ ID NO: 200196 - DNA, 22 bp, Artificial sequence
  SiRNA target sequence
cctgtgtgcaggatcgattctc

SEQ ID NO: 200197 - DNA, 22 bp, Artificial sequence
  SiRNA target sequence
ctgtgtgcaggatcgattctca

SEQ ID NO: 200198 - DNA, 22 bp, Artificial sequence
  SiRNA target sequence
tgtgtgcaggatcgattctcat

SEQ ID NO: 200199 - DNA, 22 bp, Artificial sequence
  SiRNA target sequence
gtgtgcaggatcgattctcata

SEQ ID NO: 200200 - DNA, 22 bp, Artificial sequence
  SiRNA target sequence
tgtgcaggatcgattctcatac

SEQ ID NO: 200201 - DNA, 22 bp, Artificial sequence
  SiRNA target sequence
gtgcaggatcgattctcatacc

SEQ ID NO: 200202 - DNA, 22 bp, Artificial sequence
  SiRNA target sequence
tgcaggatcgattctcataccc

SEQ ID NO: 200203 - DNA, 22 bp, Artificial sequence
  SiRNA target sequence
gcaggatcgattctcataccca

SEQ ID NO: 200204 - DNA, 22 bp, Artificial sequence
  SiRNA target sequence
caggatcgattctcatacccat

SEQ ID NO: 200205 - DNA, 22 bp, Artificial sequence
  SiRNA target sequence
aggatcgattctcatacccatt

SEQ ID NO: 200206 - DNA, 22 bp, Artificial sequence
  SiRNA target sequence
ggatcgattctcatacccattt

SEQ ID NO: 200207 - DNA, 22 bp, Artificial sequence
  SiRNA target sequence
gatcgattctcatacccatttt

SEQ ID NO: 200208 - DNA, 22 bp, Artificial sequence
  SiRNA target sequence
atcgattctcatacccattttc

SEQ ID NO: 200209 - DNA, 22 bp, Artificial sequence
  SiRNA target sequence
tcgattctcatacccattttct

SEQ ID NO: 200210 - DNA, 22 bp, Artificial sequence
  SiRNA target sequence
cgattctcatacccattttctc

SEQ ID NO: 200211 - DNA, 22 bp, Artificial sequence
  SiRNA target sequence
gattctcatacccattttctct

SEQ ID NO: 200212 - DNA, 22 bp, Artificial sequence
  SiRNA target sequence
attctcatacccattttctctt

SEQ ID NO: 200213 - DNA, 22 bp, Artificial sequence
  SiRNA target sequence
ttctcatacccattttctcttt

SEQ ID NO: 200214 - DNA, 22 bp, Artificial sequence
  SiRNA target sequence
tctcatacccattttctcttta

SEQ ID NO: 200215 - DNA, 22 bp, Artificial sequence
  SiRNA target sequence
ctcatacccattttctctttac

SEQ ID NO: 200216 - DNA, 22 bp, Artificial sequence
  SiRNA target sequence
tcatacccattttctctttaca

SEQ ID NO: 200217 - DNA, 22 bp, Artificial sequence
  SiRNA target sequence
catacccattttctctttacaa

SEQ ID NO: 200218 - DNA, 22 bp, Artificial sequence
  SiRNA target sequence
atacccattttctctttacaaa

SEQ ID NO: 200219 - DNA, 22 bp, Artificial sequence
  SiRNA target sequence
tacccattttctctttacaaat

SEQ ID NO: 200220 - DNA, 22 bp, Artificial sequence
  SiRNA target sequence
acccattttctctttacaaata

SEQ ID NO: 200221 - DNA, 22 bp, Artificial sequence
  SiRNA target sequence
cccattttctctttacaaatat

SEQ ID NO: 200222 - DNA, 22 bp, Artificial sequence
  SiRNA target sequence
ccattttctctttacaaatatc

SEQ ID NO: 200223 - DNA, 22 bp, Artificial sequence
  SiRNA target sequence
cattttctctttacaaatatca

SEQ ID NO: 200224 - DNA, 22 bp, Artificial sequence
  SiRNA target sequence
attttctctttacaaatatcaa

SEQ ID NO: 200225 - DNA, 22 bp, Artificial sequence
  SiRNA target sequence
ttttctctttacaaatatcaaa

SEQ ID NO: 200226 - DNA, 22 bp, Artificial sequence
  SiRNA target sequence
tttctctttacaaatatcaaag

SEQ ID NO: 200227 - DNA, 22 bp, Artificial sequence
  SiRNA target sequence
ttctctttacaaatatcaaagg

SEQ ID NO: 200228 - DNA, 22 bp, Artificial sequence
  SiRNA target sequence
tctctttacaaatatcaaaggc

SEQ ID NO: 200229 - DNA, 22 bp, Artificial sequence
  SiRNA target sequence
ctctttacaaatatcaaaggct

SEQ ID NO: 200230 - DNA, 22 bp, Artificial sequence
  SiRNA target sequence
tctttacaaatatcaaaggctg

SEQ ID NO: 200231 - DNA, 22 bp, Artificial sequence
  SiRNA target sequence
ctttacaaatatcaaaggctga

SEQ ID NO: 200232 - DNA, 22 bp, Artificial sequence
  SiRNA target sequence
tttacaaatatcaaaggctgaa

SEQ ID NO: 200233 - DNA, 22 bp, Artificial sequence
  SiRNA target sequence
ttacaaatatcaaaggctgaat

SEQ ID NO: 200234 - DNA, 22 bp, Artificial sequence
  SiRNA target sequence
tacaaatatcaaaggctgaata

SEQ ID NO: 200235 - DNA, 22 bp, Artificial sequence
  SiRNA target sequence
acaaatatcaaaggctgaatat

SEQ ID NO: 200236 - DNA, 22 bp, Artificial sequence
  SiRNA target sequence
caaatatcaaaggctgaatatt

SEQ ID NO: 200237 - DNA, 22 bp, Artificial sequence
  SiRNA target sequence
aaatatcaaaggctgaatattt

SEQ ID NO: 200238 - DNA, 22 bp, Artificial sequence
  SiRNA target sequence
aatatcaaaggctgaatatttt

SEQ ID NO: 200239 - DNA, 22 bp, Artificial sequence
  SiRNA target sequence
atatcaaaggctgaatatttta

SEQ ID NO: 200240 - DNA, 22 bp, Artificial sequence
  SiRNA target sequence
tatcaaaggctgaatattttaa

SEQ ID NO: 200241 - DNA, 22 bp, Artificial sequence
  SiRNA target sequence
atcaaaggctgaatattttaat

SEQ ID NO: 200242 - DNA, 22 bp, Artificial sequence
  SiRNA target sequence
tcaaaggctgaatattttaata

SEQ ID NO: 200243 - DNA, 22 bp, Artificial sequence
  SiRNA target sequence
caaaggctgaatattttaatac

SEQ ID NO: 200244 - DNA, 22 bp, Artificial sequence
  SiRNA target sequence
aaaggctgaatattttaatact

SEQ ID NO: 200245 - DNA, 22 bp, Artificial sequence
  SiRNA target sequence
aaggctgaatattttaatactt

SEQ ID NO: 200246 - DNA, 22 bp, Artificial sequence
  SiRNA target sequence
aggctgaatattttaatacttt

SEQ ID NO: 200247 - DNA, 22 bp, Artificial sequence
  SiRNA target sequence
ggctgaatattttaatactttt

SEQ ID NO: 200248 - DNA, 22 bp, Artificial sequence
  SiRNA target sequence
gctgaatattttaatactttta

SEQ ID NO: 200249 - DNA, 22 bp, Artificial sequence
  SiRNA target sequence
ctgaatattttaatacttttat

SEQ ID NO: 200250 - DNA, 22 bp, Artificial sequence
  SiRNA target sequence
tgaatattttaatacttttatg

SEQ ID NO: 200251 - DNA, 22 bp, Artificial sequence
  SiRNA target sequence
gaatattttaatacttttatga

SEQ ID NO: 200252 - DNA, 22 bp, Artificial sequence
  SiRNA target sequence
aatattttaatacttttatgaa

SEQ ID NO: 200253 - DNA, 22 bp, Artificial sequence
  SiRNA target sequence
atattttaatacttttatgaat

SEQ ID NO: 200254 - DNA, 22 bp, Artificial sequence
  SiRNA target sequence
tattttaatacttttatgaatg

SEQ ID NO: 200255 - DNA, 22 bp, Artificial sequence
  SiRNA target sequence
attttaatacttttatgaatgc

SEQ ID NO: 200256 - DNA, 22 bp, Artificial sequence
  SiRNA target sequence
ttttaatacttttatgaatgct

SEQ ID NO: 200257 - DNA, 22 bp, Artificial sequence
  SiRNA target sequence
tttaatacttttatgaatgcta

SEQ ID NO: 200258 - DNA, 22 bp, Artificial sequence
  SiRNA target sequence
ttaatacttttatgaatgctaa

SEQ ID NO: 200259 - DNA, 22 bp, Artificial sequence
  SiRNA target sequence
taatacttttatgaatgctaaa

SEQ ID NO: 200260 - DNA, 22 bp, Artificial sequence
  SiRNA target sequence
aatacttttatgaatgctaaaa

SEQ ID NO: 200261 - DNA, 22 bp, Artificial sequence
  SiRNA target sequence
atacttttatgaatgctaaaaa

SEQ ID NO: 200262 - DNA, 22 bp, Artificial sequence
  SiRNA target sequence
tacttttatgaatgctaaaaag

SEQ ID NO: 200263 - DNA, 22 bp, Artificial sequence
  SiRNA target sequence
acttttatgaatgctaaaaaga

SEQ ID NO: 200264 - DNA, 22 bp, Artificial sequence
  SiRNA target sequence
cttttatgaatgctaaaaagaa

SEQ ID NO: 200265 - DNA, 22 bp, Artificial sequence
  SiRNA target sequence
ttttatgaatgctaaaaagaac

SEQ ID NO: 200266 - DNA, 22 bp, Artificial sequence
  SiRNA target sequence
tttatgaatgctaaaaagaaca

SEQ ID NO: 200267 - DNA, 22 bp, Artificial sequence
  SiRNA target sequence
ttatgaatgctaaaaagaacat

SEQ ID NO: 200268 - DNA, 22 bp, Artificial sequence
  SiRNA target sequence
tatgaatgctaaaaagaacatt

SEQ ID NO: 200269 - DNA, 22 bp, Artificial sequence
  SiRNA target sequence
atgaatgctaaaaagaacattc

SEQ ID NO: 200270 - DNA, 22 bp, Artificial sequence
  SiRNA target sequence
tgaatgctaaaaagaacattcc

SEQ ID NO: 200271 - DNA, 22 bp, Artificial sequence
  SiRNA target sequence
gaatgctaaaaagaacattcca

SEQ ID NO: 200272 - DNA, 22 bp, Artificial sequence
  SiRNA target sequence
aatgctaaaaagaacattccac

SEQ ID NO: 200273 - DNA, 22 bp, Artificial sequence
  SiRNA target sequence
atgctaaaaagaacattccact

SEQ ID NO: 200274 - DNA, 22 bp, Artificial sequence
  SiRNA target sequence
tgctaaaaagaacattccactg

SEQ ID NO: 200275 - DNA, 22 bp, Artificial sequence
  SiRNA target sequence
gctaaaaagaacattccactgt

SEQ ID NO: 200276 - DNA, 22 bp, Artificial sequence
  SiRNA target sequence
ctaaaaagaacattccactgta

SEQ ID NO: 200277 - DNA, 22 bp, Artificial sequence
  SiRNA target sequence
taaaaagaacattccactgtaa

SEQ ID NO: 200278 - DNA, 22 bp, Artificial sequence
  SiRNA target sequence
aaaaagaacattccactgtaat

SEQ ID NO: 200279 - DNA, 22 bp, Artificial sequence
  SiRNA target sequence
aaaagaacattccactgtaatt

SEQ ID NO: 200280 - DNA, 22 bp, Artificial sequence
  SiRNA target sequence
aaagaacattccactgtaattt

SEQ ID NO: 200281 - DNA, 22 bp, Artificial sequence
  SiRNA target sequence
aagaacattccactgtaatttt

SEQ ID NO: 200282 - DNA, 22 bp, Artificial sequence
  SiRNA target sequence
agaacattccactgtaattttc

SEQ ID NO: 200283 - DNA, 22 bp, Artificial sequence
  SiRNA target sequence
gaacattccactgtaattttcg

SEQ ID NO: 200284 - DNA, 22 bp, Artificial sequence
  SiRNA target sequence
aacattccactgtaattttcga

SEQ ID NO: 200285 - DNA, 22 bp, Artificial sequence
  SiRNA target sequence
acattccactgtaattttcgat

SEQ ID NO: 200286 - DNA, 22 bp, Artificial sequence
  SiRNA target sequence
cattccactgtaattttcgatc

SEQ ID NO: 200287 - DNA, 22 bp, Artificial sequence
  SiRNA target sequence
attccactgtaattttcgatcg

SEQ ID NO: 200288 - DNA, 22 bp, Artificial sequence
  SiRNA target sequence
ttccactgtaattttcgatcgt

SEQ ID NO: 200289 - DNA, 22 bp, Artificial sequence
  SiRNA target sequence
tccactgtaattttcgatcgta

SEQ ID NO: 200290 - DNA, 22 bp, Artificial sequence
  SiRNA target sequence
ccactgtaattttcgatcgtat

SEQ ID NO: 200291 - DNA, 22 bp, Artificial sequence
  SiRNA target sequence
cactgtaattttcgatcgtata

SEQ ID NO: 200292 - DNA, 22 bp, Artificial sequence
  SiRNA target sequence
actgtaattttcgatcgtataa

SEQ ID NO: 200293 - DNA, 22 bp, Artificial sequence
  SiRNA target sequence
ctgtaattttcgatcgtataaa

SEQ ID NO: 200294 - DNA, 22 bp, Artificial sequence
  SiRNA target sequence
tgtaattttcgatcgtataaat

SEQ ID NO: 200295 - DNA, 22 bp, Artificial sequence
  SiRNA target sequence
gtaattttcgatcgtataaatg

SEQ ID NO: 200296 - DNA, 22 bp, Artificial sequence
  SiRNA target sequence
taattttcgatcgtataaatgt

SEQ ID NO: 200297 - DNA, 22 bp, Artificial sequence
  SiRNA target sequence
aattttcgatcgtataaatgta

SEQ ID NO: 200298 - DNA, 22 bp, Artificial sequence
  SiRNA target sequence
attttcgatcgtataaatgtac

SEQ ID NO: 200299 - DNA, 22 bp, Artificial sequence
  SiRNA target sequence
ttttcgatcgtataaatgtacg

SEQ ID NO: 200300 - DNA, 22 bp, Artificial sequence
  SiRNA target sequence
tttcgatcgtataaatgtacga

SEQ ID NO: 200301 - DNA, 22 bp, Artificial sequence
  SiRNA target sequence
ttcgatcgtataaatgtacgac

SEQ ID NO: 200302 - DNA, 22 bp, Artificial sequence
  SiRNA target sequence
tcgatcgtataaatgtacgaca

SEQ ID NO: 200303 - DNA, 22 bp, Artificial sequence
  SiRNA target sequence
cgatcgtataaatgtacgacat

SEQ ID NO: 200304 - DNA, 22 bp, Artificial sequence
  SiRNA target sequence
gatcgtataaatgtacgacatt

SEQ ID NO: 200305 - DNA, 22 bp, Artificial sequence
  SiRNA target sequence
atcgtataaatgtacgacattt

SEQ ID NO: 200306 - DNA, 22 bp, Artificial sequence
  SiRNA target sequence
tcgtataaatgtacgacatttt

SEQ ID NO: 200307 - DNA, 22 bp, Artificial sequence
  SiRNA target sequence
cgtataaatgtacgacattttt

SEQ ID NO: 200308 - DNA, 22 bp, Artificial sequence
  SiRNA target sequence
gtataaatgtacgacatttttt

SEQ ID NO: 200309 - DNA, 22 bp, Artificial sequence
  SiRNA target sequence
tataaatgtacgacattttttt

SEQ ID NO: 200310 - DNA, 22 bp, Artificial sequence
  SiRNA target sequence
ataaatgtacgacattttttta

SEQ ID NO: 200311 - DNA, 22 bp, Artificial sequence
  SiRNA target sequence
taaatgtacgacatttttttaa

SEQ ID NO: 200312 - DNA, 22 bp, Artificial sequence
  SiRNA target sequence
aaatgtacgacatttttttaaa

SEQ ID NO: 200313 - DNA, 22 bp, Artificial sequence
  SiRNA target sequence
aatgtacgacatttttttaaaa

SEQ ID NO: 200314 - DNA, 22 bp, Artificial sequence
  SiRNA target sequence
atgtacgacatttttttaaaaa

SEQ ID NO: 200315 - DNA, 22 bp, Artificial sequence
  SiRNA target sequence
tgtacgacatttttttaaaaaa

SEQ ID NO: 200316 - DNA, 22 bp, Artificial sequence
  SiRNA target sequence
gtacgacatttttttaaaaaat

SEQ ID NO: 200317 - DNA, 22 bp, Artificial sequence
  SiRNA target sequence
tacgacatttttttaaaaaata

SEQ ID NO: 200318 - DNA, 22 bp, Artificial sequence
  SiRNA target sequence
acgacatttttttaaaaaatac

SEQ ID NO: 200319 - DNA, 22 bp, Artificial sequence
  SiRNA target sequence
cgacatttttttaaaaaataca

SEQ ID NO: 200320 - DNA, 22 bp, Artificial sequence
  SiRNA target sequence
gacatttttttaaaaaatacag

SEQ ID NO: 200321 - DNA, 22 bp, Artificial sequence
  SiRNA target sequence
acatttttttaaaaaatacaga

SEQ ID NO: 200322 - DNA, 22 bp, Artificial sequence
  SiRNA target sequence
catttttttaaaaaatacagaa

SEQ ID NO: 200323 - DNA, 22 bp, Artificial sequence
  SiRNA target sequence
atttttttaaaaaatacagaaa

SEQ ID NO: 200324 - DNA, 22 bp, Artificial sequence
  SiRNA target sequence
tttttttaaaaaatacagaaat

SEQ ID NO: 200325 - DNA, 22 bp, Artificial sequence
  SiRNA target sequence
ttttttaaaaaatacagaaatc

SEQ ID NO: 200326 - DNA, 22 bp, Artificial sequence
  SiRNA target sequence
tttttaaaaaatacagaaatcc

SEQ ID NO: 200327 - DNA, 22 bp, Artificial sequence
  SiRNA target sequence
ttttaaaaaatacagaaatcca

SEQ ID NO: 200328 - DNA, 22 bp, Artificial sequence
  SiRNA target sequence
tttaaaaaatacagaaatccat

SEQ ID NO: 200329 - DNA, 22 bp, Artificial sequence
  SiRNA target sequence
ttaaaaaatacagaaatccatg

SEQ ID NO: 200330 - DNA, 22 bp, Artificial sequence
  SiRNA target sequence
taaaaaatacagaaatccatga

SEQ ID NO: 200331 - DNA, 22 bp, Artificial sequence
  SiRNA target sequence
aaaaaatacagaaatccatgaa

SEQ ID NO: 200332 - DNA, 22 bp, Artificial sequence
  SiRNA target sequence
aaaaatacagaaatccatgaaa

SEQ ID NO: 200333 - DNA, 22 bp, Artificial sequence
  SiRNA target sequence
aaaatacagaaatccatgaaaa

SEQ ID NO: 200334 - DNA, 22 bp, Artificial sequence
  SiRNA target sequence
aaatacagaaatccatgaaaaa

SEQ ID NO: 200335 - DNA, 22 bp, Artificial sequence
  SiRNA target sequence
aatacagaaatccatgaaaaag

SEQ ID NO: 200336 - DNA, 22 bp, Artificial sequence
  SiRNA target sequence
atacagaaatccatgaaaaagc

SEQ ID NO: 200337 - DNA, 22 bp, Artificial sequence
  SiRNA target sequence
tacagaaatccatgaaaaagca

SEQ ID NO: 200338 - DNA, 22 bp, Artificial sequence
  SiRNA target sequence
acagaaatccatgaaaaagcaa

SEQ ID NO: 200339 - DNA, 22 bp, Artificial sequence
  SiRNA target sequence
cagaaatccatgaaaaagcaag

SEQ ID NO: 200340 - DNA, 22 bp, Artificial sequence
  SiRNA target sequence
agaaatccatgaaaaagcaagt

SEQ ID NO: 200341 - DNA, 22 bp, Artificial sequence
  SiRNA target sequence
gaaatccatgaaaaagcaagtc

SEQ ID NO: 200342 - DNA, 22 bp, Artificial sequence
  SiRNA target sequence
aaatccatgaaaaagcaagtcc

SEQ ID NO: 200343 - DNA, 22 bp, Artificial sequence
  SiRNA target sequence
aatccatgaaaaagcaagtcct

SEQ ID NO: 200344 - DNA, 22 bp, Artificial sequence
  SiRNA target sequence
atccatgaaaaagcaagtcctt

SEQ ID NO: 200345 - DNA, 22 bp, Artificial sequence
  SiRNA target sequence
tccatgaaaaagcaagtccttc

SEQ ID NO: 200346 - DNA, 22 bp, Artificial sequence
  SiRNA target sequence
ccatgaaaaagcaagtccttca

SEQ ID NO: 200347 - DNA, 22 bp, Artificial sequence
  SiRNA target sequence
catgaaaaagcaagtccttcaa

SEQ ID NO: 200348 - DNA, 22 bp, Artificial sequence
  SiRNA target sequence
atgaaaaagcaagtccttcaat

SEQ ID NO: 200349 - DNA, 22 bp, Artificial sequence
  SiRNA target sequence
tgaaaaagcaagtccttcaatg

SEQ ID NO: 200350 - DNA, 22 bp, Artificial sequence
  SiRNA target sequence
gaaaaagcaagtccttcaatgg

SEQ ID NO: 200351 - DNA, 22 bp, Artificial sequence
  SiRNA target sequence
aaaaagcaagtccttcaatggc

SEQ ID NO: 200352 - DNA, 22 bp, Artificial sequence
  SiRNA target sequence
aaaagcaagtccttcaatggca

SEQ ID NO: 200353 - DNA, 22 bp, Artificial sequence
  SiRNA target sequence
aaagcaagtccttcaatggcag

SEQ ID NO: 200354 - DNA, 22 bp, Artificial sequence
  SiRNA target sequence
aagcaagtccttcaatggcaga

SEQ ID NO: 200355 - DNA, 22 bp, Artificial sequence
  SiRNA target sequence
agcaagtccttcaatggcagaa

SEQ ID NO: 200356 - DNA, 22 bp, Artificial sequence
  SiRNA target sequence
gcaagtccttcaatggcagaat

SEQ ID NO: 200357 - DNA, 22 bp, Artificial sequence
  SiRNA target sequence
caagtccttcaatggcagaatt

SEQ ID NO: 200358 - DNA, 22 bp, Artificial sequence
  SiRNA target sequence
aagtccttcaatggcagaattg

SEQ ID NO: 200359 - DNA, 22 bp, Artificial sequence
  SiRNA target sequence
agtccttcaatggcagaattgt

SEQ ID NO: 200360 - DNA, 22 bp, Artificial sequence
  SiRNA target sequence
gtccttcaatggcagaattgta

SEQ ID NO: 200361 - DNA, 22 bp, Artificial sequence
  SiRNA target sequence
tccttcaatggcagaattgtag

SEQ ID NO: 200362 - DNA, 22 bp, Artificial sequence
  SiRNA target sequence
ccttcaatggcagaattgtaga

SEQ ID NO: 200363 - DNA, 22 bp, Artificial sequence
  SiRNA target sequence
cttcaatggcagaattgtagat

SEQ ID NO: 200364 - DNA, 22 bp, Artificial sequence
  SiRNA target sequence
ttcaatggcagaattgtagatt

SEQ ID NO: 200365 - DNA, 22 bp, Artificial sequence
  SiRNA target sequence
tcaatggcagaattgtagattg

SEQ ID NO: 200366 - DNA, 22 bp, Artificial sequence
  SiRNA target sequence
caatggcagaattgtagattga

SEQ ID NO: 200367 - DNA, 22 bp, Artificial sequence
  SiRNA target sequence
aatggcagaattgtagattgat

SEQ ID NO: 200368 - DNA, 22 bp, Artificial sequence
  SiRNA target sequence
atggcagaattgtagattgatg

SEQ ID NO: 200369 - DNA, 22 bp, Artificial sequence
  SiRNA target sequence
tggcagaattgtagattgatgc

SEQ ID NO: 200370 - DNA, 22 bp, Artificial sequence
  SiRNA target sequence
ggcagaattgtagattgatgct

SEQ ID NO: 200371 - DNA, 22 bp, Artificial sequence
  SiRNA target sequence
gcagaattgtagattgatgctc

SEQ ID NO: 200372 - DNA, 22 bp, Artificial sequence
  SiRNA target sequence
cagaattgtagattgatgctcc

SEQ ID NO: 200373 - DNA, 22 bp, Artificial sequence
  SiRNA target sequence
agaattgtagattgatgctccc

SEQ ID NO: 200374 - DNA, 22 bp, Artificial sequence
  SiRNA target sequence
gaattgtagattgatgctccca

SEQ ID NO: 200375 - DNA, 22 bp, Artificial sequence
  SiRNA target sequence
aattgtagattgatgctcccat

SEQ ID NO: 200376 - DNA, 22 bp, Artificial sequence
  SiRNA target sequence
attgtagattgatgctcccata

SEQ ID NO: 200377 - DNA, 22 bp, Artificial sequence
  SiRNA target sequence
ttgtagattgatgctcccataa

SEQ ID NO: 200378 - DNA, 22 bp, Artificial sequence
  SiRNA target sequence
tgtagattgatgctcccataac

SEQ ID NO: 200379 - DNA, 22 bp, Artificial sequence
  SiRNA target sequence
gtagattgatgctcccataacg

SEQ ID NO: 200380 - DNA, 22 bp, Artificial sequence
  SiRNA target sequence
tagattgatgctcccataacga

SEQ ID NO: 200381 - DNA, 22 bp, Artificial sequence
  SiRNA target sequence
agattgatgctcccataacgat

SEQ ID NO: 200382 - DNA, 22 bp, Artificial sequence
  SiRNA target sequence
gattgatgctcccataacgatt

SEQ ID NO: 200383 - DNA, 22 bp, Artificial sequence
  SiRNA target sequence
attgatgctcccataacgatta

SEQ ID NO: 200384 - DNA, 22 bp, Artificial sequence
  SiRNA target sequence
ttgatgctcccataacgattat

SEQ ID NO: 200385 - DNA, 22 bp, Artificial sequence
  SiRNA target sequence
tgatgctcccataacgattatt

SEQ ID NO: 200386 - DNA, 22 bp, Artificial sequence
  SiRNA target sequence
gatgctcccataacgattattg

SEQ ID NO: 200387 - DNA, 22 bp, Artificial sequence
  SiRNA target sequence
atgctcccataacgattattga

SEQ ID NO: 200388 - DNA, 22 bp, Artificial sequence
  SiRNA target sequence
tgctcccataacgattattgac

SEQ ID NO: 200389 - DNA, 22 bp, Artificial sequence
  SiRNA target sequence
gctcccataacgattattgacc

SEQ ID NO: 200390 - DNA, 22 bp, Artificial sequence
  SiRNA target sequence
ctcccataacgattattgaccc

SEQ ID NO: 200391 - DNA, 22 bp, Artificial sequence
  SiRNA target sequence
tcccataacgattattgacccc

SEQ ID NO: 200392 - DNA, 22 bp, Artificial sequence
  SiRNA target sequence
cccataacgattattgacccca

SEQ ID NO: 200393 - DNA, 22 bp, Artificial sequence
  SiRNA target sequence
ccataacgattattgaccccaa

SEQ ID NO: 200394 - DNA, 22 bp, Artificial sequence
  SiRNA target sequence
cataacgattattgaccccaac

SEQ ID NO: 200395 - DNA, 22 bp, Artificial sequence
  SiRNA target sequence
ataacgattattgaccccaaca

SEQ ID NO: 200396 - DNA, 22 bp, Artificial sequence
  SiRNA target sequence
taacgattattgaccccaacaa

SEQ ID NO: 200397 - DNA, 22 bp, Artificial sequence
  SiRNA target sequence
aacgattattgaccccaacaac

SEQ ID NO: 200398 - DNA, 22 bp, Artificial sequence
  SiRNA target sequence
acgattattgaccccaacaaca

SEQ ID NO: 200399 - DNA, 22 bp, Artificial sequence
  SiRNA target sequence
cgattattgaccccaacaacaa

SEQ ID NO: 200400 - DNA, 22 bp, Artificial sequence
  SiRNA target sequence
gattattgaccccaacaacaag

SEQ ID NO: 200401 - DNA, 22 bp, Artificial sequence
  SiRNA target sequence
attattgaccccaacaacaaga

SEQ ID NO: 200402 - DNA, 22 bp, Artificial sequence
  SiRNA target sequence
ttattgaccccaacaacaagaa

SEQ ID NO: 200403 - DNA, 22 bp, Artificial sequence
  SiRNA target sequence
tattgaccccaacaacaagaat

SEQ ID NO: 200404 - DNA, 22 bp, Artificial sequence
  SiRNA target sequence
attgaccccaacaacaagaata

SEQ ID NO: 200405 - DNA, 22 bp, Artificial sequence
  SiRNA target sequence
ttgaccccaacaacaagaataa

SEQ ID NO: 200406 - DNA, 22 bp, Artificial sequence
  SiRNA target sequence
tgaccccaacaacaagaataaa

SEQ ID NO: 200407 - DNA, 22 bp, Artificial sequence
  SiRNA target sequence
gaccccaacaacaagaataaag

SEQ ID NO: 200408 - DNA, 22 bp, Artificial sequence
  SiRNA target sequence
accccaacaacaagaataaagg

SEQ ID NO: 200409 - DNA, 22 bp, Artificial sequence
  SiRNA target sequence
ccccaacaacaagaataaaggt

SEQ ID NO: 200410 - DNA, 22 bp, Artificial sequence
  SiRNA target sequence
cccaacaacaagaataaaggtg

SEQ ID NO: 200411 - DNA, 22 bp, Artificial sequence
  SiRNA target sequence
ccaacaacaagaataaaggtgt

SEQ ID NO: 200412 - DNA, 22 bp, Artificial sequence
  SiRNA target sequence
caacaacaagaataaaggtgtt

SEQ ID NO: 200413 - DNA, 22 bp, Artificial sequence
  SiRNA target sequence
aacaacaagaataaaggtgtta

SEQ ID NO: 200414 - DNA, 22 bp, Artificial sequence
  SiRNA target sequence
acaacaagaataaaggtgttaa

SEQ ID NO: 200415 - DNA, 22 bp, Artificial sequence
  SiRNA target sequence
caacaagaataaaggtgttaag

SEQ ID NO: 200416 - DNA, 22 bp, Artificial sequence
  SiRNA target sequence
aacaagaataaaggtgttaaga

SEQ ID NO: 200417 - DNA, 22 bp, Artificial sequence
  SiRNA target sequence
acaagaataaaggtgttaagag

SEQ ID NO: 200418 - DNA, 22 bp, Artificial sequence
  SiRNA target sequence
caagaataaaggtgttaagagt

SEQ ID NO: 200419 - DNA, 22 bp, Artificial sequence
  SiRNA target sequence
aagaataaaggtgttaagagtc

SEQ ID NO: 200420 - DNA, 22 bp, Artificial sequence
  SiRNA target sequence
agaataaaggtgttaagagtcc

SEQ ID NO: 200421 - DNA, 22 bp, Artificial sequence
  SiRNA target sequence
gaataaaggtgttaagagtccc

SEQ ID NO: 200422 - DNA, 22 bp, Artificial sequence
  SiRNA target sequence
aataaaggtgttaagagtccca

SEQ ID NO: 200423 - DNA, 22 bp, Artificial sequence
  SiRNA target sequence
ataaaggtgttaagagtcccat

SEQ ID NO: 200424 - DNA, 22 bp, Artificial sequence
  SiRNA target sequence
taaaggtgttaagagtcccata

SEQ ID NO: 200425 - DNA, 22 bp, Artificial sequence
  SiRNA target sequence
aaaggtgttaagagtcccatag

SEQ ID NO: 200426 - DNA, 22 bp, Artificial sequence
  SiRNA target sequence
aaggtgttaagagtcccatagt

SEQ ID NO: 200427 - DNA, 22 bp, Artificial sequence
  SiRNA target sequence
aggtgttaagagtcccatagta

SEQ ID NO: 200428 - DNA, 22 bp, Artificial sequence
  SiRNA target sequence
ggtgttaagagtcccatagtaa

SEQ ID NO: 200429 - DNA, 22 bp, Artificial sequence
  SiRNA target sequence
gtgttaagagtcccatagtaat

SEQ ID NO: 200430 - DNA, 22 bp, Artificial sequence
  SiRNA target sequence
tgttaagagtcccatagtaatc

SEQ ID NO: 200431 - DNA, 22 bp, Artificial sequence
  SiRNA target sequence
gttaagagtcccatagtaatcc

SEQ ID NO: 200432 - DNA, 22 bp, Artificial sequence
  SiRNA target sequence
ttaagagtcccatagtaatcca

SEQ ID NO: 200433 - DNA, 22 bp, Artificial sequence
  SiRNA target sequence
taagagtcccatagtaatccat

SEQ ID NO: 200434 - DNA, 22 bp, Artificial sequence
  SiRNA target sequence
aagagtcccatagtaatccatc

SEQ ID NO: 200435 - DNA, 22 bp, Artificial sequence
  SiRNA target sequence
agagtcccatagtaatccatcc

SEQ ID NO: 200436 - DNA, 22 bp, Artificial sequence
  SiRNA target sequence
gagtcccatagtaatccatcca

SEQ ID NO: 200437 - DNA, 22 bp, Artificial sequence
  SiRNA target sequence
agtcccatagtaatccatccac

SEQ ID NO: 200438 - DNA, 22 bp, Artificial sequence
  SiRNA target sequence
gtcccatagtaatccatccact

SEQ ID NO: 200439 - DNA, 22 bp, Artificial sequence
  SiRNA target sequence
tcccatagtaatccatccacta

SEQ ID NO: 200440 - DNA, 22 bp, Artificial sequence
  SiRNA target sequence
cccatagtaatccatccactac

SEQ ID NO: 200441 - DNA, 22 bp, Artificial sequence
  SiRNA target sequence
ccatagtaatccatccactact

SEQ ID NO: 200442 - DNA, 22 bp, Artificial sequence
  SiRNA target sequence
catagtaatccatccactactt

SEQ ID NO: 200443 - DNA, 22 bp, Artificial sequence
  SiRNA target sequence
atagtaatccatccactacttt

SEQ ID NO: 200444 - DNA, 22 bp, Artificial sequence
  SiRNA target sequence
tagtaatccatccactactttc

SEQ ID NO: 200445 - DNA, 22 bp, Artificial sequence
  SiRNA target sequence
agtaatccatccactactttct

SEQ ID NO: 200446 - DNA, 22 bp, Artificial sequence
  SiRNA target sequence
gtaatccatccactactttcta

SEQ ID NO: 200447 - DNA, 22 bp, Artificial sequence
  SiRNA target sequence
taatccatccactactttctac

SEQ ID NO: 200448 - DNA, 22 bp, Artificial sequence
  SiRNA target sequence
aatccatccactactttctact

SEQ ID NO: 200449 - DNA, 22 bp, Artificial sequence
  SiRNA target sequence
atccatccactactttctacta

SEQ ID NO: 200450 - DNA, 22 bp, Artificial sequence
  SiRNA target sequence
tccatccactactttctactaa

SEQ ID NO: 200451 - DNA, 22 bp, Artificial sequence
  SiRNA target sequence
ccatccactactttctactaaa

SEQ ID NO: 200452 - DNA, 22 bp, Artificial sequence
  SiRNA target sequence
catccactactttctactaaag

SEQ ID NO: 200453 - DNA, 22 bp, Artificial sequence
  SiRNA target sequence
atccactactttctactaaagt

SEQ ID NO: 200454 - DNA, 22 bp, Artificial sequence
  SiRNA target sequence
tccactactttctactaaagta

SEQ ID NO: 200455 - DNA, 22 bp, Artificial sequence
  SiRNA target sequence
ccactactttctactaaagtag

SEQ ID NO: 200456 - DNA, 22 bp, Artificial sequence
  SiRNA target sequence
cactactttctactaaagtaga

SEQ ID NO: 200457 - DNA, 22 bp, Artificial sequence
  SiRNA target sequence
actactttctactaaagtagaa

SEQ ID NO: 200458 - DNA, 22 bp, Artificial sequence
  SiRNA target sequence
ctactttctactaaagtagaaa

SEQ ID NO: 200459 - DNA, 22 bp, Artificial sequence
  SiRNA target sequence
tactttctactaaagtagaaaa

SEQ ID NO: 200460 - DNA, 22 bp, Artificial sequence
  SiRNA target sequence
actttctactaaagtagaaaat

SEQ ID NO: 200461 - DNA, 22 bp, Artificial sequence
  SiRNA target sequence
ctttctactaaagtagaaaatg

SEQ ID NO: 200462 - DNA, 22 bp, Artificial sequence
  SiRNA target sequence
tttctactaaagtagaaaatgc

SEQ ID NO: 200463 - DNA, 22 bp, Artificial sequence
  SiRNA target sequence
ttctactaaagtagaaaatgct

SEQ ID NO: 200464 - DNA, 22 bp, Artificial sequence
  SiRNA target sequence
tctactaaagtagaaaatgctg

SEQ ID NO: 200465 - DNA, 22 bp, Artificial sequence
  SiRNA target sequence
ctactaaagtagaaaatgctga

SEQ ID NO: 200466 - DNA, 22 bp, Artificial sequence
  SiRNA target sequence
tactaaagtagaaaatgctgac

SEQ ID NO: 200467 - DNA, 22 bp, Artificial sequence
  SiRNA target sequence
actaaagtagaaaatgctgaca

SEQ ID NO: 200468 - DNA, 22 bp, Artificial sequence
  SiRNA target sequence
ctaaagtagaaaatgctgacaa

SEQ ID NO: 200469 - DNA, 22 bp, Artificial sequence
  SiRNA target sequence
taaagtagaaaatgctgacaaa

SEQ ID NO: 200470 - DNA, 22 bp, Artificial sequence
  SiRNA target sequence
aaagtagaaaatgctgacaaat

SEQ ID NO: 200471 - DNA, 22 bp, Artificial sequence
  SiRNA target sequence
aagtagaaaatgctgacaaatt

SEQ ID NO: 200472 - DNA, 22 bp, Artificial sequence
  SiRNA target sequence
agtagaaaatgctgacaaatta

SEQ ID NO: 200473 - DNA, 22 bp, Artificial sequence
  SiRNA target sequence
gtagaaaatgctgacaaattaa

SEQ ID NO: 200474 - DNA, 22 bp, Artificial sequence
  SiRNA target sequence
tagaaaatgctgacaaattaag

SEQ ID NO: 200475 - DNA, 22 bp, Artificial sequence
  SiRNA target sequence
agaaaatgctgacaaattaagt

SEQ ID NO: 200476 - DNA, 22 bp, Artificial sequence
  SiRNA target sequence
gaaaatgctgacaaattaagtg

SEQ ID NO: 200477 - DNA, 22 bp, Artificial sequence
  SiRNA target sequence
aaaatgctgacaaattaagtgt

SEQ ID NO: 200478 - DNA, 22 bp, Artificial sequence
  SiRNA target sequence
aaatgctgacaaattaagtgtt

SEQ ID NO: 200479 - DNA, 22 bp, Artificial sequence
  SiRNA target sequence
aatgctgacaaattaagtgtta

SEQ ID NO: 200480 - DNA, 22 bp, Artificial sequence
  SiRNA target sequence
atgctgacaaattaagtgttat

SEQ ID NO: 200481 - DNA, 22 bp, Artificial sequence
  SiRNA target sequence
tgctgacaaattaagtgttatt

SEQ ID NO: 200482 - DNA, 22 bp, Artificial sequence
  SiRNA target sequence
gctgacaaattaagtgttatta

SEQ ID NO: 200483 - DNA, 22 bp, Artificial sequence
  SiRNA target sequence
ctgacaaattaagtgttattac

SEQ ID NO: 200484 - DNA, 22 bp, Artificial sequence
  SiRNA target sequence
tgacaaattaagtgttattaca

SEQ ID NO: 200485 - DNA, 22 bp, Artificial sequence
  SiRNA target sequence
gacaaattaagtgttattacag

SEQ ID NO: 200486 - DNA, 22 bp, Artificial sequence
  SiRNA target sequence
acaaattaagtgttattacagt

SEQ ID NO: 200487 - DNA, 22 bp, Artificial sequence
  SiRNA target sequence
caaattaagtgttattacagta

SEQ ID NO: 200488 - DNA, 22 bp, Artificial sequence
  SiRNA target sequence
aaattaagtgttattacagtaa

SEQ ID NO: 200489 - DNA, 22 bp, Artificial sequence
  SiRNA target sequence
aattaagtgttattacagtaac

SEQ ID NO: 200490 - DNA, 22 bp, Artificial sequence
  SiRNA target sequence
attaagtgttattacagtaact

SEQ ID NO: 200491 - DNA, 22 bp, Artificial sequence
  SiRNA target sequence
ttaagtgttattacagtaactg

SEQ ID NO: 200492 - DNA, 22 bp, Artificial sequence
  SiRNA target sequence
taagtgttattacagtaactgc

SEQ ID NO: 200493 - DNA, 22 bp, Artificial sequence
  SiRNA target sequence
aagtgttattacagtaactgct

SEQ ID NO: 200494 - DNA, 22 bp, Artificial sequence
  SiRNA target sequence
agtgttattacagtaactgcta

SEQ ID NO: 200495 - DNA, 22 bp, Artificial sequence
  SiRNA target sequence
gtgttattacagtaactgctac

SEQ ID NO: 200496 - DNA, 22 bp, Artificial sequence
  SiRNA target sequence
tgttattacagtaactgctacc

SEQ ID NO: 200497 - DNA, 22 bp, Artificial sequence
  SiRNA target sequence
gttattacagtaactgctacca

SEQ ID NO: 200498 - DNA, 22 bp, Artificial sequence
  SiRNA target sequence
ttattacagtaactgctaccaa

SEQ ID NO: 200499 - DNA, 22 bp, Artificial sequence
  SiRNA target sequence
tattacagtaactgctaccaat

SEQ ID NO: 200500 - DNA, 22 bp, Artificial sequence
  SiRNA target sequence
attacagtaactgctaccaata

SEQ ID NO: 200501 - DNA, 22 bp, Artificial sequence
  SiRNA target sequence
ttacagtaactgctaccaatat

SEQ ID NO: 200502 - DNA, 22 bp, Artificial sequence
  SiRNA target sequence
tacagtaactgctaccaatatt

SEQ ID NO: 200503 - DNA, 22 bp, Artificial sequence
  SiRNA target sequence
acagtaactgctaccaatattt

SEQ ID NO: 200504 - DNA, 22 bp, Artificial sequence
  SiRNA target sequence
cagtaactgctaccaatatttg

SEQ ID NO: 200505 - DNA, 22 bp, Artificial sequence
  SiRNA target sequence
agtaactgctaccaatatttga

SEQ ID NO: 200506 - DNA, 22 bp, Artificial sequence
  SiRNA target sequence
gtaactgctaccaatatttgat

SEQ ID NO: 200507 - DNA, 22 bp, Artificial sequence
  SiRNA target sequence
taactgctaccaatatttgatc

SEQ ID NO: 200508 - DNA, 22 bp, Artificial sequence
  SiRNA target sequence
aactgctaccaatatttgatct

SEQ ID NO: 200509 - DNA, 22 bp, Artificial sequence
  SiRNA target sequence
actgctaccaatatttgatcta

SEQ ID NO: 200510 - DNA, 22 bp, Artificial sequence
  SiRNA target sequence
ctgctaccaatatttgatctat

SEQ ID NO: 200511 - DNA, 22 bp, Artificial sequence
  SiRNA target sequence
tgctaccaatatttgatctatt

SEQ ID NO: 200512 - DNA, 22 bp, Artificial sequence
  SiRNA target sequence
gctaccaatatttgatctattg

SEQ ID NO: 200513 - DNA, 22 bp, Artificial sequence
  SiRNA target sequence
ctaccaatatttgatctattgt

SEQ ID NO: 200514 - DNA, 22 bp, Artificial sequence
  SiRNA target sequence
taccaatatttgatctattgta

SEQ ID NO: 200515 - DNA, 22 bp, Artificial sequence
  SiRNA target sequence
accaatatttgatctattgtat

SEQ ID NO: 200516 - DNA, 22 bp, Artificial sequence
  SiRNA target sequence
ccaatatttgatctattgtatt

SEQ ID NO: 200517 - DNA, 22 bp, Artificial sequence
  SiRNA target sequence
caatatttgatctattgtatta

SEQ ID NO: 200518 - DNA, 22 bp, Artificial sequence
  SiRNA target sequence
aatatttgatctattgtattaa

SEQ ID NO: 200519 - DNA, 22 bp, Artificial sequence
  SiRNA target sequence
atatttgatctattgtattaaa

SEQ ID NO: 200520 - DNA, 22 bp, Artificial sequence
  SiRNA target sequence
tatttgatctattgtattaaat

SEQ ID NO: 200521 - DNA, 22 bp, Artificial sequence
  SiRNA target sequence
atttgatctattgtattaaatt

SEQ ID NO: 200522 - DNA, 22 bp, Artificial sequence
  SiRNA target sequence
tttgatctattgtattaaattt

SEQ ID NO: 200523 - DNA, 22 bp, Artificial sequence
  SiRNA target sequence
ttgatctattgtattaaatttg

SEQ ID NO: 200524 - DNA, 22 bp, Artificial sequence
  SiRNA target sequence
tgatctattgtattaaatttgc

SEQ ID NO: 200525 - DNA, 22 bp, Artificial sequence
  SiRNA target sequence
gatctattgtattaaatttgcc

SEQ ID NO: 200526 - DNA, 22 bp, Artificial sequence
  SiRNA target sequence
atctattgtattaaatttgccg

SEQ ID NO: 200527 - DNA, 22 bp, Artificial sequence
  SiRNA target sequence
tctattgtattaaatttgccgg

SEQ ID NO: 200528 - DNA, 22 bp, Artificial sequence
  SiRNA target sequence
ctattgtattaaatttgccgga

SEQ ID NO: 200529 - DNA, 22 bp, Artificial sequence
  SiRNA target sequence
tattgtattaaatttgccggag

SEQ ID NO: 200530 - DNA, 22 bp, Artificial sequence
  SiRNA target sequence
attgtattaaatttgccggagt

SEQ ID NO: 200531 - DNA, 22 bp, Artificial sequence
  SiRNA target sequence
ttgtattaaatttgccggagta

SEQ ID NO: 200532 - DNA, 22 bp, Artificial sequence
  SiRNA target sequence
tgtattaaatttgccggagtat

SEQ ID NO: 200533 - DNA, 22 bp, Artificial sequence
  SiRNA target sequence
gtattaaatttgccggagtatt

SEQ ID NO: 200534 - DNA, 22 bp, Artificial sequence
  SiRNA target sequence
tattaaatttgccggagtattc

SEQ ID NO: 200535 - DNA, 22 bp, Artificial sequence
  SiRNA target sequence
attaaatttgccggagtattct

SEQ ID NO: 200536 - DNA, 22 bp, Artificial sequence
  SiRNA target sequence
ttaaatttgccggagtattctc

SEQ ID NO: 200537 - DNA, 22 bp, Artificial sequence
  SiRNA target sequence
taaatttgccggagtattctcc

SEQ ID NO: 200538 - DNA, 22 bp, Artificial sequence
  SiRNA target sequence
aaatttgccggagtattctcct

SEQ ID NO: 200539 - DNA, 22 bp, Artificial sequence
  SiRNA target sequence
aatttgccggagtattctccta

SEQ ID NO: 200540 - DNA, 22 bp, Artificial sequence
  SiRNA target sequence
atttgccggagtattctcctac

SEQ ID NO: 200541 - DNA, 22 bp, Artificial sequence
  SiRNA target sequence
tttgccggagtattctcctacc

SEQ ID NO: 200542 - DNA, 22 bp, Artificial sequence
  SiRNA target sequence
ttgccggagtattctcctacct

SEQ ID NO: 200543 - DNA, 22 bp, Artificial sequence
  SiRNA target sequence
tgccggagtattctcctacctc

SEQ ID NO: 200544 - DNA, 22 bp, Artificial sequence
  SiRNA target sequence
gccggagtattctcctacctct

SEQ ID NO: 200545 - DNA, 22 bp, Artificial sequence
  SiRNA target sequence
ccggagtattctcctacctcta

SEQ ID NO: 200546 - DNA, 22 bp, Artificial sequence
  SiRNA target sequence
cggagtattctcctacctctaa

SEQ ID NO: 200547 - DNA, 22 bp, Artificial sequence
  SiRNA target sequence
ggagtattctcctacctctaat

SEQ ID NO: 200548 - DNA, 22 bp, Artificial sequence
  SiRNA target sequence
gagtattctcctacctctaatc

SEQ ID NO: 200549 - DNA, 22 bp, Artificial sequence
  SiRNA target sequence
agtattctcctacctctaatcc

SEQ ID NO: 200550 - DNA, 22 bp, Artificial sequence
  SiRNA target sequence
gtattctcctacctctaatcct

SEQ ID NO: 200551 - DNA, 22 bp, Artificial sequence
  SiRNA target sequence
tattctcctacctctaatccta

SEQ ID NO: 200552 - DNA, 22 bp, Artificial sequence
  SiRNA target sequence
attctcctacctctaatcctaa

SEQ ID NO: 200553 - DNA, 22 bp, Artificial sequence
  SiRNA target sequence
ttctcctacctctaatcctaaa

SEQ ID NO: 200554 - DNA, 22 bp, Artificial sequence
  SiRNA target sequence
tctcctacctctaatcctaaac

SEQ ID NO: 200555 - DNA, 22 bp, Artificial sequence
  SiRNA target sequence
ctcctacctctaatcctaaact

SEQ ID NO: 200556 - DNA, 22 bp, Artificial sequence
  SiRNA target sequence
tcctacctctaatcctaaactt

SEQ ID NO: 200557 - DNA, 22 bp, Artificial sequence
  SiRNA target sequence
cctacctctaatcctaaacttt

SEQ ID NO: 200558 - DNA, 22 bp, Artificial sequence
  SiRNA target sequence
ctacctctaatcctaaactttt

SEQ ID NO: 200559 - DNA, 22 bp, Artificial sequence
  SiRNA target sequence
tacctctaatcctaaacttttt

SEQ ID NO: 200560 - DNA, 22 bp, Artificial sequence
  SiRNA target sequence
acctctaatcctaaactttttg

SEQ ID NO: 200561 - DNA, 22 bp, Artificial sequence
  SiRNA target sequence
cctctaatcctaaactttttga

SEQ ID NO: 200562 - DNA, 22 bp, Artificial sequence
  SiRNA target sequence
ctctaatcctaaactttttgac

SEQ ID NO: 200563 - DNA, 22 bp, Artificial sequence
  SiRNA target sequence
tctaatcctaaactttttgacg

SEQ ID NO: 200564 - DNA, 22 bp, Artificial sequence
  SiRNA target sequence
ctaatcctaaactttttgacgc

SEQ ID NO: 200565 - DNA, 22 bp, Artificial sequence
  SiRNA target sequence
taatcctaaactttttgacgca

SEQ ID NO: 200566 - DNA, 22 bp, Artificial sequence
  SiRNA target sequence
aatcctaaactttttgacgcag

SEQ ID NO: 200567 - DNA, 22 bp, Artificial sequence
  SiRNA target sequence
atcctaaactttttgacgcagc

SEQ ID NO: 200568 - DNA, 22 bp, Artificial sequence
  SiRNA target sequence
tcctaaactttttgacgcagct

SEQ ID NO: 200569 - DNA, 22 bp, Artificial sequence
  SiRNA target sequence
cctaaactttttgacgcagctt

SEQ ID NO: 200570 - DNA, 22 bp, Artificial sequence
  SiRNA target sequence
ctaaactttttgacgcagcttt

SEQ ID NO: 200571 - DNA, 22 bp, Artificial sequence
  SiRNA target sequence
taaactttttgacgcagcttta

SEQ ID NO: 200572 - DNA, 22 bp, Artificial sequence
  SiRNA target sequence
aaactttttgacgcagctttaa

SEQ ID NO: 200573 - DNA, 22 bp, Artificial sequence
  SiRNA target sequence
aactttttgacgcagctttaat

SEQ ID NO: 200574 - DNA, 22 bp, Artificial sequence
  SiRNA target sequence
actttttgacgcagctttaatt

SEQ ID NO: 200575 - DNA, 22 bp, Artificial sequence
  SiRNA target sequence
ctttttgacgcagctttaattc

SEQ ID NO: 200576 - DNA, 22 bp, Artificial sequence
  SiRNA target sequence
tttttgacgcagctttaattcc

SEQ ID NO: 200577 - DNA, 22 bp, Artificial sequence
  SiRNA target sequence
ttttgacgcagctttaattcct

SEQ ID NO: 200578 - DNA, 22 bp, Artificial sequence
  SiRNA target sequence
tttgacgcagctttaattcctg

SEQ ID NO: 200579 - DNA, 22 bp, Artificial sequence
  SiRNA target sequence
ttgacgcagctttaattcctgc

SEQ ID NO: 200580 - DNA, 22 bp, Artificial sequence
  SiRNA target sequence
tgacgcagctttaattcctgct

SEQ ID NO: 200581 - DNA, 22 bp, Artificial sequence
  SiRNA target sequence
gacgcagctttaattcctgctt

SEQ ID NO: 200582 - DNA, 22 bp, Artificial sequence
  SiRNA target sequence
acgcagctttaattcctgcttt

SEQ ID NO: 200583 - DNA, 22 bp, Artificial sequence
  SiRNA target sequence
cgcagctttaattcctgcttta

SEQ ID NO: 200584 - DNA, 22 bp, Artificial sequence
  SiRNA target sequence
gcagctttaattcctgctttat

SEQ ID NO: 200585 - DNA, 22 bp, Artificial sequence
  SiRNA target sequence
cagctttaattcctgctttata

SEQ ID NO: 200586 - DNA, 22 bp, Artificial sequence
  SiRNA target sequence
agctttaattcctgctttatag

SEQ ID NO: 200587 - DNA, 22 bp, Artificial sequence
  SiRNA target sequence
gctttaattcctgctttataga

SEQ ID NO: 200588 - DNA, 22 bp, Artificial sequence
  SiRNA target sequence
ctttaattcctgctttatagac

SEQ ID NO: 200589 - DNA, 22 bp, Artificial sequence
  SiRNA target sequence
tttaattcctgctttatagaca

SEQ ID NO: 200590 - DNA, 22 bp, Artificial sequence
  SiRNA target sequence
ttaattcctgctttatagacag

SEQ ID NO: 200591 - DNA, 22 bp, Artificial sequence
  SiRNA target sequence
taattcctgctttatagacaga

SEQ ID NO: 200592 - DNA, 22 bp, Artificial sequence
  SiRNA target sequence
aattcctgctttatagacagat

SEQ ID NO: 200593 - DNA, 22 bp, Artificial sequence
  SiRNA target sequence
attcctgctttatagacagatt

SEQ ID NO: 200594 - DNA, 22 bp, Artificial sequence
  SiRNA target sequence
ttcctgctttatagacagattc

SEQ ID NO: 200595 - DNA, 22 bp, Artificial sequence
  SiRNA target sequence
tcctgctttatagacagattca

SEQ ID NO: 200596 - DNA, 22 bp, Artificial sequence
  SiRNA target sequence
cctgctttatagacagattcaa

SEQ ID NO: 200597 - DNA, 22 bp, Artificial sequence
  SiRNA target sequence
ctgctttatagacagattcaat

SEQ ID NO: 200598 - DNA, 22 bp, Artificial sequence
  SiRNA target sequence
tgctttatagacagattcaatt

SEQ ID NO: 200599 - DNA, 22 bp, Artificial sequence
  SiRNA target sequence
gctttatagacagattcaatta

SEQ ID NO: 200600 - DNA, 22 bp, Artificial sequence
  SiRNA target sequence
ctttatagacagattcaattaa

SEQ ID NO: 200601 - DNA, 22 bp, Artificial sequence
  SiRNA target sequence
tttatagacagattcaattaaa

SEQ ID NO: 200602 - DNA, 22 bp, Artificial sequence
  SiRNA target sequence
ttatagacagattcaattaaat

SEQ ID NO: 200603 - DNA, 22 bp, Artificial sequence
  SiRNA target sequence
tatagacagattcaattaaatt

SEQ ID NO: 200604 - DNA, 22 bp, Artificial sequence
  SiRNA target sequence
atagacagattcaattaaatta

SEQ ID NO: 200605 - DNA, 22 bp, Artificial sequence
  SiRNA target sequence
tagacagattcaattaaattaa

SEQ ID NO: 200606 - DNA, 22 bp, Artificial sequence
  SiRNA target sequence
agacagattcaattaaattaaa

SEQ ID NO: 200607 - DNA, 22 bp, Artificial sequence
  SiRNA target sequence
gacagattcaattaaattaaat

SEQ ID NO: 200608 - DNA, 22 bp, Artificial sequence
  SiRNA target sequence
acagattcaattaaattaaatg

SEQ ID NO: 200609 - DNA, 22 bp, Artificial sequence
  SiRNA target sequence
cagattcaattaaattaaatgt

SEQ ID NO: 200610 - DNA, 22 bp, Artificial sequence
  SiRNA target sequence
agattcaattaaattaaatgtt

SEQ ID NO: 200611 - DNA, 22 bp, Artificial sequence
  SiRNA target sequence
gattcaattaaattaaatgtta

SEQ ID NO: 200612 - DNA, 22 bp, Artificial sequence
  SiRNA target sequence
attcaattaaattaaatgttat

SEQ ID NO: 200613 - DNA, 22 bp, Artificial sequence
  SiRNA target sequence
ttcaattaaattaaatgttata

SEQ ID NO: 200614 - DNA, 22 bp, Artificial sequence
  SiRNA target sequence
tcaattaaattaaatgttatat

SEQ ID NO: 200615 - DNA, 22 bp, Artificial sequence
  SiRNA target sequence
caattaaattaaatgttatatt

SEQ ID NO: 200616 - DNA, 22 bp, Artificial sequence
  SiRNA target sequence
aattaaattaaatgttatattg

SEQ ID NO: 200617 - DNA, 22 bp, Artificial sequence
  SiRNA target sequence
attaaattaaatgttatattgt

SEQ ID NO: 200618 - DNA, 22 bp, Artificial sequence
  SiRNA target sequence
ttaaattaaatgttatattgta

SEQ ID NO: 200619 - DNA, 22 bp, Artificial sequence
  SiRNA target sequence
taaattaaatgttatattgtaa

SEQ ID NO: 200620 - DNA, 22 bp, Artificial sequence
  SiRNA target sequence
aaattaaatgttatattgtaaa

SEQ ID NO: 200621 - DNA, 22 bp, Artificial sequence
  SiRNA target sequence
aattaaatgttatattgtaaaa

SEQ ID NO: 200622 - DNA, 22 bp, Artificial sequence
  SiRNA target sequence
attaaatgttatattgtaaaaa

SEQ ID NO: 200623 - DNA, 22 bp, Artificial sequence
  SiRNA target sequence
ttaaatgttatattgtaaaaaa

SEQ ID NO: 200624 - DNA, 22 bp, Artificial sequence
  SiRNA target sequence
taaatgttatattgtaaaaaaa

SEQ ID NO: 200625 - DNA, 22 bp, Artificial sequence
  SiRNA target sequence
aaatgttatattgtaaaaaaag

SEQ ID NO: 200626 - DNA, 22 bp, Artificial sequence
  SiRNA target sequence
aatgttatattgtaaaaaaaga

SEQ ID NO: 200627 - DNA, 22 bp, Artificial sequence
  SiRNA target sequence
atgttatattgtaaaaaaagac

SEQ ID NO: 200628 - DNA, 22 bp, Artificial sequence
  SiRNA target sequence
tgttatattgtaaaaaaagact

SEQ ID NO: 200629 - DNA, 22 bp, Artificial sequence
  SiRNA target sequence
gttatattgtaaaaaaagacta

SEQ ID NO: 200630 - DNA, 22 bp, Artificial sequence
  SiRNA target sequence
ttatattgtaaaaaaagactat

SEQ ID NO: 200631 - DNA, 22 bp, Artificial sequence
  SiRNA target sequence
tatattgtaaaaaaagactatt

SEQ ID NO: 200632 - DNA, 22 bp, Artificial sequence
  SiRNA target sequence
atattgtaaaaaaagactatta

SEQ ID NO: 200633 - DNA, 22 bp, Artificial sequence
  SiRNA target sequence
tattgtaaaaaaagactattat

SEQ ID NO: 200634 - DNA, 22 bp, Artificial sequence
  SiRNA target sequence
attgtaaaaaaagactattata

SEQ ID NO: 200635 - DNA, 22 bp, Artificial sequence
  SiRNA target sequence
ttgtaaaaaaagactattatac

SEQ ID NO: 200636 - DNA, 22 bp, Artificial sequence
  SiRNA target sequence
tgtaaaaaaagactattataca

SEQ ID NO: 200637 - DNA, 22 bp, Artificial sequence
  SiRNA target sequence
gtaaaaaaagactattatacaa

SEQ ID NO: 200638 - DNA, 22 bp, Artificial sequence
  SiRNA target sequence
taaaaaaagactattatacaaa

SEQ ID NO: 200639 - DNA, 22 bp, Artificial sequence
  SiRNA target sequence
aaaaaaagactattatacaaag

SEQ ID NO: 200640 - DNA, 22 bp, Artificial sequence
  SiRNA target sequence
aaaaaagactattatacaaagt

SEQ ID NO: 200641 - DNA, 22 bp, Artificial sequence
  SiRNA target sequence
aaaaagactattatacaaagtg

SEQ ID NO: 200642 - DNA, 22 bp, Artificial sequence
  SiRNA target sequence
aaaagactattatacaaagtga

SEQ ID NO: 200643 - DNA, 22 bp, Artificial sequence
  SiRNA target sequence
aaagactattatacaaagtgac

SEQ ID NO: 200644 - DNA, 22 bp, Artificial sequence
  SiRNA target sequence
aagactattatacaaagtgaca

SEQ ID NO: 200645 - DNA, 22 bp, Artificial sequence
  SiRNA target sequence
agactattatacaaagtgacat

SEQ ID NO: 200646 - DNA, 22 bp, Artificial sequence
  SiRNA target sequence
gactattatacaaagtgacatt

SEQ ID NO: 200647 - DNA, 22 bp, Artificial sequence
  SiRNA target sequence
actattatacaaagtgacatta

SEQ ID NO: 200648 - DNA, 22 bp, Artificial sequence
  SiRNA target sequence
ctattatacaaagtgacattaa

SEQ ID NO: 200649 - DNA, 22 bp, Artificial sequence
  SiRNA target sequence
tattatacaaagtgacattaat

SEQ ID NO: 200650 - DNA, 22 bp, Artificial sequence
  SiRNA target sequence
attatacaaagtgacattaata

SEQ ID NO: 200651 - DNA, 22 bp, Artificial sequence
  SiRNA target sequence
ttatacaaagtgacattaataa

SEQ ID NO: 200652 - DNA, 22 bp, Artificial sequence
  SiRNA target sequence
tatacaaagtgacattaataat

SEQ ID NO: 200653 - DNA, 22 bp, Artificial sequence
  SiRNA target sequence
atacaaagtgacattaataatt

SEQ ID NO: 200654 - DNA, 22 bp, Artificial sequence
  SiRNA target sequence
tacaaagtgacattaataattt

SEQ ID NO: 200655 - DNA, 22 bp, Artificial sequence
  SiRNA target sequence
acaaagtgacattaataatttt

SEQ ID NO: 200656 - DNA, 22 bp, Artificial sequence
  SiRNA target sequence
caaagtgacattaataattttg

SEQ ID NO: 200657 - DNA, 22 bp, Artificial sequence
  SiRNA target sequence
aaagtgacattaataattttga

SEQ ID NO: 200658 - DNA, 22 bp, Artificial sequence
  SiRNA target sequence
aagtgacattaataattttgat

SEQ ID NO: 200659 - DNA, 22 bp, Artificial sequence
  SiRNA target sequence
agtgacattaataattttgatt

SEQ ID NO: 200660 - DNA, 22 bp, Artificial sequence
  SiRNA target sequence
gtgacattaataattttgattt

SEQ ID NO: 200661 - DNA, 22 bp, Artificial sequence
  SiRNA target sequence
tgacattaataattttgatttc

SEQ ID NO: 200662 - DNA, 22 bp, Artificial sequence
  SiRNA target sequence
gacattaataattttgatttca

SEQ ID NO: 200663 - DNA, 22 bp, Artificial sequence
  SiRNA target sequence
acattaataattttgatttcat

SEQ ID NO: 200664 - DNA, 22 bp, Artificial sequence
  SiRNA target sequence
cattaataattttgatttcatc

SEQ ID NO: 200665 - DNA, 22 bp, Artificial sequence
  SiRNA target sequence
attaataattttgatttcatca

SEQ ID NO: 200666 - DNA, 22 bp, Artificial sequence
  SiRNA target sequence
ttaataattttgatttcatcat

SEQ ID NO: 200667 - DNA, 22 bp, Artificial sequence
  SiRNA target sequence
taataattttgatttcatcatt

SEQ ID NO: 200668 - DNA, 22 bp, Artificial sequence
  SiRNA target sequence
aataattttgatttcatcatta

SEQ ID NO: 200669 - DNA, 22 bp, Artificial sequence
  SiRNA target sequence
ataattttgatttcatcattat

SEQ ID NO: 200670 - DNA, 22 bp, Artificial sequence
  SiRNA target sequence
taattttgatttcatcattata

SEQ ID NO: 200671 - DNA, 22 bp, Artificial sequence
  SiRNA target sequence
aattttgatttcatcattatac

SEQ ID NO: 200672 - DNA, 22 bp, Artificial sequence
  SiRNA target sequence
attttgatttcatcattatact

SEQ ID NO: 200673 - DNA, 22 bp, Artificial sequence
  SiRNA target sequence
ttttgatttcatcattatacta

SEQ ID NO: 200674 - DNA, 22 bp, Artificial sequence
  SiRNA target sequence
tttgatttcatcattatactaa

SEQ ID NO: 200675 - DNA, 22 bp, Artificial sequence
  SiRNA target sequence
ttgatttcatcattatactaat

SEQ ID NO: 200676 - DNA, 22 bp, Artificial sequence
  SiRNA target sequence
tgatttcatcattatactaata

SEQ ID NO: 200677 - DNA, 22 bp, Artificial sequence
  SiRNA target sequence
gatttcatcattatactaatac

SEQ ID NO: 200678 - DNA, 22 bp, Artificial sequence
  SiRNA target sequence
atttcatcattatactaatacc

SEQ ID NO: 200679 - DNA, 22 bp, Artificial sequence
  SiRNA target sequence
tttcatcattatactaatacct

SEQ ID NO: 200680 - DNA, 22 bp, Artificial sequence
  SiRNA target sequence
ttcatcattatactaatacctt

SEQ ID NO: 200681 - DNA, 22 bp, Artificial sequence
  SiRNA target sequence
tcatcattatactaataccttc

SEQ ID NO: 200682 - DNA, 22 bp, Artificial sequence
  SiRNA target sequence
catcattatactaataccttcg

SEQ ID NO: 200683 - DNA, 22 bp, Artificial sequence
  SiRNA target sequence
atcattatactaataccttcgg

SEQ ID NO: 200684 - DNA, 22 bp, Artificial sequence
  SiRNA target sequence
tcattatactaataccttcgga

SEQ ID NO: 200685 - DNA, 22 bp, Artificial sequence
  SiRNA target sequence
cattatactaataccttcggag

SEQ ID NO: 200686 - DNA, 22 bp, Artificial sequence
  SiRNA target sequence
attatactaataccttcggaga

SEQ ID NO: 200687 - DNA, 22 bp, Artificial sequence
  SiRNA target sequence
ttatactaataccttcggagaa

SEQ ID NO: 200688 - DNA, 22 bp, Artificial sequence
  SiRNA target sequence
tatactaataccttcggagaaa

SEQ ID NO: 200689 - DNA, 22 bp, Artificial sequence
  SiRNA target sequence
atactaataccttcggagaaac

SEQ ID NO: 200690 - DNA, 22 bp, Artificial sequence
  SiRNA target sequence
tactaataccttcggagaaacc

SEQ ID NO: 200691 - DNA, 22 bp, Artificial sequence
  SiRNA target sequence
actaataccttcggagaaacct

SEQ ID NO: 200692 - DNA, 22 bp, Artificial sequence
  SiRNA target sequence
ctaataccttcggagaaaccta

SEQ ID NO: 200693 - DNA, 22 bp, Artificial sequence
  SiRNA target sequence
taataccttcggagaaacctac

SEQ ID NO: 200694 - DNA, 22 bp, Artificial sequence
  SiRNA target sequence
aataccttcggagaaacctaca

SEQ ID NO: 200695 - DNA, 22 bp, Artificial sequence
  SiRNA target sequence
ataccttcggagaaacctacac

SEQ ID NO: 200696 - DNA, 22 bp, Artificial sequence
  SiRNA target sequence
taccttcggagaaacctacact

SEQ ID NO: 200697 - DNA, 22 bp, Artificial sequence
  SiRNA target sequence
accttcggagaaacctacacta

SEQ ID NO: 200698 - DNA, 22 bp, Artificial sequence
  SiRNA target sequence
ccttcggagaaacctacactaa

SEQ ID NO: 200699 - DNA, 22 bp, Artificial sequence
  SiRNA target sequence
cttcggagaaacctacactaac

SEQ ID NO: 200700 - DNA, 22 bp, Artificial sequence
  SiRNA target sequence
ttcggagaaacctacactaact

SEQ ID NO: 200701 - DNA, 22 bp, Artificial sequence
  SiRNA target sequence
tcggagaaacctacactaactt

SEQ ID NO: 200702 - DNA, 22 bp, Artificial sequence
  SiRNA target sequence
cggagaaacctacactaacttt

SEQ ID NO: 200703 - DNA, 22 bp, Artificial sequence
  SiRNA target sequence
ggagaaacctacactaactttt

SEQ ID NO: 200704 - DNA, 22 bp, Artificial sequence
  SiRNA target sequence
gagaaacctacactaacttttt

SEQ ID NO: 200705 - DNA, 22 bp, Artificial sequence
  SiRNA target sequence
agaaacctacactaactttttg

SEQ ID NO: 200706 - DNA, 22 bp, Artificial sequence
  SiRNA target sequence
gaaacctacactaactttttgt

SEQ ID NO: 200707 - DNA, 22 bp, Artificial sequence
  SiRNA target sequence
aaacctacactaactttttgtt

SEQ ID NO: 200708 - DNA, 22 bp, Artificial sequence
  SiRNA target sequence
aacctacactaactttttgttt

SEQ ID NO: 200709 - DNA, 22 bp, Artificial sequence
  SiRNA target sequence
acctacactaactttttgtttc

SEQ ID NO: 200710 - DNA, 22 bp, Artificial sequence
  SiRNA target sequence
cctacactaactttttgtttct

SEQ ID NO: 200711 - DNA, 22 bp, Artificial sequence
  SiRNA target sequence
ctacactaactttttgtttctt

SEQ ID NO: 200712 - DNA, 22 bp, Artificial sequence
  SiRNA target sequence
tacactaactttttgtttcttt

SEQ ID NO: 200713 - DNA, 22 bp, Artificial sequence
  SiRNA target sequence
acactaactttttgtttctttt

SEQ ID NO: 200714 - DNA, 22 bp, Artificial sequence
  SiRNA target sequence
cactaactttttgtttcttttt

SEQ ID NO: 200715 - DNA, 22 bp, Artificial sequence
  SiRNA target sequence
actaactttttgtttctttttt

SEQ ID NO: 200716 - DNA, 22 bp, Artificial sequence
  SiRNA target sequence
ctaactttttgtttctttttta

SEQ ID NO: 200717 - DNA, 22 bp, Artificial sequence
  SiRNA target sequence
taactttttgtttcttttttat

SEQ ID NO: 200718 - DNA, 22 bp, Artificial sequence
  SiRNA target sequence
aactttttgtttcttttttatc

SEQ ID NO: 200719 - DNA, 22 bp, Artificial sequence
  SiRNA target sequence
actttttgtttcttttttatcg

SEQ ID NO: 200720 - DNA, 22 bp, Artificial sequence
  SiRNA target sequence
ctttttgtttcttttttatcgt

SEQ ID NO: 200721 - DNA, 22 bp, Artificial sequence
  SiRNA target sequence
tttttgtttcttttttatcgta

SEQ ID NO: 200722 - DNA, 22 bp, Artificial sequence
  SiRNA target sequence
ttttgtttcttttttatcgtat

SEQ ID NO: 200723 - DNA, 22 bp, Artificial sequence
  SiRNA target sequence
tttgtttcttttttatcgtatt

SEQ ID NO: 200724 - DNA, 22 bp, Artificial sequence
  SiRNA target sequence
ttgtttcttttttatcgtatta

SEQ ID NO: 200725 - DNA, 22 bp, Artificial sequence
  SiRNA target sequence
tgtttcttttttatcgtattag

SEQ ID NO: 200726 - DNA, 22 bp, Artificial sequence
  SiRNA target sequence
gtttcttttttatcgtattaga

SEQ ID NO: 200727 - DNA, 22 bp, Artificial sequence
  SiRNA target sequence
tttcttttttatcgtattagaa

SEQ ID NO: 200728 - DNA, 22 bp, Artificial sequence
  SiRNA target sequence
ttcttttttatcgtattagaag

SEQ ID NO: 200729 - DNA, 22 bp, Artificial sequence
  SiRNA target sequence
tcttttttatcgtattagaagg

SEQ ID NO: 200730 - DNA, 22 bp, Artificial sequence
  SiRNA target sequence
cttttttatcgtattagaaggt

SEQ ID NO: 200731 - DNA, 22 bp, Artificial sequence
  SiRNA target sequence
ttttttatcgtattagaaggta

SEQ ID NO: 200732 - DNA, 22 bp, Artificial sequence
  SiRNA target sequence
tttttatcgtattagaaggtat

SEQ ID NO: 200733 - DNA, 22 bp, Artificial sequence
  SiRNA target sequence
ttttatcgtattagaaggtata

SEQ ID NO: 200734 - DNA, 22 bp, Artificial sequence
  SiRNA target sequence
tttatcgtattagaaggtataa

SEQ ID NO: 200735 - DNA, 22 bp, Artificial sequence
  SiRNA target sequence
ttatcgtattagaaggtataaa

SEQ ID NO: 200736 - DNA, 22 bp, Artificial sequence
  SiRNA target sequence
tatcgtattagaaggtataaat

SEQ ID NO: 200737 - DNA, 22 bp, Artificial sequence
  SiRNA target sequence
atcgtattagaaggtataaata

SEQ ID NO: 200738 - DNA, 22 bp, Artificial sequence
  SiRNA target sequence
tcgtattagaaggtataaatat

SEQ ID NO: 200739 - DNA, 22 bp, Artificial sequence
  SiRNA target sequence
cgtattagaaggtataaatatt

SEQ ID NO: 200740 - DNA, 22 bp, Artificial sequence
  SiRNA target sequence
gtattagaaggtataaatattg

SEQ ID NO: 200741 - DNA, 22 bp, Artificial sequence
  SiRNA target sequence
tattagaaggtataaatattgg

SEQ ID NO: 200742 - DNA, 22 bp, Artificial sequence
  SiRNA target sequence
attagaaggtataaatattggt

SEQ ID NO: 200743 - DNA, 22 bp, Artificial sequence
  SiRNA target sequence
ttagaaggtataaatattggta

SEQ ID NO: 200744 - DNA, 22 bp, Artificial sequence
  SiRNA target sequence
tagaaggtataaatattggtac

SEQ ID NO: 200745 - DNA, 22 bp, Artificial sequence
  SiRNA target sequence
agaaggtataaatattggtaca

SEQ ID NO: 200746 - DNA, 22 bp, Artificial sequence
  SiRNA target sequence
gaaggtataaatattggtacac

SEQ ID NO: 200747 - DNA, 22 bp, Artificial sequence
  SiRNA target sequence
aaggtataaatattggtacact

SEQ ID NO: 200748 - DNA, 22 bp, Artificial sequence
  SiRNA target sequence
aggtataaatattggtacactc

SEQ ID NO: 200749 - DNA, 22 bp, Artificial sequence
  SiRNA target sequence
ggtataaatattggtacactca

SEQ ID NO: 200750 - DNA, 22 bp, Artificial sequence
  SiRNA target sequence
gtataaatattggtacactcat

SEQ ID NO: 200751 - DNA, 22 bp, Artificial sequence
  SiRNA target sequence
tataaatattggtacactcatt

SEQ ID NO: 200752 - DNA, 22 bp, Artificial sequence
  SiRNA target sequence
ataaatattggtacactcatta

SEQ ID NO: 200753 - DNA, 22 bp, Artificial sequence
  SiRNA target sequence
taaatattggtacactcattat

SEQ ID NO: 200754 - DNA, 22 bp, Artificial sequence
  SiRNA target sequence
aaatattggtacactcattatt

SEQ ID NO: 200755 - DNA, 22 bp, Artificial sequence
  SiRNA target sequence
aatattggtacactcattattt

SEQ ID NO: 200756 - DNA, 22 bp, Artificial sequence
  SiRNA target sequence
atattggtacactcattatttt

SEQ ID NO: 200757 - DNA, 22 bp, Artificial sequence
  SiRNA target sequence
tattggtacactcattatttta

SEQ ID NO: 200758 - DNA, 22 bp, Artificial sequence
  SiRNA target sequence
attggtacactcattattttat

SEQ ID NO: 200759 - DNA, 22 bp, Artificial sequence
  SiRNA target sequence
ttggtacactcattattttatt

SEQ ID NO: 200760 - DNA, 22 bp, Artificial sequence
  SiRNA target sequence
tggtacactcattattttattc

SEQ ID NO: 200761 - DNA, 22 bp, Artificial sequence
  SiRNA target sequence
ggtacactcattattttattct

SEQ ID NO: 200762 - DNA, 22 bp, Artificial sequence
  SiRNA target sequence
gtacactcattattttattctc

SEQ ID NO: 200763 - DNA, 22 bp, Artificial sequence
  SiRNA target sequence
tacactcattattttattctcg

SEQ ID NO: 200764 - DNA, 22 bp, Artificial sequence
  SiRNA target sequence
acactcattattttattctcga

SEQ ID NO: 200765 - DNA, 22 bp, Artificial sequence
  SiRNA target sequence
cactcattattttattctcgaa

SEQ ID NO: 200766 - DNA, 22 bp, Artificial sequence
  SiRNA target sequence
actcattattttattctcgaaa

SEQ ID NO: 200767 - DNA, 22 bp, Artificial sequence
  SiRNA target sequence
ctcattattttattctcgaaat

SEQ ID NO: 200768 - DNA, 22 bp, Artificial sequence
  SiRNA target sequence
tcattattttattctcgaaata

SEQ ID NO: 200769 - DNA, 22 bp, Artificial sequence
  SiRNA target sequence
cattattttattctcgaaataa

SEQ ID NO: 200770 - DNA, 22 bp, Artificial sequence
  SiRNA target sequence
attattttattctcgaaataat

SEQ ID NO: 200771 - DNA, 22 bp, Artificial sequence
  SiRNA target sequence
ttattttattctcgaaataata

SEQ ID NO: 200772 - DNA, 22 bp, Artificial sequence
  SiRNA target sequence
tattttattctcgaaataatat

SEQ ID NO: 200773 - DNA, 22 bp, Artificial sequence
  SiRNA target sequence
attttattctcgaaataatatt

SEQ ID NO: 200774 - DNA, 22 bp, Artificial sequence
  SiRNA target sequence
ttttattctcgaaataatattt

SEQ ID NO: 200775 - DNA, 22 bp, Artificial sequence
  SiRNA target sequence
tttattctcgaaataatatttc

SEQ ID NO: 200776 - DNA, 22 bp, Artificial sequence
  SiRNA target sequence
ttattctcgaaataatatttca

SEQ ID NO: 200777 - DNA, 22 bp, Artificial sequence
  SiRNA target sequence
tattctcgaaataatatttcat

SEQ ID NO: 200778 - DNA, 22 bp, Artificial sequence
  SiRNA target sequence
attctcgaaataatatttcatg

SEQ ID NO: 200779 - DNA, 22 bp, Artificial sequence
  SiRNA target sequence
ttctcgaaataatatttcatgt

SEQ ID NO: 200780 - DNA, 22 bp, Artificial sequence
  SiRNA target sequence
tctcgaaataatatttcatgta

SEQ ID NO: 200781 - DNA, 22 bp, Artificial sequence
  SiRNA target sequence
ctcgaaataatatttcatgtac

SEQ ID NO: 200782 - DNA, 22 bp, Artificial sequence
  SiRNA target sequence
tcgaaataatatttcatgtaca

SEQ ID NO: 200783 - DNA, 22 bp, Artificial sequence
  SiRNA target sequence
cgaaataatatttcatgtacat

SEQ ID NO: 200784 - DNA, 22 bp, Artificial sequence
  SiRNA target sequence
gaaataatatttcatgtacatt

SEQ ID NO: 200785 - DNA, 22 bp, Artificial sequence
  SiRNA target sequence
aaataatatttcatgtacatta

SEQ ID NO: 200786 - DNA, 22 bp, Artificial sequence
  SiRNA target sequence
aataatatttcatgtacattaa

SEQ ID NO: 200787 - DNA, 22 bp, Artificial sequence
  SiRNA target sequence
ataatatttcatgtacattaat

SEQ ID NO: 200788 - DNA, 22 bp, Artificial sequence
  SiRNA target sequence
taatatttcatgtacattaata

SEQ ID NO: 200789 - DNA, 22 bp, Artificial sequence
  SiRNA target sequence
aatatttcatgtacattaatat

SEQ ID NO: 200790 - DNA, 22 bp, Artificial sequence
  SiRNA target sequence
atatttcatgtacattaatatt

SEQ ID NO: 200791 - DNA, 22 bp, Artificial sequence
  SiRNA target sequence
tatttcatgtacattaatatta

SEQ ID NO: 200792 - DNA, 22 bp, Artificial sequence
  SiRNA target sequence
atttcatgtacattaatattag

SEQ ID NO: 200793 - DNA, 22 bp, Artificial sequence
  SiRNA target sequence
tttcatgtacattaatattaga

SEQ ID NO: 200794 - DNA, 22 bp, Artificial sequence
  SiRNA target sequence
ttcatgtacattaatattagac

SEQ ID NO: 200795 - DNA, 22 bp, Artificial sequence
  SiRNA target sequence
tcatgtacattaatattagaca

SEQ ID NO: 200796 - DNA, 22 bp, Artificial sequence
  SiRNA target sequence
catgtacattaatattagacat

SEQ ID NO: 200797 - DNA, 22 bp, Artificial sequence
  SiRNA target sequence
atgtacattaatattagacata

SEQ ID NO: 200798 - DNA, 22 bp, Artificial sequence
  SiRNA target sequence
tgtacattaatattagacatat

SEQ ID NO: 200799 - DNA, 22 bp, Artificial sequence
  SiRNA target sequence
gtacattaatattagacatata

SEQ ID NO: 200800 - DNA, 22 bp, Artificial sequence
  SiRNA target sequence
tacattaatattagacatatac

SEQ ID NO: 200801 - DNA, 22 bp, Artificial sequence
  SiRNA target sequence
acattaatattagacatatacc

SEQ ID NO: 200802 - DNA, 22 bp, Artificial sequence
  SiRNA target sequence
cattaatattagacatataccg

SEQ ID NO: 200803 - DNA, 22 bp, Artificial sequence
  SiRNA target sequence
attaatattagacatataccgc

SEQ ID NO: 200804 - DNA, 22 bp, Artificial sequence
  SiRNA target sequence
ttaatattagacatataccgcc

SEQ ID NO: 200805 - DNA, 22 bp, Artificial sequence
  SiRNA target sequence
taatattagacatataccgccc

SEQ ID NO: 200806 - DNA, 22 bp, Artificial sequence
  SiRNA target sequence
aatattagacatataccgccca

SEQ ID NO: 200807 - DNA, 22 bp, Artificial sequence
  SiRNA target sequence
atattagacatataccgcccat

SEQ ID NO: 200808 - DNA, 22 bp, Artificial sequence
  SiRNA target sequence
tattagacatataccgcccatg

SEQ ID NO: 200809 - DNA, 22 bp, Artificial sequence
  SiRNA target sequence
attagacatataccgcccatgg

SEQ ID NO: 200810 - DNA, 22 bp, Artificial sequence
  SiRNA target sequence
ttagacatataccgcccatggc

SEQ ID NO: 200811 - DNA, 22 bp, Artificial sequence
  SiRNA target sequence
tagacatataccgcccatggca

SEQ ID NO: 200812 - DNA, 22 bp, Artificial sequence
  SiRNA target sequence
agacatataccgcccatggcaa

SEQ ID NO: 200813 - DNA, 22 bp, Artificial sequence
  SiRNA target sequence
gacatataccgcccatggcaat

SEQ ID NO: 200814 - DNA, 22 bp, Artificial sequence
  SiRNA target sequence
acatataccgcccatggcaata

SEQ ID NO: 200815 - DNA, 22 bp, Artificial sequence
  SiRNA target sequence
catataccgcccatggcaataa

SEQ ID NO: 200816 - DNA, 22 bp, Artificial sequence
  SiRNA target sequence
atataccgcccatggcaataaa

SEQ ID NO: 200817 - DNA, 22 bp, Artificial sequence
  SiRNA target sequence
tataccgcccatggcaataaaa

SEQ ID NO: 200818 - DNA, 22 bp, Artificial sequence
  SiRNA target sequence
ataccgcccatggcaataaaaa

SEQ ID NO: 200819 - DNA, 22 bp, Artificial sequence
  SiRNA target sequence
taccgcccatggcaataaaaac

SEQ ID NO: 200820 - DNA, 22 bp, Artificial sequence
  SiRNA target sequence
accgcccatggcaataaaaacc

SEQ ID NO: 200821 - DNA, 22 bp, Artificial sequence
  SiRNA target sequence
ccgcccatggcaataaaaaccg

SEQ ID NO: 200822 - DNA, 22 bp, Artificial sequence
  SiRNA target sequence
cgcccatggcaataaaaaccga

SEQ ID NO: 200823 - DNA, 22 bp, Artificial sequence
  SiRNA target sequence
gcccatggcaataaaaaccgaa

SEQ ID NO: 200824 - DNA, 22 bp, Artificial sequence
  SiRNA target sequence
cccatggcaataaaaaccgaag

SEQ ID NO: 200825 - DNA, 22 bp, Artificial sequence
  SiRNA target sequence
ccatggcaataaaaaccgaaga

SEQ ID NO: 200826 - DNA, 22 bp, Artificial sequence
  SiRNA target sequence
catggcaataaaaaccgaagaa

SEQ ID NO: 200827 - DNA, 22 bp, Artificial sequence
  SiRNA target sequence
atggcaataaaaaccgaagaat

SEQ ID NO: 200828 - DNA, 22 bp, Artificial sequence
  SiRNA target sequence
tggcaataaaaaccgaagaata

SEQ ID NO: 200829 - DNA, 22 bp, Artificial sequence
  SiRNA target sequence
ggcaataaaaaccgaagaatat

SEQ ID NO: 200830 - DNA, 22 bp, Artificial sequence
  SiRNA target sequence
gcaataaaaaccgaagaatata

SEQ ID NO: 200831 - DNA, 22 bp, Artificial sequence
  SiRNA target sequence
caataaaaaccgaagaatataa

SEQ ID NO: 200832 - DNA, 22 bp, Artificial sequence
  SiRNA target sequence
aataaaaaccgaagaatataat

SEQ ID NO: 200833 - DNA, 22 bp, Artificial sequence
  SiRNA target sequence
ataaaaaccgaagaatataata

SEQ ID NO: 200834 - DNA, 22 bp, Artificial sequence
  SiRNA target sequence
taaaaaccgaagaatataataa

SEQ ID NO: 200835 - DNA, 22 bp, Artificial sequence
  SiRNA target sequence
aaaaaccgaagaatataataac

SEQ ID NO: 200836 - DNA, 22 bp, Artificial sequence
  SiRNA target sequence
aaaaccgaagaatataataact

SEQ ID NO: 200837 - DNA, 22 bp, Artificial sequence
  SiRNA target sequence
aaaccgaagaatataataactg

SEQ ID NO: 200838 - DNA, 22 bp, Artificial sequence
  SiRNA target sequence
aaccgaagaatataataactga

SEQ ID NO: 200839 - DNA, 22 bp, Artificial sequence
  SiRNA target sequence
accgaagaatataataactgat

SEQ ID NO: 200840 - DNA, 22 bp, Artificial sequence
  SiRNA target sequence
ccgaagaatataataactgatt

SEQ ID NO: 200841 - DNA, 22 bp, Artificial sequence
  SiRNA target sequence
cgaagaatataataactgattt

SEQ ID NO: 200842 - DNA, 22 bp, Artificial sequence
  SiRNA target sequence
gaagaatataataactgatttt

SEQ ID NO: 200843 - DNA, 22 bp, Artificial sequence
  SiRNA target sequence
aagaatataataactgattttg

SEQ ID NO: 200844 - DNA, 22 bp, Artificial sequence
  SiRNA target sequence
agaatataataactgattttgc

SEQ ID NO: 200845 - DNA, 22 bp, Artificial sequence
  SiRNA target sequence
gaatataataactgattttgct

SEQ ID NO: 200846 - DNA, 22 bp, Artificial sequence
  SiRNA target sequence
aatataataactgattttgctc

SEQ ID NO: 200847 - DNA, 22 bp, Artificial sequence
  SiRNA target sequence
atataataactgattttgctca

SEQ ID NO: 200848 - DNA, 22 bp, Artificial sequence
  SiRNA target sequence
tataataactgattttgctcat

SEQ ID NO: 200849 - DNA, 22 bp, Artificial sequence
  SiRNA target sequence
ataataactgattttgctcata

SEQ ID NO: 200850 - DNA, 22 bp, Artificial sequence
  SiRNA target sequence
taataactgattttgctcatag

SEQ ID NO: 200851 - DNA, 22 bp, Artificial sequence
  SiRNA target sequence
aataactgattttgctcatagc

SEQ ID NO: 200852 - DNA, 22 bp, Artificial sequence
  SiRNA target sequence
ataactgattttgctcatagct

SEQ ID NO: 200853 - DNA, 22 bp, Artificial sequence
  SiRNA target sequence
taactgattttgctcatagcta

SEQ ID NO: 200854 - DNA, 22 bp, Artificial sequence
  SiRNA target sequence
aactgattttgctcatagctaa

SEQ ID NO: 200855 - DNA, 22 bp, Artificial sequence
  SiRNA target sequence
actgattttgctcatagctaaa

SEQ ID NO: 200856 - DNA, 22 bp, Artificial sequence
  SiRNA target sequence
ctgattttgctcatagctaaat

SEQ ID NO: 200857 - DNA, 22 bp, Artificial sequence
  SiRNA target sequence
tgattttgctcatagctaaatc

SEQ ID NO: 200858 - DNA, 22 bp, Artificial sequence
  SiRNA target sequence
gattttgctcatagctaaatcc

SEQ ID NO: 200859 - DNA, 22 bp, Artificial sequence
  SiRNA target sequence
attttgctcatagctaaatcct

SEQ ID NO: 200860 - DNA, 22 bp, Artificial sequence
  SiRNA target sequence
ttttgctcatagctaaatcctt

SEQ ID NO: 200861 - DNA, 22 bp, Artificial sequence
  SiRNA target sequence
tttgctcatagctaaatccttt

SEQ ID NO: 200862 - DNA, 22 bp, Artificial sequence
  SiRNA target sequence
ttgctcatagctaaatcctttt

SEQ ID NO: 200863 - DNA, 22 bp, Artificial sequence
  SiRNA target sequence
tgctcatagctaaatccttttc

SEQ ID NO: 200864 - DNA, 22 bp, Artificial sequence
  SiRNA target sequence
gctcatagctaaatccttttcg

SEQ ID NO: 200865 - DNA, 22 bp, Artificial sequence
  SiRNA target sequence
ctcatagctaaatccttttcgc

SEQ ID NO: 200866 - DNA, 22 bp, Artificial sequence
  SiRNA target sequence
tcatagctaaatccttttcgca

SEQ ID NO: 200867 - DNA, 22 bp, Artificial sequence
  SiRNA target sequence
catagctaaatccttttcgcaa

SEQ ID NO: 200868 - DNA, 22 bp, Artificial sequence
  SiRNA target sequence
atagctaaatccttttcgcaat

SEQ ID NO: 200869 - DNA, 22 bp, Artificial sequence
  SiRNA target sequence
tagctaaatccttttcgcaatt

SEQ ID NO: 200870 - DNA, 22 bp, Artificial sequence
  SiRNA target sequence
agctaaatccttttcgcaattc

SEQ ID NO: 200871 - DNA, 22 bp, Artificial sequence
  SiRNA target sequence
gctaaatccttttcgcaattct

SEQ ID NO: 200872 - DNA, 22 bp, Artificial sequence
  SiRNA target sequence
ctaaatccttttcgcaattctc

SEQ ID NO: 200873 - DNA, 22 bp, Artificial sequence
  SiRNA target sequence
taaatccttttcgcaattctct

SEQ ID NO: 200874 - DNA, 22 bp, Artificial sequence
  SiRNA target sequence
aaatccttttcgcaattctctg

SEQ ID NO: 200875 - DNA, 22 bp, Artificial sequence
  SiRNA target sequence
aatccttttcgcaattctctga

SEQ ID NO: 200876 - DNA, 22 bp, Artificial sequence
  SiRNA target sequence
atccttttcgcaattctctgaa

SEQ ID NO: 200877 - DNA, 22 bp, Artificial sequence
  SiRNA target sequence
tccttttcgcaattctctgaaa

SEQ ID NO: 200878 - DNA, 22 bp, Artificial sequence
  SiRNA target sequence
ccttttcgcaattctctgaaag

SEQ ID NO: 200879 - DNA, 22 bp, Artificial sequence
  SiRNA target sequence
cttttcgcaattctctgaaaga

SEQ ID NO: 200880 - DNA, 22 bp, Artificial sequence
  SiRNA target sequence
ttttcgcaattctctgaaagaa

SEQ ID NO: 200881 - DNA, 22 bp, Artificial sequence
  SiRNA target sequence
tttcgcaattctctgaaagaac

SEQ ID NO: 200882 - DNA, 22 bp, Artificial sequence
  SiRNA target sequence
ttcgcaattctctgaaagaact

SEQ ID NO: 200883 - DNA, 22 bp, Artificial sequence
  SiRNA target sequence
tcgcaattctctgaaagaacta

SEQ ID NO: 200884 - DNA, 22 bp, Artificial sequence
  SiRNA target sequence
cgcaattctctgaaagaactac

SEQ ID NO: 200885 - DNA, 22 bp, Artificial sequence
  SiRNA target sequence
gcaattctctgaaagaactact

SEQ ID NO: 200886 - DNA, 22 bp, Artificial sequence
  SiRNA target sequence
caattctctgaaagaactactg

SEQ ID NO: 200887 - DNA, 22 bp, Artificial sequence
  SiRNA target sequence
aattctctgaaagaactactgg

SEQ ID NO: 200888 - DNA, 22 bp, Artificial sequence
  SiRNA target sequence
attctctgaaagaactactggc

SEQ ID NO: 200889 - DNA, 22 bp, Artificial sequence
  SiRNA target sequence
ttctctgaaagaactactggct

SEQ ID NO: 200890 - DNA, 22 bp, Artificial sequence
  SiRNA target sequence
tctctgaaagaactactggcta

SEQ ID NO: 200891 - DNA, 22 bp, Artificial sequence
  SiRNA target sequence
ctctgaaagaactactggctaa

SEQ ID NO: 200892 - DNA, 22 bp, Artificial sequence
  SiRNA target sequence
tctgaaagaactactggctaat

SEQ ID NO: 200893 - DNA, 22 bp, Artificial sequence
  SiRNA target sequence
ctgaaagaactactggctaatc

SEQ ID NO: 200894 - DNA, 22 bp, Artificial sequence
  SiRNA target sequence
tgaaagaactactggctaatcc

SEQ ID NO: 200895 - DNA, 22 bp, Artificial sequence
  SiRNA target sequence
gaaagaactactggctaatcca

SEQ ID NO: 200896 - DNA, 22 bp, Artificial sequence
  SiRNA target sequence
aaagaactactggctaatccag

SEQ ID NO: 200897 - DNA, 22 bp, Artificial sequence
  SiRNA target sequence
aagaactactggctaatccaga

SEQ ID NO: 200898 - DNA, 22 bp, Artificial sequence
  SiRNA target sequence
agaactactggctaatccagat

SEQ ID NO: 200899 - DNA, 22 bp, Artificial sequence
  SiRNA target sequence
gaactactggctaatccagata

SEQ ID NO: 200900 - DNA, 22 bp, Artificial sequence
  SiRNA target sequence
aactactggctaatccagatac

SEQ ID NO: 200901 - DNA, 22 bp, Artificial sequence
  SiRNA target sequence
actactggctaatccagatact

SEQ ID NO: 200902 - DNA, 22 bp, Artificial sequence
  SiRNA target sequence
ctactggctaatccagatacta

SEQ ID NO: 200903 - DNA, 22 bp, Artificial sequence
  SiRNA target sequence
tactggctaatccagatactag

SEQ ID NO: 200904 - DNA, 22 bp, Artificial sequence
  SiRNA target sequence
actggctaatccagatactagt

SEQ ID NO: 200905 - DNA, 22 bp, Artificial sequence
  SiRNA target sequence
ctggctaatccagatactagta

SEQ ID NO: 200906 - DNA, 22 bp, Artificial sequence
  SiRNA target sequence
tggctaatccagatactagtaa

SEQ ID NO: 200907 - DNA, 22 bp, Artificial sequence
  SiRNA target sequence
ggctaatccagatactagtaaa

SEQ ID NO: 200908 - DNA, 22 bp, Artificial sequence
  SiRNA target sequence
gctaatccagatactagtaaag

SEQ ID NO: 200909 - DNA, 22 bp, Artificial sequence
  SiRNA target sequence
ctaatccagatactagtaaagc

SEQ ID NO: 200910 - DNA, 22 bp, Artificial sequence
  SiRNA target sequence
taatccagatactagtaaagct

SEQ ID NO: 200911 - DNA, 22 bp, Artificial sequence
  SiRNA target sequence
aatccagatactagtaaagcta

SEQ ID NO: 200912 - DNA, 22 bp, Artificial sequence
  SiRNA target sequence
atccagatactagtaaagctaa

SEQ ID NO: 200913 - DNA, 22 bp, Artificial sequence
  SiRNA target sequence
tccagatactagtaaagctaaa

SEQ ID NO: 200914 - DNA, 22 bp, Artificial sequence
  SiRNA target sequence
ccagatactagtaaagctaaat

SEQ ID NO: 200915 - DNA, 22 bp, Artificial sequence
  SiRNA target sequence
cagatactagtaaagctaaatt

SEQ ID NO: 200916 - DNA, 22 bp, Artificial sequence
  SiRNA target sequence
agatactagtaaagctaaattt

SEQ ID NO: 200917 - DNA, 22 bp, Artificial sequence
  SiRNA target sequence
gatactagtaaagctaaatttg

SEQ ID NO: 200918 - DNA, 22 bp, Artificial sequence
  SiRNA target sequence
atactagtaaagctaaatttgc

SEQ ID NO: 200919 - DNA, 22 bp, Artificial sequence
  SiRNA target sequence
tactagtaaagctaaatttgct

SEQ ID NO: 200920 - DNA, 22 bp, Artificial sequence
  SiRNA target sequence
actagtaaagctaaatttgcta

SEQ ID NO: 200921 - DNA, 22 bp, Artificial sequence
  SiRNA target sequence
ctagtaaagctaaatttgctat

SEQ ID NO: 200922 - DNA, 22 bp, Artificial sequence
  SiRNA target sequence
tagtaaagctaaatttgctatt

SEQ ID NO: 200923 - DNA, 22 bp, Artificial sequence
  SiRNA target sequence
agtaaagctaaatttgctatta

SEQ ID NO: 200924 - DNA, 22 bp, Artificial sequence
  SiRNA target sequence
gtaaagctaaatttgctattat

SEQ ID NO: 200925 - DNA, 22 bp, Artificial sequence
  SiRNA target sequence
taaagctaaatttgctattatg

SEQ ID NO: 200926 - DNA, 22 bp, Artificial sequence
  SiRNA target sequence
aaagctaaatttgctattatgt

SEQ ID NO: 200927 - DNA, 22 bp, Artificial sequence
  SiRNA target sequence
aagctaaatttgctattatgta

SEQ ID NO: 200928 - DNA, 22 bp, Artificial sequence
  SiRNA target sequence
agctaaatttgctattatgtaa

SEQ ID NO: 200929 - DNA, 22 bp, Artificial sequence
  SiRNA target sequence
gctaaatttgctattatgtaaa

SEQ ID NO: 200930 - DNA, 22 bp, Artificial sequence
  SiRNA target sequence
ctaaatttgctattatgtaaaa

SEQ ID NO: 200931 - DNA, 22 bp, Artificial sequence
  SiRNA target sequence
taaatttgctattatgtaaaaa

SEQ ID NO: 200932 - DNA, 22 bp, Artificial sequence
  SiRNA target sequence
aaatttgctattatgtaaaaag

SEQ ID NO: 200933 - DNA, 22 bp, Artificial sequence
  SiRNA target sequence
aatttgctattatgtaaaaagg

SEQ ID NO: 200934 - DNA, 22 bp, Artificial sequence
  SiRNA target sequence
atttgctattatgtaaaaaggt

SEQ ID NO: 200935 - DNA, 22 bp, Artificial sequence
  SiRNA target sequence
tttgctattatgtaaaaaggtg

SEQ ID NO: 200936 - DNA, 22 bp, Artificial sequence
  SiRNA target sequence
ttgctattatgtaaaaaggtgg

SEQ ID NO: 200937 - DNA, 22 bp, Artificial sequence
  SiRNA target sequence
tgctattatgtaaaaaggtggt

SEQ ID NO: 200938 - DNA, 22 bp, Artificial sequence
  SiRNA target sequence
gctattatgtaaaaaggtggta

SEQ ID NO: 200939 - DNA, 22 bp, Artificial sequence
  SiRNA target sequence
ctattatgtaaaaaggtggtaa

SEQ ID NO: 200940 - DNA, 22 bp, Artificial sequence
  SiRNA target sequence
tattatgtaaaaaggtggtaaa

SEQ ID NO: 200941 - DNA, 22 bp, Artificial sequence
  SiRNA target sequence
attatgtaaaaaggtggtaaaa

SEQ ID NO: 200942 - DNA, 22 bp, Artificial sequence
  SiRNA target sequence
ttatgtaaaaaggtggtaaaaa

SEQ ID NO: 200943 - DNA, 22 bp, Artificial sequence
  SiRNA target sequence
tatgtaaaaaggtggtaaaaat

SEQ ID NO: 200944 - DNA, 22 bp, Artificial sequence
  SiRNA target sequence
atgtaaaaaggtggtaaaaatc

SEQ ID NO: 200945 - DNA, 22 bp, Artificial sequence
  SiRNA target sequence
tgtaaaaaggtggtaaaaatct

SEQ ID NO: 200946 - DNA, 22 bp, Artificial sequence
  SiRNA target sequence
gtaaaaaggtggtaaaaatctt

SEQ ID NO: 200947 - DNA, 22 bp, Artificial sequence
  SiRNA target sequence
taaaaaggtggtaaaaatcttg

SEQ ID NO: 200948 - DNA, 22 bp, Artificial sequence
  SiRNA target sequence
aaaaaggtggtaaaaatcttgt

SEQ ID NO: 200949 - DNA, 22 bp, Artificial sequence
  SiRNA target sequence
aaaaggtggtaaaaatcttgta

SEQ ID NO: 200950 - DNA, 22 bp, Artificial sequence
  SiRNA target sequence
aaaggtggtaaaaatcttgtaa

SEQ ID NO: 200951 - DNA, 22 bp, Artificial sequence
  SiRNA target sequence
aaggtggtaaaaatcttgtaaa

SEQ ID NO: 200952 - DNA, 22 bp, Artificial sequence
  SiRNA target sequence
aggtggtaaaaatcttgtaaac

SEQ ID NO: 200953 - DNA, 22 bp, Artificial sequence
  SiRNA target sequence
ggtggtaaaaatcttgtaaact

SEQ ID NO: 200954 - DNA, 22 bp, Artificial sequence
  SiRNA target sequence
gtggtaaaaatcttgtaaactg

SEQ ID NO: 200955 - DNA, 22 bp, Artificial sequence
  SiRNA target sequence
tggtaaaaatcttgtaaactgt

SEQ ID NO: 200956 - DNA, 22 bp, Artificial sequence
  SiRNA target sequence
ggtaaaaatcttgtaaactgtc

SEQ ID NO: 200957 - DNA, 22 bp, Artificial sequence
  SiRNA target sequence
gtaaaaatcttgtaaactgtct

SEQ ID NO: 200958 - DNA, 22 bp, Artificial sequence
  SiRNA target sequence
taaaaatcttgtaaactgtctg

SEQ ID NO: 200959 - DNA, 22 bp, Artificial sequence
  SiRNA target sequence
aaaaatcttgtaaactgtctga

SEQ ID NO: 200960 - DNA, 22 bp, Artificial sequence
  SiRNA target sequence
aaaatcttgtaaactgtctgat

SEQ ID NO: 200961 - DNA, 22 bp, Artificial sequence
  SiRNA target sequence
aaatcttgtaaactgtctgata

SEQ ID NO: 200962 - DNA, 22 bp, Artificial sequence
  SiRNA target sequence
aatcttgtaaactgtctgatag

SEQ ID NO: 200963 - DNA, 22 bp, Artificial sequence
  SiRNA target sequence
atcttgtaaactgtctgatagt

SEQ ID NO: 200964 - DNA, 22 bp, Artificial sequence
  SiRNA target sequence
tcttgtaaactgtctgatagta

SEQ ID NO: 200965 - DNA, 22 bp, Artificial sequence
  SiRNA target sequence
cttgtaaactgtctgatagtac

SEQ ID NO: 200966 - DNA, 22 bp, Artificial sequence
  SiRNA target sequence
ttgtaaactgtctgatagtaca

SEQ ID NO: 200967 - DNA, 22 bp, Artificial sequence
  SiRNA target sequence
tgtaaactgtctgatagtacaa

SEQ ID NO: 200968 - DNA, 22 bp, Artificial sequence
  SiRNA target sequence
gtaaactgtctgatagtacaac

SEQ ID NO: 200969 - DNA, 22 bp, Artificial sequence
  SiRNA target sequence
taaactgtctgatagtacaact

SEQ ID NO: 200970 - DNA, 22 bp, Artificial sequence
  SiRNA target sequence
aaactgtctgatagtacaactt

SEQ ID NO: 200971 - DNA, 22 bp, Artificial sequence
  SiRNA target sequence
aactgtctgatagtacaacttt

SEQ ID NO: 200972 - DNA, 22 bp, Artificial sequence
  SiRNA target sequence
actgtctgatagtacaactttc

SEQ ID NO: 200973 - DNA, 22 bp, Artificial sequence
  SiRNA target sequence
ctgtctgatagtacaactttca

SEQ ID NO: 200974 - DNA, 22 bp, Artificial sequence
  SiRNA target sequence
tgtctgatagtacaactttcat

SEQ ID NO: 200975 - DNA, 22 bp, Artificial sequence
  SiRNA target sequence
gtctgatagtacaactttcatt

SEQ ID NO: 200976 - DNA, 22 bp, Artificial sequence
  SiRNA target sequence
tctgatagtacaactttcattt

SEQ ID NO: 200977 - DNA, 22 bp, Artificial sequence
  SiRNA target sequence
ctgatagtacaactttcattta

SEQ ID NO: 200978 - DNA, 22 bp, Artificial sequence
  SiRNA target sequence
tgatagtacaactttcatttaa

SEQ ID NO: 200979 - DNA, 22 bp, Artificial sequence
  SiRNA target sequence
gatagtacaactttcatttaaa

SEQ ID NO: 200980 - DNA, 22 bp, Artificial sequence
  SiRNA target sequence
atagtacaactttcatttaaaa

SEQ ID NO: 200981 - DNA, 22 bp, Artificial sequence
  SiRNA target sequence
tagtacaactttcatttaaaaa

SEQ ID NO: 200982 - DNA, 22 bp, Artificial sequence
  SiRNA target sequence
agtacaactttcatttaaaaaa

SEQ ID NO: 200983 - DNA, 22 bp, Artificial sequence
  SiRNA target sequence
gtacaactttcatttaaaaaac

SEQ ID NO: 200984 - DNA, 22 bp, Artificial sequence
  SiRNA target sequence
tacaactttcatttaaaaaact

SEQ ID NO: 200985 - DNA, 22 bp, Artificial sequence
  SiRNA target sequence
acaactttcatttaaaaaactc

SEQ ID NO: 200986 - DNA, 22 bp, Artificial sequence
  SiRNA target sequence
caactttcatttaaaaaactca

SEQ ID NO: 200987 - DNA, 22 bp, Artificial sequence
  SiRNA target sequence
aactttcatttaaaaaactcat

SEQ ID NO: 200988 - DNA, 22 bp, Artificial sequence
  SiRNA target sequence
actttcatttaaaaaactcatg

SEQ ID NO: 200989 - DNA, 22 bp, Artificial sequence
  SiRNA target sequence
ctttcatttaaaaaactcatgt

SEQ ID NO: 200990 - DNA, 22 bp, Artificial sequence
  SiRNA target sequence
tttcatttaaaaaactcatgta

SEQ ID NO: 200991 - DNA, 22 bp, Artificial sequence
  SiRNA target sequence
ttcatttaaaaaactcatgtat

SEQ ID NO: 200992 - DNA, 22 bp, Artificial sequence
  SiRNA target sequence
tcatttaaaaaactcatgtata

SEQ ID NO: 200993 - DNA, 22 bp, Artificial sequence
  SiRNA target sequence
catttaaaaaactcatgtataa

SEQ ID NO: 200994 - DNA, 22 bp, Artificial sequence
  SiRNA target sequence
atttaaaaaactcatgtataaa

SEQ ID NO: 200995 - DNA, 22 bp, Artificial sequence
  SiRNA target sequence
tttaaaaaactcatgtataaat

SEQ ID NO: 200996 - DNA, 22 bp, Artificial sequence
  SiRNA target sequence
ttaaaaaactcatgtataaata

SEQ ID NO: 200997 - DNA, 22 bp, Artificial sequence
  SiRNA target sequence
taaaaaactcatgtataaataa

SEQ ID NO: 200998 - DNA, 22 bp, Artificial sequence
  SiRNA target sequence
aaaaaactcatgtataaataag

SEQ ID NO: 200999 - DNA, 22 bp, Artificial sequence
  SiRNA target sequence
aaaaactcatgtataaataagc

SEQ ID NO: 201000 - DNA, 22 bp, Artificial sequence
  SiRNA target sequence
aaaactcatgtataaataagcc

SEQ ID NO: 201001 - DNA, 22 bp, Artificial sequence
  SiRNA target sequence
aaactcatgtataaataagcca

SEQ ID NO: 201002 - DNA, 22 bp, Artificial sequence
  SiRNA target sequence
aactcatgtataaataagccat

SEQ ID NO: 201003 - DNA, 22 bp, Artificial sequence
  SiRNA target sequence
actcatgtataaataagccata

SEQ ID NO: 201004 - DNA, 22 bp, Artificial sequence
  SiRNA target sequence
ctcatgtataaataagccataa

SEQ ID NO: 201005 - DNA, 22 bp, Artificial sequence
  SiRNA target sequence
tcatgtataaataagccataag

SEQ ID NO: 201006 - DNA, 22 bp, Artificial sequence
  SiRNA target sequence
catgtataaataagccataagt

SEQ ID NO: 201007 - DNA, 22 bp, Artificial sequence
  SiRNA target sequence
atgtataaataagccataagta

SEQ ID NO: 201008 - DNA, 22 bp, Artificial sequence
  SiRNA target sequence
tgtataaataagccataagtaa

SEQ ID NO: 201009 - DNA, 22 bp, Artificial sequence
  SiRNA target sequence
gtataaataagccataagtaaa

SEQ ID NO: 201010 - DNA, 22 bp, Artificial sequence
  SiRNA target sequence
tataaataagccataagtaaac

SEQ ID NO: 201011 - DNA, 22 bp, Artificial sequence
  SiRNA target sequence
ataaataagccataagtaaact

SEQ ID NO: 201012 - DNA, 22 bp, Artificial sequence
  SiRNA target sequence
taaataagccataagtaaactg

SEQ ID NO: 201013 - DNA, 22 bp, Artificial sequence
  SiRNA target sequence
aaataagccataagtaaactgc

SEQ ID NO: 201014 - DNA, 22 bp, Artificial sequence
  SiRNA target sequence
aataagccataagtaaactgcc

SEQ ID NO: 201015 - DNA, 22 bp, Artificial sequence
  SiRNA target sequence
ataagccataagtaaactgccc

SEQ ID NO: 201016 - DNA, 22 bp, Artificial sequence
  SiRNA target sequence
taagccataagtaaactgcccc

SEQ ID NO: 201017 - DNA, 22 bp, Artificial sequence
  SiRNA target sequence
aagccataagtaaactgcccca

SEQ ID NO: 201018 - DNA, 22 bp, Artificial sequence
  SiRNA target sequence
agccataagtaaactgccccac

SEQ ID NO: 201019 - DNA, 22 bp, Artificial sequence
  SiRNA target sequence
gccataagtaaactgccccaca

SEQ ID NO: 201020 - DNA, 22 bp, Artificial sequence
  SiRNA target sequence
ccataagtaaactgccccacat

SEQ ID NO: 201021 - DNA, 22 bp, Artificial sequence
  SiRNA target sequence
cataagtaaactgccccacatt

SEQ ID NO: 201022 - DNA, 22 bp, Artificial sequence
  SiRNA target sequence
ataagtaaactgccccacattt

SEQ ID NO: 201023 - DNA, 22 bp, Artificial sequence
  SiRNA target sequence
taagtaaactgccccacatttc

SEQ ID NO: 201024 - DNA, 22 bp, Artificial sequence
  SiRNA target sequence
aagtaaactgccccacatttct

SEQ ID NO: 201025 - DNA, 22 bp, Artificial sequence
  SiRNA target sequence
agtaaactgccccacatttctg

SEQ ID NO: 201026 - DNA, 22 bp, Artificial sequence
  SiRNA target sequence
gtaaactgccccacatttctgc

SEQ ID NO: 201027 - DNA, 22 bp, Artificial sequence
  SiRNA target sequence
taaactgccccacatttctgct

SEQ ID NO: 201028 - DNA, 22 bp, Artificial sequence
  SiRNA target sequence
aaactgccccacatttctgcta

SEQ ID NO: 201029 - DNA, 22 bp, Artificial sequence
  SiRNA target sequence
aactgccccacatttctgctat

SEQ ID NO: 201030 - DNA, 22 bp, Artificial sequence
  SiRNA target sequence
actgccccacatttctgctatt

SEQ ID NO: 201031 - DNA, 22 bp, Artificial sequence
  SiRNA target sequence
ctgccccacatttctgctatta

SEQ ID NO: 201032 - DNA, 22 bp, Artificial sequence
  SiRNA target sequence
tgccccacatttctgctattat

SEQ ID NO: 201033 - DNA, 22 bp, Artificial sequence
  SiRNA target sequence
gccccacatttctgctattata

SEQ ID NO: 201034 - DNA, 22 bp, Artificial sequence
  SiRNA target sequence
ccccacatttctgctattataa

SEQ ID NO: 201035 - DNA, 22 bp, Artificial sequence
  SiRNA target sequence
cccacatttctgctattataaa

SEQ ID NO: 201036 - DNA, 22 bp, Artificial sequence
  SiRNA target sequence
ccacatttctgctattataaaa

SEQ ID NO: 201037 - DNA, 22 bp, Artificial sequence
  SiRNA target sequence
cacatttctgctattataaaaa

SEQ ID NO: 201038 - DNA, 22 bp, Artificial sequence
  SiRNA target sequence
acatttctgctattataaaaat

SEQ ID NO: 201039 - DNA, 22 bp, Artificial sequence
  SiRNA target sequence
catttctgctattataaaaata

SEQ ID NO: 201040 - DNA, 22 bp, Artificial sequence
  SiRNA target sequence
atttctgctattataaaaatac

SEQ ID NO: 201041 - DNA, 22 bp, Artificial sequence
  SiRNA target sequence
tttctgctattataaaaataca

SEQ ID NO: 201042 - DNA, 22 bp, Artificial sequence
  SiRNA target sequence
ttctgctattataaaaatacaa

SEQ ID NO: 201043 - DNA, 22 bp, Artificial sequence
  SiRNA target sequence
tctgctattataaaaatacaag

SEQ ID NO: 201044 - DNA, 22 bp, Artificial sequence
  SiRNA target sequence
ctgctattataaaaatacaagt

SEQ ID NO: 201045 - DNA, 22 bp, Artificial sequence
  SiRNA target sequence
tgctattataaaaatacaagtt

SEQ ID NO: 201046 - DNA, 22 bp, Artificial sequence
  SiRNA target sequence
gctattataaaaatacaagttg

SEQ ID NO: 201047 - DNA, 22 bp, Artificial sequence
  SiRNA target sequence
ctattataaaaatacaagttga

SEQ ID NO: 201048 - DNA, 22 bp, Artificial sequence
  SiRNA target sequence
tattataaaaatacaagttgaa

SEQ ID NO: 201049 - DNA, 22 bp, Artificial sequence
  SiRNA target sequence
attataaaaatacaagttgaaa

SEQ ID NO: 201050 - DNA, 22 bp, Artificial sequence
  SiRNA target sequence
ttataaaaatacaagttgaaac

SEQ ID NO: 201051 - DNA, 22 bp, Artificial sequence
  SiRNA target sequence
tataaaaatacaagttgaaacg

SEQ ID NO: 201052 - DNA, 22 bp, Artificial sequence
  SiRNA target sequence
ataaaaatacaagttgaaacgg

SEQ ID NO: 201053 - DNA, 22 bp, Artificial sequence
  SiRNA target sequence
taaaaatacaagttgaaacggg

SEQ ID NO: 201054 - DNA, 22 bp, Artificial sequence
  SiRNA target sequence
aaaaatacaagttgaaacgggc

SEQ ID NO: 201055 - DNA, 22 bp, Artificial sequence
  SiRNA target sequence
aaaatacaagttgaaacgggct

SEQ ID NO: 201056 - DNA, 22 bp, Artificial sequence
  SiRNA target sequence
aaatacaagttgaaacgggctc

SEQ ID NO: 201057 - DNA, 22 bp, Artificial sequence
  SiRNA target sequence
aatacaagttgaaacgggctcg

SEQ ID NO: 201058 - DNA, 22 bp, Artificial sequence
  SiRNA target sequence
atacaagttgaaacgggctcgt

SEQ ID NO: 201059 - DNA, 22 bp, Artificial sequence
  SiRNA target sequence
tacaagttgaaacgggctcgtt

SEQ ID NO: 201060 - DNA, 22 bp, Artificial sequence
  SiRNA target sequence
acaagttgaaacgggctcgtta

SEQ ID NO: 201061 - DNA, 22 bp, Artificial sequence
  SiRNA target sequence
caagttgaaacgggctcgttag

SEQ ID NO: 201062 - DNA, 22 bp, Artificial sequence
  SiRNA target sequence
aagttgaaacgggctcgttagc

SEQ ID NO: 201063 - DNA, 22 bp, Artificial sequence
  SiRNA target sequence
agttgaaacgggctcgttagct

SEQ ID NO: 201064 - DNA, 22 bp, Artificial sequence
  SiRNA target sequence
gttgaaacgggctcgttagctg

SEQ ID NO: 201065 - DNA, 22 bp, Artificial sequence
  SiRNA target sequence
ttgaaacgggctcgttagctgt

SEQ ID NO: 201066 - DNA, 22 bp, Artificial sequence
  SiRNA target sequence
tgaaacgggctcgttagctgta

SEQ ID NO: 201067 - DNA, 22 bp, Artificial sequence
  SiRNA target sequence
gaaacgggctcgttagctgtaa

SEQ ID NO: 201068 - DNA, 22 bp, Artificial sequence
  SiRNA target sequence
aaacgggctcgttagctgtaat

SEQ ID NO: 201069 - DNA, 22 bp, Artificial sequence
  SiRNA target sequence
aacgggctcgttagctgtaatt

SEQ ID NO: 201070 - DNA, 22 bp, Artificial sequence
  SiRNA target sequence
acgggctcgttagctgtaatta

SEQ ID NO: 201071 - DNA, 22 bp, Artificial sequence
  SiRNA target sequence
cgggctcgttagctgtaattaa

SEQ ID NO: 201072 - DNA, 22 bp, Artificial sequence
  SiRNA target sequence
gggctcgttagctgtaattaaa

SEQ ID NO: 201073 - DNA, 22 bp, Artificial sequence
  SiRNA target sequence
ggctcgttagctgtaattaaaa

SEQ ID NO: 201074 - DNA, 22 bp, Artificial sequence
  SiRNA target sequence
gctcgttagctgtaattaaaaa

SEQ ID NO: 201075 - DNA, 22 bp, Artificial sequence
  SiRNA target sequence
ctcgttagctgtaattaaaaaa

SEQ ID NO: 201076 - DNA, 22 bp, Artificial sequence
  SiRNA target sequence
tcgttagctgtaattaaaaaat

SEQ ID NO: 201077 - DNA, 22 bp, Artificial sequence
  SiRNA target sequence
cgttagctgtaattaaaaaata

SEQ ID NO: 201078 - DNA, 22 bp, Artificial sequence
  SiRNA target sequence
gttagctgtaattaaaaaatat

SEQ ID NO: 201079 - DNA, 22 bp, Artificial sequence
  SiRNA target sequence
ttagctgtaattaaaaaatatt

SEQ ID NO: 201080 - DNA, 22 bp, Artificial sequence
  SiRNA target sequence
tagctgtaattaaaaaatattt

SEQ ID NO: 201081 - DNA, 22 bp, Artificial sequence
  SiRNA target sequence
agctgtaattaaaaaatatttt

SEQ ID NO: 201082 - DNA, 22 bp, Artificial sequence
  SiRNA target sequence
gctgtaattaaaaaatatttta

SEQ ID NO: 201083 - DNA, 22 bp, Artificial sequence
  SiRNA target sequence
ctgtaattaaaaaatattttat

SEQ ID NO: 201084 - DNA, 22 bp, Artificial sequence
  SiRNA target sequence
tgtaattaaaaaatattttata

SEQ ID NO: 201085 - DNA, 22 bp, Artificial sequence
  SiRNA target sequence
gtaattaaaaaatattttataa

SEQ ID NO: 201086 - DNA, 22 bp, Artificial sequence
  SiRNA target sequence
taattaaaaaatattttataaa

SEQ ID NO: 201087 - DNA, 22 bp, Artificial sequence
  SiRNA target sequence
aattaaaaaatattttataaag

SEQ ID NO: 201088 - DNA, 22 bp, Artificial sequence
  SiRNA target sequence
attaaaaaatattttataaagt

SEQ ID NO: 201089 - DNA, 22 bp, Artificial sequence
  SiRNA target sequence
ttaaaaaatattttataaagtt

SEQ ID NO: 201090 - DNA, 22 bp, Artificial sequence
  SiRNA target sequence
taaaaaatattttataaagttc

SEQ ID NO: 201091 - DNA, 22 bp, Artificial sequence
  SiRNA target sequence
aaaaaatattttataaagttca

SEQ ID NO: 201092 - DNA, 22 bp, Artificial sequence
  SiRNA target sequence
aaaaatattttataaagttcaa

SEQ ID NO: 201093 - DNA, 22 bp, Artificial sequence
  SiRNA target sequence
aaaatattttataaagttcaat

SEQ ID NO: 201094 - DNA, 22 bp, Artificial sequence
  SiRNA target sequence
aaatattttataaagttcaatc

SEQ ID NO: 201095 - DNA, 22 bp, Artificial sequence
  SiRNA target sequence
aatattttataaagttcaatcc

SEQ ID NO: 201096 - DNA, 22 bp, Artificial sequence
  SiRNA target sequence
atattttataaagttcaatccc

SEQ ID NO: 201097 - DNA, 22 bp, Artificial sequence
  SiRNA target sequence
tattttataaagttcaatccct

SEQ ID NO: 201098 - DNA, 22 bp, Artificial sequence
  SiRNA target sequence
attttataaagttcaatccctt

SEQ ID NO: 201099 - DNA, 22 bp, Artificial sequence
  SiRNA target sequence
ttttataaagttcaatcccttc

SEQ ID NO: 201100 - DNA, 22 bp, Artificial sequence
  SiRNA target sequence
tttataaagttcaatcccttca

SEQ ID NO: 201101 - DNA, 22 bp, Artificial sequence
  SiRNA target sequence
ttataaagttcaatcccttcaa

SEQ ID NO: 201102 - DNA, 22 bp, Artificial sequence
  SiRNA target sequence
tataaagttcaatcccttcaat

SEQ ID NO: 201103 - DNA, 22 bp, Artificial sequence
  SiRNA target sequence
ataaagttcaatcccttcaatg

SEQ ID NO: 201104 - DNA, 22 bp, Artificial sequence
  SiRNA target sequence
taaagttcaatcccttcaatgc

SEQ ID NO: 201105 - DNA, 22 bp, Artificial sequence
  SiRNA target sequence
aaagttcaatcccttcaatgca

SEQ ID NO: 201106 - DNA, 22 bp, Artificial sequence
  SiRNA target sequence
aagttcaatcccttcaatgcac

SEQ ID NO: 201107 - DNA, 22 bp, Artificial sequence
  SiRNA target sequence
agttcaatcccttcaatgcacc

SEQ ID NO: 201108 - DNA, 22 bp, Artificial sequence
  SiRNA target sequence
gttcaatcccttcaatgcacct

SEQ ID NO: 201109 - DNA, 22 bp, Artificial sequence
  SiRNA target sequence
ttcaatcccttcaatgcacctt

SEQ ID NO: 201110 - DNA, 22 bp, Artificial sequence
  SiRNA target sequence
tcaatcccttcaatgcaccttt

SEQ ID NO: 201111 - DNA, 22 bp, Artificial sequence
  SiRNA target sequence
caatcccttcaatgcacctttg

SEQ ID NO: 201112 - DNA, 22 bp, Artificial sequence
  SiRNA target sequence
aatcccttcaatgcacctttgt

SEQ ID NO: 201113 - DNA, 22 bp, Artificial sequence
  SiRNA target sequence
atcccttcaatgcacctttgtt

SEQ ID NO: 201114 - DNA, 22 bp, Artificial sequence
  SiRNA target sequence
tcccttcaatgcacctttgtta

SEQ ID NO: 201115 - DNA, 22 bp, Artificial sequence
  SiRNA target sequence
cccttcaatgcacctttgttat

SEQ ID NO: 201116 - DNA, 22 bp, Artificial sequence
  SiRNA target sequence
ccttcaatgcacctttgttatc

SEQ ID NO: 201117 - DNA, 22 bp, Artificial sequence
  SiRNA target sequence
cttcaatgcacctttgttatca

SEQ ID NO: 201118 - DNA, 22 bp, Artificial sequence
  SiRNA target sequence
ttcaatgcacctttgttatcag

SEQ ID NO: 201119 - DNA, 22 bp, Artificial sequence
  SiRNA target sequence
tcaatgcacctttgttatcagc

SEQ ID NO: 201120 - DNA, 22 bp, Artificial sequence
  SiRNA target sequence
caatgcacctttgttatcagcg

SEQ ID NO: 201121 - DNA, 22 bp, Artificial sequence
  SiRNA target sequence
aatgcacctttgttatcagcga

SEQ ID NO: 201122 - DNA, 22 bp, Artificial sequence
  SiRNA target sequence
atgcacctttgttatcagcgaa

SEQ ID NO: 201123 - DNA, 22 bp, Artificial sequence
  SiRNA target sequence
tgcacctttgttatcagcgaaa

SEQ ID NO: 201124 - DNA, 22 bp, Artificial sequence
  SiRNA target sequence
gcacctttgttatcagcgaaaa

SEQ ID NO: 201125 - DNA, 22 bp, Artificial sequence
  SiRNA target sequence
cacctttgttatcagcgaaaat

SEQ ID NO: 201126 - DNA, 22 bp, Artificial sequence
  SiRNA target sequence
acctttgttatcagcgaaaata

SEQ ID NO: 201127 - DNA, 22 bp, Artificial sequence
  SiRNA target sequence
cctttgttatcagcgaaaatat

SEQ ID NO: 201128 - DNA, 22 bp, Artificial sequence
  SiRNA target sequence
ctttgttatcagcgaaaatatc

SEQ ID NO: 201129 - DNA, 22 bp, Artificial sequence
  SiRNA target sequence
tttgttatcagcgaaaatatct

SEQ ID NO: 201130 - DNA, 22 bp, Artificial sequence
  SiRNA target sequence
ttgttatcagcgaaaatatctc

SEQ ID NO: 201131 - DNA, 22 bp, Artificial sequence
  SiRNA target sequence
tgttatcagcgaaaatatctct

SEQ ID NO: 201132 - DNA, 22 bp, Artificial sequence
  SiRNA target sequence
gttatcagcgaaaatatctcta

SEQ ID NO: 201133 - DNA, 22 bp, Artificial sequence
  SiRNA target sequence
ttatcagcgaaaatatctctaa

SEQ ID NO: 201134 - DNA, 22 bp, Artificial sequence
  SiRNA target sequence
tatcagcgaaaatatctctaaa

SEQ ID NO: 201135 - DNA, 22 bp, Artificial sequence
  SiRNA target sequence
atcagcgaaaatatctctaaat

SEQ ID NO: 201136 - DNA, 22 bp, Artificial sequence
  SiRNA target sequence
tcagcgaaaatatctctaaata

SEQ ID NO: 201137 - DNA, 22 bp, Artificial sequence
  SiRNA target sequence
cagcgaaaatatctctaaataa

SEQ ID NO: 201138 - DNA, 22 bp, Artificial sequence
  SiRNA target sequence
agcgaaaatatctctaaataaa

SEQ ID NO: 201139 - DNA, 22 bp, Artificial sequence
  SiRNA target sequence
gcgaaaatatctctaaataaaa

SEQ ID NO: 201140 - DNA, 22 bp, Artificial sequence
  SiRNA target sequence
cgaaaatatctctaaataaaaa

SEQ ID NO: 201141 - DNA, 22 bp, Artificial sequence
  SiRNA target sequence
gaaaatatctctaaataaaaag

SEQ ID NO: 201142 - DNA, 22 bp, Artificial sequence
  SiRNA target sequence
aaaatatctctaaataaaaagc

SEQ ID NO: 201143 - DNA, 22 bp, Artificial sequence
  SiRNA target sequence
aaatatctctaaataaaaagct

SEQ ID NO: 201144 - DNA, 22 bp, Artificial sequence
  SiRNA target sequence
aatatctctaaataaaaagcta

SEQ ID NO: 201145 - DNA, 22 bp, Artificial sequence
  SiRNA target sequence
atatctctaaataaaaagctag

SEQ ID NO: 201146 - DNA, 22 bp, Artificial sequence
  SiRNA target sequence
tatctctaaataaaaagctaga

SEQ ID NO: 201147 - DNA, 22 bp, Artificial sequence
  SiRNA target sequence
atctctaaataaaaagctagat

SEQ ID NO: 201148 - DNA, 22 bp, Artificial sequence
  SiRNA target sequence
tctctaaataaaaagctagatg

SEQ ID NO: 201149 - DNA, 22 bp, Artificial sequence
  SiRNA target sequence
ctctaaataaaaagctagatgg

SEQ ID NO: 201150 - DNA, 22 bp, Artificial sequence
  SiRNA target sequence
tctaaataaaaagctagatggt

SEQ ID NO: 201151 - DNA, 22 bp, Artificial sequence
  SiRNA target sequence
ctaaataaaaagctagatggtg

SEQ ID NO: 201152 - DNA, 22 bp, Artificial sequence
  SiRNA target sequence
taaataaaaagctagatggtgt

SEQ ID NO: 201153 - DNA, 22 bp, Artificial sequence
  SiRNA target sequence
aaataaaaagctagatggtgtt

SEQ ID NO: 201154 - DNA, 22 bp, Artificial sequence
  SiRNA target sequence
aataaaaagctagatggtgtta

SEQ ID NO: 201155 - DNA, 22 bp, Artificial sequence
  SiRNA target sequence
ataaaaagctagatggtgttac

SEQ ID NO: 201156 - DNA, 22 bp, Artificial sequence
  SiRNA target sequence
taaaaagctagatggtgttact

SEQ ID NO: 201157 - DNA, 22 bp, Artificial sequence
  SiRNA target sequence
aaaaagctagatggtgttactt

SEQ ID NO: 201158 - DNA, 22 bp, Artificial sequence
  SiRNA target sequence
aaaagctagatggtgttacttt

SEQ ID NO: 201159 - DNA, 22 bp, Artificial sequence
  SiRNA target sequence
aaagctagatggtgttactttc

SEQ ID NO: 201160 - DNA, 22 bp, Artificial sequence
  SiRNA target sequence
aagctagatggtgttactttct

SEQ ID NO: 201161 - DNA, 22 bp, Artificial sequence
  SiRNA target sequence
agctagatggtgttactttctc

SEQ ID NO: 201162 - DNA, 22 bp, Artificial sequence
  SiRNA target sequence
gctagatggtgttactttctct

SEQ ID NO: 201163 - DNA, 22 bp, Artificial sequence
  SiRNA target sequence
ctagatggtgttactttctctt

SEQ ID NO: 201164 - DNA, 22 bp, Artificial sequence
  SiRNA target sequence
tagatggtgttactttctcttc

SEQ ID NO: 201165 - DNA, 22 bp, Artificial sequence
  SiRNA target sequence
agatggtgttactttctcttca

SEQ ID NO: 201166 - DNA, 22 bp, Artificial sequence
  SiRNA target sequence
gatggtgttactttctcttcaa

SEQ ID NO: 201167 - DNA, 22 bp, Artificial sequence
  SiRNA target sequence
atggtgttactttctcttcaaa

SEQ ID NO: 201168 - DNA, 22 bp, Artificial sequence
  SiRNA target sequence
tggtgttactttctcttcaaac

SEQ ID NO: 201169 - DNA, 22 bp, Artificial sequence
  SiRNA target sequence
ggtgttactttctcttcaaaca

SEQ ID NO: 201170 - DNA, 22 bp, Artificial sequence
  SiRNA target sequence
gtgttactttctcttcaaacaa

SEQ ID NO: 201171 - DNA, 22 bp, Artificial sequence
  SiRNA target sequence
tgttactttctcttcaaacaaa

SEQ ID NO: 201172 - DNA, 22 bp, Artificial sequence
  SiRNA target sequence
gttactttctcttcaaacaaaa

SEQ ID NO: 201173 - DNA, 22 bp, Artificial sequence
  SiRNA target sequence
ttactttctcttcaaacaaaaa

SEQ ID NO: 201174 - DNA, 22 bp, Artificial sequence
  SiRNA target sequence
tactttctcttcaaacaaaaag

SEQ ID NO: 201175 - DNA, 22 bp, Artificial sequence
  SiRNA target sequence
actttctcttcaaacaaaaaga

SEQ ID NO: 201176 - DNA, 22 bp, Artificial sequence
  SiRNA target sequence
ctttctcttcaaacaaaaagat

SEQ ID NO: 201177 - DNA, 22 bp, Artificial sequence
  SiRNA target sequence
tttctcttcaaacaaaaagatt

SEQ ID NO: 201178 - DNA, 22 bp, Artificial sequence
  SiRNA target sequence
ttctcttcaaacaaaaagattg

SEQ ID NO: 201179 - DNA, 22 bp, Artificial sequence
  SiRNA target sequence
tctcttcaaacaaaaagattgc

SEQ ID NO: 201180 - DNA, 22 bp, Artificial sequence
  SiRNA target sequence
ctcttcaaacaaaaagattgcc

SEQ ID NO: 201181 - DNA, 22 bp, Artificial sequence
  SiRNA target sequence
tcttcaaacaaaaagattgccc

SEQ ID NO: 201182 - DNA, 22 bp, Artificial sequence
  SiRNA target sequence
cttcaaacaaaaagattgcccc

SEQ ID NO: 201183 - DNA, 22 bp, Artificial sequence
  SiRNA target sequence
ttcaaacaaaaagattgcccct

SEQ ID NO: 201184 - DNA, 22 bp, Artificial sequence
  SiRNA target sequence
tcaaacaaaaagattgccccta

SEQ ID NO: 201185 - DNA, 22 bp, Artificial sequence
  SiRNA target sequence
caaacaaaaagattgcccctag

SEQ ID NO: 201186 - DNA, 22 bp, Artificial sequence
  SiRNA target sequence
aaacaaaaagattgcccctagt

SEQ ID NO: 201187 - DNA, 22 bp, Artificial sequence
  SiRNA target sequence
aacaaaaagattgcccctagtc

SEQ ID NO: 201188 - DNA, 22 bp, Artificial sequence
  SiRNA target sequence
acaaaaagattgcccctagtcc

SEQ ID NO: 201189 - DNA, 22 bp, Artificial sequence
  SiRNA target sequence
caaaaagattgcccctagtccg

SEQ ID NO: 201190 - DNA, 22 bp, Artificial sequence
  SiRNA target sequence
aaaaagattgcccctagtccga

SEQ ID NO: 201191 - DNA, 22 bp, Artificial sequence
  SiRNA target sequence
aaaagattgcccctagtccgaa

SEQ ID NO: 201192 - DNA, 22 bp, Artificial sequence
  SiRNA target sequence
aaagattgcccctagtccgaag

SEQ ID NO: 201193 - DNA, 22 bp, Artificial sequence
  SiRNA target sequence
aagattgcccctagtccgaaga

SEQ ID NO: 201194 - DNA, 22 bp, Artificial sequence
  SiRNA target sequence
agattgcccctagtccgaagaa

SEQ ID NO: 201195 - DNA, 22 bp, Artificial sequence
  SiRNA target sequence
gattgcccctagtccgaagaaa

SEQ ID NO: 201196 - DNA, 22 bp, Artificial sequence
  SiRNA target sequence
attgcccctagtccgaagaaaa

SEQ ID NO: 201197 - DNA, 22 bp, Artificial sequence
  SiRNA target sequence
ttgcccctagtccgaagaaaaa

SEQ ID NO: 201198 - DNA, 22 bp, Artificial sequence
  SiRNA target sequence
tgcccctagtccgaagaaaaat

SEQ ID NO: 201199 - DNA, 22 bp, Artificial sequence
  SiRNA target sequence
gcccctagtccgaagaaaaatg

SEQ ID NO: 201200 - DNA, 22 bp, Artificial sequence
  SiRNA target sequence
cccctagtccgaagaaaaatgc

SEQ ID NO: 201201 - DNA, 22 bp, Artificial sequence
  SiRNA target sequence
ccctagtccgaagaaaaatgca

SEQ ID NO: 201202 - DNA, 22 bp, Artificial sequence
  SiRNA target sequence
cctagtccgaagaaaaatgcag

SEQ ID NO: 201203 - DNA, 22 bp, Artificial sequence
  SiRNA target sequence
ctagtccgaagaaaaatgcagt

SEQ ID NO: 201204 - DNA, 22 bp, Artificial sequence
  SiRNA target sequence
tagtccgaagaaaaatgcagta

SEQ ID NO: 201205 - DNA, 22 bp, Artificial sequence
  SiRNA target sequence
agtccgaagaaaaatgcagtaa

SEQ ID NO: 201206 - DNA, 22 bp, Artificial sequence
  SiRNA target sequence
gtccgaagaaaaatgcagtaaa

SEQ ID NO: 201207 - DNA, 22 bp, Artificial sequence
  SiRNA target sequence
tccgaagaaaaatgcagtaaaa

SEQ ID NO: 201208 - DNA, 22 bp, Artificial sequence
  SiRNA target sequence
ccgaagaaaaatgcagtaaaaa

SEQ ID NO: 201209 - DNA, 22 bp, Artificial sequence
  SiRNA target sequence
cgaagaaaaatgcagtaaaaat

SEQ ID NO: 201210 - DNA, 22 bp, Artificial sequence
  SiRNA target sequence
gaagaaaaatgcagtaaaaatt

SEQ ID NO: 201211 - DNA, 22 bp, Artificial sequence
  SiRNA target sequence
aagaaaaatgcagtaaaaatta

SEQ ID NO: 201212 - DNA, 22 bp, Artificial sequence
  SiRNA target sequence
agaaaaatgcagtaaaaattat

SEQ ID NO: 201213 - DNA, 22 bp, Artificial sequence
  SiRNA target sequence
gaaaaatgcagtaaaaattatt

SEQ ID NO: 201214 - DNA, 22 bp, Artificial sequence
  SiRNA target sequence
aaaaatgcagtaaaaattatta

SEQ ID NO: 201215 - DNA, 22 bp, Artificial sequence
  SiRNA target sequence
aaaatgcagtaaaaattattag

SEQ ID NO: 201216 - DNA, 22 bp, Artificial sequence
  SiRNA target sequence
aaatgcagtaaaaattattaga

SEQ ID NO: 201217 - DNA, 22 bp, Artificial sequence
  SiRNA target sequence
aatgcagtaaaaattattagaa

SEQ ID NO: 201218 - DNA, 22 bp, Artificial sequence
  SiRNA target sequence
atgcagtaaaaattattagaaa

SEQ ID NO: 201219 - DNA, 22 bp, Artificial sequence
  SiRNA target sequence
tgcagtaaaaattattagaaat

SEQ ID NO: 201220 - DNA, 22 bp, Artificial sequence
  SiRNA target sequence
gcagtaaaaattattagaaata

SEQ ID NO: 201221 - DNA, 22 bp, Artificial sequence
  SiRNA target sequence
cagtaaaaattattagaaatag

SEQ ID NO: 201222 - DNA, 22 bp, Artificial sequence
  SiRNA target sequence
agtaaaaattattagaaataga

SEQ ID NO: 201223 - DNA, 22 bp, Artificial sequence
  SiRNA target sequence
gtaaaaattattagaaatagat

SEQ ID NO: 201224 - DNA, 22 bp, Artificial sequence
  SiRNA target sequence
taaaaattattagaaatagatt

SEQ ID NO: 201225 - DNA, 22 bp, Artificial sequence
  SiRNA target sequence
aaaaattattagaaatagatta

SEQ ID NO: 201226 - DNA, 22 bp, Artificial sequence
  SiRNA target sequence
aaaattattagaaatagattaa

SEQ ID NO: 201227 - DNA, 22 bp, Artificial sequence
  SiRNA target sequence
aaattattagaaatagattaaa

SEQ ID NO: 201228 - DNA, 22 bp, Artificial sequence
  SiRNA target sequence
aattattagaaatagattaaaa

SEQ ID NO: 201229 - DNA, 22 bp, Artificial sequence
  SiRNA target sequence
attattagaaatagattaaaaa

SEQ ID NO: 201230 - DNA, 22 bp, Artificial sequence
  SiRNA target sequence
ttattagaaatagattaaaaat

SEQ ID NO: 201231 - DNA, 22 bp, Artificial sequence
  SiRNA target sequence
tattagaaatagattaaaaatc

SEQ ID NO: 201232 - DNA, 22 bp, Artificial sequence
  SiRNA target sequence
attagaaatagattaaaaatcg

SEQ ID NO: 201233 - DNA, 22 bp, Artificial sequence
  SiRNA target sequence
ttagaaatagattaaaaatcga

SEQ ID NO: 201234 - DNA, 22 bp, Artificial sequence
  SiRNA target sequence
tagaaatagattaaaaatcgat

SEQ ID NO: 201235 - DNA, 22 bp, Artificial sequence
  SiRNA target sequence
agaaatagattaaaaatcgatg

SEQ ID NO: 201236 - DNA, 22 bp, Artificial sequence
  SiRNA target sequence
gaaatagattaaaaatcgatga

SEQ ID NO: 201237 - DNA, 22 bp, Artificial sequence
  SiRNA target sequence
aaatagattaaaaatcgatgat

SEQ ID NO: 201238 - DNA, 22 bp, Artificial sequence
  SiRNA target sequence
aatagattaaaaatcgatgata

SEQ ID NO: 201239 - DNA, 22 bp, Artificial sequence
  SiRNA target sequence
atagattaaaaatcgatgatac

SEQ ID NO: 201240 - DNA, 22 bp, Artificial sequence
  SiRNA target sequence
tagattaaaaatcgatgataca

SEQ ID NO: 201241 - DNA, 22 bp, Artificial sequence
  SiRNA target sequence
agattaaaaatcgatgatacag

SEQ ID NO: 201242 - DNA, 22 bp, Artificial sequence
  SiRNA target sequence
gattaaaaatcgatgatacagg

SEQ ID NO: 201243 - DNA, 22 bp, Artificial sequence
  SiRNA target sequence
attaaaaatcgatgatacaggt

SEQ ID NO: 201244 - DNA, 22 bp, Artificial sequence
  SiRNA target sequence
ttaaaaatcgatgatacaggtt

SEQ ID NO: 201245 - DNA, 22 bp, Artificial sequence
  SiRNA target sequence
taaaaatcgatgatacaggttt

SEQ ID NO: 201246 - DNA, 22 bp, Artificial sequence
  SiRNA target sequence
aaaaatcgatgatacaggttta

SEQ ID NO: 201247 - DNA, 22 bp, Artificial sequence
  SiRNA target sequence
aaaatcgatgatacaggtttat

SEQ ID NO: 201248 - DNA, 22 bp, Artificial sequence
  SiRNA target sequence
aaatcgatgatacaggtttatt

SEQ ID NO: 201249 - DNA, 22 bp, Artificial sequence
  SiRNA target sequence
aatcgatgatacaggtttattt

SEQ ID NO: 201250 - DNA, 22 bp, Artificial sequence
  SiRNA target sequence
atcgatgatacaggtttatttt

SEQ ID NO: 201251 - DNA, 22 bp, Artificial sequence
  SiRNA target sequence
tcgatgatacaggtttattttg

SEQ ID NO: 201252 - DNA, 22 bp, Artificial sequence
  SiRNA target sequence
cgatgatacaggtttattttgc

SEQ ID NO: 201253 - DNA, 22 bp, Artificial sequence
  SiRNA target sequence
gatgatacaggtttattttgca

SEQ ID NO: 201254 - DNA, 22 bp, Artificial sequence
  SiRNA target sequence
atgatacaggtttattttgcat

SEQ ID NO: 201255 - DNA, 22 bp, Artificial sequence
  SiRNA target sequence
tgatacaggtttattttgcata

SEQ ID NO: 201256 - DNA, 22 bp, Artificial sequence
  SiRNA target sequence
gatacaggtttattttgcataa

SEQ ID NO: 201257 - DNA, 22 bp, Artificial sequence
  SiRNA target sequence
atacaggtttattttgcataag

SEQ ID NO: 201258 - DNA, 22 bp, Artificial sequence
  SiRNA target sequence
tacaggtttattttgcataagc

SEQ ID NO: 201259 - DNA, 22 bp, Artificial sequence
  SiRNA target sequence
acaggtttattttgcataagcc

SEQ ID NO: 201260 - DNA, 22 bp, Artificial sequence
  SiRNA target sequence
caggtttattttgcataagcca

SEQ ID NO: 201261 - DNA, 22 bp, Artificial sequence
  SiRNA target sequence
aggtttattttgcataagccac

SEQ ID NO: 201262 - DNA, 22 bp, Artificial sequence
  SiRNA target sequence
ggtttattttgcataagccact

SEQ ID NO: 201263 - DNA, 22 bp, Artificial sequence
  SiRNA target sequence
gtttattttgcataagccactg

SEQ ID NO: 201264 - DNA, 22 bp, Artificial sequence
  SiRNA target sequence
tttattttgcataagccactgt

SEQ ID NO: 201265 - DNA, 22 bp, Artificial sequence
  SiRNA target sequence
ttattttgcataagccactgta

SEQ ID NO: 201266 - DNA, 22 bp, Artificial sequence
  SiRNA target sequence
tattttgcataagccactgtat

SEQ ID NO: 201267 - DNA, 22 bp, Artificial sequence
  SiRNA target sequence
attttgcataagccactgtatt

SEQ ID NO: 201268 - DNA, 22 bp, Artificial sequence
  SiRNA target sequence
ttttgcataagccactgtatta

SEQ ID NO: 201269 - DNA, 22 bp, Artificial sequence
  SiRNA target sequence
tttgcataagccactgtattaa

SEQ ID NO: 201270 - DNA, 22 bp, Artificial sequence
  SiRNA target sequence
ttgcataagccactgtattaaa

SEQ ID NO: 201271 - DNA, 22 bp, Artificial sequence
  SiRNA target sequence
tgcataagccactgtattaaaa

SEQ ID NO: 201272 - DNA, 22 bp, Artificial sequence
  SiRNA target sequence
gcataagccactgtattaaaat

SEQ ID NO: 201273 - DNA, 22 bp, Artificial sequence
  SiRNA target sequence
cataagccactgtattaaaatt

SEQ ID NO: 201274 - DNA, 22 bp, Artificial sequence
  SiRNA target sequence
ataagccactgtattaaaatta

SEQ ID NO: 201275 - DNA, 22 bp, Artificial sequence
  SiRNA target sequence
taagccactgtattaaaattac

SEQ ID NO: 201276 - DNA, 22 bp, Artificial sequence
  SiRNA target sequence
aagccactgtattaaaattaca

SEQ ID NO: 201277 - DNA, 22 bp, Artificial sequence
  SiRNA target sequence
agccactgtattaaaattacag

SEQ ID NO: 201278 - DNA, 22 bp, Artificial sequence
  SiRNA target sequence
gccactgtattaaaattacaga

SEQ ID NO: 201279 - DNA, 22 bp, Artificial sequence
  SiRNA target sequence
ccactgtattaaaattacagat

SEQ ID NO: 201280 - DNA, 22 bp, Artificial sequence
  SiRNA target sequence
cactgtattaaaattacagatg

SEQ ID NO: 201281 - DNA, 22 bp, Artificial sequence
  SiRNA target sequence
actgtattaaaattacagatgc

SEQ ID NO: 201282 - DNA, 22 bp, Artificial sequence
  SiRNA target sequence
ctgtattaaaattacagatgca

SEQ ID NO: 201283 - DNA, 22 bp, Artificial sequence
  SiRNA target sequence
tgtattaaaattacagatgcaa

SEQ ID NO: 201284 - DNA, 22 bp, Artificial sequence
  SiRNA target sequence
gtattaaaattacagatgcaaa

SEQ ID NO: 201285 - DNA, 22 bp, Artificial sequence
  SiRNA target sequence
tattaaaattacagatgcaaaa

SEQ ID NO: 201286 - DNA, 22 bp, Artificial sequence
  SiRNA target sequence
attaaaattacagatgcaaaag

SEQ ID NO: 201287 - DNA, 22 bp, Artificial sequence
  SiRNA target sequence
ttaaaattacagatgcaaaaga

SEQ ID NO: 201288 - DNA, 22 bp, Artificial sequence
  SiRNA target sequence
taaaattacagatgcaaaagat

SEQ ID NO: 201289 - DNA, 22 bp, Artificial sequence
  SiRNA target sequence
aaaattacagatgcaaaagata

SEQ ID NO: 201290 - DNA, 22 bp, Artificial sequence
  SiRNA target sequence
aaattacagatgcaaaagatat

SEQ ID NO: 201291 - DNA, 22 bp, Artificial sequence
  SiRNA target sequence
aattacagatgcaaaagatata

SEQ ID NO: 201292 - DNA, 22 bp, Artificial sequence
  SiRNA target sequence
attacagatgcaaaagatatag

SEQ ID NO: 201293 - DNA, 22 bp, Artificial sequence
  SiRNA target sequence
ttacagatgcaaaagatatagg

SEQ ID NO: 201294 - DNA, 22 bp, Artificial sequence
  SiRNA target sequence
tacagatgcaaaagatatagga

SEQ ID NO: 201295 - DNA, 22 bp, Artificial sequence
  SiRNA target sequence
acagatgcaaaagatataggaa

SEQ ID NO: 201296 - DNA, 22 bp, Artificial sequence
  SiRNA target sequence
cagatgcaaaagatataggaag

SEQ ID NO: 201297 - DNA, 22 bp, Artificial sequence
  SiRNA target sequence
agatgcaaaagatataggaaga

SEQ ID NO: 201298 - DNA, 22 bp, Artificial sequence
  SiRNA target sequence
gatgcaaaagatataggaagaa

SEQ ID NO: 201299 - DNA, 22 bp, Artificial sequence
  SiRNA target sequence
atgcaaaagatataggaagaac

SEQ ID NO: 201300 - DNA, 22 bp, Artificial sequence
  SiRNA target sequence
tgcaaaagatataggaagaaca

SEQ ID NO: 201301 - DNA, 22 bp, Artificial sequence
  SiRNA target sequence
gcaaaagatataggaagaacat

SEQ ID NO: 201302 - DNA, 22 bp, Artificial sequence
  SiRNA target sequence
caaaagatataggaagaacata

SEQ ID NO: 201303 - DNA, 22 bp, Artificial sequence
  SiRNA target sequence
aaaagatataggaagaacataa

SEQ ID NO: 201304 - DNA, 22 bp, Artificial sequence
  SiRNA target sequence
aaagatataggaagaacataaa

SEQ ID NO: 201305 - DNA, 22 bp, Artificial sequence
  SiRNA target sequence
aagatataggaagaacataaaa

SEQ ID NO: 201306 - DNA, 22 bp, Artificial sequence
  SiRNA target sequence
agatataggaagaacataaaaa

SEQ ID NO: 201307 - DNA, 22 bp, Artificial sequence
  SiRNA target sequence
gatataggaagaacataaaaaa

SEQ ID NO: 201308 - DNA, 22 bp, Artificial sequence
  SiRNA target sequence
atataggaagaacataaaaaat

SEQ ID NO: 201309 - DNA, 22 bp, Artificial sequence
  SiRNA target sequence
tataggaagaacataaaaaatt

SEQ ID NO: 201310 - DNA, 22 bp, Artificial sequence
  SiRNA target sequence
ataggaagaacataaaaaattt

SEQ ID NO: 201311 - DNA, 22 bp, Artificial sequence
  SiRNA target sequence
taggaagaacataaaaaatttt

SEQ ID NO: 201312 - DNA, 22 bp, Artificial sequence
  SiRNA target sequence
aggaagaacataaaaaattttc

SEQ ID NO: 201313 - DNA, 22 bp, Artificial sequence
  SiRNA target sequence
ggaagaacataaaaaattttca

SEQ ID NO: 201314 - DNA, 22 bp, Artificial sequence
  SiRNA target sequence
gaagaacataaaaaattttcat

SEQ ID NO: 201315 - DNA, 22 bp, Artificial sequence
  SiRNA target sequence
aagaacataaaaaattttcata

SEQ ID NO: 201316 - DNA, 22 bp, Artificial sequence
  SiRNA target sequence
agaacataaaaaattttcataa

SEQ ID NO: 201317 - DNA, 22 bp, Artificial sequence
  SiRNA target sequence
gaacataaaaaattttcataaa

SEQ ID NO: 201318 - DNA, 22 bp, Artificial sequence
  SiRNA target sequence
aacataaaaaattttcataaac

SEQ ID NO: 201319 - DNA, 22 bp, Artificial sequence
  SiRNA target sequence
acataaaaaattttcataaaca

SEQ ID NO: 201320 - DNA, 22 bp, Artificial sequence
  SiRNA target sequence
cataaaaaattttcataaacat

SEQ ID NO: 201321 - DNA, 22 bp, Artificial sequence
  SiRNA target sequence
ataaaaaattttcataaacata

SEQ ID NO: 201322 - DNA, 22 bp, Artificial sequence
  SiRNA target sequence
taaaaaattttcataaacataa

SEQ ID NO: 201323 - DNA, 22 bp, Artificial sequence
  SiRNA target sequence
aaaaaattttcataaacataat

SEQ ID NO: 201324 - DNA, 22 bp, Artificial sequence
  SiRNA target sequence
aaaaattttcataaacataatt

SEQ ID NO: 201325 - DNA, 22 bp, Artificial sequence
  SiRNA target sequence
aaaattttcataaacataattg

SEQ ID NO: 201326 - DNA, 22 bp, Artificial sequence
  SiRNA target sequence
aaattttcataaacataattga

SEQ ID NO: 201327 - DNA, 22 bp, Artificial sequence
  SiRNA target sequence
aattttcataaacataattgaa

SEQ ID NO: 201328 - DNA, 22 bp, Artificial sequence
  SiRNA target sequence
attttcataaacataattgaat

SEQ ID NO: 201329 - DNA, 22 bp, Artificial sequence
  SiRNA target sequence
ttttcataaacataattgaatt

SEQ ID NO: 201330 - DNA, 22 bp, Artificial sequence
  SiRNA target sequence
tttcataaacataattgaattc

SEQ ID NO: 201331 - DNA, 22 bp, Artificial sequence
  SiRNA target sequence
ttcataaacataattgaattct

SEQ ID NO: 201332 - DNA, 22 bp, Artificial sequence
  SiRNA target sequence
tcataaacataattgaattctg

SEQ ID NO: 201333 - DNA, 22 bp, Artificial sequence
  SiRNA target sequence
cataaacataattgaattctga

SEQ ID NO: 201334 - DNA, 22 bp, Artificial sequence
  SiRNA target sequence
ataaacataattgaattctgat

SEQ ID NO: 201335 - DNA, 22 bp, Artificial sequence
  SiRNA target sequence
taaacataattgaattctgatc

SEQ ID NO: 201336 - DNA, 22 bp, Artificial sequence
  SiRNA target sequence
aaacataattgaattctgatct

SEQ ID NO: 201337 - DNA, 22 bp, Artificial sequence
  SiRNA target sequence
aacataattgaattctgatctt

SEQ ID NO: 201338 - DNA, 22 bp, Artificial sequence
  SiRNA target sequence
acataattgaattctgatcttg

SEQ ID NO: 201339 - DNA, 22 bp, Artificial sequence
  SiRNA target sequence
cataattgaattctgatcttgc

SEQ ID NO: 201340 - DNA, 22 bp, Artificial sequence
  SiRNA target sequence
ataattgaattctgatcttgcc

SEQ ID NO: 201341 - DNA, 22 bp, Artificial sequence
  SiRNA target sequence
taattgaattctgatcttgcct

SEQ ID NO: 201342 - DNA, 22 bp, Artificial sequence
  SiRNA target sequence
aattgaattctgatcttgcctt

SEQ ID NO: 201343 - DNA, 22 bp, Artificial sequence
  SiRNA target sequence
attgaattctgatcttgcctta

SEQ ID NO: 201344 - DNA, 22 bp, Artificial sequence
  SiRNA target sequence
ttgaattctgatcttgccttac

SEQ ID NO: 201345 - DNA, 22 bp, Artificial sequence
  SiRNA target sequence
tgaattctgatcttgccttacc

SEQ ID NO: 201346 - DNA, 22 bp, Artificial sequence
  SiRNA target sequence
gaattctgatcttgccttacca

SEQ ID NO: 201347 - DNA, 22 bp, Artificial sequence
  SiRNA target sequence
aattctgatcttgccttaccat

SEQ ID NO: 201348 - DNA, 22 bp, Artificial sequence
  SiRNA target sequence
attctgatcttgccttaccatc

SEQ ID NO: 201349 - DNA, 22 bp, Artificial sequence
  SiRNA target sequence
ttctgatcttgccttaccatca

SEQ ID NO: 201350 - DNA, 22 bp, Artificial sequence
  SiRNA target sequence
tctgatcttgccttaccatcac

SEQ ID NO: 201351 - DNA, 22 bp, Artificial sequence
  SiRNA target sequence
ctgatcttgccttaccatcaca

SEQ ID NO: 201352 - DNA, 22 bp, Artificial sequence
  SiRNA target sequence
tgatcttgccttaccatcacaa

SEQ ID NO: 201353 - DNA, 22 bp, Artificial sequence
  SiRNA target sequence
gatcttgccttaccatcacaaa

SEQ ID NO: 201354 - DNA, 22 bp, Artificial sequence
  SiRNA target sequence
atcttgccttaccatcacaaat

SEQ ID NO: 201355 - DNA, 22 bp, Artificial sequence
  SiRNA target sequence
tcttgccttaccatcacaaata

SEQ ID NO: 201356 - DNA, 22 bp, Artificial sequence
  SiRNA target sequence
cttgccttaccatcacaaataa

SEQ ID NO: 201357 - DNA, 22 bp, Artificial sequence
  SiRNA target sequence
ttgccttaccatcacaaataaa

SEQ ID NO: 201358 - DNA, 22 bp, Artificial sequence
  SiRNA target sequence
tgccttaccatcacaaataaat

SEQ ID NO: 201359 - DNA, 22 bp, Artificial sequence
  SiRNA target sequence
gccttaccatcacaaataaatc

SEQ ID NO: 201360 - DNA, 22 bp, Artificial sequence
  SiRNA target sequence
ccttaccatcacaaataaatct

SEQ ID NO: 201361 - DNA, 22 bp, Artificial sequence
  SiRNA target sequence
cttaccatcacaaataaatctt

SEQ ID NO: 201362 - DNA, 22 bp, Artificial sequence
  SiRNA target sequence
ttaccatcacaaataaatcttt

SEQ ID NO: 201363 - DNA, 22 bp, Artificial sequence
  SiRNA target sequence
taccatcacaaataaatctttt

SEQ ID NO: 201364 - DNA, 22 bp, Artificial sequence
  SiRNA target sequence
accatcacaaataaatctttta

SEQ ID NO: 201365 - DNA, 22 bp, Artificial sequence
  SiRNA target sequence
ccatcacaaataaatcttttaa

SEQ ID NO: 201366 - DNA, 22 bp, Artificial sequence
  SiRNA target sequence
catcacaaataaatcttttaaa

SEQ ID NO: 201367 - DNA, 22 bp, Artificial sequence
  SiRNA target sequence
atcacaaataaatcttttaaaa

SEQ ID NO: 201368 - DNA, 22 bp, Artificial sequence
  SiRNA target sequence
tcacaaataaatcttttaaaat

SEQ ID NO: 201369 - DNA, 22 bp, Artificial sequence
  SiRNA target sequence
cacaaataaatcttttaaaatt

SEQ ID NO: 201370 - DNA, 22 bp, Artificial sequence
  SiRNA target sequence
acaaataaatcttttaaaattc

SEQ ID NO: 201371 - DNA, 22 bp, Artificial sequence
  SiRNA target sequence
caaataaatcttttaaaattct

SEQ ID NO: 201372 - DNA, 22 bp, Artificial sequence
  SiRNA target sequence
aaataaatcttttaaaattctt

SEQ ID NO: 201373 - DNA, 22 bp, Artificial sequence
  SiRNA target sequence
aataaatcttttaaaattctta

SEQ ID NO: 201374 - DNA, 22 bp, Artificial sequence
  SiRNA target sequence
ataaatcttttaaaattcttaa

SEQ ID NO: 201375 - DNA, 22 bp, Artificial sequence
  SiRNA target sequence
taaatcttttaaaattcttaaa

SEQ ID NO: 201376 - DNA, 22 bp, Artificial sequence
  SiRNA target sequence
aaatcttttaaaattcttaaaa

SEQ ID NO: 201377 - DNA, 22 bp, Artificial sequence
  SiRNA target sequence
aatcttttaaaattcttaaaaa

SEQ ID NO: 201378 - DNA, 22 bp, Artificial sequence
  SiRNA target sequence
atcttttaaaattcttaaaaat

SEQ ID NO: 201379 - DNA, 22 bp, Artificial sequence
  SiRNA target sequence
tcttttaaaattcttaaaaatg

SEQ ID NO: 201380 - DNA, 22 bp, Artificial sequence
  SiRNA target sequence
cttttaaaattcttaaaaatga

SEQ ID NO: 201381 - DNA, 22 bp, Artificial sequence
  SiRNA target sequence
ttttaaaattcttaaaaatgaa

SEQ ID NO: 201382 - DNA, 22 bp, Artificial sequence
  SiRNA target sequence
tttaaaattcttaaaaatgaat

SEQ ID NO: 201383 - DNA, 22 bp, Artificial sequence
  SiRNA target sequence
ttaaaattcttaaaaatgaata

SEQ ID NO: 201384 - DNA, 22 bp, Artificial sequence
  SiRNA target sequence
taaaattcttaaaaatgaatac

SEQ ID NO: 201385 - DNA, 22 bp, Artificial sequence
  SiRNA target sequence
aaaattcttaaaaatgaataca

SEQ ID NO: 201386 - DNA, 22 bp, Artificial sequence
  SiRNA target sequence
aaattcttaaaaatgaatacac

SEQ ID NO: 201387 - DNA, 22 bp, Artificial sequence
  SiRNA target sequence
aattcttaaaaatgaatacaca

SEQ ID NO: 201388 - DNA, 22 bp, Artificial sequence
  SiRNA target sequence
attcttaaaaatgaatacacaa

SEQ ID NO: 201389 - DNA, 22 bp, Artificial sequence
  SiRNA target sequence
ttcttaaaaatgaatacacaaa

SEQ ID NO: 201390 - DNA, 22 bp, Artificial sequence
  SiRNA target sequence
tcttaaaaatgaatacacaaag

SEQ ID NO: 201391 - DNA, 22 bp, Artificial sequence
  SiRNA target sequence
cttaaaaatgaatacacaaagt

SEQ ID NO: 201392 - DNA, 22 bp, Artificial sequence
  SiRNA target sequence
ttaaaaatgaatacacaaagtt

SEQ ID NO: 201393 - DNA, 22 bp, Artificial sequence
  SiRNA target sequence
taaaaatgaatacacaaagtta

SEQ ID NO: 201394 - DNA, 22 bp, Artificial sequence
  SiRNA target sequence
aaaaatgaatacacaaagttaa

SEQ ID NO: 201395 - DNA, 22 bp, Artificial sequence
  SiRNA target sequence
aaaatgaatacacaaagttaat

SEQ ID NO: 201396 - DNA, 22 bp, Artificial sequence
  SiRNA target sequence
aaatgaatacacaaagttaatt

SEQ ID NO: 201397 - DNA, 22 bp, Artificial sequence
  SiRNA target sequence
aatgaatacacaaagttaatta

SEQ ID NO: 201398 - DNA, 22 bp, Artificial sequence
  SiRNA target sequence
atgaatacacaaagttaattaa

SEQ ID NO: 201399 - DNA, 22 bp, Artificial sequence
  SiRNA target sequence
tgaatacacaaagttaattaat

SEQ ID NO: 201400 - DNA, 22 bp, Artificial sequence
  SiRNA target sequence
gaatacacaaagttaattaatc

SEQ ID NO: 201401 - DNA, 22 bp, Artificial sequence
  SiRNA target sequence
aatacacaaagttaattaatcc

SEQ ID NO: 201402 - DNA, 22 bp, Artificial sequence
  SiRNA target sequence
atacacaaagttaattaatcca

SEQ ID NO: 201403 - DNA, 22 bp, Artificial sequence
  SiRNA target sequence
tacacaaagttaattaatccaa

SEQ ID NO: 201404 - DNA, 22 bp, Artificial sequence
  SiRNA target sequence
acacaaagttaattaatccaaa

SEQ ID NO: 201405 - DNA, 22 bp, Artificial sequence
  SiRNA target sequence
cacaaagttaattaatccaaac

SEQ ID NO: 201406 - DNA, 22 bp, Artificial sequence
  SiRNA target sequence
acaaagttaattaatccaaaca

SEQ ID NO: 201407 - DNA, 22 bp, Artificial sequence
  SiRNA target sequence
caaagttaattaatccaaacat

SEQ ID NO: 201408 - DNA, 22 bp, Artificial sequence
  SiRNA target sequence
aaagttaattaatccaaacata

SEQ ID NO: 201409 - DNA, 22 bp, Artificial sequence
  SiRNA target sequence
aagttaattaatccaaacataa

SEQ ID NO: 201410 - DNA, 22 bp, Artificial sequence
  SiRNA target sequence
agttaattaatccaaacataat

SEQ ID NO: 201411 - DNA, 22 bp, Artificial sequence
  SiRNA target sequence
gttaattaatccaaacataata

SEQ ID NO: 201412 - DNA, 22 bp, Artificial sequence
  SiRNA target sequence
ttaattaatccaaacataatac

SEQ ID NO: 201413 - DNA, 22 bp, Artificial sequence
  SiRNA target sequence
taattaatccaaacataatacc

SEQ ID NO: 201414 - DNA, 22 bp, Artificial sequence
  SiRNA target sequence
aattaatccaaacataatacca

SEQ ID NO: 201415 - DNA, 22 bp, Artificial sequence
  SiRNA target sequence
attaatccaaacataataccaa

SEQ ID NO: 201416 - DNA, 22 bp, Artificial sequence
  SiRNA target sequence
ttaatccaaacataataccaag

SEQ ID NO: 201417 - DNA, 22 bp, Artificial sequence
  SiRNA target sequence
taatccaaacataataccaagt

SEQ ID NO: 201418 - DNA, 22 bp, Artificial sequence
  SiRNA target sequence
aatccaaacataataccaagta

SEQ ID NO: 201419 - DNA, 22 bp, Artificial sequence
  SiRNA target sequence
atccaaacataataccaagtat

SEQ ID NO: 201420 - DNA, 22 bp, Artificial sequence
  SiRNA target sequence
tccaaacataataccaagtata

SEQ ID NO: 201421 - DNA, 22 bp, Artificial sequence
  SiRNA target sequence
ccaaacataataccaagtataa

SEQ ID NO: 201422 - DNA, 22 bp, Artificial sequence
  SiRNA target sequence
caaacataataccaagtataaa

SEQ ID NO: 201423 - DNA, 22 bp, Artificial sequence
  SiRNA target sequence
aaacataataccaagtataaaa

SEQ ID NO: 201424 - DNA, 22 bp, Artificial sequence
  SiRNA target sequence
aacataataccaagtataaaaa

SEQ ID NO: 201425 - DNA, 22 bp, Artificial sequence
  SiRNA target sequence
acataataccaagtataaaaaa

SEQ ID NO: 201426 - DNA, 22 bp, Artificial sequence
  SiRNA target sequence
cataataccaagtataaaaaat

SEQ ID NO: 201427 - DNA, 22 bp, Artificial sequence
  SiRNA target sequence
ataataccaagtataaaaaatt

SEQ ID NO: 201428 - DNA, 22 bp, Artificial sequence
  SiRNA target sequence
taataccaagtataaaaaattt

SEQ ID NO: 201429 - DNA, 22 bp, Artificial sequence
  SiRNA target sequence
aataccaagtataaaaaattta

SEQ ID NO: 201430 - DNA, 22 bp, Artificial sequence
  SiRNA target sequence
ataccaagtataaaaaatttag

SEQ ID NO: 201431 - DNA, 22 bp, Artificial sequence
  SiRNA target sequence
taccaagtataaaaaatttagg

SEQ ID NO: 201432 - DNA, 22 bp, Artificial sequence
  SiRNA target sequence
accaagtataaaaaatttaggc

SEQ ID NO: 201433 - DNA, 22 bp, Artificial sequence
  SiRNA target sequence
ccaagtataaaaaatttaggca

SEQ ID NO: 201434 - DNA, 22 bp, Artificial sequence
  SiRNA target sequence
caagtataaaaaatttaggcat

SEQ ID NO: 201435 - DNA, 22 bp, Artificial sequence
  SiRNA target sequence
aagtataaaaaatttaggcatt

SEQ ID NO: 201436 - DNA, 22 bp, Artificial sequence
  SiRNA target sequence
agtataaaaaatttaggcattt

SEQ ID NO: 201437 - DNA, 22 bp, Artificial sequence
  SiRNA target sequence
gtataaaaaatttaggcatttc

SEQ ID NO: 201438 - DNA, 22 bp, Artificial sequence
  SiRNA target sequence
tataaaaaatttaggcatttca

SEQ ID NO: 201439 - DNA, 22 bp, Artificial sequence
  SiRNA target sequence
ataaaaaatttaggcatttcaa

SEQ ID NO: 201440 - DNA, 22 bp, Artificial sequence
  SiRNA target sequence
taaaaaatttaggcatttcaac

SEQ ID NO: 201441 - DNA, 22 bp, Artificial sequence
  SiRNA target sequence
aaaaaatttaggcatttcaacc

SEQ ID NO: 201442 - DNA, 22 bp, Artificial sequence
  SiRNA target sequence
aaaaatttaggcatttcaacct

SEQ ID NO: 201443 - DNA, 22 bp, Artificial sequence
  SiRNA target sequence
aaaatttaggcatttcaacctt

SEQ ID NO: 201444 - DNA, 22 bp, Artificial sequence
  SiRNA target sequence
aaatttaggcatttcaacctta

SEQ ID NO: 201445 - DNA, 22 bp, Artificial sequence
  SiRNA target sequence
aatttaggcatttcaaccttag

SEQ ID NO: 201446 - DNA, 22 bp, Artificial sequence
  SiRNA target sequence
atttaggcatttcaaccttagc

SEQ ID NO: 201447 - DNA, 22 bp, Artificial sequence
  SiRNA target sequence
tttaggcatttcaaccttagca

SEQ ID NO: 201448 - DNA, 22 bp, Artificial sequence
  SiRNA target sequence
ttaggcatttcaaccttagcaa

SEQ ID NO: 201449 - DNA, 22 bp, Artificial sequence
  SiRNA target sequence
taggcatttcaaccttagcaac

SEQ ID NO: 201450 - DNA, 22 bp, Artificial sequence
  SiRNA target sequence
aggcatttcaaccttagcaact

SEQ ID NO: 201451 - DNA, 22 bp, Artificial sequence
  SiRNA target sequence
ggcatttcaaccttagcaactt

SEQ ID NO: 201452 - DNA, 22 bp, Artificial sequence
  SiRNA target sequence
gcatttcaaccttagcaacttt

SEQ ID NO: 201453 - DNA, 22 bp, Artificial sequence
  SiRNA target sequence
catttcaaccttagcaacttta

SEQ ID NO: 201454 - DNA, 22 bp, Artificial sequence
  SiRNA target sequence
atttcaaccttagcaactttaa

SEQ ID NO: 201455 - DNA, 22 bp, Artificial sequence
  SiRNA target sequence
tttcaaccttagcaactttaaa

SEQ ID NO: 201456 - DNA, 22 bp, Artificial sequence
  SiRNA target sequence
ttcaaccttagcaactttaaaa

SEQ ID NO: 201457 - DNA, 22 bp, Artificial sequence
  SiRNA target sequence
tcaaccttagcaactttaaaat

SEQ ID NO: 201458 - DNA, 22 bp, Artificial sequence
  SiRNA target sequence
caaccttagcaactttaaaata

SEQ ID NO: 201459 - DNA, 22 bp, Artificial sequence
  SiRNA target sequence
aaccttagcaactttaaaataa

SEQ ID NO: 201460 - DNA, 22 bp, Artificial sequence
  SiRNA target sequence
accttagcaactttaaaataac

SEQ ID NO: 201461 - DNA, 22 bp, Artificial sequence
  SiRNA target sequence
ccttagcaactttaaaataact

SEQ ID NO: 201462 - DNA, 22 bp, Artificial sequence
  SiRNA target sequence
cttagcaactttaaaataactc

SEQ ID NO: 201463 - DNA, 22 bp, Artificial sequence
  SiRNA target sequence
ttagcaactttaaaataactca

SEQ ID NO: 201464 - DNA, 22 bp, Artificial sequence
  SiRNA target sequence
tagcaactttaaaataactcag

SEQ ID NO: 201465 - DNA, 22 bp, Artificial sequence
  SiRNA target sequence
agcaactttaaaataactcagt

SEQ ID NO: 201466 - DNA, 22 bp, Artificial sequence
  SiRNA target sequence
gcaactttaaaataactcagta

SEQ ID NO: 201467 - DNA, 22 bp, Artificial sequence
  SiRNA target sequence
caactttaaaataactcagtaa

SEQ ID NO: 201468 - DNA, 22 bp, Artificial sequence
  SiRNA target sequence
aactttaaaataactcagtaat

SEQ ID NO: 201469 - DNA, 22 bp, Artificial sequence
  SiRNA target sequence
actttaaaataactcagtaatc

SEQ ID NO: 201470 - DNA, 22 bp, Artificial sequence
  SiRNA target sequence
ctttaaaataactcagtaatcc

SEQ ID NO: 201471 - DNA, 22 bp, Artificial sequence
  SiRNA target sequence
tttaaaataactcagtaatcct

SEQ ID NO: 201472 - DNA, 22 bp, Artificial sequence
  SiRNA target sequence
ttaaaataactcagtaatcctg

SEQ ID NO: 201473 - DNA, 22 bp, Artificial sequence
  SiRNA target sequence
taaaataactcagtaatcctgt

SEQ ID NO: 201474 - DNA, 22 bp, Artificial sequence
  SiRNA target sequence
aaaataactcagtaatcctgtt

SEQ ID NO: 201475 - DNA, 22 bp, Artificial sequence
  SiRNA target sequence
aaataactcagtaatcctgttc

SEQ ID NO: 201476 - DNA, 22 bp, Artificial sequence
  SiRNA target sequence
aataactcagtaatcctgttct

SEQ ID NO: 201477 - DNA, 22 bp, Artificial sequence
  SiRNA target sequence
ataactcagtaatcctgttctt

SEQ ID NO: 201478 - DNA, 22 bp, Artificial sequence
  SiRNA target sequence
taactcagtaatcctgttcttg

SEQ ID NO: 201479 - DNA, 22 bp, Artificial sequence
  SiRNA target sequence
aactcagtaatcctgttcttga

SEQ ID NO: 201480 - DNA, 22 bp, Artificial sequence
  SiRNA target sequence
actcagtaatcctgttcttgaa

SEQ ID NO: 201481 - DNA, 22 bp, Artificial sequence
  SiRNA target sequence
ctcagtaatcctgttcttgaat

SEQ ID NO: 201482 - DNA, 22 bp, Artificial sequence
  SiRNA target sequence
tcagtaatcctgttcttgaatt

SEQ ID NO: 201483 - DNA, 22 bp, Artificial sequence
  SiRNA target sequence
cagtaatcctgttcttgaattt

SEQ ID NO: 201484 - DNA, 22 bp, Artificial sequence
  SiRNA target sequence
agtaatcctgttcttgaatttg

SEQ ID NO: 201485 - DNA, 22 bp, Artificial sequence
  SiRNA target sequence
gtaatcctgttcttgaatttgc

SEQ ID NO: 201486 - DNA, 22 bp, Artificial sequence
  SiRNA target sequence
taatcctgttcttgaatttgct

SEQ ID NO: 201487 - DNA, 22 bp, Artificial sequence
  SiRNA target sequence
aatcctgttcttgaatttgcta

SEQ ID NO: 201488 - DNA, 22 bp, Artificial sequence
  SiRNA target sequence
atcctgttcttgaatttgctaa

SEQ ID NO: 201489 - DNA, 22 bp, Artificial sequence
  SiRNA target sequence
tcctgttcttgaatttgctaat

SEQ ID NO: 201490 - DNA, 22 bp, Artificial sequence
  SiRNA target sequence
cctgttcttgaatttgctaatt

SEQ ID NO: 201491 - DNA, 22 bp, Artificial sequence
  SiRNA target sequence
ctgttcttgaatttgctaattg

SEQ ID NO: 201492 - DNA, 22 bp, Artificial sequence
  SiRNA target sequence
tgttcttgaatttgctaattga

SEQ ID NO: 201493 - DNA, 22 bp, Artificial sequence
  SiRNA target sequence
gttcttgaatttgctaattgat

SEQ ID NO: 201494 - DNA, 22 bp, Artificial sequence
  SiRNA target sequence
ttcttgaatttgctaattgatc

SEQ ID NO: 201495 - DNA, 22 bp, Artificial sequence
  SiRNA target sequence
tcttgaatttgctaattgatca

SEQ ID NO: 201496 - DNA, 22 bp, Artificial sequence
  SiRNA target sequence
cttgaatttgctaattgatcaa

SEQ ID NO: 201497 - DNA, 22 bp, Artificial sequence
  SiRNA target sequence
ttgaatttgctaattgatcaat

SEQ ID NO: 201498 - DNA, 22 bp, Artificial sequence
  SiRNA target sequence
tgaatttgctaattgatcaatc

SEQ ID NO: 201499 - DNA, 22 bp, Artificial sequence
  SiRNA target sequence
gaatttgctaattgatcaatct

SEQ ID NO: 201500 - DNA, 22 bp, Artificial sequence
  SiRNA target sequence
aatttgctaattgatcaatctc

SEQ ID NO: 201501 - DNA, 22 bp, Artificial sequence
  SiRNA target sequence
atttgctaattgatcaatctca

SEQ ID NO: 201502 - DNA, 22 bp, Artificial sequence
  SiRNA target sequence
tttgctaattgatcaatctcat

SEQ ID NO: 201503 - DNA, 22 bp, Artificial sequence
  SiRNA target sequence
ttgctaattgatcaatctcatc

SEQ ID NO: 201504 - DNA, 22 bp, Artificial sequence
  SiRNA target sequence
tgctaattgatcaatctcatct

SEQ ID NO: 201505 - DNA, 22 bp, Artificial sequence
  SiRNA target sequence
gctaattgatcaatctcatctt

SEQ ID NO: 201506 - DNA, 22 bp, Artificial sequence
  SiRNA target sequence
ctaattgatcaatctcatcttc

SEQ ID NO: 201507 - DNA, 22 bp, Artificial sequence
  SiRNA target sequence
taattgatcaatctcatcttcc

SEQ ID NO: 201508 - DNA, 22 bp, Artificial sequence
  SiRNA target sequence
aattgatcaatctcatcttccg

SEQ ID NO: 201509 - DNA, 22 bp, Artificial sequence
  SiRNA target sequence
attgatcaatctcatcttccgt

SEQ ID NO: 201510 - DNA, 22 bp, Artificial sequence
  SiRNA target sequence
ttgatcaatctcatcttccgta

SEQ ID NO: 201511 - DNA, 22 bp, Artificial sequence
  SiRNA target sequence
tgatcaatctcatcttccgtag

SEQ ID NO: 201512 - DNA, 22 bp, Artificial sequence
  SiRNA target sequence
gatcaatctcatcttccgtagg

SEQ ID NO: 201513 - DNA, 22 bp, Artificial sequence
  SiRNA target sequence
atcaatctcatcttccgtaggt

SEQ ID NO: 201514 - DNA, 22 bp, Artificial sequence
  SiRNA target sequence
tcaatctcatcttccgtaggta

SEQ ID NO: 201515 - DNA, 22 bp, Artificial sequence
  SiRNA target sequence
caatctcatcttccgtaggtaa

SEQ ID NO: 201516 - DNA, 22 bp, Artificial sequence
  SiRNA target sequence
aatctcatcttccgtaggtaag

SEQ ID NO: 201517 - DNA, 22 bp, Artificial sequence
  SiRNA target sequence
atctcatcttccgtaggtaagt

SEQ ID NO: 201518 - DNA, 22 bp, Artificial sequence
  SiRNA target sequence
tctcatcttccgtaggtaagtt

SEQ ID NO: 201519 - DNA, 22 bp, Artificial sequence
  SiRNA target sequence
ctcatcttccgtaggtaagttg

SEQ ID NO: 201520 - DNA, 22 bp, Artificial sequence
  SiRNA target sequence
tcatcttccgtaggtaagttgt

SEQ ID NO: 201521 - DNA, 22 bp, Artificial sequence
  SiRNA target sequence
catcttccgtaggtaagttgtt

SEQ ID NO: 201522 - DNA, 22 bp, Artificial sequence
  SiRNA target sequence
atcttccgtaggtaagttgttt

SEQ ID NO: 201523 - DNA, 22 bp, Artificial sequence
  SiRNA target sequence
tcttccgtaggtaagttgtttt

SEQ ID NO: 201524 - DNA, 22 bp, Artificial sequence
  SiRNA target sequence
cttccgtaggtaagttgttttc

SEQ ID NO: 201525 - DNA, 22 bp, Artificial sequence
  SiRNA target sequence
ttccgtaggtaagttgttttca

SEQ ID NO: 201526 - DNA, 22 bp, Artificial sequence
  SiRNA target sequence
tccgtaggtaagttgttttcag

SEQ ID NO: 201527 - DNA, 22 bp, Artificial sequence
  SiRNA target sequence
ccgtaggtaagttgttttcagg

SEQ ID NO: 201528 - DNA, 22 bp, Artificial sequence
  SiRNA target sequence
cgtaggtaagttgttttcaggt

SEQ ID NO: 201529 - DNA, 22 bp, Artificial sequence
  SiRNA target sequence
gtaggtaagttgttttcaggtg

SEQ ID NO: 201530 - DNA, 22 bp, Artificial sequence
  SiRNA target sequence
taggtaagttgttttcaggtgt

SEQ ID NO: 201531 - DNA, 22 bp, Artificial sequence
  SiRNA target sequence
aggtaagttgttttcaggtgtt

SEQ ID NO: 201532 - DNA, 22 bp, Artificial sequence
  SiRNA target sequence
ggtaagttgttttcaggtgttt

SEQ ID NO: 201533 - DNA, 22 bp, Artificial sequence
  SiRNA target sequence
gtaagttgttttcaggtgtttc

SEQ ID NO: 201534 - DNA, 22 bp, Artificial sequence
  SiRNA target sequence
taagttgttttcaggtgtttca

SEQ ID NO: 201535 - DNA, 22 bp, Artificial sequence
  SiRNA target sequence
aagttgttttcaggtgtttcat

SEQ ID NO: 201536 - DNA, 22 bp, Artificial sequence
  SiRNA target sequence
agttgttttcaggtgtttcatt

SEQ ID NO: 201537 - DNA, 22 bp, Artificial sequence
  SiRNA target sequence
gttgttttcaggtgtttcattt

SEQ ID NO: 201538 - DNA, 22 bp, Artificial sequence
  SiRNA target sequence
ttgttttcaggtgtttcattta

SEQ ID NO: 201539 - DNA, 22 bp, Artificial sequence
  SiRNA target sequence
tgttttcaggtgtttcatttat

SEQ ID NO: 201540 - DNA, 22 bp, Artificial sequence
  SiRNA target sequence
gttttcaggtgtttcatttatt

SEQ ID NO: 201541 - DNA, 22 bp, Artificial sequence
  SiRNA target sequence
ttttcaggtgtttcatttatta

SEQ ID NO: 201542 - DNA, 22 bp, Artificial sequence
  SiRNA target sequence
tttcaggtgtttcatttattac

SEQ ID NO: 201543 - DNA, 22 bp, Artificial sequence
  SiRNA target sequence
ttcaggtgtttcatttattaca

SEQ ID NO: 201544 - DNA, 22 bp, Artificial sequence
  SiRNA target sequence
tcaggtgtttcatttattacac

SEQ ID NO: 201545 - DNA, 22 bp, Artificial sequence
  SiRNA target sequence
caggtgtttcatttattacact

SEQ ID NO: 201546 - DNA, 22 bp, Artificial sequence
  SiRNA target sequence
aggtgtttcatttattacactc

SEQ ID NO: 201547 - DNA, 22 bp, Artificial sequence
  SiRNA target sequence
ggtgtttcatttattacactca

SEQ ID NO: 201548 - DNA, 22 bp, Artificial sequence
  SiRNA target sequence
gtgtttcatttattacactcat

SEQ ID NO: 201549 - DNA, 23 bp, Artificial sequence
  SiRNA target sequence
ttattctgcgttttcttttttgt

SEQ ID NO: 201550 - DNA, 23 bp, Artificial sequence
  SiRNA target sequence
tattctgcgttttcttttttgtc

SEQ ID NO: 201551 - DNA, 23 bp, Artificial sequence
  SiRNA target sequence
attctgcgttttcttttttgtcg

SEQ ID NO: 201552 - DNA, 23 bp, Artificial sequence
  SiRNA target sequence
ttctgcgttttcttttttgtcgt

SEQ ID NO: 201553 - DNA, 23 bp, Artificial sequence
  SiRNA target sequence
tctgcgttttcttttttgtcgtc

SEQ ID NO: 201554 - DNA, 23 bp, Artificial sequence
  SiRNA target sequence
ctgcgttttcttttttgtcgtct

SEQ ID NO: 201555 - DNA, 23 bp, Artificial sequence
  SiRNA target sequence
tgcgttttcttttttgtcgtctt

SEQ ID NO: 201556 - DNA, 23 bp, Artificial sequence
  SiRNA target sequence
gcgttttcttttttgtcgtcttt

SEQ ID NO: 201557 - DNA, 23 bp, Artificial sequence
  SiRNA target sequence
cgttttcttttttgtcgtctttt

SEQ ID NO: 201558 - DNA, 23 bp, Artificial sequence
  SiRNA target sequence
gttttcttttttgtcgtctttta

SEQ ID NO: 201559 - DNA, 23 bp, Artificial sequence
  SiRNA target sequence
ttttcttttttgtcgtcttttat

SEQ ID NO: 201560 - DNA, 23 bp, Artificial sequence
  SiRNA target sequence
tttcttttttgtcgtcttttatt

SEQ ID NO: 201561 - DNA, 23 bp, Artificial sequence
  SiRNA target sequence
ttcttttttgtcgtcttttatta

SEQ ID NO: 201562 - DNA, 23 bp, Artificial sequence
  SiRNA target sequence
tcttttttgtcgtcttttattaa

SEQ ID NO: 201563 - DNA, 23 bp, Artificial sequence
  SiRNA target sequence
cttttttgtcgtcttttattaaa

SEQ ID NO: 201564 - DNA, 23 bp, Artificial sequence
  SiRNA target sequence
ttttttgtcgtcttttattaaat

SEQ ID NO: 201565 - DNA, 23 bp, Artificial sequence
  SiRNA target sequence
tttttgtcgtcttttattaaatc

SEQ ID NO: 201566 - DNA, 23 bp, Artificial sequence
  SiRNA target sequence
ttttgtcgtcttttattaaatct

SEQ ID NO: 201567 - DNA, 23 bp, Artificial sequence
  SiRNA target sequence
tttgtcgtcttttattaaatcta

SEQ ID NO: 201568 - DNA, 23 bp, Artificial sequence
  SiRNA target sequence
ttgtcgtcttttattaaatctat

SEQ ID NO: 201569 - DNA, 23 bp, Artificial sequence
  SiRNA target sequence
tgtcgtcttttattaaatctatg

SEQ ID NO: 201570 - DNA, 23 bp, Artificial sequence
  SiRNA target sequence
gtcgtcttttattaaatctatgt

SEQ ID NO: 201571 - DNA, 23 bp, Artificial sequence
  SiRNA target sequence
tcgtcttttattaaatctatgtc

SEQ ID NO: 201572 - DNA, 23 bp, Artificial sequence
  SiRNA target sequence
cgtcttttattaaatctatgtct

SEQ ID NO: 201573 - DNA, 23 bp, Artificial sequence
  SiRNA target sequence
gtcttttattaaatctatgtcta

SEQ ID NO: 201574 - DNA, 23 bp, Artificial sequence
  SiRNA target sequence
tcttttattaaatctatgtctac

SEQ ID NO: 201575 - DNA, 23 bp, Artificial sequence
  SiRNA target sequence
cttttattaaatctatgtctaca

SEQ ID NO: 201576 - DNA, 23 bp, Artificial sequence
  SiRNA target sequence
ttttattaaatctatgtctacac

SEQ ID NO: 201577 - DNA, 23 bp, Artificial sequence
  SiRNA target sequence
tttattaaatctatgtctacact

SEQ ID NO: 201578 - DNA, 23 bp, Artificial sequence
  SiRNA target sequence
ttattaaatctatgtctacactt

SEQ ID NO: 201579 - DNA, 23 bp, Artificial sequence
  SiRNA target sequence
tattaaatctatgtctacacttg

SEQ ID NO: 201580 - DNA, 23 bp, Artificial sequence
  SiRNA target sequence
attaaatctatgtctacacttgt

SEQ ID NO: 201581 - DNA, 23 bp, Artificial sequence
  SiRNA target sequence
ttaaatctatgtctacacttgta

SEQ ID NO: 201582 - DNA, 23 bp, Artificial sequence
  SiRNA target sequence
taaatctatgtctacacttgtat

SEQ ID NO: 201583 - DNA, 23 bp, Artificial sequence
  SiRNA target sequence
aaatctatgtctacacttgtatt

SEQ ID NO: 201584 - DNA, 23 bp, Artificial sequence
  SiRNA target sequence
aatctatgtctacacttgtatta

SEQ ID NO: 201585 - DNA, 23 bp, Artificial sequence
  SiRNA target sequence
atctatgtctacacttgtattat

SEQ ID NO: 201586 - DNA, 23 bp, Artificial sequence
  SiRNA target sequence
tctatgtctacacttgtattatt

SEQ ID NO: 201587 - DNA, 23 bp, Artificial sequence
  SiRNA target sequence
ctatgtctacacttgtattattt

SEQ ID NO: 201588 - DNA, 23 bp, Artificial sequence
  SiRNA target sequence
tatgtctacacttgtattatttt

SEQ ID NO: 201589 - DNA, 23 bp, Artificial sequence
  SiRNA target sequence
atgtctacacttgtattattttt

SEQ ID NO: 201590 - DNA, 23 bp, Artificial sequence
  SiRNA target sequence
tgtctacacttgtattattttta

SEQ ID NO: 201591 - DNA, 23 bp, Artificial sequence
  SiRNA target sequence
gtctacacttgtattatttttaa

SEQ ID NO: 201592 - DNA, 23 bp, Artificial sequence
  SiRNA target sequence
tctacacttgtattatttttaat

SEQ ID NO: 201593 - DNA, 23 bp, Artificial sequence
  SiRNA target sequence
ctacacttgtattatttttaatt

SEQ ID NO: 201594 - DNA, 23 bp, Artificial sequence
  SiRNA target sequence
tacacttgtattatttttaattg

SEQ ID NO: 201595 - DNA, 23 bp, Artificial sequence
  SiRNA target sequence
acacttgtattatttttaattga

SEQ ID NO: 201596 - DNA, 23 bp, Artificial sequence
  SiRNA target sequence
cacttgtattatttttaattgaa

SEQ ID NO: 201597 - DNA, 23 bp, Artificial sequence
  SiRNA target sequence
acttgtattatttttaattgaaa

SEQ ID NO: 201598 - DNA, 23 bp, Artificial sequence
  SiRNA target sequence
cttgtattatttttaattgaaac

SEQ ID NO: 201599 - DNA, 23 bp, Artificial sequence
  SiRNA target sequence
ttgtattatttttaattgaaacg

SEQ ID NO: 201600 - DNA, 23 bp, Artificial sequence
  SiRNA target sequence
tgtattatttttaattgaaacgt

SEQ ID NO: 201601 - DNA, 23 bp, Artificial sequence
  SiRNA target sequence
gtattatttttaattgaaacgtt

SEQ ID NO: 201602 - DNA, 23 bp, Artificial sequence
  SiRNA target sequence
tattatttttaattgaaacgtta

SEQ ID NO: 201603 - DNA, 23 bp, Artificial sequence
  SiRNA target sequence
attatttttaattgaaacgttat

SEQ ID NO: 201604 - DNA, 23 bp, Artificial sequence
  SiRNA target sequence
ttatttttaattgaaacgttata

SEQ ID NO: 201605 - DNA, 23 bp, Artificial sequence
  SiRNA target sequence
tatttttaattgaaacgttatat

SEQ ID NO: 201606 - DNA, 23 bp, Artificial sequence
  SiRNA target sequence
atttttaattgaaacgttatatg

SEQ ID NO: 201607 - DNA, 23 bp, Artificial sequence
  SiRNA target sequence
tttttaattgaaacgttatatgc

SEQ ID NO: 201608 - DNA, 23 bp, Artificial sequence
  SiRNA target sequence
ttttaattgaaacgttatatgca

SEQ ID NO: 201609 - DNA, 23 bp, Artificial sequence
  SiRNA target sequence
tttaattgaaacgttatatgcac

SEQ ID NO: 201610 - DNA, 23 bp, Artificial sequence
  SiRNA target sequence
ttaattgaaacgttatatgcacc

SEQ ID NO: 201611 - DNA, 23 bp, Artificial sequence
  SiRNA target sequence
taattgaaacgttatatgcaccc

SEQ ID NO: 201612 - DNA, 23 bp, Artificial sequence
  SiRNA target sequence
aattgaaacgttatatgcacccg

SEQ ID NO: 201613 - DNA, 23 bp, Artificial sequence
  SiRNA target sequence
attgaaacgttatatgcacccgc

SEQ ID NO: 201614 - DNA, 23 bp, Artificial sequence
  SiRNA target sequence
ttgaaacgttatatgcacccgct

SEQ ID NO: 201615 - DNA, 23 bp, Artificial sequence
  SiRNA target sequence
tgaaacgttatatgcacccgcta

SEQ ID NO: 201616 - DNA, 23 bp, Artificial sequence
  SiRNA target sequence
gaaacgttatatgcacccgctaa

SEQ ID NO: 201617 - DNA, 23 bp, Artificial sequence
  SiRNA target sequence
aaacgttatatgcacccgctaaa

SEQ ID NO: 201618 - DNA, 23 bp, Artificial sequence
  SiRNA target sequence
aacgttatatgcacccgctaaat

SEQ ID NO: 201619 - DNA, 23 bp, Artificial sequence
  SiRNA target sequence
acgttatatgcacccgctaaata

SEQ ID NO: 201620 - DNA, 23 bp, Artificial sequence
  SiRNA target sequence
cgttatatgcacccgctaaatag

SEQ ID NO: 201621 - DNA, 23 bp, Artificial sequence
  SiRNA target sequence
gttatatgcacccgctaaataga

SEQ ID NO: 201622 - DNA, 23 bp, Artificial sequence
  SiRNA target sequence
ttatatgcacccgctaaatagat

SEQ ID NO: 201623 - DNA, 23 bp, Artificial sequence
  SiRNA target sequence
tatatgcacccgctaaatagatt

SEQ ID NO: 201624 - DNA, 23 bp, Artificial sequence
  SiRNA target sequence
atatgcacccgctaaatagatta

SEQ ID NO: 201625 - DNA, 23 bp, Artificial sequence
  SiRNA target sequence
tatgcacccgctaaatagattat

SEQ ID NO: 201626 - DNA, 23 bp, Artificial sequence
  SiRNA target sequence
atgcacccgctaaatagattata

SEQ ID NO: 201627 - DNA, 23 bp, Artificial sequence
  SiRNA target sequence
tgcacccgctaaatagattatag

SEQ ID NO: 201628 - DNA, 23 bp, Artificial sequence
  SiRNA target sequence
gcacccgctaaatagattatagc

SEQ ID NO: 201629 - DNA, 23 bp, Artificial sequence
  SiRNA target sequence
cacccgctaaatagattatagct

SEQ ID NO: 201630 - DNA, 23 bp, Artificial sequence
  SiRNA target sequence
acccgctaaatagattatagctc

SEQ ID NO: 201631 - DNA, 23 bp, Artificial sequence
  SiRNA target sequence
cccgctaaatagattatagctct

SEQ ID NO: 201632 - DNA, 23 bp, Artificial sequence
  SiRNA target sequence
ccgctaaatagattatagctcta

SEQ ID NO: 201633 - DNA, 23 bp, Artificial sequence
  SiRNA target sequence
cgctaaatagattatagctctaa

SEQ ID NO: 201634 - DNA, 23 bp, Artificial sequence
  SiRNA target sequence
gctaaatagattatagctctaat

SEQ ID NO: 201635 - DNA, 23 bp, Artificial sequence
  SiRNA target sequence
ctaaatagattatagctctaatc

SEQ ID NO: 201636 - DNA, 23 bp, Artificial sequence
  SiRNA target sequence
taaatagattatagctctaatcc

SEQ ID NO: 201637 - DNA, 23 bp, Artificial sequence
  SiRNA target sequence
aaatagattatagctctaatcca

SEQ ID NO: 201638 - DNA, 23 bp, Artificial sequence
  SiRNA target sequence
aatagattatagctctaatccaa

SEQ ID NO: 201639 - DNA, 23 bp, Artificial sequence
  SiRNA target sequence
atagattatagctctaatccaaa

SEQ ID NO: 201640 - DNA, 23 bp, Artificial sequence
  SiRNA target sequence
tagattatagctctaatccaaat

SEQ ID NO: 201641 - DNA, 23 bp, Artificial sequence
  SiRNA target sequence
agattatagctctaatccaaata

SEQ ID NO: 201642 - DNA, 23 bp, Artificial sequence
  SiRNA target sequence
gattatagctctaatccaaatat

SEQ ID NO: 201643 - DNA, 23 bp, Artificial sequence
  SiRNA target sequence
attatagctctaatccaaatata

SEQ ID NO: 201644 - DNA, 23 bp, Artificial sequence
  SiRNA target sequence
ttatagctctaatccaaatataa

SEQ ID NO: 201645 - DNA, 23 bp, Artificial sequence
  SiRNA target sequence
tatagctctaatccaaatataaa

SEQ ID NO: 201646 - DNA, 23 bp, Artificial sequence
  SiRNA target sequence
atagctctaatccaaatataaat

SEQ ID NO: 201647 - DNA, 23 bp, Artificial sequence
  SiRNA target sequence
tagctctaatccaaatataaatc

SEQ ID NO: 201648 - DNA, 23 bp, Artificial sequence
  SiRNA target sequence
agctctaatccaaatataaatca

SEQ ID NO: 201649 - DNA, 23 bp, Artificial sequence
  SiRNA target sequence
gctctaatccaaatataaatcaa

SEQ ID NO: 201650 - DNA, 23 bp, Artificial sequence
  SiRNA target sequence
ctctaatccaaatataaatcaat

SEQ ID NO: 201651 - DNA, 23 bp, Artificial sequence
  SiRNA target sequence
tctaatccaaatataaatcaata

SEQ ID NO: 201652 - DNA, 23 bp, Artificial sequence
  SiRNA target sequence
ctaatccaaatataaatcaatat

SEQ ID NO: 201653 - DNA, 23 bp, Artificial sequence
  SiRNA target sequence
taatccaaatataaatcaatatt

SEQ ID NO: 201654 - DNA, 23 bp, Artificial sequence
  SiRNA target sequence
aatccaaatataaatcaatatta

SEQ ID NO: 201655 - DNA, 23 bp, Artificial sequence
  SiRNA target sequence
atccaaatataaatcaatattat

SEQ ID NO: 201656 - DNA, 23 bp, Artificial sequence
  SiRNA target sequence
tccaaatataaatcaatattatt

SEQ ID NO: 201657 - DNA, 23 bp, Artificial sequence
  SiRNA target sequence
ccaaatataaatcaatattattg

SEQ ID NO: 201658 - DNA, 23 bp, Artificial sequence
  SiRNA target sequence
caaatataaatcaatattattgc

SEQ ID NO: 201659 - DNA, 23 bp, Artificial sequence
  SiRNA target sequence
aaatataaatcaatattattgca

SEQ ID NO: 201660 - DNA, 23 bp, Artificial sequence
  SiRNA target sequence
aatataaatcaatattattgcaa

SEQ ID NO: 201661 - DNA, 23 bp, Artificial sequence
  SiRNA target sequence
atataaatcaatattattgcaat

SEQ ID NO: 201662 - DNA, 23 bp, Artificial sequence
  SiRNA target sequence
tataaatcaatattattgcaatc

SEQ ID NO: 201663 - DNA, 23 bp, Artificial sequence
  SiRNA target sequence
ataaatcaatattattgcaatcg

SEQ ID NO: 201664 - DNA, 23 bp, Artificial sequence
  SiRNA target sequence
taaatcaatattattgcaatcgt

SEQ ID NO: 201665 - DNA, 23 bp, Artificial sequence
  SiRNA target sequence
aaatcaatattattgcaatcgtt

SEQ ID NO: 201666 - DNA, 23 bp, Artificial sequence
  SiRNA target sequence
aatcaatattattgcaatcgtta

SEQ ID NO: 201667 - DNA, 23 bp, Artificial sequence
  SiRNA target sequence
atcaatattattgcaatcgttaa

SEQ ID NO: 201668 - DNA, 23 bp, Artificial sequence
  SiRNA target sequence
tcaatattattgcaatcgttaat

SEQ ID NO: 201669 - DNA, 23 bp, Artificial sequence
  SiRNA target sequence
caatattattgcaatcgttaatg

SEQ ID NO: 201670 - DNA, 23 bp, Artificial sequence
  SiRNA target sequence
aatattattgcaatcgttaatgt

SEQ ID NO: 201671 - DNA, 23 bp, Artificial sequence
  SiRNA target sequence
atattattgcaatcgttaatgtg

SEQ ID NO: 201672 - DNA, 23 bp, Artificial sequence
  SiRNA target sequence
tattattgcaatcgttaatgtga

SEQ ID NO: 201673 - DNA, 23 bp, Artificial sequence
  SiRNA target sequence
attattgcaatcgttaatgtgat

SEQ ID NO: 201674 - DNA, 23 bp, Artificial sequence
  SiRNA target sequence
ttattgcaatcgttaatgtgatt

SEQ ID NO: 201675 - DNA, 23 bp, Artificial sequence
  SiRNA target sequence
tattgcaatcgttaatgtgattg

SEQ ID NO: 201676 - DNA, 23 bp, Artificial sequence
  SiRNA target sequence
attgcaatcgttaatgtgattgg

SEQ ID NO: 201677 - DNA, 23 bp, Artificial sequence
  SiRNA target sequence
ttgcaatcgttaatgtgattgga

SEQ ID NO: 201678 - DNA, 23 bp, Artificial sequence
  SiRNA target sequence
tgcaatcgttaatgtgattggac

SEQ ID NO: 201679 - DNA, 23 bp, Artificial sequence
  SiRNA target sequence
gcaatcgttaatgtgattggact

SEQ ID NO: 201680 - DNA, 23 bp, Artificial sequence
  SiRNA target sequence
caatcgttaatgtgattggacta

SEQ ID NO: 201681 - DNA, 23 bp, Artificial sequence
  SiRNA target sequence
aatcgttaatgtgattggactac

SEQ ID NO: 201682 - DNA, 23 bp, Artificial sequence
  SiRNA target sequence
atcgttaatgtgattggactacc

SEQ ID NO: 201683 - DNA, 23 bp, Artificial sequence
  SiRNA target sequence
tcgttaatgtgattggactaccc

SEQ ID NO: 201684 - DNA, 23 bp, Artificial sequence
  SiRNA target sequence
cgttaatgtgattggactaccct

SEQ ID NO: 201685 - DNA, 23 bp, Artificial sequence
  SiRNA target sequence
gttaatgtgattggactaccctt

SEQ ID NO: 201686 - DNA, 23 bp, Artificial sequence
  SiRNA target sequence
ttaatgtgattggactacccttc

SEQ ID NO: 201687 - DNA, 23 bp, Artificial sequence
  SiRNA target sequence
taatgtgattggactacccttcc

SEQ ID NO: 201688 - DNA, 23 bp, Artificial sequence
  SiRNA target sequence
aatgtgattggactacccttcct

SEQ ID NO: 201689 - DNA, 23 bp, Artificial sequence
  SiRNA target sequence
atgtgattggactacccttcctt

SEQ ID NO: 201690 - DNA, 23 bp, Artificial sequence
  SiRNA target sequence
tgtgattggactacccttcctta

SEQ ID NO: 201691 - DNA, 23 bp, Artificial sequence
  SiRNA target sequence
gtgattggactacccttccttac

SEQ ID NO: 201692 - DNA, 23 bp, Artificial sequence
  SiRNA target sequence
tgattggactacccttccttaca

SEQ ID NO: 201693 - DNA, 23 bp, Artificial sequence
  SiRNA target sequence
gattggactacccttccttacat

SEQ ID NO: 201694 - DNA, 23 bp, Artificial sequence
  SiRNA target sequence
attggactacccttccttacatt

SEQ ID NO: 201695 - DNA, 23 bp, Artificial sequence
  SiRNA target sequence
ttggactacccttccttacatta

SEQ ID NO: 201696 - DNA, 23 bp, Artificial sequence
  SiRNA target sequence
tggactacccttccttacattat

SEQ ID NO: 201697 - DNA, 23 bp, Artificial sequence
  SiRNA target sequence
ggactacccttccttacattatc

SEQ ID NO: 201698 - DNA, 23 bp, Artificial sequence
  SiRNA target sequence
gactacccttccttacattatca

SEQ ID NO: 201699 - DNA, 23 bp, Artificial sequence
  SiRNA target sequence
actacccttccttacattatcag

SEQ ID NO: 201700 - DNA, 23 bp, Artificial sequence
  SiRNA target sequence
ctacccttccttacattatcagt

SEQ ID NO: 201701 - DNA, 23 bp, Artificial sequence
  SiRNA target sequence
tacccttccttacattatcagta

SEQ ID NO: 201702 - DNA, 23 bp, Artificial sequence
  SiRNA target sequence
acccttccttacattatcagtat

SEQ ID NO: 201703 - DNA, 23 bp, Artificial sequence
  SiRNA target sequence
cccttccttacattatcagtatc

SEQ ID NO: 201704 - DNA, 23 bp, Artificial sequence
  SiRNA target sequence
ccttccttacattatcagtatca

SEQ ID NO: 201705 - DNA, 23 bp, Artificial sequence
  SiRNA target sequence
cttccttacattatcagtatcaa

SEQ ID NO: 201706 - DNA, 23 bp, Artificial sequence
  SiRNA target sequence
ttccttacattatcagtatcaag

SEQ ID NO: 201707 - DNA, 23 bp, Artificial sequence
  SiRNA target sequence
tccttacattatcagtatcaagt

SEQ ID NO: 201708 - DNA, 23 bp, Artificial sequence
  SiRNA target sequence
ccttacattatcagtatcaagtg

SEQ ID NO: 201709 - DNA, 23 bp, Artificial sequence
  SiRNA target sequence
cttacattatcagtatcaagtgc

SEQ ID NO: 201710 - DNA, 23 bp, Artificial sequence
  SiRNA target sequence
ttacattatcagtatcaagtgct

SEQ ID NO: 201711 - DNA, 23 bp, Artificial sequence
  SiRNA target sequence
tacattatcagtatcaagtgcta

SEQ ID NO: 201712 - DNA, 23 bp, Artificial sequence
  SiRNA target sequence
acattatcagtatcaagtgctac

SEQ ID NO: 201713 - DNA, 23 bp, Artificial sequence
  SiRNA target sequence
cattatcagtatcaagtgctact

SEQ ID NO: 201714 - DNA, 23 bp, Artificial sequence
  SiRNA target sequence
attatcagtatcaagtgctacta

SEQ ID NO: 201715 - DNA, 23 bp, Artificial sequence
  SiRNA target sequence
ttatcagtatcaagtgctactaa

SEQ ID NO: 201716 - DNA, 23 bp, Artificial sequence
  SiRNA target sequence
tatcagtatcaagtgctactaat

SEQ ID NO: 201717 - DNA, 23 bp, Artificial sequence
  SiRNA target sequence
atcagtatcaagtgctactaata

SEQ ID NO: 201718 - DNA, 23 bp, Artificial sequence
  SiRNA target sequence
tcagtatcaagtgctactaatat

SEQ ID NO: 201719 - DNA, 23 bp, Artificial sequence
  SiRNA target sequence
cagtatcaagtgctactaatatg

SEQ ID NO: 201720 - DNA, 23 bp, Artificial sequence
  SiRNA target sequence
agtatcaagtgctactaatatgg

SEQ ID NO: 201721 - DNA, 23 bp, Artificial sequence
  SiRNA target sequence
gtatcaagtgctactaatatggc

SEQ ID NO: 201722 - DNA, 23 bp, Artificial sequence
  SiRNA target sequence
tatcaagtgctactaatatggct

SEQ ID NO: 201723 - DNA, 23 bp, Artificial sequence
  SiRNA target sequence
atcaagtgctactaatatggcta

SEQ ID NO: 201724 - DNA, 23 bp, Artificial sequence
  SiRNA target sequence
tcaagtgctactaatatggctag

SEQ ID NO: 201725 - DNA, 23 bp, Artificial sequence
  SiRNA target sequence
caagtgctactaatatggctagt

SEQ ID NO: 201726 - DNA, 23 bp, Artificial sequence
  SiRNA target sequence
aagtgctactaatatggctagtc

SEQ ID NO: 201727 - DNA, 23 bp, Artificial sequence
  SiRNA target sequence
agtgctactaatatggctagtcc

SEQ ID NO: 201728 - DNA, 23 bp, Artificial sequence
  SiRNA target sequence
gtgctactaatatggctagtcca

SEQ ID NO: 201729 - DNA, 23 bp, Artificial sequence
  SiRNA target sequence
tgctactaatatggctagtccat

SEQ ID NO: 201730 - DNA, 23 bp, Artificial sequence
  SiRNA target sequence
gctactaatatggctagtccata

SEQ ID NO: 201731 - DNA, 23 bp, Artificial sequence
  SiRNA target sequence
ctactaatatggctagtccatat

SEQ ID NO: 201732 - DNA, 23 bp, Artificial sequence
  SiRNA target sequence
tactaatatggctagtccatata

SEQ ID NO: 201733 - DNA, 23 bp, Artificial sequence
  SiRNA target sequence
actaatatggctagtccatataa

SEQ ID NO: 201734 - DNA, 23 bp, Artificial sequence
  SiRNA target sequence
ctaatatggctagtccatataat

SEQ ID NO: 201735 - DNA, 23 bp, Artificial sequence
  SiRNA target sequence
taatatggctagtccatataatg

SEQ ID NO: 201736 - DNA, 23 bp, Artificial sequence
  SiRNA target sequence
aatatggctagtccatataatga

SEQ ID NO: 201737 - DNA, 23 bp, Artificial sequence
  SiRNA target sequence
atatggctagtccatataatgaa

SEQ ID NO: 201738 - DNA, 23 bp, Artificial sequence
  SiRNA target sequence
tatggctagtccatataatgaac

SEQ ID NO: 201739 - DNA, 23 bp, Artificial sequence
  SiRNA target sequence
atggctagtccatataatgaacc

SEQ ID NO: 201740 - DNA, 23 bp, Artificial sequence
  SiRNA target sequence
tggctagtccatataatgaacca

SEQ ID NO: 201741 - DNA, 23 bp, Artificial sequence
  SiRNA target sequence
ggctagtccatataatgaaccaa

SEQ ID NO: 201742 - DNA, 23 bp, Artificial sequence
  SiRNA target sequence
gctagtccatataatgaaccaat

SEQ ID NO: 201743 - DNA, 23 bp, Artificial sequence
  SiRNA target sequence
ctagtccatataatgaaccaata

SEQ ID NO: 201744 - DNA, 23 bp, Artificial sequence
  SiRNA target sequence
tagtccatataatgaaccaatag

SEQ ID NO: 201745 - DNA, 23 bp, Artificial sequence
  SiRNA target sequence
agtccatataatgaaccaataga

SEQ ID NO: 201746 - DNA, 23 bp, Artificial sequence
  SiRNA target sequence
gtccatataatgaaccaatagat

SEQ ID NO: 201747 - DNA, 23 bp, Artificial sequence
  SiRNA target sequence
tccatataatgaaccaatagatt

SEQ ID NO: 201748 - DNA, 23 bp, Artificial sequence
  SiRNA target sequence
ccatataatgaaccaatagattt

SEQ ID NO: 201749 - DNA, 23 bp, Artificial sequence
  SiRNA target sequence
catataatgaaccaatagatttt

SEQ ID NO: 201750 - DNA, 23 bp, Artificial sequence
  SiRNA target sequence
atataatgaaccaatagattttc

SEQ ID NO: 201751 - DNA, 23 bp, Artificial sequence
  SiRNA target sequence
tataatgaaccaatagattttcc

SEQ ID NO: 201752 - DNA, 23 bp, Artificial sequence
  SiRNA target sequence
ataatgaaccaatagattttcct

SEQ ID NO: 201753 - DNA, 23 bp, Artificial sequence
  SiRNA target sequence
taatgaaccaatagattttccta

SEQ ID NO: 201754 - DNA, 23 bp, Artificial sequence
  SiRNA target sequence
aatgaaccaatagattttcctaa

SEQ ID NO: 201755 - DNA, 23 bp, Artificial sequence
  SiRNA target sequence
atgaaccaatagattttcctaat

SEQ ID NO: 201756 - DNA, 23 bp, Artificial sequence
  SiRNA target sequence
tgaaccaatagattttcctaatt

SEQ ID NO: 201757 - DNA, 23 bp, Artificial sequence
  SiRNA target sequence
gaaccaatagattttcctaattt

SEQ ID NO: 201758 - DNA, 23 bp, Artificial sequence
  SiRNA target sequence
aaccaatagattttcctaattta

SEQ ID NO: 201759 - DNA, 23 bp, Artificial sequence
  SiRNA target sequence
accaatagattttcctaatttat

SEQ ID NO: 201760 - DNA, 23 bp, Artificial sequence
  SiRNA target sequence
ccaatagattttcctaatttatt

SEQ ID NO: 201761 - DNA, 23 bp, Artificial sequence
  SiRNA target sequence
caatagattttcctaatttatta

SEQ ID NO: 201762 - DNA, 23 bp, Artificial sequence
  SiRNA target sequence
aatagattttcctaatttattaa

SEQ ID NO: 201763 - DNA, 23 bp, Artificial sequence
  SiRNA target sequence
atagattttcctaatttattaaa

SEQ ID NO: 201764 - DNA, 23 bp, Artificial sequence
  SiRNA target sequence
tagattttcctaatttattaaaa

SEQ ID NO: 201765 - DNA, 23 bp, Artificial sequence
  SiRNA target sequence
agattttcctaatttattaaaaa

SEQ ID NO: 201766 - DNA, 23 bp, Artificial sequence
  SiRNA target sequence
gattttcctaatttattaaaaat

SEQ ID NO: 201767 - DNA, 23 bp, Artificial sequence
  SiRNA target sequence
attttcctaatttattaaaaata

SEQ ID NO: 201768 - DNA, 23 bp, Artificial sequence
  SiRNA target sequence
ttttcctaatttattaaaaatac

SEQ ID NO: 201769 - DNA, 23 bp, Artificial sequence
  SiRNA target sequence
tttcctaatttattaaaaatacc

SEQ ID NO: 201770 - DNA, 23 bp, Artificial sequence
  SiRNA target sequence
ttcctaatttattaaaaatacca

SEQ ID NO: 201771 - DNA, 23 bp, Artificial sequence
  SiRNA target sequence
tcctaatttattaaaaataccat

SEQ ID NO: 201772 - DNA, 23 bp, Artificial sequence
  SiRNA target sequence
cctaatttattaaaaataccatc

SEQ ID NO: 201773 - DNA, 23 bp, Artificial sequence
  SiRNA target sequence
ctaatttattaaaaataccatca

SEQ ID NO: 201774 - DNA, 23 bp, Artificial sequence
  SiRNA target sequence
taatttattaaaaataccatcat

SEQ ID NO: 201775 - DNA, 23 bp, Artificial sequence
  SiRNA target sequence
aatttattaaaaataccatcata

SEQ ID NO: 201776 - DNA, 23 bp, Artificial sequence
  SiRNA target sequence
atttattaaaaataccatcataa

SEQ ID NO: 201777 - DNA, 23 bp, Artificial sequence
  SiRNA target sequence
tttattaaaaataccatcataaa

SEQ ID NO: 201778 - DNA, 23 bp, Artificial sequence
  SiRNA target sequence
ttattaaaaataccatcataaac

SEQ ID NO: 201779 - DNA, 23 bp, Artificial sequence
  SiRNA target sequence
tattaaaaataccatcataaaca

SEQ ID NO: 201780 - DNA, 23 bp, Artificial sequence
  SiRNA target sequence
attaaaaataccatcataaacac

SEQ ID NO: 201781 - DNA, 23 bp, Artificial sequence
  SiRNA target sequence
ttaaaaataccatcataaacact

SEQ ID NO: 201782 - DNA, 23 bp, Artificial sequence
  SiRNA target sequence
taaaaataccatcataaacactt

SEQ ID NO: 201783 - DNA, 23 bp, Artificial sequence
  SiRNA target sequence
aaaaataccatcataaacacttt

SEQ ID NO: 201784 - DNA, 23 bp, Artificial sequence
  SiRNA target sequence
aaaataccatcataaacactttt

SEQ ID NO: 201785 - DNA, 23 bp, Artificial sequence
  SiRNA target sequence
aaataccatcataaacactttta

SEQ ID NO: 201786 - DNA, 23 bp, Artificial sequence
  SiRNA target sequence
aataccatcataaacacttttaa

SEQ ID NO: 201787 - DNA, 23 bp, Artificial sequence
  SiRNA target sequence
ataccatcataaacacttttaaa

SEQ ID NO: 201788 - DNA, 23 bp, Artificial sequence
  SiRNA target sequence
taccatcataaacacttttaaac

SEQ ID NO: 201789 - DNA, 23 bp, Artificial sequence
  SiRNA target sequence
accatcataaacacttttaaacc

SEQ ID NO: 201790 - DNA, 23 bp, Artificial sequence
  SiRNA target sequence
ccatcataaacacttttaaaccg

SEQ ID NO: 201791 - DNA, 23 bp, Artificial sequence
  SiRNA target sequence
catcataaacacttttaaaccgt

SEQ ID NO: 201792 - DNA, 23 bp, Artificial sequence
  SiRNA target sequence
atcataaacacttttaaaccgtg

SEQ ID NO: 201793 - DNA, 23 bp, Artificial sequence
  SiRNA target sequence
tcataaacacttttaaaccgtgc

SEQ ID NO: 201794 - DNA, 23 bp, Artificial sequence
  SiRNA target sequence
cataaacacttttaaaccgtgcc

SEQ ID NO: 201795 - DNA, 23 bp, Artificial sequence
  SiRNA target sequence
ataaacacttttaaaccgtgccc

SEQ ID NO: 201796 - DNA, 23 bp, Artificial sequence
  SiRNA target sequence
taaacacttttaaaccgtgccct

SEQ ID NO: 201797 - DNA, 23 bp, Artificial sequence
  SiRNA target sequence
aaacacttttaaaccgtgccctg

SEQ ID NO: 201798 - DNA, 23 bp, Artificial sequence
  SiRNA target sequence
aacacttttaaaccgtgccctgt

SEQ ID NO: 201799 - DNA, 23 bp, Artificial sequence
  SiRNA target sequence
acacttttaaaccgtgccctgtg

SEQ ID NO: 201800 - DNA, 23 bp, Artificial sequence
  SiRNA target sequence
cacttttaaaccgtgccctgtgt

SEQ ID NO: 201801 - DNA, 23 bp, Artificial sequence
  SiRNA target sequence
acttttaaaccgtgccctgtgtg

SEQ ID NO: 201802 - DNA, 23 bp, Artificial sequence
  SiRNA target sequence
cttttaaaccgtgccctgtgtgc

SEQ ID NO: 201803 - DNA, 23 bp, Artificial sequence
  SiRNA target sequence
ttttaaaccgtgccctgtgtgca

SEQ ID NO: 201804 - DNA, 23 bp, Artificial sequence
  SiRNA target sequence
tttaaaccgtgccctgtgtgcag

SEQ ID NO: 201805 - DNA, 23 bp, Artificial sequence
  SiRNA target sequence
ttaaaccgtgccctgtgtgcagg

SEQ ID NO: 201806 - DNA, 23 bp, Artificial sequence
  SiRNA target sequence
taaaccgtgccctgtgtgcagga

SEQ ID NO: 201807 - DNA, 23 bp, Artificial sequence
  SiRNA target sequence
aaaccgtgccctgtgtgcaggat

SEQ ID NO: 201808 - DNA, 23 bp, Artificial sequence
  SiRNA target sequence
aaccgtgccctgtgtgcaggatc

SEQ ID NO: 201809 - DNA, 23 bp, Artificial sequence
  SiRNA target sequence
accgtgccctgtgtgcaggatcg

SEQ ID NO: 201810 - DNA, 23 bp, Artificial sequence
  SiRNA target sequence
ccgtgccctgtgtgcaggatcga

SEQ ID NO: 201811 - DNA, 23 bp, Artificial sequence
  SiRNA target sequence
cgtgccctgtgtgcaggatcgat

SEQ ID NO: 201812 - DNA, 23 bp, Artificial sequence
  SiRNA target sequence
gtgccctgtgtgcaggatcgatt

SEQ ID NO: 201813 - DNA, 23 bp, Artificial sequence
  SiRNA target sequence
tgccctgtgtgcaggatcgattc

SEQ ID NO: 201814 - DNA, 23 bp, Artificial sequence
  SiRNA target sequence
gccctgtgtgcaggatcgattct

SEQ ID NO: 201815 - DNA, 23 bp, Artificial sequence
  SiRNA target sequence
ccctgtgtgcaggatcgattctc

SEQ ID NO: 201816 - DNA, 23 bp, Artificial sequence
  SiRNA target sequence
cctgtgtgcaggatcgattctca

SEQ ID NO: 201817 - DNA, 23 bp, Artificial sequence
  SiRNA target sequence
ctgtgtgcaggatcgattctcat

SEQ ID NO: 201818 - DNA, 23 bp, Artificial sequence
  SiRNA target sequence
tgtgtgcaggatcgattctcata

SEQ ID NO: 201819 - DNA, 23 bp, Artificial sequence
  SiRNA target sequence
gtgtgcaggatcgattctcatac

SEQ ID NO: 201820 - DNA, 23 bp, Artificial sequence
  SiRNA target sequence
tgtgcaggatcgattctcatacc

SEQ ID NO: 201821 - DNA, 23 bp, Artificial sequence
  SiRNA target sequence
gtgcaggatcgattctcataccc

SEQ ID NO: 201822 - DNA, 23 bp, Artificial sequence
  SiRNA target sequence
tgcaggatcgattctcataccca

SEQ ID NO: 201823 - DNA, 23 bp, Artificial sequence
  SiRNA target sequence
gcaggatcgattctcatacccat

SEQ ID NO: 201824 - DNA, 23 bp, Artificial sequence
  SiRNA target sequence
caggatcgattctcatacccatt

SEQ ID NO: 201825 - DNA, 23 bp, Artificial sequence
  SiRNA target sequence
aggatcgattctcatacccattt

SEQ ID NO: 201826 - DNA, 23 bp, Artificial sequence
  SiRNA target sequence
ggatcgattctcatacccatttt

SEQ ID NO: 201827 - DNA, 23 bp, Artificial sequence
  SiRNA target sequence
gatcgattctcatacccattttc

SEQ ID NO: 201828 - DNA, 23 bp, Artificial sequence
  SiRNA target sequence
atcgattctcatacccattttct

SEQ ID NO: 201829 - DNA, 23 bp, Artificial sequence
  SiRNA target sequence
tcgattctcatacccattttctc

SEQ ID NO: 201830 - DNA, 23 bp, Artificial sequence
  SiRNA target sequence
cgattctcatacccattttctct

SEQ ID NO: 201831 - DNA, 23 bp, Artificial sequence
  SiRNA target sequence
gattctcatacccattttctctt

SEQ ID NO: 201832 - DNA, 23 bp, Artificial sequence
  SiRNA target sequence
attctcatacccattttctcttt

SEQ ID NO: 201833 - DNA, 23 bp, Artificial sequence
  SiRNA target sequence
ttctcatacccattttctcttta

SEQ ID NO: 201834 - DNA, 23 bp, Artificial sequence
  SiRNA target sequence
tctcatacccattttctctttac

SEQ ID NO: 201835 - DNA, 23 bp, Artificial sequence
  SiRNA target sequence
ctcatacccattttctctttaca

SEQ ID NO: 201836 - DNA, 23 bp, Artificial sequence
  SiRNA target sequence
tcatacccattttctctttacaa

SEQ ID NO: 201837 - DNA, 23 bp, Artificial sequence
  SiRNA target sequence
catacccattttctctttacaaa

SEQ ID NO: 201838 - DNA, 23 bp, Artificial sequence
  SiRNA target sequence
atacccattttctctttacaaat

SEQ ID NO: 201839 - DNA, 23 bp, Artificial sequence
  SiRNA target sequence
tacccattttctctttacaaata

SEQ ID NO: 201840 - DNA, 23 bp, Artificial sequence
  SiRNA target sequence
acccattttctctttacaaatat

SEQ ID NO: 201841 - DNA, 23 bp, Artificial sequence
  SiRNA target sequence
cccattttctctttacaaatatc

SEQ ID NO: 201842 - DNA, 23 bp, Artificial sequence
  SiRNA target sequence
ccattttctctttacaaatatca

SEQ ID NO: 201843 - DNA, 23 bp, Artificial sequence
  SiRNA target sequence
cattttctctttacaaatatcaa

SEQ ID NO: 201844 - DNA, 23 bp, Artificial sequence
  SiRNA target sequence
attttctctttacaaatatcaaa

SEQ ID NO: 201845 - DNA, 23 bp, Artificial sequence
  SiRNA target sequence
ttttctctttacaaatatcaaag

SEQ ID NO: 201846 - DNA, 23 bp, Artificial sequence
  SiRNA target sequence
tttctctttacaaatatcaaagg

SEQ ID NO: 201847 - DNA, 23 bp, Artificial sequence
  SiRNA target sequence
ttctctttacaaatatcaaaggc

SEQ ID NO: 201848 - DNA, 23 bp, Artificial sequence
  SiRNA target sequence
tctctttacaaatatcaaaggct

SEQ ID NO: 201849 - DNA, 23 bp, Artificial sequence
  SiRNA target sequence
ctctttacaaatatcaaaggctg

SEQ ID NO: 201850 - DNA, 23 bp, Artificial sequence
  SiRNA target sequence
tctttacaaatatcaaaggctga

SEQ ID NO: 201851 - DNA, 23 bp, Artificial sequence
  SiRNA target sequence
ctttacaaatatcaaaggctgaa

SEQ ID NO: 201852 - DNA, 23 bp, Artificial sequence
  SiRNA target sequence
tttacaaatatcaaaggctgaat

SEQ ID NO: 201853 - DNA, 23 bp, Artificial sequence
  SiRNA target sequence
ttacaaatatcaaaggctgaata

SEQ ID NO: 201854 - DNA, 23 bp, Artificial sequence
  SiRNA target sequence
tacaaatatcaaaggctgaatat

SEQ ID NO: 201855 - DNA, 23 bp, Artificial sequence
  SiRNA target sequence
acaaatatcaaaggctgaatatt

SEQ ID NO: 201856 - DNA, 23 bp, Artificial sequence
  SiRNA target sequence
caaatatcaaaggctgaatattt

SEQ ID NO: 201857 - DNA, 23 bp, Artificial sequence
  SiRNA target sequence
aaatatcaaaggctgaatatttt

SEQ ID NO: 201858 - DNA, 23 bp, Artificial sequence
  SiRNA target sequence
aatatcaaaggctgaatatttta

SEQ ID NO: 201859 - DNA, 23 bp, Artificial sequence
  SiRNA target sequence
atatcaaaggctgaatattttaa

SEQ ID NO: 201860 - DNA, 23 bp, Artificial sequence
  SiRNA target sequence
tatcaaaggctgaatattttaat

SEQ ID NO: 201861 - DNA, 23 bp, Artificial sequence
  SiRNA target sequence
atcaaaggctgaatattttaata

SEQ ID NO: 201862 - DNA, 23 bp, Artificial sequence
  SiRNA target sequence
tcaaaggctgaatattttaatac

SEQ ID NO: 201863 - DNA, 23 bp, Artificial sequence
  SiRNA target sequence
caaaggctgaatattttaatact

SEQ ID NO: 201864 - DNA, 23 bp, Artificial sequence
  SiRNA target sequence
aaaggctgaatattttaatactt

SEQ ID NO: 201865 - DNA, 23 bp, Artificial sequence
  SiRNA target sequence
aaggctgaatattttaatacttt

SEQ ID NO: 201866 - DNA, 23 bp, Artificial sequence
  SiRNA target sequence
aggctgaatattttaatactttt

SEQ ID NO: 201867 - DNA, 23 bp, Artificial sequence
  SiRNA target sequence
ggctgaatattttaatactttta

SEQ ID NO: 201868 - DNA, 23 bp, Artificial sequence
  SiRNA target sequence
gctgaatattttaatacttttat

SEQ ID NO: 201869 - DNA, 23 bp, Artificial sequence
  SiRNA target sequence
ctgaatattttaatacttttatg

SEQ ID NO: 201870 - DNA, 23 bp, Artificial sequence
  SiRNA target sequence
tgaatattttaatacttttatga

SEQ ID NO: 201871 - DNA, 23 bp, Artificial sequence
  SiRNA target sequence
gaatattttaatacttttatgaa

SEQ ID NO: 201872 - DNA, 23 bp, Artificial sequence
  SiRNA target sequence
aatattttaatacttttatgaat

SEQ ID NO: 201873 - DNA, 23 bp, Artificial sequence
  SiRNA target sequence
atattttaatacttttatgaatg

SEQ ID NO: 201874 - DNA, 23 bp, Artificial sequence
  SiRNA target sequence
tattttaatacttttatgaatgc

SEQ ID NO: 201875 - DNA, 23 bp, Artificial sequence
  SiRNA target sequence
attttaatacttttatgaatgct

SEQ ID NO: 201876 - DNA, 23 bp, Artificial sequence
  SiRNA target sequence
ttttaatacttttatgaatgcta

SEQ ID NO: 201877 - DNA, 23 bp, Artificial sequence
  SiRNA target sequence
tttaatacttttatgaatgctaa

SEQ ID NO: 201878 - DNA, 23 bp, Artificial sequence
  SiRNA target sequence
ttaatacttttatgaatgctaaa

SEQ ID NO: 201879 - DNA, 23 bp, Artificial sequence
  SiRNA target sequence
taatacttttatgaatgctaaaa

SEQ ID NO: 201880 - DNA, 23 bp, Artificial sequence
  SiRNA target sequence
aatacttttatgaatgctaaaaa

SEQ ID NO: 201881 - DNA, 23 bp, Artificial sequence
  SiRNA target sequence
atacttttatgaatgctaaaaag

SEQ ID NO: 201882 - DNA, 23 bp, Artificial sequence
  SiRNA target sequence
tacttttatgaatgctaaaaaga

SEQ ID NO: 201883 - DNA, 23 bp, Artificial sequence
  SiRNA target sequence
acttttatgaatgctaaaaagaa

SEQ ID NO: 201884 - DNA, 23 bp, Artificial sequence
  SiRNA target sequence
cttttatgaatgctaaaaagaac

SEQ ID NO: 201885 - DNA, 23 bp, Artificial sequence
  SiRNA target sequence
ttttatgaatgctaaaaagaaca

SEQ ID NO: 201886 - DNA, 23 bp, Artificial sequence
  SiRNA target sequence
tttatgaatgctaaaaagaacat

SEQ ID NO: 201887 - DNA, 23 bp, Artificial sequence
  SiRNA target sequence
ttatgaatgctaaaaagaacatt

SEQ ID NO: 201888 - DNA, 23 bp, Artificial sequence
  SiRNA target sequence
tatgaatgctaaaaagaacattc

SEQ ID NO: 201889 - DNA, 23 bp, Artificial sequence
  SiRNA target sequence
atgaatgctaaaaagaacattcc

SEQ ID NO: 201890 - DNA, 23 bp, Artificial sequence
  SiRNA target sequence
tgaatgctaaaaagaacattcca

SEQ ID NO: 201891 - DNA, 23 bp, Artificial sequence
  SiRNA target sequence
gaatgctaaaaagaacattccac

SEQ ID NO: 201892 - DNA, 23 bp, Artificial sequence
  SiRNA target sequence
aatgctaaaaagaacattccact

SEQ ID NO: 201893 - DNA, 23 bp, Artificial sequence
  SiRNA target sequence
atgctaaaaagaacattccactg

SEQ ID NO: 201894 - DNA, 23 bp, Artificial sequence
  SiRNA target sequence
tgctaaaaagaacattccactgt

SEQ ID NO: 201895 - DNA, 23 bp, Artificial sequence
  SiRNA target sequence
gctaaaaagaacattccactgta

SEQ ID NO: 201896 - DNA, 23 bp, Artificial sequence
  SiRNA target sequence
ctaaaaagaacattccactgtaa

SEQ ID NO: 201897 - DNA, 23 bp, Artificial sequence
  SiRNA target sequence
taaaaagaacattccactgtaat

SEQ ID NO: 201898 - DNA, 23 bp, Artificial sequence
  SiRNA target sequence
aaaaagaacattccactgtaatt

SEQ ID NO: 201899 - DNA, 23 bp, Artificial sequence
  SiRNA target sequence
aaaagaacattccactgtaattt

SEQ ID NO: 201900 - DNA, 23 bp, Artificial sequence
  SiRNA target sequence
aaagaacattccactgtaatttt

SEQ ID NO: 201901 - DNA, 23 bp, Artificial sequence
  SiRNA target sequence
aagaacattccactgtaattttc

SEQ ID NO: 201902 - DNA, 23 bp, Artificial sequence
  SiRNA target sequence
agaacattccactgtaattttcg

SEQ ID NO: 201903 - DNA, 23 bp, Artificial sequence
  SiRNA target sequence
gaacattccactgtaattttcga

SEQ ID NO: 201904 - DNA, 23 bp, Artificial sequence
  SiRNA target sequence
aacattccactgtaattttcgat

SEQ ID NO: 201905 - DNA, 23 bp, Artificial sequence
  SiRNA target sequence
acattccactgtaattttcgatc

SEQ ID NO: 201906 - DNA, 23 bp, Artificial sequence
  SiRNA target sequence
cattccactgtaattttcgatcg

SEQ ID NO: 201907 - DNA, 23 bp, Artificial sequence
  SiRNA target sequence
attccactgtaattttcgatcgt

SEQ ID NO: 201908 - DNA, 23 bp, Artificial sequence
  SiRNA target sequence
ttccactgtaattttcgatcgta

SEQ ID NO: 201909 - DNA, 23 bp, Artificial sequence
  SiRNA target sequence
tccactgtaattttcgatcgtat

SEQ ID NO: 201910 - DNA, 23 bp, Artificial sequence
  SiRNA target sequence
ccactgtaattttcgatcgtata

SEQ ID NO: 201911 - DNA, 23 bp, Artificial sequence
  SiRNA target sequence
cactgtaattttcgatcgtataa

SEQ ID NO: 201912 - DNA, 23 bp, Artificial sequence
  SiRNA target sequence
actgtaattttcgatcgtataaa

SEQ ID NO: 201913 - DNA, 23 bp, Artificial sequence
  SiRNA target sequence
ctgtaattttcgatcgtataaat

SEQ ID NO: 201914 - DNA, 23 bp, Artificial sequence
  SiRNA target sequence
tgtaattttcgatcgtataaatg

SEQ ID NO: 201915 - DNA, 23 bp, Artificial sequence
  SiRNA target sequence
gtaattttcgatcgtataaatgt

SEQ ID NO: 201916 - DNA, 23 bp, Artificial sequence
  SiRNA target sequence
taattttcgatcgtataaatgta

SEQ ID NO: 201917 - DNA, 23 bp, Artificial sequence
  SiRNA target sequence
aattttcgatcgtataaatgtac

SEQ ID NO: 201918 - DNA, 23 bp, Artificial sequence
  SiRNA target sequence
attttcgatcgtataaatgtacg

SEQ ID NO: 201919 - DNA, 23 bp, Artificial sequence
  SiRNA target sequence
ttttcgatcgtataaatgtacga

SEQ ID NO: 201920 - DNA, 23 bp, Artificial sequence
  SiRNA target sequence
tttcgatcgtataaatgtacgac

SEQ ID NO: 201921 - DNA, 23 bp, Artificial sequence
  SiRNA target sequence
ttcgatcgtataaatgtacgaca

SEQ ID NO: 201922 - DNA, 23 bp, Artificial sequence
  SiRNA target sequence
tcgatcgtataaatgtacgacat

SEQ ID NO: 201923 - DNA, 23 bp, Artificial sequence
  SiRNA target sequence
cgatcgtataaatgtacgacatt

SEQ ID NO: 201924 - DNA, 23 bp, Artificial sequence
  SiRNA target sequence
gatcgtataaatgtacgacattt

SEQ ID NO: 201925 - DNA, 23 bp, Artificial sequence
  SiRNA target sequence
atcgtataaatgtacgacatttt

SEQ ID NO: 201926 - DNA, 23 bp, Artificial sequence
  SiRNA target sequence
tcgtataaatgtacgacattttt

SEQ ID NO: 201927 - DNA, 23 bp, Artificial sequence
  SiRNA target sequence
cgtataaatgtacgacatttttt

SEQ ID NO: 201928 - DNA, 23 bp, Artificial sequence
  SiRNA target sequence
gtataaatgtacgacattttttt

SEQ ID NO: 201929 - DNA, 23 bp, Artificial sequence
  SiRNA target sequence
tataaatgtacgacattttttta

SEQ ID NO: 201930 - DNA, 23 bp, Artificial sequence
  SiRNA target sequence
ataaatgtacgacatttttttaa

SEQ ID NO: 201931 - DNA, 23 bp, Artificial sequence
  SiRNA target sequence
taaatgtacgacatttttttaaa

SEQ ID NO: 201932 - DNA, 23 bp, Artificial sequence
  SiRNA target sequence
aaatgtacgacatttttttaaaa

SEQ ID NO: 201933 - DNA, 23 bp, Artificial sequence
  SiRNA target sequence
aatgtacgacatttttttaaaaa

SEQ ID NO: 201934 - DNA, 23 bp, Artificial sequence
  SiRNA target sequence
atgtacgacatttttttaaaaaa

SEQ ID NO: 201935 - DNA, 23 bp, Artificial sequence
  SiRNA target sequence
tgtacgacatttttttaaaaaat

SEQ ID NO: 201936 - DNA, 23 bp, Artificial sequence
  SiRNA target sequence
gtacgacatttttttaaaaaata

SEQ ID NO: 201937 - DNA, 23 bp, Artificial sequence
  SiRNA target sequence
tacgacatttttttaaaaaatac

SEQ ID NO: 201938 - DNA, 23 bp, Artificial sequence
  SiRNA target sequence
acgacatttttttaaaaaataca

SEQ ID NO: 201939 - DNA, 23 bp, Artificial sequence
  SiRNA target sequence
cgacatttttttaaaaaatacag

SEQ ID NO: 201940 - DNA, 23 bp, Artificial sequence
  SiRNA target sequence
gacatttttttaaaaaatacaga

SEQ ID NO: 201941 - DNA, 23 bp, Artificial sequence
  SiRNA target sequence
acatttttttaaaaaatacagaa

SEQ ID NO: 201942 - DNA, 23 bp, Artificial sequence
  SiRNA target sequence
catttttttaaaaaatacagaaa

SEQ ID NO: 201943 - DNA, 23 bp, Artificial sequence
  SiRNA target sequence
atttttttaaaaaatacagaaat

SEQ ID NO: 201944 - DNA, 23 bp, Artificial sequence
  SiRNA target sequence
tttttttaaaaaatacagaaatc

SEQ ID NO: 201945 - DNA, 23 bp, Artificial sequence
  SiRNA target sequence
ttttttaaaaaatacagaaatcc

SEQ ID NO: 201946 - DNA, 23 bp, Artificial sequence
  SiRNA target sequence
tttttaaaaaatacagaaatcca

SEQ ID NO: 201947 - DNA, 23 bp, Artificial sequence
  SiRNA target sequence
ttttaaaaaatacagaaatccat

SEQ ID NO: 201948 - DNA, 23 bp, Artificial sequence
  SiRNA target sequence
tttaaaaaatacagaaatccatg

SEQ ID NO: 201949 - DNA, 23 bp, Artificial sequence
  SiRNA target sequence
ttaaaaaatacagaaatccatga

SEQ ID NO: 201950 - DNA, 23 bp, Artificial sequence
  SiRNA target sequence
taaaaaatacagaaatccatgaa

SEQ ID NO: 201951 - DNA, 23 bp, Artificial sequence
  SiRNA target sequence
aaaaaatacagaaatccatgaaa

SEQ ID NO: 201952 - DNA, 23 bp, Artificial sequence
  SiRNA target sequence
aaaaatacagaaatccatgaaaa

SEQ ID NO: 201953 - DNA, 23 bp, Artificial sequence
  SiRNA target sequence
aaaatacagaaatccatgaaaaa

SEQ ID NO: 201954 - DNA, 23 bp, Artificial sequence
  SiRNA target sequence
aaatacagaaatccatgaaaaag

SEQ ID NO: 201955 - DNA, 23 bp, Artificial sequence
  SiRNA target sequence
aatacagaaatccatgaaaaagc

SEQ ID NO: 201956 - DNA, 23 bp, Artificial sequence
  SiRNA target sequence
atacagaaatccatgaaaaagca

SEQ ID NO: 201957 - DNA, 23 bp, Artificial sequence
  SiRNA target sequence
tacagaaatccatgaaaaagcaa

SEQ ID NO: 201958 - DNA, 23 bp, Artificial sequence
  SiRNA target sequence
acagaaatccatgaaaaagcaag

SEQ ID NO: 201959 - DNA, 23 bp, Artificial sequence
  SiRNA target sequence
cagaaatccatgaaaaagcaagt

SEQ ID NO: 201960 - DNA, 23 bp, Artificial sequence
  SiRNA target sequence
agaaatccatgaaaaagcaagtc

SEQ ID NO: 201961 - DNA, 23 bp, Artificial sequence
  SiRNA target sequence
gaaatccatgaaaaagcaagtcc

SEQ ID NO: 201962 - DNA, 23 bp, Artificial sequence
  SiRNA target sequence
aaatccatgaaaaagcaagtcct

SEQ ID NO: 201963 - DNA, 23 bp, Artificial sequence
  SiRNA target sequence
aatccatgaaaaagcaagtcctt

SEQ ID NO: 201964 - DNA, 23 bp, Artificial sequence
  SiRNA target sequence
atccatgaaaaagcaagtccttc

SEQ ID NO: 201965 - DNA, 23 bp, Artificial sequence
  SiRNA target sequence
tccatgaaaaagcaagtccttca

SEQ ID NO: 201966 - DNA, 23 bp, Artificial sequence
  SiRNA target sequence
ccatgaaaaagcaagtccttcaa

SEQ ID NO: 201967 - DNA, 23 bp, Artificial sequence
  SiRNA target sequence
catgaaaaagcaagtccttcaat

SEQ ID NO: 201968 - DNA, 23 bp, Artificial sequence
  SiRNA target sequence
atgaaaaagcaagtccttcaatg

SEQ ID NO: 201969 - DNA, 23 bp, Artificial sequence
  SiRNA target sequence
tgaaaaagcaagtccttcaatgg

SEQ ID NO: 201970 - DNA, 23 bp, Artificial sequence
  SiRNA target sequence
gaaaaagcaagtccttcaatggc

SEQ ID NO: 201971 - DNA, 23 bp, Artificial sequence
  SiRNA target sequence
aaaaagcaagtccttcaatggca

SEQ ID NO: 201972 - DNA, 23 bp, Artificial sequence
  SiRNA target sequence
aaaagcaagtccttcaatggcag

SEQ ID NO: 201973 - DNA, 23 bp, Artificial sequence
  SiRNA target sequence
aaagcaagtccttcaatggcaga

SEQ ID NO: 201974 - DNA, 23 bp, Artificial sequence
  SiRNA target sequence
aagcaagtccttcaatggcagaa

SEQ ID NO: 201975 - DNA, 23 bp, Artificial sequence
  SiRNA target sequence
agcaagtccttcaatggcagaat

SEQ ID NO: 201976 - DNA, 23 bp, Artificial sequence
  SiRNA target sequence
gcaagtccttcaatggcagaatt

SEQ ID NO: 201977 - DNA, 23 bp, Artificial sequence
  SiRNA target sequence
caagtccttcaatggcagaattg

SEQ ID NO: 201978 - DNA, 23 bp, Artificial sequence
  SiRNA target sequence
aagtccttcaatggcagaattgt

SEQ ID NO: 201979 - DNA, 23 bp, Artificial sequence
  SiRNA target sequence
agtccttcaatggcagaattgta

SEQ ID NO: 201980 - DNA, 23 bp, Artificial sequence
  SiRNA target sequence
gtccttcaatggcagaattgtag

SEQ ID NO: 201981 - DNA, 23 bp, Artificial sequence
  SiRNA target sequence
tccttcaatggcagaattgtaga

SEQ ID NO: 201982 - DNA, 23 bp, Artificial sequence
  SiRNA target sequence
ccttcaatggcagaattgtagat

SEQ ID NO: 201983 - DNA, 23 bp, Artificial sequence
  SiRNA target sequence
cttcaatggcagaattgtagatt

SEQ ID NO: 201984 - DNA, 23 bp, Artificial sequence
  SiRNA target sequence
ttcaatggcagaattgtagattg

SEQ ID NO: 201985 - DNA, 23 bp, Artificial sequence
  SiRNA target sequence
tcaatggcagaattgtagattga

SEQ ID NO: 201986 - DNA, 23 bp, Artificial sequence
  SiRNA target sequence
caatggcagaattgtagattgat

SEQ ID NO: 201987 - DNA, 23 bp, Artificial sequence
  SiRNA target sequence
aatggcagaattgtagattgatg

SEQ ID NO: 201988 - DNA, 23 bp, Artificial sequence
  SiRNA target sequence
atggcagaattgtagattgatgc

SEQ ID NO: 201989 - DNA, 23 bp, Artificial sequence
  SiRNA target sequence
tggcagaattgtagattgatgct

SEQ ID NO: 201990 - DNA, 23 bp, Artificial sequence
  SiRNA target sequence
ggcagaattgtagattgatgctc

SEQ ID NO: 201991 - DNA, 23 bp, Artificial sequence
  SiRNA target sequence
gcagaattgtagattgatgctcc

SEQ ID NO: 201992 - DNA, 23 bp, Artificial sequence
  SiRNA target sequence
cagaattgtagattgatgctccc

SEQ ID NO: 201993 - DNA, 23 bp, Artificial sequence
  SiRNA target sequence
agaattgtagattgatgctccca

SEQ ID NO: 201994 - DNA, 23 bp, Artificial sequence
  SiRNA target sequence
gaattgtagattgatgctcccat

SEQ ID NO: 201995 - DNA, 23 bp, Artificial sequence
  SiRNA target sequence
aattgtagattgatgctcccata

SEQ ID NO: 201996 - DNA, 23 bp, Artificial sequence
  SiRNA target sequence
attgtagattgatgctcccataa

SEQ ID NO: 201997 - DNA, 23 bp, Artificial sequence
  SiRNA target sequence
ttgtagattgatgctcccataac

SEQ ID NO: 201998 - DNA, 23 bp, Artificial sequence
  SiRNA target sequence
tgtagattgatgctcccataacg

SEQ ID NO: 201999 - DNA, 23 bp, Artificial sequence
  SiRNA target sequence
gtagattgatgctcccataacga

SEQ ID NO: 202000 - DNA, 23 bp, Artificial sequence
  SiRNA target sequence
tagattgatgctcccataacgat

SEQ ID NO: 202001 - DNA, 23 bp, Artificial sequence
  SiRNA target sequence
agattgatgctcccataacgatt

SEQ ID NO: 202002 - DNA, 23 bp, Artificial sequence
  SiRNA target sequence
gattgatgctcccataacgatta

SEQ ID NO: 202003 - DNA, 23 bp, Artificial sequence
  SiRNA target sequence
attgatgctcccataacgattat

SEQ ID NO: 202004 - DNA, 23 bp, Artificial sequence
  SiRNA target sequence
ttgatgctcccataacgattatt

SEQ ID NO: 202005 - DNA, 23 bp, Artificial sequence
  SiRNA target sequence
tgatgctcccataacgattattg

SEQ ID NO: 202006 - DNA, 23 bp, Artificial sequence
  SiRNA target sequence
gatgctcccataacgattattga

SEQ ID NO: 202007 - DNA, 23 bp, Artificial sequence
  SiRNA target sequence
atgctcccataacgattattgac

SEQ ID NO: 202008 - DNA, 23 bp, Artificial sequence
  SiRNA target sequence
tgctcccataacgattattgacc

SEQ ID NO: 202009 - DNA, 23 bp, Artificial sequence
  SiRNA target sequence
gctcccataacgattattgaccc

SEQ ID NO: 202010 - DNA, 23 bp, Artificial sequence
  SiRNA target sequence
ctcccataacgattattgacccc

SEQ ID NO: 202011 - DNA, 23 bp, Artificial sequence
  SiRNA target sequence
tcccataacgattattgacccca

SEQ ID NO: 202012 - DNA, 23 bp, Artificial sequence
  SiRNA target sequence
cccataacgattattgaccccaa

SEQ ID NO: 202013 - DNA, 23 bp, Artificial sequence
  SiRNA target sequence
ccataacgattattgaccccaac

SEQ ID NO: 202014 - DNA, 23 bp, Artificial sequence
  SiRNA target sequence
cataacgattattgaccccaaca

SEQ ID NO: 202015 - DNA, 23 bp, Artificial sequence
  SiRNA target sequence
ataacgattattgaccccaacaa

SEQ ID NO: 202016 - DNA, 23 bp, Artificial sequence
  SiRNA target sequence
taacgattattgaccccaacaac

SEQ ID NO: 202017 - DNA, 23 bp, Artificial sequence
  SiRNA target sequence
aacgattattgaccccaacaaca

SEQ ID NO: 202018 - DNA, 23 bp, Artificial sequence
  SiRNA target sequence
acgattattgaccccaacaacaa

SEQ ID NO: 202019 - DNA, 23 bp, Artificial sequence
  SiRNA target sequence
cgattattgaccccaacaacaag

SEQ ID NO: 202020 - DNA, 23 bp, Artificial sequence
  SiRNA target sequence
gattattgaccccaacaacaaga

SEQ ID NO: 202021 - DNA, 23 bp, Artificial sequence
  SiRNA target sequence
attattgaccccaacaacaagaa

SEQ ID NO: 202022 - DNA, 23 bp, Artificial sequence
  SiRNA target sequence
ttattgaccccaacaacaagaat

SEQ ID NO: 202023 - DNA, 23 bp, Artificial sequence
  SiRNA target sequence
tattgaccccaacaacaagaata

SEQ ID NO: 202024 - DNA, 23 bp, Artificial sequence
  SiRNA target sequence
attgaccccaacaacaagaataa

SEQ ID NO: 202025 - DNA, 23 bp, Artificial sequence
  SiRNA target sequence
ttgaccccaacaacaagaataaa

SEQ ID NO: 202026 - DNA, 23 bp, Artificial sequence
  SiRNA target sequence
tgaccccaacaacaagaataaag

SEQ ID NO: 202027 - DNA, 23 bp, Artificial sequence
  SiRNA target sequence
gaccccaacaacaagaataaagg

SEQ ID NO: 202028 - DNA, 23 bp, Artificial sequence
  SiRNA target sequence
accccaacaacaagaataaaggt

SEQ ID NO: 202029 - DNA, 23 bp, Artificial sequence
  SiRNA target sequence
ccccaacaacaagaataaaggtg

SEQ ID NO: 202030 - DNA, 23 bp, Artificial sequence
  SiRNA target sequence
cccaacaacaagaataaaggtgt

SEQ ID NO: 202031 - DNA, 23 bp, Artificial sequence
  SiRNA target sequence
ccaacaacaagaataaaggtgtt

SEQ ID NO: 202032 - DNA, 23 bp, Artificial sequence
  SiRNA target sequence
caacaacaagaataaaggtgtta

SEQ ID NO: 202033 - DNA, 23 bp, Artificial sequence
  SiRNA target sequence
aacaacaagaataaaggtgttaa

SEQ ID NO: 202034 - DNA, 23 bp, Artificial sequence
  SiRNA target sequence
acaacaagaataaaggtgttaag

SEQ ID NO: 202035 - DNA, 23 bp, Artificial sequence
  SiRNA target sequence
caacaagaataaaggtgttaaga

SEQ ID NO: 202036 - DNA, 23 bp, Artificial sequence
  SiRNA target sequence
aacaagaataaaggtgttaagag

SEQ ID NO: 202037 - DNA, 23 bp, Artificial sequence
  SiRNA target sequence
acaagaataaaggtgttaagagt

SEQ ID NO: 202038 - DNA, 23 bp, Artificial sequence
  SiRNA target sequence
caagaataaaggtgttaagagtc

SEQ ID NO: 202039 - DNA, 23 bp, Artificial sequence
  SiRNA target sequence
aagaataaaggtgttaagagtcc

SEQ ID NO: 202040 - DNA, 23 bp, Artificial sequence
  SiRNA target sequence
agaataaaggtgttaagagtccc

SEQ ID NO: 202041 - DNA, 23 bp, Artificial sequence
  SiRNA target sequence
gaataaaggtgttaagagtccca

SEQ ID NO: 202042 - DNA, 23 bp, Artificial sequence
  SiRNA target sequence
aataaaggtgttaagagtcccat

SEQ ID NO: 202043 - DNA, 23 bp, Artificial sequence
  SiRNA target sequence
ataaaggtgttaagagtcccata

SEQ ID NO: 202044 - DNA, 23 bp, Artificial sequence
  SiRNA target sequence
taaaggtgttaagagtcccatag

SEQ ID NO: 202045 - DNA, 23 bp, Artificial sequence
  SiRNA target sequence
aaaggtgttaagagtcccatagt

SEQ ID NO: 202046 - DNA, 23 bp, Artificial sequence
  SiRNA target sequence
aaggtgttaagagtcccatagta

SEQ ID NO: 202047 - DNA, 23 bp, Artificial sequence
  SiRNA target sequence
aggtgttaagagtcccatagtaa

SEQ ID NO: 202048 - DNA, 23 bp, Artificial sequence
  SiRNA target sequence
ggtgttaagagtcccatagtaat

SEQ ID NO: 202049 - DNA, 23 bp, Artificial sequence
  SiRNA target sequence
gtgttaagagtcccatagtaatc

SEQ ID NO: 202050 - DNA, 23 bp, Artificial sequence
  SiRNA target sequence
tgttaagagtcccatagtaatcc

SEQ ID NO: 202051 - DNA, 23 bp, Artificial sequence
  SiRNA target sequence
gttaagagtcccatagtaatcca

SEQ ID NO: 202052 - DNA, 23 bp, Artificial sequence
  SiRNA target sequence
ttaagagtcccatagtaatccat

SEQ ID NO: 202053 - DNA, 23 bp, Artificial sequence
  SiRNA target sequence
taagagtcccatagtaatccatc

SEQ ID NO: 202054 - DNA, 23 bp, Artificial sequence
  SiRNA target sequence
aagagtcccatagtaatccatcc

SEQ ID NO: 202055 - DNA, 23 bp, Artificial sequence
  SiRNA target sequence
agagtcccatagtaatccatcca

SEQ ID NO: 202056 - DNA, 23 bp, Artificial sequence
  SiRNA target sequence
gagtcccatagtaatccatccac

SEQ ID NO: 202057 - DNA, 23 bp, Artificial sequence
  SiRNA target sequence
agtcccatagtaatccatccact

SEQ ID NO: 202058 - DNA, 23 bp, Artificial sequence
  SiRNA target sequence
gtcccatagtaatccatccacta

SEQ ID NO: 202059 - DNA, 23 bp, Artificial sequence
  SiRNA target sequence
tcccatagtaatccatccactac

SEQ ID NO: 202060 - DNA, 23 bp, Artificial sequence
  SiRNA target sequence
cccatagtaatccatccactact

SEQ ID NO: 202061 - DNA, 23 bp, Artificial sequence
  SiRNA target sequence
ccatagtaatccatccactactt

SEQ ID NO: 202062 - DNA, 23 bp, Artificial sequence
  SiRNA target sequence
catagtaatccatccactacttt

SEQ ID NO: 202063 - DNA, 23 bp, Artificial sequence
  SiRNA target sequence
atagtaatccatccactactttc

SEQ ID NO: 202064 - DNA, 23 bp, Artificial sequence
  SiRNA target sequence
tagtaatccatccactactttct

SEQ ID NO: 202065 - DNA, 23 bp, Artificial sequence
  SiRNA target sequence
agtaatccatccactactttcta

SEQ ID NO: 202066 - DNA, 23 bp, Artificial sequence
  SiRNA target sequence
gtaatccatccactactttctac

SEQ ID NO: 202067 - DNA, 23 bp, Artificial sequence
  SiRNA target sequence
taatccatccactactttctact

SEQ ID NO: 202068 - DNA, 23 bp, Artificial sequence
  SiRNA target sequence
aatccatccactactttctacta

SEQ ID NO: 202069 - DNA, 23 bp, Artificial sequence
  SiRNA target sequence
atccatccactactttctactaa

SEQ ID NO: 202070 - DNA, 23 bp, Artificial sequence
  SiRNA target sequence
tccatccactactttctactaaa

SEQ ID NO: 202071 - DNA, 23 bp, Artificial sequence
  SiRNA target sequence
ccatccactactttctactaaag

SEQ ID NO: 202072 - DNA, 23 bp, Artificial sequence
  SiRNA target sequence
catccactactttctactaaagt

SEQ ID NO: 202073 - DNA, 23 bp, Artificial sequence
  SiRNA target sequence
atccactactttctactaaagta

SEQ ID NO: 202074 - DNA, 23 bp, Artificial sequence
  SiRNA target sequence
tccactactttctactaaagtag

SEQ ID NO: 202075 - DNA, 23 bp, Artificial sequence
  SiRNA target sequence
ccactactttctactaaagtaga

SEQ ID NO: 202076 - DNA, 23 bp, Artificial sequence
  SiRNA target sequence
cactactttctactaaagtagaa

SEQ ID NO: 202077 - DNA, 23 bp, Artificial sequence
  SiRNA target sequence
actactttctactaaagtagaaa

SEQ ID NO: 202078 - DNA, 23 bp, Artificial sequence
  SiRNA target sequence
ctactttctactaaagtagaaaa

SEQ ID NO: 202079 - DNA, 23 bp, Artificial sequence
  SiRNA target sequence
tactttctactaaagtagaaaat

SEQ ID NO: 202080 - DNA, 23 bp, Artificial sequence
  SiRNA target sequence
actttctactaaagtagaaaatg

SEQ ID NO: 202081 - DNA, 23 bp, Artificial sequence
  SiRNA target sequence
ctttctactaaagtagaaaatgc

SEQ ID NO: 202082 - DNA, 23 bp, Artificial sequence
  SiRNA target sequence
tttctactaaagtagaaaatgct

SEQ ID NO: 202083 - DNA, 23 bp, Artificial sequence
  SiRNA target sequence
ttctactaaagtagaaaatgctg

SEQ ID NO: 202084 - DNA, 23 bp, Artificial sequence
  SiRNA target sequence
tctactaaagtagaaaatgctga

SEQ ID NO: 202085 - DNA, 23 bp, Artificial sequence
  SiRNA target sequence
ctactaaagtagaaaatgctgac

SEQ ID NO: 202086 - DNA, 23 bp, Artificial sequence
  SiRNA target sequence
tactaaagtagaaaatgctgaca

SEQ ID NO: 202087 - DNA, 23 bp, Artificial sequence
  SiRNA target sequence
actaaagtagaaaatgctgacaa

SEQ ID NO: 202088 - DNA, 23 bp, Artificial sequence
  SiRNA target sequence
ctaaagtagaaaatgctgacaaa

SEQ ID NO: 202089 - DNA, 23 bp, Artificial sequence
  SiRNA target sequence
taaagtagaaaatgctgacaaat

SEQ ID NO: 202090 - DNA, 23 bp, Artificial sequence
  SiRNA target sequence
aaagtagaaaatgctgacaaatt

SEQ ID NO: 202091 - DNA, 23 bp, Artificial sequence
  SiRNA target sequence
aagtagaaaatgctgacaaatta

SEQ ID NO: 202092 - DNA, 23 bp, Artificial sequence
  SiRNA target sequence
agtagaaaatgctgacaaattaa

SEQ ID NO: 202093 - DNA, 23 bp, Artificial sequence
  SiRNA target sequence
gtagaaaatgctgacaaattaag

SEQ ID NO: 202094 - DNA, 23 bp, Artificial sequence
  SiRNA target sequence
tagaaaatgctgacaaattaagt

SEQ ID NO: 202095 - DNA, 23 bp, Artificial sequence
  SiRNA target sequence
agaaaatgctgacaaattaagtg

SEQ ID NO: 202096 - DNA, 23 bp, Artificial sequence
  SiRNA target sequence
gaaaatgctgacaaattaagtgt

SEQ ID NO: 202097 - DNA, 23 bp, Artificial sequence
  SiRNA target sequence
aaaatgctgacaaattaagtgtt

SEQ ID NO: 202098 - DNA, 23 bp, Artificial sequence
  SiRNA target sequence
aaatgctgacaaattaagtgtta

SEQ ID NO: 202099 - DNA, 23 bp, Artificial sequence
  SiRNA target sequence
aatgctgacaaattaagtgttat

SEQ ID NO: 202100 - DNA, 23 bp, Artificial sequence
  SiRNA target sequence
atgctgacaaattaagtgttatt

SEQ ID NO: 202101 - DNA, 23 bp, Artificial sequence
  SiRNA target sequence
tgctgacaaattaagtgttatta

SEQ ID NO: 202102 - DNA, 23 bp, Artificial sequence
  SiRNA target sequence
gctgacaaattaagtgttattac

SEQ ID NO: 202103 - DNA, 23 bp, Artificial sequence
  SiRNA target sequence
ctgacaaattaagtgttattaca

SEQ ID NO: 202104 - DNA, 23 bp, Artificial sequence
  SiRNA target sequence
tgacaaattaagtgttattacag

SEQ ID NO: 202105 - DNA, 23 bp, Artificial sequence
  SiRNA target sequence
gacaaattaagtgttattacagt

SEQ ID NO: 202106 - DNA, 23 bp, Artificial sequence
  SiRNA target sequence
acaaattaagtgttattacagta

SEQ ID NO: 202107 - DNA, 23 bp, Artificial sequence
  SiRNA target sequence
caaattaagtgttattacagtaa

SEQ ID NO: 202108 - DNA, 23 bp, Artificial sequence
  SiRNA target sequence
aaattaagtgttattacagtaac

SEQ ID NO: 202109 - DNA, 23 bp, Artificial sequence
  SiRNA target sequence
aattaagtgttattacagtaact

SEQ ID NO: 202110 - DNA, 23 bp, Artificial sequence
  SiRNA target sequence
attaagtgttattacagtaactg

SEQ ID NO: 202111 - DNA, 23 bp, Artificial sequence
  SiRNA target sequence
ttaagtgttattacagtaactgc

SEQ ID NO: 202112 - DNA, 23 bp, Artificial sequence
  SiRNA target sequence
taagtgttattacagtaactgct

SEQ ID NO: 202113 - DNA, 23 bp, Artificial sequence
  SiRNA target sequence
aagtgttattacagtaactgcta

SEQ ID NO: 202114 - DNA, 23 bp, Artificial sequence
  SiRNA target sequence
agtgttattacagtaactgctac

SEQ ID NO: 202115 - DNA, 23 bp, Artificial sequence
  SiRNA target sequence
gtgttattacagtaactgctacc

SEQ ID NO: 202116 - DNA, 23 bp, Artificial sequence
  SiRNA target sequence
tgttattacagtaactgctacca

SEQ ID NO: 202117 - DNA, 23 bp, Artificial sequence
  SiRNA target sequence
gttattacagtaactgctaccaa

SEQ ID NO: 202118 - DNA, 23 bp, Artificial sequence
  SiRNA target sequence
ttattacagtaactgctaccaat

SEQ ID NO: 202119 - DNA, 23 bp, Artificial sequence
  SiRNA target sequence
tattacagtaactgctaccaata

SEQ ID NO: 202120 - DNA, 23 bp, Artificial sequence
  SiRNA target sequence
attacagtaactgctaccaatat

SEQ ID NO: 202121 - DNA, 23 bp, Artificial sequence
  SiRNA target sequence
ttacagtaactgctaccaatatt

SEQ ID NO: 202122 - DNA, 23 bp, Artificial sequence
  SiRNA target sequence
tacagtaactgctaccaatattt

SEQ ID NO: 202123 - DNA, 23 bp, Artificial sequence
  SiRNA target sequence
acagtaactgctaccaatatttg

SEQ ID NO: 202124 - DNA, 23 bp, Artificial sequence
  SiRNA target sequence
cagtaactgctaccaatatttga

SEQ ID NO: 202125 - DNA, 23 bp, Artificial sequence
  SiRNA target sequence
agtaactgctaccaatatttgat

SEQ ID NO: 202126 - DNA, 23 bp, Artificial sequence
  SiRNA target sequence
gtaactgctaccaatatttgatc

SEQ ID NO: 202127 - DNA, 23 bp, Artificial sequence
  SiRNA target sequence
taactgctaccaatatttgatct

SEQ ID NO: 202128 - DNA, 23 bp, Artificial sequence
  SiRNA target sequence
aactgctaccaatatttgatcta

SEQ ID NO: 202129 - DNA, 23 bp, Artificial sequence
  SiRNA target sequence
actgctaccaatatttgatctat

SEQ ID NO: 202130 - DNA, 23 bp, Artificial sequence
  SiRNA target sequence
ctgctaccaatatttgatctatt

SEQ ID NO: 202131 - DNA, 23 bp, Artificial sequence
  SiRNA target sequence
tgctaccaatatttgatctattg

SEQ ID NO: 202132 - DNA, 23 bp, Artificial sequence
  SiRNA target sequence
gctaccaatatttgatctattgt

SEQ ID NO: 202133 - DNA, 23 bp, Artificial sequence
  SiRNA target sequence
ctaccaatatttgatctattgta

SEQ ID NO: 202134 - DNA, 23 bp, Artificial sequence
  SiRNA target sequence
taccaatatttgatctattgtat

SEQ ID NO: 202135 - DNA, 23 bp, Artificial sequence
  SiRNA target sequence
accaatatttgatctattgtatt

SEQ ID NO: 202136 - DNA, 23 bp, Artificial sequence
  SiRNA target sequence
ccaatatttgatctattgtatta

SEQ ID NO: 202137 - DNA, 23 bp, Artificial sequence
  SiRNA target sequence
caatatttgatctattgtattaa

SEQ ID NO: 202138 - DNA, 23 bp, Artificial sequence
  SiRNA target sequence
aatatttgatctattgtattaaa

SEQ ID NO: 202139 - DNA, 23 bp, Artificial sequence
  SiRNA target sequence
atatttgatctattgtattaaat

SEQ ID NO: 202140 - DNA, 23 bp, Artificial sequence
  SiRNA target sequence
tatttgatctattgtattaaatt

SEQ ID NO: 202141 - DNA, 23 bp, Artificial sequence
  SiRNA target sequence
atttgatctattgtattaaattt

SEQ ID NO: 202142 - DNA, 23 bp, Artificial sequence
  SiRNA target sequence
tttgatctattgtattaaatttg

SEQ ID NO: 202143 - DNA, 23 bp, Artificial sequence
  SiRNA target sequence
ttgatctattgtattaaatttgc

SEQ ID NO: 202144 - DNA, 23 bp, Artificial sequence
  SiRNA target sequence
tgatctattgtattaaatttgcc

SEQ ID NO: 202145 - DNA, 23 bp, Artificial sequence
  SiRNA target sequence
gatctattgtattaaatttgccg

SEQ ID NO: 202146 - DNA, 23 bp, Artificial sequence
  SiRNA target sequence
atctattgtattaaatttgccgg

SEQ ID NO: 202147 - DNA, 23 bp, Artificial sequence
  SiRNA target sequence
tctattgtattaaatttgccgga

SEQ ID NO: 202148 - DNA, 23 bp, Artificial sequence
  SiRNA target sequence
ctattgtattaaatttgccggag

SEQ ID NO: 202149 - DNA, 23 bp, Artificial sequence
  SiRNA target sequence
tattgtattaaatttgccggagt

SEQ ID NO: 202150 - DNA, 23 bp, Artificial sequence
  SiRNA target sequence
attgtattaaatttgccggagta

SEQ ID NO: 202151 - DNA, 23 bp, Artificial sequence
  SiRNA target sequence
ttgtattaaatttgccggagtat

SEQ ID NO: 202152 - DNA, 23 bp, Artificial sequence
  SiRNA target sequence
tgtattaaatttgccggagtatt

SEQ ID NO: 202153 - DNA, 23 bp, Artificial sequence
  SiRNA target sequence
gtattaaatttgccggagtattc

SEQ ID NO: 202154 - DNA, 23 bp, Artificial sequence
  SiRNA target sequence
tattaaatttgccggagtattct

SEQ ID NO: 202155 - DNA, 23 bp, Artificial sequence
  SiRNA target sequence
attaaatttgccggagtattctc

SEQ ID NO: 202156 - DNA, 23 bp, Artificial sequence
  SiRNA target sequence
ttaaatttgccggagtattctcc

SEQ ID NO: 202157 - DNA, 23 bp, Artificial sequence
  SiRNA target sequence
taaatttgccggagtattctcct

SEQ ID NO: 202158 - DNA, 23 bp, Artificial sequence
  SiRNA target sequence
aaatttgccggagtattctccta

SEQ ID NO: 202159 - DNA, 23 bp, Artificial sequence
  SiRNA target sequence
aatttgccggagtattctcctac

SEQ ID NO: 202160 - DNA, 23 bp, Artificial sequence
  SiRNA target sequence
atttgccggagtattctcctacc

SEQ ID NO: 202161 - DNA, 23 bp, Artificial sequence
  SiRNA target sequence
tttgccggagtattctcctacct

SEQ ID NO: 202162 - DNA, 23 bp, Artificial sequence
  SiRNA target sequence
ttgccggagtattctcctacctc

SEQ ID NO: 202163 - DNA, 23 bp, Artificial sequence
  SiRNA target sequence
tgccggagtattctcctacctct

SEQ ID NO: 202164 - DNA, 23 bp, Artificial sequence
  SiRNA target sequence
gccggagtattctcctacctcta

SEQ ID NO: 202165 - DNA, 23 bp, Artificial sequence
  SiRNA target sequence
ccggagtattctcctacctctaa

SEQ ID NO: 202166 - DNA, 23 bp, Artificial sequence
  SiRNA target sequence
cggagtattctcctacctctaat

SEQ ID NO: 202167 - DNA, 23 bp, Artificial sequence
  SiRNA target sequence
ggagtattctcctacctctaatc

SEQ ID NO: 202168 - DNA, 23 bp, Artificial sequence
  SiRNA target sequence
gagtattctcctacctctaatcc

SEQ ID NO: 202169 - DNA, 23 bp, Artificial sequence
  SiRNA target sequence
agtattctcctacctctaatcct

SEQ ID NO: 202170 - DNA, 23 bp, Artificial sequence
  SiRNA target sequence
gtattctcctacctctaatccta

SEQ ID NO: 202171 - DNA, 23 bp, Artificial sequence
  SiRNA target sequence
tattctcctacctctaatcctaa

SEQ ID NO: 202172 - DNA, 23 bp, Artificial sequence
  SiRNA target sequence
attctcctacctctaatcctaaa

SEQ ID NO: 202173 - DNA, 23 bp, Artificial sequence
  SiRNA target sequence
ttctcctacctctaatcctaaac

SEQ ID NO: 202174 - DNA, 23 bp, Artificial sequence
  SiRNA target sequence
tctcctacctctaatcctaaact

SEQ ID NO: 202175 - DNA, 23 bp, Artificial sequence
  SiRNA target sequence
ctcctacctctaatcctaaactt

SEQ ID NO: 202176 - DNA, 23 bp, Artificial sequence
  SiRNA target sequence
tcctacctctaatcctaaacttt

SEQ ID NO: 202177 - DNA, 23 bp, Artificial sequence
  SiRNA target sequence
cctacctctaatcctaaactttt

SEQ ID NO: 202178 - DNA, 23 bp, Artificial sequence
  SiRNA target sequence
ctacctctaatcctaaacttttt

SEQ ID NO: 202179 - DNA, 23 bp, Artificial sequence
  SiRNA target sequence
tacctctaatcctaaactttttg

SEQ ID NO: 202180 - DNA, 23 bp, Artificial sequence
  SiRNA target sequence
acctctaatcctaaactttttga

SEQ ID NO: 202181 - DNA, 23 bp, Artificial sequence
  SiRNA target sequence
cctctaatcctaaactttttgac

SEQ ID NO: 202182 - DNA, 23 bp, Artificial sequence
  SiRNA target sequence
ctctaatcctaaactttttgacg

SEQ ID NO: 202183 - DNA, 23 bp, Artificial sequence
  SiRNA target sequence
tctaatcctaaactttttgacgc

SEQ ID NO: 202184 - DNA, 23 bp, Artificial sequence
  SiRNA target sequence
ctaatcctaaactttttgacgca

SEQ ID NO: 202185 - DNA, 23 bp, Artificial sequence
  SiRNA target sequence
taatcctaaactttttgacgcag

SEQ ID NO: 202186 - DNA, 23 bp, Artificial sequence
  SiRNA target sequence
aatcctaaactttttgacgcagc

SEQ ID NO: 202187 - DNA, 23 bp, Artificial sequence
  SiRNA target sequence
atcctaaactttttgacgcagct

SEQ ID NO: 202188 - DNA, 23 bp, Artificial sequence
  SiRNA target sequence
tcctaaactttttgacgcagctt

SEQ ID NO: 202189 - DNA, 23 bp, Artificial sequence
  SiRNA target sequence
cctaaactttttgacgcagcttt

SEQ ID NO: 202190 - DNA, 23 bp, Artificial sequence
  SiRNA target sequence
ctaaactttttgacgcagcttta

SEQ ID NO: 202191 - DNA, 23 bp, Artificial sequence
  SiRNA target sequence
taaactttttgacgcagctttaa

SEQ ID NO: 202192 - DNA, 23 bp, Artificial sequence
  SiRNA target sequence
aaactttttgacgcagctttaat

SEQ ID NO: 202193 - DNA, 23 bp, Artificial sequence
  SiRNA target sequence
aactttttgacgcagctttaatt

SEQ ID NO: 202194 - DNA, 23 bp, Artificial sequence
  SiRNA target sequence
actttttgacgcagctttaattc

SEQ ID NO: 202195 - DNA, 23 bp, Artificial sequence
  SiRNA target sequence
ctttttgacgcagctttaattcc

SEQ ID NO: 202196 - DNA, 23 bp, Artificial sequence
  SiRNA target sequence
tttttgacgcagctttaattcct

SEQ ID NO: 202197 - DNA, 23 bp, Artificial sequence
  SiRNA target sequence
ttttgacgcagctttaattcctg

SEQ ID NO: 202198 - DNA, 23 bp, Artificial sequence
  SiRNA target sequence
tttgacgcagctttaattcctgc

SEQ ID NO: 202199 - DNA, 23 bp, Artificial sequence
  SiRNA target sequence
ttgacgcagctttaattcctgct

SEQ ID NO: 202200 - DNA, 23 bp, Artificial sequence
  SiRNA target sequence
tgacgcagctttaattcctgctt

SEQ ID NO: 202201 - DNA, 23 bp, Artificial sequence
  SiRNA target sequence
gacgcagctttaattcctgcttt

SEQ ID NO: 202202 - DNA, 23 bp, Artificial sequence
  SiRNA target sequence
acgcagctttaattcctgcttta

SEQ ID NO: 202203 - DNA, 23 bp, Artificial sequence
  SiRNA target sequence
cgcagctttaattcctgctttat

SEQ ID NO: 202204 - DNA, 23 bp, Artificial sequence
  SiRNA target sequence
gcagctttaattcctgctttata

SEQ ID NO: 202205 - DNA, 23 bp, Artificial sequence
  SiRNA target sequence
cagctttaattcctgctttatag

SEQ ID NO: 202206 - DNA, 23 bp, Artificial sequence
  SiRNA target sequence
agctttaattcctgctttataga

SEQ ID NO: 202207 - DNA, 23 bp, Artificial sequence
  SiRNA target sequence
gctttaattcctgctttatagac

SEQ ID NO: 202208 - DNA, 23 bp, Artificial sequence
  SiRNA target sequence
ctttaattcctgctttatagaca

SEQ ID NO: 202209 - DNA, 23 bp, Artificial sequence
  SiRNA target sequence
tttaattcctgctttatagacag

SEQ ID NO: 202210 - DNA, 23 bp, Artificial sequence
  SiRNA target sequence
ttaattcctgctttatagacaga

SEQ ID NO: 202211 - DNA, 23 bp, Artificial sequence
  SiRNA target sequence
taattcctgctttatagacagat

SEQ ID NO: 202212 - DNA, 23 bp, Artificial sequence
  SiRNA target sequence
aattcctgctttatagacagatt

SEQ ID NO: 202213 - DNA, 23 bp, Artificial sequence
  SiRNA target sequence
attcctgctttatagacagattc

SEQ ID NO: 202214 - DNA, 23 bp, Artificial sequence
  SiRNA target sequence
ttcctgctttatagacagattca

SEQ ID NO: 202215 - DNA, 23 bp, Artificial sequence
  SiRNA target sequence
tcctgctttatagacagattcaa

SEQ ID NO: 202216 - DNA, 23 bp, Artificial sequence
  SiRNA target sequence
cctgctttatagacagattcaat

SEQ ID NO: 202217 - DNA, 23 bp, Artificial sequence
  SiRNA target sequence
ctgctttatagacagattcaatt

SEQ ID NO: 202218 - DNA, 23 bp, Artificial sequence
  SiRNA target sequence
tgctttatagacagattcaatta

SEQ ID NO: 202219 - DNA, 23 bp, Artificial sequence
  SiRNA target sequence
gctttatagacagattcaattaa

SEQ ID NO: 202220 - DNA, 23 bp, Artificial sequence
  SiRNA target sequence
ctttatagacagattcaattaaa

SEQ ID NO: 202221 - DNA, 23 bp, Artificial sequence
  SiRNA target sequence
tttatagacagattcaattaaat

SEQ ID NO: 202222 - DNA, 23 bp, Artificial sequence
  SiRNA target sequence
ttatagacagattcaattaaatt

SEQ ID NO: 202223 - DNA, 23 bp, Artificial sequence
  SiRNA target sequence
tatagacagattcaattaaatta

SEQ ID NO: 202224 - DNA, 23 bp, Artificial sequence
  SiRNA target sequence
atagacagattcaattaaattaa

SEQ ID NO: 202225 - DNA, 23 bp, Artificial sequence
  SiRNA target sequence
tagacagattcaattaaattaaa

SEQ ID NO: 202226 - DNA, 23 bp, Artificial sequence
  SiRNA target sequence
agacagattcaattaaattaaat

SEQ ID NO: 202227 - DNA, 23 bp, Artificial sequence
  SiRNA target sequence
gacagattcaattaaattaaatg

SEQ ID NO: 202228 - DNA, 23 bp, Artificial sequence
  SiRNA target sequence
acagattcaattaaattaaatgt

SEQ ID NO: 202229 - DNA, 23 bp, Artificial sequence
  SiRNA target sequence
cagattcaattaaattaaatgtt

SEQ ID NO: 202230 - DNA, 23 bp, Artificial sequence
  SiRNA target sequence
agattcaattaaattaaatgtta

SEQ ID NO: 202231 - DNA, 23 bp, Artificial sequence
  SiRNA target sequence
gattcaattaaattaaatgttat

SEQ ID NO: 202232 - DNA, 23 bp, Artificial sequence
  SiRNA target sequence
attcaattaaattaaatgttata

SEQ ID NO: 202233 - DNA, 23 bp, Artificial sequence
  SiRNA target sequence
ttcaattaaattaaatgttatat

SEQ ID NO: 202234 - DNA, 23 bp, Artificial sequence
  SiRNA target sequence
tcaattaaattaaatgttatatt

SEQ ID NO: 202235 - DNA, 23 bp, Artificial sequence
  SiRNA target sequence
caattaaattaaatgttatattg

SEQ ID NO: 202236 - DNA, 23 bp, Artificial sequence
  SiRNA target sequence
aattaaattaaatgttatattgt

SEQ ID NO: 202237 - DNA, 23 bp, Artificial sequence
  SiRNA target sequence
attaaattaaatgttatattgta

SEQ ID NO: 202238 - DNA, 23 bp, Artificial sequence
  SiRNA target sequence
ttaaattaaatgttatattgtaa

SEQ ID NO: 202239 - DNA, 23 bp, Artificial sequence
  SiRNA target sequence
taaattaaatgttatattgtaaa

SEQ ID NO: 202240 - DNA, 23 bp, Artificial sequence
  SiRNA target sequence
aaattaaatgttatattgtaaaa

SEQ ID NO: 202241 - DNA, 23 bp, Artificial sequence
  SiRNA target sequence
aattaaatgttatattgtaaaaa

SEQ ID NO: 202242 - DNA, 23 bp, Artificial sequence
  SiRNA target sequence
attaaatgttatattgtaaaaaa

SEQ ID NO: 202243 - DNA, 23 bp, Artificial sequence
  SiRNA target sequence
ttaaatgttatattgtaaaaaaa

SEQ ID NO: 202244 - DNA, 23 bp, Artificial sequence
  SiRNA target sequence
taaatgttatattgtaaaaaaag

SEQ ID NO: 202245 - DNA, 23 bp, Artificial sequence
  SiRNA target sequence
aaatgttatattgtaaaaaaaga

SEQ ID NO: 202246 - DNA, 23 bp, Artificial sequence
  SiRNA target sequence
aatgttatattgtaaaaaaagac

SEQ ID NO: 202247 - DNA, 23 bp, Artificial sequence
  SiRNA target sequence
atgttatattgtaaaaaaagact

SEQ ID NO: 202248 - DNA, 23 bp, Artificial sequence
  SiRNA target sequence
tgttatattgtaaaaaaagacta

SEQ ID NO: 202249 - DNA, 23 bp, Artificial sequence
  SiRNA target sequence
gttatattgtaaaaaaagactat

SEQ ID NO: 202250 - DNA, 23 bp, Artificial sequence
  SiRNA target sequence
ttatattgtaaaaaaagactatt

SEQ ID NO: 202251 - DNA, 23 bp, Artificial sequence
  SiRNA target sequence
tatattgtaaaaaaagactatta

SEQ ID NO: 202252 - DNA, 23 bp, Artificial sequence
  SiRNA target sequence
atattgtaaaaaaagactattat

SEQ ID NO: 202253 - DNA, 23 bp, Artificial sequence
  SiRNA target sequence
tattgtaaaaaaagactattata

SEQ ID NO: 202254 - DNA, 23 bp, Artificial sequence
  SiRNA target sequence
attgtaaaaaaagactattatac

SEQ ID NO: 202255 - DNA, 23 bp, Artificial sequence
  SiRNA target sequence
ttgtaaaaaaagactattataca

SEQ ID NO: 202256 - DNA, 23 bp, Artificial sequence
  SiRNA target sequence
tgtaaaaaaagactattatacaa

SEQ ID NO: 202257 - DNA, 23 bp, Artificial sequence
  SiRNA target sequence
gtaaaaaaagactattatacaaa

SEQ ID NO: 202258 - DNA, 23 bp, Artificial sequence
  SiRNA target sequence
taaaaaaagactattatacaaag

SEQ ID NO: 202259 - DNA, 23 bp, Artificial sequence
  SiRNA target sequence
aaaaaaagactattatacaaagt

SEQ ID NO: 202260 - DNA, 23 bp, Artificial sequence
  SiRNA target sequence
aaaaaagactattatacaaagtg

SEQ ID NO: 202261 - DNA, 23 bp, Artificial sequence
  SiRNA target sequence
aaaaagactattatacaaagtga

SEQ ID NO: 202262 - DNA, 23 bp, Artificial sequence
  SiRNA target sequence
aaaagactattatacaaagtgac

SEQ ID NO: 202263 - DNA, 23 bp, Artificial sequence
  SiRNA target sequence
aaagactattatacaaagtgaca

SEQ ID NO: 202264 - DNA, 23 bp, Artificial sequence
  SiRNA target sequence
aagactattatacaaagtgacat

SEQ ID NO: 202265 - DNA, 23 bp, Artificial sequence
  SiRNA target sequence
agactattatacaaagtgacatt

SEQ ID NO: 202266 - DNA, 23 bp, Artificial sequence
  SiRNA target sequence
gactattatacaaagtgacatta

SEQ ID NO: 202267 - DNA, 23 bp, Artificial sequence
  SiRNA target sequence
actattatacaaagtgacattaa

SEQ ID NO: 202268 - DNA, 23 bp, Artificial sequence
  SiRNA target sequence
ctattatacaaagtgacattaat

SEQ ID NO: 202269 - DNA, 23 bp, Artificial sequence
  SiRNA target sequence
tattatacaaagtgacattaata

SEQ ID NO: 202270 - DNA, 23 bp, Artificial sequence
  SiRNA target sequence
attatacaaagtgacattaataa

SEQ ID NO: 202271 - DNA, 23 bp, Artificial sequence
  SiRNA target sequence
ttatacaaagtgacattaataat

SEQ ID NO: 202272 - DNA, 23 bp, Artificial sequence
  SiRNA target sequence
tatacaaagtgacattaataatt

SEQ ID NO: 202273 - DNA, 23 bp, Artificial sequence
  SiRNA target sequence
atacaaagtgacattaataattt

SEQ ID NO: 202274 - DNA, 23 bp, Artificial sequence
  SiRNA target sequence
tacaaagtgacattaataatttt

SEQ ID NO: 202275 - DNA, 23 bp, Artificial sequence
  SiRNA target sequence
acaaagtgacattaataattttg

SEQ ID NO: 202276 - DNA, 23 bp, Artificial sequence
  SiRNA target sequence
caaagtgacattaataattttga

SEQ ID NO: 202277 - DNA, 23 bp, Artificial sequence
  SiRNA target sequence
aaagtgacattaataattttgat

SEQ ID NO: 202278 - DNA, 23 bp, Artificial sequence
  SiRNA target sequence
aagtgacattaataattttgatt

SEQ ID NO: 202279 - DNA, 23 bp, Artificial sequence
  SiRNA target sequence
agtgacattaataattttgattt

SEQ ID NO: 202280 - DNA, 23 bp, Artificial sequence
  SiRNA target sequence
gtgacattaataattttgatttc

SEQ ID NO: 202281 - DNA, 23 bp, Artificial sequence
  SiRNA target sequence
tgacattaataattttgatttca

SEQ ID NO: 202282 - DNA, 23 bp, Artificial sequence
  SiRNA target sequence
gacattaataattttgatttcat

SEQ ID NO: 202283 - DNA, 23 bp, Artificial sequence
  SiRNA target sequence
acattaataattttgatttcatc

SEQ ID NO: 202284 - DNA, 23 bp, Artificial sequence
  SiRNA target sequence
cattaataattttgatttcatca

SEQ ID NO: 202285 - DNA, 23 bp, Artificial sequence
  SiRNA target sequence
attaataattttgatttcatcat

SEQ ID NO: 202286 - DNA, 23 bp, Artificial sequence
  SiRNA target sequence
ttaataattttgatttcatcatt

SEQ ID NO: 202287 - DNA, 23 bp, Artificial sequence
  SiRNA target sequence
taataattttgatttcatcatta

SEQ ID NO: 202288 - DNA, 23 bp, Artificial sequence
  SiRNA target sequence
aataattttgatttcatcattat

SEQ ID NO: 202289 - DNA, 23 bp, Artificial sequence
  SiRNA target sequence
ataattttgatttcatcattata

SEQ ID NO: 202290 - DNA, 23 bp, Artificial sequence
  SiRNA target sequence
taattttgatttcatcattatac

SEQ ID NO: 202291 - DNA, 23 bp, Artificial sequence
  SiRNA target sequence
aattttgatttcatcattatact

SEQ ID NO: 202292 - DNA, 23 bp, Artificial sequence
  SiRNA target sequence
attttgatttcatcattatacta

SEQ ID NO: 202293 - DNA, 23 bp, Artificial sequence
  SiRNA target sequence
ttttgatttcatcattatactaa

SEQ ID NO: 202294 - DNA, 23 bp, Artificial sequence
  SiRNA target sequence
tttgatttcatcattatactaat

SEQ ID NO: 202295 - DNA, 23 bp, Artificial sequence
  SiRNA target sequence
ttgatttcatcattatactaata

SEQ ID NO: 202296 - DNA, 23 bp, Artificial sequence
  SiRNA target sequence
tgatttcatcattatactaatac

SEQ ID NO: 202297 - DNA, 23 bp, Artificial sequence
  SiRNA target sequence
gatttcatcattatactaatacc

SEQ ID NO: 202298 - DNA, 23 bp, Artificial sequence
  SiRNA target sequence
atttcatcattatactaatacct

SEQ ID NO: 202299 - DNA, 23 bp, Artificial sequence
  SiRNA target sequence
tttcatcattatactaatacctt

SEQ ID NO: 202300 - DNA, 23 bp, Artificial sequence
  SiRNA target sequence
ttcatcattatactaataccttc

SEQ ID NO: 202301 - DNA, 23 bp, Artificial sequence
  SiRNA target sequence
tcatcattatactaataccttcg

SEQ ID NO: 202302 - DNA, 23 bp, Artificial sequence
  SiRNA target sequence
catcattatactaataccttcgg

SEQ ID NO: 202303 - DNA, 23 bp, Artificial sequence
  SiRNA target sequence
atcattatactaataccttcgga

SEQ ID NO: 202304 - DNA, 23 bp, Artificial sequence
  SiRNA target sequence
tcattatactaataccttcggag

SEQ ID NO: 202305 - DNA, 23 bp, Artificial sequence
  SiRNA target sequence
cattatactaataccttcggaga

SEQ ID NO: 202306 - DNA, 23 bp, Artificial sequence
  SiRNA target sequence
attatactaataccttcggagaa

SEQ ID NO: 202307 - DNA, 23 bp, Artificial sequence
  SiRNA target sequence
ttatactaataccttcggagaaa

SEQ ID NO: 202308 - DNA, 23 bp, Artificial sequence
  SiRNA target sequence
tatactaataccttcggagaaac

SEQ ID NO: 202309 - DNA, 23 bp, Artificial sequence
  SiRNA target sequence
atactaataccttcggagaaacc

SEQ ID NO: 202310 - DNA, 23 bp, Artificial sequence
  SiRNA target sequence
tactaataccttcggagaaacct

SEQ ID NO: 202311 - DNA, 23 bp, Artificial sequence
  SiRNA target sequence
actaataccttcggagaaaccta

SEQ ID NO: 202312 - DNA, 23 bp, Artificial sequence
  SiRNA target sequence
ctaataccttcggagaaacctac

SEQ ID NO: 202313 - DNA, 23 bp, Artificial sequence
  SiRNA target sequence
taataccttcggagaaacctaca

SEQ ID NO: 202314 - DNA, 23 bp, Artificial sequence
  SiRNA target sequence
aataccttcggagaaacctacac

SEQ ID NO: 202315 - DNA, 23 bp, Artificial sequence
  SiRNA target sequence
ataccttcggagaaacctacact

SEQ ID NO: 202316 - DNA, 23 bp, Artificial sequence
  SiRNA target sequence
taccttcggagaaacctacacta

SEQ ID NO: 202317 - DNA, 23 bp, Artificial sequence
  SiRNA target sequence
accttcggagaaacctacactaa

SEQ ID NO: 202318 - DNA, 23 bp, Artificial sequence
  SiRNA target sequence
ccttcggagaaacctacactaac

SEQ ID NO: 202319 - DNA, 23 bp, Artificial sequence
  SiRNA target sequence
cttcggagaaacctacactaact

SEQ ID NO: 202320 - DNA, 23 bp, Artificial sequence
  SiRNA target sequence
ttcggagaaacctacactaactt

SEQ ID NO: 202321 - DNA, 23 bp, Artificial sequence
  SiRNA target sequence
tcggagaaacctacactaacttt

SEQ ID NO: 202322 - DNA, 23 bp, Artificial sequence
  SiRNA target sequence
cggagaaacctacactaactttt

SEQ ID NO: 202323 - DNA, 23 bp, Artificial sequence
  SiRNA target sequence
ggagaaacctacactaacttttt

SEQ ID NO: 202324 - DNA, 23 bp, Artificial sequence
  SiRNA target sequence
gagaaacctacactaactttttg

SEQ ID NO: 202325 - DNA, 23 bp, Artificial sequence
  SiRNA target sequence
agaaacctacactaactttttgt

SEQ ID NO: 202326 - DNA, 23 bp, Artificial sequence
  SiRNA target sequence
gaaacctacactaactttttgtt

SEQ ID NO: 202327 - DNA, 23 bp, Artificial sequence
  SiRNA target sequence
aaacctacactaactttttgttt

SEQ ID NO: 202328 - DNA, 23 bp, Artificial sequence
  SiRNA target sequence
aacctacactaactttttgtttc

SEQ ID NO: 202329 - DNA, 23 bp, Artificial sequence
  SiRNA target sequence
acctacactaactttttgtttct

SEQ ID NO: 202330 - DNA, 23 bp, Artificial sequence
  SiRNA target sequence
cctacactaactttttgtttctt

SEQ ID NO: 202331 - DNA, 23 bp, Artificial sequence
  SiRNA target sequence
ctacactaactttttgtttcttt

SEQ ID NO: 202332 - DNA, 23 bp, Artificial sequence
  SiRNA target sequence
tacactaactttttgtttctttt

SEQ ID NO: 202333 - DNA, 23 bp, Artificial sequence
  SiRNA target sequence
acactaactttttgtttcttttt

SEQ ID NO: 202334 - DNA, 23 bp, Artificial sequence
  SiRNA target sequence
cactaactttttgtttctttttt

SEQ ID NO: 202335 - DNA, 23 bp, Artificial sequence
  SiRNA target sequence
actaactttttgtttctttttta

SEQ ID NO: 202336 - DNA, 23 bp, Artificial sequence
  SiRNA target sequence
ctaactttttgtttcttttttat

SEQ ID NO: 202337 - DNA, 23 bp, Artificial sequence
  SiRNA target sequence
taactttttgtttcttttttatc

SEQ ID NO: 202338 - DNA, 23 bp, Artificial sequence
  SiRNA target sequence
aactttttgtttcttttttatcg

SEQ ID NO: 202339 - DNA, 23 bp, Artificial sequence
  SiRNA target sequence
actttttgtttcttttttatcgt

SEQ ID NO: 202340 - DNA, 23 bp, Artificial sequence
  SiRNA target sequence
ctttttgtttcttttttatcgta

SEQ ID NO: 202341 - DNA, 23 bp, Artificial sequence
  SiRNA target sequence
tttttgtttcttttttatcgtat

SEQ ID NO: 202342 - DNA, 23 bp, Artificial sequence
  SiRNA target sequence
ttttgtttcttttttatcgtatt

SEQ ID NO: 202343 - DNA, 23 bp, Artificial sequence
  SiRNA target sequence
tttgtttcttttttatcgtatta

SEQ ID NO: 202344 - DNA, 23 bp, Artificial sequence
  SiRNA target sequence
ttgtttcttttttatcgtattag

SEQ ID NO: 202345 - DNA, 23 bp, Artificial sequence
  SiRNA target sequence
tgtttcttttttatcgtattaga

SEQ ID NO: 202346 - DNA, 23 bp, Artificial sequence
  SiRNA target sequence
gtttcttttttatcgtattagaa

SEQ ID NO: 202347 - DNA, 23 bp, Artificial sequence
  SiRNA target sequence
tttcttttttatcgtattagaag

SEQ ID NO: 202348 - DNA, 23 bp, Artificial sequence
  SiRNA target sequence
ttcttttttatcgtattagaagg

SEQ ID NO: 202349 - DNA, 23 bp, Artificial sequence
  SiRNA target sequence
tcttttttatcgtattagaaggt

SEQ ID NO: 202350 - DNA, 23 bp, Artificial sequence
  SiRNA target sequence
cttttttatcgtattagaaggta

SEQ ID NO: 202351 - DNA, 23 bp, Artificial sequence
  SiRNA target sequence
ttttttatcgtattagaaggtat

SEQ ID NO: 202352 - DNA, 23 bp, Artificial sequence
  SiRNA target sequence
tttttatcgtattagaaggtata

SEQ ID NO: 202353 - DNA, 23 bp, Artificial sequence
  SiRNA target sequence
ttttatcgtattagaaggtataa

SEQ ID NO: 202354 - DNA, 23 bp, Artificial sequence
  SiRNA target sequence
tttatcgtattagaaggtataaa

SEQ ID NO: 202355 - DNA, 23 bp, Artificial sequence
  SiRNA target sequence
ttatcgtattagaaggtataaat

SEQ ID NO: 202356 - DNA, 23 bp, Artificial sequence
  SiRNA target sequence
tatcgtattagaaggtataaata

SEQ ID NO: 202357 - DNA, 23 bp, Artificial sequence
  SiRNA target sequence
atcgtattagaaggtataaatat

SEQ ID NO: 202358 - DNA, 23 bp, Artificial sequence
  SiRNA target sequence
tcgtattagaaggtataaatatt

SEQ ID NO: 202359 - DNA, 23 bp, Artificial sequence
  SiRNA target sequence
cgtattagaaggtataaatattg

SEQ ID NO: 202360 - DNA, 23 bp, Artificial sequence
  SiRNA target sequence
gtattagaaggtataaatattgg

SEQ ID NO: 202361 - DNA, 23 bp, Artificial sequence
  SiRNA target sequence
tattagaaggtataaatattggt

SEQ ID NO: 202362 - DNA, 23 bp, Artificial sequence
  SiRNA target sequence
attagaaggtataaatattggta

SEQ ID NO: 202363 - DNA, 23 bp, Artificial sequence
  SiRNA target sequence
ttagaaggtataaatattggtac

SEQ ID NO: 202364 - DNA, 23 bp, Artificial sequence
  SiRNA target sequence
tagaaggtataaatattggtaca

SEQ ID NO: 202365 - DNA, 23 bp, Artificial sequence
  SiRNA target sequence
agaaggtataaatattggtacac

SEQ ID NO: 202366 - DNA, 23 bp, Artificial sequence
  SiRNA target sequence
gaaggtataaatattggtacact

SEQ ID NO: 202367 - DNA, 23 bp, Artificial sequence
  SiRNA target sequence
aaggtataaatattggtacactc

SEQ ID NO: 202368 - DNA, 23 bp, Artificial sequence
  SiRNA target sequence
aggtataaatattggtacactca

SEQ ID NO: 202369 - DNA, 23 bp, Artificial sequence
  SiRNA target sequence
ggtataaatattggtacactcat

SEQ ID NO: 202370 - DNA, 23 bp, Artificial sequence
  SiRNA target sequence
gtataaatattggtacactcatt

SEQ ID NO: 202371 - DNA, 23 bp, Artificial sequence
  SiRNA target sequence
tataaatattggtacactcatta

SEQ ID NO: 202372 - DNA, 23 bp, Artificial sequence
  SiRNA target sequence
ataaatattggtacactcattat

SEQ ID NO: 202373 - DNA, 23 bp, Artificial sequence
  SiRNA target sequence
taaatattggtacactcattatt

SEQ ID NO: 202374 - DNA, 23 bp, Artificial sequence
  SiRNA target sequence
aaatattggtacactcattattt

SEQ ID NO: 202375 - DNA, 23 bp, Artificial sequence
  SiRNA target sequence
aatattggtacactcattatttt

SEQ ID NO: 202376 - DNA, 23 bp, Artificial sequence
  SiRNA target sequence
atattggtacactcattatttta

SEQ ID NO: 202377 - DNA, 23 bp, Artificial sequence
  SiRNA target sequence
tattggtacactcattattttat

SEQ ID NO: 202378 - DNA, 23 bp, Artificial sequence
  SiRNA target sequence
attggtacactcattattttatt

SEQ ID NO: 202379 - DNA, 23 bp, Artificial sequence
  SiRNA target sequence
ttggtacactcattattttattc

SEQ ID NO: 202380 - DNA, 23 bp, Artificial sequence
  SiRNA target sequence
tggtacactcattattttattct

SEQ ID NO: 202381 - DNA, 23 bp, Artificial sequence
  SiRNA target sequence
ggtacactcattattttattctc

SEQ ID NO: 202382 - DNA, 23 bp, Artificial sequence
  SiRNA target sequence
gtacactcattattttattctcg

SEQ ID NO: 202383 - DNA, 23 bp, Artificial sequence
  SiRNA target sequence
tacactcattattttattctcga

SEQ ID NO: 202384 - DNA, 23 bp, Artificial sequence
  SiRNA target sequence
acactcattattttattctcgaa

SEQ ID NO: 202385 - DNA, 23 bp, Artificial sequence
  SiRNA target sequence
cactcattattttattctcgaaa

SEQ ID NO: 202386 - DNA, 23 bp, Artificial sequence
  SiRNA target sequence
actcattattttattctcgaaat

SEQ ID NO: 202387 - DNA, 23 bp, Artificial sequence
  SiRNA target sequence
ctcattattttattctcgaaata

SEQ ID NO: 202388 - DNA, 23 bp, Artificial sequence
  SiRNA target sequence
tcattattttattctcgaaataa

SEQ ID NO: 202389 - DNA, 23 bp, Artificial sequence
  SiRNA target sequence
cattattttattctcgaaataat

SEQ ID NO: 202390 - DNA, 23 bp, Artificial sequence
  SiRNA target sequence
attattttattctcgaaataata

SEQ ID NO: 202391 - DNA, 23 bp, Artificial sequence
  SiRNA target sequence
ttattttattctcgaaataatat

SEQ ID NO: 202392 - DNA, 23 bp, Artificial sequence
  SiRNA target sequence
tattttattctcgaaataatatt

SEQ ID NO: 202393 - DNA, 23 bp, Artificial sequence
  SiRNA target sequence
attttattctcgaaataatattt

SEQ ID NO: 202394 - DNA, 23 bp, Artificial sequence
  SiRNA target sequence
ttttattctcgaaataatatttc

SEQ ID NO: 202395 - DNA, 23 bp, Artificial sequence
  SiRNA target sequence
tttattctcgaaataatatttca

SEQ ID NO: 202396 - DNA, 23 bp, Artificial sequence
  SiRNA target sequence
ttattctcgaaataatatttcat

SEQ ID NO: 202397 - DNA, 23 bp, Artificial sequence
  SiRNA target sequence
tattctcgaaataatatttcatg

SEQ ID NO: 202398 - DNA, 23 bp, Artificial sequence
  SiRNA target sequence
attctcgaaataatatttcatgt

SEQ ID NO: 202399 - DNA, 23 bp, Artificial sequence
  SiRNA target sequence
ttctcgaaataatatttcatgta

SEQ ID NO: 202400 - DNA, 23 bp, Artificial sequence
  SiRNA target sequence
tctcgaaataatatttcatgtac

SEQ ID NO: 202401 - DNA, 23 bp, Artificial sequence
  SiRNA target sequence
ctcgaaataatatttcatgtaca

SEQ ID NO: 202402 - DNA, 23 bp, Artificial sequence
  SiRNA target sequence
tcgaaataatatttcatgtacat

SEQ ID NO: 202403 - DNA, 23 bp, Artificial sequence
  SiRNA target sequence
cgaaataatatttcatgtacatt

SEQ ID NO: 202404 - DNA, 23 bp, Artificial sequence
  SiRNA target sequence
gaaataatatttcatgtacatta

SEQ ID NO: 202405 - DNA, 23 bp, Artificial sequence
  SiRNA target sequence
aaataatatttcatgtacattaa

SEQ ID NO: 202406 - DNA, 23 bp, Artificial sequence
  SiRNA target sequence
aataatatttcatgtacattaat

SEQ ID NO: 202407 - DNA, 23 bp, Artificial sequence
  SiRNA target sequence
ataatatttcatgtacattaata

SEQ ID NO: 202408 - DNA, 23 bp, Artificial sequence
  SiRNA target sequence
taatatttcatgtacattaatat

SEQ ID NO: 202409 - DNA, 23 bp, Artificial sequence
  SiRNA target sequence
aatatttcatgtacattaatatt

SEQ ID NO: 202410 - DNA, 23 bp, Artificial sequence
  SiRNA target sequence
atatttcatgtacattaatatta

SEQ ID NO: 202411 - DNA, 23 bp, Artificial sequence
  SiRNA target sequence
tatttcatgtacattaatattag

SEQ ID NO: 202412 - DNA, 23 bp, Artificial sequence
  SiRNA target sequence
atttcatgtacattaatattaga

SEQ ID NO: 202413 - DNA, 23 bp, Artificial sequence
  SiRNA target sequence
tttcatgtacattaatattagac

SEQ ID NO: 202414 - DNA, 23 bp, Artificial sequence
  SiRNA target sequence
ttcatgtacattaatattagaca

SEQ ID NO: 202415 - DNA, 23 bp, Artificial sequence
  SiRNA target sequence
tcatgtacattaatattagacat

SEQ ID NO: 202416 - DNA, 23 bp, Artificial sequence
  SiRNA target sequence
catgtacattaatattagacata

SEQ ID NO: 202417 - DNA, 23 bp, Artificial sequence
  SiRNA target sequence
atgtacattaatattagacatat

SEQ ID NO: 202418 - DNA, 23 bp, Artificial sequence
  SiRNA target sequence
tgtacattaatattagacatata

SEQ ID NO: 202419 - DNA, 23 bp, Artificial sequence
  SiRNA target sequence
gtacattaatattagacatatac

SEQ ID NO: 202420 - DNA, 23 bp, Artificial sequence
  SiRNA target sequence
tacattaatattagacatatacc

SEQ ID NO: 202421 - DNA, 23 bp, Artificial sequence
  SiRNA target sequence
acattaatattagacatataccg

SEQ ID NO: 202422 - DNA, 23 bp, Artificial sequence
  SiRNA target sequence
cattaatattagacatataccgc

SEQ ID NO: 202423 - DNA, 23 bp, Artificial sequence
  SiRNA target sequence
attaatattagacatataccgcc

SEQ ID NO: 202424 - DNA, 23 bp, Artificial sequence
  SiRNA target sequence
ttaatattagacatataccgccc

SEQ ID NO: 202425 - DNA, 23 bp, Artificial sequence
  SiRNA target sequence
taatattagacatataccgccca

SEQ ID NO: 202426 - DNA, 23 bp, Artificial sequence
  SiRNA target sequence
aatattagacatataccgcccat

SEQ ID NO: 202427 - DNA, 23 bp, Artificial sequence
  SiRNA target sequence
atattagacatataccgcccatg

SEQ ID NO: 202428 - DNA, 23 bp, Artificial sequence
  SiRNA target sequence
tattagacatataccgcccatgg

SEQ ID NO: 202429 - DNA, 23 bp, Artificial sequence
  SiRNA target sequence
attagacatataccgcccatggc

SEQ ID NO: 202430 - DNA, 23 bp, Artificial sequence
  SiRNA target sequence
ttagacatataccgcccatggca

SEQ ID NO: 202431 - DNA, 23 bp, Artificial sequence
  SiRNA target sequence
tagacatataccgcccatggcaa

SEQ ID NO: 202432 - DNA, 23 bp, Artificial sequence
  SiRNA target sequence
agacatataccgcccatggcaat

SEQ ID NO: 202433 - DNA, 23 bp, Artificial sequence
  SiRNA target sequence
gacatataccgcccatggcaata

SEQ ID NO: 202434 - DNA, 23 bp, Artificial sequence
  SiRNA target sequence
acatataccgcccatggcaataa

SEQ ID NO: 202435 - DNA, 23 bp, Artificial sequence
  SiRNA target sequence
catataccgcccatggcaataaa

SEQ ID NO: 202436 - DNA, 23 bp, Artificial sequence
  SiRNA target sequence
atataccgcccatggcaataaaa

SEQ ID NO: 202437 - DNA, 23 bp, Artificial sequence
  SiRNA target sequence
tataccgcccatggcaataaaaa

SEQ ID NO: 202438 - DNA, 23 bp, Artificial sequence
  SiRNA target sequence
ataccgcccatggcaataaaaac

SEQ ID NO: 202439 - DNA, 23 bp, Artificial sequence
  SiRNA target sequence
taccgcccatggcaataaaaacc

SEQ ID NO: 202440 - DNA, 23 bp, Artificial sequence
  SiRNA target sequence
accgcccatggcaataaaaaccg

SEQ ID NO: 202441 - DNA, 23 bp, Artificial sequence
  SiRNA target sequence
ccgcccatggcaataaaaaccga

SEQ ID NO: 202442 - DNA, 23 bp, Artificial sequence
  SiRNA target sequence
cgcccatggcaataaaaaccgaa

SEQ ID NO: 202443 - DNA, 23 bp, Artificial sequence
  SiRNA target sequence
gcccatggcaataaaaaccgaag

SEQ ID NO: 202444 - DNA, 23 bp, Artificial sequence
  SiRNA target sequence
cccatggcaataaaaaccgaaga

SEQ ID NO: 202445 - DNA, 23 bp, Artificial sequence
  SiRNA target sequence
ccatggcaataaaaaccgaagaa

SEQ ID NO: 202446 - DNA, 23 bp, Artificial sequence
  SiRNA target sequence
catggcaataaaaaccgaagaat

SEQ ID NO: 202447 - DNA, 23 bp, Artificial sequence
  SiRNA target sequence
atggcaataaaaaccgaagaata

SEQ ID NO: 202448 - DNA, 23 bp, Artificial sequence
  SiRNA target sequence
tggcaataaaaaccgaagaatat

SEQ ID NO: 202449 - DNA, 23 bp, Artificial sequence
  SiRNA target sequence
ggcaataaaaaccgaagaatata

SEQ ID NO: 202450 - DNA, 23 bp, Artificial sequence
  SiRNA target sequence
gcaataaaaaccgaagaatataa

SEQ ID NO: 202451 - DNA, 23 bp, Artificial sequence
  SiRNA target sequence
caataaaaaccgaagaatataat

SEQ ID NO: 202452 - DNA, 23 bp, Artificial sequence
  SiRNA target sequence
aataaaaaccgaagaatataata

SEQ ID NO: 202453 - DNA, 23 bp, Artificial sequence
  SiRNA target sequence
ataaaaaccgaagaatataataa

SEQ ID NO: 202454 - DNA, 23 bp, Artificial sequence
  SiRNA target sequence
taaaaaccgaagaatataataac

SEQ ID NO: 202455 - DNA, 23 bp, Artificial sequence
  SiRNA target sequence
aaaaaccgaagaatataataact

SEQ ID NO: 202456 - DNA, 23 bp, Artificial sequence
  SiRNA target sequence
aaaaccgaagaatataataactg

SEQ ID NO: 202457 - DNA, 23 bp, Artificial sequence
  SiRNA target sequence
aaaccgaagaatataataactga

SEQ ID NO: 202458 - DNA, 23 bp, Artificial sequence
  SiRNA target sequence
aaccgaagaatataataactgat

SEQ ID NO: 202459 - DNA, 23 bp, Artificial sequence
  SiRNA target sequence
accgaagaatataataactgatt

SEQ ID NO: 202460 - DNA, 23 bp, Artificial sequence
  SiRNA target sequence
ccgaagaatataataactgattt

SEQ ID NO: 202461 - DNA, 23 bp, Artificial sequence
  SiRNA target sequence
cgaagaatataataactgatttt

SEQ ID NO: 202462 - DNA, 23 bp, Artificial sequence
  SiRNA target sequence
gaagaatataataactgattttg

SEQ ID NO: 202463 - DNA, 23 bp, Artificial sequence
  SiRNA target sequence
aagaatataataactgattttgc

SEQ ID NO: 202464 - DNA, 23 bp, Artificial sequence
  SiRNA target sequence
agaatataataactgattttgct

SEQ ID NO: 202465 - DNA, 23 bp, Artificial sequence
  SiRNA target sequence
gaatataataactgattttgctc

SEQ ID NO: 202466 - DNA, 23 bp, Artificial sequence
  SiRNA target sequence
aatataataactgattttgctca

SEQ ID NO: 202467 - DNA, 23 bp, Artificial sequence
  SiRNA target sequence
atataataactgattttgctcat

SEQ ID NO: 202468 - DNA, 23 bp, Artificial sequence
  SiRNA target sequence
tataataactgattttgctcata

SEQ ID NO: 202469 - DNA, 23 bp, Artificial sequence
  SiRNA target sequence
ataataactgattttgctcatag

SEQ ID NO: 202470 - DNA, 23 bp, Artificial sequence
  SiRNA target sequence
taataactgattttgctcatagc

SEQ ID NO: 202471 - DNA, 23 bp, Artificial sequence
  SiRNA target sequence
aataactgattttgctcatagct

SEQ ID NO: 202472 - DNA, 23 bp, Artificial sequence
  SiRNA target sequence
ataactgattttgctcatagcta

SEQ ID NO: 202473 - DNA, 23 bp, Artificial sequence
  SiRNA target sequence
taactgattttgctcatagctaa

SEQ ID NO: 202474 - DNA, 23 bp, Artificial sequence
  SiRNA target sequence
aactgattttgctcatagctaaa

SEQ ID NO: 202475 - DNA, 23 bp, Artificial sequence
  SiRNA target sequence
actgattttgctcatagctaaat

SEQ ID NO: 202476 - DNA, 23 bp, Artificial sequence
  SiRNA target sequence
ctgattttgctcatagctaaatc

SEQ ID NO: 202477 - DNA, 23 bp, Artificial sequence
  SiRNA target sequence
tgattttgctcatagctaaatcc

SEQ ID NO: 202478 - DNA, 23 bp, Artificial sequence
  SiRNA target sequence
gattttgctcatagctaaatcct

SEQ ID NO: 202479 - DNA, 23 bp, Artificial sequence
  SiRNA target sequence
attttgctcatagctaaatcctt

SEQ ID NO: 202480 - DNA, 23 bp, Artificial sequence
  SiRNA target sequence
ttttgctcatagctaaatccttt

SEQ ID NO: 202481 - DNA, 23 bp, Artificial sequence
  SiRNA target sequence
tttgctcatagctaaatcctttt

SEQ ID NO: 202482 - DNA, 23 bp, Artificial sequence
  SiRNA target sequence
ttgctcatagctaaatccttttc

SEQ ID NO: 202483 - DNA, 23 bp, Artificial sequence
  SiRNA target sequence
tgctcatagctaaatccttttcg

SEQ ID NO: 202484 - DNA, 23 bp, Artificial sequence
  SiRNA target sequence
gctcatagctaaatccttttcgc

SEQ ID NO: 202485 - DNA, 23 bp, Artificial sequence
  SiRNA target sequence
ctcatagctaaatccttttcgca

SEQ ID NO: 202486 - DNA, 23 bp, Artificial sequence
  SiRNA target sequence
tcatagctaaatccttttcgcaa

SEQ ID NO: 202487 - DNA, 23 bp, Artificial sequence
  SiRNA target sequence
catagctaaatccttttcgcaat

SEQ ID NO: 202488 - DNA, 23 bp, Artificial sequence
  SiRNA target sequence
atagctaaatccttttcgcaatt

SEQ ID NO: 202489 - DNA, 23 bp, Artificial sequence
  SiRNA target sequence
tagctaaatccttttcgcaattc

SEQ ID NO: 202490 - DNA, 23 bp, Artificial sequence
  SiRNA target sequence
agctaaatccttttcgcaattct

SEQ ID NO: 202491 - DNA, 23 bp, Artificial sequence
  SiRNA target sequence
gctaaatccttttcgcaattctc

SEQ ID NO: 202492 - DNA, 23 bp, Artificial sequence
  SiRNA target sequence
ctaaatccttttcgcaattctct

SEQ ID NO: 202493 - DNA, 23 bp, Artificial sequence
  SiRNA target sequence
taaatccttttcgcaattctctg

SEQ ID NO: 202494 - DNA, 23 bp, Artificial sequence
  SiRNA target sequence
aaatccttttcgcaattctctga

SEQ ID NO: 202495 - DNA, 23 bp, Artificial sequence
  SiRNA target sequence
aatccttttcgcaattctctgaa

SEQ ID NO: 202496 - DNA, 23 bp, Artificial sequence
  SiRNA target sequence
atccttttcgcaattctctgaaa

SEQ ID NO: 202497 - DNA, 23 bp, Artificial sequence
  SiRNA target sequence
tccttttcgcaattctctgaaag

SEQ ID NO: 202498 - DNA, 23 bp, Artificial sequence
  SiRNA target sequence
ccttttcgcaattctctgaaaga

SEQ ID NO: 202499 - DNA, 23 bp, Artificial sequence
  SiRNA target sequence
cttttcgcaattctctgaaagaa

SEQ ID NO: 202500 - DNA, 23 bp, Artificial sequence
  SiRNA target sequence
ttttcgcaattctctgaaagaac

SEQ ID NO: 202501 - DNA, 23 bp, Artificial sequence
  SiRNA target sequence
tttcgcaattctctgaaagaact

SEQ ID NO: 202502 - DNA, 23 bp, Artificial sequence
  SiRNA target sequence
ttcgcaattctctgaaagaacta

SEQ ID NO: 202503 - DNA, 23 bp, Artificial sequence
  SiRNA target sequence
tcgcaattctctgaaagaactac

SEQ ID NO: 202504 - DNA, 23 bp, Artificial sequence
  SiRNA target sequence
cgcaattctctgaaagaactact

SEQ ID NO: 202505 - DNA, 23 bp, Artificial sequence
  SiRNA target sequence
gcaattctctgaaagaactactg

SEQ ID NO: 202506 - DNA, 23 bp, Artificial sequence
  SiRNA target sequence
caattctctgaaagaactactgg

SEQ ID NO: 202507 - DNA, 23 bp, Artificial sequence
  SiRNA target sequence
aattctctgaaagaactactggc

SEQ ID NO: 202508 - DNA, 23 bp, Artificial sequence
  SiRNA target sequence
attctctgaaagaactactggct

SEQ ID NO: 202509 - DNA, 23 bp, Artificial sequence
  SiRNA target sequence
ttctctgaaagaactactggcta

SEQ ID NO: 202510 - DNA, 23 bp, Artificial sequence
  SiRNA target sequence
tctctgaaagaactactggctaa

SEQ ID NO: 202511 - DNA, 23 bp, Artificial sequence
  SiRNA target sequence
ctctgaaagaactactggctaat

SEQ ID NO: 202512 - DNA, 23 bp, Artificial sequence
  SiRNA target sequence
tctgaaagaactactggctaatc

SEQ ID NO: 202513 - DNA, 23 bp, Artificial sequence
  SiRNA target sequence
ctgaaagaactactggctaatcc

SEQ ID NO: 202514 - DNA, 23 bp, Artificial sequence
  SiRNA target sequence
tgaaagaactactggctaatcca

SEQ ID NO: 202515 - DNA, 23 bp, Artificial sequence
  SiRNA target sequence
gaaagaactactggctaatccag

SEQ ID NO: 202516 - DNA, 23 bp, Artificial sequence
  SiRNA target sequence
aaagaactactggctaatccaga

SEQ ID NO: 202517 - DNA, 23 bp, Artificial sequence
  SiRNA target sequence
aagaactactggctaatccagat

SEQ ID NO: 202518 - DNA, 23 bp, Artificial sequence
  SiRNA target sequence
agaactactggctaatccagata

SEQ ID NO: 202519 - DNA, 23 bp, Artificial sequence
  SiRNA target sequence
gaactactggctaatccagatac

SEQ ID NO: 202520 - DNA, 23 bp, Artificial sequence
  SiRNA target sequence
aactactggctaatccagatact

SEQ ID NO: 202521 - DNA, 23 bp, Artificial sequence
  SiRNA target sequence
actactggctaatccagatacta

SEQ ID NO: 202522 - DNA, 23 bp, Artificial sequence
  SiRNA target sequence
ctactggctaatccagatactag

SEQ ID NO: 202523 - DNA, 23 bp, Artificial sequence
  SiRNA target sequence
tactggctaatccagatactagt

SEQ ID NO: 202524 - DNA, 23 bp, Artificial sequence
  SiRNA target sequence
actggctaatccagatactagta

SEQ ID NO: 202525 - DNA, 23 bp, Artificial sequence
  SiRNA target sequence
ctggctaatccagatactagtaa

SEQ ID NO: 202526 - DNA, 23 bp, Artificial sequence
  SiRNA target sequence
tggctaatccagatactagtaaa

SEQ ID NO: 202527 - DNA, 23 bp, Artificial sequence
  SiRNA target sequence
ggctaatccagatactagtaaag

SEQ ID NO: 202528 - DNA, 23 bp, Artificial sequence
  SiRNA target sequence
gctaatccagatactagtaaagc

SEQ ID NO: 202529 - DNA, 23 bp, Artificial sequence
  SiRNA target sequence
ctaatccagatactagtaaagct

SEQ ID NO: 202530 - DNA, 23 bp, Artificial sequence
  SiRNA target sequence
taatccagatactagtaaagcta

SEQ ID NO: 202531 - DNA, 23 bp, Artificial sequence
  SiRNA target sequence
aatccagatactagtaaagctaa

SEQ ID NO: 202532 - DNA, 23 bp, Artificial sequence
  SiRNA target sequence
atccagatactagtaaagctaaa

SEQ ID NO: 202533 - DNA, 23 bp, Artificial sequence
  SiRNA target sequence
tccagatactagtaaagctaaat

SEQ ID NO: 202534 - DNA, 23 bp, Artificial sequence
  SiRNA target sequence
ccagatactagtaaagctaaatt

SEQ ID NO: 202535 - DNA, 23 bp, Artificial sequence
  SiRNA target sequence
cagatactagtaaagctaaattt

SEQ ID NO: 202536 - DNA, 23 bp, Artificial sequence
  SiRNA target sequence
agatactagtaaagctaaatttg

SEQ ID NO: 202537 - DNA, 23 bp, Artificial sequence
  SiRNA target sequence
gatactagtaaagctaaatttgc

SEQ ID NO: 202538 - DNA, 23 bp, Artificial sequence
  SiRNA target sequence
atactagtaaagctaaatttgct

SEQ ID NO: 202539 - DNA, 23 bp, Artificial sequence
  SiRNA target sequence
tactagtaaagctaaatttgcta

SEQ ID NO: 202540 - DNA, 23 bp, Artificial sequence
  SiRNA target sequence
actagtaaagctaaatttgctat

SEQ ID NO: 202541 - DNA, 23 bp, Artificial sequence
  SiRNA target sequence
ctagtaaagctaaatttgctatt

SEQ ID NO: 202542 - DNA, 23 bp, Artificial sequence
  SiRNA target sequence
tagtaaagctaaatttgctatta

SEQ ID NO: 202543 - DNA, 23 bp, Artificial sequence
  SiRNA target sequence
agtaaagctaaatttgctattat

SEQ ID NO: 202544 - DNA, 23 bp, Artificial sequence
  SiRNA target sequence
gtaaagctaaatttgctattatg

SEQ ID NO: 202545 - DNA, 23 bp, Artificial sequence
  SiRNA target sequence
taaagctaaatttgctattatgt

SEQ ID NO: 202546 - DNA, 23 bp, Artificial sequence
  SiRNA target sequence
aaagctaaatttgctattatgta

SEQ ID NO: 202547 - DNA, 23 bp, Artificial sequence
  SiRNA target sequence
aagctaaatttgctattatgtaa

SEQ ID NO: 202548 - DNA, 23 bp, Artificial sequence
  SiRNA target sequence
agctaaatttgctattatgtaaa

SEQ ID NO: 202549 - DNA, 23 bp, Artificial sequence
  SiRNA target sequence
gctaaatttgctattatgtaaaa

SEQ ID NO: 202550 - DNA, 23 bp, Artificial sequence
  SiRNA target sequence
ctaaatttgctattatgtaaaaa

SEQ ID NO: 202551 - DNA, 23 bp, Artificial sequence
  SiRNA target sequence
taaatttgctattatgtaaaaag

SEQ ID NO: 202552 - DNA, 23 bp, Artificial sequence
  SiRNA target sequence
aaatttgctattatgtaaaaagg

SEQ ID NO: 202553 - DNA, 23 bp, Artificial sequence
  SiRNA target sequence
aatttgctattatgtaaaaaggt

SEQ ID NO: 202554 - DNA, 23 bp, Artificial sequence
  SiRNA target sequence
atttgctattatgtaaaaaggtg

SEQ ID NO: 202555 - DNA, 23 bp, Artificial sequence
  SiRNA target sequence
tttgctattatgtaaaaaggtgg

SEQ ID NO: 202556 - DNA, 23 bp, Artificial sequence
  SiRNA target sequence
ttgctattatgtaaaaaggtggt

SEQ ID NO: 202557 - DNA, 23 bp, Artificial sequence
  SiRNA target sequence
tgctattatgtaaaaaggtggta

SEQ ID NO: 202558 - DNA, 23 bp, Artificial sequence
  SiRNA target sequence
gctattatgtaaaaaggtggtaa

SEQ ID NO: 202559 - DNA, 23 bp, Artificial sequence
  SiRNA target sequence
ctattatgtaaaaaggtggtaaa

SEQ ID NO: 202560 - DNA, 23 bp, Artificial sequence
  SiRNA target sequence
tattatgtaaaaaggtggtaaaa

SEQ ID NO: 202561 - DNA, 23 bp, Artificial sequence
  SiRNA target sequence
attatgtaaaaaggtggtaaaaa

SEQ ID NO: 202562 - DNA, 23 bp, Artificial sequence
  SiRNA target sequence
ttatgtaaaaaggtggtaaaaat

SEQ ID NO: 202563 - DNA, 23 bp, Artificial sequence
  SiRNA target sequence
tatgtaaaaaggtggtaaaaatc

SEQ ID NO: 202564 - DNA, 23 bp, Artificial sequence
  SiRNA target sequence
atgtaaaaaggtggtaaaaatct

SEQ ID NO: 202565 - DNA, 23 bp, Artificial sequence
  SiRNA target sequence
tgtaaaaaggtggtaaaaatctt

SEQ ID NO: 202566 - DNA, 23 bp, Artificial sequence
  SiRNA target sequence
gtaaaaaggtggtaaaaatcttg

SEQ ID NO: 202567 - DNA, 23 bp, Artificial sequence
  SiRNA target sequence
taaaaaggtggtaaaaatcttgt

SEQ ID NO: 202568 - DNA, 23 bp, Artificial sequence
  SiRNA target sequence
aaaaaggtggtaaaaatcttgta

SEQ ID NO: 202569 - DNA, 23 bp, Artificial sequence
  SiRNA target sequence
aaaaggtggtaaaaatcttgtaa

SEQ ID NO: 202570 - DNA, 23 bp, Artificial sequence
  SiRNA target sequence
aaaggtggtaaaaatcttgtaaa

SEQ ID NO: 202571 - DNA, 23 bp, Artificial sequence
  SiRNA target sequence
aaggtggtaaaaatcttgtaaac

SEQ ID NO: 202572 - DNA, 23 bp, Artificial sequence
  SiRNA target sequence
aggtggtaaaaatcttgtaaact

SEQ ID NO: 202573 - DNA, 23 bp, Artificial sequence
  SiRNA target sequence
ggtggtaaaaatcttgtaaactg

SEQ ID NO: 202574 - DNA, 23 bp, Artificial sequence
  SiRNA target sequence
gtggtaaaaatcttgtaaactgt

SEQ ID NO: 202575 - DNA, 23 bp, Artificial sequence
  SiRNA target sequence
tggtaaaaatcttgtaaactgtc

SEQ ID NO: 202576 - DNA, 23 bp, Artificial sequence
  SiRNA target sequence
ggtaaaaatcttgtaaactgtct

SEQ ID NO: 202577 - DNA, 23 bp, Artificial sequence
  SiRNA target sequence
gtaaaaatcttgtaaactgtctg

SEQ ID NO: 202578 - DNA, 23 bp, Artificial sequence
  SiRNA target sequence
taaaaatcttgtaaactgtctga

SEQ ID NO: 202579 - DNA, 23 bp, Artificial sequence
  SiRNA target sequence
aaaaatcttgtaaactgtctgat

SEQ ID NO: 202580 - DNA, 23 bp, Artificial sequence
  SiRNA target sequence
aaaatcttgtaaactgtctgata

SEQ ID NO: 202581 - DNA, 23 bp, Artificial sequence
  SiRNA target sequence
aaatcttgtaaactgtctgatag

SEQ ID NO: 202582 - DNA, 23 bp, Artificial sequence
  SiRNA target sequence
aatcttgtaaactgtctgatagt

SEQ ID NO: 202583 - DNA, 23 bp, Artificial sequence
  SiRNA target sequence
atcttgtaaactgtctgatagta

SEQ ID NO: 202584 - DNA, 23 bp, Artificial sequence
  SiRNA target sequence
tcttgtaaactgtctgatagtac

SEQ ID NO: 202585 - DNA, 23 bp, Artificial sequence
  SiRNA target sequence
cttgtaaactgtctgatagtaca

SEQ ID NO: 202586 - DNA, 23 bp, Artificial sequence
  SiRNA target sequence
ttgtaaactgtctgatagtacaa

SEQ ID NO: 202587 - DNA, 23 bp, Artificial sequence
  SiRNA target sequence
tgtaaactgtctgatagtacaac

SEQ ID NO: 202588 - DNA, 23 bp, Artificial sequence
  SiRNA target sequence
gtaaactgtctgatagtacaact

SEQ ID NO: 202589 - DNA, 23 bp, Artificial sequence
  SiRNA target sequence
taaactgtctgatagtacaactt

SEQ ID NO: 202590 - DNA, 23 bp, Artificial sequence
  SiRNA target sequence
aaactgtctgatagtacaacttt

SEQ ID NO: 202591 - DNA, 23 bp, Artificial sequence
  SiRNA target sequence
aactgtctgatagtacaactttc

SEQ ID NO: 202592 - DNA, 23 bp, Artificial sequence
  SiRNA target sequence
actgtctgatagtacaactttca

SEQ ID NO: 202593 - DNA, 23 bp, Artificial sequence
  SiRNA target sequence
ctgtctgatagtacaactttcat

SEQ ID NO: 202594 - DNA, 23 bp, Artificial sequence
  SiRNA target sequence
tgtctgatagtacaactttcatt

SEQ ID NO: 202595 - DNA, 23 bp, Artificial sequence
  SiRNA target sequence
gtctgatagtacaactttcattt

SEQ ID NO: 202596 - DNA, 23 bp, Artificial sequence
  SiRNA target sequence
tctgatagtacaactttcattta

SEQ ID NO: 202597 - DNA, 23 bp, Artificial sequence
  SiRNA target sequence
ctgatagtacaactttcatttaa

SEQ ID NO: 202598 - DNA, 23 bp, Artificial sequence
  SiRNA target sequence
tgatagtacaactttcatttaaa

SEQ ID NO: 202599 - DNA, 23 bp, Artificial sequence
  SiRNA target sequence
gatagtacaactttcatttaaaa

SEQ ID NO: 202600 - DNA, 23 bp, Artificial sequence
  SiRNA target sequence
atagtacaactttcatttaaaaa

SEQ ID NO: 202601 - DNA, 23 bp, Artificial sequence
  SiRNA target sequence
tagtacaactttcatttaaaaaa

SEQ ID NO: 202602 - DNA, 23 bp, Artificial sequence
  SiRNA target sequence
agtacaactttcatttaaaaaac

SEQ ID NO: 202603 - DNA, 23 bp, Artificial sequence
  SiRNA target sequence
gtacaactttcatttaaaaaact

SEQ ID NO: 202604 - DNA, 23 bp, Artificial sequence
  SiRNA target sequence
tacaactttcatttaaaaaactc

SEQ ID NO: 202605 - DNA, 23 bp, Artificial sequence
  SiRNA target sequence
acaactttcatttaaaaaactca

SEQ ID NO: 202606 - DNA, 23 bp, Artificial sequence
  SiRNA target sequence
caactttcatttaaaaaactcat

SEQ ID NO: 202607 - DNA, 23 bp, Artificial sequence
  SiRNA target sequence
aactttcatttaaaaaactcatg

SEQ ID NO: 202608 - DNA, 23 bp, Artificial sequence
  SiRNA target sequence
actttcatttaaaaaactcatgt

SEQ ID NO: 202609 - DNA, 23 bp, Artificial sequence
  SiRNA target sequence
ctttcatttaaaaaactcatgta

SEQ ID NO: 202610 - DNA, 23 bp, Artificial sequence
  SiRNA target sequence
tttcatttaaaaaactcatgtat

SEQ ID NO: 202611 - DNA, 23 bp, Artificial sequence
  SiRNA target sequence
ttcatttaaaaaactcatgtata

SEQ ID NO: 202612 - DNA, 23 bp, Artificial sequence
  SiRNA target sequence
tcatttaaaaaactcatgtataa

SEQ ID NO: 202613 - DNA, 23 bp, Artificial sequence
  SiRNA target sequence
catttaaaaaactcatgtataaa

SEQ ID NO: 202614 - DNA, 23 bp, Artificial sequence
  SiRNA target sequence
atttaaaaaactcatgtataaat

SEQ ID NO: 202615 - DNA, 23 bp, Artificial sequence
  SiRNA target sequence
tttaaaaaactcatgtataaata

SEQ ID NO: 202616 - DNA, 23 bp, Artificial sequence
  SiRNA target sequence
ttaaaaaactcatgtataaataa

SEQ ID NO: 202617 - DNA, 23 bp, Artificial sequence
  SiRNA target sequence
taaaaaactcatgtataaataag

SEQ ID NO: 202618 - DNA, 23 bp, Artificial sequence
  SiRNA target sequence
aaaaaactcatgtataaataagc

SEQ ID NO: 202619 - DNA, 23 bp, Artificial sequence
  SiRNA target sequence
aaaaactcatgtataaataagcc

SEQ ID NO: 202620 - DNA, 23 bp, Artificial sequence
  SiRNA target sequence
aaaactcatgtataaataagcca

SEQ ID NO: 202621 - DNA, 23 bp, Artificial sequence
  SiRNA target sequence
aaactcatgtataaataagccat

SEQ ID NO: 202622 - DNA, 23 bp, Artificial sequence
  SiRNA target sequence
aactcatgtataaataagccata

SEQ ID NO: 202623 - DNA, 23 bp, Artificial sequence
  SiRNA target sequence
actcatgtataaataagccataa

SEQ ID NO: 202624 - DNA, 23 bp, Artificial sequence
  SiRNA target sequence
ctcatgtataaataagccataag

SEQ ID NO: 202625 - DNA, 23 bp, Artificial sequence
  SiRNA target sequence
tcatgtataaataagccataagt

SEQ ID NO: 202626 - DNA, 23 bp, Artificial sequence
  SiRNA target sequence
catgtataaataagccataagta

SEQ ID NO: 202627 - DNA, 23 bp, Artificial sequence
  SiRNA target sequence
atgtataaataagccataagtaa

SEQ ID NO: 202628 - DNA, 23 bp, Artificial sequence
  SiRNA target sequence
tgtataaataagccataagtaaa

SEQ ID NO: 202629 - DNA, 23 bp, Artificial sequence
  SiRNA target sequence
gtataaataagccataagtaaac

SEQ ID NO: 202630 - DNA, 23 bp, Artificial sequence
  SiRNA target sequence
tataaataagccataagtaaact

SEQ ID NO: 202631 - DNA, 23 bp, Artificial sequence
  SiRNA target sequence
ataaataagccataagtaaactg

SEQ ID NO: 202632 - DNA, 23 bp, Artificial sequence
  SiRNA target sequence
taaataagccataagtaaactgc

SEQ ID NO: 202633 - DNA, 23 bp, Artificial sequence
  SiRNA target sequence
aaataagccataagtaaactgcc

SEQ ID NO: 202634 - DNA, 23 bp, Artificial sequence
  SiRNA target sequence
aataagccataagtaaactgccc

SEQ ID NO: 202635 - DNA, 23 bp, Artificial sequence
  SiRNA target sequence
ataagccataagtaaactgcccc

SEQ ID NO: 202636 - DNA, 23 bp, Artificial sequence
  SiRNA target sequence
taagccataagtaaactgcccca

SEQ ID NO: 202637 - DNA, 23 bp, Artificial sequence
  SiRNA target sequence
aagccataagtaaactgccccac

SEQ ID NO: 202638 - DNA, 23 bp, Artificial sequence
  SiRNA target sequence
agccataagtaaactgccccaca

SEQ ID NO: 202639 - DNA, 23 bp, Artificial sequence
  SiRNA target sequence
gccataagtaaactgccccacat

SEQ ID NO: 202640 - DNA, 23 bp, Artificial sequence
  SiRNA target sequence
ccataagtaaactgccccacatt

SEQ ID NO: 202641 - DNA, 23 bp, Artificial sequence
  SiRNA target sequence
cataagtaaactgccccacattt

SEQ ID NO: 202642 - DNA, 23 bp, Artificial sequence
  SiRNA target sequence
ataagtaaactgccccacatttc

SEQ ID NO: 202643 - DNA, 23 bp, Artificial sequence
  SiRNA target sequence
taagtaaactgccccacatttct

SEQ ID NO: 202644 - DNA, 23 bp, Artificial sequence
  SiRNA target sequence
aagtaaactgccccacatttctg

SEQ ID NO: 202645 - DNA, 23 bp, Artificial sequence
  SiRNA target sequence
agtaaactgccccacatttctgc

SEQ ID NO: 202646 - DNA, 23 bp, Artificial sequence
  SiRNA target sequence
gtaaactgccccacatttctgct

SEQ ID NO: 202647 - DNA, 23 bp, Artificial sequence
  SiRNA target sequence
taaactgccccacatttctgcta

SEQ ID NO: 202648 - DNA, 23 bp, Artificial sequence
  SiRNA target sequence
aaactgccccacatttctgctat

SEQ ID NO: 202649 - DNA, 23 bp, Artificial sequence
  SiRNA target sequence
aactgccccacatttctgctatt

SEQ ID NO: 202650 - DNA, 23 bp, Artificial sequence
  SiRNA target sequence
actgccccacatttctgctatta

SEQ ID NO: 202651 - DNA, 23 bp, Artificial sequence
  SiRNA target sequence
ctgccccacatttctgctattat

SEQ ID NO: 202652 - DNA, 23 bp, Artificial sequence
  SiRNA target sequence
tgccccacatttctgctattata

SEQ ID NO: 202653 - DNA, 23 bp, Artificial sequence
  SiRNA target sequence
gccccacatttctgctattataa

SEQ ID NO: 202654 - DNA, 23 bp, Artificial sequence
  SiRNA target sequence
ccccacatttctgctattataaa

SEQ ID NO: 202655 - DNA, 23 bp, Artificial sequence
  SiRNA target sequence
cccacatttctgctattataaaa

SEQ ID NO: 202656 - DNA, 23 bp, Artificial sequence
  SiRNA target sequence
ccacatttctgctattataaaaa

SEQ ID NO: 202657 - DNA, 23 bp, Artificial sequence
  SiRNA target sequence
cacatttctgctattataaaaat

SEQ ID NO: 202658 - DNA, 23 bp, Artificial sequence
  SiRNA target sequence
acatttctgctattataaaaata

SEQ ID NO: 202659 - DNA, 23 bp, Artificial sequence
  SiRNA target sequence
catttctgctattataaaaatac

SEQ ID NO: 202660 - DNA, 23 bp, Artificial sequence
  SiRNA target sequence
atttctgctattataaaaataca

SEQ ID NO: 202661 - DNA, 23 bp, Artificial sequence
  SiRNA target sequence
tttctgctattataaaaatacaa

SEQ ID NO: 202662 - DNA, 23 bp, Artificial sequence
  SiRNA target sequence
ttctgctattataaaaatacaag

SEQ ID NO: 202663 - DNA, 23 bp, Artificial sequence
  SiRNA target sequence
tctgctattataaaaatacaagt

SEQ ID NO: 202664 - DNA, 23 bp, Artificial sequence
  SiRNA target sequence
ctgctattataaaaatacaagtt

SEQ ID NO: 202665 - DNA, 23 bp, Artificial sequence
  SiRNA target sequence
tgctattataaaaatacaagttg

SEQ ID NO: 202666 - DNA, 23 bp, Artificial sequence
  SiRNA target sequence
gctattataaaaatacaagttga

SEQ ID NO: 202667 - DNA, 23 bp, Artificial sequence
  SiRNA target sequence
ctattataaaaatacaagttgaa

SEQ ID NO: 202668 - DNA, 23 bp, Artificial sequence
  SiRNA target sequence
tattataaaaatacaagttgaaa

SEQ ID NO: 202669 - DNA, 23 bp, Artificial sequence
  SiRNA target sequence
attataaaaatacaagttgaaac

SEQ ID NO: 202670 - DNA, 23 bp, Artificial sequence
  SiRNA target sequence
ttataaaaatacaagttgaaacg

SEQ ID NO: 202671 - DNA, 23 bp, Artificial sequence
  SiRNA target sequence
tataaaaatacaagttgaaacgg

SEQ ID NO: 202672 - DNA, 23 bp, Artificial sequence
  SiRNA target sequence
ataaaaatacaagttgaaacggg

SEQ ID NO: 202673 - DNA, 23 bp, Artificial sequence
  SiRNA target sequence
taaaaatacaagttgaaacgggc

SEQ ID NO: 202674 - DNA, 23 bp, Artificial sequence
  SiRNA target sequence
aaaaatacaagttgaaacgggct

SEQ ID NO: 202675 - DNA, 23 bp, Artificial sequence
  SiRNA target sequence
aaaatacaagttgaaacgggctc

SEQ ID NO: 202676 - DNA, 23 bp, Artificial sequence
  SiRNA target sequence
aaatacaagttgaaacgggctcg

SEQ ID NO: 202677 - DNA, 23 bp, Artificial sequence
  SiRNA target sequence
aatacaagttgaaacgggctcgt

SEQ ID NO: 202678 - DNA, 23 bp, Artificial sequence
  SiRNA target sequence
atacaagttgaaacgggctcgtt

SEQ ID NO: 202679 - DNA, 23 bp, Artificial sequence
  SiRNA target sequence
tacaagttgaaacgggctcgtta

SEQ ID NO: 202680 - DNA, 23 bp, Artificial sequence
  SiRNA target sequence
acaagttgaaacgggctcgttag

SEQ ID NO: 202681 - DNA, 23 bp, Artificial sequence
  SiRNA target sequence
caagttgaaacgggctcgttagc

SEQ ID NO: 202682 - DNA, 23 bp, Artificial sequence
  SiRNA target sequence
aagttgaaacgggctcgttagct

SEQ ID NO: 202683 - DNA, 23 bp, Artificial sequence
  SiRNA target sequence
agttgaaacgggctcgttagctg

SEQ ID NO: 202684 - DNA, 23 bp, Artificial sequence
  SiRNA target sequence
gttgaaacgggctcgttagctgt

SEQ ID NO: 202685 - DNA, 23 bp, Artificial sequence
  SiRNA target sequence
ttgaaacgggctcgttagctgta

SEQ ID NO: 202686 - DNA, 23 bp, Artificial sequence
  SiRNA target sequence
tgaaacgggctcgttagctgtaa

SEQ ID NO: 202687 - DNA, 23 bp, Artificial sequence
  SiRNA target sequence
gaaacgggctcgttagctgtaat

SEQ ID NO: 202688 - DNA, 23 bp, Artificial sequence
  SiRNA target sequence
aaacgggctcgttagctgtaatt

SEQ ID NO: 202689 - DNA, 23 bp, Artificial sequence
  SiRNA target sequence
aacgggctcgttagctgtaatta

SEQ ID NO: 202690 - DNA, 23 bp, Artificial sequence
  SiRNA target sequence
acgggctcgttagctgtaattaa

SEQ ID NO: 202691 - DNA, 23 bp, Artificial sequence
  SiRNA target sequence
cgggctcgttagctgtaattaaa

SEQ ID NO: 202692 - DNA, 23 bp, Artificial sequence
  SiRNA target sequence
gggctcgttagctgtaattaaaa

SEQ ID NO: 202693 - DNA, 23 bp, Artificial sequence
  SiRNA target sequence
ggctcgttagctgtaattaaaaa

SEQ ID NO: 202694 - DNA, 23 bp, Artificial sequence
  SiRNA target sequence
gctcgttagctgtaattaaaaaa

SEQ ID NO: 202695 - DNA, 23 bp, Artificial sequence
  SiRNA target sequence
ctcgttagctgtaattaaaaaat

SEQ ID NO: 202696 - DNA, 23 bp, Artificial sequence
  SiRNA target sequence
tcgttagctgtaattaaaaaata

SEQ ID NO: 202697 - DNA, 23 bp, Artificial sequence
  SiRNA target sequence
cgttagctgtaattaaaaaatat

SEQ ID NO: 202698 - DNA, 23 bp, Artificial sequence
  SiRNA target sequence
gttagctgtaattaaaaaatatt

SEQ ID NO: 202699 - DNA, 23 bp, Artificial sequence
  SiRNA target sequence
ttagctgtaattaaaaaatattt

SEQ ID NO: 202700 - DNA, 23 bp, Artificial sequence
  SiRNA target sequence
tagctgtaattaaaaaatatttt

SEQ ID NO: 202701 - DNA, 23 bp, Artificial sequence
  SiRNA target sequence
agctgtaattaaaaaatatttta

SEQ ID NO: 202702 - DNA, 23 bp, Artificial sequence
  SiRNA target sequence
gctgtaattaaaaaatattttat

SEQ ID NO: 202703 - DNA, 23 bp, Artificial sequence
  SiRNA target sequence
ctgtaattaaaaaatattttata

SEQ ID NO: 202704 - DNA, 23 bp, Artificial sequence
  SiRNA target sequence
tgtaattaaaaaatattttataa

SEQ ID NO: 202705 - DNA, 23 bp, Artificial sequence
  SiRNA target sequence
gtaattaaaaaatattttataaa

SEQ ID NO: 202706 - DNA, 23 bp, Artificial sequence
  SiRNA target sequence
taattaaaaaatattttataaag

SEQ ID NO: 202707 - DNA, 23 bp, Artificial sequence
  SiRNA target sequence
aattaaaaaatattttataaagt

SEQ ID NO: 202708 - DNA, 23 bp, Artificial sequence
  SiRNA target sequence
attaaaaaatattttataaagtt

SEQ ID NO: 202709 - DNA, 23 bp, Artificial sequence
  SiRNA target sequence
ttaaaaaatattttataaagttc

SEQ ID NO: 202710 - DNA, 23 bp, Artificial sequence
  SiRNA target sequence
taaaaaatattttataaagttca

SEQ ID NO: 202711 - DNA, 23 bp, Artificial sequence
  SiRNA target sequence
aaaaaatattttataaagttcaa

SEQ ID NO: 202712 - DNA, 23 bp, Artificial sequence
  SiRNA target sequence
aaaaatattttataaagttcaat

SEQ ID NO: 202713 - DNA, 23 bp, Artificial sequence
  SiRNA target sequence
aaaatattttataaagttcaatc

SEQ ID NO: 202714 - DNA, 23 bp, Artificial sequence
  SiRNA target sequence
aaatattttataaagttcaatcc

SEQ ID NO: 202715 - DNA, 23 bp, Artificial sequence
  SiRNA target sequence
aatattttataaagttcaatccc

SEQ ID NO: 202716 - DNA, 23 bp, Artificial sequence
  SiRNA target sequence
atattttataaagttcaatccct

SEQ ID NO: 202717 - DNA, 23 bp, Artificial sequence
  SiRNA target sequence
tattttataaagttcaatccctt

SEQ ID NO: 202718 - DNA, 23 bp, Artificial sequence
  SiRNA target sequence
attttataaagttcaatcccttc

SEQ ID NO: 202719 - DNA, 23 bp, Artificial sequence
  SiRNA target sequence
ttttataaagttcaatcccttca

SEQ ID NO: 202720 - DNA, 23 bp, Artificial sequence
  SiRNA target sequence
tttataaagttcaatcccttcaa

SEQ ID NO: 202721 - DNA, 23 bp, Artificial sequence
  SiRNA target sequence
ttataaagttcaatcccttcaat

SEQ ID NO: 202722 - DNA, 23 bp, Artificial sequence
  SiRNA target sequence
tataaagttcaatcccttcaatg

SEQ ID NO: 202723 - DNA, 23 bp, Artificial sequence
  SiRNA target sequence
ataaagttcaatcccttcaatgc

SEQ ID NO: 202724 - DNA, 23 bp, Artificial sequence
  SiRNA target sequence
taaagttcaatcccttcaatgca

SEQ ID NO: 202725 - DNA, 23 bp, Artificial sequence
  SiRNA target sequence
aaagttcaatcccttcaatgcac

SEQ ID NO: 202726 - DNA, 23 bp, Artificial sequence
  SiRNA target sequence
aagttcaatcccttcaatgcacc

SEQ ID NO: 202727 - DNA, 23 bp, Artificial sequence
  SiRNA target sequence
agttcaatcccttcaatgcacct

SEQ ID NO: 202728 - DNA, 23 bp, Artificial sequence
  SiRNA target sequence
gttcaatcccttcaatgcacctt

SEQ ID NO: 202729 - DNA, 23 bp, Artificial sequence
  SiRNA target sequence
ttcaatcccttcaatgcaccttt

SEQ ID NO: 202730 - DNA, 23 bp, Artificial sequence
  SiRNA target sequence
tcaatcccttcaatgcacctttg

SEQ ID NO: 202731 - DNA, 23 bp, Artificial sequence
  SiRNA target sequence
caatcccttcaatgcacctttgt

SEQ ID NO: 202732 - DNA, 23 bp, Artificial sequence
  SiRNA target sequence
aatcccttcaatgcacctttgtt

SEQ ID NO: 202733 - DNA, 23 bp, Artificial sequence
  SiRNA target sequence
atcccttcaatgcacctttgtta

SEQ ID NO: 202734 - DNA, 23 bp, Artificial sequence
  SiRNA target sequence
tcccttcaatgcacctttgttat

SEQ ID NO: 202735 - DNA, 23 bp, Artificial sequence
  SiRNA target sequence
cccttcaatgcacctttgttatc

SEQ ID NO: 202736 - DNA, 23 bp, Artificial sequence
  SiRNA target sequence
ccttcaatgcacctttgttatca

SEQ ID NO: 202737 - DNA, 23 bp, Artificial sequence
  SiRNA target sequence
cttcaatgcacctttgttatcag

SEQ ID NO: 202738 - DNA, 23 bp, Artificial sequence
  SiRNA target sequence
ttcaatgcacctttgttatcagc

SEQ ID NO: 202739 - DNA, 23 bp, Artificial sequence
  SiRNA target sequence
tcaatgcacctttgttatcagcg

SEQ ID NO: 202740 - DNA, 23 bp, Artificial sequence
  SiRNA target sequence
caatgcacctttgttatcagcga

SEQ ID NO: 202741 - DNA, 23 bp, Artificial sequence
  SiRNA target sequence
aatgcacctttgttatcagcgaa

SEQ ID NO: 202742 - DNA, 23 bp, Artificial sequence
  SiRNA target sequence
atgcacctttgttatcagcgaaa

SEQ ID NO: 202743 - DNA, 23 bp, Artificial sequence
  SiRNA target sequence
tgcacctttgttatcagcgaaaa

SEQ ID NO: 202744 - DNA, 23 bp, Artificial sequence
  SiRNA target sequence
gcacctttgttatcagcgaaaat

SEQ ID NO: 202745 - DNA, 23 bp, Artificial sequence
  SiRNA target sequence
cacctttgttatcagcgaaaata

SEQ ID NO: 202746 - DNA, 23 bp, Artificial sequence
  SiRNA target sequence
acctttgttatcagcgaaaatat

SEQ ID NO: 202747 - DNA, 23 bp, Artificial sequence
  SiRNA target sequence
cctttgttatcagcgaaaatatc

SEQ ID NO: 202748 - DNA, 23 bp, Artificial sequence
  SiRNA target sequence
ctttgttatcagcgaaaatatct

SEQ ID NO: 202749 - DNA, 23 bp, Artificial sequence
  SiRNA target sequence
tttgttatcagcgaaaatatctc

SEQ ID NO: 202750 - DNA, 23 bp, Artificial sequence
  SiRNA target sequence
ttgttatcagcgaaaatatctct

SEQ ID NO: 202751 - DNA, 23 bp, Artificial sequence
  SiRNA target sequence
tgttatcagcgaaaatatctcta

SEQ ID NO: 202752 - DNA, 23 bp, Artificial sequence
  SiRNA target sequence
gttatcagcgaaaatatctctaa

SEQ ID NO: 202753 - DNA, 23 bp, Artificial sequence
  SiRNA target sequence
ttatcagcgaaaatatctctaaa

SEQ ID NO: 202754 - DNA, 23 bp, Artificial sequence
  SiRNA target sequence
tatcagcgaaaatatctctaaat

SEQ ID NO: 202755 - DNA, 23 bp, Artificial sequence
  SiRNA target sequence
atcagcgaaaatatctctaaata

SEQ ID NO: 202756 - DNA, 23 bp, Artificial sequence
  SiRNA target sequence
tcagcgaaaatatctctaaataa

SEQ ID NO: 202757 - DNA, 23 bp, Artificial sequence
  SiRNA target sequence
cagcgaaaatatctctaaataaa

SEQ ID NO: 202758 - DNA, 23 bp, Artificial sequence
  SiRNA target sequence
agcgaaaatatctctaaataaaa

SEQ ID NO: 202759 - DNA, 23 bp, Artificial sequence
  SiRNA target sequence
gcgaaaatatctctaaataaaaa

SEQ ID NO: 202760 - DNA, 23 bp, Artificial sequence
  SiRNA target sequence
cgaaaatatctctaaataaaaag

SEQ ID NO: 202761 - DNA, 23 bp, Artificial sequence
  SiRNA target sequence
gaaaatatctctaaataaaaagc

SEQ ID NO: 202762 - DNA, 23 bp, Artificial sequence
  SiRNA target sequence
aaaatatctctaaataaaaagct

SEQ ID NO: 202763 - DNA, 23 bp, Artificial sequence
  SiRNA target sequence
aaatatctctaaataaaaagcta

SEQ ID NO: 202764 - DNA, 23 bp, Artificial sequence
  SiRNA target sequence
aatatctctaaataaaaagctag

SEQ ID NO: 202765 - DNA, 23 bp, Artificial sequence
  SiRNA target sequence
atatctctaaataaaaagctaga

SEQ ID NO: 202766 - DNA, 23 bp, Artificial sequence
  SiRNA target sequence
tatctctaaataaaaagctagat

SEQ ID NO: 202767 - DNA, 23 bp, Artificial sequence
  SiRNA target sequence
atctctaaataaaaagctagatg

SEQ ID NO: 202768 - DNA, 23 bp, Artificial sequence
  SiRNA target sequence
tctctaaataaaaagctagatgg

SEQ ID NO: 202769 - DNA, 23 bp, Artificial sequence
  SiRNA target sequence
ctctaaataaaaagctagatggt

SEQ ID NO: 202770 - DNA, 23 bp, Artificial sequence
  SiRNA target sequence
tctaaataaaaagctagatggtg

SEQ ID NO: 202771 - DNA, 23 bp, Artificial sequence
  SiRNA target sequence
ctaaataaaaagctagatggtgt

SEQ ID NO: 202772 - DNA, 23 bp, Artificial sequence
  SiRNA target sequence
taaataaaaagctagatggtgtt

SEQ ID NO: 202773 - DNA, 23 bp, Artificial sequence
  SiRNA target sequence
aaataaaaagctagatggtgtta

SEQ ID NO: 202774 - DNA, 23 bp, Artificial sequence
  SiRNA target sequence
aataaaaagctagatggtgttac

SEQ ID NO: 202775 - DNA, 23 bp, Artificial sequence
  SiRNA target sequence
ataaaaagctagatggtgttact

SEQ ID NO: 202776 - DNA, 23 bp, Artificial sequence
  SiRNA target sequence
taaaaagctagatggtgttactt

SEQ ID NO: 202777 - DNA, 23 bp, Artificial sequence
  SiRNA target sequence
aaaaagctagatggtgttacttt

SEQ ID NO: 202778 - DNA, 23 bp, Artificial sequence
  SiRNA target sequence
aaaagctagatggtgttactttc

SEQ ID NO: 202779 - DNA, 23 bp, Artificial sequence
  SiRNA target sequence
aaagctagatggtgttactttct

SEQ ID NO: 202780 - DNA, 23 bp, Artificial sequence
  SiRNA target sequence
aagctagatggtgttactttctc

SEQ ID NO: 202781 - DNA, 23 bp, Artificial sequence
  SiRNA target sequence
agctagatggtgttactttctct

SEQ ID NO: 202782 - DNA, 23 bp, Artificial sequence
  SiRNA target sequence
gctagatggtgttactttctctt

SEQ ID NO: 202783 - DNA, 23 bp, Artificial sequence
  SiRNA target sequence
ctagatggtgttactttctcttc

SEQ ID NO: 202784 - DNA, 23 bp, Artificial sequence
  SiRNA target sequence
tagatggtgttactttctcttca

SEQ ID NO: 202785 - DNA, 23 bp, Artificial sequence
  SiRNA target sequence
agatggtgttactttctcttcaa

SEQ ID NO: 202786 - DNA, 23 bp, Artificial sequence
  SiRNA target sequence
gatggtgttactttctcttcaaa

SEQ ID NO: 202787 - DNA, 23 bp, Artificial sequence
  SiRNA target sequence
atggtgttactttctcttcaaac

SEQ ID NO: 202788 - DNA, 23 bp, Artificial sequence
  SiRNA target sequence
tggtgttactttctcttcaaaca

SEQ ID NO: 202789 - DNA, 23 bp, Artificial sequence
  SiRNA target sequence
ggtgttactttctcttcaaacaa

SEQ ID NO: 202790 - DNA, 23 bp, Artificial sequence
  SiRNA target sequence
gtgttactttctcttcaaacaaa

SEQ ID NO: 202791 - DNA, 23 bp, Artificial sequence
  SiRNA target sequence
tgttactttctcttcaaacaaaa

SEQ ID NO: 202792 - DNA, 23 bp, Artificial sequence
  SiRNA target sequence
gttactttctcttcaaacaaaaa

SEQ ID NO: 202793 - DNA, 23 bp, Artificial sequence
  SiRNA target sequence
ttactttctcttcaaacaaaaag

SEQ ID NO: 202794 - DNA, 23 bp, Artificial sequence
  SiRNA target sequence
tactttctcttcaaacaaaaaga

SEQ ID NO: 202795 - DNA, 23 bp, Artificial sequence
  SiRNA target sequence
actttctcttcaaacaaaaagat

SEQ ID NO: 202796 - DNA, 23 bp, Artificial sequence
  SiRNA target sequence
ctttctcttcaaacaaaaagatt

SEQ ID NO: 202797 - DNA, 23 bp, Artificial sequence
  SiRNA target sequence
tttctcttcaaacaaaaagattg

SEQ ID NO: 202798 - DNA, 23 bp, Artificial sequence
  SiRNA target sequence
ttctcttcaaacaaaaagattgc

SEQ ID NO: 202799 - DNA, 23 bp, Artificial sequence
  SiRNA target sequence
tctcttcaaacaaaaagattgcc

SEQ ID NO: 202800 - DNA, 23 bp, Artificial sequence
  SiRNA target sequence
ctcttcaaacaaaaagattgccc

SEQ ID NO: 202801 - DNA, 23 bp, Artificial sequence
  SiRNA target sequence
tcttcaaacaaaaagattgcccc

SEQ ID NO: 202802 - DNA, 23 bp, Artificial sequence
  SiRNA target sequence
cttcaaacaaaaagattgcccct

SEQ ID NO: 202803 - DNA, 23 bp, Artificial sequence
  SiRNA target sequence
ttcaaacaaaaagattgccccta

SEQ ID NO: 202804 - DNA, 23 bp, Artificial sequence
  SiRNA target sequence
tcaaacaaaaagattgcccctag

SEQ ID NO: 202805 - DNA, 23 bp, Artificial sequence
  SiRNA target sequence
caaacaaaaagattgcccctagt

SEQ ID NO: 202806 - DNA, 23 bp, Artificial sequence
  SiRNA target sequence
aaacaaaaagattgcccctagtc

SEQ ID NO: 202807 - DNA, 23 bp, Artificial sequence
  SiRNA target sequence
aacaaaaagattgcccctagtcc

SEQ ID NO: 202808 - DNA, 23 bp, Artificial sequence
  SiRNA target sequence
acaaaaagattgcccctagtccg

SEQ ID NO: 202809 - DNA, 23 bp, Artificial sequence
  SiRNA target sequence
caaaaagattgcccctagtccga

SEQ ID NO: 202810 - DNA, 23 bp, Artificial sequence
  SiRNA target sequence
aaaaagattgcccctagtccgaa

SEQ ID NO: 202811 - DNA, 23 bp, Artificial sequence
  SiRNA target sequence
aaaagattgcccctagtccgaag

SEQ ID NO: 202812 - DNA, 23 bp, Artificial sequence
  SiRNA target sequence
aaagattgcccctagtccgaaga

SEQ ID NO: 202813 - DNA, 23 bp, Artificial sequence
  SiRNA target sequence
aagattgcccctagtccgaagaa

SEQ ID NO: 202814 - DNA, 23 bp, Artificial sequence
  SiRNA target sequence
agattgcccctagtccgaagaaa

SEQ ID NO: 202815 - DNA, 23 bp, Artificial sequence
  SiRNA target sequence
gattgcccctagtccgaagaaaa

SEQ ID NO: 202816 - DNA, 23 bp, Artificial sequence
  SiRNA target sequence
attgcccctagtccgaagaaaaa

SEQ ID NO: 202817 - DNA, 23 bp, Artificial sequence
  SiRNA target sequence
ttgcccctagtccgaagaaaaat

SEQ ID NO: 202818 - DNA, 23 bp, Artificial sequence
  SiRNA target sequence
tgcccctagtccgaagaaaaatg

SEQ ID NO: 202819 - DNA, 23 bp, Artificial sequence
  SiRNA target sequence
gcccctagtccgaagaaaaatgc

SEQ ID NO: 202820 - DNA, 23 bp, Artificial sequence
  SiRNA target sequence
cccctagtccgaagaaaaatgca

SEQ ID NO: 202821 - DNA, 23 bp, Artificial sequence
  SiRNA target sequence
ccctagtccgaagaaaaatgcag

SEQ ID NO: 202822 - DNA, 23 bp, Artificial sequence
  SiRNA target sequence
cctagtccgaagaaaaatgcagt

SEQ ID NO: 202823 - DNA, 23 bp, Artificial sequence
  SiRNA target sequence
ctagtccgaagaaaaatgcagta

SEQ ID NO: 202824 - DNA, 23 bp, Artificial sequence
  SiRNA target sequence
tagtccgaagaaaaatgcagtaa

SEQ ID NO: 202825 - DNA, 23 bp, Artificial sequence
  SiRNA target sequence
agtccgaagaaaaatgcagtaaa

SEQ ID NO: 202826 - DNA, 23 bp, Artificial sequence
  SiRNA target sequence
gtccgaagaaaaatgcagtaaaa

SEQ ID NO: 202827 - DNA, 23 bp, Artificial sequence
  SiRNA target sequence
tccgaagaaaaatgcagtaaaaa

SEQ ID NO: 202828 - DNA, 23 bp, Artificial sequence
  SiRNA target sequence
ccgaagaaaaatgcagtaaaaat

SEQ ID NO: 202829 - DNA, 23 bp, Artificial sequence
  SiRNA target sequence
cgaagaaaaatgcagtaaaaatt

SEQ ID NO: 202830 - DNA, 23 bp, Artificial sequence
  SiRNA target sequence
gaagaaaaatgcagtaaaaatta

SEQ ID NO: 202831 - DNA, 23 bp, Artificial sequence
  SiRNA target sequence
aagaaaaatgcagtaaaaattat

SEQ ID NO: 202832 - DNA, 23 bp, Artificial sequence
  SiRNA target sequence
agaaaaatgcagtaaaaattatt

SEQ ID NO: 202833 - DNA, 23 bp, Artificial sequence
  SiRNA target sequence
gaaaaatgcagtaaaaattatta

SEQ ID NO: 202834 - DNA, 23 bp, Artificial sequence
  SiRNA target sequence
aaaaatgcagtaaaaattattag

SEQ ID NO: 202835 - DNA, 23 bp, Artificial sequence
  SiRNA target sequence
aaaatgcagtaaaaattattaga

SEQ ID NO: 202836 - DNA, 23 bp, Artificial sequence
  SiRNA target sequence
aaatgcagtaaaaattattagaa

SEQ ID NO: 202837 - DNA, 23 bp, Artificial sequence
  SiRNA target sequence
aatgcagtaaaaattattagaaa

SEQ ID NO: 202838 - DNA, 23 bp, Artificial sequence
  SiRNA target sequence
atgcagtaaaaattattagaaat

SEQ ID NO: 202839 - DNA, 23 bp, Artificial sequence
  SiRNA target sequence
tgcagtaaaaattattagaaata

SEQ ID NO: 202840 - DNA, 23 bp, Artificial sequence
  SiRNA target sequence
gcagtaaaaattattagaaatag

SEQ ID NO: 202841 - DNA, 23 bp, Artificial sequence
  SiRNA target sequence
cagtaaaaattattagaaataga

SEQ ID NO: 202842 - DNA, 23 bp, Artificial sequence
  SiRNA target sequence
agtaaaaattattagaaatagat

SEQ ID NO: 202843 - DNA, 23 bp, Artificial sequence
  SiRNA target sequence
gtaaaaattattagaaatagatt

SEQ ID NO: 202844 - DNA, 23 bp, Artificial sequence
  SiRNA target sequence
taaaaattattagaaatagatta

SEQ ID NO: 202845 - DNA, 23 bp, Artificial sequence
  SiRNA target sequence
aaaaattattagaaatagattaa

SEQ ID NO: 202846 - DNA, 23 bp, Artificial sequence
  SiRNA target sequence
aaaattattagaaatagattaaa

SEQ ID NO: 202847 - DNA, 23 bp, Artificial sequence
  SiRNA target sequence
aaattattagaaatagattaaaa

SEQ ID NO: 202848 - DNA, 23 bp, Artificial sequence
  SiRNA target sequence
aattattagaaatagattaaaaa

SEQ ID NO: 202849 - DNA, 23 bp, Artificial sequence
  SiRNA target sequence
attattagaaatagattaaaaat

SEQ ID NO: 202850 - DNA, 23 bp, Artificial sequence
  SiRNA target sequence
ttattagaaatagattaaaaatc

SEQ ID NO: 202851 - DNA, 23 bp, Artificial sequence
  SiRNA target sequence
tattagaaatagattaaaaatcg

SEQ ID NO: 202852 - DNA, 23 bp, Artificial sequence
  SiRNA target sequence
attagaaatagattaaaaatcga

SEQ ID NO: 202853 - DNA, 23 bp, Artificial sequence
  SiRNA target sequence
ttagaaatagattaaaaatcgat

SEQ ID NO: 202854 - DNA, 23 bp, Artificial sequence
  SiRNA target sequence
tagaaatagattaaaaatcgatg

SEQ ID NO: 202855 - DNA, 23 bp, Artificial sequence
  SiRNA target sequence
agaaatagattaaaaatcgatga

SEQ ID NO: 202856 - DNA, 23 bp, Artificial sequence
  SiRNA target sequence
gaaatagattaaaaatcgatgat

SEQ ID NO: 202857 - DNA, 23 bp, Artificial sequence
  SiRNA target sequence
aaatagattaaaaatcgatgata

SEQ ID NO: 202858 - DNA, 23 bp, Artificial sequence
  SiRNA target sequence
aatagattaaaaatcgatgatac

SEQ ID NO: 202859 - DNA, 23 bp, Artificial sequence
  SiRNA target sequence
atagattaaaaatcgatgataca

SEQ ID NO: 202860 - DNA, 23 bp, Artificial sequence
  SiRNA target sequence
tagattaaaaatcgatgatacag

SEQ ID NO: 202861 - DNA, 23 bp, Artificial sequence
  SiRNA target sequence
agattaaaaatcgatgatacagg

SEQ ID NO: 202862 - DNA, 23 bp, Artificial sequence
  SiRNA target sequence
gattaaaaatcgatgatacaggt

SEQ ID NO: 202863 - DNA, 23 bp, Artificial sequence
  SiRNA target sequence
attaaaaatcgatgatacaggtt

SEQ ID NO: 202864 - DNA, 23 bp, Artificial sequence
  SiRNA target sequence
ttaaaaatcgatgatacaggttt

SEQ ID NO: 202865 - DNA, 23 bp, Artificial sequence
  SiRNA target sequence
taaaaatcgatgatacaggttta

SEQ ID NO: 202866 - DNA, 23 bp, Artificial sequence
  SiRNA target sequence
aaaaatcgatgatacaggtttat

SEQ ID NO: 202867 - DNA, 23 bp, Artificial sequence
  SiRNA target sequence
aaaatcgatgatacaggtttatt

SEQ ID NO: 202868 - DNA, 23 bp, Artificial sequence
  SiRNA target sequence
aaatcgatgatacaggtttattt

SEQ ID NO: 202869 - DNA, 23 bp, Artificial sequence
  SiRNA target sequence
aatcgatgatacaggtttatttt

SEQ ID NO: 202870 - DNA, 23 bp, Artificial sequence
  SiRNA target sequence
atcgatgatacaggtttattttg

SEQ ID NO: 202871 - DNA, 23 bp, Artificial sequence
  SiRNA target sequence
tcgatgatacaggtttattttgc

SEQ ID NO: 202872 - DNA, 23 bp, Artificial sequence
  SiRNA target sequence
cgatgatacaggtttattttgca

SEQ ID NO: 202873 - DNA, 23 bp, Artificial sequence
  SiRNA target sequence
gatgatacaggtttattttgcat

SEQ ID NO: 202874 - DNA, 23 bp, Artificial sequence
  SiRNA target sequence
atgatacaggtttattttgcata

SEQ ID NO: 202875 - DNA, 23 bp, Artificial sequence
  SiRNA target sequence
tgatacaggtttattttgcataa

SEQ ID NO: 202876 - DNA, 23 bp, Artificial sequence
  SiRNA target sequence
gatacaggtttattttgcataag

SEQ ID NO: 202877 - DNA, 23 bp, Artificial sequence
  SiRNA target sequence
atacaggtttattttgcataagc

SEQ ID NO: 202878 - DNA, 23 bp, Artificial sequence
  SiRNA target sequence
tacaggtttattttgcataagcc

SEQ ID NO: 202879 - DNA, 23 bp, Artificial sequence
  SiRNA target sequence
acaggtttattttgcataagcca

SEQ ID NO: 202880 - DNA, 23 bp, Artificial sequence
  SiRNA target sequence
caggtttattttgcataagccac

SEQ ID NO: 202881 - DNA, 23 bp, Artificial sequence
  SiRNA target sequence
aggtttattttgcataagccact

SEQ ID NO: 202882 - DNA, 23 bp, Artificial sequence
  SiRNA target sequence
ggtttattttgcataagccactg

SEQ ID NO: 202883 - DNA, 23 bp, Artificial sequence
  SiRNA target sequence
gtttattttgcataagccactgt

SEQ ID NO: 202884 - DNA, 23 bp, Artificial sequence
  SiRNA target sequence
tttattttgcataagccactgta

SEQ ID NO: 202885 - DNA, 23 bp, Artificial sequence
  SiRNA target sequence
ttattttgcataagccactgtat

SEQ ID NO: 202886 - DNA, 23 bp, Artificial sequence
  SiRNA target sequence
tattttgcataagccactgtatt

SEQ ID NO: 202887 - DNA, 23 bp, Artificial sequence
  SiRNA target sequence
attttgcataagccactgtatta

SEQ ID NO: 202888 - DNA, 23 bp, Artificial sequence
  SiRNA target sequence
ttttgcataagccactgtattaa

SEQ ID NO: 202889 - DNA, 23 bp, Artificial sequence
  SiRNA target sequence
tttgcataagccactgtattaaa

SEQ ID NO: 202890 - DNA, 23 bp, Artificial sequence
  SiRNA target sequence
ttgcataagccactgtattaaaa

SEQ ID NO: 202891 - DNA, 23 bp, Artificial sequence
  SiRNA target sequence
tgcataagccactgtattaaaat

SEQ ID NO: 202892 - DNA, 23 bp, Artificial sequence
  SiRNA target sequence
gcataagccactgtattaaaatt

SEQ ID NO: 202893 - DNA, 23 bp, Artificial sequence
  SiRNA target sequence
cataagccactgtattaaaatta

SEQ ID NO: 202894 - DNA, 23 bp, Artificial sequence
  SiRNA target sequence
ataagccactgtattaaaattac

SEQ ID NO: 202895 - DNA, 23 bp, Artificial sequence
  SiRNA target sequence
taagccactgtattaaaattaca

SEQ ID NO: 202896 - DNA, 23 bp, Artificial sequence
  SiRNA target sequence
aagccactgtattaaaattacag

SEQ ID NO: 202897 - DNA, 23 bp, Artificial sequence
  SiRNA target sequence
agccactgtattaaaattacaga

SEQ ID NO: 202898 - DNA, 23 bp, Artificial sequence
  SiRNA target sequence
gccactgtattaaaattacagat

SEQ ID NO: 202899 - DNA, 23 bp, Artificial sequence
  SiRNA target sequence
ccactgtattaaaattacagatg

SEQ ID NO: 202900 - DNA, 23 bp, Artificial sequence
  SiRNA target sequence
cactgtattaaaattacagatgc

SEQ ID NO: 202901 - DNA, 23 bp, Artificial sequence
  SiRNA target sequence
actgtattaaaattacagatgca

SEQ ID NO: 202902 - DNA, 23 bp, Artificial sequence
  SiRNA target sequence
ctgtattaaaattacagatgcaa

SEQ ID NO: 202903 - DNA, 23 bp, Artificial sequence
  SiRNA target sequence
tgtattaaaattacagatgcaaa

SEQ ID NO: 202904 - DNA, 23 bp, Artificial sequence
  SiRNA target sequence
gtattaaaattacagatgcaaaa

SEQ ID NO: 202905 - DNA, 23 bp, Artificial sequence
  SiRNA target sequence
tattaaaattacagatgcaaaag

SEQ ID NO: 202906 - DNA, 23 bp, Artificial sequence
  SiRNA target sequence
attaaaattacagatgcaaaaga

SEQ ID NO: 202907 - DNA, 23 bp, Artificial sequence
  SiRNA target sequence
ttaaaattacagatgcaaaagat

SEQ ID NO: 202908 - DNA, 23 bp, Artificial sequence
  SiRNA target sequence
taaaattacagatgcaaaagata

SEQ ID NO: 202909 - DNA, 23 bp, Artificial sequence
  SiRNA target sequence
aaaattacagatgcaaaagatat

SEQ ID NO: 202910 - DNA, 23 bp, Artificial sequence
  SiRNA target sequence
aaattacagatgcaaaagatata

SEQ ID NO: 202911 - DNA, 23 bp, Artificial sequence
  SiRNA target sequence
aattacagatgcaaaagatatag

SEQ ID NO: 202912 - DNA, 23 bp, Artificial sequence
  SiRNA target sequence
attacagatgcaaaagatatagg

SEQ ID NO: 202913 - DNA, 23 bp, Artificial sequence
  SiRNA target sequence
ttacagatgcaaaagatatagga

SEQ ID NO: 202914 - DNA, 23 bp, Artificial sequence
  SiRNA target sequence
tacagatgcaaaagatataggaa

SEQ ID NO: 202915 - DNA, 23 bp, Artificial sequence
  SiRNA target sequence
acagatgcaaaagatataggaag

SEQ ID NO: 202916 - DNA, 23 bp, Artificial sequence
  SiRNA target sequence
cagatgcaaaagatataggaaga

SEQ ID NO: 202917 - DNA, 23 bp, Artificial sequence
  SiRNA target sequence
agatgcaaaagatataggaagaa

SEQ ID NO: 202918 - DNA, 23 bp, Artificial sequence
  SiRNA target sequence
gatgcaaaagatataggaagaac

SEQ ID NO: 202919 - DNA, 23 bp, Artificial sequence
  SiRNA target sequence
atgcaaaagatataggaagaaca

SEQ ID NO: 202920 - DNA, 23 bp, Artificial sequence
  SiRNA target sequence
tgcaaaagatataggaagaacat

SEQ ID NO: 202921 - DNA, 23 bp, Artificial sequence
  SiRNA target sequence
gcaaaagatataggaagaacata

SEQ ID NO: 202922 - DNA, 23 bp, Artificial sequence
  SiRNA target sequence
caaaagatataggaagaacataa

SEQ ID NO: 202923 - DNA, 23 bp, Artificial sequence
  SiRNA target sequence
aaaagatataggaagaacataaa

SEQ ID NO: 202924 - DNA, 23 bp, Artificial sequence
  SiRNA target sequence
aaagatataggaagaacataaaa

SEQ ID NO: 202925 - DNA, 23 bp, Artificial sequence
  SiRNA target sequence
aagatataggaagaacataaaaa

SEQ ID NO: 202926 - DNA, 23 bp, Artificial sequence
  SiRNA target sequence
agatataggaagaacataaaaaa

SEQ ID NO: 202927 - DNA, 23 bp, Artificial sequence
  SiRNA target sequence
gatataggaagaacataaaaaat

SEQ ID NO: 202928 - DNA, 23 bp, Artificial sequence
  SiRNA target sequence
atataggaagaacataaaaaatt

SEQ ID NO: 202929 - DNA, 23 bp, Artificial sequence
  SiRNA target sequence
tataggaagaacataaaaaattt

SEQ ID NO: 202930 - DNA, 23 bp, Artificial sequence
  SiRNA target sequence
ataggaagaacataaaaaatttt

SEQ ID NO: 202931 - DNA, 23 bp, Artificial sequence
  SiRNA target sequence
taggaagaacataaaaaattttc

SEQ ID NO: 202932 - DNA, 23 bp, Artificial sequence
  SiRNA target sequence
aggaagaacataaaaaattttca

SEQ ID NO: 202933 - DNA, 23 bp, Artificial sequence
  SiRNA target sequence
ggaagaacataaaaaattttcat

SEQ ID NO: 202934 - DNA, 23 bp, Artificial sequence
  SiRNA target sequence
gaagaacataaaaaattttcata

SEQ ID NO: 202935 - DNA, 23 bp, Artificial sequence
  SiRNA target sequence
aagaacataaaaaattttcataa

SEQ ID NO: 202936 - DNA, 23 bp, Artificial sequence
  SiRNA target sequence
agaacataaaaaattttcataaa

SEQ ID NO: 202937 - DNA, 23 bp, Artificial sequence
  SiRNA target sequence
gaacataaaaaattttcataaac

SEQ ID NO: 202938 - DNA, 23 bp, Artificial sequence
  SiRNA target sequence
aacataaaaaattttcataaaca

SEQ ID NO: 202939 - DNA, 23 bp, Artificial sequence
  SiRNA target sequence
acataaaaaattttcataaacat

SEQ ID NO: 202940 - DNA, 23 bp, Artificial sequence
  SiRNA target sequence
cataaaaaattttcataaacata

SEQ ID NO: 202941 - DNA, 23 bp, Artificial sequence
  SiRNA target sequence
ataaaaaattttcataaacataa

SEQ ID NO: 202942 - DNA, 23 bp, Artificial sequence
  SiRNA target sequence
taaaaaattttcataaacataat

SEQ ID NO: 202943 - DNA, 23 bp, Artificial sequence
  SiRNA target sequence
aaaaaattttcataaacataatt

SEQ ID NO: 202944 - DNA, 23 bp, Artificial sequence
  SiRNA target sequence
aaaaattttcataaacataattg

SEQ ID NO: 202945 - DNA, 23 bp, Artificial sequence
  SiRNA target sequence
aaaattttcataaacataattga

SEQ ID NO: 202946 - DNA, 23 bp, Artificial sequence
  SiRNA target sequence
aaattttcataaacataattgaa

SEQ ID NO: 202947 - DNA, 23 bp, Artificial sequence
  SiRNA target sequence
aattttcataaacataattgaat

SEQ ID NO: 202948 - DNA, 23 bp, Artificial sequence
  SiRNA target sequence
attttcataaacataattgaatt

SEQ ID NO: 202949 - DNA, 23 bp, Artificial sequence
  SiRNA target sequence
ttttcataaacataattgaattc

SEQ ID NO: 202950 - DNA, 23 bp, Artificial sequence
  SiRNA target sequence
tttcataaacataattgaattct

SEQ ID NO: 202951 - DNA, 23 bp, Artificial sequence
  SiRNA target sequence
ttcataaacataattgaattctg

SEQ ID NO: 202952 - DNA, 23 bp, Artificial sequence
  SiRNA target sequence
tcataaacataattgaattctga

SEQ ID NO: 202953 - DNA, 23 bp, Artificial sequence
  SiRNA target sequence
cataaacataattgaattctgat

SEQ ID NO: 202954 - DNA, 23 bp, Artificial sequence
  SiRNA target sequence
ataaacataattgaattctgatc

SEQ ID NO: 202955 - DNA, 23 bp, Artificial sequence
  SiRNA target sequence
taaacataattgaattctgatct

SEQ ID NO: 202956 - DNA, 23 bp, Artificial sequence
  SiRNA target sequence
aaacataattgaattctgatctt

SEQ ID NO: 202957 - DNA, 23 bp, Artificial sequence
  SiRNA target sequence
aacataattgaattctgatcttg

SEQ ID NO: 202958 - DNA, 23 bp, Artificial sequence
  SiRNA target sequence
acataattgaattctgatcttgc

SEQ ID NO: 202959 - DNA, 23 bp, Artificial sequence
  SiRNA target sequence
cataattgaattctgatcttgcc

SEQ ID NO: 202960 - DNA, 23 bp, Artificial sequence
  SiRNA target sequence
ataattgaattctgatcttgcct

SEQ ID NO: 202961 - DNA, 23 bp, Artificial sequence
  SiRNA target sequence
taattgaattctgatcttgcctt

SEQ ID NO: 202962 - DNA, 23 bp, Artificial sequence
  SiRNA target sequence
aattgaattctgatcttgcctta

SEQ ID NO: 202963 - DNA, 23 bp, Artificial sequence
  SiRNA target sequence
attgaattctgatcttgccttac

SEQ ID NO: 202964 - DNA, 23 bp, Artificial sequence
  SiRNA target sequence
ttgaattctgatcttgccttacc

SEQ ID NO: 202965 - DNA, 23 bp, Artificial sequence
  SiRNA target sequence
tgaattctgatcttgccttacca

SEQ ID NO: 202966 - DNA, 23 bp, Artificial sequence
  SiRNA target sequence
gaattctgatcttgccttaccat

SEQ ID NO: 202967 - DNA, 23 bp, Artificial sequence
  SiRNA target sequence
aattctgatcttgccttaccatc

SEQ ID NO: 202968 - DNA, 23 bp, Artificial sequence
  SiRNA target sequence
attctgatcttgccttaccatca

SEQ ID NO: 202969 - DNA, 23 bp, Artificial sequence
  SiRNA target sequence
ttctgatcttgccttaccatcac

SEQ ID NO: 202970 - DNA, 23 bp, Artificial sequence
  SiRNA target sequence
tctgatcttgccttaccatcaca

SEQ ID NO: 202971 - DNA, 23 bp, Artificial sequence
  SiRNA target sequence
ctgatcttgccttaccatcacaa

SEQ ID NO: 202972 - DNA, 23 bp, Artificial sequence
  SiRNA target sequence
tgatcttgccttaccatcacaaa

SEQ ID NO: 202973 - DNA, 23 bp, Artificial sequence
  SiRNA target sequence
gatcttgccttaccatcacaaat

SEQ ID NO: 202974 - DNA, 23 bp, Artificial sequence
  SiRNA target sequence
atcttgccttaccatcacaaata

SEQ ID NO: 202975 - DNA, 23 bp, Artificial sequence
  SiRNA target sequence
tcttgccttaccatcacaaataa

SEQ ID NO: 202976 - DNA, 23 bp, Artificial sequence
  SiRNA target sequence
cttgccttaccatcacaaataaa

SEQ ID NO: 202977 - DNA, 23 bp, Artificial sequence
  SiRNA target sequence
ttgccttaccatcacaaataaat

SEQ ID NO: 202978 - DNA, 23 bp, Artificial sequence
  SiRNA target sequence
tgccttaccatcacaaataaatc

SEQ ID NO: 202979 - DNA, 23 bp, Artificial sequence
  SiRNA target sequence
gccttaccatcacaaataaatct

SEQ ID NO: 202980 - DNA, 23 bp, Artificial sequence
  SiRNA target sequence
ccttaccatcacaaataaatctt

SEQ ID NO: 202981 - DNA, 23 bp, Artificial sequence
  SiRNA target sequence
cttaccatcacaaataaatcttt

SEQ ID NO: 202982 - DNA, 23 bp, Artificial sequence
  SiRNA target sequence
ttaccatcacaaataaatctttt

SEQ ID NO: 202983 - DNA, 23 bp, Artificial sequence
  SiRNA target sequence
taccatcacaaataaatctttta

SEQ ID NO: 202984 - DNA, 23 bp, Artificial sequence
  SiRNA target sequence
accatcacaaataaatcttttaa

SEQ ID NO: 202985 - DNA, 23 bp, Artificial sequence
  SiRNA target sequence
ccatcacaaataaatcttttaaa

SEQ ID NO: 202986 - DNA, 23 bp, Artificial sequence
  SiRNA target sequence
catcacaaataaatcttttaaaa

SEQ ID NO: 202987 - DNA, 23 bp, Artificial sequence
  SiRNA target sequence
atcacaaataaatcttttaaaat

SEQ ID NO: 202988 - DNA, 23 bp, Artificial sequence
  SiRNA target sequence
tcacaaataaatcttttaaaatt

SEQ ID NO: 202989 - DNA, 23 bp, Artificial sequence
  SiRNA target sequence
cacaaataaatcttttaaaattc

SEQ ID NO: 202990 - DNA, 23 bp, Artificial sequence
  SiRNA target sequence
acaaataaatcttttaaaattct

SEQ ID NO: 202991 - DNA, 23 bp, Artificial sequence
  SiRNA target sequence
caaataaatcttttaaaattctt

SEQ ID NO: 202992 - DNA, 23 bp, Artificial sequence
  SiRNA target sequence
aaataaatcttttaaaattctta

SEQ ID NO: 202993 - DNA, 23 bp, Artificial sequence
  SiRNA target sequence
aataaatcttttaaaattcttaa

SEQ ID NO: 202994 - DNA, 23 bp, Artificial sequence
  SiRNA target sequence
ataaatcttttaaaattcttaaa

SEQ ID NO: 202995 - DNA, 23 bp, Artificial sequence
  SiRNA target sequence
taaatcttttaaaattcttaaaa

SEQ ID NO: 202996 - DNA, 23 bp, Artificial sequence
  SiRNA target sequence
aaatcttttaaaattcttaaaaa

SEQ ID NO: 202997 - DNA, 23 bp, Artificial sequence
  SiRNA target sequence
aatcttttaaaattcttaaaaat

SEQ ID NO: 202998 - DNA, 23 bp, Artificial sequence
  SiRNA target sequence
atcttttaaaattcttaaaaatg

SEQ ID NO: 202999 - DNA, 23 bp, Artificial sequence
  SiRNA target sequence
tcttttaaaattcttaaaaatga

SEQ ID NO: 203000 - DNA, 23 bp, Artificial sequence
  SiRNA target sequence
cttttaaaattcttaaaaatgaa

SEQ ID NO: 203001 - DNA, 23 bp, Artificial sequence
  SiRNA target sequence
ttttaaaattcttaaaaatgaat

SEQ ID NO: 203002 - DNA, 23 bp, Artificial sequence
  SiRNA target sequence
tttaaaattcttaaaaatgaata

SEQ ID NO: 203003 - DNA, 23 bp, Artificial sequence
  SiRNA target sequence
ttaaaattcttaaaaatgaatac

SEQ ID NO: 203004 - DNA, 23 bp, Artificial sequence
  SiRNA target sequence
taaaattcttaaaaatgaataca

SEQ ID NO: 203005 - DNA, 23 bp, Artificial sequence
  SiRNA target sequence
aaaattcttaaaaatgaatacac

SEQ ID NO: 203006 - DNA, 23 bp, Artificial sequence
  SiRNA target sequence
aaattcttaaaaatgaatacaca

SEQ ID NO: 203007 - DNA, 23 bp, Artificial sequence
  SiRNA target sequence
aattcttaaaaatgaatacacaa

SEQ ID NO: 203008 - DNA, 23 bp, Artificial sequence
  SiRNA target sequence
attcttaaaaatgaatacacaaa

SEQ ID NO: 203009 - DNA, 23 bp, Artificial sequence
  SiRNA target sequence
ttcttaaaaatgaatacacaaag

SEQ ID NO: 203010 - DNA, 23 bp, Artificial sequence
  SiRNA target sequence
tcttaaaaatgaatacacaaagt

SEQ ID NO: 203011 - DNA, 23 bp, Artificial sequence
  SiRNA target sequence
cttaaaaatgaatacacaaagtt

SEQ ID NO: 203012 - DNA, 23 bp, Artificial sequence
  SiRNA target sequence
ttaaaaatgaatacacaaagtta

SEQ ID NO: 203013 - DNA, 23 bp, Artificial sequence
  SiRNA target sequence
taaaaatgaatacacaaagttaa

SEQ ID NO: 203014 - DNA, 23 bp, Artificial sequence
  SiRNA target sequence
aaaaatgaatacacaaagttaat

SEQ ID NO: 203015 - DNA, 23 bp, Artificial sequence
  SiRNA target sequence
aaaatgaatacacaaagttaatt

SEQ ID NO: 203016 - DNA, 23 bp, Artificial sequence
  SiRNA target sequence
aaatgaatacacaaagttaatta

SEQ ID NO: 203017 - DNA, 23 bp, Artificial sequence
  SiRNA target sequence
aatgaatacacaaagttaattaa

SEQ ID NO: 203018 - DNA, 23 bp, Artificial sequence
  SiRNA target sequence
atgaatacacaaagttaattaat

SEQ ID NO: 203019 - DNA, 23 bp, Artificial sequence
  SiRNA target sequence
tgaatacacaaagttaattaatc

SEQ ID NO: 203020 - DNA, 23 bp, Artificial sequence
  SiRNA target sequence
gaatacacaaagttaattaatcc

SEQ ID NO: 203021 - DNA, 23 bp, Artificial sequence
  SiRNA target sequence
aatacacaaagttaattaatcca

SEQ ID NO: 203022 - DNA, 23 bp, Artificial sequence
  SiRNA target sequence
atacacaaagttaattaatccaa

SEQ ID NO: 203023 - DNA, 23 bp, Artificial sequence
  SiRNA target sequence
tacacaaagttaattaatccaaa

SEQ ID NO: 203024 - DNA, 23 bp, Artificial sequence
  SiRNA target sequence
acacaaagttaattaatccaaac

SEQ ID NO: 203025 - DNA, 23 bp, Artificial sequence
  SiRNA target sequence
cacaaagttaattaatccaaaca

SEQ ID NO: 203026 - DNA, 23 bp, Artificial sequence
  SiRNA target sequence
acaaagttaattaatccaaacat

SEQ ID NO: 203027 - DNA, 23 bp, Artificial sequence
  SiRNA target sequence
caaagttaattaatccaaacata

SEQ ID NO: 203028 - DNA, 23 bp, Artificial sequence
  SiRNA target sequence
aaagttaattaatccaaacataa

SEQ ID NO: 203029 - DNA, 23 bp, Artificial sequence
  SiRNA target sequence
aagttaattaatccaaacataat

SEQ ID NO: 203030 - DNA, 23 bp, Artificial sequence
  SiRNA target sequence
agttaattaatccaaacataata

SEQ ID NO: 203031 - DNA, 23 bp, Artificial sequence
  SiRNA target sequence
gttaattaatccaaacataatac

SEQ ID NO: 203032 - DNA, 23 bp, Artificial sequence
  SiRNA target sequence
ttaattaatccaaacataatacc

SEQ ID NO: 203033 - DNA, 23 bp, Artificial sequence
  SiRNA target sequence
taattaatccaaacataatacca

SEQ ID NO: 203034 - DNA, 23 bp, Artificial sequence
  SiRNA target sequence
aattaatccaaacataataccaa

SEQ ID NO: 203035 - DNA, 23 bp, Artificial sequence
  SiRNA target sequence
attaatccaaacataataccaag

SEQ ID NO: 203036 - DNA, 23 bp, Artificial sequence
  SiRNA target sequence
ttaatccaaacataataccaagt

SEQ ID NO: 203037 - DNA, 23 bp, Artificial sequence
  SiRNA target sequence
taatccaaacataataccaagta

SEQ ID NO: 203038 - DNA, 23 bp, Artificial sequence
  SiRNA target sequence
aatccaaacataataccaagtat

SEQ ID NO: 203039 - DNA, 23 bp, Artificial sequence
  SiRNA target sequence
atccaaacataataccaagtata

SEQ ID NO: 203040 - DNA, 23 bp, Artificial sequence
  SiRNA target sequence
tccaaacataataccaagtataa

SEQ ID NO: 203041 - DNA, 23 bp, Artificial sequence
  SiRNA target sequence
ccaaacataataccaagtataaa

SEQ ID NO: 203042 - DNA, 23 bp, Artificial sequence
  SiRNA target sequence
caaacataataccaagtataaaa

SEQ ID NO: 203043 - DNA, 23 bp, Artificial sequence
  SiRNA target sequence
aaacataataccaagtataaaaa

SEQ ID NO: 203044 - DNA, 23 bp, Artificial sequence
  SiRNA target sequence
aacataataccaagtataaaaaa

SEQ ID NO: 203045 - DNA, 23 bp, Artificial sequence
  SiRNA target sequence
acataataccaagtataaaaaat

SEQ ID NO: 203046 - DNA, 23 bp, Artificial sequence
  SiRNA target sequence
cataataccaagtataaaaaatt

SEQ ID NO: 203047 - DNA, 23 bp, Artificial sequence
  SiRNA target sequence
ataataccaagtataaaaaattt

SEQ ID NO: 203048 - DNA, 23 bp, Artificial sequence
  SiRNA target sequence
taataccaagtataaaaaattta

SEQ ID NO: 203049 - DNA, 23 bp, Artificial sequence
  SiRNA target sequence
aataccaagtataaaaaatttag

SEQ ID NO: 203050 - DNA, 23 bp, Artificial sequence
  SiRNA target sequence
ataccaagtataaaaaatttagg

SEQ ID NO: 203051 - DNA, 23 bp, Artificial sequence
  SiRNA target sequence
taccaagtataaaaaatttaggc

SEQ ID NO: 203052 - DNA, 23 bp, Artificial sequence
  SiRNA target sequence
accaagtataaaaaatttaggca

SEQ ID NO: 203053 - DNA, 23 bp, Artificial sequence
  SiRNA target sequence
ccaagtataaaaaatttaggcat

SEQ ID NO: 203054 - DNA, 23 bp, Artificial sequence
  SiRNA target sequence
caagtataaaaaatttaggcatt

SEQ ID NO: 203055 - DNA, 23 bp, Artificial sequence
  SiRNA target sequence
aagtataaaaaatttaggcattt

SEQ ID NO: 203056 - DNA, 23 bp, Artificial sequence
  SiRNA target sequence
agtataaaaaatttaggcatttc

SEQ ID NO: 203057 - DNA, 23 bp, Artificial sequence
  SiRNA target sequence
gtataaaaaatttaggcatttca

SEQ ID NO: 203058 - DNA, 23 bp, Artificial sequence
  SiRNA target sequence
tataaaaaatttaggcatttcaa

SEQ ID NO: 203059 - DNA, 23 bp, Artificial sequence
  SiRNA target sequence
ataaaaaatttaggcatttcaac

SEQ ID NO: 203060 - DNA, 23 bp, Artificial sequence
  SiRNA target sequence
taaaaaatttaggcatttcaacc

SEQ ID NO: 203061 - DNA, 23 bp, Artificial sequence
  SiRNA target sequence
aaaaaatttaggcatttcaacct

SEQ ID NO: 203062 - DNA, 23 bp, Artificial sequence
  SiRNA target sequence
aaaaatttaggcatttcaacctt

SEQ ID NO: 203063 - DNA, 23 bp, Artificial sequence
  SiRNA target sequence
aaaatttaggcatttcaacctta

SEQ ID NO: 203064 - DNA, 23 bp, Artificial sequence
  SiRNA target sequence
aaatttaggcatttcaaccttag

SEQ ID NO: 203065 - DNA, 23 bp, Artificial sequence
  SiRNA target sequence
aatttaggcatttcaaccttagc

SEQ ID NO: 203066 - DNA, 23 bp, Artificial sequence
  SiRNA target sequence
atttaggcatttcaaccttagca

SEQ ID NO: 203067 - DNA, 23 bp, Artificial sequence
  SiRNA target sequence
tttaggcatttcaaccttagcaa

SEQ ID NO: 203068 - DNA, 23 bp, Artificial sequence
  SiRNA target sequence
ttaggcatttcaaccttagcaac

SEQ ID NO: 203069 - DNA, 23 bp, Artificial sequence
  SiRNA target sequence
taggcatttcaaccttagcaact

SEQ ID NO: 203070 - DNA, 23 bp, Artificial sequence
  SiRNA target sequence
aggcatttcaaccttagcaactt

SEQ ID NO: 203071 - DNA, 23 bp, Artificial sequence
  SiRNA target sequence
ggcatttcaaccttagcaacttt

SEQ ID NO: 203072 - DNA, 23 bp, Artificial sequence
  SiRNA target sequence
gcatttcaaccttagcaacttta

SEQ ID NO: 203073 - DNA, 23 bp, Artificial sequence
  SiRNA target sequence
catttcaaccttagcaactttaa

SEQ ID NO: 203074 - DNA, 23 bp, Artificial sequence
  SiRNA target sequence
atttcaaccttagcaactttaaa

SEQ ID NO: 203075 - DNA, 23 bp, Artificial sequence
  SiRNA target sequence
tttcaaccttagcaactttaaaa

SEQ ID NO: 203076 - DNA, 23 bp, Artificial sequence
  SiRNA target sequence
ttcaaccttagcaactttaaaat

SEQ ID NO: 203077 - DNA, 23 bp, Artificial sequence
  SiRNA target sequence
tcaaccttagcaactttaaaata

SEQ ID NO: 203078 - DNA, 23 bp, Artificial sequence
  SiRNA target sequence
caaccttagcaactttaaaataa

SEQ ID NO: 203079 - DNA, 23 bp, Artificial sequence
  SiRNA target sequence
aaccttagcaactttaaaataac

SEQ ID NO: 203080 - DNA, 23 bp, Artificial sequence
  SiRNA target sequence
accttagcaactttaaaataact

SEQ ID NO: 203081 - DNA, 23 bp, Artificial sequence
  SiRNA target sequence
ccttagcaactttaaaataactc

SEQ ID NO: 203082 - DNA, 23 bp, Artificial sequence
  SiRNA target sequence
cttagcaactttaaaataactca

SEQ ID NO: 203083 - DNA, 23 bp, Artificial sequence
  SiRNA target sequence
ttagcaactttaaaataactcag

SEQ ID NO: 203084 - DNA, 23 bp, Artificial sequence
  SiRNA target sequence
tagcaactttaaaataactcagt

SEQ ID NO: 203085 - DNA, 23 bp, Artificial sequence
  SiRNA target sequence
agcaactttaaaataactcagta

SEQ ID NO: 203086 - DNA, 23 bp, Artificial sequence
  SiRNA target sequence
gcaactttaaaataactcagtaa

SEQ ID NO: 203087 - DNA, 23 bp, Artificial sequence
  SiRNA target sequence
caactttaaaataactcagtaat

SEQ ID NO: 203088 - DNA, 23 bp, Artificial sequence
  SiRNA target sequence
aactttaaaataactcagtaatc

SEQ ID NO: 203089 - DNA, 23 bp, Artificial sequence
  SiRNA target sequence
actttaaaataactcagtaatcc

SEQ ID NO: 203090 - DNA, 23 bp, Artificial sequence
  SiRNA target sequence
ctttaaaataactcagtaatcct

SEQ ID NO: 203091 - DNA, 23 bp, Artificial sequence
  SiRNA target sequence
tttaaaataactcagtaatcctg

SEQ ID NO: 203092 - DNA, 23 bp, Artificial sequence
  SiRNA target sequence
ttaaaataactcagtaatcctgt

SEQ ID NO: 203093 - DNA, 23 bp, Artificial sequence
  SiRNA target sequence
taaaataactcagtaatcctgtt

SEQ ID NO: 203094 - DNA, 23 bp, Artificial sequence
  SiRNA target sequence
aaaataactcagtaatcctgttc

SEQ ID NO: 203095 - DNA, 23 bp, Artificial sequence
  SiRNA target sequence
aaataactcagtaatcctgttct

SEQ ID NO: 203096 - DNA, 23 bp, Artificial sequence
  SiRNA target sequence
aataactcagtaatcctgttctt

SEQ ID NO: 203097 - DNA, 23 bp, Artificial sequence
  SiRNA target sequence
ataactcagtaatcctgttcttg

SEQ ID NO: 203098 - DNA, 23 bp, Artificial sequence
  SiRNA target sequence
taactcagtaatcctgttcttga

SEQ ID NO: 203099 - DNA, 23 bp, Artificial sequence
  SiRNA target sequence
aactcagtaatcctgttcttgaa

SEQ ID NO: 203100 - DNA, 23 bp, Artificial sequence
  SiRNA target sequence
actcagtaatcctgttcttgaat

SEQ ID NO: 203101 - DNA, 23 bp, Artificial sequence
  SiRNA target sequence
ctcagtaatcctgttcttgaatt

SEQ ID NO: 203102 - DNA, 23 bp, Artificial sequence
  SiRNA target sequence
tcagtaatcctgttcttgaattt

SEQ ID NO: 203103 - DNA, 23 bp, Artificial sequence
  SiRNA target sequence
cagtaatcctgttcttgaatttg

SEQ ID NO: 203104 - DNA, 23 bp, Artificial sequence
  SiRNA target sequence
agtaatcctgttcttgaatttgc

SEQ ID NO: 203105 - DNA, 23 bp, Artificial sequence
  SiRNA target sequence
gtaatcctgttcttgaatttgct

SEQ ID NO: 203106 - DNA, 23 bp, Artificial sequence
  SiRNA target sequence
taatcctgttcttgaatttgcta

SEQ ID NO: 203107 - DNA, 23 bp, Artificial sequence
  SiRNA target sequence
aatcctgttcttgaatttgctaa

SEQ ID NO: 203108 - DNA, 23 bp, Artificial sequence
  SiRNA target sequence
atcctgttcttgaatttgctaat

SEQ ID NO: 203109 - DNA, 23 bp, Artificial sequence
  SiRNA target sequence
tcctgttcttgaatttgctaatt

SEQ ID NO: 203110 - DNA, 23 bp, Artificial sequence
  SiRNA target sequence
cctgttcttgaatttgctaattg

SEQ ID NO: 203111 - DNA, 23 bp, Artificial sequence
  SiRNA target sequence
ctgttcttgaatttgctaattga

SEQ ID NO: 203112 - DNA, 23 bp, Artificial sequence
  SiRNA target sequence
tgttcttgaatttgctaattgat

SEQ ID NO: 203113 - DNA, 23 bp, Artificial sequence
  SiRNA target sequence
gttcttgaatttgctaattgatc

SEQ ID NO: 203114 - DNA, 23 bp, Artificial sequence
  SiRNA target sequence
ttcttgaatttgctaattgatca

SEQ ID NO: 203115 - DNA, 23 bp, Artificial sequence
  SiRNA target sequence
tcttgaatttgctaattgatcaa

SEQ ID NO: 203116 - DNA, 23 bp, Artificial sequence
  SiRNA target sequence
cttgaatttgctaattgatcaat

SEQ ID NO: 203117 - DNA, 23 bp, Artificial sequence
  SiRNA target sequence
ttgaatttgctaattgatcaatc

SEQ ID NO: 203118 - DNA, 23 bp, Artificial sequence
  SiRNA target sequence
tgaatttgctaattgatcaatct

SEQ ID NO: 203119 - DNA, 23 bp, Artificial sequence
  SiRNA target sequence
gaatttgctaattgatcaatctc

SEQ ID NO: 203120 - DNA, 23 bp, Artificial sequence
  SiRNA target sequence
aatttgctaattgatcaatctca

SEQ ID NO: 203121 - DNA, 23 bp, Artificial sequence
  SiRNA target sequence
atttgctaattgatcaatctcat

SEQ ID NO: 203122 - DNA, 23 bp, Artificial sequence
  SiRNA target sequence
tttgctaattgatcaatctcatc

SEQ ID NO: 203123 - DNA, 23 bp, Artificial sequence
  SiRNA target sequence
ttgctaattgatcaatctcatct

SEQ ID NO: 203124 - DNA, 23 bp, Artificial sequence
  SiRNA target sequence
tgctaattgatcaatctcatctt

SEQ ID NO: 203125 - DNA, 23 bp, Artificial sequence
  SiRNA target sequence
gctaattgatcaatctcatcttc

SEQ ID NO: 203126 - DNA, 23 bp, Artificial sequence
  SiRNA target sequence
ctaattgatcaatctcatcttcc

SEQ ID NO: 203127 - DNA, 23 bp, Artificial sequence
  SiRNA target sequence
taattgatcaatctcatcttccg

SEQ ID NO: 203128 - DNA, 23 bp, Artificial sequence
  SiRNA target sequence
aattgatcaatctcatcttccgt

SEQ ID NO: 203129 - DNA, 23 bp, Artificial sequence
  SiRNA target sequence
attgatcaatctcatcttccgta

SEQ ID NO: 203130 - DNA, 23 bp, Artificial sequence
  SiRNA target sequence
ttgatcaatctcatcttccgtag

SEQ ID NO: 203131 - DNA, 23 bp, Artificial sequence
  SiRNA target sequence
tgatcaatctcatcttccgtagg

SEQ ID NO: 203132 - DNA, 23 bp, Artificial sequence
  SiRNA target sequence
gatcaatctcatcttccgtaggt

SEQ ID NO: 203133 - DNA, 23 bp, Artificial sequence
  SiRNA target sequence
atcaatctcatcttccgtaggta

SEQ ID NO: 203134 - DNA, 23 bp, Artificial sequence
  SiRNA target sequence
tcaatctcatcttccgtaggtaa

SEQ ID NO: 203135 - DNA, 23 bp, Artificial sequence
  SiRNA target sequence
caatctcatcttccgtaggtaag

SEQ ID NO: 203136 - DNA, 23 bp, Artificial sequence
  SiRNA target sequence
aatctcatcttccgtaggtaagt

SEQ ID NO: 203137 - DNA, 23 bp, Artificial sequence
  SiRNA target sequence
atctcatcttccgtaggtaagtt

SEQ ID NO: 203138 - DNA, 23 bp, Artificial sequence
  SiRNA target sequence
tctcatcttccgtaggtaagttg

SEQ ID NO: 203139 - DNA, 23 bp, Artificial sequence
  SiRNA target sequence
ctcatcttccgtaggtaagttgt

SEQ ID NO: 203140 - DNA, 23 bp, Artificial sequence
  SiRNA target sequence
tcatcttccgtaggtaagttgtt

SEQ ID NO: 203141 - DNA, 23 bp, Artificial sequence
  SiRNA target sequence
catcttccgtaggtaagttgttt

SEQ ID NO: 203142 - DNA, 23 bp, Artificial sequence
  SiRNA target sequence
atcttccgtaggtaagttgtttt

SEQ ID NO: 203143 - DNA, 23 bp, Artificial sequence
  SiRNA target sequence
tcttccgtaggtaagttgttttc

SEQ ID NO: 203144 - DNA, 23 bp, Artificial sequence
  SiRNA target sequence
cttccgtaggtaagttgttttca

SEQ ID NO: 203145 - DNA, 23 bp, Artificial sequence
  SiRNA target sequence
ttccgtaggtaagttgttttcag

SEQ ID NO: 203146 - DNA, 23 bp, Artificial sequence
  SiRNA target sequence
tccgtaggtaagttgttttcagg

SEQ ID NO: 203147 - DNA, 23 bp, Artificial sequence
  SiRNA target sequence
ccgtaggtaagttgttttcaggt

SEQ ID NO: 203148 - DNA, 23 bp, Artificial sequence
  SiRNA target sequence
cgtaggtaagttgttttcaggtg

SEQ ID NO: 203149 - DNA, 23 bp, Artificial sequence
  SiRNA target sequence
gtaggtaagttgttttcaggtgt

SEQ ID NO: 203150 - DNA, 23 bp, Artificial sequence
  SiRNA target sequence
taggtaagttgttttcaggtgtt

SEQ ID NO: 203151 - DNA, 23 bp, Artificial sequence
  SiRNA target sequence
aggtaagttgttttcaggtgttt

SEQ ID NO: 203152 - DNA, 23 bp, Artificial sequence
  SiRNA target sequence
ggtaagttgttttcaggtgtttc

SEQ ID NO: 203153 - DNA, 23 bp, Artificial sequence
  SiRNA target sequence
gtaagttgttttcaggtgtttca

SEQ ID NO: 203154 - DNA, 23 bp, Artificial sequence
  SiRNA target sequence
taagttgttttcaggtgtttcat

SEQ ID NO: 203155 - DNA, 23 bp, Artificial sequence
  SiRNA target sequence
aagttgttttcaggtgtttcatt

SEQ ID NO: 203156 - DNA, 23 bp, Artificial sequence
  SiRNA target sequence
agttgttttcaggtgtttcattt

SEQ ID NO: 203157 - DNA, 23 bp, Artificial sequence
  SiRNA target sequence
gttgttttcaggtgtttcattta

SEQ ID NO: 203158 - DNA, 23 bp, Artificial sequence
  SiRNA target sequence
ttgttttcaggtgtttcatttat

SEQ ID NO: 203159 - DNA, 23 bp, Artificial sequence
  SiRNA target sequence
tgttttcaggtgtttcatttatt

SEQ ID NO: 203160 - DNA, 23 bp, Artificial sequence
  SiRNA target sequence
gttttcaggtgtttcatttatta

SEQ ID NO: 203161 - DNA, 23 bp, Artificial sequence
  SiRNA target sequence
ttttcaggtgtttcatttattac

SEQ ID NO: 203162 - DNA, 23 bp, Artificial sequence
  SiRNA target sequence
tttcaggtgtttcatttattaca

SEQ ID NO: 203163 - DNA, 23 bp, Artificial sequence
  SiRNA target sequence
ttcaggtgtttcatttattacac

SEQ ID NO: 203164 - DNA, 23 bp, Artificial sequence
  SiRNA target sequence
tcaggtgtttcatttattacact

SEQ ID NO: 203165 - DNA, 23 bp, Artificial sequence
  SiRNA target sequence
caggtgtttcatttattacactc

SEQ ID NO: 203166 - DNA, 23 bp, Artificial sequence
  SiRNA target sequence
aggtgtttcatttattacactca

SEQ ID NO: 203167 - DNA, 23 bp, Artificial sequence
  SiRNA target sequence
ggtgtttcatttattacactcat

SEQ ID NO: 203168 - DNA, 24 bp, Artificial sequence
  SiRNA target sequence
ttattctgcgttttcttttttgtc

SEQ ID NO: 203169 - DNA, 24 bp, Artificial sequence
  SiRNA target sequence
tattctgcgttttcttttttgtcg

SEQ ID NO: 203170 - DNA, 24 bp, Artificial sequence
  SiRNA target sequence
attctgcgttttcttttttgtcgt

SEQ ID NO: 203171 - DNA, 24 bp, Artificial sequence
  SiRNA target sequence
ttctgcgttttcttttttgtcgtc

SEQ ID NO: 203172 - DNA, 24 bp, Artificial sequence
  SiRNA target sequence
tctgcgttttcttttttgtcgtct

SEQ ID NO: 203173 - DNA, 24 bp, Artificial sequence
  SiRNA target sequence
ctgcgttttcttttttgtcgtctt

SEQ ID NO: 203174 - DNA, 24 bp, Artificial sequence
  SiRNA target sequence
tgcgttttcttttttgtcgtcttt

SEQ ID NO: 203175 - DNA, 24 bp, Artificial sequence
  SiRNA target sequence
gcgttttcttttttgtcgtctttt

SEQ ID NO: 203176 - DNA, 24 bp, Artificial sequence
  SiRNA target sequence
cgttttcttttttgtcgtctttta

SEQ ID NO: 203177 - DNA, 24 bp, Artificial sequence
  SiRNA target sequence
gttttcttttttgtcgtcttttat

SEQ ID NO: 203178 - DNA, 24 bp, Artificial sequence
  SiRNA target sequence
ttttcttttttgtcgtcttttatt

SEQ ID NO: 203179 - DNA, 24 bp, Artificial sequence
  SiRNA target sequence
tttcttttttgtcgtcttttatta

SEQ ID NO: 203180 - DNA, 24 bp, Artificial sequence
  SiRNA target sequence
ttcttttttgtcgtcttttattaa

SEQ ID NO: 203181 - DNA, 24 bp, Artificial sequence
  SiRNA target sequence
tcttttttgtcgtcttttattaaa

SEQ ID NO: 203182 - DNA, 24 bp, Artificial sequence
  SiRNA target sequence
cttttttgtcgtcttttattaaat

SEQ ID NO: 203183 - DNA, 24 bp, Artificial sequence
  SiRNA target sequence
ttttttgtcgtcttttattaaatc

SEQ ID NO: 203184 - DNA, 24 bp, Artificial sequence
  SiRNA target sequence
tttttgtcgtcttttattaaatct

SEQ ID NO: 203185 - DNA, 24 bp, Artificial sequence
  SiRNA target sequence
ttttgtcgtcttttattaaatcta

SEQ ID NO: 203186 - DNA, 24 bp, Artificial sequence
  SiRNA target sequence
tttgtcgtcttttattaaatctat

SEQ ID NO: 203187 - DNA, 24 bp, Artificial sequence
  SiRNA target sequence
ttgtcgtcttttattaaatctatg

SEQ ID NO: 203188 - DNA, 24 bp, Artificial sequence
  SiRNA target sequence
tgtcgtcttttattaaatctatgt

SEQ ID NO: 203189 - DNA, 24 bp, Artificial sequence
  SiRNA target sequence
gtcgtcttttattaaatctatgtc

SEQ ID NO: 203190 - DNA, 24 bp, Artificial sequence
  SiRNA target sequence
tcgtcttttattaaatctatgtct

SEQ ID NO: 203191 - DNA, 24 bp, Artificial sequence
  SiRNA target sequence
cgtcttttattaaatctatgtcta

SEQ ID NO: 203192 - DNA, 24 bp, Artificial sequence
  SiRNA target sequence
gtcttttattaaatctatgtctac

SEQ ID NO: 203193 - DNA, 24 bp, Artificial sequence
  SiRNA target sequence
tcttttattaaatctatgtctaca

SEQ ID NO: 203194 - DNA, 24 bp, Artificial sequence
  SiRNA target sequence
cttttattaaatctatgtctacac

SEQ ID NO: 203195 - DNA, 24 bp, Artificial sequence
  SiRNA target sequence
ttttattaaatctatgtctacact

SEQ ID NO: 203196 - DNA, 24 bp, Artificial sequence
  SiRNA target sequence
tttattaaatctatgtctacactt

SEQ ID NO: 203197 - DNA, 24 bp, Artificial sequence
  SiRNA target sequence
ttattaaatctatgtctacacttg

SEQ ID NO: 203198 - DNA, 24 bp, Artificial sequence
  SiRNA target sequence
tattaaatctatgtctacacttgt

SEQ ID NO: 203199 - DNA, 24 bp, Artificial sequence
  SiRNA target sequence
attaaatctatgtctacacttgta

SEQ ID NO: 203200 - DNA, 24 bp, Artificial sequence
  SiRNA target sequence
ttaaatctatgtctacacttgtat

SEQ ID NO: 203201 - DNA, 24 bp, Artificial sequence
  SiRNA target sequence
taaatctatgtctacacttgtatt

SEQ ID NO: 203202 - DNA, 24 bp, Artificial sequence
  SiRNA target sequence
aaatctatgtctacacttgtatta

SEQ ID NO: 203203 - DNA, 24 bp, Artificial sequence
  SiRNA target sequence
aatctatgtctacacttgtattat

SEQ ID NO: 203204 - DNA, 24 bp, Artificial sequence
  SiRNA target sequence
atctatgtctacacttgtattatt

SEQ ID NO: 203205 - DNA, 24 bp, Artificial sequence
  SiRNA target sequence
tctatgtctacacttgtattattt

SEQ ID NO: 203206 - DNA, 24 bp, Artificial sequence
  SiRNA target sequence
ctatgtctacacttgtattatttt

SEQ ID NO: 203207 - DNA, 24 bp, Artificial sequence
  SiRNA target sequence
tatgtctacacttgtattattttt

SEQ ID NO: 203208 - DNA, 24 bp, Artificial sequence
  SiRNA target sequence
atgtctacacttgtattattttta

SEQ ID NO: 203209 - DNA, 24 bp, Artificial sequence
  SiRNA target sequence
tgtctacacttgtattatttttaa

SEQ ID NO: 203210 - DNA, 24 bp, Artificial sequence
  SiRNA target sequence
gtctacacttgtattatttttaat

SEQ ID NO: 203211 - DNA, 24 bp, Artificial sequence
  SiRNA target sequence
tctacacttgtattatttttaatt

SEQ ID NO: 203212 - DNA, 24 bp, Artificial sequence
  SiRNA target sequence
ctacacttgtattatttttaattg

SEQ ID NO: 203213 - DNA, 24 bp, Artificial sequence
  SiRNA target sequence
tacacttgtattatttttaattga

SEQ ID NO: 203214 - DNA, 24 bp, Artificial sequence
  SiRNA target sequence
acacttgtattatttttaattgaa

SEQ ID NO: 203215 - DNA, 24 bp, Artificial sequence
  SiRNA target sequence
cacttgtattatttttaattgaaa

SEQ ID NO: 203216 - DNA, 24 bp, Artificial sequence
  SiRNA target sequence
acttgtattatttttaattgaaac

SEQ ID NO: 203217 - DNA, 24 bp, Artificial sequence
  SiRNA target sequence
cttgtattatttttaattgaaacg

SEQ ID NO: 203218 - DNA, 24 bp, Artificial sequence
  SiRNA target sequence
ttgtattatttttaattgaaacgt

SEQ ID NO: 203219 - DNA, 24 bp, Artificial sequence
  SiRNA target sequence
tgtattatttttaattgaaacgtt

SEQ ID NO: 203220 - DNA, 24 bp, Artificial sequence
  SiRNA target sequence
gtattatttttaattgaaacgtta

SEQ ID NO: 203221 - DNA, 24 bp, Artificial sequence
  SiRNA target sequence
tattatttttaattgaaacgttat

SEQ ID NO: 203222 - DNA, 24 bp, Artificial sequence
  SiRNA target sequence
attatttttaattgaaacgttata

SEQ ID NO: 203223 - DNA, 24 bp, Artificial sequence
  SiRNA target sequence
ttatttttaattgaaacgttatat

SEQ ID NO: 203224 - DNA, 24 bp, Artificial sequence
  SiRNA target sequence
tatttttaattgaaacgttatatg

SEQ ID NO: 203225 - DNA, 24 bp, Artificial sequence
  SiRNA target sequence
atttttaattgaaacgttatatgc

SEQ ID NO: 203226 - DNA, 24 bp, Artificial sequence
  SiRNA target sequence
tttttaattgaaacgttatatgca

SEQ ID NO: 203227 - DNA, 24 bp, Artificial sequence
  SiRNA target sequence
ttttaattgaaacgttatatgcac

SEQ ID NO: 203228 - DNA, 24 bp, Artificial sequence
  SiRNA target sequence
tttaattgaaacgttatatgcacc

SEQ ID NO: 203229 - DNA, 24 bp, Artificial sequence
  SiRNA target sequence
ttaattgaaacgttatatgcaccc

SEQ ID NO: 203230 - DNA, 24 bp, Artificial sequence
  SiRNA target sequence
taattgaaacgttatatgcacccg

SEQ ID NO: 203231 - DNA, 24 bp, Artificial sequence
  SiRNA target sequence
aattgaaacgttatatgcacccgc

SEQ ID NO: 203232 - DNA, 24 bp, Artificial sequence
  SiRNA target sequence
attgaaacgttatatgcacccgct

SEQ ID NO: 203233 - DNA, 24 bp, Artificial sequence
  SiRNA target sequence
ttgaaacgttatatgcacccgcta

SEQ ID NO: 203234 - DNA, 24 bp, Artificial sequence
  SiRNA target sequence
tgaaacgttatatgcacccgctaa

SEQ ID NO: 203235 - DNA, 24 bp, Artificial sequence
  SiRNA target sequence
gaaacgttatatgcacccgctaaa

SEQ ID NO: 203236 - DNA, 24 bp, Artificial sequence
  SiRNA target sequence
aaacgttatatgcacccgctaaat

SEQ ID NO: 203237 - DNA, 24 bp, Artificial sequence
  SiRNA target sequence
aacgttatatgcacccgctaaata

SEQ ID NO: 203238 - DNA, 24 bp, Artificial sequence
  SiRNA target sequence
acgttatatgcacccgctaaatag

SEQ ID NO: 203239 - DNA, 24 bp, Artificial sequence
  SiRNA target sequence
cgttatatgcacccgctaaataga

SEQ ID NO: 203240 - DNA, 24 bp, Artificial sequence
  SiRNA target sequence
gttatatgcacccgctaaatagat

SEQ ID NO: 203241 - DNA, 24 bp, Artificial sequence
  SiRNA target sequence
ttatatgcacccgctaaatagatt

SEQ ID NO: 203242 - DNA, 24 bp, Artificial sequence
  SiRNA target sequence
tatatgcacccgctaaatagatta

SEQ ID NO: 203243 - DNA, 24 bp, Artificial sequence
  SiRNA target sequence
atatgcacccgctaaatagattat

SEQ ID NO: 203244 - DNA, 24 bp, Artificial sequence
  SiRNA target sequence
tatgcacccgctaaatagattata

SEQ ID NO: 203245 - DNA, 24 bp, Artificial sequence
  SiRNA target sequence
atgcacccgctaaatagattatag

SEQ ID NO: 203246 - DNA, 24 bp, Artificial sequence
  SiRNA target sequence
tgcacccgctaaatagattatagc

SEQ ID NO: 203247 - DNA, 24 bp, Artificial sequence
  SiRNA target sequence
gcacccgctaaatagattatagct

SEQ ID NO: 203248 - DNA, 24 bp, Artificial sequence
  SiRNA target sequence
cacccgctaaatagattatagctc

SEQ ID NO: 203249 - DNA, 24 bp, Artificial sequence
  SiRNA target sequence
acccgctaaatagattatagctct

SEQ ID NO: 203250 - DNA, 24 bp, Artificial sequence
  SiRNA target sequence
cccgctaaatagattatagctcta

SEQ ID NO: 203251 - DNA, 24 bp, Artificial sequence
  SiRNA target sequence
ccgctaaatagattatagctctaa

SEQ ID NO: 203252 - DNA, 24 bp, Artificial sequence
  SiRNA target sequence
cgctaaatagattatagctctaat

SEQ ID NO: 203253 - DNA, 24 bp, Artificial sequence
  SiRNA target sequence
gctaaatagattatagctctaatc

SEQ ID NO: 203254 - DNA, 24 bp, Artificial sequence
  SiRNA target sequence
ctaaatagattatagctctaatcc

SEQ ID NO: 203255 - DNA, 24 bp, Artificial sequence
  SiRNA target sequence
taaatagattatagctctaatcca

SEQ ID NO: 203256 - DNA, 24 bp, Artificial sequence
  SiRNA target sequence
aaatagattatagctctaatccaa

SEQ ID NO: 203257 - DNA, 24 bp, Artificial sequence
  SiRNA target sequence
aatagattatagctctaatccaaa

SEQ ID NO: 203258 - DNA, 24 bp, Artificial sequence
  SiRNA target sequence
atagattatagctctaatccaaat

SEQ ID NO: 203259 - DNA, 24 bp, Artificial sequence
  SiRNA target sequence
tagattatagctctaatccaaata

SEQ ID NO: 203260 - DNA, 24 bp, Artificial sequence
  SiRNA target sequence
agattatagctctaatccaaatat

SEQ ID NO: 203261 - DNA, 24 bp, Artificial sequence
  SiRNA target sequence
gattatagctctaatccaaatata

SEQ ID NO: 203262 - DNA, 24 bp, Artificial sequence
  SiRNA target sequence
attatagctctaatccaaatataa

SEQ ID NO: 203263 - DNA, 24 bp, Artificial sequence
  SiRNA target sequence
ttatagctctaatccaaatataaa

SEQ ID NO: 203264 - DNA, 24 bp, Artificial sequence
  SiRNA target sequence
tatagctctaatccaaatataaat

SEQ ID NO: 203265 - DNA, 24 bp, Artificial sequence
  SiRNA target sequence
atagctctaatccaaatataaatc

SEQ ID NO: 203266 - DNA, 24 bp, Artificial sequence
  SiRNA target sequence
tagctctaatccaaatataaatca

SEQ ID NO: 203267 - DNA, 24 bp, Artificial sequence
  SiRNA target sequence
agctctaatccaaatataaatcaa

SEQ ID NO: 203268 - DNA, 24 bp, Artificial sequence
  SiRNA target sequence
gctctaatccaaatataaatcaat

SEQ ID NO: 203269 - DNA, 24 bp, Artificial sequence
  SiRNA target sequence
ctctaatccaaatataaatcaata

SEQ ID NO: 203270 - DNA, 24 bp, Artificial sequence
  SiRNA target sequence
tctaatccaaatataaatcaatat

SEQ ID NO: 203271 - DNA, 24 bp, Artificial sequence
  SiRNA target sequence
ctaatccaaatataaatcaatatt

SEQ ID NO: 203272 - DNA, 24 bp, Artificial sequence
  SiRNA target sequence
taatccaaatataaatcaatatta

SEQ ID NO: 203273 - DNA, 24 bp, Artificial sequence
  SiRNA target sequence
aatccaaatataaatcaatattat

SEQ ID NO: 203274 - DNA, 24 bp, Artificial sequence
  SiRNA target sequence
atccaaatataaatcaatattatt

SEQ ID NO: 203275 - DNA, 24 bp, Artificial sequence
  SiRNA target sequence
tccaaatataaatcaatattattg

SEQ ID NO: 203276 - DNA, 24 bp, Artificial sequence
  SiRNA target sequence
ccaaatataaatcaatattattgc

SEQ ID NO: 203277 - DNA, 24 bp, Artificial sequence
  SiRNA target sequence
caaatataaatcaatattattgca

SEQ ID NO: 203278 - DNA, 24 bp, Artificial sequence
  SiRNA target sequence
aaatataaatcaatattattgcaa

SEQ ID NO: 203279 - DNA, 24 bp, Artificial sequence
  SiRNA target sequence
aatataaatcaatattattgcaat

SEQ ID NO: 203280 - DNA, 24 bp, Artificial sequence
  SiRNA target sequence
atataaatcaatattattgcaatc

SEQ ID NO: 203281 - DNA, 24 bp, Artificial sequence
  SiRNA target sequence
tataaatcaatattattgcaatcg

SEQ ID NO: 203282 - DNA, 24 bp, Artificial sequence
  SiRNA target sequence
ataaatcaatattattgcaatcgt

SEQ ID NO: 203283 - DNA, 24 bp, Artificial sequence
  SiRNA target sequence
taaatcaatattattgcaatcgtt

SEQ ID NO: 203284 - DNA, 24 bp, Artificial sequence
  SiRNA target sequence
aaatcaatattattgcaatcgtta

SEQ ID NO: 203285 - DNA, 24 bp, Artificial sequence
  SiRNA target sequence
aatcaatattattgcaatcgttaa

SEQ ID NO: 203286 - DNA, 24 bp, Artificial sequence
  SiRNA target sequence
atcaatattattgcaatcgttaat

SEQ ID NO: 203287 - DNA, 24 bp, Artificial sequence
  SiRNA target sequence
tcaatattattgcaatcgttaatg

SEQ ID NO: 203288 - DNA, 24 bp, Artificial sequence
  SiRNA target sequence
caatattattgcaatcgttaatgt

SEQ ID NO: 203289 - DNA, 24 bp, Artificial sequence
  SiRNA target sequence
aatattattgcaatcgttaatgtg

SEQ ID NO: 203290 - DNA, 24 bp, Artificial sequence
  SiRNA target sequence
atattattgcaatcgttaatgtga

SEQ ID NO: 203291 - DNA, 24 bp, Artificial sequence
  SiRNA target sequence
tattattgcaatcgttaatgtgat

SEQ ID NO: 203292 - DNA, 24 bp, Artificial sequence
  SiRNA target sequence
attattgcaatcgttaatgtgatt

SEQ ID NO: 203293 - DNA, 24 bp, Artificial sequence
  SiRNA target sequence
ttattgcaatcgttaatgtgattg

SEQ ID NO: 203294 - DNA, 24 bp, Artificial sequence
  SiRNA target sequence
tattgcaatcgttaatgtgattgg

SEQ ID NO: 203295 - DNA, 24 bp, Artificial sequence
  SiRNA target sequence
attgcaatcgttaatgtgattgga

SEQ ID NO: 203296 - DNA, 24 bp, Artificial sequence
  SiRNA target sequence
ttgcaatcgttaatgtgattggac

SEQ ID NO: 203297 - DNA, 24 bp, Artificial sequence
  SiRNA target sequence
tgcaatcgttaatgtgattggact

SEQ ID NO: 203298 - DNA, 24 bp, Artificial sequence
  SiRNA target sequence
gcaatcgttaatgtgattggacta

SEQ ID NO: 203299 - DNA, 24 bp, Artificial sequence
  SiRNA target sequence
caatcgttaatgtgattggactac

SEQ ID NO: 203300 - DNA, 24 bp, Artificial sequence
  SiRNA target sequence
aatcgttaatgtgattggactacc

SEQ ID NO: 203301 - DNA, 24 bp, Artificial sequence
  SiRNA target sequence
atcgttaatgtgattggactaccc

SEQ ID NO: 203302 - DNA, 24 bp, Artificial sequence
  SiRNA target sequence
tcgttaatgtgattggactaccct

SEQ ID NO: 203303 - DNA, 24 bp, Artificial sequence
  SiRNA target sequence
cgttaatgtgattggactaccctt

SEQ ID NO: 203304 - DNA, 24 bp, Artificial sequence
  SiRNA target sequence
gttaatgtgattggactacccttc

SEQ ID NO: 203305 - DNA, 24 bp, Artificial sequence
  SiRNA target sequence
ttaatgtgattggactacccttcc

SEQ ID NO: 203306 - DNA, 24 bp, Artificial sequence
  SiRNA target sequence
taatgtgattggactacccttcct

SEQ ID NO: 203307 - DNA, 24 bp, Artificial sequence
  SiRNA target sequence
aatgtgattggactacccttcctt

SEQ ID NO: 203308 - DNA, 24 bp, Artificial sequence
  SiRNA target sequence
atgtgattggactacccttcctta

SEQ ID NO: 203309 - DNA, 24 bp, Artificial sequence
  SiRNA target sequence
tgtgattggactacccttccttac

SEQ ID NO: 203310 - DNA, 24 bp, Artificial sequence
  SiRNA target sequence
gtgattggactacccttccttaca

SEQ ID NO: 203311 - DNA, 24 bp, Artificial sequence
  SiRNA target sequence
tgattggactacccttccttacat

SEQ ID NO: 203312 - DNA, 24 bp, Artificial sequence
  SiRNA target sequence
gattggactacccttccttacatt

SEQ ID NO: 203313 - DNA, 24 bp, Artificial sequence
  SiRNA target sequence
attggactacccttccttacatta

SEQ ID NO: 203314 - DNA, 24 bp, Artificial sequence
  SiRNA target sequence
ttggactacccttccttacattat

SEQ ID NO: 203315 - DNA, 24 bp, Artificial sequence
  SiRNA target sequence
tggactacccttccttacattatc

SEQ ID NO: 203316 - DNA, 24 bp, Artificial sequence
  SiRNA target sequence
ggactacccttccttacattatca

SEQ ID NO: 203317 - DNA, 24 bp, Artificial sequence
  SiRNA target sequence
gactacccttccttacattatcag

SEQ ID NO: 203318 - DNA, 24 bp, Artificial sequence
  SiRNA target sequence
actacccttccttacattatcagt

SEQ ID NO: 203319 - DNA, 24 bp, Artificial sequence
  SiRNA target sequence
ctacccttccttacattatcagta

SEQ ID NO: 203320 - DNA, 24 bp, Artificial sequence
  SiRNA target sequence
tacccttccttacattatcagtat

SEQ ID NO: 203321 - DNA, 24 bp, Artificial sequence
  SiRNA target sequence
acccttccttacattatcagtatc

SEQ ID NO: 203322 - DNA, 24 bp, Artificial sequence
  SiRNA target sequence
cccttccttacattatcagtatca

SEQ ID NO: 203323 - DNA, 24 bp, Artificial sequence
  SiRNA target sequence
ccttccttacattatcagtatcaa

SEQ ID NO: 203324 - DNA, 24 bp, Artificial sequence
  SiRNA target sequence
cttccttacattatcagtatcaag

SEQ ID NO: 203325 - DNA, 24 bp, Artificial sequence
  SiRNA target sequence
ttccttacattatcagtatcaagt

SEQ ID NO: 203326 - DNA, 24 bp, Artificial sequence
  SiRNA target sequence
tccttacattatcagtatcaagtg

SEQ ID NO: 203327 - DNA, 24 bp, Artificial sequence
  SiRNA target sequence
ccttacattatcagtatcaagtgc

SEQ ID NO: 203328 - DNA, 24 bp, Artificial sequence
  SiRNA target sequence
cttacattatcagtatcaagtgct

SEQ ID NO: 203329 - DNA, 24 bp, Artificial sequence
  SiRNA target sequence
ttacattatcagtatcaagtgcta

SEQ ID NO: 203330 - DNA, 24 bp, Artificial sequence
  SiRNA target sequence
tacattatcagtatcaagtgctac

SEQ ID NO: 203331 - DNA, 24 bp, Artificial sequence
  SiRNA target sequence
acattatcagtatcaagtgctact

SEQ ID NO: 203332 - DNA, 24 bp, Artificial sequence
  SiRNA target sequence
cattatcagtatcaagtgctacta

SEQ ID NO: 203333 - DNA, 24 bp, Artificial sequence
  SiRNA target sequence
attatcagtatcaagtgctactaa

SEQ ID NO: 203334 - DNA, 24 bp, Artificial sequence
  SiRNA target sequence
ttatcagtatcaagtgctactaat

SEQ ID NO: 203335 - DNA, 24 bp, Artificial sequence
  SiRNA target sequence
tatcagtatcaagtgctactaata

SEQ ID NO: 203336 - DNA, 24 bp, Artificial sequence
  SiRNA target sequence
atcagtatcaagtgctactaatat

SEQ ID NO: 203337 - DNA, 24 bp, Artificial sequence
  SiRNA target sequence
tcagtatcaagtgctactaatatg

SEQ ID NO: 203338 - DNA, 24 bp, Artificial sequence
  SiRNA target sequence
cagtatcaagtgctactaatatgg

SEQ ID NO: 203339 - DNA, 24 bp, Artificial sequence
  SiRNA target sequence
agtatcaagtgctactaatatggc

SEQ ID NO: 203340 - DNA, 24 bp, Artificial sequence
  SiRNA target sequence
gtatcaagtgctactaatatggct

SEQ ID NO: 203341 - DNA, 24 bp, Artificial sequence
  SiRNA target sequence
tatcaagtgctactaatatggcta

SEQ ID NO: 203342 - DNA, 24 bp, Artificial sequence
  SiRNA target sequence
atcaagtgctactaatatggctag

SEQ ID NO: 203343 - DNA, 24 bp, Artificial sequence
  SiRNA target sequence
tcaagtgctactaatatggctagt

SEQ ID NO: 203344 - DNA, 24 bp, Artificial sequence
  SiRNA target sequence
caagtgctactaatatggctagtc

SEQ ID NO: 203345 - DNA, 24 bp, Artificial sequence
  SiRNA target sequence
aagtgctactaatatggctagtcc

SEQ ID NO: 203346 - DNA, 24 bp, Artificial sequence
  SiRNA target sequence
agtgctactaatatggctagtcca

SEQ ID NO: 203347 - DNA, 24 bp, Artificial sequence
  SiRNA target sequence
gtgctactaatatggctagtccat

SEQ ID NO: 203348 - DNA, 24 bp, Artificial sequence
  SiRNA target sequence
tgctactaatatggctagtccata

SEQ ID NO: 203349 - DNA, 24 bp, Artificial sequence
  SiRNA target sequence
gctactaatatggctagtccatat

SEQ ID NO: 203350 - DNA, 24 bp, Artificial sequence
  SiRNA target sequence
ctactaatatggctagtccatata

SEQ ID NO: 203351 - DNA, 24 bp, Artificial sequence
  SiRNA target sequence
tactaatatggctagtccatataa

SEQ ID NO: 203352 - DNA, 24 bp, Artificial sequence
  SiRNA target sequence
actaatatggctagtccatataat

SEQ ID NO: 203353 - DNA, 24 bp, Artificial sequence
  SiRNA target sequence
ctaatatggctagtccatataatg

SEQ ID NO: 203354 - DNA, 24 bp, Artificial sequence
  SiRNA target sequence
taatatggctagtccatataatga

SEQ ID NO: 203355 - DNA, 24 bp, Artificial sequence
  SiRNA target sequence
aatatggctagtccatataatgaa

SEQ ID NO: 203356 - DNA, 24 bp, Artificial sequence
  SiRNA target sequence
atatggctagtccatataatgaac

SEQ ID NO: 203357 - DNA, 24 bp, Artificial sequence
  SiRNA target sequence
tatggctagtccatataatgaacc

SEQ ID NO: 203358 - DNA, 24 bp, Artificial sequence
  SiRNA target sequence
atggctagtccatataatgaacca

SEQ ID NO: 203359 - DNA, 24 bp, Artificial sequence
  SiRNA target sequence
tggctagtccatataatgaaccaa

SEQ ID NO: 203360 - DNA, 24 bp, Artificial sequence
  SiRNA target sequence
ggctagtccatataatgaaccaat

SEQ ID NO: 203361 - DNA, 24 bp, Artificial sequence
  SiRNA target sequence
gctagtccatataatgaaccaata

SEQ ID NO: 203362 - DNA, 24 bp, Artificial sequence
  SiRNA target sequence
ctagtccatataatgaaccaatag

SEQ ID NO: 203363 - DNA, 24 bp, Artificial sequence
  SiRNA target sequence
tagtccatataatgaaccaataga

SEQ ID NO: 203364 - DNA, 24 bp, Artificial sequence
  SiRNA target sequence
agtccatataatgaaccaatagat

SEQ ID NO: 203365 - DNA, 24 bp, Artificial sequence
  SiRNA target sequence
gtccatataatgaaccaatagatt

SEQ ID NO: 203366 - DNA, 24 bp, Artificial sequence
  SiRNA target sequence
tccatataatgaaccaatagattt

SEQ ID NO: 203367 - DNA, 24 bp, Artificial sequence
  SiRNA target sequence
ccatataatgaaccaatagatttt

SEQ ID NO: 203368 - DNA, 24 bp, Artificial sequence
  SiRNA target sequence
catataatgaaccaatagattttc

SEQ ID NO: 203369 - DNA, 24 bp, Artificial sequence
  SiRNA target sequence
atataatgaaccaatagattttcc

SEQ ID NO: 203370 - DNA, 24 bp, Artificial sequence
  SiRNA target sequence
tataatgaaccaatagattttcct

SEQ ID NO: 203371 - DNA, 24 bp, Artificial sequence
  SiRNA target sequence
ataatgaaccaatagattttccta

SEQ ID NO: 203372 - DNA, 24 bp, Artificial sequence
  SiRNA target sequence
taatgaaccaatagattttcctaa

SEQ ID NO: 203373 - DNA, 24 bp, Artificial sequence
  SiRNA target sequence
aatgaaccaatagattttcctaat

SEQ ID NO: 203374 - DNA, 24 bp, Artificial sequence
  SiRNA target sequence
atgaaccaatagattttcctaatt

SEQ ID NO: 203375 - DNA, 24 bp, Artificial sequence
  SiRNA target sequence
tgaaccaatagattttcctaattt

SEQ ID NO: 203376 - DNA, 24 bp, Artificial sequence
  SiRNA target sequence
gaaccaatagattttcctaattta

SEQ ID NO: 203377 - DNA, 24 bp, Artificial sequence
  SiRNA target sequence
aaccaatagattttcctaatttat

SEQ ID NO: 203378 - DNA, 24 bp, Artificial sequence
  SiRNA target sequence
accaatagattttcctaatttatt

SEQ ID NO: 203379 - DNA, 24 bp, Artificial sequence
  SiRNA target sequence
ccaatagattttcctaatttatta

SEQ ID NO: 203380 - DNA, 24 bp, Artificial sequence
  SiRNA target sequence
caatagattttcctaatttattaa

SEQ ID NO: 203381 - DNA, 24 bp, Artificial sequence
  SiRNA target sequence
aatagattttcctaatttattaaa

SEQ ID NO: 203382 - DNA, 24 bp, Artificial sequence
  SiRNA target sequence
atagattttcctaatttattaaaa

SEQ ID NO: 203383 - DNA, 24 bp, Artificial sequence
  SiRNA target sequence
tagattttcctaatttattaaaaa

SEQ ID NO: 203384 - DNA, 24 bp, Artificial sequence
  SiRNA target sequence
agattttcctaatttattaaaaat

SEQ ID NO: 203385 - DNA, 24 bp, Artificial sequence
  SiRNA target sequence
gattttcctaatttattaaaaata

SEQ ID NO: 203386 - DNA, 24 bp, Artificial sequence
  SiRNA target sequence
attttcctaatttattaaaaatac

SEQ ID NO: 203387 - DNA, 24 bp, Artificial sequence
  SiRNA target sequence
ttttcctaatttattaaaaatacc

SEQ ID NO: 203388 - DNA, 24 bp, Artificial sequence
  SiRNA target sequence
tttcctaatttattaaaaatacca

SEQ ID NO: 203389 - DNA, 24 bp, Artificial sequence
  SiRNA target sequence
ttcctaatttattaaaaataccat

SEQ ID NO: 203390 - DNA, 24 bp, Artificial sequence
  SiRNA target sequence
tcctaatttattaaaaataccatc

SEQ ID NO: 203391 - DNA, 24 bp, Artificial sequence
  SiRNA target sequence
cctaatttattaaaaataccatca

SEQ ID NO: 203392 - DNA, 24 bp, Artificial sequence
  SiRNA target sequence
ctaatttattaaaaataccatcat

SEQ ID NO: 203393 - DNA, 24 bp, Artificial sequence
  SiRNA target sequence
taatttattaaaaataccatcata

SEQ ID NO: 203394 - DNA, 24 bp, Artificial sequence
  SiRNA target sequence
aatttattaaaaataccatcataa

SEQ ID NO: 203395 - DNA, 24 bp, Artificial sequence
  SiRNA target sequence
atttattaaaaataccatcataaa

SEQ ID NO: 203396 - DNA, 24 bp, Artificial sequence
  SiRNA target sequence
tttattaaaaataccatcataaac

SEQ ID NO: 203397 - DNA, 24 bp, Artificial sequence
  SiRNA target sequence
ttattaaaaataccatcataaaca

SEQ ID NO: 203398 - DNA, 24 bp, Artificial sequence
  SiRNA target sequence
tattaaaaataccatcataaacac

SEQ ID NO: 203399 - DNA, 24 bp, Artificial sequence
  SiRNA target sequence
attaaaaataccatcataaacact

SEQ ID NO: 203400 - DNA, 24 bp, Artificial sequence
  SiRNA target sequence
ttaaaaataccatcataaacactt

SEQ ID NO: 203401 - DNA, 24 bp, Artificial sequence
  SiRNA target sequence
taaaaataccatcataaacacttt

SEQ ID NO: 203402 - DNA, 24 bp, Artificial sequence
  SiRNA target sequence
aaaaataccatcataaacactttt

SEQ ID NO: 203403 - DNA, 24 bp, Artificial sequence
  SiRNA target sequence
aaaataccatcataaacactttta

SEQ ID NO: 203404 - DNA, 24 bp, Artificial sequence
  SiRNA target sequence
aaataccatcataaacacttttaa

SEQ ID NO: 203405 - DNA, 24 bp, Artificial sequence
  SiRNA target sequence
aataccatcataaacacttttaaa

SEQ ID NO: 203406 - DNA, 24 bp, Artificial sequence
  SiRNA target sequence
ataccatcataaacacttttaaac

SEQ ID NO: 203407 - DNA, 24 bp, Artificial sequence
  SiRNA target sequence
taccatcataaacacttttaaacc

SEQ ID NO: 203408 - DNA, 24 bp, Artificial sequence
  SiRNA target sequence
accatcataaacacttttaaaccg

SEQ ID NO: 203409 - DNA, 24 bp, Artificial sequence
  SiRNA target sequence
ccatcataaacacttttaaaccgt

SEQ ID NO: 203410 - DNA, 24 bp, Artificial sequence
  SiRNA target sequence
catcataaacacttttaaaccgtg

SEQ ID NO: 203411 - DNA, 24 bp, Artificial sequence
  SiRNA target sequence
atcataaacacttttaaaccgtgc

SEQ ID NO: 203412 - DNA, 24 bp, Artificial sequence
  SiRNA target sequence
tcataaacacttttaaaccgtgcc

SEQ ID NO: 203413 - DNA, 24 bp, Artificial sequence
  SiRNA target sequence
cataaacacttttaaaccgtgccc

SEQ ID NO: 203414 - DNA, 24 bp, Artificial sequence
  SiRNA target sequence
ataaacacttttaaaccgtgccct

SEQ ID NO: 203415 - DNA, 24 bp, Artificial sequence
  SiRNA target sequence
taaacacttttaaaccgtgccctg

SEQ ID NO: 203416 - DNA, 24 bp, Artificial sequence
  SiRNA target sequence
aaacacttttaaaccgtgccctgt

SEQ ID NO: 203417 - DNA, 24 bp, Artificial sequence
  SiRNA target sequence
aacacttttaaaccgtgccctgtg

SEQ ID NO: 203418 - DNA, 24 bp, Artificial sequence
  SiRNA target sequence
acacttttaaaccgtgccctgtgt

SEQ ID NO: 203419 - DNA, 24 bp, Artificial sequence
  SiRNA target sequence
cacttttaaaccgtgccctgtgtg

SEQ ID NO: 203420 - DNA, 24 bp, Artificial sequence
  SiRNA target sequence
acttttaaaccgtgccctgtgtgc

SEQ ID NO: 203421 - DNA, 24 bp, Artificial sequence
  SiRNA target sequence
cttttaaaccgtgccctgtgtgca

SEQ ID NO: 203422 - DNA, 24 bp, Artificial sequence
  SiRNA target sequence
ttttaaaccgtgccctgtgtgcag

SEQ ID NO: 203423 - DNA, 24 bp, Artificial sequence
  SiRNA target sequence
tttaaaccgtgccctgtgtgcagg

SEQ ID NO: 203424 - DNA, 24 bp, Artificial sequence
  SiRNA target sequence
ttaaaccgtgccctgtgtgcagga

SEQ ID NO: 203425 - DNA, 24 bp, Artificial sequence
  SiRNA target sequence
taaaccgtgccctgtgtgcaggat

SEQ ID NO: 203426 - DNA, 24 bp, Artificial sequence
  SiRNA target sequence
aaaccgtgccctgtgtgcaggatc

SEQ ID NO: 203427 - DNA, 24 bp, Artificial sequence
  SiRNA target sequence
aaccgtgccctgtgtgcaggatcg

SEQ ID NO: 203428 - DNA, 24 bp, Artificial sequence
  SiRNA target sequence
accgtgccctgtgtgcaggatcga

SEQ ID NO: 203429 - DNA, 24 bp, Artificial sequence
  SiRNA target sequence
ccgtgccctgtgtgcaggatcgat

SEQ ID NO: 203430 - DNA, 24 bp, Artificial sequence
  SiRNA target sequence
cgtgccctgtgtgcaggatcgatt

SEQ ID NO: 203431 - DNA, 24 bp, Artificial sequence
  SiRNA target sequence
gtgccctgtgtgcaggatcgattc

SEQ ID NO: 203432 - DNA, 24 bp, Artificial sequence
  SiRNA target sequence
tgccctgtgtgcaggatcgattct

SEQ ID NO: 203433 - DNA, 24 bp, Artificial sequence
  SiRNA target sequence
gccctgtgtgcaggatcgattctc

SEQ ID NO: 203434 - DNA, 24 bp, Artificial sequence
  SiRNA target sequence
ccctgtgtgcaggatcgattctca

SEQ ID NO: 203435 - DNA, 24 bp, Artificial sequence
  SiRNA target sequence
cctgtgtgcaggatcgattctcat

SEQ ID NO: 203436 - DNA, 24 bp, Artificial sequence
  SiRNA target sequence
ctgtgtgcaggatcgattctcata

SEQ ID NO: 203437 - DNA, 24 bp, Artificial sequence
  SiRNA target sequence
tgtgtgcaggatcgattctcatac

SEQ ID NO: 203438 - DNA, 24 bp, Artificial sequence
  SiRNA target sequence
gtgtgcaggatcgattctcatacc

SEQ ID NO: 203439 - DNA, 24 bp, Artificial sequence
  SiRNA target sequence
tgtgcaggatcgattctcataccc

SEQ ID NO: 203440 - DNA, 24 bp, Artificial sequence
  SiRNA target sequence
gtgcaggatcgattctcataccca

SEQ ID NO: 203441 - DNA, 24 bp, Artificial sequence
  SiRNA target sequence
tgcaggatcgattctcatacccat

SEQ ID NO: 203442 - DNA, 24 bp, Artificial sequence
  SiRNA target sequence
gcaggatcgattctcatacccatt

SEQ ID NO: 203443 - DNA, 24 bp, Artificial sequence
  SiRNA target sequence
caggatcgattctcatacccattt

SEQ ID NO: 203444 - DNA, 24 bp, Artificial sequence
  SiRNA target sequence
aggatcgattctcatacccatttt

SEQ ID NO: 203445 - DNA, 24 bp, Artificial sequence
  SiRNA target sequence
ggatcgattctcatacccattttc

SEQ ID NO: 203446 - DNA, 24 bp, Artificial sequence
  SiRNA target sequence
gatcgattctcatacccattttct

SEQ ID NO: 203447 - DNA, 24 bp, Artificial sequence
  SiRNA target sequence
atcgattctcatacccattttctc

SEQ ID NO: 203448 - DNA, 24 bp, Artificial sequence
  SiRNA target sequence
tcgattctcatacccattttctct

SEQ ID NO: 203449 - DNA, 24 bp, Artificial sequence
  SiRNA target sequence
cgattctcatacccattttctctt

SEQ ID NO: 203450 - DNA, 24 bp, Artificial sequence
  SiRNA target sequence
gattctcatacccattttctcttt

SEQ ID NO: 203451 - DNA, 24 bp, Artificial sequence
  SiRNA target sequence
attctcatacccattttctcttta

SEQ ID NO: 203452 - DNA, 24 bp, Artificial sequence
  SiRNA target sequence
ttctcatacccattttctctttac

SEQ ID NO: 203453 - DNA, 24 bp, Artificial sequence
  SiRNA target sequence
tctcatacccattttctctttaca

SEQ ID NO: 203454 - DNA, 24 bp, Artificial sequence
  SiRNA target sequence
ctcatacccattttctctttacaa

SEQ ID NO: 203455 - DNA, 24 bp, Artificial sequence
  SiRNA target sequence
tcatacccattttctctttacaaa

SEQ ID NO: 203456 - DNA, 24 bp, Artificial sequence
  SiRNA target sequence
catacccattttctctttacaaat

SEQ ID NO: 203457 - DNA, 24 bp, Artificial sequence
  SiRNA target sequence
atacccattttctctttacaaata

SEQ ID NO: 203458 - DNA, 24 bp, Artificial sequence
  SiRNA target sequence
tacccattttctctttacaaatat

SEQ ID NO: 203459 - DNA, 24 bp, Artificial sequence
  SiRNA target sequence
acccattttctctttacaaatatc

SEQ ID NO: 203460 - DNA, 24 bp, Artificial sequence
  SiRNA target sequence
cccattttctctttacaaatatca

SEQ ID NO: 203461 - DNA, 24 bp, Artificial sequence
  SiRNA target sequence
ccattttctctttacaaatatcaa

SEQ ID NO: 203462 - DNA, 24 bp, Artificial sequence
  SiRNA target sequence
cattttctctttacaaatatcaaa

SEQ ID NO: 203463 - DNA, 24 bp, Artificial sequence
  SiRNA target sequence
attttctctttacaaatatcaaag

SEQ ID NO: 203464 - DNA, 24 bp, Artificial sequence
  SiRNA target sequence
ttttctctttacaaatatcaaagg

SEQ ID NO: 203465 - DNA, 24 bp, Artificial sequence
  SiRNA target sequence
tttctctttacaaatatcaaaggc

SEQ ID NO: 203466 - DNA, 24 bp, Artificial sequence
  SiRNA target sequence
ttctctttacaaatatcaaaggct

SEQ ID NO: 203467 - DNA, 24 bp, Artificial sequence
  SiRNA target sequence
tctctttacaaatatcaaaggctg

SEQ ID NO: 203468 - DNA, 24 bp, Artificial sequence
  SiRNA target sequence
ctctttacaaatatcaaaggctga

SEQ ID NO: 203469 - DNA, 24 bp, Artificial sequence
  SiRNA target sequence
tctttacaaatatcaaaggctgaa

SEQ ID NO: 203470 - DNA, 24 bp, Artificial sequence
  SiRNA target sequence
ctttacaaatatcaaaggctgaat

SEQ ID NO: 203471 - DNA, 24 bp, Artificial sequence
  SiRNA target sequence
tttacaaatatcaaaggctgaata

SEQ ID NO: 203472 - DNA, 24 bp, Artificial sequence
  SiRNA target sequence
ttacaaatatcaaaggctgaatat

SEQ ID NO: 203473 - DNA, 24 bp, Artificial sequence
  SiRNA target sequence
tacaaatatcaaaggctgaatatt

SEQ ID NO: 203474 - DNA, 24 bp, Artificial sequence
  SiRNA target sequence
acaaatatcaaaggctgaatattt

SEQ ID NO: 203475 - DNA, 24 bp, Artificial sequence
  SiRNA target sequence
caaatatcaaaggctgaatatttt

SEQ ID NO: 203476 - DNA, 24 bp, Artificial sequence
  SiRNA target sequence
aaatatcaaaggctgaatatttta

SEQ ID NO: 203477 - DNA, 24 bp, Artificial sequence
  SiRNA target sequence
aatatcaaaggctgaatattttaa

SEQ ID NO: 203478 - DNA, 24 bp, Artificial sequence
  SiRNA target sequence
atatcaaaggctgaatattttaat

SEQ ID NO: 203479 - DNA, 24 bp, Artificial sequence
  SiRNA target sequence
tatcaaaggctgaatattttaata

SEQ ID NO: 203480 - DNA, 24 bp, Artificial sequence
  SiRNA target sequence
atcaaaggctgaatattttaatac

SEQ ID NO: 203481 - DNA, 24 bp, Artificial sequence
  SiRNA target sequence
tcaaaggctgaatattttaatact

SEQ ID NO: 203482 - DNA, 24 bp, Artificial sequence
  SiRNA target sequence
caaaggctgaatattttaatactt

SEQ ID NO: 203483 - DNA, 24 bp, Artificial sequence
  SiRNA target sequence
aaaggctgaatattttaatacttt

SEQ ID NO: 203484 - DNA, 24 bp, Artificial sequence
  SiRNA target sequence
aaggctgaatattttaatactttt

SEQ ID NO: 203485 - DNA, 24 bp, Artificial sequence
  SiRNA target sequence
aggctgaatattttaatactttta

SEQ ID NO: 203486 - DNA, 24 bp, Artificial sequence
  SiRNA target sequence
ggctgaatattttaatacttttat

SEQ ID NO: 203487 - DNA, 24 bp, Artificial sequence
  SiRNA target sequence
gctgaatattttaatacttttatg

SEQ ID NO: 203488 - DNA, 24 bp, Artificial sequence
  SiRNA target sequence
ctgaatattttaatacttttatga

SEQ ID NO: 203489 - DNA, 24 bp, Artificial sequence
  SiRNA target sequence
tgaatattttaatacttttatgaa

SEQ ID NO: 203490 - DNA, 24 bp, Artificial sequence
  SiRNA target sequence
gaatattttaatacttttatgaat

SEQ ID NO: 203491 - DNA, 24 bp, Artificial sequence
  SiRNA target sequence
aatattttaatacttttatgaatg

SEQ ID NO: 203492 - DNA, 24 bp, Artificial sequence
  SiRNA target sequence
atattttaatacttttatgaatgc

SEQ ID NO: 203493 - DNA, 24 bp, Artificial sequence
  SiRNA target sequence
tattttaatacttttatgaatgct

SEQ ID NO: 203494 - DNA, 24 bp, Artificial sequence
  SiRNA target sequence
attttaatacttttatgaatgcta

SEQ ID NO: 203495 - DNA, 24 bp, Artificial sequence
  SiRNA target sequence
ttttaatacttttatgaatgctaa

SEQ ID NO: 203496 - DNA, 24 bp, Artificial sequence
  SiRNA target sequence
tttaatacttttatgaatgctaaa

SEQ ID NO: 203497 - DNA, 24 bp, Artificial sequence
  SiRNA target sequence
ttaatacttttatgaatgctaaaa

SEQ ID NO: 203498 - DNA, 24 bp, Artificial sequence
  SiRNA target sequence
taatacttttatgaatgctaaaaa

SEQ ID NO: 203499 - DNA, 24 bp, Artificial sequence
  SiRNA target sequence
aatacttttatgaatgctaaaaag

SEQ ID NO: 203500 - DNA, 24 bp, Artificial sequence
  SiRNA target sequence
atacttttatgaatgctaaaaaga

SEQ ID NO: 203501 - DNA, 24 bp, Artificial sequence
  SiRNA target sequence
tacttttatgaatgctaaaaagaa

SEQ ID NO: 203502 - DNA, 24 bp, Artificial sequence
  SiRNA target sequence
acttttatgaatgctaaaaagaac

SEQ ID NO: 203503 - DNA, 24 bp, Artificial sequence
  SiRNA target sequence
cttttatgaatgctaaaaagaaca

SEQ ID NO: 203504 - DNA, 24 bp, Artificial sequence
  SiRNA target sequence
ttttatgaatgctaaaaagaacat

SEQ ID NO: 203505 - DNA, 24 bp, Artificial sequence
  SiRNA target sequence
tttatgaatgctaaaaagaacatt

SEQ ID NO: 203506 - DNA, 24 bp, Artificial sequence
  SiRNA target sequence
ttatgaatgctaaaaagaacattc

SEQ ID NO: 203507 - DNA, 24 bp, Artificial sequence
  SiRNA target sequence
tatgaatgctaaaaagaacattcc

SEQ ID NO: 203508 - DNA, 24 bp, Artificial sequence
  SiRNA target sequence
atgaatgctaaaaagaacattcca

SEQ ID NO: 203509 - DNA, 24 bp, Artificial sequence
  SiRNA target sequence
tgaatgctaaaaagaacattccac

SEQ ID NO: 203510 - DNA, 24 bp, Artificial sequence
  SiRNA target sequence
gaatgctaaaaagaacattccact

SEQ ID NO: 203511 - DNA, 24 bp, Artificial sequence
  SiRNA target sequence
aatgctaaaaagaacattccactg

SEQ ID NO: 203512 - DNA, 24 bp, Artificial sequence
  SiRNA target sequence
atgctaaaaagaacattccactgt

SEQ ID NO: 203513 - DNA, 24 bp, Artificial sequence
  SiRNA target sequence
tgctaaaaagaacattccactgta

SEQ ID NO: 203514 - DNA, 24 bp, Artificial sequence
  SiRNA target sequence
gctaaaaagaacattccactgtaa

SEQ ID NO: 203515 - DNA, 24 bp, Artificial sequence
  SiRNA target sequence
ctaaaaagaacattccactgtaat

SEQ ID NO: 203516 - DNA, 24 bp, Artificial sequence
  SiRNA target sequence
taaaaagaacattccactgtaatt

SEQ ID NO: 203517 - DNA, 24 bp, Artificial sequence
  SiRNA target sequence
aaaaagaacattccactgtaattt

SEQ ID NO: 203518 - DNA, 24 bp, Artificial sequence
  SiRNA target sequence
aaaagaacattccactgtaatttt

SEQ ID NO: 203519 - DNA, 24 bp, Artificial sequence
  SiRNA target sequence
aaagaacattccactgtaattttc

SEQ ID NO: 203520 - DNA, 24 bp, Artificial sequence
  SiRNA target sequence
aagaacattccactgtaattttcg

SEQ ID NO: 203521 - DNA, 24 bp, Artificial sequence
  SiRNA target sequence
agaacattccactgtaattttcga

SEQ ID NO: 203522 - DNA, 24 bp, Artificial sequence
  SiRNA target sequence
gaacattccactgtaattttcgat

SEQ ID NO: 203523 - DNA, 24 bp, Artificial sequence
  SiRNA target sequence
aacattccactgtaattttcgatc

SEQ ID NO: 203524 - DNA, 24 bp, Artificial sequence
  SiRNA target sequence
acattccactgtaattttcgatcg

SEQ ID NO: 203525 - DNA, 24 bp, Artificial sequence
  SiRNA target sequence
cattccactgtaattttcgatcgt

SEQ ID NO: 203526 - DNA, 24 bp, Artificial sequence
  SiRNA target sequence
attccactgtaattttcgatcgta

SEQ ID NO: 203527 - DNA, 24 bp, Artificial sequence
  SiRNA target sequence
ttccactgtaattttcgatcgtat

SEQ ID NO: 203528 - DNA, 24 bp, Artificial sequence
  SiRNA target sequence
tccactgtaattttcgatcgtata

SEQ ID NO: 203529 - DNA, 24 bp, Artificial sequence
  SiRNA target sequence
ccactgtaattttcgatcgtataa

SEQ ID NO: 203530 - DNA, 24 bp, Artificial sequence
  SiRNA target sequence
cactgtaattttcgatcgtataaa

SEQ ID NO: 203531 - DNA, 24 bp, Artificial sequence
  SiRNA target sequence
actgtaattttcgatcgtataaat

SEQ ID NO: 203532 - DNA, 24 bp, Artificial sequence
  SiRNA target sequence
ctgtaattttcgatcgtataaatg

SEQ ID NO: 203533 - DNA, 24 bp, Artificial sequence
  SiRNA target sequence
tgtaattttcgatcgtataaatgt

SEQ ID NO: 203534 - DNA, 24 bp, Artificial sequence
  SiRNA target sequence
gtaattttcgatcgtataaatgta

SEQ ID NO: 203535 - DNA, 24 bp, Artificial sequence
  SiRNA target sequence
taattttcgatcgtataaatgtac

SEQ ID NO: 203536 - DNA, 24 bp, Artificial sequence
  SiRNA target sequence
aattttcgatcgtataaatgtacg

SEQ ID NO: 203537 - DNA, 24 bp, Artificial sequence
  SiRNA target sequence
attttcgatcgtataaatgtacga

SEQ ID NO: 203538 - DNA, 24 bp, Artificial sequence
  SiRNA target sequence
ttttcgatcgtataaatgtacgac

SEQ ID NO: 203539 - DNA, 24 bp, Artificial sequence
  SiRNA target sequence
tttcgatcgtataaatgtacgaca

SEQ ID NO: 203540 - DNA, 24 bp, Artificial sequence
  SiRNA target sequence
ttcgatcgtataaatgtacgacat

SEQ ID NO: 203541 - DNA, 24 bp, Artificial sequence
  SiRNA target sequence
tcgatcgtataaatgtacgacatt

SEQ ID NO: 203542 - DNA, 24 bp, Artificial sequence
  SiRNA target sequence
cgatcgtataaatgtacgacattt

SEQ ID NO: 203543 - DNA, 24 bp, Artificial sequence
  SiRNA target sequence
gatcgtataaatgtacgacatttt

SEQ ID NO: 203544 - DNA, 24 bp, Artificial sequence
  SiRNA target sequence
atcgtataaatgtacgacattttt

SEQ ID NO: 203545 - DNA, 24 bp, Artificial sequence
  SiRNA target sequence
tcgtataaatgtacgacatttttt

SEQ ID NO: 203546 - DNA, 24 bp, Artificial sequence
  SiRNA target sequence
cgtataaatgtacgacattttttt

SEQ ID NO: 203547 - DNA, 24 bp, Artificial sequence
  SiRNA target sequence
gtataaatgtacgacattttttta

SEQ ID NO: 203548 - DNA, 24 bp, Artificial sequence
  SiRNA target sequence
tataaatgtacgacatttttttaa

SEQ ID NO: 203549 - DNA, 24 bp, Artificial sequence
  SiRNA target sequence
ataaatgtacgacatttttttaaa

SEQ ID NO: 203550 - DNA, 24 bp, Artificial sequence
  SiRNA target sequence
taaatgtacgacatttttttaaaa

SEQ ID NO: 203551 - DNA, 24 bp, Artificial sequence
  SiRNA target sequence
aaatgtacgacatttttttaaaaa

SEQ ID NO: 203552 - DNA, 24 bp, Artificial sequence
  SiRNA target sequence
aatgtacgacatttttttaaaaaa

SEQ ID NO: 203553 - DNA, 24 bp, Artificial sequence
  SiRNA target sequence
atgtacgacatttttttaaaaaat

SEQ ID NO: 203554 - DNA, 24 bp, Artificial sequence
  SiRNA target sequence
tgtacgacatttttttaaaaaata

SEQ ID NO: 203555 - DNA, 24 bp, Artificial sequence
  SiRNA target sequence
gtacgacatttttttaaaaaatac

SEQ ID NO: 203556 - DNA, 24 bp, Artificial sequence
  SiRNA target sequence
tacgacatttttttaaaaaataca

SEQ ID NO: 203557 - DNA, 24 bp, Artificial sequence
  SiRNA target sequence
acgacatttttttaaaaaatacag

SEQ ID NO: 203558 - DNA, 24 bp, Artificial sequence
  SiRNA target sequence
cgacatttttttaaaaaatacaga

SEQ ID NO: 203559 - DNA, 24 bp, Artificial sequence
  SiRNA target sequence
gacatttttttaaaaaatacagaa

SEQ ID NO: 203560 - DNA, 24 bp, Artificial sequence
  SiRNA target sequence
acatttttttaaaaaatacagaaa

SEQ ID NO: 203561 - DNA, 24 bp, Artificial sequence
  SiRNA target sequence
catttttttaaaaaatacagaaat

SEQ ID NO: 203562 - DNA, 24 bp, Artificial sequence
  SiRNA target sequence
atttttttaaaaaatacagaaatc

SEQ ID NO: 203563 - DNA, 24 bp, Artificial sequence
  SiRNA target sequence
tttttttaaaaaatacagaaatcc

SEQ ID NO: 203564 - DNA, 24 bp, Artificial sequence
  SiRNA target sequence
ttttttaaaaaatacagaaatcca

SEQ ID NO: 203565 - DNA, 24 bp, Artificial sequence
  SiRNA target sequence
tttttaaaaaatacagaaatccat

SEQ ID NO: 203566 - DNA, 24 bp, Artificial sequence
  SiRNA target sequence
ttttaaaaaatacagaaatccatg

SEQ ID NO: 203567 - DNA, 24 bp, Artificial sequence
  SiRNA target sequence
tttaaaaaatacagaaatccatga

SEQ ID NO: 203568 - DNA, 24 bp, Artificial sequence
  SiRNA target sequence
ttaaaaaatacagaaatccatgaa

SEQ ID NO: 203569 - DNA, 24 bp, Artificial sequence
  SiRNA target sequence
taaaaaatacagaaatccatgaaa

SEQ ID NO: 203570 - DNA, 24 bp, Artificial sequence
  SiRNA target sequence
aaaaaatacagaaatccatgaaaa

SEQ ID NO: 203571 - DNA, 24 bp, Artificial sequence
  SiRNA target sequence
aaaaatacagaaatccatgaaaaa

SEQ ID NO: 203572 - DNA, 24 bp, Artificial sequence
  SiRNA target sequence
aaaatacagaaatccatgaaaaag

SEQ ID NO: 203573 - DNA, 24 bp, Artificial sequence
  SiRNA target sequence
aaatacagaaatccatgaaaaagc

SEQ ID NO: 203574 - DNA, 24 bp, Artificial sequence
  SiRNA target sequence
aatacagaaatccatgaaaaagca

SEQ ID NO: 203575 - DNA, 24 bp, Artificial sequence
  SiRNA target sequence
atacagaaatccatgaaaaagcaa

SEQ ID NO: 203576 - DNA, 24 bp, Artificial sequence
  SiRNA target sequence
tacagaaatccatgaaaaagcaag

SEQ ID NO: 203577 - DNA, 24 bp, Artificial sequence
  SiRNA target sequence
acagaaatccatgaaaaagcaagt

SEQ ID NO: 203578 - DNA, 24 bp, Artificial sequence
  SiRNA target sequence
cagaaatccatgaaaaagcaagtc

SEQ ID NO: 203579 - DNA, 24 bp, Artificial sequence
  SiRNA target sequence
agaaatccatgaaaaagcaagtcc

SEQ ID NO: 203580 - DNA, 24 bp, Artificial sequence
  SiRNA target sequence
gaaatccatgaaaaagcaagtcct

SEQ ID NO: 203581 - DNA, 24 bp, Artificial sequence
  SiRNA target sequence
aaatccatgaaaaagcaagtcctt

SEQ ID NO: 203582 - DNA, 24 bp, Artificial sequence
  SiRNA target sequence
aatccatgaaaaagcaagtccttc

SEQ ID NO: 203583 - DNA, 24 bp, Artificial sequence
  SiRNA target sequence
atccatgaaaaagcaagtccttca

SEQ ID NO: 203584 - DNA, 24 bp, Artificial sequence
  SiRNA target sequence
tccatgaaaaagcaagtccttcaa

SEQ ID NO: 203585 - DNA, 24 bp, Artificial sequence
  SiRNA target sequence
ccatgaaaaagcaagtccttcaat

SEQ ID NO: 203586 - DNA, 24 bp, Artificial sequence
  SiRNA target sequence
catgaaaaagcaagtccttcaatg

SEQ ID NO: 203587 - DNA, 24 bp, Artificial sequence
  SiRNA target sequence
atgaaaaagcaagtccttcaatgg

SEQ ID NO: 203588 - DNA, 24 bp, Artificial sequence
  SiRNA target sequence
tgaaaaagcaagtccttcaatggc

SEQ ID NO: 203589 - DNA, 24 bp, Artificial sequence
  SiRNA target sequence
gaaaaagcaagtccttcaatggca

SEQ ID NO: 203590 - DNA, 24 bp, Artificial sequence
  SiRNA target sequence
aaaaagcaagtccttcaatggcag

SEQ ID NO: 203591 - DNA, 24 bp, Artificial sequence
  SiRNA target sequence
aaaagcaagtccttcaatggcaga

SEQ ID NO: 203592 - DNA, 24 bp, Artificial sequence
  SiRNA target sequence
aaagcaagtccttcaatggcagaa

SEQ ID NO: 203593 - DNA, 24 bp, Artificial sequence
  SiRNA target sequence
aagcaagtccttcaatggcagaat

SEQ ID NO: 203594 - DNA, 24 bp, Artificial sequence
  SiRNA target sequence
agcaagtccttcaatggcagaatt

SEQ ID NO: 203595 - DNA, 24 bp, Artificial sequence
  SiRNA target sequence
gcaagtccttcaatggcagaattg

SEQ ID NO: 203596 - DNA, 24 bp, Artificial sequence
  SiRNA target sequence
caagtccttcaatggcagaattgt

SEQ ID NO: 203597 - DNA, 24 bp, Artificial sequence
  SiRNA target sequence
aagtccttcaatggcagaattgta

SEQ ID NO: 203598 - DNA, 24 bp, Artificial sequence
  SiRNA target sequence
agtccttcaatggcagaattgtag

SEQ ID NO: 203599 - DNA, 24 bp, Artificial sequence
  SiRNA target sequence
gtccttcaatggcagaattgtaga

SEQ ID NO: 203600 - DNA, 24 bp, Artificial sequence
  SiRNA target sequence
tccttcaatggcagaattgtagat

SEQ ID NO: 203601 - DNA, 24 bp, Artificial sequence
  SiRNA target sequence
ccttcaatggcagaattgtagatt

SEQ ID NO: 203602 - DNA, 24 bp, Artificial sequence
  SiRNA target sequence
cttcaatggcagaattgtagattg

SEQ ID NO: 203603 - DNA, 24 bp, Artificial sequence
  SiRNA target sequence
ttcaatggcagaattgtagattga

SEQ ID NO: 203604 - DNA, 24 bp, Artificial sequence
  SiRNA target sequence
tcaatggcagaattgtagattgat

SEQ ID NO: 203605 - DNA, 24 bp, Artificial sequence
  SiRNA target sequence
caatggcagaattgtagattgatg

SEQ ID NO: 203606 - DNA, 24 bp, Artificial sequence
  SiRNA target sequence
aatggcagaattgtagattgatgc

SEQ ID NO: 203607 - DNA, 24 bp, Artificial sequence
  SiRNA target sequence
atggcagaattgtagattgatgct

SEQ ID NO: 203608 - DNA, 24 bp, Artificial sequence
  SiRNA target sequence
tggcagaattgtagattgatgctc

SEQ ID NO: 203609 - DNA, 24 bp, Artificial sequence
  SiRNA target sequence
ggcagaattgtagattgatgctcc

SEQ ID NO: 203610 - DNA, 24 bp, Artificial sequence
  SiRNA target sequence
gcagaattgtagattgatgctccc

SEQ ID NO: 203611 - DNA, 24 bp, Artificial sequence
  SiRNA target sequence
cagaattgtagattgatgctccca

SEQ ID NO: 203612 - DNA, 24 bp, Artificial sequence
  SiRNA target sequence
agaattgtagattgatgctcccat

SEQ ID NO: 203613 - DNA, 24 bp, Artificial sequence
  SiRNA target sequence
gaattgtagattgatgctcccata

SEQ ID NO: 203614 - DNA, 24 bp, Artificial sequence
  SiRNA target sequence
aattgtagattgatgctcccataa

SEQ ID NO: 203615 - DNA, 24 bp, Artificial sequence
  SiRNA target sequence
attgtagattgatgctcccataac

SEQ ID NO: 203616 - DNA, 24 bp, Artificial sequence
  SiRNA target sequence
ttgtagattgatgctcccataacg

SEQ ID NO: 203617 - DNA, 24 bp, Artificial sequence
  SiRNA target sequence
tgtagattgatgctcccataacga

SEQ ID NO: 203618 - DNA, 24 bp, Artificial sequence
  SiRNA target sequence
gtagattgatgctcccataacgat

SEQ ID NO: 203619 - DNA, 24 bp, Artificial sequence
  SiRNA target sequence
tagattgatgctcccataacgatt

SEQ ID NO: 203620 - DNA, 24 bp, Artificial sequence
  SiRNA target sequence
agattgatgctcccataacgatta

SEQ ID NO: 203621 - DNA, 24 bp, Artificial sequence
  SiRNA target sequence
gattgatgctcccataacgattat

SEQ ID NO: 203622 - DNA, 24 bp, Artificial sequence
  SiRNA target sequence
attgatgctcccataacgattatt

SEQ ID NO: 203623 - DNA, 24 bp, Artificial sequence
  SiRNA target sequence
ttgatgctcccataacgattattg

SEQ ID NO: 203624 - DNA, 24 bp, Artificial sequence
  SiRNA target sequence
tgatgctcccataacgattattga

SEQ ID NO: 203625 - DNA, 24 bp, Artificial sequence
  SiRNA target sequence
gatgctcccataacgattattgac

SEQ ID NO: 203626 - DNA, 24 bp, Artificial sequence
  SiRNA target sequence
atgctcccataacgattattgacc

SEQ ID NO: 203627 - DNA, 24 bp, Artificial sequence
  SiRNA target sequence
tgctcccataacgattattgaccc

SEQ ID NO: 203628 - DNA, 24 bp, Artificial sequence
  SiRNA target sequence
gctcccataacgattattgacccc

SEQ ID NO: 203629 - DNA, 24 bp, Artificial sequence
  SiRNA target sequence
ctcccataacgattattgacccca

SEQ ID NO: 203630 - DNA, 24 bp, Artificial sequence
  SiRNA target sequence
tcccataacgattattgaccccaa

SEQ ID NO: 203631 - DNA, 24 bp, Artificial sequence
  SiRNA target sequence
cccataacgattattgaccccaac

SEQ ID NO: 203632 - DNA, 24 bp, Artificial sequence
  SiRNA target sequence
ccataacgattattgaccccaaca

SEQ ID NO: 203633 - DNA, 24 bp, Artificial sequence
  SiRNA target sequence
cataacgattattgaccccaacaa

SEQ ID NO: 203634 - DNA, 24 bp, Artificial sequence
  SiRNA target sequence
ataacgattattgaccccaacaac

SEQ ID NO: 203635 - DNA, 24 bp, Artificial sequence
  SiRNA target sequence
taacgattattgaccccaacaaca

SEQ ID NO: 203636 - DNA, 24 bp, Artificial sequence
  SiRNA target sequence
aacgattattgaccccaacaacaa

SEQ ID NO: 203637 - DNA, 24 bp, Artificial sequence
  SiRNA target sequence
acgattattgaccccaacaacaag

SEQ ID NO: 203638 - DNA, 24 bp, Artificial sequence
  SiRNA target sequence
cgattattgaccccaacaacaaga

SEQ ID NO: 203639 - DNA, 24 bp, Artificial sequence
  SiRNA target sequence
gattattgaccccaacaacaagaa

SEQ ID NO: 203640 - DNA, 24 bp, Artificial sequence
  SiRNA target sequence
attattgaccccaacaacaagaat

SEQ ID NO: 203641 - DNA, 24 bp, Artificial sequence
  SiRNA target sequence
ttattgaccccaacaacaagaata

SEQ ID NO: 203642 - DNA, 24 bp, Artificial sequence
  SiRNA target sequence
tattgaccccaacaacaagaataa

SEQ ID NO: 203643 - DNA, 24 bp, Artificial sequence
  SiRNA target sequence
attgaccccaacaacaagaataaa

SEQ ID NO: 203644 - DNA, 24 bp, Artificial sequence
  SiRNA target sequence
ttgaccccaacaacaagaataaag

SEQ ID NO: 203645 - DNA, 24 bp, Artificial sequence
  SiRNA target sequence
tgaccccaacaacaagaataaagg

SEQ ID NO: 203646 - DNA, 24 bp, Artificial sequence
  SiRNA target sequence
gaccccaacaacaagaataaaggt

SEQ ID NO: 203647 - DNA, 24 bp, Artificial sequence
  SiRNA target sequence
accccaacaacaagaataaaggtg

SEQ ID NO: 203648 - DNA, 24 bp, Artificial sequence
  SiRNA target sequence
ccccaacaacaagaataaaggtgt

SEQ ID NO: 203649 - DNA, 24 bp, Artificial sequence
  SiRNA target sequence
cccaacaacaagaataaaggtgtt

SEQ ID NO: 203650 - DNA, 24 bp, Artificial sequence
  SiRNA target sequence
ccaacaacaagaataaaggtgtta

SEQ ID NO: 203651 - DNA, 24 bp, Artificial sequence
  SiRNA target sequence
caacaacaagaataaaggtgttaa

SEQ ID NO: 203652 - DNA, 24 bp, Artificial sequence
  SiRNA target sequence
aacaacaagaataaaggtgttaag

SEQ ID NO: 203653 - DNA, 24 bp, Artificial sequence
  SiRNA target sequence
acaacaagaataaaggtgttaaga

SEQ ID NO: 203654 - DNA, 24 bp, Artificial sequence
  SiRNA target sequence
caacaagaataaaggtgttaagag

SEQ ID NO: 203655 - DNA, 24 bp, Artificial sequence
  SiRNA target sequence
aacaagaataaaggtgttaagagt

SEQ ID NO: 203656 - DNA, 24 bp, Artificial sequence
  SiRNA target sequence
acaagaataaaggtgttaagagtc

SEQ ID NO: 203657 - DNA, 24 bp, Artificial sequence
  SiRNA target sequence
caagaataaaggtgttaagagtcc

SEQ ID NO: 203658 - DNA, 24 bp, Artificial sequence
  SiRNA target sequence
aagaataaaggtgttaagagtccc

SEQ ID NO: 203659 - DNA, 24 bp, Artificial sequence
  SiRNA target sequence
agaataaaggtgttaagagtccca

SEQ ID NO: 203660 - DNA, 24 bp, Artificial sequence
  SiRNA target sequence
gaataaaggtgttaagagtcccat

SEQ ID NO: 203661 - DNA, 24 bp, Artificial sequence
  SiRNA target sequence
aataaaggtgttaagagtcccata

SEQ ID NO: 203662 - DNA, 24 bp, Artificial sequence
  SiRNA target sequence
ataaaggtgttaagagtcccatag

SEQ ID NO: 203663 - DNA, 24 bp, Artificial sequence
  SiRNA target sequence
taaaggtgttaagagtcccatagt

SEQ ID NO: 203664 - DNA, 24 bp, Artificial sequence
  SiRNA target sequence
aaaggtgttaagagtcccatagta

SEQ ID NO: 203665 - DNA, 24 bp, Artificial sequence
  SiRNA target sequence
aaggtgttaagagtcccatagtaa

SEQ ID NO: 203666 - DNA, 24 bp, Artificial sequence
  SiRNA target sequence
aggtgttaagagtcccatagtaat

SEQ ID NO: 203667 - DNA, 24 bp, Artificial sequence
  SiRNA target sequence
ggtgttaagagtcccatagtaatc

SEQ ID NO: 203668 - DNA, 24 bp, Artificial sequence
  SiRNA target sequence
gtgttaagagtcccatagtaatcc

SEQ ID NO: 203669 - DNA, 24 bp, Artificial sequence
  SiRNA target sequence
tgttaagagtcccatagtaatcca

SEQ ID NO: 203670 - DNA, 24 bp, Artificial sequence
  SiRNA target sequence
gttaagagtcccatagtaatccat

SEQ ID NO: 203671 - DNA, 24 bp, Artificial sequence
  SiRNA target sequence
ttaagagtcccatagtaatccatc

SEQ ID NO: 203672 - DNA, 24 bp, Artificial sequence
  SiRNA target sequence
taagagtcccatagtaatccatcc

SEQ ID NO: 203673 - DNA, 24 bp, Artificial sequence
  SiRNA target sequence
aagagtcccatagtaatccatcca

SEQ ID NO: 203674 - DNA, 24 bp, Artificial sequence
  SiRNA target sequence
agagtcccatagtaatccatccac

SEQ ID NO: 203675 - DNA, 24 bp, Artificial sequence
  SiRNA target sequence
gagtcccatagtaatccatccact

SEQ ID NO: 203676 - DNA, 24 bp, Artificial sequence
  SiRNA target sequence
agtcccatagtaatccatccacta

SEQ ID NO: 203677 - DNA, 24 bp, Artificial sequence
  SiRNA target sequence
gtcccatagtaatccatccactac

SEQ ID NO: 203678 - DNA, 24 bp, Artificial sequence
  SiRNA target sequence
tcccatagtaatccatccactact

SEQ ID NO: 203679 - DNA, 24 bp, Artificial sequence
  SiRNA target sequence
cccatagtaatccatccactactt

SEQ ID NO: 203680 - DNA, 24 bp, Artificial sequence
  SiRNA target sequence
ccatagtaatccatccactacttt

SEQ ID NO: 203681 - DNA, 24 bp, Artificial sequence
  SiRNA target sequence
catagtaatccatccactactttc

SEQ ID NO: 203682 - DNA, 24 bp, Artificial sequence
  SiRNA target sequence
atagtaatccatccactactttct

SEQ ID NO: 203683 - DNA, 24 bp, Artificial sequence
  SiRNA target sequence
tagtaatccatccactactttcta

SEQ ID NO: 203684 - DNA, 24 bp, Artificial sequence
  SiRNA target sequence
agtaatccatccactactttctac

SEQ ID NO: 203685 - DNA, 24 bp, Artificial sequence
  SiRNA target sequence
gtaatccatccactactttctact

SEQ ID NO: 203686 - DNA, 24 bp, Artificial sequence
  SiRNA target sequence
taatccatccactactttctacta

SEQ ID NO: 203687 - DNA, 24 bp, Artificial sequence
  SiRNA target sequence
aatccatccactactttctactaa

SEQ ID NO: 203688 - DNA, 24 bp, Artificial sequence
  SiRNA target sequence
atccatccactactttctactaaa

SEQ ID NO: 203689 - DNA, 24 bp, Artificial sequence
  SiRNA target sequence
tccatccactactttctactaaag

SEQ ID NO: 203690 - DNA, 24 bp, Artificial sequence
  SiRNA target sequence
ccatccactactttctactaaagt

SEQ ID NO: 203691 - DNA, 24 bp, Artificial sequence
  SiRNA target sequence
catccactactttctactaaagta

SEQ ID NO: 203692 - DNA, 24 bp, Artificial sequence
  SiRNA target sequence
atccactactttctactaaagtag

SEQ ID NO: 203693 - DNA, 24 bp, Artificial sequence
  SiRNA target sequence
tccactactttctactaaagtaga

SEQ ID NO: 203694 - DNA, 24 bp, Artificial sequence
  SiRNA target sequence
ccactactttctactaaagtagaa

SEQ ID NO: 203695 - DNA, 24 bp, Artificial sequence
  SiRNA target sequence
cactactttctactaaagtagaaa

SEQ ID NO: 203696 - DNA, 24 bp, Artificial sequence
  SiRNA target sequence
actactttctactaaagtagaaaa

SEQ ID NO: 203697 - DNA, 24 bp, Artificial sequence
  SiRNA target sequence
ctactttctactaaagtagaaaat

SEQ ID NO: 203698 - DNA, 24 bp, Artificial sequence
  SiRNA target sequence
tactttctactaaagtagaaaatg

SEQ ID NO: 203699 - DNA, 24 bp, Artificial sequence
  SiRNA target sequence
actttctactaaagtagaaaatgc

SEQ ID NO: 203700 - DNA, 24 bp, Artificial sequence
  SiRNA target sequence
ctttctactaaagtagaaaatgct

SEQ ID NO: 203701 - DNA, 24 bp, Artificial sequence
  SiRNA target sequence
tttctactaaagtagaaaatgctg

SEQ ID NO: 203702 - DNA, 24 bp, Artificial sequence
  SiRNA target sequence
ttctactaaagtagaaaatgctga

SEQ ID NO: 203703 - DNA, 24 bp, Artificial sequence
  SiRNA target sequence
tctactaaagtagaaaatgctgac

SEQ ID NO: 203704 - DNA, 24 bp, Artificial sequence
  SiRNA target sequence
ctactaaagtagaaaatgctgaca

SEQ ID NO: 203705 - DNA, 24 bp, Artificial sequence
  SiRNA target sequence
tactaaagtagaaaatgctgacaa

SEQ ID NO: 203706 - DNA, 24 bp, Artificial sequence
  SiRNA target sequence
actaaagtagaaaatgctgacaaa

SEQ ID NO: 203707 - DNA, 24 bp, Artificial sequence
  SiRNA target sequence
ctaaagtagaaaatgctgacaaat

SEQ ID NO: 203708 - DNA, 24 bp, Artificial sequence
  SiRNA target sequence
taaagtagaaaatgctgacaaatt

SEQ ID NO: 203709 - DNA, 24 bp, Artificial sequence
  SiRNA target sequence
aaagtagaaaatgctgacaaatta

SEQ ID NO: 203710 - DNA, 24 bp, Artificial sequence
  SiRNA target sequence
aagtagaaaatgctgacaaattaa

SEQ ID NO: 203711 - DNA, 24 bp, Artificial sequence
  SiRNA target sequence
agtagaaaatgctgacaaattaag

SEQ ID NO: 203712 - DNA, 24 bp, Artificial sequence
  SiRNA target sequence
gtagaaaatgctgacaaattaagt

SEQ ID NO: 203713 - DNA, 24 bp, Artificial sequence
  SiRNA target sequence
tagaaaatgctgacaaattaagtg

SEQ ID NO: 203714 - DNA, 24 bp, Artificial sequence
  SiRNA target sequence
agaaaatgctgacaaattaagtgt

SEQ ID NO: 203715 - DNA, 24 bp, Artificial sequence
  SiRNA target sequence
gaaaatgctgacaaattaagtgtt

SEQ ID NO: 203716 - DNA, 24 bp, Artificial sequence
  SiRNA target sequence
aaaatgctgacaaattaagtgtta

SEQ ID NO: 203717 - DNA, 24 bp, Artificial sequence
  SiRNA target sequence
aaatgctgacaaattaagtgttat

SEQ ID NO: 203718 - DNA, 24 bp, Artificial sequence
  SiRNA target sequence
aatgctgacaaattaagtgttatt

SEQ ID NO: 203719 - DNA, 24 bp, Artificial sequence
  SiRNA target sequence
atgctgacaaattaagtgttatta

SEQ ID NO: 203720 - DNA, 24 bp, Artificial sequence
  SiRNA target sequence
tgctgacaaattaagtgttattac

SEQ ID NO: 203721 - DNA, 24 bp, Artificial sequence
  SiRNA target sequence
gctgacaaattaagtgttattaca

SEQ ID NO: 203722 - DNA, 24 bp, Artificial sequence
  SiRNA target sequence
ctgacaaattaagtgttattacag

SEQ ID NO: 203723 - DNA, 24 bp, Artificial sequence
  SiRNA target sequence
tgacaaattaagtgttattacagt

SEQ ID NO: 203724 - DNA, 24 bp, Artificial sequence
  SiRNA target sequence
gacaaattaagtgttattacagta

SEQ ID NO: 203725 - DNA, 24 bp, Artificial sequence
  SiRNA target sequence
acaaattaagtgttattacagtaa

SEQ ID NO: 203726 - DNA, 24 bp, Artificial sequence
  SiRNA target sequence
caaattaagtgttattacagtaac

SEQ ID NO: 203727 - DNA, 24 bp, Artificial sequence
  SiRNA target sequence
aaattaagtgttattacagtaact

SEQ ID NO: 203728 - DNA, 24 bp, Artificial sequence
  SiRNA target sequence
aattaagtgttattacagtaactg

SEQ ID NO: 203729 - DNA, 24 bp, Artificial sequence
  SiRNA target sequence
attaagtgttattacagtaactgc

SEQ ID NO: 203730 - DNA, 24 bp, Artificial sequence
  SiRNA target sequence
ttaagtgttattacagtaactgct

SEQ ID NO: 203731 - DNA, 24 bp, Artificial sequence
  SiRNA target sequence
taagtgttattacagtaactgcta

SEQ ID NO: 203732 - DNA, 24 bp, Artificial sequence
  SiRNA target sequence
aagtgttattacagtaactgctac

SEQ ID NO: 203733 - DNA, 24 bp, Artificial sequence
  SiRNA target sequence
agtgttattacagtaactgctacc

SEQ ID NO: 203734 - DNA, 24 bp, Artificial sequence
  SiRNA target sequence
gtgttattacagtaactgctacca

SEQ ID NO: 203735 - DNA, 24 bp, Artificial sequence
  SiRNA target sequence
tgttattacagtaactgctaccaa

SEQ ID NO: 203736 - DNA, 24 bp, Artificial sequence
  SiRNA target sequence
gttattacagtaactgctaccaat

SEQ ID NO: 203737 - DNA, 24 bp, Artificial sequence
  SiRNA target sequence
ttattacagtaactgctaccaata

SEQ ID NO: 203738 - DNA, 24 bp, Artificial sequence
  SiRNA target sequence
tattacagtaactgctaccaatat

SEQ ID NO: 203739 - DNA, 24 bp, Artificial sequence
  SiRNA target sequence
attacagtaactgctaccaatatt

SEQ ID NO: 203740 - DNA, 24 bp, Artificial sequence
  SiRNA target sequence
ttacagtaactgctaccaatattt

SEQ ID NO: 203741 - DNA, 24 bp, Artificial sequence
  SiRNA target sequence
tacagtaactgctaccaatatttg

SEQ ID NO: 203742 - DNA, 24 bp, Artificial sequence
  SiRNA target sequence
acagtaactgctaccaatatttga

SEQ ID NO: 203743 - DNA, 24 bp, Artificial sequence
  SiRNA target sequence
cagtaactgctaccaatatttgat

SEQ ID NO: 203744 - DNA, 24 bp, Artificial sequence
  SiRNA target sequence
agtaactgctaccaatatttgatc

SEQ ID NO: 203745 - DNA, 24 bp, Artificial sequence
  SiRNA target sequence
gtaactgctaccaatatttgatct

SEQ ID NO: 203746 - DNA, 24 bp, Artificial sequence
  SiRNA target sequence
taactgctaccaatatttgatcta

SEQ ID NO: 203747 - DNA, 24 bp, Artificial sequence
  SiRNA target sequence
aactgctaccaatatttgatctat

SEQ ID NO: 203748 - DNA, 24 bp, Artificial sequence
  SiRNA target sequence
actgctaccaatatttgatctatt

SEQ ID NO: 203749 - DNA, 24 bp, Artificial sequence
  SiRNA target sequence
ctgctaccaatatttgatctattg

SEQ ID NO: 203750 - DNA, 24 bp, Artificial sequence
  SiRNA target sequence
tgctaccaatatttgatctattgt

SEQ ID NO: 203751 - DNA, 24 bp, Artificial sequence
  SiRNA target sequence
gctaccaatatttgatctattgta

SEQ ID NO: 203752 - DNA, 24 bp, Artificial sequence
  SiRNA target sequence
ctaccaatatttgatctattgtat

SEQ ID NO: 203753 - DNA, 24 bp, Artificial sequence
  SiRNA target sequence
taccaatatttgatctattgtatt

SEQ ID NO: 203754 - DNA, 24 bp, Artificial sequence
  SiRNA target sequence
accaatatttgatctattgtatta

SEQ ID NO: 203755 - DNA, 24 bp, Artificial sequence
  SiRNA target sequence
ccaatatttgatctattgtattaa

SEQ ID NO: 203756 - DNA, 24 bp, Artificial sequence
  SiRNA target sequence
caatatttgatctattgtattaaa

SEQ ID NO: 203757 - DNA, 24 bp, Artificial sequence
  SiRNA target sequence
aatatttgatctattgtattaaat

SEQ ID NO: 203758 - DNA, 24 bp, Artificial sequence
  SiRNA target sequence
atatttgatctattgtattaaatt

SEQ ID NO: 203759 - DNA, 24 bp, Artificial sequence
  SiRNA target sequence
tatttgatctattgtattaaattt

SEQ ID NO: 203760 - DNA, 24 bp, Artificial sequence
  SiRNA target sequence
atttgatctattgtattaaatttg

SEQ ID NO: 203761 - DNA, 24 bp, Artificial sequence
  SiRNA target sequence
tttgatctattgtattaaatttgc

SEQ ID NO: 203762 - DNA, 24 bp, Artificial sequence
  SiRNA target sequence
ttgatctattgtattaaatttgcc

SEQ ID NO: 203763 - DNA, 24 bp, Artificial sequence
  SiRNA target sequence
tgatctattgtattaaatttgccg

SEQ ID NO: 203764 - DNA, 24 bp, Artificial sequence
  SiRNA target sequence
gatctattgtattaaatttgccgg

SEQ ID NO: 203765 - DNA, 24 bp, Artificial sequence
  SiRNA target sequence
atctattgtattaaatttgccgga

SEQ ID NO: 203766 - DNA, 24 bp, Artificial sequence
  SiRNA target sequence
tctattgtattaaatttgccggag

SEQ ID NO: 203767 - DNA, 24 bp, Artificial sequence
  SiRNA target sequence
ctattgtattaaatttgccggagt

SEQ ID NO: 203768 - DNA, 24 bp, Artificial sequence
  SiRNA target sequence
tattgtattaaatttgccggagta

SEQ ID NO: 203769 - DNA, 24 bp, Artificial sequence
  SiRNA target sequence
attgtattaaatttgccggagtat

SEQ ID NO: 203770 - DNA, 24 bp, Artificial sequence
  SiRNA target sequence
ttgtattaaatttgccggagtatt

SEQ ID NO: 203771 - DNA, 24 bp, Artificial sequence
  SiRNA target sequence
tgtattaaatttgccggagtattc

SEQ ID NO: 203772 - DNA, 24 bp, Artificial sequence
  SiRNA target sequence
gtattaaatttgccggagtattct

SEQ ID NO: 203773 - DNA, 24 bp, Artificial sequence
  SiRNA target sequence
tattaaatttgccggagtattctc

SEQ ID NO: 203774 - DNA, 24 bp, Artificial sequence
  SiRNA target sequence
attaaatttgccggagtattctcc

SEQ ID NO: 203775 - DNA, 24 bp, Artificial sequence
  SiRNA target sequence
ttaaatttgccggagtattctcct

SEQ ID NO: 203776 - DNA, 24 bp, Artificial sequence
  SiRNA target sequence
taaatttgccggagtattctccta

SEQ ID NO: 203777 - DNA, 24 bp, Artificial sequence
  SiRNA target sequence
aaatttgccggagtattctcctac

SEQ ID NO: 203778 - DNA, 24 bp, Artificial sequence
  SiRNA target sequence
aatttgccggagtattctcctacc

SEQ ID NO: 203779 - DNA, 24 bp, Artificial sequence
  SiRNA target sequence
atttgccggagtattctcctacct

SEQ ID NO: 203780 - DNA, 24 bp, Artificial sequence
  SiRNA target sequence
tttgccggagtattctcctacctc

SEQ ID NO: 203781 - DNA, 24 bp, Artificial sequence
  SiRNA target sequence
ttgccggagtattctcctacctct

SEQ ID NO: 203782 - DNA, 24 bp, Artificial sequence
  SiRNA target sequence
tgccggagtattctcctacctcta

SEQ ID NO: 203783 - DNA, 24 bp, Artificial sequence
  SiRNA target sequence
gccggagtattctcctacctctaa

SEQ ID NO: 203784 - DNA, 24 bp, Artificial sequence
  SiRNA target sequence
ccggagtattctcctacctctaat

SEQ ID NO: 203785 - DNA, 24 bp, Artificial sequence
  SiRNA target sequence
cggagtattctcctacctctaatc

SEQ ID NO: 203786 - DNA, 24 bp, Artificial sequence
  SiRNA target sequence
ggagtattctcctacctctaatcc

SEQ ID NO: 203787 - DNA, 24 bp, Artificial sequence
  SiRNA target sequence
gagtattctcctacctctaatcct

SEQ ID NO: 203788 - DNA, 24 bp, Artificial sequence
  SiRNA target sequence
agtattctcctacctctaatccta

SEQ ID NO: 203789 - DNA, 24 bp, Artificial sequence
  SiRNA target sequence
gtattctcctacctctaatcctaa

SEQ ID NO: 203790 - DNA, 24 bp, Artificial sequence
  SiRNA target sequence
tattctcctacctctaatcctaaa

SEQ ID NO: 203791 - DNA, 24 bp, Artificial sequence
  SiRNA target sequence
attctcctacctctaatcctaaac

SEQ ID NO: 203792 - DNA, 24 bp, Artificial sequence
  SiRNA target sequence
ttctcctacctctaatcctaaact

SEQ ID NO: 203793 - DNA, 24 bp, Artificial sequence
  SiRNA target sequence
tctcctacctctaatcctaaactt

SEQ ID NO: 203794 - DNA, 24 bp, Artificial sequence
  SiRNA target sequence
ctcctacctctaatcctaaacttt

SEQ ID NO: 203795 - DNA, 24 bp, Artificial sequence
  SiRNA target sequence
tcctacctctaatcctaaactttt

SEQ ID NO: 203796 - DNA, 24 bp, Artificial sequence
  SiRNA target sequence
cctacctctaatcctaaacttttt

SEQ ID NO: 203797 - DNA, 24 bp, Artificial sequence
  SiRNA target sequence
ctacctctaatcctaaactttttg

SEQ ID NO: 203798 - DNA, 24 bp, Artificial sequence
  SiRNA target sequence
tacctctaatcctaaactttttga

SEQ ID NO: 203799 - DNA, 24 bp, Artificial sequence
  SiRNA target sequence
acctctaatcctaaactttttgac

SEQ ID NO: 203800 - DNA, 24 bp, Artificial sequence
  SiRNA target sequence
cctctaatcctaaactttttgacg

SEQ ID NO: 203801 - DNA, 24 bp, Artificial sequence
  SiRNA target sequence
ctctaatcctaaactttttgacgc

SEQ ID NO: 203802 - DNA, 24 bp, Artificial sequence
  SiRNA target sequence
tctaatcctaaactttttgacgca

SEQ ID NO: 203803 - DNA, 24 bp, Artificial sequence
  SiRNA target sequence
ctaatcctaaactttttgacgcag

SEQ ID NO: 203804 - DNA, 24 bp, Artificial sequence
  SiRNA target sequence
taatcctaaactttttgacgcagc

SEQ ID NO: 203805 - DNA, 24 bp, Artificial sequence
  SiRNA target sequence
aatcctaaactttttgacgcagct

SEQ ID NO: 203806 - DNA, 24 bp, Artificial sequence
  SiRNA target sequence
atcctaaactttttgacgcagctt

SEQ ID NO: 203807 - DNA, 24 bp, Artificial sequence
  SiRNA target sequence
tcctaaactttttgacgcagcttt

SEQ ID NO: 203808 - DNA, 24 bp, Artificial sequence
  SiRNA target sequence
cctaaactttttgacgcagcttta

SEQ ID NO: 203809 - DNA, 24 bp, Artificial sequence
  SiRNA target sequence
ctaaactttttgacgcagctttaa

SEQ ID NO: 203810 - DNA, 24 bp, Artificial sequence
  SiRNA target sequence
taaactttttgacgcagctttaat

SEQ ID NO: 203811 - DNA, 24 bp, Artificial sequence
  SiRNA target sequence
aaactttttgacgcagctttaatt

SEQ ID NO: 203812 - DNA, 24 bp, Artificial sequence
  SiRNA target sequence
aactttttgacgcagctttaattc

SEQ ID NO: 203813 - DNA, 24 bp, Artificial sequence
  SiRNA target sequence
actttttgacgcagctttaattcc

SEQ ID NO: 203814 - DNA, 24 bp, Artificial sequence
  SiRNA target sequence
ctttttgacgcagctttaattcct

SEQ ID NO: 203815 - DNA, 24 bp, Artificial sequence
  SiRNA target sequence
tttttgacgcagctttaattcctg

SEQ ID NO: 203816 - DNA, 24 bp, Artificial sequence
  SiRNA target sequence
ttttgacgcagctttaattcctgc

SEQ ID NO: 203817 - DNA, 24 bp, Artificial sequence
  SiRNA target sequence
tttgacgcagctttaattcctgct

SEQ ID NO: 203818 - DNA, 24 bp, Artificial sequence
  SiRNA target sequence
ttgacgcagctttaattcctgctt

SEQ ID NO: 203819 - DNA, 24 bp, Artificial sequence
  SiRNA target sequence
tgacgcagctttaattcctgcttt

SEQ ID NO: 203820 - DNA, 24 bp, Artificial sequence
  SiRNA target sequence
gacgcagctttaattcctgcttta

SEQ ID NO: 203821 - DNA, 24 bp, Artificial sequence
  SiRNA target sequence
acgcagctttaattcctgctttat

SEQ ID NO: 203822 - DNA, 24 bp, Artificial sequence
  SiRNA target sequence
cgcagctttaattcctgctttata

SEQ ID NO: 203823 - DNA, 24 bp, Artificial sequence
  SiRNA target sequence
gcagctttaattcctgctttatag

SEQ ID NO: 203824 - DNA, 24 bp, Artificial sequence
  SiRNA target sequence
cagctttaattcctgctttataga

SEQ ID NO: 203825 - DNA, 24 bp, Artificial sequence
  SiRNA target sequence
agctttaattcctgctttatagac

SEQ ID NO: 203826 - DNA, 24 bp, Artificial sequence
  SiRNA target sequence
gctttaattcctgctttatagaca

SEQ ID NO: 203827 - DNA, 24 bp, Artificial sequence
  SiRNA target sequence
ctttaattcctgctttatagacag

SEQ ID NO: 203828 - DNA, 24 bp, Artificial sequence
  SiRNA target sequence
tttaattcctgctttatagacaga

SEQ ID NO: 203829 - DNA, 24 bp, Artificial sequence
  SiRNA target sequence
ttaattcctgctttatagacagat

SEQ ID NO: 203830 - DNA, 24 bp, Artificial sequence
  SiRNA target sequence
taattcctgctttatagacagatt

SEQ ID NO: 203831 - DNA, 24 bp, Artificial sequence
  SiRNA target sequence
aattcctgctttatagacagattc

SEQ ID NO: 203832 - DNA, 24 bp, Artificial sequence
  SiRNA target sequence
attcctgctttatagacagattca

SEQ ID NO: 203833 - DNA, 24 bp, Artificial sequence
  SiRNA target sequence
ttcctgctttatagacagattcaa

SEQ ID NO: 203834 - DNA, 24 bp, Artificial sequence
  SiRNA target sequence
tcctgctttatagacagattcaat

SEQ ID NO: 203835 - DNA, 24 bp, Artificial sequence
  SiRNA target sequence
cctgctttatagacagattcaatt

SEQ ID NO: 203836 - DNA, 24 bp, Artificial sequence
  SiRNA target sequence
ctgctttatagacagattcaatta

SEQ ID NO: 203837 - DNA, 24 bp, Artificial sequence
  SiRNA target sequence
tgctttatagacagattcaattaa

SEQ ID NO: 203838 - DNA, 24 bp, Artificial sequence
  SiRNA target sequence
gctttatagacagattcaattaaa

SEQ ID NO: 203839 - DNA, 24 bp, Artificial sequence
  SiRNA target sequence
ctttatagacagattcaattaaat

SEQ ID NO: 203840 - DNA, 24 bp, Artificial sequence
  SiRNA target sequence
tttatagacagattcaattaaatt

SEQ ID NO: 203841 - DNA, 24 bp, Artificial sequence
  SiRNA target sequence
ttatagacagattcaattaaatta

SEQ ID NO: 203842 - DNA, 24 bp, Artificial sequence
  SiRNA target sequence
tatagacagattcaattaaattaa

SEQ ID NO: 203843 - DNA, 24 bp, Artificial sequence
  SiRNA target sequence
atagacagattcaattaaattaaa

SEQ ID NO: 203844 - DNA, 24 bp, Artificial sequence
  SiRNA target sequence
tagacagattcaattaaattaaat

SEQ ID NO: 203845 - DNA, 24 bp, Artificial sequence
  SiRNA target sequence
agacagattcaattaaattaaatg

SEQ ID NO: 203846 - DNA, 24 bp, Artificial sequence
  SiRNA target sequence
gacagattcaattaaattaaatgt

SEQ ID NO: 203847 - DNA, 24 bp, Artificial sequence
  SiRNA target sequence
acagattcaattaaattaaatgtt

SEQ ID NO: 203848 - DNA, 24 bp, Artificial sequence
  SiRNA target sequence
cagattcaattaaattaaatgtta

SEQ ID NO: 203849 - DNA, 24 bp, Artificial sequence
  SiRNA target sequence
agattcaattaaattaaatgttat

SEQ ID NO: 203850 - DNA, 24 bp, Artificial sequence
  SiRNA target sequence
gattcaattaaattaaatgttata

SEQ ID NO: 203851 - DNA, 24 bp, Artificial sequence
  SiRNA target sequence
attcaattaaattaaatgttatat

SEQ ID NO: 203852 - DNA, 24 bp, Artificial sequence
  SiRNA target sequence
ttcaattaaattaaatgttatatt

SEQ ID NO: 203853 - DNA, 24 bp, Artificial sequence
  SiRNA target sequence
tcaattaaattaaatgttatattg

SEQ ID NO: 203854 - DNA, 24 bp, Artificial sequence
  SiRNA target sequence
caattaaattaaatgttatattgt

SEQ ID NO: 203855 - DNA, 24 bp, Artificial sequence
  SiRNA target sequence
aattaaattaaatgttatattgta

SEQ ID NO: 203856 - DNA, 24 bp, Artificial sequence
  SiRNA target sequence
attaaattaaatgttatattgtaa

SEQ ID NO: 203857 - DNA, 24 bp, Artificial sequence
  SiRNA target sequence
ttaaattaaatgttatattgtaaa

SEQ ID NO: 203858 - DNA, 24 bp, Artificial sequence
  SiRNA target sequence
taaattaaatgttatattgtaaaa

SEQ ID NO: 203859 - DNA, 24 bp, Artificial sequence
  SiRNA target sequence
aaattaaatgttatattgtaaaaa

SEQ ID NO: 203860 - DNA, 24 bp, Artificial sequence
  SiRNA target sequence
aattaaatgttatattgtaaaaaa

SEQ ID NO: 203861 - DNA, 24 bp, Artificial sequence
  SiRNA target sequence
attaaatgttatattgtaaaaaaa

SEQ ID NO: 203862 - DNA, 24 bp, Artificial sequence
  SiRNA target sequence
ttaaatgttatattgtaaaaaaag

SEQ ID NO: 203863 - DNA, 24 bp, Artificial sequence
  SiRNA target sequence
taaatgttatattgtaaaaaaaga

SEQ ID NO: 203864 - DNA, 24 bp, Artificial sequence
  SiRNA target sequence
aaatgttatattgtaaaaaaagac

SEQ ID NO: 203865 - DNA, 24 bp, Artificial sequence
  SiRNA target sequence
aatgttatattgtaaaaaaagact

SEQ ID NO: 203866 - DNA, 24 bp, Artificial sequence
  SiRNA target sequence
atgttatattgtaaaaaaagacta

SEQ ID NO: 203867 - DNA, 24 bp, Artificial sequence
  SiRNA target sequence
tgttatattgtaaaaaaagactat

SEQ ID NO: 203868 - DNA, 24 bp, Artificial sequence
  SiRNA target sequence
gttatattgtaaaaaaagactatt

SEQ ID NO: 203869 - DNA, 24 bp, Artificial sequence
  SiRNA target sequence
ttatattgtaaaaaaagactatta

SEQ ID NO: 203870 - DNA, 24 bp, Artificial sequence
  SiRNA target sequence
tatattgtaaaaaaagactattat

SEQ ID NO: 203871 - DNA, 24 bp, Artificial sequence
  SiRNA target sequence
atattgtaaaaaaagactattata

SEQ ID NO: 203872 - DNA, 24 bp, Artificial sequence
  SiRNA target sequence
tattgtaaaaaaagactattatac

SEQ ID NO: 203873 - DNA, 24 bp, Artificial sequence
  SiRNA target sequence
attgtaaaaaaagactattataca

SEQ ID NO: 203874 - DNA, 24 bp, Artificial sequence
  SiRNA target sequence
ttgtaaaaaaagactattatacaa

SEQ ID NO: 203875 - DNA, 24 bp, Artificial sequence
  SiRNA target sequence
tgtaaaaaaagactattatacaaa

SEQ ID NO: 203876 - DNA, 24 bp, Artificial sequence
  SiRNA target sequence
gtaaaaaaagactattatacaaag

SEQ ID NO: 203877 - DNA, 24 bp, Artificial sequence
  SiRNA target sequence
taaaaaaagactattatacaaagt

SEQ ID NO: 203878 - DNA, 24 bp, Artificial sequence
  SiRNA target sequence
aaaaaaagactattatacaaagtg

SEQ ID NO: 203879 - DNA, 24 bp, Artificial sequence
  SiRNA target sequence
aaaaaagactattatacaaagtga

SEQ ID NO: 203880 - DNA, 24 bp, Artificial sequence
  SiRNA target sequence
aaaaagactattatacaaagtgac

SEQ ID NO: 203881 - DNA, 24 bp, Artificial sequence
  SiRNA target sequence
aaaagactattatacaaagtgaca

SEQ ID NO: 203882 - DNA, 24 bp, Artificial sequence
  SiRNA target sequence
aaagactattatacaaagtgacat

SEQ ID NO: 203883 - DNA, 24 bp, Artificial sequence
  SiRNA target sequence
aagactattatacaaagtgacatt

SEQ ID NO: 203884 - DNA, 24 bp, Artificial sequence
  SiRNA target sequence
agactattatacaaagtgacatta

SEQ ID NO: 203885 - DNA, 24 bp, Artificial sequence
  SiRNA target sequence
gactattatacaaagtgacattaa

SEQ ID NO: 203886 - DNA, 24 bp, Artificial sequence
  SiRNA target sequence
actattatacaaagtgacattaat

SEQ ID NO: 203887 - DNA, 24 bp, Artificial sequence
  SiRNA target sequence
ctattatacaaagtgacattaata

SEQ ID NO: 203888 - DNA, 24 bp, Artificial sequence
  SiRNA target sequence
tattatacaaagtgacattaataa

SEQ ID NO: 203889 - DNA, 24 bp, Artificial sequence
  SiRNA target sequence
attatacaaagtgacattaataat

SEQ ID NO: 203890 - DNA, 24 bp, Artificial sequence
  SiRNA target sequence
ttatacaaagtgacattaataatt

SEQ ID NO: 203891 - DNA, 24 bp, Artificial sequence
  SiRNA target sequence
tatacaaagtgacattaataattt

SEQ ID NO: 203892 - DNA, 24 bp, Artificial sequence
  SiRNA target sequence
atacaaagtgacattaataatttt

SEQ ID NO: 203893 - DNA, 24 bp, Artificial sequence
  SiRNA target sequence
tacaaagtgacattaataattttg

SEQ ID NO: 203894 - DNA, 24 bp, Artificial sequence
  SiRNA target sequence
acaaagtgacattaataattttga

SEQ ID NO: 203895 - DNA, 24 bp, Artificial sequence
  SiRNA target sequence
caaagtgacattaataattttgat

SEQ ID NO: 203896 - DNA, 24 bp, Artificial sequence
  SiRNA target sequence
aaagtgacattaataattttgatt

SEQ ID NO: 203897 - DNA, 24 bp, Artificial sequence
  SiRNA target sequence
aagtgacattaataattttgattt

SEQ ID NO: 203898 - DNA, 24 bp, Artificial sequence
  SiRNA target sequence
agtgacattaataattttgatttc

SEQ ID NO: 203899 - DNA, 24 bp, Artificial sequence
  SiRNA target sequence
gtgacattaataattttgatttca

SEQ ID NO: 203900 - DNA, 24 bp, Artificial sequence
  SiRNA target sequence
tgacattaataattttgatttcat

SEQ ID NO: 203901 - DNA, 24 bp, Artificial sequence
  SiRNA target sequence
gacattaataattttgatttcatc

SEQ ID NO: 203902 - DNA, 24 bp, Artificial sequence
  SiRNA target sequence
acattaataattttgatttcatca

SEQ ID NO: 203903 - DNA, 24 bp, Artificial sequence
  SiRNA target sequence
cattaataattttgatttcatcat

SEQ ID NO: 203904 - DNA, 24 bp, Artificial sequence
  SiRNA target sequence
attaataattttgatttcatcatt

SEQ ID NO: 203905 - DNA, 24 bp, Artificial sequence
  SiRNA target sequence
ttaataattttgatttcatcatta

SEQ ID NO: 203906 - DNA, 24 bp, Artificial sequence
  SiRNA target sequence
taataattttgatttcatcattat

SEQ ID NO: 203907 - DNA, 24 bp, Artificial sequence
  SiRNA target sequence
aataattttgatttcatcattata

SEQ ID NO: 203908 - DNA, 24 bp, Artificial sequence
  SiRNA target sequence
ataattttgatttcatcattatac

SEQ ID NO: 203909 - DNA, 24 bp, Artificial sequence
  SiRNA target sequence
taattttgatttcatcattatact

SEQ ID NO: 203910 - DNA, 24 bp, Artificial sequence
  SiRNA target sequence
aattttgatttcatcattatacta

SEQ ID NO: 203911 - DNA, 24 bp, Artificial sequence
  SiRNA target sequence
attttgatttcatcattatactaa

SEQ ID NO: 203912 - DNA, 24 bp, Artificial sequence
  SiRNA target sequence
ttttgatttcatcattatactaat

SEQ ID NO: 203913 - DNA, 24 bp, Artificial sequence
  SiRNA target sequence
tttgatttcatcattatactaata

SEQ ID NO: 203914 - DNA, 24 bp, Artificial sequence
  SiRNA target sequence
ttgatttcatcattatactaatac

SEQ ID NO: 203915 - DNA, 24 bp, Artificial sequence
  SiRNA target sequence
tgatttcatcattatactaatacc

SEQ ID NO: 203916 - DNA, 24 bp, Artificial sequence
  SiRNA target sequence
gatttcatcattatactaatacct

SEQ ID NO: 203917 - DNA, 24 bp, Artificial sequence
  SiRNA target sequence
atttcatcattatactaatacctt

SEQ ID NO: 203918 - DNA, 24 bp, Artificial sequence
  SiRNA target sequence
tttcatcattatactaataccttc

SEQ ID NO: 203919 - DNA, 24 bp, Artificial sequence
  SiRNA target sequence
ttcatcattatactaataccttcg

SEQ ID NO: 203920 - DNA, 24 bp, Artificial sequence
  SiRNA target sequence
tcatcattatactaataccttcgg

SEQ ID NO: 203921 - DNA, 24 bp, Artificial sequence
  SiRNA target sequence
catcattatactaataccttcgga

SEQ ID NO: 203922 - DNA, 24 bp, Artificial sequence
  SiRNA target sequence
atcattatactaataccttcggag

SEQ ID NO: 203923 - DNA, 24 bp, Artificial sequence
  SiRNA target sequence
tcattatactaataccttcggaga

SEQ ID NO: 203924 - DNA, 24 bp, Artificial sequence
  SiRNA target sequence
cattatactaataccttcggagaa

SEQ ID NO: 203925 - DNA, 24 bp, Artificial sequence
  SiRNA target sequence
attatactaataccttcggagaaa

SEQ ID NO: 203926 - DNA, 24 bp, Artificial sequence
  SiRNA target sequence
ttatactaataccttcggagaaac

SEQ ID NO: 203927 - DNA, 24 bp, Artificial sequence
  SiRNA target sequence
tatactaataccttcggagaaacc

SEQ ID NO: 203928 - DNA, 24 bp, Artificial sequence
  SiRNA target sequence
atactaataccttcggagaaacct

SEQ ID NO: 203929 - DNA, 24 bp, Artificial sequence
  SiRNA target sequence
tactaataccttcggagaaaccta

SEQ ID NO: 203930 - DNA, 24 bp, Artificial sequence
  SiRNA target sequence
actaataccttcggagaaacctac

SEQ ID NO: 203931 - DNA, 24 bp, Artificial sequence
  SiRNA target sequence
ctaataccttcggagaaacctaca

SEQ ID NO: 203932 - DNA, 24 bp, Artificial sequence
  SiRNA target sequence
taataccttcggagaaacctacac

SEQ ID NO: 203933 - DNA, 24 bp, Artificial sequence
  SiRNA target sequence
aataccttcggagaaacctacact

SEQ ID NO: 203934 - DNA, 24 bp, Artificial sequence
  SiRNA target sequence
ataccttcggagaaacctacacta

SEQ ID NO: 203935 - DNA, 24 bp, Artificial sequence
  SiRNA target sequence
taccttcggagaaacctacactaa

SEQ ID NO: 203936 - DNA, 24 bp, Artificial sequence
  SiRNA target sequence
accttcggagaaacctacactaac

SEQ ID NO: 203937 - DNA, 24 bp, Artificial sequence
  SiRNA target sequence
ccttcggagaaacctacactaact

SEQ ID NO: 203938 - DNA, 24 bp, Artificial sequence
  SiRNA target sequence
cttcggagaaacctacactaactt

SEQ ID NO: 203939 - DNA, 24 bp, Artificial sequence
  SiRNA target sequence
ttcggagaaacctacactaacttt

SEQ ID NO: 203940 - DNA, 24 bp, Artificial sequence
  SiRNA target sequence
tcggagaaacctacactaactttt

SEQ ID NO: 203941 - DNA, 24 bp, Artificial sequence
  SiRNA target sequence
cggagaaacctacactaacttttt

SEQ ID NO: 203942 - DNA, 24 bp, Artificial sequence
  SiRNA target sequence
ggagaaacctacactaactttttg

SEQ ID NO: 203943 - DNA, 24 bp, Artificial sequence
  SiRNA target sequence
gagaaacctacactaactttttgt

SEQ ID NO: 203944 - DNA, 24 bp, Artificial sequence
  SiRNA target sequence
agaaacctacactaactttttgtt

SEQ ID NO: 203945 - DNA, 24 bp, Artificial sequence
  SiRNA target sequence
gaaacctacactaactttttgttt

SEQ ID NO: 203946 - DNA, 24 bp, Artificial sequence
  SiRNA target sequence
aaacctacactaactttttgtttc

SEQ ID NO: 203947 - DNA, 24 bp, Artificial sequence
  SiRNA target sequence
aacctacactaactttttgtttct

SEQ ID NO: 203948 - DNA, 24 bp, Artificial sequence
  SiRNA target sequence
acctacactaactttttgtttctt

SEQ ID NO: 203949 - DNA, 24 bp, Artificial sequence
  SiRNA target sequence
cctacactaactttttgtttcttt

SEQ ID NO: 203950 - DNA, 24 bp, Artificial sequence
  SiRNA target sequence
ctacactaactttttgtttctttt

SEQ ID NO: 203951 - DNA, 24 bp, Artificial sequence
  SiRNA target sequence
tacactaactttttgtttcttttt

SEQ ID NO: 203952 - DNA, 24 bp, Artificial sequence
  SiRNA target sequence
acactaactttttgtttctttttt

SEQ ID NO: 203953 - DNA, 24 bp, Artificial sequence
  SiRNA target sequence
cactaactttttgtttctttttta

SEQ ID NO: 203954 - DNA, 24 bp, Artificial sequence
  SiRNA target sequence
actaactttttgtttcttttttat

SEQ ID NO: 203955 - DNA, 24 bp, Artificial sequence
  SiRNA target sequence
ctaactttttgtttcttttttatc

SEQ ID NO: 203956 - DNA, 24 bp, Artificial sequence
  SiRNA target sequence
taactttttgtttcttttttatcg

SEQ ID NO: 203957 - DNA, 24 bp, Artificial sequence
  SiRNA target sequence
aactttttgtttcttttttatcgt

SEQ ID NO: 203958 - DNA, 24 bp, Artificial sequence
  SiRNA target sequence
actttttgtttcttttttatcgta

SEQ ID NO: 203959 - DNA, 24 bp, Artificial sequence
  SiRNA target sequence
ctttttgtttcttttttatcgtat

SEQ ID NO: 203960 - DNA, 24 bp, Artificial sequence
  SiRNA target sequence
tttttgtttcttttttatcgtatt

SEQ ID NO: 203961 - DNA, 24 bp, Artificial sequence
  SiRNA target sequence
ttttgtttcttttttatcgtatta

SEQ ID NO: 203962 - DNA, 24 bp, Artificial sequence
  SiRNA target sequence
tttgtttcttttttatcgtattag

SEQ ID NO: 203963 - DNA, 24 bp, Artificial sequence
  SiRNA target sequence
ttgtttcttttttatcgtattaga

SEQ ID NO: 203964 - DNA, 24 bp, Artificial sequence
  SiRNA target sequence
tgtttcttttttatcgtattagaa

SEQ ID NO: 203965 - DNA, 24 bp, Artificial sequence
  SiRNA target sequence
gtttcttttttatcgtattagaag

SEQ ID NO: 203966 - DNA, 24 bp, Artificial sequence
  SiRNA target sequence
tttcttttttatcgtattagaagg

SEQ ID NO: 203967 - DNA, 24 bp, Artificial sequence
  SiRNA target sequence
ttcttttttatcgtattagaaggt

SEQ ID NO: 203968 - DNA, 24 bp, Artificial sequence
  SiRNA target sequence
tcttttttatcgtattagaaggta

SEQ ID NO: 203969 - DNA, 24 bp, Artificial sequence
  SiRNA target sequence
cttttttatcgtattagaaggtat

SEQ ID NO: 203970 - DNA, 24 bp, Artificial sequence
  SiRNA target sequence
ttttttatcgtattagaaggtata

SEQ ID NO: 203971 - DNA, 24 bp, Artificial sequence
  SiRNA target sequence
tttttatcgtattagaaggtataa

SEQ ID NO: 203972 - DNA, 24 bp, Artificial sequence
  SiRNA target sequence
ttttatcgtattagaaggtataaa

SEQ ID NO: 203973 - DNA, 24 bp, Artificial sequence
  SiRNA target sequence
tttatcgtattagaaggtataaat

SEQ ID NO: 203974 - DNA, 24 bp, Artificial sequence
  SiRNA target sequence
ttatcgtattagaaggtataaata

SEQ ID NO: 203975 - DNA, 24 bp, Artificial sequence
  SiRNA target sequence
tatcgtattagaaggtataaatat

SEQ ID NO: 203976 - DNA, 24 bp, Artificial sequence
  SiRNA target sequence
atcgtattagaaggtataaatatt

SEQ ID NO: 203977 - DNA, 24 bp, Artificial sequence
  SiRNA target sequence
tcgtattagaaggtataaatattg

SEQ ID NO: 203978 - DNA, 24 bp, Artificial sequence
  SiRNA target sequence
cgtattagaaggtataaatattgg

SEQ ID NO: 203979 - DNA, 24 bp, Artificial sequence
  SiRNA target sequence
gtattagaaggtataaatattggt

SEQ ID NO: 203980 - DNA, 24 bp, Artificial sequence
  SiRNA target sequence
tattagaaggtataaatattggta

SEQ ID NO: 203981 - DNA, 24 bp, Artificial sequence
  SiRNA target sequence
attagaaggtataaatattggtac

SEQ ID NO: 203982 - DNA, 24 bp, Artificial sequence
  SiRNA target sequence
ttagaaggtataaatattggtaca

SEQ ID NO: 203983 - DNA, 24 bp, Artificial sequence
  SiRNA target sequence
tagaaggtataaatattggtacac

SEQ ID NO: 203984 - DNA, 24 bp, Artificial sequence
  SiRNA target sequence
agaaggtataaatattggtacact

SEQ ID NO: 203985 - DNA, 24 bp, Artificial sequence
  SiRNA target sequence
gaaggtataaatattggtacactc

SEQ ID NO: 203986 - DNA, 24 bp, Artificial sequence
  SiRNA target sequence
aaggtataaatattggtacactca

SEQ ID NO: 203987 - DNA, 24 bp, Artificial sequence
  SiRNA target sequence
aggtataaatattggtacactcat

SEQ ID NO: 203988 - DNA, 24 bp, Artificial sequence
  SiRNA target sequence
ggtataaatattggtacactcatt

SEQ ID NO: 203989 - DNA, 24 bp, Artificial sequence
  SiRNA target sequence
gtataaatattggtacactcatta

SEQ ID NO: 203990 - DNA, 24 bp, Artificial sequence
  SiRNA target sequence
tataaatattggtacactcattat

SEQ ID NO: 203991 - DNA, 24 bp, Artificial sequence
  SiRNA target sequence
ataaatattggtacactcattatt

SEQ ID NO: 203992 - DNA, 24 bp, Artificial sequence
  SiRNA target sequence
taaatattggtacactcattattt

SEQ ID NO: 203993 - DNA, 24 bp, Artificial sequence
  SiRNA target sequence
aaatattggtacactcattatttt

SEQ ID NO: 203994 - DNA, 24 bp, Artificial sequence
  SiRNA target sequence
aatattggtacactcattatttta

SEQ ID NO: 203995 - DNA, 24 bp, Artificial sequence
  SiRNA target sequence
atattggtacactcattattttat

SEQ ID NO: 203996 - DNA, 24 bp, Artificial sequence
  SiRNA target sequence
tattggtacactcattattttatt

SEQ ID NO: 203997 - DNA, 24 bp, Artificial sequence
  SiRNA target sequence
attggtacactcattattttattc

SEQ ID NO: 203998 - DNA, 24 bp, Artificial sequence
  SiRNA target sequence
ttggtacactcattattttattct

SEQ ID NO: 203999 - DNA, 24 bp, Artificial sequence
  SiRNA target sequence
tggtacactcattattttattctc

SEQ ID NO: 204000 - DNA, 24 bp, Artificial sequence
  SiRNA target sequence
ggtacactcattattttattctcg

SEQ ID NO: 204001 - DNA, 24 bp, Artificial sequence
  SiRNA target sequence
gtacactcattattttattctcga

SEQ ID NO: 204002 - DNA, 24 bp, Artificial sequence
  SiRNA target sequence
tacactcattattttattctcgaa

SEQ ID NO: 204003 - DNA, 24 bp, Artificial sequence
  SiRNA target sequence
acactcattattttattctcgaaa

SEQ ID NO: 204004 - DNA, 24 bp, Artificial sequence
  SiRNA target sequence
cactcattattttattctcgaaat

SEQ ID NO: 204005 - DNA, 24 bp, Artificial sequence
  SiRNA target sequence
actcattattttattctcgaaata

SEQ ID NO: 204006 - DNA, 24 bp, Artificial sequence
  SiRNA target sequence
ctcattattttattctcgaaataa

SEQ ID NO: 204007 - DNA, 24 bp, Artificial sequence
  SiRNA target sequence
tcattattttattctcgaaataat

SEQ ID NO: 204008 - DNA, 24 bp, Artificial sequence
  SiRNA target sequence
cattattttattctcgaaataata

SEQ ID NO: 204009 - DNA, 24 bp, Artificial sequence
  SiRNA target sequence
attattttattctcgaaataatat

SEQ ID NO: 204010 - DNA, 24 bp, Artificial sequence
  SiRNA target sequence
ttattttattctcgaaataatatt

SEQ ID NO: 204011 - DNA, 24 bp, Artificial sequence
  SiRNA target sequence
tattttattctcgaaataatattt

SEQ ID NO: 204012 - DNA, 24 bp, Artificial sequence
  SiRNA target sequence
attttattctcgaaataatatttc

SEQ ID NO: 204013 - DNA, 24 bp, Artificial sequence
  SiRNA target sequence
ttttattctcgaaataatatttca

SEQ ID NO: 204014 - DNA, 24 bp, Artificial sequence
  SiRNA target sequence
tttattctcgaaataatatttcat

SEQ ID NO: 204015 - DNA, 24 bp, Artificial sequence
  SiRNA target sequence
ttattctcgaaataatatttcatg

SEQ ID NO: 204016 - DNA, 24 bp, Artificial sequence
  SiRNA target sequence
tattctcgaaataatatttcatgt

SEQ ID NO: 204017 - DNA, 24 bp, Artificial sequence
  SiRNA target sequence
attctcgaaataatatttcatgta

SEQ ID NO: 204018 - DNA, 24 bp, Artificial sequence
  SiRNA target sequence
ttctcgaaataatatttcatgtac

SEQ ID NO: 204019 - DNA, 24 bp, Artificial sequence
  SiRNA target sequence
tctcgaaataatatttcatgtaca

SEQ ID NO: 204020 - DNA, 24 bp, Artificial sequence
  SiRNA target sequence
ctcgaaataatatttcatgtacat

SEQ ID NO: 204021 - DNA, 24 bp, Artificial sequence
  SiRNA target sequence
tcgaaataatatttcatgtacatt

SEQ ID NO: 204022 - DNA, 24 bp, Artificial sequence
  SiRNA target sequence
cgaaataatatttcatgtacatta

SEQ ID NO: 204023 - DNA, 24 bp, Artificial sequence
  SiRNA target sequence
gaaataatatttcatgtacattaa

SEQ ID NO: 204024 - DNA, 24 bp, Artificial sequence
  SiRNA target sequence
aaataatatttcatgtacattaat

SEQ ID NO: 204025 - DNA, 24 bp, Artificial sequence
  SiRNA target sequence
aataatatttcatgtacattaata

SEQ ID NO: 204026 - DNA, 24 bp, Artificial sequence
  SiRNA target sequence
ataatatttcatgtacattaatat

SEQ ID NO: 204027 - DNA, 24 bp, Artificial sequence
  SiRNA target sequence
taatatttcatgtacattaatatt

SEQ ID NO: 204028 - DNA, 24 bp, Artificial sequence
  SiRNA target sequence
aatatttcatgtacattaatatta

SEQ ID NO: 204029 - DNA, 24 bp, Artificial sequence
  SiRNA target sequence
atatttcatgtacattaatattag

SEQ ID NO: 204030 - DNA, 24 bp, Artificial sequence
  SiRNA target sequence
tatttcatgtacattaatattaga

SEQ ID NO: 204031 - DNA, 24 bp, Artificial sequence
  SiRNA target sequence
atttcatgtacattaatattagac

SEQ ID NO: 204032 - DNA, 24 bp, Artificial sequence
  SiRNA target sequence
tttcatgtacattaatattagaca

SEQ ID NO: 204033 - DNA, 24 bp, Artificial sequence
  SiRNA target sequence
ttcatgtacattaatattagacat

SEQ ID NO: 204034 - DNA, 24 bp, Artificial sequence
  SiRNA target sequence
tcatgtacattaatattagacata

SEQ ID NO: 204035 - DNA, 24 bp, Artificial sequence
  SiRNA target sequence
catgtacattaatattagacatat

SEQ ID NO: 204036 - DNA, 24 bp, Artificial sequence
  SiRNA target sequence
atgtacattaatattagacatata

SEQ ID NO: 204037 - DNA, 24 bp, Artificial sequence
  SiRNA target sequence
tgtacattaatattagacatatac

SEQ ID NO: 204038 - DNA, 24 bp, Artificial sequence
  SiRNA target sequence
gtacattaatattagacatatacc

SEQ ID NO: 204039 - DNA, 24 bp, Artificial sequence
  SiRNA target sequence
tacattaatattagacatataccg

SEQ ID NO: 204040 - DNA, 24 bp, Artificial sequence
  SiRNA target sequence
acattaatattagacatataccgc

SEQ ID NO: 204041 - DNA, 24 bp, Artificial sequence
  SiRNA target sequence
cattaatattagacatataccgcc

SEQ ID NO: 204042 - DNA, 24 bp, Artificial sequence
  SiRNA target sequence
attaatattagacatataccgccc

SEQ ID NO: 204043 - DNA, 24 bp, Artificial sequence
  SiRNA target sequence
ttaatattagacatataccgccca

SEQ ID NO: 204044 - DNA, 24 bp, Artificial sequence
  SiRNA target sequence
taatattagacatataccgcccat

SEQ ID NO: 204045 - DNA, 24 bp, Artificial sequence
  SiRNA target sequence
aatattagacatataccgcccatg

SEQ ID NO: 204046 - DNA, 24 bp, Artificial sequence
  SiRNA target sequence
atattagacatataccgcccatgg

SEQ ID NO: 204047 - DNA, 24 bp, Artificial sequence
  SiRNA target sequence
tattagacatataccgcccatggc

SEQ ID NO: 204048 - DNA, 24 bp, Artificial sequence
  SiRNA target sequence
attagacatataccgcccatggca

SEQ ID NO: 204049 - DNA, 24 bp, Artificial sequence
  SiRNA target sequence
ttagacatataccgcccatggcaa

SEQ ID NO: 204050 - DNA, 24 bp, Artificial sequence
  SiRNA target sequence
tagacatataccgcccatggcaat

SEQ ID NO: 204051 - DNA, 24 bp, Artificial sequence
  SiRNA target sequence
agacatataccgcccatggcaata

SEQ ID NO: 204052 - DNA, 24 bp, Artificial sequence
  SiRNA target sequence
gacatataccgcccatggcaataa

SEQ ID NO: 204053 - DNA, 24 bp, Artificial sequence
  SiRNA target sequence
acatataccgcccatggcaataaa

SEQ ID NO: 204054 - DNA, 24 bp, Artificial sequence
  SiRNA target sequence
catataccgcccatggcaataaaa

SEQ ID NO: 204055 - DNA, 24 bp, Artificial sequence
  SiRNA target sequence
atataccgcccatggcaataaaaa

SEQ ID NO: 204056 - DNA, 24 bp, Artificial sequence
  SiRNA target sequence
tataccgcccatggcaataaaaac

SEQ ID NO: 204057 - DNA, 24 bp, Artificial sequence
  SiRNA target sequence
ataccgcccatggcaataaaaacc

SEQ ID NO: 204058 - DNA, 24 bp, Artificial sequence
  SiRNA target sequence
taccgcccatggcaataaaaaccg

SEQ ID NO: 204059 - DNA, 24 bp, Artificial sequence
  SiRNA target sequence
accgcccatggcaataaaaaccga

SEQ ID NO: 204060 - DNA, 24 bp, Artificial sequence
  SiRNA target sequence
ccgcccatggcaataaaaaccgaa

SEQ ID NO: 204061 - DNA, 24 bp, Artificial sequence
  SiRNA target sequence
cgcccatggcaataaaaaccgaag

SEQ ID NO: 204062 - DNA, 24 bp, Artificial sequence
  SiRNA target sequence
gcccatggcaataaaaaccgaaga

SEQ ID NO: 204063 - DNA, 24 bp, Artificial sequence
  SiRNA target sequence
cccatggcaataaaaaccgaagaa

SEQ ID NO: 204064 - DNA, 24 bp, Artificial sequence
  SiRNA target sequence
ccatggcaataaaaaccgaagaat

SEQ ID NO: 204065 - DNA, 24 bp, Artificial sequence
  SiRNA target sequence
catggcaataaaaaccgaagaata

SEQ ID NO: 204066 - DNA, 24 bp, Artificial sequence
  SiRNA target sequence
atggcaataaaaaccgaagaatat

SEQ ID NO: 204067 - DNA, 24 bp, Artificial sequence
  SiRNA target sequence
tggcaataaaaaccgaagaatata

SEQ ID NO: 204068 - DNA, 24 bp, Artificial sequence
  SiRNA target sequence
ggcaataaaaaccgaagaatataa

SEQ ID NO: 204069 - DNA, 24 bp, Artificial sequence
  SiRNA target sequence
gcaataaaaaccgaagaatataat

SEQ ID NO: 204070 - DNA, 24 bp, Artificial sequence
  SiRNA target sequence
caataaaaaccgaagaatataata

SEQ ID NO: 204071 - DNA, 24 bp, Artificial sequence
  SiRNA target sequence
aataaaaaccgaagaatataataa

SEQ ID NO: 204072 - DNA, 24 bp, Artificial sequence
  SiRNA target sequence
ataaaaaccgaagaatataataac

SEQ ID NO: 204073 - DNA, 24 bp, Artificial sequence
  SiRNA target sequence
taaaaaccgaagaatataataact

SEQ ID NO: 204074 - DNA, 24 bp, Artificial sequence
  SiRNA target sequence
aaaaaccgaagaatataataactg

SEQ ID NO: 204075 - DNA, 24 bp, Artificial sequence
  SiRNA target sequence
aaaaccgaagaatataataactga

SEQ ID NO: 204076 - DNA, 24 bp, Artificial sequence
  SiRNA target sequence
aaaccgaagaatataataactgat

SEQ ID NO: 204077 - DNA, 24 bp, Artificial sequence
  SiRNA target sequence
aaccgaagaatataataactgatt

SEQ ID NO: 204078 - DNA, 24 bp, Artificial sequence
  SiRNA target sequence
accgaagaatataataactgattt

SEQ ID NO: 204079 - DNA, 24 bp, Artificial sequence
  SiRNA target sequence
ccgaagaatataataactgatttt

SEQ ID NO: 204080 - DNA, 24 bp, Artificial sequence
  SiRNA target sequence
cgaagaatataataactgattttg

SEQ ID NO: 204081 - DNA, 24 bp, Artificial sequence
  SiRNA target sequence
gaagaatataataactgattttgc

SEQ ID NO: 204082 - DNA, 24 bp, Artificial sequence
  SiRNA target sequence
aagaatataataactgattttgct

SEQ ID NO: 204083 - DNA, 24 bp, Artificial sequence
  SiRNA target sequence
agaatataataactgattttgctc

SEQ ID NO: 204084 - DNA, 24 bp, Artificial sequence
  SiRNA target sequence
gaatataataactgattttgctca

SEQ ID NO: 204085 - DNA, 24 bp, Artificial sequence
  SiRNA target sequence
aatataataactgattttgctcat

SEQ ID NO: 204086 - DNA, 24 bp, Artificial sequence
  SiRNA target sequence
atataataactgattttgctcata

SEQ ID NO: 204087 - DNA, 24 bp, Artificial sequence
  SiRNA target sequence
tataataactgattttgctcatag

SEQ ID NO: 204088 - DNA, 24 bp, Artificial sequence
  SiRNA target sequence
ataataactgattttgctcatagc

SEQ ID NO: 204089 - DNA, 24 bp, Artificial sequence
  SiRNA target sequence
taataactgattttgctcatagct

SEQ ID NO: 204090 - DNA, 24 bp, Artificial sequence
  SiRNA target sequence
aataactgattttgctcatagcta

SEQ ID NO: 204091 - DNA, 24 bp, Artificial sequence
  SiRNA target sequence
ataactgattttgctcatagctaa

SEQ ID NO: 204092 - DNA, 24 bp, Artificial sequence
  SiRNA target sequence
taactgattttgctcatagctaaa

SEQ ID NO: 204093 - DNA, 24 bp, Artificial sequence
  SiRNA target sequence
aactgattttgctcatagctaaat

SEQ ID NO: 204094 - DNA, 24 bp, Artificial sequence
  SiRNA target sequence
actgattttgctcatagctaaatc

SEQ ID NO: 204095 - DNA, 24 bp, Artificial sequence
  SiRNA target sequence
ctgattttgctcatagctaaatcc

SEQ ID NO: 204096 - DNA, 24 bp, Artificial sequence
  SiRNA target sequence
tgattttgctcatagctaaatcct

SEQ ID NO: 204097 - DNA, 24 bp, Artificial sequence
  SiRNA target sequence
gattttgctcatagctaaatcctt

SEQ ID NO: 204098 - DNA, 24 bp, Artificial sequence
  SiRNA target sequence
attttgctcatagctaaatccttt

SEQ ID NO: 204099 - DNA, 24 bp, Artificial sequence
  SiRNA target sequence
ttttgctcatagctaaatcctttt

SEQ ID NO: 204100 - DNA, 24 bp, Artificial sequence
  SiRNA target sequence
tttgctcatagctaaatccttttc

SEQ ID NO: 204101 - DNA, 24 bp, Artificial sequence
  SiRNA target sequence
ttgctcatagctaaatccttttcg

SEQ ID NO: 204102 - DNA, 24 bp, Artificial sequence
  SiRNA target sequence
tgctcatagctaaatccttttcgc

SEQ ID NO: 204103 - DNA, 24 bp, Artificial sequence
  SiRNA target sequence
gctcatagctaaatccttttcgca

SEQ ID NO: 204104 - DNA, 24 bp, Artificial sequence
  SiRNA target sequence
ctcatagctaaatccttttcgcaa

SEQ ID NO: 204105 - DNA, 24 bp, Artificial sequence
  SiRNA target sequence
tcatagctaaatccttttcgcaat

SEQ ID NO: 204106 - DNA, 24 bp, Artificial sequence
  SiRNA target sequence
catagctaaatccttttcgcaatt

SEQ ID NO: 204107 - DNA, 24 bp, Artificial sequence
  SiRNA target sequence
atagctaaatccttttcgcaattc

SEQ ID NO: 204108 - DNA, 24 bp, Artificial sequence
  SiRNA target sequence
tagctaaatccttttcgcaattct

SEQ ID NO: 204109 - DNA, 24 bp, Artificial sequence
  SiRNA target sequence
agctaaatccttttcgcaattctc

SEQ ID NO: 204110 - DNA, 24 bp, Artificial sequence
  SiRNA target sequence
gctaaatccttttcgcaattctct

SEQ ID NO: 204111 - DNA, 24 bp, Artificial sequence
  SiRNA target sequence
ctaaatccttttcgcaattctctg

SEQ ID NO: 204112 - DNA, 24 bp, Artificial sequence
  SiRNA target sequence
taaatccttttcgcaattctctga

SEQ ID NO: 204113 - DNA, 24 bp, Artificial sequence
  SiRNA target sequence
aaatccttttcgcaattctctgaa

SEQ ID NO: 204114 - DNA, 24 bp, Artificial sequence
  SiRNA target sequence
aatccttttcgcaattctctgaaa

SEQ ID NO: 204115 - DNA, 24 bp, Artificial sequence
  SiRNA target sequence
atccttttcgcaattctctgaaag

SEQ ID NO: 204116 - DNA, 24 bp, Artificial sequence
  SiRNA target sequence
tccttttcgcaattctctgaaaga

SEQ ID NO: 204117 - DNA, 24 bp, Artificial sequence
  SiRNA target sequence
ccttttcgcaattctctgaaagaa

SEQ ID NO: 204118 - DNA, 24 bp, Artificial sequence
  SiRNA target sequence
cttttcgcaattctctgaaagaac

SEQ ID NO: 204119 - DNA, 24 bp, Artificial sequence
  SiRNA target sequence
ttttcgcaattctctgaaagaact

SEQ ID NO: 204120 - DNA, 24 bp, Artificial sequence
  SiRNA target sequence
tttcgcaattctctgaaagaacta

SEQ ID NO: 204121 - DNA, 24 bp, Artificial sequence
  SiRNA target sequence
ttcgcaattctctgaaagaactac

SEQ ID NO: 204122 - DNA, 24 bp, Artificial sequence
  SiRNA target sequence
tcgcaattctctgaaagaactact

SEQ ID NO: 204123 - DNA, 24 bp, Artificial sequence
  SiRNA target sequence
cgcaattctctgaaagaactactg

SEQ ID NO: 204124 - DNA, 24 bp, Artificial sequence
  SiRNA target sequence
gcaattctctgaaagaactactgg

SEQ ID NO: 204125 - DNA, 24 bp, Artificial sequence
  SiRNA target sequence
caattctctgaaagaactactggc

SEQ ID NO: 204126 - DNA, 24 bp, Artificial sequence
  SiRNA target sequence
aattctctgaaagaactactggct

SEQ ID NO: 204127 - DNA, 24 bp, Artificial sequence
  SiRNA target sequence
attctctgaaagaactactggcta

SEQ ID NO: 204128 - DNA, 24 bp, Artificial sequence
  SiRNA target sequence
ttctctgaaagaactactggctaa

SEQ ID NO: 204129 - DNA, 24 bp, Artificial sequence
  SiRNA target sequence
tctctgaaagaactactggctaat

SEQ ID NO: 204130 - DNA, 24 bp, Artificial sequence
  SiRNA target sequence
ctctgaaagaactactggctaatc

SEQ ID NO: 204131 - DNA, 24 bp, Artificial sequence
  SiRNA target sequence
tctgaaagaactactggctaatcc

SEQ ID NO: 204132 - DNA, 24 bp, Artificial sequence
  SiRNA target sequence
ctgaaagaactactggctaatcca

SEQ ID NO: 204133 - DNA, 24 bp, Artificial sequence
  SiRNA target sequence
tgaaagaactactggctaatccag

SEQ ID NO: 204134 - DNA, 24 bp, Artificial sequence
  SiRNA target sequence
gaaagaactactggctaatccaga

SEQ ID NO: 204135 - DNA, 24 bp, Artificial sequence
  SiRNA target sequence
aaagaactactggctaatccagat

SEQ ID NO: 204136 - DNA, 24 bp, Artificial sequence
  SiRNA target sequence
aagaactactggctaatccagata

SEQ ID NO: 204137 - DNA, 24 bp, Artificial sequence
  SiRNA target sequence
agaactactggctaatccagatac

SEQ ID NO: 204138 - DNA, 24 bp, Artificial sequence
  SiRNA target sequence
gaactactggctaatccagatact

SEQ ID NO: 204139 - DNA, 24 bp, Artificial sequence
  SiRNA target sequence
aactactggctaatccagatacta

SEQ ID NO: 204140 - DNA, 24 bp, Artificial sequence
  SiRNA target sequence
actactggctaatccagatactag

SEQ ID NO: 204141 - DNA, 24 bp, Artificial sequence
  SiRNA target sequence
ctactggctaatccagatactagt

SEQ ID NO: 204142 - DNA, 24 bp, Artificial sequence
  SiRNA target sequence
tactggctaatccagatactagta

SEQ ID NO: 204143 - DNA, 24 bp, Artificial sequence
  SiRNA target sequence
actggctaatccagatactagtaa

SEQ ID NO: 204144 - DNA, 24 bp, Artificial sequence
  SiRNA target sequence
ctggctaatccagatactagtaaa

SEQ ID NO: 204145 - DNA, 24 bp, Artificial sequence
  SiRNA target sequence
tggctaatccagatactagtaaag

SEQ ID NO: 204146 - DNA, 24 bp, Artificial sequence
  SiRNA target sequence
ggctaatccagatactagtaaagc

SEQ ID NO: 204147 - DNA, 24 bp, Artificial sequence
  SiRNA target sequence
gctaatccagatactagtaaagct

SEQ ID NO: 204148 - DNA, 24 bp, Artificial sequence
  SiRNA target sequence
ctaatccagatactagtaaagcta

SEQ ID NO: 204149 - DNA, 24 bp, Artificial sequence
  SiRNA target sequence
taatccagatactagtaaagctaa

SEQ ID NO: 204150 - DNA, 24 bp, Artificial sequence
  SiRNA target sequence
aatccagatactagtaaagctaaa

SEQ ID NO: 204151 - DNA, 24 bp, Artificial sequence
  SiRNA target sequence
atccagatactagtaaagctaaat

SEQ ID NO: 204152 - DNA, 24 bp, Artificial sequence
  SiRNA target sequence
tccagatactagtaaagctaaatt

SEQ ID NO: 204153 - DNA, 24 bp, Artificial sequence
  SiRNA target sequence
ccagatactagtaaagctaaattt

SEQ ID NO: 204154 - DNA, 24 bp, Artificial sequence
  SiRNA target sequence
cagatactagtaaagctaaatttg

SEQ ID NO: 204155 - DNA, 24 bp, Artificial sequence
  SiRNA target sequence
agatactagtaaagctaaatttgc

SEQ ID NO: 204156 - DNA, 24 bp, Artificial sequence
  SiRNA target sequence
gatactagtaaagctaaatttgct

SEQ ID NO: 204157 - DNA, 24 bp, Artificial sequence
  SiRNA target sequence
atactagtaaagctaaatttgcta

SEQ ID NO: 204158 - DNA, 24 bp, Artificial sequence
  SiRNA target sequence
tactagtaaagctaaatttgctat

SEQ ID NO: 204159 - DNA, 24 bp, Artificial sequence
  SiRNA target sequence
actagtaaagctaaatttgctatt

SEQ ID NO: 204160 - DNA, 24 bp, Artificial sequence
  SiRNA target sequence
ctagtaaagctaaatttgctatta

SEQ ID NO: 204161 - DNA, 24 bp, Artificial sequence
  SiRNA target sequence
tagtaaagctaaatttgctattat

SEQ ID NO: 204162 - DNA, 24 bp, Artificial sequence
  SiRNA target sequence
agtaaagctaaatttgctattatg

SEQ ID NO: 204163 - DNA, 24 bp, Artificial sequence
  SiRNA target sequence
gtaaagctaaatttgctattatgt

SEQ ID NO: 204164 - DNA, 24 bp, Artificial sequence
  SiRNA target sequence
taaagctaaatttgctattatgta

SEQ ID NO: 204165 - DNA, 24 bp, Artificial sequence
  SiRNA target sequence
aaagctaaatttgctattatgtaa

SEQ ID NO: 204166 - DNA, 24 bp, Artificial sequence
  SiRNA target sequence
aagctaaatttgctattatgtaaa

SEQ ID NO: 204167 - DNA, 24 bp, Artificial sequence
  SiRNA target sequence
agctaaatttgctattatgtaaaa

SEQ ID NO: 204168 - DNA, 24 bp, Artificial sequence
  SiRNA target sequence
gctaaatttgctattatgtaaaaa

SEQ ID NO: 204169 - DNA, 24 bp, Artificial sequence
  SiRNA target sequence
ctaaatttgctattatgtaaaaag

SEQ ID NO: 204170 - DNA, 24 bp, Artificial sequence
  SiRNA target sequence
taaatttgctattatgtaaaaagg

SEQ ID NO: 204171 - DNA, 24 bp, Artificial sequence
  SiRNA target sequence
aaatttgctattatgtaaaaaggt

SEQ ID NO: 204172 - DNA, 24 bp, Artificial sequence
  SiRNA target sequence
aatttgctattatgtaaaaaggtg

SEQ ID NO: 204173 - DNA, 24 bp, Artificial sequence
  SiRNA target sequence
atttgctattatgtaaaaaggtgg

SEQ ID NO: 204174 - DNA, 24 bp, Artificial sequence
  SiRNA target sequence
tttgctattatgtaaaaaggtggt

SEQ ID NO: 204175 - DNA, 24 bp, Artificial sequence
  SiRNA target sequence
ttgctattatgtaaaaaggtggta

SEQ ID NO: 204176 - DNA, 24 bp, Artificial sequence
  SiRNA target sequence
tgctattatgtaaaaaggtggtaa

SEQ ID NO: 204177 - DNA, 24 bp, Artificial sequence
  SiRNA target sequence
gctattatgtaaaaaggtggtaaa

SEQ ID NO: 204178 - DNA, 24 bp, Artificial sequence
  SiRNA target sequence
ctattatgtaaaaaggtggtaaaa

SEQ ID NO: 204179 - DNA, 24 bp, Artificial sequence
  SiRNA target sequence
tattatgtaaaaaggtggtaaaaa

SEQ ID NO: 204180 - DNA, 24 bp, Artificial sequence
  SiRNA target sequence
attatgtaaaaaggtggtaaaaat

SEQ ID NO: 204181 - DNA, 24 bp, Artificial sequence
  SiRNA target sequence
ttatgtaaaaaggtggtaaaaatc

SEQ ID NO: 204182 - DNA, 24 bp, Artificial sequence
  SiRNA target sequence
tatgtaaaaaggtggtaaaaatct

SEQ ID NO: 204183 - DNA, 24 bp, Artificial sequence
  SiRNA target sequence
atgtaaaaaggtggtaaaaatctt

SEQ ID NO: 204184 - DNA, 24 bp, Artificial sequence
  SiRNA target sequence
tgtaaaaaggtggtaaaaatcttg

SEQ ID NO: 204185 - DNA, 24 bp, Artificial sequence
  SiRNA target sequence
gtaaaaaggtggtaaaaatcttgt

SEQ ID NO: 204186 - DNA, 24 bp, Artificial sequence
  SiRNA target sequence
taaaaaggtggtaaaaatcttgta

SEQ ID NO: 204187 - DNA, 24 bp, Artificial sequence
  SiRNA target sequence
aaaaaggtggtaaaaatcttgtaa

SEQ ID NO: 204188 - DNA, 24 bp, Artificial sequence
  SiRNA target sequence
aaaaggtggtaaaaatcttgtaaa

SEQ ID NO: 204189 - DNA, 24 bp, Artificial sequence
  SiRNA target sequence
aaaggtggtaaaaatcttgtaaac

SEQ ID NO: 204190 - DNA, 24 bp, Artificial sequence
  SiRNA target sequence
aaggtggtaaaaatcttgtaaact

SEQ ID NO: 204191 - DNA, 24 bp, Artificial sequence
  SiRNA target sequence
aggtggtaaaaatcttgtaaactg

SEQ ID NO: 204192 - DNA, 24 bp, Artificial sequence
  SiRNA target sequence
ggtggtaaaaatcttgtaaactgt

SEQ ID NO: 204193 - DNA, 24 bp, Artificial sequence
  SiRNA target sequence
gtggtaaaaatcttgtaaactgtc

SEQ ID NO: 204194 - DNA, 24 bp, Artificial sequence
  SiRNA target sequence
tggtaaaaatcttgtaaactgtct

SEQ ID NO: 204195 - DNA, 24 bp, Artificial sequence
  SiRNA target sequence
ggtaaaaatcttgtaaactgtctg

SEQ ID NO: 204196 - DNA, 24 bp, Artificial sequence
  SiRNA target sequence
gtaaaaatcttgtaaactgtctga

SEQ ID NO: 204197 - DNA, 24 bp, Artificial sequence
  SiRNA target sequence
taaaaatcttgtaaactgtctgat

SEQ ID NO: 204198 - DNA, 24 bp, Artificial sequence
  SiRNA target sequence
aaaaatcttgtaaactgtctgata

SEQ ID NO: 204199 - DNA, 24 bp, Artificial sequence
  SiRNA target sequence
aaaatcttgtaaactgtctgatag

SEQ ID NO: 204200 - DNA, 24 bp, Artificial sequence
  SiRNA target sequence
aaatcttgtaaactgtctgatagt

SEQ ID NO: 204201 - DNA, 24 bp, Artificial sequence
  SiRNA target sequence
aatcttgtaaactgtctgatagta

SEQ ID NO: 204202 - DNA, 24 bp, Artificial sequence
  SiRNA target sequence
atcttgtaaactgtctgatagtac

SEQ ID NO: 204203 - DNA, 24 bp, Artificial sequence
  SiRNA target sequence
tcttgtaaactgtctgatagtaca

SEQ ID NO: 204204 - DNA, 24 bp, Artificial sequence
  SiRNA target sequence
cttgtaaactgtctgatagtacaa

SEQ ID NO: 204205 - DNA, 24 bp, Artificial sequence
  SiRNA target sequence
ttgtaaactgtctgatagtacaac

SEQ ID NO: 204206 - DNA, 24 bp, Artificial sequence
  SiRNA target sequence
tgtaaactgtctgatagtacaact

SEQ ID NO: 204207 - DNA, 24 bp, Artificial sequence
  SiRNA target sequence
gtaaactgtctgatagtacaactt

SEQ ID NO: 204208 - DNA, 24 bp, Artificial sequence
  SiRNA target sequence
taaactgtctgatagtacaacttt

SEQ ID NO: 204209 - DNA, 24 bp, Artificial sequence
  SiRNA target sequence
aaactgtctgatagtacaactttc

SEQ ID NO: 204210 - DNA, 24 bp, Artificial sequence
  SiRNA target sequence
aactgtctgatagtacaactttca

SEQ ID NO: 204211 - DNA, 24 bp, Artificial sequence
  SiRNA target sequence
actgtctgatagtacaactttcat

SEQ ID NO: 204212 - DNA, 24 bp, Artificial sequence
  SiRNA target sequence
ctgtctgatagtacaactttcatt

SEQ ID NO: 204213 - DNA, 24 bp, Artificial sequence
  SiRNA target sequence
tgtctgatagtacaactttcattt

SEQ ID NO: 204214 - DNA, 24 bp, Artificial sequence
  SiRNA target sequence
gtctgatagtacaactttcattta

SEQ ID NO: 204215 - DNA, 24 bp, Artificial sequence
  SiRNA target sequence
tctgatagtacaactttcatttaa

SEQ ID NO: 204216 - DNA, 24 bp, Artificial sequence
  SiRNA target sequence
ctgatagtacaactttcatttaaa

SEQ ID NO: 204217 - DNA, 24 bp, Artificial sequence
  SiRNA target sequence
tgatagtacaactttcatttaaaa

SEQ ID NO: 204218 - DNA, 24 bp, Artificial sequence
  SiRNA target sequence
gatagtacaactttcatttaaaaa

SEQ ID NO: 204219 - DNA, 24 bp, Artificial sequence
  SiRNA target sequence
atagtacaactttcatttaaaaaa

SEQ ID NO: 204220 - DNA, 24 bp, Artificial sequence
  SiRNA target sequence
tagtacaactttcatttaaaaaac

SEQ ID NO: 204221 - DNA, 24 bp, Artificial sequence
  SiRNA target sequence
agtacaactttcatttaaaaaact

SEQ ID NO: 204222 - DNA, 24 bp, Artificial sequence
  SiRNA target sequence
gtacaactttcatttaaaaaactc

SEQ ID NO: 204223 - DNA, 24 bp, Artificial sequence
  SiRNA target sequence
tacaactttcatttaaaaaactca

SEQ ID NO: 204224 - DNA, 24 bp, Artificial sequence
  SiRNA target sequence
acaactttcatttaaaaaactcat

SEQ ID NO: 204225 - DNA, 24 bp, Artificial sequence
  SiRNA target sequence
caactttcatttaaaaaactcatg

SEQ ID NO: 204226 - DNA, 24 bp, Artificial sequence
  SiRNA target sequence
aactttcatttaaaaaactcatgt

SEQ ID NO: 204227 - DNA, 24 bp, Artificial sequence
  SiRNA target sequence
actttcatttaaaaaactcatgta

SEQ ID NO: 204228 - DNA, 24 bp, Artificial sequence
  SiRNA target sequence
ctttcatttaaaaaactcatgtat

SEQ ID NO: 204229 - DNA, 24 bp, Artificial sequence
  SiRNA target sequence
tttcatttaaaaaactcatgtata

SEQ ID NO: 204230 - DNA, 24 bp, Artificial sequence
  SiRNA target sequence
ttcatttaaaaaactcatgtataa

SEQ ID NO: 204231 - DNA, 24 bp, Artificial sequence
  SiRNA target sequence
tcatttaaaaaactcatgtataaa

SEQ ID NO: 204232 - DNA, 24 bp, Artificial sequence
  SiRNA target sequence
catttaaaaaactcatgtataaat

SEQ ID NO: 204233 - DNA, 24 bp, Artificial sequence
  SiRNA target sequence
atttaaaaaactcatgtataaata

SEQ ID NO: 204234 - DNA, 24 bp, Artificial sequence
  SiRNA target sequence
tttaaaaaactcatgtataaataa

SEQ ID NO: 204235 - DNA, 24 bp, Artificial sequence
  SiRNA target sequence
ttaaaaaactcatgtataaataag

SEQ ID NO: 204236 - DNA, 24 bp, Artificial sequence
  SiRNA target sequence
taaaaaactcatgtataaataagc

SEQ ID NO: 204237 - DNA, 24 bp, Artificial sequence
  SiRNA target sequence
aaaaaactcatgtataaataagcc

SEQ ID NO: 204238 - DNA, 24 bp, Artificial sequence
  SiRNA target sequence
aaaaactcatgtataaataagcca

SEQ ID NO: 204239 - DNA, 24 bp, Artificial sequence
  SiRNA target sequence
aaaactcatgtataaataagccat

SEQ ID NO: 204240 - DNA, 24 bp, Artificial sequence
  SiRNA target sequence
aaactcatgtataaataagccata

SEQ ID NO: 204241 - DNA, 24 bp, Artificial sequence
  SiRNA target sequence
aactcatgtataaataagccataa

SEQ ID NO: 204242 - DNA, 24 bp, Artificial sequence
  SiRNA target sequence
actcatgtataaataagccataag

SEQ ID NO: 204243 - DNA, 24 bp, Artificial sequence
  SiRNA target sequence
ctcatgtataaataagccataagt

SEQ ID NO: 204244 - DNA, 24 bp, Artificial sequence
  SiRNA target sequence
tcatgtataaataagccataagta

SEQ ID NO: 204245 - DNA, 24 bp, Artificial sequence
  SiRNA target sequence
catgtataaataagccataagtaa

SEQ ID NO: 204246 - DNA, 24 bp, Artificial sequence
  SiRNA target sequence
atgtataaataagccataagtaaa

SEQ ID NO: 204247 - DNA, 24 bp, Artificial sequence
  SiRNA target sequence
tgtataaataagccataagtaaac

SEQ ID NO: 204248 - DNA, 24 bp, Artificial sequence
  SiRNA target sequence
gtataaataagccataagtaaact

SEQ ID NO: 204249 - DNA, 24 bp, Artificial sequence
  SiRNA target sequence
tataaataagccataagtaaactg

SEQ ID NO: 204250 - DNA, 24 bp, Artificial sequence
  SiRNA target sequence
ataaataagccataagtaaactgc

SEQ ID NO: 204251 - DNA, 24 bp, Artificial sequence
  SiRNA target sequence
taaataagccataagtaaactgcc

SEQ ID NO: 204252 - DNA, 24 bp, Artificial sequence
  SiRNA target sequence
aaataagccataagtaaactgccc

SEQ ID NO: 204253 - DNA, 24 bp, Artificial sequence
  SiRNA target sequence
aataagccataagtaaactgcccc

SEQ ID NO: 204254 - DNA, 24 bp, Artificial sequence
  SiRNA target sequence
ataagccataagtaaactgcccca

SEQ ID NO: 204255 - DNA, 24 bp, Artificial sequence
  SiRNA target sequence
taagccataagtaaactgccccac

SEQ ID NO: 204256 - DNA, 24 bp, Artificial sequence
  SiRNA target sequence
aagccataagtaaactgccccaca

SEQ ID NO: 204257 - DNA, 24 bp, Artificial sequence
  SiRNA target sequence
agccataagtaaactgccccacat

SEQ ID NO: 204258 - DNA, 24 bp, Artificial sequence
  SiRNA target sequence
gccataagtaaactgccccacatt

SEQ ID NO: 204259 - DNA, 24 bp, Artificial sequence
  SiRNA target sequence
ccataagtaaactgccccacattt

SEQ ID NO: 204260 - DNA, 24 bp, Artificial sequence
  SiRNA target sequence
cataagtaaactgccccacatttc

SEQ ID NO: 204261 - DNA, 24 bp, Artificial sequence
  SiRNA target sequence
ataagtaaactgccccacatttct

SEQ ID NO: 204262 - DNA, 24 bp, Artificial sequence
  SiRNA target sequence
taagtaaactgccccacatttctg

SEQ ID NO: 204263 - DNA, 24 bp, Artificial sequence
  SiRNA target sequence
aagtaaactgccccacatttctgc

SEQ ID NO: 204264 - DNA, 24 bp, Artificial sequence
  SiRNA target sequence
agtaaactgccccacatttctgct

SEQ ID NO: 204265 - DNA, 24 bp, Artificial sequence
  SiRNA target sequence
gtaaactgccccacatttctgcta

SEQ ID NO: 204266 - DNA, 24 bp, Artificial sequence
  SiRNA target sequence
taaactgccccacatttctgctat

SEQ ID NO: 204267 - DNA, 24 bp, Artificial sequence
  SiRNA target sequence
aaactgccccacatttctgctatt

SEQ ID NO: 204268 - DNA, 24 bp, Artificial sequence
  SiRNA target sequence
aactgccccacatttctgctatta

SEQ ID NO: 204269 - DNA, 24 bp, Artificial sequence
  SiRNA target sequence
actgccccacatttctgctattat

SEQ ID NO: 204270 - DNA, 24 bp, Artificial sequence
  SiRNA target sequence
ctgccccacatttctgctattata

SEQ ID NO: 204271 - DNA, 24 bp, Artificial sequence
  SiRNA target sequence
tgccccacatttctgctattataa

SEQ ID NO: 204272 - DNA, 24 bp, Artificial sequence
  SiRNA target sequence
gccccacatttctgctattataaa

SEQ ID NO: 204273 - DNA, 24 bp, Artificial sequence
  SiRNA target sequence
ccccacatttctgctattataaaa

SEQ ID NO: 204274 - DNA, 24 bp, Artificial sequence
  SiRNA target sequence
cccacatttctgctattataaaaa

SEQ ID NO: 204275 - DNA, 24 bp, Artificial sequence
  SiRNA target sequence
ccacatttctgctattataaaaat

SEQ ID NO: 204276 - DNA, 24 bp, Artificial sequence
  SiRNA target sequence
cacatttctgctattataaaaata

SEQ ID NO: 204277 - DNA, 24 bp, Artificial sequence
  SiRNA target sequence
acatttctgctattataaaaatac

SEQ ID NO: 204278 - DNA, 24 bp, Artificial sequence
  SiRNA target sequence
catttctgctattataaaaataca

SEQ ID NO: 204279 - DNA, 24 bp, Artificial sequence
  SiRNA target sequence
atttctgctattataaaaatacaa

SEQ ID NO: 204280 - DNA, 24 bp, Artificial sequence
  SiRNA target sequence
tttctgctattataaaaatacaag

SEQ ID NO: 204281 - DNA, 24 bp, Artificial sequence
  SiRNA target sequence
ttctgctattataaaaatacaagt

SEQ ID NO: 204282 - DNA, 24 bp, Artificial sequence
  SiRNA target sequence
tctgctattataaaaatacaagtt

SEQ ID NO: 204283 - DNA, 24 bp, Artificial sequence
  SiRNA target sequence
ctgctattataaaaatacaagttg

SEQ ID NO: 204284 - DNA, 24 bp, Artificial sequence
  SiRNA target sequence
tgctattataaaaatacaagttga

SEQ ID NO: 204285 - DNA, 24 bp, Artificial sequence
  SiRNA target sequence
gctattataaaaatacaagttgaa

SEQ ID NO: 204286 - DNA, 24 bp, Artificial sequence
  SiRNA target sequence
ctattataaaaatacaagttgaaa

SEQ ID NO: 204287 - DNA, 24 bp, Artificial sequence
  SiRNA target sequence
tattataaaaatacaagttgaaac

SEQ ID NO: 204288 - DNA, 24 bp, Artificial sequence
  SiRNA target sequence
attataaaaatacaagttgaaacg

SEQ ID NO: 204289 - DNA, 24 bp, Artificial sequence
  SiRNA target sequence
ttataaaaatacaagttgaaacgg

SEQ ID NO: 204290 - DNA, 24 bp, Artificial sequence
  SiRNA target sequence
tataaaaatacaagttgaaacggg

SEQ ID NO: 204291 - DNA, 24 bp, Artificial sequence
  SiRNA target sequence
ataaaaatacaagttgaaacgggc

SEQ ID NO: 204292 - DNA, 24 bp, Artificial sequence
  SiRNA target sequence
taaaaatacaagttgaaacgggct

SEQ ID NO: 204293 - DNA, 24 bp, Artificial sequence
  SiRNA target sequence
aaaaatacaagttgaaacgggctc

SEQ ID NO: 204294 - DNA, 24 bp, Artificial sequence
  SiRNA target sequence
aaaatacaagttgaaacgggctcg

SEQ ID NO: 204295 - DNA, 24 bp, Artificial sequence
  SiRNA target sequence
aaatacaagttgaaacgggctcgt

SEQ ID NO: 204296 - DNA, 24 bp, Artificial sequence
  SiRNA target sequence
aatacaagttgaaacgggctcgtt

SEQ ID NO: 204297 - DNA, 24 bp, Artificial sequence
  SiRNA target sequence
atacaagttgaaacgggctcgtta

SEQ ID NO: 204298 - DNA, 24 bp, Artificial sequence
  SiRNA target sequence
tacaagttgaaacgggctcgttag

SEQ ID NO: 204299 - DNA, 24 bp, Artificial sequence
  SiRNA target sequence
acaagttgaaacgggctcgttagc

SEQ ID NO: 204300 - DNA, 24 bp, Artificial sequence
  SiRNA target sequence
caagttgaaacgggctcgttagct

SEQ ID NO: 204301 - DNA, 24 bp, Artificial sequence
  SiRNA target sequence
aagttgaaacgggctcgttagctg

SEQ ID NO: 204302 - DNA, 24 bp, Artificial sequence
  SiRNA target sequence
agttgaaacgggctcgttagctgt

SEQ ID NO: 204303 - DNA, 24 bp, Artificial sequence
  SiRNA target sequence
gttgaaacgggctcgttagctgta

SEQ ID NO: 204304 - DNA, 24 bp, Artificial sequence
  SiRNA target sequence
ttgaaacgggctcgttagctgtaa

SEQ ID NO: 204305 - DNA, 24 bp, Artificial sequence
  SiRNA target sequence
tgaaacgggctcgttagctgtaat

SEQ ID NO: 204306 - DNA, 24 bp, Artificial sequence
  SiRNA target sequence
gaaacgggctcgttagctgtaatt

SEQ ID NO: 204307 - DNA, 24 bp, Artificial sequence
  SiRNA target sequence
aaacgggctcgttagctgtaatta

SEQ ID NO: 204308 - DNA, 24 bp, Artificial sequence
  SiRNA target sequence
aacgggctcgttagctgtaattaa

SEQ ID NO: 204309 - DNA, 24 bp, Artificial sequence
  SiRNA target sequence
acgggctcgttagctgtaattaaa

SEQ ID NO: 204310 - DNA, 24 bp, Artificial sequence
  SiRNA target sequence
cgggctcgttagctgtaattaaaa

SEQ ID NO: 204311 - DNA, 24 bp, Artificial sequence
  SiRNA target sequence
gggctcgttagctgtaattaaaaa

SEQ ID NO: 204312 - DNA, 24 bp, Artificial sequence
  SiRNA target sequence
ggctcgttagctgtaattaaaaaa

SEQ ID NO: 204313 - DNA, 24 bp, Artificial sequence
  SiRNA target sequence
gctcgttagctgtaattaaaaaat

SEQ ID NO: 204314 - DNA, 24 bp, Artificial sequence
  SiRNA target sequence
ctcgttagctgtaattaaaaaata

SEQ ID NO: 204315 - DNA, 24 bp, Artificial sequence
  SiRNA target sequence
tcgttagctgtaattaaaaaatat

SEQ ID NO: 204316 - DNA, 24 bp, Artificial sequence
  SiRNA target sequence
cgttagctgtaattaaaaaatatt

SEQ ID NO: 204317 - DNA, 24 bp, Artificial sequence
  SiRNA target sequence
gttagctgtaattaaaaaatattt

SEQ ID NO: 204318 - DNA, 24 bp, Artificial sequence
  SiRNA target sequence
ttagctgtaattaaaaaatatttt

SEQ ID NO: 204319 - DNA, 24 bp, Artificial sequence
  SiRNA target sequence
tagctgtaattaaaaaatatttta

SEQ ID NO: 204320 - DNA, 24 bp, Artificial sequence
  SiRNA target sequence
agctgtaattaaaaaatattttat

SEQ ID NO: 204321 - DNA, 24 bp, Artificial sequence
  SiRNA target sequence
gctgtaattaaaaaatattttata

SEQ ID NO: 204322 - DNA, 24 bp, Artificial sequence
  SiRNA target sequence
ctgtaattaaaaaatattttataa

SEQ ID NO: 204323 - DNA, 24 bp, Artificial sequence
  SiRNA target sequence
tgtaattaaaaaatattttataaa

SEQ ID NO: 204324 - DNA, 24 bp, Artificial sequence
  SiRNA target sequence
gtaattaaaaaatattttataaag

SEQ ID NO: 204325 - DNA, 24 bp, Artificial sequence
  SiRNA target sequence
taattaaaaaatattttataaagt

SEQ ID NO: 204326 - DNA, 24 bp, Artificial sequence
  SiRNA target sequence
aattaaaaaatattttataaagtt

SEQ ID NO: 204327 - DNA, 24 bp, Artificial sequence
  SiRNA target sequence
attaaaaaatattttataaagttc

SEQ ID NO: 204328 - DNA, 24 bp, Artificial sequence
  SiRNA target sequence
ttaaaaaatattttataaagttca

SEQ ID NO: 204329 - DNA, 24 bp, Artificial sequence
  SiRNA target sequence
taaaaaatattttataaagttcaa

SEQ ID NO: 204330 - DNA, 24 bp, Artificial sequence
  SiRNA target sequence
aaaaaatattttataaagttcaat

SEQ ID NO: 204331 - DNA, 24 bp, Artificial sequence
  SiRNA target sequence
aaaaatattttataaagttcaatc

SEQ ID NO: 204332 - DNA, 24 bp, Artificial sequence
  SiRNA target sequence
aaaatattttataaagttcaatcc

SEQ ID NO: 204333 - DNA, 24 bp, Artificial sequence
  SiRNA target sequence
aaatattttataaagttcaatccc

SEQ ID NO: 204334 - DNA, 24 bp, Artificial sequence
  SiRNA target sequence
aatattttataaagttcaatccct

SEQ ID NO: 204335 - DNA, 24 bp, Artificial sequence
  SiRNA target sequence
atattttataaagttcaatccctt

SEQ ID NO: 204336 - DNA, 24 bp, Artificial sequence
  SiRNA target sequence
tattttataaagttcaatcccttc

SEQ ID NO: 204337 - DNA, 24 bp, Artificial sequence
  SiRNA target sequence
attttataaagttcaatcccttca

SEQ ID NO: 204338 - DNA, 24 bp, Artificial sequence
  SiRNA target sequence
ttttataaagttcaatcccttcaa

SEQ ID NO: 204339 - DNA, 24 bp, Artificial sequence
  SiRNA target sequence
tttataaagttcaatcccttcaat

SEQ ID NO: 204340 - DNA, 24 bp, Artificial sequence
  SiRNA target sequence
ttataaagttcaatcccttcaatg

SEQ ID NO: 204341 - DNA, 24 bp, Artificial sequence
  SiRNA target sequence
tataaagttcaatcccttcaatgc

SEQ ID NO: 204342 - DNA, 24 bp, Artificial sequence
  SiRNA target sequence
ataaagttcaatcccttcaatgca

SEQ ID NO: 204343 - DNA, 24 bp, Artificial sequence
  SiRNA target sequence
taaagttcaatcccttcaatgcac

SEQ ID NO: 204344 - DNA, 24 bp, Artificial sequence
  SiRNA target sequence
aaagttcaatcccttcaatgcacc

SEQ ID NO: 204345 - DNA, 24 bp, Artificial sequence
  SiRNA target sequence
aagttcaatcccttcaatgcacct

SEQ ID NO: 204346 - DNA, 24 bp, Artificial sequence
  SiRNA target sequence
agttcaatcccttcaatgcacctt

SEQ ID NO: 204347 - DNA, 24 bp, Artificial sequence
  SiRNA target sequence
gttcaatcccttcaatgcaccttt

SEQ ID NO: 204348 - DNA, 24 bp, Artificial sequence
  SiRNA target sequence
ttcaatcccttcaatgcacctttg

SEQ ID NO: 204349 - DNA, 24 bp, Artificial sequence
  SiRNA target sequence
tcaatcccttcaatgcacctttgt

SEQ ID NO: 204350 - DNA, 24 bp, Artificial sequence
  SiRNA target sequence
caatcccttcaatgcacctttgtt

SEQ ID NO: 204351 - DNA, 24 bp, Artificial sequence
  SiRNA target sequence
aatcccttcaatgcacctttgtta

SEQ ID NO: 204352 - DNA, 24 bp, Artificial sequence
  SiRNA target sequence
atcccttcaatgcacctttgttat

SEQ ID NO: 204353 - DNA, 24 bp, Artificial sequence
  SiRNA target sequence
tcccttcaatgcacctttgttatc

SEQ ID NO: 204354 - DNA, 24 bp, Artificial sequence
  SiRNA target sequence
cccttcaatgcacctttgttatca

SEQ ID NO: 204355 - DNA, 24 bp, Artificial sequence
  SiRNA target sequence
ccttcaatgcacctttgttatcag

SEQ ID NO: 204356 - DNA, 24 bp, Artificial sequence
  SiRNA target sequence
cttcaatgcacctttgttatcagc

SEQ ID NO: 204357 - DNA, 24 bp, Artificial sequence
  SiRNA target sequence
ttcaatgcacctttgttatcagcg

SEQ ID NO: 204358 - DNA, 24 bp, Artificial sequence
  SiRNA target sequence
tcaatgcacctttgttatcagcga

SEQ ID NO: 204359 - DNA, 24 bp, Artificial sequence
  SiRNA target sequence
caatgcacctttgttatcagcgaa

SEQ ID NO: 204360 - DNA, 24 bp, Artificial sequence
  SiRNA target sequence
aatgcacctttgttatcagcgaaa

SEQ ID NO: 204361 - DNA, 24 bp, Artificial sequence
  SiRNA target sequence
atgcacctttgttatcagcgaaaa

SEQ ID NO: 204362 - DNA, 24 bp, Artificial sequence
  SiRNA target sequence
tgcacctttgttatcagcgaaaat

SEQ ID NO: 204363 - DNA, 24 bp, Artificial sequence
  SiRNA target sequence
gcacctttgttatcagcgaaaata

SEQ ID NO: 204364 - DNA, 24 bp, Artificial sequence
  SiRNA target sequence
cacctttgttatcagcgaaaatat

SEQ ID NO: 204365 - DNA, 24 bp, Artificial sequence
  SiRNA target sequence
acctttgttatcagcgaaaatatc

SEQ ID NO: 204366 - DNA, 24 bp, Artificial sequence
  SiRNA target sequence
cctttgttatcagcgaaaatatct

SEQ ID NO: 204367 - DNA, 24 bp, Artificial sequence
  SiRNA target sequence
ctttgttatcagcgaaaatatctc

SEQ ID NO: 204368 - DNA, 24 bp, Artificial sequence
  SiRNA target sequence
tttgttatcagcgaaaatatctct

SEQ ID NO: 204369 - DNA, 24 bp, Artificial sequence
  SiRNA target sequence
ttgttatcagcgaaaatatctcta

SEQ ID NO: 204370 - DNA, 24 bp, Artificial sequence
  SiRNA target sequence
tgttatcagcgaaaatatctctaa

SEQ ID NO: 204371 - DNA, 24 bp, Artificial sequence
  SiRNA target sequence
gttatcagcgaaaatatctctaaa

SEQ ID NO: 204372 - DNA, 24 bp, Artificial sequence
  SiRNA target sequence
ttatcagcgaaaatatctctaaat

SEQ ID NO: 204373 - DNA, 24 bp, Artificial sequence
  SiRNA target sequence
tatcagcgaaaatatctctaaata

SEQ ID NO: 204374 - DNA, 24 bp, Artificial sequence
  SiRNA target sequence
atcagcgaaaatatctctaaataa

SEQ ID NO: 204375 - DNA, 24 bp, Artificial sequence
  SiRNA target sequence
tcagcgaaaatatctctaaataaa

SEQ ID NO: 204376 - DNA, 24 bp, Artificial sequence
  SiRNA target sequence
cagcgaaaatatctctaaataaaa

SEQ ID NO: 204377 - DNA, 24 bp, Artificial sequence
  SiRNA target sequence
agcgaaaatatctctaaataaaaa

SEQ ID NO: 204378 - DNA, 24 bp, Artificial sequence
  SiRNA target sequence
gcgaaaatatctctaaataaaaag

SEQ ID NO: 204379 - DNA, 24 bp, Artificial sequence
  SiRNA target sequence
cgaaaatatctctaaataaaaagc

SEQ ID NO: 204380 - DNA, 24 bp, Artificial sequence
  SiRNA target sequence
gaaaatatctctaaataaaaagct

SEQ ID NO: 204381 - DNA, 24 bp, Artificial sequence
  SiRNA target sequence
aaaatatctctaaataaaaagcta

SEQ ID NO: 204382 - DNA, 24 bp, Artificial sequence
  SiRNA target sequence
aaatatctctaaataaaaagctag

SEQ ID NO: 204383 - DNA, 24 bp, Artificial sequence
  SiRNA target sequence
aatatctctaaataaaaagctaga

SEQ ID NO: 204384 - DNA, 24 bp, Artificial sequence
  SiRNA target sequence
atatctctaaataaaaagctagat

SEQ ID NO: 204385 - DNA, 24 bp, Artificial sequence
  SiRNA target sequence
tatctctaaataaaaagctagatg

SEQ ID NO: 204386 - DNA, 24 bp, Artificial sequence
  SiRNA target sequence
atctctaaataaaaagctagatgg

SEQ ID NO: 204387 - DNA, 24 bp, Artificial sequence
  SiRNA target sequence
tctctaaataaaaagctagatggt

SEQ ID NO: 204388 - DNA, 24 bp, Artificial sequence
  SiRNA target sequence
ctctaaataaaaagctagatggtg

SEQ ID NO: 204389 - DNA, 24 bp, Artificial sequence
  SiRNA target sequence
tctaaataaaaagctagatggtgt

SEQ ID NO: 204390 - DNA, 24 bp, Artificial sequence
  SiRNA target sequence
ctaaataaaaagctagatggtgtt

SEQ ID NO: 204391 - DNA, 24 bp, Artificial sequence
  SiRNA target sequence
taaataaaaagctagatggtgtta

SEQ ID NO: 204392 - DNA, 24 bp, Artificial sequence
  SiRNA target sequence
aaataaaaagctagatggtgttac

SEQ ID NO: 204393 - DNA, 24 bp, Artificial sequence
  SiRNA target sequence
aataaaaagctagatggtgttact

SEQ ID NO: 204394 - DNA, 24 bp, Artificial sequence
  SiRNA target sequence
ataaaaagctagatggtgttactt

SEQ ID NO: 204395 - DNA, 24 bp, Artificial sequence
  SiRNA target sequence
taaaaagctagatggtgttacttt

SEQ ID NO: 204396 - DNA, 24 bp, Artificial sequence
  SiRNA target sequence
aaaaagctagatggtgttactttc

SEQ ID NO: 204397 - DNA, 24 bp, Artificial sequence
  SiRNA target sequence
aaaagctagatggtgttactttct

SEQ ID NO: 204398 - DNA, 24 bp, Artificial sequence
  SiRNA target sequence
aaagctagatggtgttactttctc

SEQ ID NO: 204399 - DNA, 24 bp, Artificial sequence
  SiRNA target sequence
aagctagatggtgttactttctct

SEQ ID NO: 204400 - DNA, 24 bp, Artificial sequence
  SiRNA target sequence
agctagatggtgttactttctctt

SEQ ID NO: 204401 - DNA, 24 bp, Artificial sequence
  SiRNA target sequence
gctagatggtgttactttctcttc

SEQ ID NO: 204402 - DNA, 24 bp, Artificial sequence
  SiRNA target sequence
ctagatggtgttactttctcttca

SEQ ID NO: 204403 - DNA, 24 bp, Artificial sequence
  SiRNA target sequence
tagatggtgttactttctcttcaa

SEQ ID NO: 204404 - DNA, 24 bp, Artificial sequence
  SiRNA target sequence
agatggtgttactttctcttcaaa

SEQ ID NO: 204405 - DNA, 24 bp, Artificial sequence
  SiRNA target sequence
gatggtgttactttctcttcaaac

SEQ ID NO: 204406 - DNA, 24 bp, Artificial sequence
  SiRNA target sequence
atggtgttactttctcttcaaaca

SEQ ID NO: 204407 - DNA, 24 bp, Artificial sequence
  SiRNA target sequence
tggtgttactttctcttcaaacaa

SEQ ID NO: 204408 - DNA, 24 bp, Artificial sequence
  SiRNA target sequence
ggtgttactttctcttcaaacaaa

SEQ ID NO: 204409 - DNA, 24 bp, Artificial sequence
  SiRNA target sequence
gtgttactttctcttcaaacaaaa

SEQ ID NO: 204410 - DNA, 24 bp, Artificial sequence
  SiRNA target sequence
tgttactttctcttcaaacaaaaa

SEQ ID NO: 204411 - DNA, 24 bp, Artificial sequence
  SiRNA target sequence
gttactttctcttcaaacaaaaag

SEQ ID NO: 204412 - DNA, 24 bp, Artificial sequence
  SiRNA target sequence
ttactttctcttcaaacaaaaaga

SEQ ID NO: 204413 - DNA, 24 bp, Artificial sequence
  SiRNA target sequence
tactttctcttcaaacaaaaagat

SEQ ID NO: 204414 - DNA, 24 bp, Artificial sequence
  SiRNA target sequence
actttctcttcaaacaaaaagatt

SEQ ID NO: 204415 - DNA, 24 bp, Artificial sequence
  SiRNA target sequence
ctttctcttcaaacaaaaagattg

SEQ ID NO: 204416 - DNA, 24 bp, Artificial sequence
  SiRNA target sequence
tttctcttcaaacaaaaagattgc

SEQ ID NO: 204417 - DNA, 24 bp, Artificial sequence
  SiRNA target sequence
ttctcttcaaacaaaaagattgcc

SEQ ID NO: 204418 - DNA, 24 bp, Artificial sequence
  SiRNA target sequence
tctcttcaaacaaaaagattgccc

SEQ ID NO: 204419 - DNA, 24 bp, Artificial sequence
  SiRNA target sequence
ctcttcaaacaaaaagattgcccc

SEQ ID NO: 204420 - DNA, 24 bp, Artificial sequence
  SiRNA target sequence
tcttcaaacaaaaagattgcccct

SEQ ID NO: 204421 - DNA, 24 bp, Artificial sequence
  SiRNA target sequence
cttcaaacaaaaagattgccccta

SEQ ID NO: 204422 - DNA, 24 bp, Artificial sequence
  SiRNA target sequence
ttcaaacaaaaagattgcccctag

SEQ ID NO: 204423 - DNA, 24 bp, Artificial sequence
  SiRNA target sequence
tcaaacaaaaagattgcccctagt

SEQ ID NO: 204424 - DNA, 24 bp, Artificial sequence
  SiRNA target sequence
caaacaaaaagattgcccctagtc

SEQ ID NO: 204425 - DNA, 24 bp, Artificial sequence
  SiRNA target sequence
aaacaaaaagattgcccctagtcc

SEQ ID NO: 204426 - DNA, 24 bp, Artificial sequence
  SiRNA target sequence
aacaaaaagattgcccctagtccg

SEQ ID NO: 204427 - DNA, 24 bp, Artificial sequence
  SiRNA target sequence
acaaaaagattgcccctagtccga

SEQ ID NO: 204428 - DNA, 24 bp, Artificial sequence
  SiRNA target sequence
caaaaagattgcccctagtccgaa

SEQ ID NO: 204429 - DNA, 24 bp, Artificial sequence
  SiRNA target sequence
aaaaagattgcccctagtccgaag

SEQ ID NO: 204430 - DNA, 24 bp, Artificial sequence
  SiRNA target sequence
aaaagattgcccctagtccgaaga

SEQ ID NO: 204431 - DNA, 24 bp, Artificial sequence
  SiRNA target sequence
aaagattgcccctagtccgaagaa

SEQ ID NO: 204432 - DNA, 24 bp, Artificial sequence
  SiRNA target sequence
aagattgcccctagtccgaagaaa

SEQ ID NO: 204433 - DNA, 24 bp, Artificial sequence
  SiRNA target sequence
agattgcccctagtccgaagaaaa

SEQ ID NO: 204434 - DNA, 24 bp, Artificial sequence
  SiRNA target sequence
gattgcccctagtccgaagaaaaa

SEQ ID NO: 204435 - DNA, 24 bp, Artificial sequence
  SiRNA target sequence
attgcccctagtccgaagaaaaat

SEQ ID NO: 204436 - DNA, 24 bp, Artificial sequence
  SiRNA target sequence
ttgcccctagtccgaagaaaaatg

SEQ ID NO: 204437 - DNA, 24 bp, Artificial sequence
  SiRNA target sequence
tgcccctagtccgaagaaaaatgc

SEQ ID NO: 204438 - DNA, 24 bp, Artificial sequence
  SiRNA target sequence
gcccctagtccgaagaaaaatgca

SEQ ID NO: 204439 - DNA, 24 bp, Artificial sequence
  SiRNA target sequence
cccctagtccgaagaaaaatgcag

SEQ ID NO: 204440 - DNA, 24 bp, Artificial sequence
  SiRNA target sequence
ccctagtccgaagaaaaatgcagt

SEQ ID NO: 204441 - DNA, 24 bp, Artificial sequence
  SiRNA target sequence
cctagtccgaagaaaaatgcagta

SEQ ID NO: 204442 - DNA, 24 bp, Artificial sequence
  SiRNA target sequence
ctagtccgaagaaaaatgcagtaa

SEQ ID NO: 204443 - DNA, 24 bp, Artificial sequence
  SiRNA target sequence
tagtccgaagaaaaatgcagtaaa

SEQ ID NO: 204444 - DNA, 24 bp, Artificial sequence
  SiRNA target sequence
agtccgaagaaaaatgcagtaaaa

SEQ ID NO: 204445 - DNA, 24 bp, Artificial sequence
  SiRNA target sequence
gtccgaagaaaaatgcagtaaaaa

SEQ ID NO: 204446 - DNA, 24 bp, Artificial sequence
  SiRNA target sequence
tccgaagaaaaatgcagtaaaaat

SEQ ID NO: 204447 - DNA, 24 bp, Artificial sequence
  SiRNA target sequence
ccgaagaaaaatgcagtaaaaatt

SEQ ID NO: 204448 - DNA, 24 bp, Artificial sequence
  SiRNA target sequence
cgaagaaaaatgcagtaaaaatta

SEQ ID NO: 204449 - DNA, 24 bp, Artificial sequence
  SiRNA target sequence
gaagaaaaatgcagtaaaaattat

SEQ ID NO: 204450 - DNA, 24 bp, Artificial sequence
  SiRNA target sequence
aagaaaaatgcagtaaaaattatt

SEQ ID NO: 204451 - DNA, 24 bp, Artificial sequence
  SiRNA target sequence
agaaaaatgcagtaaaaattatta

SEQ ID NO: 204452 - DNA, 24 bp, Artificial sequence
  SiRNA target sequence
gaaaaatgcagtaaaaattattag

SEQ ID NO: 204453 - DNA, 24 bp, Artificial sequence
  SiRNA target sequence
aaaaatgcagtaaaaattattaga

SEQ ID NO: 204454 - DNA, 24 bp, Artificial sequence
  SiRNA target sequence
aaaatgcagtaaaaattattagaa

SEQ ID NO: 204455 - DNA, 24 bp, Artificial sequence
  SiRNA target sequence
aaatgcagtaaaaattattagaaa

SEQ ID NO: 204456 - DNA, 24 bp, Artificial sequence
  SiRNA target sequence
aatgcagtaaaaattattagaaat

SEQ ID NO: 204457 - DNA, 24 bp, Artificial sequence
  SiRNA target sequence
atgcagtaaaaattattagaaata

SEQ ID NO: 204458 - DNA, 24 bp, Artificial sequence
  SiRNA target sequence
tgcagtaaaaattattagaaatag

SEQ ID NO: 204459 - DNA, 24 bp, Artificial sequence
  SiRNA target sequence
gcagtaaaaattattagaaataga

SEQ ID NO: 204460 - DNA, 24 bp, Artificial sequence
  SiRNA target sequence
cagtaaaaattattagaaatagat

SEQ ID NO: 204461 - DNA, 24 bp, Artificial sequence
  SiRNA target sequence
agtaaaaattattagaaatagatt

SEQ ID NO: 204462 - DNA, 24 bp, Artificial sequence
  SiRNA target sequence
gtaaaaattattagaaatagatta

SEQ ID NO: 204463 - DNA, 24 bp, Artificial sequence
  SiRNA target sequence
taaaaattattagaaatagattaa

SEQ ID NO: 204464 - DNA, 24 bp, Artificial sequence
  SiRNA target sequence
aaaaattattagaaatagattaaa

SEQ ID NO: 204465 - DNA, 24 bp, Artificial sequence
  SiRNA target sequence
aaaattattagaaatagattaaaa

SEQ ID NO: 204466 - DNA, 24 bp, Artificial sequence
  SiRNA target sequence
aaattattagaaatagattaaaaa

SEQ ID NO: 204467 - DNA, 24 bp, Artificial sequence
  SiRNA target sequence
aattattagaaatagattaaaaat

SEQ ID NO: 204468 - DNA, 24 bp, Artificial sequence
  SiRNA target sequence
attattagaaatagattaaaaatc

SEQ ID NO: 204469 - DNA, 24 bp, Artificial sequence
  SiRNA target sequence
ttattagaaatagattaaaaatcg

SEQ ID NO: 204470 - DNA, 24 bp, Artificial sequence
  SiRNA target sequence
tattagaaatagattaaaaatcga

SEQ ID NO: 204471 - DNA, 24 bp, Artificial sequence
  SiRNA target sequence
attagaaatagattaaaaatcgat

SEQ ID NO: 204472 - DNA, 24 bp, Artificial sequence
  SiRNA target sequence
ttagaaatagattaaaaatcgatg

SEQ ID NO: 204473 - DNA, 24 bp, Artificial sequence
  SiRNA target sequence
tagaaatagattaaaaatcgatga

SEQ ID NO: 204474 - DNA, 24 bp, Artificial sequence
  SiRNA target sequence
agaaatagattaaaaatcgatgat

SEQ ID NO: 204475 - DNA, 24 bp, Artificial sequence
  SiRNA target sequence
gaaatagattaaaaatcgatgata

SEQ ID NO: 204476 - DNA, 24 bp, Artificial sequence
  SiRNA target sequence
aaatagattaaaaatcgatgatac

SEQ ID NO: 204477 - DNA, 24 bp, Artificial sequence
  SiRNA target sequence
aatagattaaaaatcgatgataca

SEQ ID NO: 204478 - DNA, 24 bp, Artificial sequence
  SiRNA target sequence
atagattaaaaatcgatgatacag

SEQ ID NO: 204479 - DNA, 24 bp, Artificial sequence
  SiRNA target sequence
tagattaaaaatcgatgatacagg

SEQ ID NO: 204480 - DNA, 24 bp, Artificial sequence
  SiRNA target sequence
agattaaaaatcgatgatacaggt

SEQ ID NO: 204481 - DNA, 24 bp, Artificial sequence
  SiRNA target sequence
gattaaaaatcgatgatacaggtt

SEQ ID NO: 204482 - DNA, 24 bp, Artificial sequence
  SiRNA target sequence
attaaaaatcgatgatacaggttt

SEQ ID NO: 204483 - DNA, 24 bp, Artificial sequence
  SiRNA target sequence
ttaaaaatcgatgatacaggttta

SEQ ID NO: 204484 - DNA, 24 bp, Artificial sequence
  SiRNA target sequence
taaaaatcgatgatacaggtttat

SEQ ID NO: 204485 - DNA, 24 bp, Artificial sequence
  SiRNA target sequence
aaaaatcgatgatacaggtttatt

SEQ ID NO: 204486 - DNA, 24 bp, Artificial sequence
  SiRNA target sequence
aaaatcgatgatacaggtttattt

SEQ ID NO: 204487 - DNA, 24 bp, Artificial sequence
  SiRNA target sequence
aaatcgatgatacaggtttatttt

SEQ ID NO: 204488 - DNA, 24 bp, Artificial sequence
  SiRNA target sequence
aatcgatgatacaggtttattttg

SEQ ID NO: 204489 - DNA, 24 bp, Artificial sequence
  SiRNA target sequence
atcgatgatacaggtttattttgc

SEQ ID NO: 204490 - DNA, 24 bp, Artificial sequence
  SiRNA target sequence
tcgatgatacaggtttattttgca

SEQ ID NO: 204491 - DNA, 24 bp, Artificial sequence
  SiRNA target sequence
cgatgatacaggtttattttgcat

SEQ ID NO: 204492 - DNA, 24 bp, Artificial sequence
  SiRNA target sequence
gatgatacaggtttattttgcata

SEQ ID NO: 204493 - DNA, 24 bp, Artificial sequence
  SiRNA target sequence
atgatacaggtttattttgcataa

SEQ ID NO: 204494 - DNA, 24 bp, Artificial sequence
  SiRNA target sequence
tgatacaggtttattttgcataag

SEQ ID NO: 204495 - DNA, 24 bp, Artificial sequence
  SiRNA target sequence
gatacaggtttattttgcataagc

SEQ ID NO: 204496 - DNA, 24 bp, Artificial sequence
  SiRNA target sequence
atacaggtttattttgcataagcc

SEQ ID NO: 204497 - DNA, 24 bp, Artificial sequence
  SiRNA target sequence
tacaggtttattttgcataagcca

SEQ ID NO: 204498 - DNA, 24 bp, Artificial sequence
  SiRNA target sequence
acaggtttattttgcataagccac

SEQ ID NO: 204499 - DNA, 24 bp, Artificial sequence
  SiRNA target sequence
caggtttattttgcataagccact

SEQ ID NO: 204500 - DNA, 24 bp, Artificial sequence
  SiRNA target sequence
aggtttattttgcataagccactg

SEQ ID NO: 204501 - DNA, 24 bp, Artificial sequence
  SiRNA target sequence
ggtttattttgcataagccactgt

SEQ ID NO: 204502 - DNA, 24 bp, Artificial sequence
  SiRNA target sequence
gtttattttgcataagccactgta

SEQ ID NO: 204503 - DNA, 24 bp, Artificial sequence
  SiRNA target sequence
tttattttgcataagccactgtat

SEQ ID NO: 204504 - DNA, 24 bp, Artificial sequence
  SiRNA target sequence
ttattttgcataagccactgtatt

SEQ ID NO: 204505 - DNA, 24 bp, Artificial sequence
  SiRNA target sequence
tattttgcataagccactgtatta

SEQ ID NO: 204506 - DNA, 24 bp, Artificial sequence
  SiRNA target sequence
attttgcataagccactgtattaa

SEQ ID NO: 204507 - DNA, 24 bp, Artificial sequence
  SiRNA target sequence
ttttgcataagccactgtattaaa

SEQ ID NO: 204508 - DNA, 24 bp, Artificial sequence
  SiRNA target sequence
tttgcataagccactgtattaaaa

SEQ ID NO: 204509 - DNA, 24 bp, Artificial sequence
  SiRNA target sequence
ttgcataagccactgtattaaaat

SEQ ID NO: 204510 - DNA, 24 bp, Artificial sequence
  SiRNA target sequence
tgcataagccactgtattaaaatt

SEQ ID NO: 204511 - DNA, 24 bp, Artificial sequence
  SiRNA target sequence
gcataagccactgtattaaaatta

SEQ ID NO: 204512 - DNA, 24 bp, Artificial sequence
  SiRNA target sequence
cataagccactgtattaaaattac

SEQ ID NO: 204513 - DNA, 24 bp, Artificial sequence
  SiRNA target sequence
ataagccactgtattaaaattaca

SEQ ID NO: 204514 - DNA, 24 bp, Artificial sequence
  SiRNA target sequence
taagccactgtattaaaattacag

SEQ ID NO: 204515 - DNA, 24 bp, Artificial sequence
  SiRNA target sequence
aagccactgtattaaaattacaga

SEQ ID NO: 204516 - DNA, 24 bp, Artificial sequence
  SiRNA target sequence
agccactgtattaaaattacagat

SEQ ID NO: 204517 - DNA, 24 bp, Artificial sequence
  SiRNA target sequence
gccactgtattaaaattacagatg

SEQ ID NO: 204518 - DNA, 24 bp, Artificial sequence
  SiRNA target sequence
ccactgtattaaaattacagatgc

SEQ ID NO: 204519 - DNA, 24 bp, Artificial sequence
  SiRNA target sequence
cactgtattaaaattacagatgca

SEQ ID NO: 204520 - DNA, 24 bp, Artificial sequence
  SiRNA target sequence
actgtattaaaattacagatgcaa

SEQ ID NO: 204521 - DNA, 24 bp, Artificial sequence
  SiRNA target sequence
ctgtattaaaattacagatgcaaa

SEQ ID NO: 204522 - DNA, 24 bp, Artificial sequence
  SiRNA target sequence
tgtattaaaattacagatgcaaaa

SEQ ID NO: 204523 - DNA, 24 bp, Artificial sequence
  SiRNA target sequence
gtattaaaattacagatgcaaaag

SEQ ID NO: 204524 - DNA, 24 bp, Artificial sequence
  SiRNA target sequence
tattaaaattacagatgcaaaaga

SEQ ID NO: 204525 - DNA, 24 bp, Artificial sequence
  SiRNA target sequence
attaaaattacagatgcaaaagat

SEQ ID NO: 204526 - DNA, 24 bp, Artificial sequence
  SiRNA target sequence
ttaaaattacagatgcaaaagata

SEQ ID NO: 204527 - DNA, 24 bp, Artificial sequence
  SiRNA target sequence
taaaattacagatgcaaaagatat

SEQ ID NO: 204528 - DNA, 24 bp, Artificial sequence
  SiRNA target sequence
aaaattacagatgcaaaagatata

SEQ ID NO: 204529 - DNA, 24 bp, Artificial sequence
  SiRNA target sequence
aaattacagatgcaaaagatatag

SEQ ID NO: 204530 - DNA, 24 bp, Artificial sequence
  SiRNA target sequence
aattacagatgcaaaagatatagg

SEQ ID NO: 204531 - DNA, 24 bp, Artificial sequence
  SiRNA target sequence
attacagatgcaaaagatatagga

SEQ ID NO: 204532 - DNA, 24 bp, Artificial sequence
  SiRNA target sequence
ttacagatgcaaaagatataggaa

SEQ ID NO: 204533 - DNA, 24 bp, Artificial sequence
  SiRNA target sequence
tacagatgcaaaagatataggaag

SEQ ID NO: 204534 - DNA, 24 bp, Artificial sequence
  SiRNA target sequence
acagatgcaaaagatataggaaga

SEQ ID NO: 204535 - DNA, 24 bp, Artificial sequence
  SiRNA target sequence
cagatgcaaaagatataggaagaa

SEQ ID NO: 204536 - DNA, 24 bp, Artificial sequence
  SiRNA target sequence
agatgcaaaagatataggaagaac

SEQ ID NO: 204537 - DNA, 24 bp, Artificial sequence
  SiRNA target sequence
gatgcaaaagatataggaagaaca

SEQ ID NO: 204538 - DNA, 24 bp, Artificial sequence
  SiRNA target sequence
atgcaaaagatataggaagaacat

SEQ ID NO: 204539 - DNA, 24 bp, Artificial sequence
  SiRNA target sequence
tgcaaaagatataggaagaacata

SEQ ID NO: 204540 - DNA, 24 bp, Artificial sequence
  SiRNA target sequence
gcaaaagatataggaagaacataa

SEQ ID NO: 204541 - DNA, 24 bp, Artificial sequence
  SiRNA target sequence
caaaagatataggaagaacataaa

SEQ ID NO: 204542 - DNA, 24 bp, Artificial sequence
  SiRNA target sequence
aaaagatataggaagaacataaaa

SEQ ID NO: 204543 - DNA, 24 bp, Artificial sequence
  SiRNA target sequence
aaagatataggaagaacataaaaa

SEQ ID NO: 204544 - DNA, 24 bp, Artificial sequence
  SiRNA target sequence
aagatataggaagaacataaaaaa

SEQ ID NO: 204545 - DNA, 24 bp, Artificial sequence
  SiRNA target sequence
agatataggaagaacataaaaaat

SEQ ID NO: 204546 - DNA, 24 bp, Artificial sequence
  SiRNA target sequence
gatataggaagaacataaaaaatt

SEQ ID NO: 204547 - DNA, 24 bp, Artificial sequence
  SiRNA target sequence
atataggaagaacataaaaaattt

SEQ ID NO: 204548 - DNA, 24 bp, Artificial sequence
  SiRNA target sequence
tataggaagaacataaaaaatttt

SEQ ID NO: 204549 - DNA, 24 bp, Artificial sequence
  SiRNA target sequence
ataggaagaacataaaaaattttc

SEQ ID NO: 204550 - DNA, 24 bp, Artificial sequence
  SiRNA target sequence
taggaagaacataaaaaattttca

SEQ ID NO: 204551 - DNA, 24 bp, Artificial sequence
  SiRNA target sequence
aggaagaacataaaaaattttcat

SEQ ID NO: 204552 - DNA, 24 bp, Artificial sequence
  SiRNA target sequence
ggaagaacataaaaaattttcata

SEQ ID NO: 204553 - DNA, 24 bp, Artificial sequence
  SiRNA target sequence
gaagaacataaaaaattttcataa

SEQ ID NO: 204554 - DNA, 24 bp, Artificial sequence
  SiRNA target sequence
aagaacataaaaaattttcataaa

SEQ ID NO: 204555 - DNA, 24 bp, Artificial sequence
  SiRNA target sequence
agaacataaaaaattttcataaac

SEQ ID NO: 204556 - DNA, 24 bp, Artificial sequence
  SiRNA target sequence
gaacataaaaaattttcataaaca

SEQ ID NO: 204557 - DNA, 24 bp, Artificial sequence
  SiRNA target sequence
aacataaaaaattttcataaacat

SEQ ID NO: 204558 - DNA, 24 bp, Artificial sequence
  SiRNA target sequence
acataaaaaattttcataaacata

SEQ ID NO: 204559 - DNA, 24 bp, Artificial sequence
  SiRNA target sequence
cataaaaaattttcataaacataa

SEQ ID NO: 204560 - DNA, 24 bp, Artificial sequence
  SiRNA target sequence
ataaaaaattttcataaacataat

SEQ ID NO: 204561 - DNA, 24 bp, Artificial sequence
  SiRNA target sequence
taaaaaattttcataaacataatt

SEQ ID NO: 204562 - DNA, 24 bp, Artificial sequence
  SiRNA target sequence
aaaaaattttcataaacataattg

SEQ ID NO: 204563 - DNA, 24 bp, Artificial sequence
  SiRNA target sequence
aaaaattttcataaacataattga

SEQ ID NO: 204564 - DNA, 24 bp, Artificial sequence
  SiRNA target sequence
aaaattttcataaacataattgaa

SEQ ID NO: 204565 - DNA, 24 bp, Artificial sequence
  SiRNA target sequence
aaattttcataaacataattgaat

SEQ ID NO: 204566 - DNA, 24 bp, Artificial sequence
  SiRNA target sequence
aattttcataaacataattgaatt

SEQ ID NO: 204567 - DNA, 24 bp, Artificial sequence
  SiRNA target sequence
attttcataaacataattgaattc

SEQ ID NO: 204568 - DNA, 24 bp, Artificial sequence
  SiRNA target sequence
ttttcataaacataattgaattct

SEQ ID NO: 204569 - DNA, 24 bp, Artificial sequence
  SiRNA target sequence
tttcataaacataattgaattctg

SEQ ID NO: 204570 - DNA, 24 bp, Artificial sequence
  SiRNA target sequence
ttcataaacataattgaattctga

SEQ ID NO: 204571 - DNA, 24 bp, Artificial sequence
  SiRNA target sequence
tcataaacataattgaattctgat

SEQ ID NO: 204572 - DNA, 24 bp, Artificial sequence
  SiRNA target sequence
cataaacataattgaattctgatc

SEQ ID NO: 204573 - DNA, 24 bp, Artificial sequence
  SiRNA target sequence
ataaacataattgaattctgatct

SEQ ID NO: 204574 - DNA, 24 bp, Artificial sequence
  SiRNA target sequence
taaacataattgaattctgatctt

SEQ ID NO: 204575 - DNA, 24 bp, Artificial sequence
  SiRNA target sequence
aaacataattgaattctgatcttg

SEQ ID NO: 204576 - DNA, 24 bp, Artificial sequence
  SiRNA target sequence
aacataattgaattctgatcttgc

SEQ ID NO: 204577 - DNA, 24 bp, Artificial sequence
  SiRNA target sequence
acataattgaattctgatcttgcc

SEQ ID NO: 204578 - DNA, 24 bp, Artificial sequence
  SiRNA target sequence
cataattgaattctgatcttgcct

SEQ ID NO: 204579 - DNA, 24 bp, Artificial sequence
  SiRNA target sequence
ataattgaattctgatcttgcctt

SEQ ID NO: 204580 - DNA, 24 bp, Artificial sequence
  SiRNA target sequence
taattgaattctgatcttgcctta

SEQ ID NO: 204581 - DNA, 24 bp, Artificial sequence
  SiRNA target sequence
aattgaattctgatcttgccttac

SEQ ID NO: 204582 - DNA, 24 bp, Artificial sequence
  SiRNA target sequence
attgaattctgatcttgccttacc

SEQ ID NO: 204583 - DNA, 24 bp, Artificial sequence
  SiRNA target sequence
ttgaattctgatcttgccttacca

SEQ ID NO: 204584 - DNA, 24 bp, Artificial sequence
  SiRNA target sequence
tgaattctgatcttgccttaccat

SEQ ID NO: 204585 - DNA, 24 bp, Artificial sequence
  SiRNA target sequence
gaattctgatcttgccttaccatc

SEQ ID NO: 204586 - DNA, 24 bp, Artificial sequence
  SiRNA target sequence
aattctgatcttgccttaccatca

SEQ ID NO: 204587 - DNA, 24 bp, Artificial sequence
  SiRNA target sequence
attctgatcttgccttaccatcac

SEQ ID NO: 204588 - DNA, 24 bp, Artificial sequence
  SiRNA target sequence
ttctgatcttgccttaccatcaca

SEQ ID NO: 204589 - DNA, 24 bp, Artificial sequence
  SiRNA target sequence
tctgatcttgccttaccatcacaa

SEQ ID NO: 204590 - DNA, 24 bp, Artificial sequence
  SiRNA target sequence
ctgatcttgccttaccatcacaaa

SEQ ID NO: 204591 - DNA, 24 bp, Artificial sequence
  SiRNA target sequence
tgatcttgccttaccatcacaaat

SEQ ID NO: 204592 - DNA, 24 bp, Artificial sequence
  SiRNA target sequence
gatcttgccttaccatcacaaata

SEQ ID NO: 204593 - DNA, 24 bp, Artificial sequence
  SiRNA target sequence
atcttgccttaccatcacaaataa

SEQ ID NO: 204594 - DNA, 24 bp, Artificial sequence
  SiRNA target sequence
tcttgccttaccatcacaaataaa

SEQ ID NO: 204595 - DNA, 24 bp, Artificial sequence
  SiRNA target sequence
cttgccttaccatcacaaataaat

SEQ ID NO: 204596 - DNA, 24 bp, Artificial sequence
  SiRNA target sequence
ttgccttaccatcacaaataaatc

SEQ ID NO: 204597 - DNA, 24 bp, Artificial sequence
  SiRNA target sequence
tgccttaccatcacaaataaatct

SEQ ID NO: 204598 - DNA, 24 bp, Artificial sequence
  SiRNA target sequence
gccttaccatcacaaataaatctt

SEQ ID NO: 204599 - DNA, 24 bp, Artificial sequence
  SiRNA target sequence
ccttaccatcacaaataaatcttt

SEQ ID NO: 204600 - DNA, 24 bp, Artificial sequence
  SiRNA target sequence
cttaccatcacaaataaatctttt

SEQ ID NO: 204601 - DNA, 24 bp, Artificial sequence
  SiRNA target sequence
ttaccatcacaaataaatctttta

SEQ ID NO: 204602 - DNA, 24 bp, Artificial sequence
  SiRNA target sequence
taccatcacaaataaatcttttaa

SEQ ID NO: 204603 - DNA, 24 bp, Artificial sequence
  SiRNA target sequence
accatcacaaataaatcttttaaa

SEQ ID NO: 204604 - DNA, 24 bp, Artificial sequence
  SiRNA target sequence
ccatcacaaataaatcttttaaaa

SEQ ID NO: 204605 - DNA, 24 bp, Artificial sequence
  SiRNA target sequence
catcacaaataaatcttttaaaat

SEQ ID NO: 204606 - DNA, 24 bp, Artificial sequence
  SiRNA target sequence
atcacaaataaatcttttaaaatt

SEQ ID NO: 204607 - DNA, 24 bp, Artificial sequence
  SiRNA target sequence
tcacaaataaatcttttaaaattc

SEQ ID NO: 204608 - DNA, 24 bp, Artificial sequence
  SiRNA target sequence
cacaaataaatcttttaaaattct

SEQ ID NO: 204609 - DNA, 24 bp, Artificial sequence
  SiRNA target sequence
acaaataaatcttttaaaattctt

SEQ ID NO: 204610 - DNA, 24 bp, Artificial sequence
  SiRNA target sequence
caaataaatcttttaaaattctta

SEQ ID NO: 204611 - DNA, 24 bp, Artificial sequence
  SiRNA target sequence
aaataaatcttttaaaattcttaa

SEQ ID NO: 204612 - DNA, 24 bp, Artificial sequence
  SiRNA target sequence
aataaatcttttaaaattcttaaa

SEQ ID NO: 204613 - DNA, 24 bp, Artificial sequence
  SiRNA target sequence
ataaatcttttaaaattcttaaaa

SEQ ID NO: 204614 - DNA, 24 bp, Artificial sequence
  SiRNA target sequence
taaatcttttaaaattcttaaaaa

SEQ ID NO: 204615 - DNA, 24 bp, Artificial sequence
  SiRNA target sequence
aaatcttttaaaattcttaaaaat

SEQ ID NO: 204616 - DNA, 24 bp, Artificial sequence
  SiRNA target sequence
aatcttttaaaattcttaaaaatg

SEQ ID NO: 204617 - DNA, 24 bp, Artificial sequence
  SiRNA target sequence
atcttttaaaattcttaaaaatga

SEQ ID NO: 204618 - DNA, 24 bp, Artificial sequence
  SiRNA target sequence
tcttttaaaattcttaaaaatgaa

SEQ ID NO: 204619 - DNA, 24 bp, Artificial sequence
  SiRNA target sequence
cttttaaaattcttaaaaatgaat

SEQ ID NO: 204620 - DNA, 24 bp, Artificial sequence
  SiRNA target sequence
ttttaaaattcttaaaaatgaata

SEQ ID NO: 204621 - DNA, 24 bp, Artificial sequence
  SiRNA target sequence
tttaaaattcttaaaaatgaatac

SEQ ID NO: 204622 - DNA, 24 bp, Artificial sequence
  SiRNA target sequence
ttaaaattcttaaaaatgaataca

SEQ ID NO: 204623 - DNA, 24 bp, Artificial sequence
  SiRNA target sequence
taaaattcttaaaaatgaatacac

SEQ ID NO: 204624 - DNA, 24 bp, Artificial sequence
  SiRNA target sequence
aaaattcttaaaaatgaatacaca

SEQ ID NO: 204625 - DNA, 24 bp, Artificial sequence
  SiRNA target sequence
aaattcttaaaaatgaatacacaa

SEQ ID NO: 204626 - DNA, 24 bp, Artificial sequence
  SiRNA target sequence
aattcttaaaaatgaatacacaaa

SEQ ID NO: 204627 - DNA, 24 bp, Artificial sequence
  SiRNA target sequence
attcttaaaaatgaatacacaaag

SEQ ID NO: 204628 - DNA, 24 bp, Artificial sequence
  SiRNA target sequence
ttcttaaaaatgaatacacaaagt

SEQ ID NO: 204629 - DNA, 24 bp, Artificial sequence
  SiRNA target sequence
tcttaaaaatgaatacacaaagtt

SEQ ID NO: 204630 - DNA, 24 bp, Artificial sequence
  SiRNA target sequence
cttaaaaatgaatacacaaagtta

SEQ ID NO: 204631 - DNA, 24 bp, Artificial sequence
  SiRNA target sequence
ttaaaaatgaatacacaaagttaa

SEQ ID NO: 204632 - DNA, 24 bp, Artificial sequence
  SiRNA target sequence
taaaaatgaatacacaaagttaat

SEQ ID NO: 204633 - DNA, 24 bp, Artificial sequence
  SiRNA target sequence
aaaaatgaatacacaaagttaatt

SEQ ID NO: 204634 - DNA, 24 bp, Artificial sequence
  SiRNA target sequence
aaaatgaatacacaaagttaatta

SEQ ID NO: 204635 - DNA, 24 bp, Artificial sequence
  SiRNA target sequence
aaatgaatacacaaagttaattaa

SEQ ID NO: 204636 - DNA, 24 bp, Artificial sequence
  SiRNA target sequence
aatgaatacacaaagttaattaat

SEQ ID NO: 204637 - DNA, 24 bp, Artificial sequence
  SiRNA target sequence
atgaatacacaaagttaattaatc

SEQ ID NO: 204638 - DNA, 24 bp, Artificial sequence
  SiRNA target sequence
tgaatacacaaagttaattaatcc

SEQ ID NO: 204639 - DNA, 24 bp, Artificial sequence
  SiRNA target sequence
gaatacacaaagttaattaatcca

SEQ ID NO: 204640 - DNA, 24 bp, Artificial sequence
  SiRNA target sequence
aatacacaaagttaattaatccaa

SEQ ID NO: 204641 - DNA, 24 bp, Artificial sequence
  SiRNA target sequence
atacacaaagttaattaatccaaa

SEQ ID NO: 204642 - DNA, 24 bp, Artificial sequence
  SiRNA target sequence
tacacaaagttaattaatccaaac

SEQ ID NO: 204643 - DNA, 24 bp, Artificial sequence
  SiRNA target sequence
acacaaagttaattaatccaaaca

SEQ ID NO: 204644 - DNA, 24 bp, Artificial sequence
  SiRNA target sequence
cacaaagttaattaatccaaacat

SEQ ID NO: 204645 - DNA, 24 bp, Artificial sequence
  SiRNA target sequence
acaaagttaattaatccaaacata

SEQ ID NO: 204646 - DNA, 24 bp, Artificial sequence
  SiRNA target sequence
caaagttaattaatccaaacataa

SEQ ID NO: 204647 - DNA, 24 bp, Artificial sequence
  SiRNA target sequence
aaagttaattaatccaaacataat

SEQ ID NO: 204648 - DNA, 24 bp, Artificial sequence
  SiRNA target sequence
aagttaattaatccaaacataata

SEQ ID NO: 204649 - DNA, 24 bp, Artificial sequence
  SiRNA target sequence
agttaattaatccaaacataatac

SEQ ID NO: 204650 - DNA, 24 bp, Artificial sequence
  SiRNA target sequence
gttaattaatccaaacataatacc

SEQ ID NO: 204651 - DNA, 24 bp, Artificial sequence
  SiRNA target sequence
ttaattaatccaaacataatacca

SEQ ID NO: 204652 - DNA, 24 bp, Artificial sequence
  SiRNA target sequence
taattaatccaaacataataccaa

SEQ ID NO: 204653 - DNA, 24 bp, Artificial sequence
  SiRNA target sequence
aattaatccaaacataataccaag

SEQ ID NO: 204654 - DNA, 24 bp, Artificial sequence
  SiRNA target sequence
attaatccaaacataataccaagt

SEQ ID NO: 204655 - DNA, 24 bp, Artificial sequence
  SiRNA target sequence
ttaatccaaacataataccaagta

SEQ ID NO: 204656 - DNA, 24 bp, Artificial sequence
  SiRNA target sequence
taatccaaacataataccaagtat

SEQ ID NO: 204657 - DNA, 24 bp, Artificial sequence
  SiRNA target sequence
aatccaaacataataccaagtata

SEQ ID NO: 204658 - DNA, 24 bp, Artificial sequence
  SiRNA target sequence
atccaaacataataccaagtataa

SEQ ID NO: 204659 - DNA, 24 bp, Artificial sequence
  SiRNA target sequence
tccaaacataataccaagtataaa

SEQ ID NO: 204660 - DNA, 24 bp, Artificial sequence
  SiRNA target sequence
ccaaacataataccaagtataaaa

SEQ ID NO: 204661 - DNA, 24 bp, Artificial sequence
  SiRNA target sequence
caaacataataccaagtataaaaa

SEQ ID NO: 204662 - DNA, 24 bp, Artificial sequence
  SiRNA target sequence
aaacataataccaagtataaaaaa

SEQ ID NO: 204663 - DNA, 24 bp, Artificial sequence
  SiRNA target sequence
aacataataccaagtataaaaaat

SEQ ID NO: 204664 - DNA, 24 bp, Artificial sequence
  SiRNA target sequence
acataataccaagtataaaaaatt

SEQ ID NO: 204665 - DNA, 24 bp, Artificial sequence
  SiRNA target sequence
cataataccaagtataaaaaattt

SEQ ID NO: 204666 - DNA, 24 bp, Artificial sequence
  SiRNA target sequence
ataataccaagtataaaaaattta

SEQ ID NO: 204667 - DNA, 24 bp, Artificial sequence
  SiRNA target sequence
taataccaagtataaaaaatttag

SEQ ID NO: 204668 - DNA, 24 bp, Artificial sequence
  SiRNA target sequence
aataccaagtataaaaaatttagg

SEQ ID NO: 204669 - DNA, 24 bp, Artificial sequence
  SiRNA target sequence
ataccaagtataaaaaatttaggc

SEQ ID NO: 204670 - DNA, 24 bp, Artificial sequence
  SiRNA target sequence
taccaagtataaaaaatttaggca

SEQ ID NO: 204671 - DNA, 24 bp, Artificial sequence
  SiRNA target sequence
accaagtataaaaaatttaggcat

SEQ ID NO: 204672 - DNA, 24 bp, Artificial sequence
  SiRNA target sequence
ccaagtataaaaaatttaggcatt

SEQ ID NO: 204673 - DNA, 24 bp, Artificial sequence
  SiRNA target sequence
caagtataaaaaatttaggcattt

SEQ ID NO: 204674 - DNA, 24 bp, Artificial sequence
  SiRNA target sequence
aagtataaaaaatttaggcatttc

SEQ ID NO: 204675 - DNA, 24 bp, Artificial sequence
  SiRNA target sequence
agtataaaaaatttaggcatttca

SEQ ID NO: 204676 - DNA, 24 bp, Artificial sequence
  SiRNA target sequence
gtataaaaaatttaggcatttcaa

SEQ ID NO: 204677 - DNA, 24 bp, Artificial sequence
  SiRNA target sequence
tataaaaaatttaggcatttcaac

SEQ ID NO: 204678 - DNA, 24 bp, Artificial sequence
  SiRNA target sequence
ataaaaaatttaggcatttcaacc

SEQ ID NO: 204679 - DNA, 24 bp, Artificial sequence
  SiRNA target sequence
taaaaaatttaggcatttcaacct

SEQ ID NO: 204680 - DNA, 24 bp, Artificial sequence
  SiRNA target sequence
aaaaaatttaggcatttcaacctt

SEQ ID NO: 204681 - DNA, 24 bp, Artificial sequence
  SiRNA target sequence
aaaaatttaggcatttcaacctta

SEQ ID NO: 204682 - DNA, 24 bp, Artificial sequence
  SiRNA target sequence
aaaatttaggcatttcaaccttag

SEQ ID NO: 204683 - DNA, 24 bp, Artificial sequence
  SiRNA target sequence
aaatttaggcatttcaaccttagc

SEQ ID NO: 204684 - DNA, 24 bp, Artificial sequence
  SiRNA target sequence
aatttaggcatttcaaccttagca

SEQ ID NO: 204685 - DNA, 24 bp, Artificial sequence
  SiRNA target sequence
atttaggcatttcaaccttagcaa

SEQ ID NO: 204686 - DNA, 24 bp, Artificial sequence
  SiRNA target sequence
tttaggcatttcaaccttagcaac

SEQ ID NO: 204687 - DNA, 24 bp, Artificial sequence
  SiRNA target sequence
ttaggcatttcaaccttagcaact

SEQ ID NO: 204688 - DNA, 24 bp, Artificial sequence
  SiRNA target sequence
taggcatttcaaccttagcaactt

SEQ ID NO: 204689 - DNA, 24 bp, Artificial sequence
  SiRNA target sequence
aggcatttcaaccttagcaacttt

SEQ ID NO: 204690 - DNA, 24 bp, Artificial sequence
  SiRNA target sequence
ggcatttcaaccttagcaacttta

SEQ ID NO: 204691 - DNA, 24 bp, Artificial sequence
  SiRNA target sequence
gcatttcaaccttagcaactttaa

SEQ ID NO: 204692 - DNA, 24 bp, Artificial sequence
  SiRNA target sequence
catttcaaccttagcaactttaaa

SEQ ID NO: 204693 - DNA, 24 bp, Artificial sequence
  SiRNA target sequence
atttcaaccttagcaactttaaaa

SEQ ID NO: 204694 - DNA, 24 bp, Artificial sequence
  SiRNA target sequence
tttcaaccttagcaactttaaaat

SEQ ID NO: 204695 - DNA, 24 bp, Artificial sequence
  SiRNA target sequence
ttcaaccttagcaactttaaaata

SEQ ID NO: 204696 - DNA, 24 bp, Artificial sequence
  SiRNA target sequence
tcaaccttagcaactttaaaataa

SEQ ID NO: 204697 - DNA, 24 bp, Artificial sequence
  SiRNA target sequence
caaccttagcaactttaaaataac

SEQ ID NO: 204698 - DNA, 24 bp, Artificial sequence
  SiRNA target sequence
aaccttagcaactttaaaataact

SEQ ID NO: 204699 - DNA, 24 bp, Artificial sequence
  SiRNA target sequence
accttagcaactttaaaataactc

SEQ ID NO: 204700 - DNA, 24 bp, Artificial sequence
  SiRNA target sequence
ccttagcaactttaaaataactca

SEQ ID NO: 204701 - DNA, 24 bp, Artificial sequence
  SiRNA target sequence
cttagcaactttaaaataactcag

SEQ ID NO: 204702 - DNA, 24 bp, Artificial sequence
  SiRNA target sequence
ttagcaactttaaaataactcagt

SEQ ID NO: 204703 - DNA, 24 bp, Artificial sequence
  SiRNA target sequence
tagcaactttaaaataactcagta

SEQ ID NO: 204704 - DNA, 24 bp, Artificial sequence
  SiRNA target sequence
agcaactttaaaataactcagtaa

SEQ ID NO: 204705 - DNA, 24 bp, Artificial sequence
  SiRNA target sequence
gcaactttaaaataactcagtaat

SEQ ID NO: 204706 - DNA, 24 bp, Artificial sequence
  SiRNA target sequence
caactttaaaataactcagtaatc

SEQ ID NO: 204707 - DNA, 24 bp, Artificial sequence
  SiRNA target sequence
aactttaaaataactcagtaatcc

SEQ ID NO: 204708 - DNA, 24 bp, Artificial sequence
  SiRNA target sequence
actttaaaataactcagtaatcct

SEQ ID NO: 204709 - DNA, 24 bp, Artificial sequence
  SiRNA target sequence
ctttaaaataactcagtaatcctg

SEQ ID NO: 204710 - DNA, 24 bp, Artificial sequence
  SiRNA target sequence
tttaaaataactcagtaatcctgt

SEQ ID NO: 204711 - DNA, 24 bp, Artificial sequence
  SiRNA target sequence
ttaaaataactcagtaatcctgtt

SEQ ID NO: 204712 - DNA, 24 bp, Artificial sequence
  SiRNA target sequence
taaaataactcagtaatcctgttc

SEQ ID NO: 204713 - DNA, 24 bp, Artificial sequence
  SiRNA target sequence
aaaataactcagtaatcctgttct

SEQ ID NO: 204714 - DNA, 24 bp, Artificial sequence
  SiRNA target sequence
aaataactcagtaatcctgttctt

SEQ ID NO: 204715 - DNA, 24 bp, Artificial sequence
  SiRNA target sequence
aataactcagtaatcctgttcttg

SEQ ID NO: 204716 - DNA, 24 bp, Artificial sequence
  SiRNA target sequence
ataactcagtaatcctgttcttga

SEQ ID NO: 204717 - DNA, 24 bp, Artificial sequence
  SiRNA target sequence
taactcagtaatcctgttcttgaa

SEQ ID NO: 204718 - DNA, 24 bp, Artificial sequence
  SiRNA target sequence
aactcagtaatcctgttcttgaat

SEQ ID NO: 204719 - DNA, 24 bp, Artificial sequence
  SiRNA target sequence
actcagtaatcctgttcttgaatt

SEQ ID NO: 204720 - DNA, 24 bp, Artificial sequence
  SiRNA target sequence
ctcagtaatcctgttcttgaattt

SEQ ID NO: 204721 - DNA, 24 bp, Artificial sequence
  SiRNA target sequence
tcagtaatcctgttcttgaatttg

SEQ ID NO: 204722 - DNA, 24 bp, Artificial sequence
  SiRNA target sequence
cagtaatcctgttcttgaatttgc

SEQ ID NO: 204723 - DNA, 24 bp, Artificial sequence
  SiRNA target sequence
agtaatcctgttcttgaatttgct

SEQ ID NO: 204724 - DNA, 24 bp, Artificial sequence
  SiRNA target sequence
gtaatcctgttcttgaatttgcta

SEQ ID NO: 204725 - DNA, 24 bp, Artificial sequence
  SiRNA target sequence
taatcctgttcttgaatttgctaa

SEQ ID NO: 204726 - DNA, 24 bp, Artificial sequence
  SiRNA target sequence
aatcctgttcttgaatttgctaat

SEQ ID NO: 204727 - DNA, 24 bp, Artificial sequence
  SiRNA target sequence
atcctgttcttgaatttgctaatt

SEQ ID NO: 204728 - DNA, 24 bp, Artificial sequence
  SiRNA target sequence
tcctgttcttgaatttgctaattg

SEQ ID NO: 204729 - DNA, 24 bp, Artificial sequence
  SiRNA target sequence
cctgttcttgaatttgctaattga

SEQ ID NO: 204730 - DNA, 24 bp, Artificial sequence
  SiRNA target sequence
ctgttcttgaatttgctaattgat

SEQ ID NO: 204731 - DNA, 24 bp, Artificial sequence
  SiRNA target sequence
tgttcttgaatttgctaattgatc

SEQ ID NO: 204732 - DNA, 24 bp, Artificial sequence
  SiRNA target sequence
gttcttgaatttgctaattgatca

SEQ ID NO: 204733 - DNA, 24 bp, Artificial sequence
  SiRNA target sequence
ttcttgaatttgctaattgatcaa

SEQ ID NO: 204734 - DNA, 24 bp, Artificial sequence
  SiRNA target sequence
tcttgaatttgctaattgatcaat

SEQ ID NO: 204735 - DNA, 24 bp, Artificial sequence
  SiRNA target sequence
cttgaatttgctaattgatcaatc

SEQ ID NO: 204736 - DNA, 24 bp, Artificial sequence
  SiRNA target sequence
ttgaatttgctaattgatcaatct

SEQ ID NO: 204737 - DNA, 24 bp, Artificial sequence
  SiRNA target sequence
tgaatttgctaattgatcaatctc

SEQ ID NO: 204738 - DNA, 24 bp, Artificial sequence
  SiRNA target sequence
gaatttgctaattgatcaatctca

SEQ ID NO: 204739 - DNA, 24 bp, Artificial sequence
  SiRNA target sequence
aatttgctaattgatcaatctcat

SEQ ID NO: 204740 - DNA, 24 bp, Artificial sequence
  SiRNA target sequence
atttgctaattgatcaatctcatc

SEQ ID NO: 204741 - DNA, 24 bp, Artificial sequence
  SiRNA target sequence
tttgctaattgatcaatctcatct

SEQ ID NO: 204742 - DNA, 24 bp, Artificial sequence
  SiRNA target sequence
ttgctaattgatcaatctcatctt

SEQ ID NO: 204743 - DNA, 24 bp, Artificial sequence
  SiRNA target sequence
tgctaattgatcaatctcatcttc

SEQ ID NO: 204744 - DNA, 24 bp, Artificial sequence
  SiRNA target sequence
gctaattgatcaatctcatcttcc

SEQ ID NO: 204745 - DNA, 24 bp, Artificial sequence
  SiRNA target sequence
ctaattgatcaatctcatcttccg

SEQ ID NO: 204746 - DNA, 24 bp, Artificial sequence
  SiRNA target sequence
taattgatcaatctcatcttccgt

SEQ ID NO: 204747 - DNA, 24 bp, Artificial sequence
  SiRNA target sequence
aattgatcaatctcatcttccgta

SEQ ID NO: 204748 - DNA, 24 bp, Artificial sequence
  SiRNA target sequence
attgatcaatctcatcttccgtag

SEQ ID NO: 204749 - DNA, 24 bp, Artificial sequence
  SiRNA target sequence
ttgatcaatctcatcttccgtagg

SEQ ID NO: 204750 - DNA, 24 bp, Artificial sequence
  SiRNA target sequence
tgatcaatctcatcttccgtaggt

SEQ ID NO: 204751 - DNA, 24 bp, Artificial sequence
  SiRNA target sequence
gatcaatctcatcttccgtaggta

SEQ ID NO: 204752 - DNA, 24 bp, Artificial sequence
  SiRNA target sequence
atcaatctcatcttccgtaggtaa

SEQ ID NO: 204753 - DNA, 24 bp, Artificial sequence
  SiRNA target sequence
tcaatctcatcttccgtaggtaag

SEQ ID NO: 204754 - DNA, 24 bp, Artificial sequence
  SiRNA target sequence
caatctcatcttccgtaggtaagt

SEQ ID NO: 204755 - DNA, 24 bp, Artificial sequence
  SiRNA target sequence
aatctcatcttccgtaggtaagtt

SEQ ID NO: 204756 - DNA, 24 bp, Artificial sequence
  SiRNA target sequence
atctcatcttccgtaggtaagttg

SEQ ID NO: 204757 - DNA, 24 bp, Artificial sequence
  SiRNA target sequence
tctcatcttccgtaggtaagttgt

SEQ ID NO: 204758 - DNA, 24 bp, Artificial sequence
  SiRNA target sequence
ctcatcttccgtaggtaagttgtt

SEQ ID NO: 204759 - DNA, 24 bp, Artificial sequence
  SiRNA target sequence
tcatcttccgtaggtaagttgttt

SEQ ID NO: 204760 - DNA, 24 bp, Artificial sequence
  SiRNA target sequence
catcttccgtaggtaagttgtttt

SEQ ID NO: 204761 - DNA, 24 bp, Artificial sequence
  SiRNA target sequence
atcttccgtaggtaagttgttttc

SEQ ID NO: 204762 - DNA, 24 bp, Artificial sequence
  SiRNA target sequence
tcttccgtaggtaagttgttttca

SEQ ID NO: 204763 - DNA, 24 bp, Artificial sequence
  SiRNA target sequence
cttccgtaggtaagttgttttcag

SEQ ID NO: 204764 - DNA, 24 bp, Artificial sequence
  SiRNA target sequence
ttccgtaggtaagttgttttcagg

SEQ ID NO: 204765 - DNA, 24 bp, Artificial sequence
  SiRNA target sequence
tccgtaggtaagttgttttcaggt

SEQ ID NO: 204766 - DNA, 24 bp, Artificial sequence
  SiRNA target sequence
ccgtaggtaagttgttttcaggtg

SEQ ID NO: 204767 - DNA, 24 bp, Artificial sequence
  SiRNA target sequence
cgtaggtaagttgttttcaggtgt

SEQ ID NO: 204768 - DNA, 24 bp, Artificial sequence
  SiRNA target sequence
gtaggtaagttgttttcaggtgtt

SEQ ID NO: 204769 - DNA, 24 bp, Artificial sequence
  SiRNA target sequence
taggtaagttgttttcaggtgttt

SEQ ID NO: 204770 - DNA, 24 bp, Artificial sequence
  SiRNA target sequence
aggtaagttgttttcaggtgtttc

SEQ ID NO: 204771 - DNA, 24 bp, Artificial sequence
  SiRNA target sequence
ggtaagttgttttcaggtgtttca

SEQ ID NO: 204772 - DNA, 24 bp, Artificial sequence
  SiRNA target sequence
gtaagttgttttcaggtgtttcat

SEQ ID NO: 204773 - DNA, 24 bp, Artificial sequence
  SiRNA target sequence
taagttgttttcaggtgtttcatt

SEQ ID NO: 204774 - DNA, 24 bp, Artificial sequence
  SiRNA target sequence
aagttgttttcaggtgtttcattt

SEQ ID NO: 204775 - DNA, 24 bp, Artificial sequence
  SiRNA target sequence
agttgttttcaggtgtttcattta

SEQ ID NO: 204776 - DNA, 24 bp, Artificial sequence
  SiRNA target sequence
gttgttttcaggtgtttcatttat

SEQ ID NO: 204777 - DNA, 24 bp, Artificial sequence
  SiRNA target sequence
ttgttttcaggtgtttcatttatt

SEQ ID NO: 204778 - DNA, 24 bp, Artificial sequence
  SiRNA target sequence
tgttttcaggtgtttcatttatta

SEQ ID NO: 204779 - DNA, 24 bp, Artificial sequence
  SiRNA target sequence
gttttcaggtgtttcatttattac

SEQ ID NO: 204780 - DNA, 24 bp, Artificial sequence
  SiRNA target sequence
ttttcaggtgtttcatttattaca

SEQ ID NO: 204781 - DNA, 24 bp, Artificial sequence
  SiRNA target sequence
tttcaggtgtttcatttattacac

SEQ ID NO: 204782 - DNA, 24 bp, Artificial sequence
  SiRNA target sequence
ttcaggtgtttcatttattacact

SEQ ID NO: 204783 - DNA, 24 bp, Artificial sequence
  SiRNA target sequence
tcaggtgtttcatttattacactc

SEQ ID NO: 204784 - DNA, 24 bp, Artificial sequence
  SiRNA target sequence
caggtgtttcatttattacactca

SEQ ID NO: 204785 - DNA, 24 bp, Artificial sequence
  SiRNA target sequence
aggtgtttcatttattacactcat

SEQ ID NO: 204786 - DNA, 25 bp, Artificial sequence
  SiRNA target sequence
ttattctgcgttttcttttttgtcg

SEQ ID NO: 204787 - DNA, 25 bp, Artificial sequence
  SiRNA target sequence
tattctgcgttttcttttttgtcgt

SEQ ID NO: 204788 - DNA, 25 bp, Artificial sequence
  SiRNA target sequence
attctgcgttttcttttttgtcgtc

SEQ ID NO: 204789 - DNA, 25 bp, Artificial sequence
  SiRNA target sequence
ttctgcgttttcttttttgtcgtct

SEQ ID NO: 204790 - DNA, 25 bp, Artificial sequence
  SiRNA target sequence
tctgcgttttcttttttgtcgtctt

SEQ ID NO: 204791 - DNA, 25 bp, Artificial sequence
  SiRNA target sequence
ctgcgttttcttttttgtcgtcttt

SEQ ID NO: 204792 - DNA, 25 bp, Artificial sequence
  SiRNA target sequence
tgcgttttcttttttgtcgtctttt

SEQ ID NO: 204793 - DNA, 25 bp, Artificial sequence
  SiRNA target sequence
gcgttttcttttttgtcgtctttta

SEQ ID NO: 204794 - DNA, 25 bp, Artificial sequence
  SiRNA target sequence
cgttttcttttttgtcgtcttttat

SEQ ID NO: 204795 - DNA, 25 bp, Artificial sequence
  SiRNA target sequence
gttttcttttttgtcgtcttttatt

SEQ ID NO: 204796 - DNA, 25 bp, Artificial sequence
  SiRNA target sequence
ttttcttttttgtcgtcttttatta

SEQ ID NO: 204797 - DNA, 25 bp, Artificial sequence
  SiRNA target sequence
tttcttttttgtcgtcttttattaa

SEQ ID NO: 204798 - DNA, 25 bp, Artificial sequence
  SiRNA target sequence
ttcttttttgtcgtcttttattaaa

SEQ ID NO: 204799 - DNA, 25 bp, Artificial sequence
  SiRNA target sequence
tcttttttgtcgtcttttattaaat

SEQ ID NO: 204800 - DNA, 25 bp, Artificial sequence
  SiRNA target sequence
cttttttgtcgtcttttattaaatc

SEQ ID NO: 204801 - DNA, 25 bp, Artificial sequence
  SiRNA target sequence
ttttttgtcgtcttttattaaatct

SEQ ID NO: 204802 - DNA, 25 bp, Artificial sequence
  SiRNA target sequence
tttttgtcgtcttttattaaatcta

SEQ ID NO: 204803 - DNA, 25 bp, Artificial sequence
  SiRNA target sequence
ttttgtcgtcttttattaaatctat

SEQ ID NO: 204804 - DNA, 25 bp, Artificial sequence
  SiRNA target sequence
tttgtcgtcttttattaaatctatg

SEQ ID NO: 204805 - DNA, 25 bp, Artificial sequence
  SiRNA target sequence
ttgtcgtcttttattaaatctatgt

SEQ ID NO: 204806 - DNA, 25 bp, Artificial sequence
  SiRNA target sequence
tgtcgtcttttattaaatctatgtc

SEQ ID NO: 204807 - DNA, 25 bp, Artificial sequence
  SiRNA target sequence
gtcgtcttttattaaatctatgtct

SEQ ID NO: 204808 - DNA, 25 bp, Artificial sequence
  SiRNA target sequence
tcgtcttttattaaatctatgtcta

SEQ ID NO: 204809 - DNA, 25 bp, Artificial sequence
  SiRNA target sequence
cgtcttttattaaatctatgtctac

SEQ ID NO: 204810 - DNA, 25 bp, Artificial sequence
  SiRNA target sequence
gtcttttattaaatctatgtctaca

SEQ ID NO: 204811 - DNA, 25 bp, Artificial sequence
  SiRNA target sequence
tcttttattaaatctatgtctacac

SEQ ID NO: 204812 - DNA, 25 bp, Artificial sequence
  SiRNA target sequence
cttttattaaatctatgtctacact

SEQ ID NO: 204813 - DNA, 25 bp, Artificial sequence
  SiRNA target sequence
ttttattaaatctatgtctacactt

SEQ ID NO: 204814 - DNA, 25 bp, Artificial sequence
  SiRNA target sequence
tttattaaatctatgtctacacttg

SEQ ID NO: 204815 - DNA, 25 bp, Artificial sequence
  SiRNA target sequence
ttattaaatctatgtctacacttgt

SEQ ID NO: 204816 - DNA, 25 bp, Artificial sequence
  SiRNA target sequence
tattaaatctatgtctacacttgta

SEQ ID NO: 204817 - DNA, 25 bp, Artificial sequence
  SiRNA target sequence
attaaatctatgtctacacttgtat

SEQ ID NO: 204818 - DNA, 25 bp, Artificial sequence
  SiRNA target sequence
ttaaatctatgtctacacttgtatt

SEQ ID NO: 204819 - DNA, 25 bp, Artificial sequence
  SiRNA target sequence
taaatctatgtctacacttgtatta

SEQ ID NO: 204820 - DNA, 25 bp, Artificial sequence
  SiRNA target sequence
aaatctatgtctacacttgtattat

SEQ ID NO: 204821 - DNA, 25 bp, Artificial sequence
  SiRNA target sequence
aatctatgtctacacttgtattatt

SEQ ID NO: 204822 - DNA, 25 bp, Artificial sequence
  SiRNA target sequence
atctatgtctacacttgtattattt

SEQ ID NO: 204823 - DNA, 25 bp, Artificial sequence
  SiRNA target sequence
tctatgtctacacttgtattatttt

SEQ ID NO: 204824 - DNA, 25 bp, Artificial sequence
  SiRNA target sequence
ctatgtctacacttgtattattttt

SEQ ID NO: 204825 - DNA, 25 bp, Artificial sequence
  SiRNA target sequence
tatgtctacacttgtattattttta

SEQ ID NO: 204826 - DNA, 25 bp, Artificial sequence
  SiRNA target sequence
atgtctacacttgtattatttttaa

SEQ ID NO: 204827 - DNA, 25 bp, Artificial sequence
  SiRNA target sequence
tgtctacacttgtattatttttaat

SEQ ID NO: 204828 - DNA, 25 bp, Artificial sequence
  SiRNA target sequence
gtctacacttgtattatttttaatt

SEQ ID NO: 204829 - DNA, 25 bp, Artificial sequence
  SiRNA target sequence
tctacacttgtattatttttaattg

SEQ ID NO: 204830 - DNA, 25 bp, Artificial sequence
  SiRNA target sequence
ctacacttgtattatttttaattga

SEQ ID NO: 204831 - DNA, 25 bp, Artificial sequence
  SiRNA target sequence
tacacttgtattatttttaattgaa

SEQ ID NO: 204832 - DNA, 25 bp, Artificial sequence
  SiRNA target sequence
acacttgtattatttttaattgaaa

SEQ ID NO: 204833 - DNA, 25 bp, Artificial sequence
  SiRNA target sequence
cacttgtattatttttaattgaaac

SEQ ID NO: 204834 - DNA, 25 bp, Artificial sequence
  SiRNA target sequence
acttgtattatttttaattgaaacg

SEQ ID NO: 204835 - DNA, 25 bp, Artificial sequence
  SiRNA target sequence
cttgtattatttttaattgaaacgt

SEQ ID NO: 204836 - DNA, 25 bp, Artificial sequence
  SiRNA target sequence
ttgtattatttttaattgaaacgtt

SEQ ID NO: 204837 - DNA, 25 bp, Artificial sequence
  SiRNA target sequence
tgtattatttttaattgaaacgtta

SEQ ID NO: 204838 - DNA, 25 bp, Artificial sequence
  SiRNA target sequence
gtattatttttaattgaaacgttat

SEQ ID NO: 204839 - DNA, 25 bp, Artificial sequence
  SiRNA target sequence
tattatttttaattgaaacgttata

SEQ ID NO: 204840 - DNA, 25 bp, Artificial sequence
  SiRNA target sequence
attatttttaattgaaacgttatat

SEQ ID NO: 204841 - DNA, 25 bp, Artificial sequence
  SiRNA target sequence
ttatttttaattgaaacgttatatg

SEQ ID NO: 204842 - DNA, 25 bp, Artificial sequence
  SiRNA target sequence
tatttttaattgaaacgttatatgc

SEQ ID NO: 204843 - DNA, 25 bp, Artificial sequence
  SiRNA target sequence
atttttaattgaaacgttatatgca

SEQ ID NO: 204844 - DNA, 25 bp, Artificial sequence
  SiRNA target sequence
tttttaattgaaacgttatatgcac

SEQ ID NO: 204845 - DNA, 25 bp, Artificial sequence
  SiRNA target sequence
ttttaattgaaacgttatatgcacc

SEQ ID NO: 204846 - DNA, 25 bp, Artificial sequence
  SiRNA target sequence
tttaattgaaacgttatatgcaccc

SEQ ID NO: 204847 - DNA, 25 bp, Artificial sequence
  SiRNA target sequence
ttaattgaaacgttatatgcacccg

SEQ ID NO: 204848 - DNA, 25 bp, Artificial sequence
  SiRNA target sequence
taattgaaacgttatatgcacccgc

SEQ ID NO: 204849 - DNA, 25 bp, Artificial sequence
  SiRNA target sequence
aattgaaacgttatatgcacccgct

SEQ ID NO: 204850 - DNA, 25 bp, Artificial sequence
  SiRNA target sequence
attgaaacgttatatgcacccgcta

SEQ ID NO: 204851 - DNA, 25 bp, Artificial sequence
  SiRNA target sequence
ttgaaacgttatatgcacccgctaa

SEQ ID NO: 204852 - DNA, 25 bp, Artificial sequence
  SiRNA target sequence
tgaaacgttatatgcacccgctaaa

SEQ ID NO: 204853 - DNA, 25 bp, Artificial sequence
  SiRNA target sequence
gaaacgttatatgcacccgctaaat

SEQ ID NO: 204854 - DNA, 25 bp, Artificial sequence
  SiRNA target sequence
aaacgttatatgcacccgctaaata

SEQ ID NO: 204855 - DNA, 25 bp, Artificial sequence
  SiRNA target sequence
aacgttatatgcacccgctaaatag

SEQ ID NO: 204856 - DNA, 25 bp, Artificial sequence
  SiRNA target sequence
acgttatatgcacccgctaaataga

SEQ ID NO: 204857 - DNA, 25 bp, Artificial sequence
  SiRNA target sequence
cgttatatgcacccgctaaatagat

SEQ ID NO: 204858 - DNA, 25 bp, Artificial sequence
  SiRNA target sequence
gttatatgcacccgctaaatagatt

SEQ ID NO: 204859 - DNA, 25 bp, Artificial sequence
  SiRNA target sequence
ttatatgcacccgctaaatagatta

SEQ ID NO: 204860 - DNA, 25 bp, Artificial sequence
  SiRNA target sequence
tatatgcacccgctaaatagattat

SEQ ID NO: 204861 - DNA, 25 bp, Artificial sequence
  SiRNA target sequence
atatgcacccgctaaatagattata

SEQ ID NO: 204862 - DNA, 25 bp, Artificial sequence
  SiRNA target sequence
tatgcacccgctaaatagattatag

SEQ ID NO: 204863 - DNA, 25 bp, Artificial sequence
  SiRNA target sequence
atgcacccgctaaatagattatagc

SEQ ID NO: 204864 - DNA, 25 bp, Artificial sequence
  SiRNA target sequence
tgcacccgctaaatagattatagct

SEQ ID NO: 204865 - DNA, 25 bp, Artificial sequence
  SiRNA target sequence
gcacccgctaaatagattatagctc

SEQ ID NO: 204866 - DNA, 25 bp, Artificial sequence
  SiRNA target sequence
cacccgctaaatagattatagctct

SEQ ID NO: 204867 - DNA, 25 bp, Artificial sequence
  SiRNA target sequence
acccgctaaatagattatagctcta

SEQ ID NO: 204868 - DNA, 25 bp, Artificial sequence
  SiRNA target sequence
cccgctaaatagattatagctctaa

SEQ ID NO: 204869 - DNA, 25 bp, Artificial sequence
  SiRNA target sequence
ccgctaaatagattatagctctaat

SEQ ID NO: 204870 - DNA, 25 bp, Artificial sequence
  SiRNA target sequence
cgctaaatagattatagctctaatc

SEQ ID NO: 204871 - DNA, 25 bp, Artificial sequence
  SiRNA target sequence
gctaaatagattatagctctaatcc

SEQ ID NO: 204872 - DNA, 25 bp, Artificial sequence
  SiRNA target sequence
ctaaatagattatagctctaatcca

SEQ ID NO: 204873 - DNA, 25 bp, Artificial sequence
  SiRNA target sequence
taaatagattatagctctaatccaa

SEQ ID NO: 204874 - DNA, 25 bp, Artificial sequence
  SiRNA target sequence
aaatagattatagctctaatccaaa

SEQ ID NO: 204875 - DNA, 25 bp, Artificial sequence
  SiRNA target sequence
aatagattatagctctaatccaaat

SEQ ID NO: 204876 - DNA, 25 bp, Artificial sequence
  SiRNA target sequence
atagattatagctctaatccaaata

SEQ ID NO: 204877 - DNA, 25 bp, Artificial sequence
  SiRNA target sequence
tagattatagctctaatccaaatat

SEQ ID NO: 204878 - DNA, 25 bp, Artificial sequence
  SiRNA target sequence
agattatagctctaatccaaatata

SEQ ID NO: 204879 - DNA, 25 bp, Artificial sequence
  SiRNA target sequence
gattatagctctaatccaaatataa

SEQ ID NO: 204880 - DNA, 25 bp, Artificial sequence
  SiRNA target sequence
attatagctctaatccaaatataaa

SEQ ID NO: 204881 - DNA, 25 bp, Artificial sequence
  SiRNA target sequence
ttatagctctaatccaaatataaat

SEQ ID NO: 204882 - DNA, 25 bp, Artificial sequence
  SiRNA target sequence
tatagctctaatccaaatataaatc

SEQ ID NO: 204883 - DNA, 25 bp, Artificial sequence
  SiRNA target sequence
atagctctaatccaaatataaatca

SEQ ID NO: 204884 - DNA, 25 bp, Artificial sequence
  SiRNA target sequence
tagctctaatccaaatataaatcaa

SEQ ID NO: 204885 - DNA, 25 bp, Artificial sequence
  SiRNA target sequence
agctctaatccaaatataaatcaat

SEQ ID NO: 204886 - DNA, 25 bp, Artificial sequence
  SiRNA target sequence
gctctaatccaaatataaatcaata

SEQ ID NO: 204887 - DNA, 25 bp, Artificial sequence
  SiRNA target sequence
ctctaatccaaatataaatcaatat

SEQ ID NO: 204888 - DNA, 25 bp, Artificial sequence
  SiRNA target sequence
tctaatccaaatataaatcaatatt

SEQ ID NO: 204889 - DNA, 25 bp, Artificial sequence
  SiRNA target sequence
ctaatccaaatataaatcaatatta

SEQ ID NO: 204890 - DNA, 25 bp, Artificial sequence
  SiRNA target sequence
taatccaaatataaatcaatattat

SEQ ID NO: 204891 - DNA, 25 bp, Artificial sequence
  SiRNA target sequence
aatccaaatataaatcaatattatt

SEQ ID NO: 204892 - DNA, 25 bp, Artificial sequence
  SiRNA target sequence
atccaaatataaatcaatattattg

SEQ ID NO: 204893 - DNA, 25 bp, Artificial sequence
  SiRNA target sequence
tccaaatataaatcaatattattgc

SEQ ID NO: 204894 - DNA, 25 bp, Artificial sequence
  SiRNA target sequence
ccaaatataaatcaatattattgca

SEQ ID NO: 204895 - DNA, 25 bp, Artificial sequence
  SiRNA target sequence
caaatataaatcaatattattgcaa

SEQ ID NO: 204896 - DNA, 25 bp, Artificial sequence
  SiRNA target sequence
aaatataaatcaatattattgcaat

SEQ ID NO: 204897 - DNA, 25 bp, Artificial sequence
  SiRNA target sequence
aatataaatcaatattattgcaatc

SEQ ID NO: 204898 - DNA, 25 bp, Artificial sequence
  SiRNA target sequence
atataaatcaatattattgcaatcg

SEQ ID NO: 204899 - DNA, 25 bp, Artificial sequence
  SiRNA target sequence
tataaatcaatattattgcaatcgt

SEQ ID NO: 204900 - DNA, 25 bp, Artificial sequence
  SiRNA target sequence
ataaatcaatattattgcaatcgtt

SEQ ID NO: 204901 - DNA, 25 bp, Artificial sequence
  SiRNA target sequence
taaatcaatattattgcaatcgtta

SEQ ID NO: 204902 - DNA, 25 bp, Artificial sequence
  SiRNA target sequence
aaatcaatattattgcaatcgttaa

SEQ ID NO: 204903 - DNA, 25 bp, Artificial sequence
  SiRNA target sequence
aatcaatattattgcaatcgttaat

SEQ ID NO: 204904 - DNA, 25 bp, Artificial sequence
  SiRNA target sequence
atcaatattattgcaatcgttaatg

SEQ ID NO: 204905 - DNA, 25 bp, Artificial sequence
  SiRNA target sequence
tcaatattattgcaatcgttaatgt

SEQ ID NO: 204906 - DNA, 25 bp, Artificial sequence
  SiRNA target sequence
caatattattgcaatcgttaatgtg

SEQ ID NO: 204907 - DNA, 25 bp, Artificial sequence
  SiRNA target sequence
aatattattgcaatcgttaatgtga

SEQ ID NO: 204908 - DNA, 25 bp, Artificial sequence
  SiRNA target sequence
atattattgcaatcgttaatgtgat

SEQ ID NO: 204909 - DNA, 25 bp, Artificial sequence
  SiRNA target sequence
tattattgcaatcgttaatgtgatt

SEQ ID NO: 204910 - DNA, 25 bp, Artificial sequence
  SiRNA target sequence
attattgcaatcgttaatgtgattg

SEQ ID NO: 204911 - DNA, 25 bp, Artificial sequence
  SiRNA target sequence
ttattgcaatcgttaatgtgattgg

SEQ ID NO: 204912 - DNA, 25 bp, Artificial sequence
  SiRNA target sequence
tattgcaatcgttaatgtgattgga

SEQ ID NO: 204913 - DNA, 25 bp, Artificial sequence
  SiRNA target sequence
attgcaatcgttaatgtgattggac

SEQ ID NO: 204914 - DNA, 25 bp, Artificial sequence
  SiRNA target sequence
ttgcaatcgttaatgtgattggact

SEQ ID NO: 204915 - DNA, 25 bp, Artificial sequence
  SiRNA target sequence
tgcaatcgttaatgtgattggacta

SEQ ID NO: 204916 - DNA, 25 bp, Artificial sequence
  SiRNA target sequence
gcaatcgttaatgtgattggactac

SEQ ID NO: 204917 - DNA, 25 bp, Artificial sequence
  SiRNA target sequence
caatcgttaatgtgattggactacc

SEQ ID NO: 204918 - DNA, 25 bp, Artificial sequence
  SiRNA target sequence
aatcgttaatgtgattggactaccc

SEQ ID NO: 204919 - DNA, 25 bp, Artificial sequence
  SiRNA target sequence
atcgttaatgtgattggactaccct

SEQ ID NO: 204920 - DNA, 25 bp, Artificial sequence
  SiRNA target sequence
tcgttaatgtgattggactaccctt

SEQ ID NO: 204921 - DNA, 25 bp, Artificial sequence
  SiRNA target sequence
cgttaatgtgattggactacccttc

SEQ ID NO: 204922 - DNA, 25 bp, Artificial sequence
  SiRNA target sequence
gttaatgtgattggactacccttcc

SEQ ID NO: 204923 - DNA, 25 bp, Artificial sequence
  SiRNA target sequence
ttaatgtgattggactacccttcct

SEQ ID NO: 204924 - DNA, 25 bp, Artificial sequence
  SiRNA target sequence
taatgtgattggactacccttcctt

SEQ ID NO: 204925 - DNA, 25 bp, Artificial sequence
  SiRNA target sequence
aatgtgattggactacccttcctta

SEQ ID NO: 204926 - DNA, 25 bp, Artificial sequence
  SiRNA target sequence
atgtgattggactacccttccttac

SEQ ID NO: 204927 - DNA, 25 bp, Artificial sequence
  SiRNA target sequence
tgtgattggactacccttccttaca

SEQ ID NO: 204928 - DNA, 25 bp, Artificial sequence
  SiRNA target sequence
gtgattggactacccttccttacat

SEQ ID NO: 204929 - DNA, 25 bp, Artificial sequence
  SiRNA target sequence
tgattggactacccttccttacatt

SEQ ID NO: 204930 - DNA, 25 bp, Artificial sequence
  SiRNA target sequence
gattggactacccttccttacatta

SEQ ID NO: 204931 - DNA, 25 bp, Artificial sequence
  SiRNA target sequence
attggactacccttccttacattat

SEQ ID NO: 204932 - DNA, 25 bp, Artificial sequence
  SiRNA target sequence
ttggactacccttccttacattatc

SEQ ID NO: 204933 - DNA, 25 bp, Artificial sequence
  SiRNA target sequence
tggactacccttccttacattatca

SEQ ID NO: 204934 - DNA, 25 bp, Artificial sequence
  SiRNA target sequence
ggactacccttccttacattatcag

SEQ ID NO: 204935 - DNA, 25 bp, Artificial sequence
  SiRNA target sequence
gactacccttccttacattatcagt

SEQ ID NO: 204936 - DNA, 25 bp, Artificial sequence
  SiRNA target sequence
actacccttccttacattatcagta

SEQ ID NO: 204937 - DNA, 25 bp, Artificial sequence
  SiRNA target sequence
ctacccttccttacattatcagtat

SEQ ID NO: 204938 - DNA, 25 bp, Artificial sequence
  SiRNA target sequence
tacccttccttacattatcagtatc

SEQ ID NO: 204939 - DNA, 25 bp, Artificial sequence
  SiRNA target sequence
acccttccttacattatcagtatca

SEQ ID NO: 204940 - DNA, 25 bp, Artificial sequence
  SiRNA target sequence
cccttccttacattatcagtatcaa

SEQ ID NO: 204941 - DNA, 25 bp, Artificial sequence
  SiRNA target sequence
ccttccttacattatcagtatcaag

SEQ ID NO: 204942 - DNA, 25 bp, Artificial sequence
  SiRNA target sequence
cttccttacattatcagtatcaagt

SEQ ID NO: 204943 - DNA, 25 bp, Artificial sequence
  SiRNA target sequence
ttccttacattatcagtatcaagtg

SEQ ID NO: 204944 - DNA, 25 bp, Artificial sequence
  SiRNA target sequence
tccttacattatcagtatcaagtgc

SEQ ID NO: 204945 - DNA, 25 bp, Artificial sequence
  SiRNA target sequence
ccttacattatcagtatcaagtgct

SEQ ID NO: 204946 - DNA, 25 bp, Artificial sequence
  SiRNA target sequence
cttacattatcagtatcaagtgcta

SEQ ID NO: 204947 - DNA, 25 bp, Artificial sequence
  SiRNA target sequence
ttacattatcagtatcaagtgctac

SEQ ID NO: 204948 - DNA, 25 bp, Artificial sequence
  SiRNA target sequence
tacattatcagtatcaagtgctact

SEQ ID NO: 204949 - DNA, 25 bp, Artificial sequence
  SiRNA target sequence
acattatcagtatcaagtgctacta

SEQ ID NO: 204950 - DNA, 25 bp, Artificial sequence
  SiRNA target sequence
cattatcagtatcaagtgctactaa

SEQ ID NO: 204951 - DNA, 25 bp, Artificial sequence
  SiRNA target sequence
attatcagtatcaagtgctactaat

SEQ ID NO: 204952 - DNA, 25 bp, Artificial sequence
  SiRNA target sequence
ttatcagtatcaagtgctactaata

SEQ ID NO: 204953 - DNA, 25 bp, Artificial sequence
  SiRNA target sequence
tatcagtatcaagtgctactaatat

SEQ ID NO: 204954 - DNA, 25 bp, Artificial sequence
  SiRNA target sequence
atcagtatcaagtgctactaatatg

SEQ ID NO: 204955 - DNA, 25 bp, Artificial sequence
  SiRNA target sequence
tcagtatcaagtgctactaatatgg

SEQ ID NO: 204956 - DNA, 25 bp, Artificial sequence
  SiRNA target sequence
cagtatcaagtgctactaatatggc

SEQ ID NO: 204957 - DNA, 25 bp, Artificial sequence
  SiRNA target sequence
agtatcaagtgctactaatatggct

SEQ ID NO: 204958 - DNA, 25 bp, Artificial sequence
  SiRNA target sequence
gtatcaagtgctactaatatggcta

SEQ ID NO: 204959 - DNA, 25 bp, Artificial sequence
  SiRNA target sequence
tatcaagtgctactaatatggctag

SEQ ID NO: 204960 - DNA, 25 bp, Artificial sequence
  SiRNA target sequence
atcaagtgctactaatatggctagt

SEQ ID NO: 204961 - DNA, 25 bp, Artificial sequence
  SiRNA target sequence
tcaagtgctactaatatggctagtc

SEQ ID NO: 204962 - DNA, 25 bp, Artificial sequence
  SiRNA target sequence
caagtgctactaatatggctagtcc

SEQ ID NO: 204963 - DNA, 25 bp, Artificial sequence
  SiRNA target sequence
aagtgctactaatatggctagtcca

SEQ ID NO: 204964 - DNA, 25 bp, Artificial sequence
  SiRNA target sequence
agtgctactaatatggctagtccat

SEQ ID NO: 204965 - DNA, 25 bp, Artificial sequence
  SiRNA target sequence
gtgctactaatatggctagtccata

SEQ ID NO: 204966 - DNA, 25 bp, Artificial sequence
  SiRNA target sequence
tgctactaatatggctagtccatat

SEQ ID NO: 204967 - DNA, 25 bp, Artificial sequence
  SiRNA target sequence
gctactaatatggctagtccatata

SEQ ID NO: 204968 - DNA, 25 bp, Artificial sequence
  SiRNA target sequence
ctactaatatggctagtccatataa

SEQ ID NO: 204969 - DNA, 25 bp, Artificial sequence
  SiRNA target sequence
tactaatatggctagtccatataat

SEQ ID NO: 204970 - DNA, 25 bp, Artificial sequence
  SiRNA target sequence
actaatatggctagtccatataatg

SEQ ID NO: 204971 - DNA, 25 bp, Artificial sequence
  SiRNA target sequence
ctaatatggctagtccatataatga

SEQ ID NO: 204972 - DNA, 25 bp, Artificial sequence
  SiRNA target sequence
taatatggctagtccatataatgaa

SEQ ID NO: 204973 - DNA, 25 bp, Artificial sequence
  SiRNA target sequence
aatatggctagtccatataatgaac

SEQ ID NO: 204974 - DNA, 25 bp, Artificial sequence
  SiRNA target sequence
atatggctagtccatataatgaacc

SEQ ID NO: 204975 - DNA, 25 bp, Artificial sequence
  SiRNA target sequence
tatggctagtccatataatgaacca

SEQ ID NO: 204976 - DNA, 25 bp, Artificial sequence
  SiRNA target sequence
atggctagtccatataatgaaccaa

SEQ ID NO: 204977 - DNA, 25 bp, Artificial sequence
  SiRNA target sequence
tggctagtccatataatgaaccaat

SEQ ID NO: 204978 - DNA, 25 bp, Artificial sequence
  SiRNA target sequence
ggctagtccatataatgaaccaata

SEQ ID NO: 204979 - DNA, 25 bp, Artificial sequence
  SiRNA target sequence
gctagtccatataatgaaccaatag

SEQ ID NO: 204980 - DNA, 25 bp, Artificial sequence
  SiRNA target sequence
ctagtccatataatgaaccaataga

SEQ ID NO: 204981 - DNA, 25 bp, Artificial sequence
  SiRNA target sequence
tagtccatataatgaaccaatagat

SEQ ID NO: 204982 - DNA, 25 bp, Artificial sequence
  SiRNA target sequence
agtccatataatgaaccaatagatt

SEQ ID NO: 204983 - DNA, 25 bp, Artificial sequence
  SiRNA target sequence
gtccatataatgaaccaatagattt

SEQ ID NO: 204984 - DNA, 25 bp, Artificial sequence
  SiRNA target sequence
tccatataatgaaccaatagatttt

SEQ ID NO: 204985 - DNA, 25 bp, Artificial sequence
  SiRNA target sequence
ccatataatgaaccaatagattttc

SEQ ID NO: 204986 - DNA, 25 bp, Artificial sequence
  SiRNA target sequence
catataatgaaccaatagattttcc

SEQ ID NO: 204987 - DNA, 25 bp, Artificial sequence
  SiRNA target sequence
atataatgaaccaatagattttcct

SEQ ID NO: 204988 - DNA, 25 bp, Artificial sequence
  SiRNA target sequence
tataatgaaccaatagattttccta

SEQ ID NO: 204989 - DNA, 25 bp, Artificial sequence
  SiRNA target sequence
ataatgaaccaatagattttcctaa

SEQ ID NO: 204990 - DNA, 25 bp, Artificial sequence
  SiRNA target sequence
taatgaaccaatagattttcctaat

SEQ ID NO: 204991 - DNA, 25 bp, Artificial sequence
  SiRNA target sequence
aatgaaccaatagattttcctaatt

SEQ ID NO: 204992 - DNA, 25 bp, Artificial sequence
  SiRNA target sequence
atgaaccaatagattttcctaattt

SEQ ID NO: 204993 - DNA, 25 bp, Artificial sequence
  SiRNA target sequence
tgaaccaatagattttcctaattta

SEQ ID NO: 204994 - DNA, 25 bp, Artificial sequence
  SiRNA target sequence
gaaccaatagattttcctaatttat

SEQ ID NO: 204995 - DNA, 25 bp, Artificial sequence
  SiRNA target sequence
aaccaatagattttcctaatttatt

SEQ ID NO: 204996 - DNA, 25 bp, Artificial sequence
  SiRNA target sequence
accaatagattttcctaatttatta

SEQ ID NO: 204997 - DNA, 25 bp, Artificial sequence
  SiRNA target sequence
ccaatagattttcctaatttattaa

SEQ ID NO: 204998 - DNA, 25 bp, Artificial sequence
  SiRNA target sequence
caatagattttcctaatttattaaa

SEQ ID NO: 204999 - DNA, 25 bp, Artificial sequence
  SiRNA target sequence
aatagattttcctaatttattaaaa

SEQ ID NO: 205000 - DNA, 25 bp, Artificial sequence
  SiRNA target sequence
atagattttcctaatttattaaaaa

SEQ ID NO: 205001 - DNA, 25 bp, Artificial sequence
  SiRNA target sequence
tagattttcctaatttattaaaaat

SEQ ID NO: 205002 - DNA, 25 bp, Artificial sequence
  SiRNA target sequence
agattttcctaatttattaaaaata

SEQ ID NO: 205003 - DNA, 25 bp, Artificial sequence
  SiRNA target sequence
gattttcctaatttattaaaaatac

SEQ ID NO: 205004 - DNA, 25 bp, Artificial sequence
  SiRNA target sequence
attttcctaatttattaaaaatacc

SEQ ID NO: 205005 - DNA, 25 bp, Artificial sequence
  SiRNA target sequence
ttttcctaatttattaaaaatacca

SEQ ID NO: 205006 - DNA, 25 bp, Artificial sequence
  SiRNA target sequence
tttcctaatttattaaaaataccat

SEQ ID NO: 205007 - DNA, 25 bp, Artificial sequence
  SiRNA target sequence
ttcctaatttattaaaaataccatc

SEQ ID NO: 205008 - DNA, 25 bp, Artificial sequence
  SiRNA target sequence
tcctaatttattaaaaataccatca

SEQ ID NO: 205009 - DNA, 25 bp, Artificial sequence
  SiRNA target sequence
cctaatttattaaaaataccatcat

SEQ ID NO: 205010 - DNA, 25 bp, Artificial sequence
  SiRNA target sequence
ctaatttattaaaaataccatcata

SEQ ID NO: 205011 - DNA, 25 bp, Artificial sequence
  SiRNA target sequence
taatttattaaaaataccatcataa

SEQ ID NO: 205012 - DNA, 25 bp, Artificial sequence
  SiRNA target sequence
aatttattaaaaataccatcataaa

SEQ ID NO: 205013 - DNA, 25 bp, Artificial sequence
  SiRNA target sequence
atttattaaaaataccatcataaac

SEQ ID NO: 205014 - DNA, 25 bp, Artificial sequence
  SiRNA target sequence
tttattaaaaataccatcataaaca

SEQ ID NO: 205015 - DNA, 25 bp, Artificial sequence
  SiRNA target sequence
ttattaaaaataccatcataaacac

SEQ ID NO: 205016 - DNA, 25 bp, Artificial sequence
  SiRNA target sequence
tattaaaaataccatcataaacact

SEQ ID NO: 205017 - DNA, 25 bp, Artificial sequence
  SiRNA target sequence
attaaaaataccatcataaacactt

SEQ ID NO: 205018 - DNA, 25 bp, Artificial sequence
  SiRNA target sequence
ttaaaaataccatcataaacacttt

SEQ ID NO: 205019 - DNA, 25 bp, Artificial sequence
  SiRNA target sequence
taaaaataccatcataaacactttt

SEQ ID NO: 205020 - DNA, 25 bp, Artificial sequence
  SiRNA target sequence
aaaaataccatcataaacactttta

SEQ ID NO: 205021 - DNA, 25 bp, Artificial sequence
  SiRNA target sequence
aaaataccatcataaacacttttaa

SEQ ID NO: 205022 - DNA, 25 bp, Artificial sequence
  SiRNA target sequence
aaataccatcataaacacttttaaa

SEQ ID NO: 205023 - DNA, 25 bp, Artificial sequence
  SiRNA target sequence
aataccatcataaacacttttaaac

SEQ ID NO: 205024 - DNA, 25 bp, Artificial sequence
  SiRNA target sequence
ataccatcataaacacttttaaacc

SEQ ID NO: 205025 - DNA, 25 bp, Artificial sequence
  SiRNA target sequence
taccatcataaacacttttaaaccg

SEQ ID NO: 205026 - DNA, 25 bp, Artificial sequence
  SiRNA target sequence
accatcataaacacttttaaaccgt

SEQ ID NO: 205027 - DNA, 25 bp, Artificial sequence
  SiRNA target sequence
ccatcataaacacttttaaaccgtg

SEQ ID NO: 205028 - DNA, 25 bp, Artificial sequence
  SiRNA target sequence
catcataaacacttttaaaccgtgc

SEQ ID NO: 205029 - DNA, 25 bp, Artificial sequence
  SiRNA target sequence
atcataaacacttttaaaccgtgcc

SEQ ID NO: 205030 - DNA, 25 bp, Artificial sequence
  SiRNA target sequence
tcataaacacttttaaaccgtgccc

SEQ ID NO: 205031 - DNA, 25 bp, Artificial sequence
  SiRNA target sequence
cataaacacttttaaaccgtgccct

SEQ ID NO: 205032 - DNA, 25 bp, Artificial sequence
  SiRNA target sequence
ataaacacttttaaaccgtgccctg

SEQ ID NO: 205033 - DNA, 25 bp, Artificial sequence
  SiRNA target sequence
taaacacttttaaaccgtgccctgt

SEQ ID NO: 205034 - DNA, 25 bp, Artificial sequence
  SiRNA target sequence
aaacacttttaaaccgtgccctgtg

SEQ ID NO: 205035 - DNA, 25 bp, Artificial sequence
  SiRNA target sequence
aacacttttaaaccgtgccctgtgt

SEQ ID NO: 205036 - DNA, 25 bp, Artificial sequence
  SiRNA target sequence
acacttttaaaccgtgccctgtgtg

SEQ ID NO: 205037 - DNA, 25 bp, Artificial sequence
  SiRNA target sequence
cacttttaaaccgtgccctgtgtgc

SEQ ID NO: 205038 - DNA, 25 bp, Artificial sequence
  SiRNA target sequence
acttttaaaccgtgccctgtgtgca

SEQ ID NO: 205039 - DNA, 25 bp, Artificial sequence
  SiRNA target sequence
cttttaaaccgtgccctgtgtgcag

SEQ ID NO: 205040 - DNA, 25 bp, Artificial sequence
  SiRNA target sequence
ttttaaaccgtgccctgtgtgcagg

SEQ ID NO: 205041 - DNA, 25 bp, Artificial sequence
  SiRNA target sequence
tttaaaccgtgccctgtgtgcagga

SEQ ID NO: 205042 - DNA, 25 bp, Artificial sequence
  SiRNA target sequence
ttaaaccgtgccctgtgtgcaggat

SEQ ID NO: 205043 - DNA, 25 bp, Artificial sequence
  SiRNA target sequence
taaaccgtgccctgtgtgcaggatc

SEQ ID NO: 205044 - DNA, 25 bp, Artificial sequence
  SiRNA target sequence
aaaccgtgccctgtgtgcaggatcg

SEQ ID NO: 205045 - DNA, 25 bp, Artificial sequence
  SiRNA target sequence
aaccgtgccctgtgtgcaggatcga

SEQ ID NO: 205046 - DNA, 25 bp, Artificial sequence
  SiRNA target sequence
accgtgccctgtgtgcaggatcgat

SEQ ID NO: 205047 - DNA, 25 bp, Artificial sequence
  SiRNA target sequence
ccgtgccctgtgtgcaggatcgatt

SEQ ID NO: 205048 - DNA, 25 bp, Artificial sequence
  SiRNA target sequence
cgtgccctgtgtgcaggatcgattc

SEQ ID NO: 205049 - DNA, 25 bp, Artificial sequence
  SiRNA target sequence
gtgccctgtgtgcaggatcgattct

SEQ ID NO: 205050 - DNA, 25 bp, Artificial sequence
  SiRNA target sequence
tgccctgtgtgcaggatcgattctc

SEQ ID NO: 205051 - DNA, 25 bp, Artificial sequence
  SiRNA target sequence
gccctgtgtgcaggatcgattctca

SEQ ID NO: 205052 - DNA, 25 bp, Artificial sequence
  SiRNA target sequence
ccctgtgtgcaggatcgattctcat

SEQ ID NO: 205053 - DNA, 25 bp, Artificial sequence
  SiRNA target sequence
cctgtgtgcaggatcgattctcata

SEQ ID NO: 205054 - DNA, 25 bp, Artificial sequence
  SiRNA target sequence
ctgtgtgcaggatcgattctcatac

SEQ ID NO: 205055 - DNA, 25 bp, Artificial sequence
  SiRNA target sequence
tgtgtgcaggatcgattctcatacc

SEQ ID NO: 205056 - DNA, 25 bp, Artificial sequence
  SiRNA target sequence
gtgtgcaggatcgattctcataccc

SEQ ID NO: 205057 - DNA, 25 bp, Artificial sequence
  SiRNA target sequence
tgtgcaggatcgattctcataccca

SEQ ID NO: 205058 - DNA, 25 bp, Artificial sequence
  SiRNA target sequence
gtgcaggatcgattctcatacccat

SEQ ID NO: 205059 - DNA, 25 bp, Artificial sequence
  SiRNA target sequence
tgcaggatcgattctcatacccatt

SEQ ID NO: 205060 - DNA, 25 bp, Artificial sequence
  SiRNA target sequence
gcaggatcgattctcatacccattt

SEQ ID NO: 205061 - DNA, 25 bp, Artificial sequence
  SiRNA target sequence
caggatcgattctcatacccatttt

SEQ ID NO: 205062 - DNA, 25 bp, Artificial sequence
  SiRNA target sequence
aggatcgattctcatacccattttc

SEQ ID NO: 205063 - DNA, 25 bp, Artificial sequence
  SiRNA target sequence
ggatcgattctcatacccattttct

SEQ ID NO: 205064 - DNA, 25 bp, Artificial sequence
  SiRNA target sequence
gatcgattctcatacccattttctc

SEQ ID NO: 205065 - DNA, 25 bp, Artificial sequence
  SiRNA target sequence
atcgattctcatacccattttctct

SEQ ID NO: 205066 - DNA, 25 bp, Artificial sequence
  SiRNA target sequence
tcgattctcatacccattttctctt

SEQ ID NO: 205067 - DNA, 25 bp, Artificial sequence
  SiRNA target sequence
cgattctcatacccattttctcttt

SEQ ID NO: 205068 - DNA, 25 bp, Artificial sequence
  SiRNA target sequence
gattctcatacccattttctcttta

SEQ ID NO: 205069 - DNA, 25 bp, Artificial sequence
  SiRNA target sequence
attctcatacccattttctctttac

SEQ ID NO: 205070 - DNA, 25 bp, Artificial sequence
  SiRNA target sequence
ttctcatacccattttctctttaca

SEQ ID NO: 205071 - DNA, 25 bp, Artificial sequence
  SiRNA target sequence
tctcatacccattttctctttacaa

SEQ ID NO: 205072 - DNA, 25 bp, Artificial sequence
  SiRNA target sequence
ctcatacccattttctctttacaaa

SEQ ID NO: 205073 - DNA, 25 bp, Artificial sequence
  SiRNA target sequence
tcatacccattttctctttacaaat

SEQ ID NO: 205074 - DNA, 25 bp, Artificial sequence
  SiRNA target sequence
catacccattttctctttacaaata

SEQ ID NO: 205075 - DNA, 25 bp, Artificial sequence
  SiRNA target sequence
atacccattttctctttacaaatat

SEQ ID NO: 205076 - DNA, 25 bp, Artificial sequence
  SiRNA target sequence
tacccattttctctttacaaatatc

SEQ ID NO: 205077 - DNA, 25 bp, Artificial sequence
  SiRNA target sequence
acccattttctctttacaaatatca

SEQ ID NO: 205078 - DNA, 25 bp, Artificial sequence
  SiRNA target sequence
cccattttctctttacaaatatcaa

SEQ ID NO: 205079 - DNA, 25 bp, Artificial sequence
  SiRNA target sequence
ccattttctctttacaaatatcaaa

SEQ ID NO: 205080 - DNA, 25 bp, Artificial sequence
  SiRNA target sequence
cattttctctttacaaatatcaaag

SEQ ID NO: 205081 - DNA, 25 bp, Artificial sequence
  SiRNA target sequence
attttctctttacaaatatcaaagg

SEQ ID NO: 205082 - DNA, 25 bp, Artificial sequence
  SiRNA target sequence
ttttctctttacaaatatcaaaggc

SEQ ID NO: 205083 - DNA, 25 bp, Artificial sequence
  SiRNA target sequence
tttctctttacaaatatcaaaggct

SEQ ID NO: 205084 - DNA, 25 bp, Artificial sequence
  SiRNA target sequence
ttctctttacaaatatcaaaggctg

SEQ ID NO: 205085 - DNA, 25 bp, Artificial sequence
  SiRNA target sequence
tctctttacaaatatcaaaggctga

SEQ ID NO: 205086 - DNA, 25 bp, Artificial sequence
  SiRNA target sequence
ctctttacaaatatcaaaggctgaa

SEQ ID NO: 205087 - DNA, 25 bp, Artificial sequence
  SiRNA target sequence
tctttacaaatatcaaaggctgaat

SEQ ID NO: 205088 - DNA, 25 bp, Artificial sequence
  SiRNA target sequence
ctttacaaatatcaaaggctgaata

SEQ ID NO: 205089 - DNA, 25 bp, Artificial sequence
  SiRNA target sequence
tttacaaatatcaaaggctgaatat

SEQ ID NO: 205090 - DNA, 25 bp, Artificial sequence
  SiRNA target sequence
ttacaaatatcaaaggctgaatatt

SEQ ID NO: 205091 - DNA, 25 bp, Artificial sequence
  SiRNA target sequence
tacaaatatcaaaggctgaatattt

SEQ ID NO: 205092 - DNA, 25 bp, Artificial sequence
  SiRNA target sequence
acaaatatcaaaggctgaatatttt

SEQ ID NO: 205093 - DNA, 25 bp, Artificial sequence
  SiRNA target sequence
caaatatcaaaggctgaatatttta

SEQ ID NO: 205094 - DNA, 25 bp, Artificial sequence
  SiRNA target sequence
aaatatcaaaggctgaatattttaa

SEQ ID NO: 205095 - DNA, 25 bp, Artificial sequence
  SiRNA target sequence
aatatcaaaggctgaatattttaat

SEQ ID NO: 205096 - DNA, 25 bp, Artificial sequence
  SiRNA target sequence
atatcaaaggctgaatattttaata

SEQ ID NO: 205097 - DNA, 25 bp, Artificial sequence
  SiRNA target sequence
tatcaaaggctgaatattttaatac

SEQ ID NO: 205098 - DNA, 25 bp, Artificial sequence
  SiRNA target sequence
atcaaaggctgaatattttaatact

SEQ ID NO: 205099 - DNA, 25 bp, Artificial sequence
  SiRNA target sequence
tcaaaggctgaatattttaatactt

SEQ ID NO: 205100 - DNA, 25 bp, Artificial sequence
  SiRNA target sequence
caaaggctgaatattttaatacttt

SEQ ID NO: 205101 - DNA, 25 bp, Artificial sequence
  SiRNA target sequence
aaaggctgaatattttaatactttt

SEQ ID NO: 205102 - DNA, 25 bp, Artificial sequence
  SiRNA target sequence
aaggctgaatattttaatactttta

SEQ ID NO: 205103 - DNA, 25 bp, Artificial sequence
  SiRNA target sequence
aggctgaatattttaatacttttat

SEQ ID NO: 205104 - DNA, 25 bp, Artificial sequence
  SiRNA target sequence
ggctgaatattttaatacttttatg

SEQ ID NO: 205105 - DNA, 25 bp, Artificial sequence
  SiRNA target sequence
gctgaatattttaatacttttatga

SEQ ID NO: 205106 - DNA, 25 bp, Artificial sequence
  SiRNA target sequence
ctgaatattttaatacttttatgaa

SEQ ID NO: 205107 - DNA, 25 bp, Artificial sequence
  SiRNA target sequence
tgaatattttaatacttttatgaat

SEQ ID NO: 205108 - DNA, 25 bp, Artificial sequence
  SiRNA target sequence
gaatattttaatacttttatgaatg

SEQ ID NO: 205109 - DNA, 25 bp, Artificial sequence
  SiRNA target sequence
aatattttaatacttttatgaatgc

SEQ ID NO: 205110 - DNA, 25 bp, Artificial sequence
  SiRNA target sequence
atattttaatacttttatgaatgct

SEQ ID NO: 205111 - DNA, 25 bp, Artificial sequence
  SiRNA target sequence
tattttaatacttttatgaatgcta

SEQ ID NO: 205112 - DNA, 25 bp, Artificial sequence
  SiRNA target sequence
attttaatacttttatgaatgctaa

SEQ ID NO: 205113 - DNA, 25 bp, Artificial sequence
  SiRNA target sequence
ttttaatacttttatgaatgctaaa

SEQ ID NO: 205114 - DNA, 25 bp, Artificial sequence
  SiRNA target sequence
tttaatacttttatgaatgctaaaa

SEQ ID NO: 205115 - DNA, 25 bp, Artificial sequence
  SiRNA target sequence
ttaatacttttatgaatgctaaaaa

SEQ ID NO: 205116 - DNA, 25 bp, Artificial sequence
  SiRNA target sequence
taatacttttatgaatgctaaaaag

SEQ ID NO: 205117 - DNA, 25 bp, Artificial sequence
  SiRNA target sequence
aatacttttatgaatgctaaaaaga

SEQ ID NO: 205118 - DNA, 25 bp, Artificial sequence
  SiRNA target sequence
atacttttatgaatgctaaaaagaa

SEQ ID NO: 205119 - DNA, 25 bp, Artificial sequence
  SiRNA target sequence
tacttttatgaatgctaaaaagaac

SEQ ID NO: 205120 - DNA, 25 bp, Artificial sequence
  SiRNA target sequence
acttttatgaatgctaaaaagaaca

SEQ ID NO: 205121 - DNA, 25 bp, Artificial sequence
  SiRNA target sequence
cttttatgaatgctaaaaagaacat

SEQ ID NO: 205122 - DNA, 25 bp, Artificial sequence
  SiRNA target sequence
ttttatgaatgctaaaaagaacatt

SEQ ID NO: 205123 - DNA, 25 bp, Artificial sequence
  SiRNA target sequence
tttatgaatgctaaaaagaacattc

SEQ ID NO: 205124 - DNA, 25 bp, Artificial sequence
  SiRNA target sequence
ttatgaatgctaaaaagaacattcc

SEQ ID NO: 205125 - DNA, 25 bp, Artificial sequence
  SiRNA target sequence
tatgaatgctaaaaagaacattcca

SEQ ID NO: 205126 - DNA, 25 bp, Artificial sequence
  SiRNA target sequence
atgaatgctaaaaagaacattccac

SEQ ID NO: 205127 - DNA, 25 bp, Artificial sequence
  SiRNA target sequence
tgaatgctaaaaagaacattccact

SEQ ID NO: 205128 - DNA, 25 bp, Artificial sequence
  SiRNA target sequence
gaatgctaaaaagaacattccactg

SEQ ID NO: 205129 - DNA, 25 bp, Artificial sequence
  SiRNA target sequence
aatgctaaaaagaacattccactgt

SEQ ID NO: 205130 - DNA, 25 bp, Artificial sequence
  SiRNA target sequence
atgctaaaaagaacattccactgta

SEQ ID NO: 205131 - DNA, 25 bp, Artificial sequence
  SiRNA target sequence
tgctaaaaagaacattccactgtaa

SEQ ID NO: 205132 - DNA, 25 bp, Artificial sequence
  SiRNA target sequence
gctaaaaagaacattccactgtaat

SEQ ID NO: 205133 - DNA, 25 bp, Artificial sequence
  SiRNA target sequence
ctaaaaagaacattccactgtaatt

SEQ ID NO: 205134 - DNA, 25 bp, Artificial sequence
  SiRNA target sequence
taaaaagaacattccactgtaattt

SEQ ID NO: 205135 - DNA, 25 bp, Artificial sequence
  SiRNA target sequence
aaaaagaacattccactgtaatttt

SEQ ID NO: 205136 - DNA, 25 bp, Artificial sequence
  SiRNA target sequence
aaaagaacattccactgtaattttc

SEQ ID NO: 205137 - DNA, 25 bp, Artificial sequence
  SiRNA target sequence
aaagaacattccactgtaattttcg

SEQ ID NO: 205138 - DNA, 25 bp, Artificial sequence
  SiRNA target sequence
aagaacattccactgtaattttcga

SEQ ID NO: 205139 - DNA, 25 bp, Artificial sequence
  SiRNA target sequence
agaacattccactgtaattttcgat

SEQ ID NO: 205140 - DNA, 25 bp, Artificial sequence
  SiRNA target sequence
gaacattccactgtaattttcgatc

SEQ ID NO: 205141 - DNA, 25 bp, Artificial sequence
  SiRNA target sequence
aacattccactgtaattttcgatcg

SEQ ID NO: 205142 - DNA, 25 bp, Artificial sequence
  SiRNA target sequence
acattccactgtaattttcgatcgt

SEQ ID NO: 205143 - DNA, 25 bp, Artificial sequence
  SiRNA target sequence
cattccactgtaattttcgatcgta

SEQ ID NO: 205144 - DNA, 25 bp, Artificial sequence
  SiRNA target sequence
attccactgtaattttcgatcgtat

SEQ ID NO: 205145 - DNA, 25 bp, Artificial sequence
  SiRNA target sequence
ttccactgtaattttcgatcgtata

SEQ ID NO: 205146 - DNA, 25 bp, Artificial sequence
  SiRNA target sequence
tccactgtaattttcgatcgtataa

SEQ ID NO: 205147 - DNA, 25 bp, Artificial sequence
  SiRNA target sequence
ccactgtaattttcgatcgtataaa

SEQ ID NO: 205148 - DNA, 25 bp, Artificial sequence
  SiRNA target sequence
cactgtaattttcgatcgtataaat

SEQ ID NO: 205149 - DNA, 25 bp, Artificial sequence
  SiRNA target sequence
actgtaattttcgatcgtataaatg

SEQ ID NO: 205150 - DNA, 25 bp, Artificial sequence
  SiRNA target sequence
ctgtaattttcgatcgtataaatgt

SEQ ID NO: 205151 - DNA, 25 bp, Artificial sequence
  SiRNA target sequence
tgtaattttcgatcgtataaatgta

SEQ ID NO: 205152 - DNA, 25 bp, Artificial sequence
  SiRNA target sequence
gtaattttcgatcgtataaatgtac

SEQ ID NO: 205153 - DNA, 25 bp, Artificial sequence
  SiRNA target sequence
taattttcgatcgtataaatgtacg

SEQ ID NO: 205154 - DNA, 25 bp, Artificial sequence
  SiRNA target sequence
aattttcgatcgtataaatgtacga

SEQ ID NO: 205155 - DNA, 25 bp, Artificial sequence
  SiRNA target sequence
attttcgatcgtataaatgtacgac

SEQ ID NO: 205156 - DNA, 25 bp, Artificial sequence
  SiRNA target sequence
ttttcgatcgtataaatgtacgaca

SEQ ID NO: 205157 - DNA, 25 bp, Artificial sequence
  SiRNA target sequence
tttcgatcgtataaatgtacgacat

SEQ ID NO: 205158 - DNA, 25 bp, Artificial sequence
  SiRNA target sequence
ttcgatcgtataaatgtacgacatt

SEQ ID NO: 205159 - DNA, 25 bp, Artificial sequence
  SiRNA target sequence
tcgatcgtataaatgtacgacattt

SEQ ID NO: 205160 - DNA, 25 bp, Artificial sequence
  SiRNA target sequence
cgatcgtataaatgtacgacatttt

SEQ ID NO: 205161 - DNA, 25 bp, Artificial sequence
  SiRNA target sequence
gatcgtataaatgtacgacattttt

SEQ ID NO: 205162 - DNA, 25 bp, Artificial sequence
  SiRNA target sequence
atcgtataaatgtacgacatttttt

SEQ ID NO: 205163 - DNA, 25 bp, Artificial sequence
  SiRNA target sequence
tcgtataaatgtacgacattttttt

SEQ ID NO: 205164 - DNA, 25 bp, Artificial sequence
  SiRNA target sequence
cgtataaatgtacgacattttttta

SEQ ID NO: 205165 - DNA, 25 bp, Artificial sequence
  SiRNA target sequence
gtataaatgtacgacatttttttaa

SEQ ID NO: 205166 - DNA, 25 bp, Artificial sequence
  SiRNA target sequence
tataaatgtacgacatttttttaaa

SEQ ID NO: 205167 - DNA, 25 bp, Artificial sequence
  SiRNA target sequence
ataaatgtacgacatttttttaaaa

SEQ ID NO: 205168 - DNA, 25 bp, Artificial sequence
  SiRNA target sequence
taaatgtacgacatttttttaaaaa

SEQ ID NO: 205169 - DNA, 25 bp, Artificial sequence
  SiRNA target sequence
aaatgtacgacatttttttaaaaaa

SEQ ID NO: 205170 - DNA, 25 bp, Artificial sequence
  SiRNA target sequence
aatgtacgacatttttttaaaaaat

SEQ ID NO: 205171 - DNA, 25 bp, Artificial sequence
  SiRNA target sequence
atgtacgacatttttttaaaaaata

SEQ ID NO: 205172 - DNA, 25 bp, Artificial sequence
  SiRNA target sequence
tgtacgacatttttttaaaaaatac

SEQ ID NO: 205173 - DNA, 25 bp, Artificial sequence
  SiRNA target sequence
gtacgacatttttttaaaaaataca

SEQ ID NO: 205174 - DNA, 25 bp, Artificial sequence
  SiRNA target sequence
tacgacatttttttaaaaaatacag

SEQ ID NO: 205175 - DNA, 25 bp, Artificial sequence
  SiRNA target sequence
acgacatttttttaaaaaatacaga

SEQ ID NO: 205176 - DNA, 25 bp, Artificial sequence
  SiRNA target sequence
cgacatttttttaaaaaatacagaa

SEQ ID NO: 205177 - DNA, 25 bp, Artificial sequence
  SiRNA target sequence
gacatttttttaaaaaatacagaaa

SEQ ID NO: 205178 - DNA, 25 bp, Artificial sequence
  SiRNA target sequence
acatttttttaaaaaatacagaaat

SEQ ID NO: 205179 - DNA, 25 bp, Artificial sequence
  SiRNA target sequence
catttttttaaaaaatacagaaatc

SEQ ID NO: 205180 - DNA, 25 bp, Artificial sequence
  SiRNA target sequence
atttttttaaaaaatacagaaatcc

SEQ ID NO: 205181 - DNA, 25 bp, Artificial sequence
  SiRNA target sequence
tttttttaaaaaatacagaaatcca

SEQ ID NO: 205182 - DNA, 25 bp, Artificial sequence
  SiRNA target sequence
ttttttaaaaaatacagaaatccat

SEQ ID NO: 205183 - DNA, 25 bp, Artificial sequence
  SiRNA target sequence
tttttaaaaaatacagaaatccatg

SEQ ID NO: 205184 - DNA, 25 bp, Artificial sequence
  SiRNA target sequence
ttttaaaaaatacagaaatccatga

SEQ ID NO: 205185 - DNA, 25 bp, Artificial sequence
  SiRNA target sequence
tttaaaaaatacagaaatccatgaa

SEQ ID NO: 205186 - DNA, 25 bp, Artificial sequence
  SiRNA target sequence
ttaaaaaatacagaaatccatgaaa

SEQ ID NO: 205187 - DNA, 25 bp, Artificial sequence
  SiRNA target sequence
taaaaaatacagaaatccatgaaaa

SEQ ID NO: 205188 - DNA, 25 bp, Artificial sequence
  SiRNA target sequence
aaaaaatacagaaatccatgaaaaa

SEQ ID NO: 205189 - DNA, 25 bp, Artificial sequence
  SiRNA target sequence
aaaaatacagaaatccatgaaaaag

SEQ ID NO: 205190 - DNA, 25 bp, Artificial sequence
  SiRNA target sequence
aaaatacagaaatccatgaaaaagc

SEQ ID NO: 205191 - DNA, 25 bp, Artificial sequence
  SiRNA target sequence
aaatacagaaatccatgaaaaagca

SEQ ID NO: 205192 - DNA, 25 bp, Artificial sequence
  SiRNA target sequence
aatacagaaatccatgaaaaagcaa

SEQ ID NO: 205193 - DNA, 25 bp, Artificial sequence
  SiRNA target sequence
atacagaaatccatgaaaaagcaag

SEQ ID NO: 205194 - DNA, 25 bp, Artificial sequence
  SiRNA target sequence
tacagaaatccatgaaaaagcaagt

SEQ ID NO: 205195 - DNA, 25 bp, Artificial sequence
  SiRNA target sequence
acagaaatccatgaaaaagcaagtc

SEQ ID NO: 205196 - DNA, 25 bp, Artificial sequence
  SiRNA target sequence
cagaaatccatgaaaaagcaagtcc

SEQ ID NO: 205197 - DNA, 25 bp, Artificial sequence
  SiRNA target sequence
agaaatccatgaaaaagcaagtcct

SEQ ID NO: 205198 - DNA, 25 bp, Artificial sequence
  SiRNA target sequence
gaaatccatgaaaaagcaagtcctt

SEQ ID NO: 205199 - DNA, 25 bp, Artificial sequence
  SiRNA target sequence
aaatccatgaaaaagcaagtccttc

SEQ ID NO: 205200 - DNA, 25 bp, Artificial sequence
  SiRNA target sequence
aatccatgaaaaagcaagtccttca

SEQ ID NO: 205201 - DNA, 25 bp, Artificial sequence
  SiRNA target sequence
atccatgaaaaagcaagtccttcaa

SEQ ID NO: 205202 - DNA, 25 bp, Artificial sequence
  SiRNA target sequence
tccatgaaaaagcaagtccttcaat

SEQ ID NO: 205203 - DNA, 25 bp, Artificial sequence
  SiRNA target sequence
ccatgaaaaagcaagtccttcaatg

SEQ ID NO: 205204 - DNA, 25 bp, Artificial sequence
  SiRNA target sequence
catgaaaaagcaagtccttcaatgg

SEQ ID NO: 205205 - DNA, 25 bp, Artificial sequence
  SiRNA target sequence
atgaaaaagcaagtccttcaatggc

SEQ ID NO: 205206 - DNA, 25 bp, Artificial sequence
  SiRNA target sequence
tgaaaaagcaagtccttcaatggca

SEQ ID NO: 205207 - DNA, 25 bp, Artificial sequence
  SiRNA target sequence
gaaaaagcaagtccttcaatggcag

SEQ ID NO: 205208 - DNA, 25 bp, Artificial sequence
  SiRNA target sequence
aaaaagcaagtccttcaatggcaga

SEQ ID NO: 205209 - DNA, 25 bp, Artificial sequence
  SiRNA target sequence
aaaagcaagtccttcaatggcagaa

SEQ ID NO: 205210 - DNA, 25 bp, Artificial sequence
  SiRNA target sequence
aaagcaagtccttcaatggcagaat

SEQ ID NO: 205211 - DNA, 25 bp, Artificial sequence
  SiRNA target sequence
aagcaagtccttcaatggcagaatt

SEQ ID NO: 205212 - DNA, 25 bp, Artificial sequence
  SiRNA target sequence
agcaagtccttcaatggcagaattg

SEQ ID NO: 205213 - DNA, 25 bp, Artificial sequence
  SiRNA target sequence
gcaagtccttcaatggcagaattgt

SEQ ID NO: 205214 - DNA, 25 bp, Artificial sequence
  SiRNA target sequence
caagtccttcaatggcagaattgta

SEQ ID NO: 205215 - DNA, 25 bp, Artificial sequence
  SiRNA target sequence
aagtccttcaatggcagaattgtag

SEQ ID NO: 205216 - DNA, 25 bp, Artificial sequence
  SiRNA target sequence
agtccttcaatggcagaattgtaga

SEQ ID NO: 205217 - DNA, 25 bp, Artificial sequence
  SiRNA target sequence
gtccttcaatggcagaattgtagat

SEQ ID NO: 205218 - DNA, 25 bp, Artificial sequence
  SiRNA target sequence
tccttcaatggcagaattgtagatt

SEQ ID NO: 205219 - DNA, 25 bp, Artificial sequence
  SiRNA target sequence
ccttcaatggcagaattgtagattg

SEQ ID NO: 205220 - DNA, 25 bp, Artificial sequence
  SiRNA target sequence
cttcaatggcagaattgtagattga

SEQ ID NO: 205221 - DNA, 25 bp, Artificial sequence
  SiRNA target sequence
ttcaatggcagaattgtagattgat

SEQ ID NO: 205222 - DNA, 25 bp, Artificial sequence
  SiRNA target sequence
tcaatggcagaattgtagattgatg

SEQ ID NO: 205223 - DNA, 25 bp, Artificial sequence
  SiRNA target sequence
caatggcagaattgtagattgatgc

SEQ ID NO: 205224 - DNA, 25 bp, Artificial sequence
  SiRNA target sequence
aatggcagaattgtagattgatgct

SEQ ID NO: 205225 - DNA, 25 bp, Artificial sequence
  SiRNA target sequence
atggcagaattgtagattgatgctc

SEQ ID NO: 205226 - DNA, 25 bp, Artificial sequence
  SiRNA target sequence
tggcagaattgtagattgatgctcc

SEQ ID NO: 205227 - DNA, 25 bp, Artificial sequence
  SiRNA target sequence
ggcagaattgtagattgatgctccc

SEQ ID NO: 205228 - DNA, 25 bp, Artificial sequence
  SiRNA target sequence
gcagaattgtagattgatgctccca

SEQ ID NO: 205229 - DNA, 25 bp, Artificial sequence
  SiRNA target sequence
cagaattgtagattgatgctcccat

SEQ ID NO: 205230 - DNA, 25 bp, Artificial sequence
  SiRNA target sequence
agaattgtagattgatgctcccata

SEQ ID NO: 205231 - DNA, 25 bp, Artificial sequence
  SiRNA target sequence
gaattgtagattgatgctcccataa

SEQ ID NO: 205232 - DNA, 25 bp, Artificial sequence
  SiRNA target sequence
aattgtagattgatgctcccataac

SEQ ID NO: 205233 - DNA, 25 bp, Artificial sequence
  SiRNA target sequence
attgtagattgatgctcccataacg

SEQ ID NO: 205234 - DNA, 25 bp, Artificial sequence
  SiRNA target sequence
ttgtagattgatgctcccataacga

SEQ ID NO: 205235 - DNA, 25 bp, Artificial sequence
  SiRNA target sequence
tgtagattgatgctcccataacgat

SEQ ID NO: 205236 - DNA, 25 bp, Artificial sequence
  SiRNA target sequence
gtagattgatgctcccataacgatt

SEQ ID NO: 205237 - DNA, 25 bp, Artificial sequence
  SiRNA target sequence
tagattgatgctcccataacgatta

SEQ ID NO: 205238 - DNA, 25 bp, Artificial sequence
  SiRNA target sequence
agattgatgctcccataacgattat

SEQ ID NO: 205239 - DNA, 25 bp, Artificial sequence
  SiRNA target sequence
gattgatgctcccataacgattatt

SEQ ID NO: 205240 - DNA, 25 bp, Artificial sequence
  SiRNA target sequence
attgatgctcccataacgattattg

SEQ ID NO: 205241 - DNA, 25 bp, Artificial sequence
  SiRNA target sequence
ttgatgctcccataacgattattga

SEQ ID NO: 205242 - DNA, 25 bp, Artificial sequence
  SiRNA target sequence
tgatgctcccataacgattattgac

SEQ ID NO: 205243 - DNA, 25 bp, Artificial sequence
  SiRNA target sequence
gatgctcccataacgattattgacc

SEQ ID NO: 205244 - DNA, 25 bp, Artificial sequence
  SiRNA target sequence
atgctcccataacgattattgaccc

SEQ ID NO: 205245 - DNA, 25 bp, Artificial sequence
  SiRNA target sequence
tgctcccataacgattattgacccc

SEQ ID NO: 205246 - DNA, 25 bp, Artificial sequence
  SiRNA target sequence
gctcccataacgattattgacccca

SEQ ID NO: 205247 - DNA, 25 bp, Artificial sequence
  SiRNA target sequence
ctcccataacgattattgaccccaa

SEQ ID NO: 205248 - DNA, 25 bp, Artificial sequence
  SiRNA target sequence
tcccataacgattattgaccccaac

SEQ ID NO: 205249 - DNA, 25 bp, Artificial sequence
  SiRNA target sequence
cccataacgattattgaccccaaca

SEQ ID NO: 205250 - DNA, 25 bp, Artificial sequence
  SiRNA target sequence
ccataacgattattgaccccaacaa

SEQ ID NO: 205251 - DNA, 25 bp, Artificial sequence
  SiRNA target sequence
cataacgattattgaccccaacaac

SEQ ID NO: 205252 - DNA, 25 bp, Artificial sequence
  SiRNA target sequence
ataacgattattgaccccaacaaca

SEQ ID NO: 205253 - DNA, 25 bp, Artificial sequence
  SiRNA target sequence
taacgattattgaccccaacaacaa

SEQ ID NO: 205254 - DNA, 25 bp, Artificial sequence
  SiRNA target sequence
aacgattattgaccccaacaacaag

SEQ ID NO: 205255 - DNA, 25 bp, Artificial sequence
  SiRNA target sequence
acgattattgaccccaacaacaaga

SEQ ID NO: 205256 - DNA, 25 bp, Artificial sequence
  SiRNA target sequence
cgattattgaccccaacaacaagaa

SEQ ID NO: 205257 - DNA, 25 bp, Artificial sequence
  SiRNA target sequence
gattattgaccccaacaacaagaat

SEQ ID NO: 205258 - DNA, 25 bp, Artificial sequence
  SiRNA target sequence
attattgaccccaacaacaagaata

SEQ ID NO: 205259 - DNA, 25 bp, Artificial sequence
  SiRNA target sequence
ttattgaccccaacaacaagaataa

SEQ ID NO: 205260 - DNA, 25 bp, Artificial sequence
  SiRNA target sequence
tattgaccccaacaacaagaataaa

SEQ ID NO: 205261 - DNA, 25 bp, Artificial sequence
  SiRNA target sequence
attgaccccaacaacaagaataaag

SEQ ID NO: 205262 - DNA, 25 bp, Artificial sequence
  SiRNA target sequence
ttgaccccaacaacaagaataaagg

SEQ ID NO: 205263 - DNA, 25 bp, Artificial sequence
  SiRNA target sequence
tgaccccaacaacaagaataaaggt

SEQ ID NO: 205264 - DNA, 25 bp, Artificial sequence
  SiRNA target sequence
gaccccaacaacaagaataaaggtg

SEQ ID NO: 205265 - DNA, 25 bp, Artificial sequence
  SiRNA target sequence
accccaacaacaagaataaaggtgt

SEQ ID NO: 205266 - DNA, 25 bp, Artificial sequence
  SiRNA target sequence
ccccaacaacaagaataaaggtgtt

SEQ ID NO: 205267 - DNA, 25 bp, Artificial sequence
  SiRNA target sequence
cccaacaacaagaataaaggtgtta

SEQ ID NO: 205268 - DNA, 25 bp, Artificial sequence
  SiRNA target sequence
ccaacaacaagaataaaggtgttaa

SEQ ID NO: 205269 - DNA, 25 bp, Artificial sequence
  SiRNA target sequence
caacaacaagaataaaggtgttaag

SEQ ID NO: 205270 - DNA, 25 bp, Artificial sequence
  SiRNA target sequence
aacaacaagaataaaggtgttaaga

SEQ ID NO: 205271 - DNA, 25 bp, Artificial sequence
  SiRNA target sequence
acaacaagaataaaggtgttaagag

SEQ ID NO: 205272 - DNA, 25 bp, Artificial sequence
  SiRNA target sequence
caacaagaataaaggtgttaagagt

SEQ ID NO: 205273 - DNA, 25 bp, Artificial sequence
  SiRNA target sequence
aacaagaataaaggtgttaagagtc

SEQ ID NO: 205274 - DNA, 25 bp, Artificial sequence
  SiRNA target sequence
acaagaataaaggtgttaagagtcc

SEQ ID NO: 205275 - DNA, 25 bp, Artificial sequence
  SiRNA target sequence
caagaataaaggtgttaagagtccc

SEQ ID NO: 205276 - DNA, 25 bp, Artificial sequence
  SiRNA target sequence
aagaataaaggtgttaagagtccca

SEQ ID NO: 205277 - DNA, 25 bp, Artificial sequence
  SiRNA target sequence
agaataaaggtgttaagagtcccat

SEQ ID NO: 205278 - DNA, 25 bp, Artificial sequence
  SiRNA target sequence
gaataaaggtgttaagagtcccata

SEQ ID NO: 205279 - DNA, 25 bp, Artificial sequence
  SiRNA target sequence
aataaaggtgttaagagtcccatag

SEQ ID NO: 205280 - DNA, 25 bp, Artificial sequence
  SiRNA target sequence
ataaaggtgttaagagtcccatagt

SEQ ID NO: 205281 - DNA, 25 bp, Artificial sequence
  SiRNA target sequence
taaaggtgttaagagtcccatagta

SEQ ID NO: 205282 - DNA, 25 bp, Artificial sequence
  SiRNA target sequence
aaaggtgttaagagtcccatagtaa

SEQ ID NO: 205283 - DNA, 25 bp, Artificial sequence
  SiRNA target sequence
aaggtgttaagagtcccatagtaat

SEQ ID NO: 205284 - DNA, 25 bp, Artificial sequence
  SiRNA target sequence
aggtgttaagagtcccatagtaatc

SEQ ID NO: 205285 - DNA, 25 bp, Artificial sequence
  SiRNA target sequence
ggtgttaagagtcccatagtaatcc

SEQ ID NO: 205286 - DNA, 25 bp, Artificial sequence
  SiRNA target sequence
gtgttaagagtcccatagtaatcca

SEQ ID NO: 205287 - DNA, 25 bp, Artificial sequence
  SiRNA target sequence
tgttaagagtcccatagtaatccat

SEQ ID NO: 205288 - DNA, 25 bp, Artificial sequence
  SiRNA target sequence
gttaagagtcccatagtaatccatc

SEQ ID NO: 205289 - DNA, 25 bp, Artificial sequence
  SiRNA target sequence
ttaagagtcccatagtaatccatcc

SEQ ID NO: 205290 - DNA, 25 bp, Artificial sequence
  SiRNA target sequence
taagagtcccatagtaatccatcca

SEQ ID NO: 205291 - DNA, 25 bp, Artificial sequence
  SiRNA target sequence
aagagtcccatagtaatccatccac

SEQ ID NO: 205292 - DNA, 25 bp, Artificial sequence
  SiRNA target sequence
agagtcccatagtaatccatccact

SEQ ID NO: 205293 - DNA, 25 bp, Artificial sequence
  SiRNA target sequence
gagtcccatagtaatccatccacta

SEQ ID NO: 205294 - DNA, 25 bp, Artificial sequence
  SiRNA target sequence
agtcccatagtaatccatccactac

SEQ ID NO: 205295 - DNA, 25 bp, Artificial sequence
  SiRNA target sequence
gtcccatagtaatccatccactact

SEQ ID NO: 205296 - DNA, 25 bp, Artificial sequence
  SiRNA target sequence
tcccatagtaatccatccactactt

SEQ ID NO: 205297 - DNA, 25 bp, Artificial sequence
  SiRNA target sequence
cccatagtaatccatccactacttt

SEQ ID NO: 205298 - DNA, 25 bp, Artificial sequence
  SiRNA target sequence
ccatagtaatccatccactactttc

SEQ ID NO: 205299 - DNA, 25 bp, Artificial sequence
  SiRNA target sequence
catagtaatccatccactactttct

SEQ ID NO: 205300 - DNA, 25 bp, Artificial sequence
  SiRNA target sequence
atagtaatccatccactactttcta

SEQ ID NO: 205301 - DNA, 25 bp, Artificial sequence
  SiRNA target sequence
tagtaatccatccactactttctac

SEQ ID NO: 205302 - DNA, 25 bp, Artificial sequence
  SiRNA target sequence
agtaatccatccactactttctact

SEQ ID NO: 205303 - DNA, 25 bp, Artificial sequence
  SiRNA target sequence
gtaatccatccactactttctacta

SEQ ID NO: 205304 - DNA, 25 bp, Artificial sequence
  SiRNA target sequence
taatccatccactactttctactaa

SEQ ID NO: 205305 - DNA, 25 bp, Artificial sequence
  SiRNA target sequence
aatccatccactactttctactaaa

SEQ ID NO: 205306 - DNA, 25 bp, Artificial sequence
  SiRNA target sequence
atccatccactactttctactaaag

SEQ ID NO: 205307 - DNA, 25 bp, Artificial sequence
  SiRNA target sequence
tccatccactactttctactaaagt

SEQ ID NO: 205308 - DNA, 25 bp, Artificial sequence
  SiRNA target sequence
ccatccactactttctactaaagta

SEQ ID NO: 205309 - DNA, 25 bp, Artificial sequence
  SiRNA target sequence
catccactactttctactaaagtag

SEQ ID NO: 205310 - DNA, 25 bp, Artificial sequence
  SiRNA target sequence
atccactactttctactaaagtaga

SEQ ID NO: 205311 - DNA, 25 bp, Artificial sequence
  SiRNA target sequence
tccactactttctactaaagtagaa

SEQ ID NO: 205312 - DNA, 25 bp, Artificial sequence
  SiRNA target sequence
ccactactttctactaaagtagaaa

SEQ ID NO: 205313 - DNA, 25 bp, Artificial sequence
  SiRNA target sequence
cactactttctactaaagtagaaaa

SEQ ID NO: 205314 - DNA, 25 bp, Artificial sequence
  SiRNA target sequence
actactttctactaaagtagaaaat

SEQ ID NO: 205315 - DNA, 25 bp, Artificial sequence
  SiRNA target sequence
ctactttctactaaagtagaaaatg

SEQ ID NO: 205316 - DNA, 25 bp, Artificial sequence
  SiRNA target sequence
tactttctactaaagtagaaaatgc

SEQ ID NO: 205317 - DNA, 25 bp, Artificial sequence
  SiRNA target sequence
actttctactaaagtagaaaatgct

SEQ ID NO: 205318 - DNA, 25 bp, Artificial sequence
  SiRNA target sequence
ctttctactaaagtagaaaatgctg

SEQ ID NO: 205319 - DNA, 25 bp, Artificial sequence
  SiRNA target sequence
tttctactaaagtagaaaatgctga

SEQ ID NO: 205320 - DNA, 25 bp, Artificial sequence
  SiRNA target sequence
ttctactaaagtagaaaatgctgac

SEQ ID NO: 205321 - DNA, 25 bp, Artificial sequence
  SiRNA target sequence
tctactaaagtagaaaatgctgaca

SEQ ID NO: 205322 - DNA, 25 bp, Artificial sequence
  SiRNA target sequence
ctactaaagtagaaaatgctgacaa

SEQ ID NO: 205323 - DNA, 25 bp, Artificial sequence
  SiRNA target sequence
tactaaagtagaaaatgctgacaaa

SEQ ID NO: 205324 - DNA, 25 bp, Artificial sequence
  SiRNA target sequence
actaaagtagaaaatgctgacaaat

SEQ ID NO: 205325 - DNA, 25 bp, Artificial sequence
  SiRNA target sequence
ctaaagtagaaaatgctgacaaatt

SEQ ID NO: 205326 - DNA, 25 bp, Artificial sequence
  SiRNA target sequence
taaagtagaaaatgctgacaaatta

SEQ ID NO: 205327 - DNA, 25 bp, Artificial sequence
  SiRNA target sequence
aaagtagaaaatgctgacaaattaa

SEQ ID NO: 205328 - DNA, 25 bp, Artificial sequence
  SiRNA target sequence
aagtagaaaatgctgacaaattaag

SEQ ID NO: 205329 - DNA, 25 bp, Artificial sequence
  SiRNA target sequence
agtagaaaatgctgacaaattaagt

SEQ ID NO: 205330 - DNA, 25 bp, Artificial sequence
  SiRNA target sequence
gtagaaaatgctgacaaattaagtg

SEQ ID NO: 205331 - DNA, 25 bp, Artificial sequence
  SiRNA target sequence
tagaaaatgctgacaaattaagtgt

SEQ ID NO: 205332 - DNA, 25 bp, Artificial sequence
  SiRNA target sequence
agaaaatgctgacaaattaagtgtt

SEQ ID NO: 205333 - DNA, 25 bp, Artificial sequence
  SiRNA target sequence
gaaaatgctgacaaattaagtgtta

SEQ ID NO: 205334 - DNA, 25 bp, Artificial sequence
  SiRNA target sequence
aaaatgctgacaaattaagtgttat

SEQ ID NO: 205335 - DNA, 25 bp, Artificial sequence
  SiRNA target sequence
aaatgctgacaaattaagtgttatt

SEQ ID NO: 205336 - DNA, 25 bp, Artificial sequence
  SiRNA target sequence
aatgctgacaaattaagtgttatta

SEQ ID NO: 205337 - DNA, 25 bp, Artificial sequence
  SiRNA target sequence
atgctgacaaattaagtgttattac

SEQ ID NO: 205338 - DNA, 25 bp, Artificial sequence
  SiRNA target sequence
tgctgacaaattaagtgttattaca

SEQ ID NO: 205339 - DNA, 25 bp, Artificial sequence
  SiRNA target sequence
gctgacaaattaagtgttattacag

SEQ ID NO: 205340 - DNA, 25 bp, Artificial sequence
  SiRNA target sequence
ctgacaaattaagtgttattacagt

SEQ ID NO: 205341 - DNA, 25 bp, Artificial sequence
  SiRNA target sequence
tgacaaattaagtgttattacagta

SEQ ID NO: 205342 - DNA, 25 bp, Artificial sequence
  SiRNA target sequence
gacaaattaagtgttattacagtaa

SEQ ID NO: 205343 - DNA, 25 bp, Artificial sequence
  SiRNA target sequence
acaaattaagtgttattacagtaac

SEQ ID NO: 205344 - DNA, 25 bp, Artificial sequence
  SiRNA target sequence
caaattaagtgttattacagtaact

SEQ ID NO: 205345 - DNA, 25 bp, Artificial sequence
  SiRNA target sequence
aaattaagtgttattacagtaactg

SEQ ID NO: 205346 - DNA, 25 bp, Artificial sequence
  SiRNA target sequence
aattaagtgttattacagtaactgc

SEQ ID NO: 205347 - DNA, 25 bp, Artificial sequence
  SiRNA target sequence
attaagtgttattacagtaactgct

SEQ ID NO: 205348 - DNA, 25 bp, Artificial sequence
  SiRNA target sequence
ttaagtgttattacagtaactgcta

SEQ ID NO: 205349 - DNA, 25 bp, Artificial sequence
  SiRNA target sequence
taagtgttattacagtaactgctac

SEQ ID NO: 205350 - DNA, 25 bp, Artificial sequence
  SiRNA target sequence
aagtgttattacagtaactgctacc

SEQ ID NO: 205351 - DNA, 25 bp, Artificial sequence
  SiRNA target sequence
agtgttattacagtaactgctacca

SEQ ID NO: 205352 - DNA, 25 bp, Artificial sequence
  SiRNA target sequence
gtgttattacagtaactgctaccaa

SEQ ID NO: 205353 - DNA, 25 bp, Artificial sequence
  SiRNA target sequence
tgttattacagtaactgctaccaat

SEQ ID NO: 205354 - DNA, 25 bp, Artificial sequence
  SiRNA target sequence
gttattacagtaactgctaccaata

SEQ ID NO: 205355 - DNA, 25 bp, Artificial sequence
  SiRNA target sequence
ttattacagtaactgctaccaatat

SEQ ID NO: 205356 - DNA, 25 bp, Artificial sequence
  SiRNA target sequence
tattacagtaactgctaccaatatt

SEQ ID NO: 205357 - DNA, 25 bp, Artificial sequence
  SiRNA target sequence
attacagtaactgctaccaatattt

SEQ ID NO: 205358 - DNA, 25 bp, Artificial sequence
  SiRNA target sequence
ttacagtaactgctaccaatatttg

SEQ ID NO: 205359 - DNA, 25 bp, Artificial sequence
  SiRNA target sequence
tacagtaactgctaccaatatttga

SEQ ID NO: 205360 - DNA, 25 bp, Artificial sequence
  SiRNA target sequence
acagtaactgctaccaatatttgat

SEQ ID NO: 205361 - DNA, 25 bp, Artificial sequence
  SiRNA target sequence
cagtaactgctaccaatatttgatc

SEQ ID NO: 205362 - DNA, 25 bp, Artificial sequence
  SiRNA target sequence
agtaactgctaccaatatttgatct

SEQ ID NO: 205363 - DNA, 25 bp, Artificial sequence
  SiRNA target sequence
gtaactgctaccaatatttgatcta

SEQ ID NO: 205364 - DNA, 25 bp, Artificial sequence
  SiRNA target sequence
taactgctaccaatatttgatctat

SEQ ID NO: 205365 - DNA, 25 bp, Artificial sequence
  SiRNA target sequence
aactgctaccaatatttgatctatt

SEQ ID NO: 205366 - DNA, 25 bp, Artificial sequence
  SiRNA target sequence
actgctaccaatatttgatctattg

SEQ ID NO: 205367 - DNA, 25 bp, Artificial sequence
  SiRNA target sequence
ctgctaccaatatttgatctattgt

SEQ ID NO: 205368 - DNA, 25 bp, Artificial sequence
  SiRNA target sequence
tgctaccaatatttgatctattgta

SEQ ID NO: 205369 - DNA, 25 bp, Artificial sequence
  SiRNA target sequence
gctaccaatatttgatctattgtat

SEQ ID NO: 205370 - DNA, 25 bp, Artificial sequence
  SiRNA target sequence
ctaccaatatttgatctattgtatt

SEQ ID NO: 205371 - DNA, 25 bp, Artificial sequence
  SiRNA target sequence
taccaatatttgatctattgtatta

SEQ ID NO: 205372 - DNA, 25 bp, Artificial sequence
  SiRNA target sequence
accaatatttgatctattgtattaa

SEQ ID NO: 205373 - DNA, 25 bp, Artificial sequence
  SiRNA target sequence
ccaatatttgatctattgtattaaa

SEQ ID NO: 205374 - DNA, 25 bp, Artificial sequence
  SiRNA target sequence
caatatttgatctattgtattaaat

SEQ ID NO: 205375 - DNA, 25 bp, Artificial sequence
  SiRNA target sequence
aatatttgatctattgtattaaatt

SEQ ID NO: 205376 - DNA, 25 bp, Artificial sequence
  SiRNA target sequence
atatttgatctattgtattaaattt

SEQ ID NO: 205377 - DNA, 25 bp, Artificial sequence
  SiRNA target sequence
tatttgatctattgtattaaatttg

SEQ ID NO: 205378 - DNA, 25 bp, Artificial sequence
  SiRNA target sequence
atttgatctattgtattaaatttgc

SEQ ID NO: 205379 - DNA, 25 bp, Artificial sequence
  SiRNA target sequence
tttgatctattgtattaaatttgcc

SEQ ID NO: 205380 - DNA, 25 bp, Artificial sequence
  SiRNA target sequence
ttgatctattgtattaaatttgccg

SEQ ID NO: 205381 - DNA, 25 bp, Artificial sequence
  SiRNA target sequence
tgatctattgtattaaatttgccgg

SEQ ID NO: 205382 - DNA, 25 bp, Artificial sequence
  SiRNA target sequence
gatctattgtattaaatttgccgga

SEQ ID NO: 205383 - DNA, 25 bp, Artificial sequence
  SiRNA target sequence
atctattgtattaaatttgccggag

SEQ ID NO: 205384 - DNA, 25 bp, Artificial sequence
  SiRNA target sequence
tctattgtattaaatttgccggagt

SEQ ID NO: 205385 - DNA, 25 bp, Artificial sequence
  SiRNA target sequence
ctattgtattaaatttgccggagta

SEQ ID NO: 205386 - DNA, 25 bp, Artificial sequence
  SiRNA target sequence
tattgtattaaatttgccggagtat

SEQ ID NO: 205387 - DNA, 25 bp, Artificial sequence
  SiRNA target sequence
attgtattaaatttgccggagtatt

SEQ ID NO: 205388 - DNA, 25 bp, Artificial sequence
  SiRNA target sequence
ttgtattaaatttgccggagtattc

SEQ ID NO: 205389 - DNA, 25 bp, Artificial sequence
  SiRNA target sequence
tgtattaaatttgccggagtattct

SEQ ID NO: 205390 - DNA, 25 bp, Artificial sequence
  SiRNA target sequence
gtattaaatttgccggagtattctc

SEQ ID NO: 205391 - DNA, 25 bp, Artificial sequence
  SiRNA target sequence
tattaaatttgccggagtattctcc

SEQ ID NO: 205392 - DNA, 25 bp, Artificial sequence
  SiRNA target sequence
attaaatttgccggagtattctcct

SEQ ID NO: 205393 - DNA, 25 bp, Artificial sequence
  SiRNA target sequence
ttaaatttgccggagtattctccta

SEQ ID NO: 205394 - DNA, 25 bp, Artificial sequence
  SiRNA target sequence
taaatttgccggagtattctcctac

SEQ ID NO: 205395 - DNA, 25 bp, Artificial sequence
  SiRNA target sequence
aaatttgccggagtattctcctacc

SEQ ID NO: 205396 - DNA, 25 bp, Artificial sequence
  SiRNA target sequence
aatttgccggagtattctcctacct

SEQ ID NO: 205397 - DNA, 25 bp, Artificial sequence
  SiRNA target sequence
atttgccggagtattctcctacctc

SEQ ID NO: 205398 - DNA, 25 bp, Artificial sequence
  SiRNA target sequence
tttgccggagtattctcctacctct

SEQ ID NO: 205399 - DNA, 25 bp, Artificial sequence
  SiRNA target sequence
ttgccggagtattctcctacctcta

SEQ ID NO: 205400 - DNA, 25 bp, Artificial sequence
  SiRNA target sequence
tgccggagtattctcctacctctaa

SEQ ID NO: 205401 - DNA, 25 bp, Artificial sequence
  SiRNA target sequence
gccggagtattctcctacctctaat

SEQ ID NO: 205402 - DNA, 25 bp, Artificial sequence
  SiRNA target sequence
ccggagtattctcctacctctaatc

SEQ ID NO: 205403 - DNA, 25 bp, Artificial sequence
  SiRNA target sequence
cggagtattctcctacctctaatcc

SEQ ID NO: 205404 - DNA, 25 bp, Artificial sequence
  SiRNA target sequence
ggagtattctcctacctctaatcct

SEQ ID NO: 205405 - DNA, 25 bp, Artificial sequence
  SiRNA target sequence
gagtattctcctacctctaatccta

SEQ ID NO: 205406 - DNA, 25 bp, Artificial sequence
  SiRNA target sequence
agtattctcctacctctaatcctaa

SEQ ID NO: 205407 - DNA, 25 bp, Artificial sequence
  SiRNA target sequence
gtattctcctacctctaatcctaaa

SEQ ID NO: 205408 - DNA, 25 bp, Artificial sequence
  SiRNA target sequence
tattctcctacctctaatcctaaac

SEQ ID NO: 205409 - DNA, 25 bp, Artificial sequence
  SiRNA target sequence
attctcctacctctaatcctaaact

SEQ ID NO: 205410 - DNA, 25 bp, Artificial sequence
  SiRNA target sequence
ttctcctacctctaatcctaaactt

SEQ ID NO: 205411 - DNA, 25 bp, Artificial sequence
  SiRNA target sequence
tctcctacctctaatcctaaacttt

SEQ ID NO: 205412 - DNA, 25 bp, Artificial sequence
  SiRNA target sequence
ctcctacctctaatcctaaactttt

SEQ ID NO: 205413 - DNA, 25 bp, Artificial sequence
  SiRNA target sequence
tcctacctctaatcctaaacttttt

SEQ ID NO: 205414 - DNA, 25 bp, Artificial sequence
  SiRNA target sequence
cctacctctaatcctaaactttttg

SEQ ID NO: 205415 - DNA, 25 bp, Artificial sequence
  SiRNA target sequence
ctacctctaatcctaaactttttga

SEQ ID NO: 205416 - DNA, 25 bp, Artificial sequence
  SiRNA target sequence
tacctctaatcctaaactttttgac

SEQ ID NO: 205417 - DNA, 25 bp, Artificial sequence
  SiRNA target sequence
acctctaatcctaaactttttgacg

SEQ ID NO: 205418 - DNA, 25 bp, Artificial sequence
  SiRNA target sequence
cctctaatcctaaactttttgacgc

SEQ ID NO: 205419 - DNA, 25 bp, Artificial sequence
  SiRNA target sequence
ctctaatcctaaactttttgacgca

SEQ ID NO: 205420 - DNA, 25 bp, Artificial sequence
  SiRNA target sequence
tctaatcctaaactttttgacgcag

SEQ ID NO: 205421 - DNA, 25 bp, Artificial sequence
  SiRNA target sequence
ctaatcctaaactttttgacgcagc

SEQ ID NO: 205422 - DNA, 25 bp, Artificial sequence
  SiRNA target sequence
taatcctaaactttttgacgcagct

SEQ ID NO: 205423 - DNA, 25 bp, Artificial sequence
  SiRNA target sequence
aatcctaaactttttgacgcagctt

SEQ ID NO: 205424 - DNA, 25 bp, Artificial sequence
  SiRNA target sequence
atcctaaactttttgacgcagcttt

SEQ ID NO: 205425 - DNA, 25 bp, Artificial sequence
  SiRNA target sequence
tcctaaactttttgacgcagcttta

SEQ ID NO: 205426 - DNA, 25 bp, Artificial sequence
  SiRNA target sequence
cctaaactttttgacgcagctttaa

SEQ ID NO: 205427 - DNA, 25 bp, Artificial sequence
  SiRNA target sequence
ctaaactttttgacgcagctttaat

SEQ ID NO: 205428 - DNA, 25 bp, Artificial sequence
  SiRNA target sequence
taaactttttgacgcagctttaatt

SEQ ID NO: 205429 - DNA, 25 bp, Artificial sequence
  SiRNA target sequence
aaactttttgacgcagctttaattc

SEQ ID NO: 205430 - DNA, 25 bp, Artificial sequence
  SiRNA target sequence
aactttttgacgcagctttaattcc

SEQ ID NO: 205431 - DNA, 25 bp, Artificial sequence
  SiRNA target sequence
actttttgacgcagctttaattcct

SEQ ID NO: 205432 - DNA, 25 bp, Artificial sequence
  SiRNA target sequence
ctttttgacgcagctttaattcctg

SEQ ID NO: 205433 - DNA, 25 bp, Artificial sequence
  SiRNA target sequence
tttttgacgcagctttaattcctgc

SEQ ID NO: 205434 - DNA, 25 bp, Artificial sequence
  SiRNA target sequence
ttttgacgcagctttaattcctgct

SEQ ID NO: 205435 - DNA, 25 bp, Artificial sequence
  SiRNA target sequence
tttgacgcagctttaattcctgctt

SEQ ID NO: 205436 - DNA, 25 bp, Artificial sequence
  SiRNA target sequence
ttgacgcagctttaattcctgcttt

SEQ ID NO: 205437 - DNA, 25 bp, Artificial sequence
  SiRNA target sequence
tgacgcagctttaattcctgcttta

SEQ ID NO: 205438 - DNA, 25 bp, Artificial sequence
  SiRNA target sequence
gacgcagctttaattcctgctttat

SEQ ID NO: 205439 - DNA, 25 bp, Artificial sequence
  SiRNA target sequence
acgcagctttaattcctgctttata

SEQ ID NO: 205440 - DNA, 25 bp, Artificial sequence
  SiRNA target sequence
cgcagctttaattcctgctttatag

SEQ ID NO: 205441 - DNA, 25 bp, Artificial sequence
  SiRNA target sequence
gcagctttaattcctgctttataga

SEQ ID NO: 205442 - DNA, 25 bp, Artificial sequence
  SiRNA target sequence
cagctttaattcctgctttatagac

SEQ ID NO: 205443 - DNA, 25 bp, Artificial sequence
  SiRNA target sequence
agctttaattcctgctttatagaca

SEQ ID NO: 205444 - DNA, 25 bp, Artificial sequence
  SiRNA target sequence
gctttaattcctgctttatagacag

SEQ ID NO: 205445 - DNA, 25 bp, Artificial sequence
  SiRNA target sequence
ctttaattcctgctttatagacaga

SEQ ID NO: 205446 - DNA, 25 bp, Artificial sequence
  SiRNA target sequence
tttaattcctgctttatagacagat

SEQ ID NO: 205447 - DNA, 25 bp, Artificial sequence
  SiRNA target sequence
ttaattcctgctttatagacagatt

SEQ ID NO: 205448 - DNA, 25 bp, Artificial sequence
  SiRNA target sequence
taattcctgctttatagacagattc

SEQ ID NO: 205449 - DNA, 25 bp, Artificial sequence
  SiRNA target sequence
aattcctgctttatagacagattca

SEQ ID NO: 205450 - DNA, 25 bp, Artificial sequence
  SiRNA target sequence
attcctgctttatagacagattcaa

SEQ ID NO: 205451 - DNA, 25 bp, Artificial sequence
  SiRNA target sequence
ttcctgctttatagacagattcaat

SEQ ID NO: 205452 - DNA, 25 bp, Artificial sequence
  SiRNA target sequence
tcctgctttatagacagattcaatt

SEQ ID NO: 205453 - DNA, 25 bp, Artificial sequence
  SiRNA target sequence
cctgctttatagacagattcaatta

SEQ ID NO: 205454 - DNA, 25 bp, Artificial sequence
  SiRNA target sequence
ctgctttatagacagattcaattaa

SEQ ID NO: 205455 - DNA, 25 bp, Artificial sequence
  SiRNA target sequence
tgctttatagacagattcaattaaa

SEQ ID NO: 205456 - DNA, 25 bp, Artificial sequence
  SiRNA target sequence
gctttatagacagattcaattaaat

SEQ ID NO: 205457 - DNA, 25 bp, Artificial sequence
  SiRNA target sequence
ctttatagacagattcaattaaatt

SEQ ID NO: 205458 - DNA, 25 bp, Artificial sequence
  SiRNA target sequence
tttatagacagattcaattaaatta

SEQ ID NO: 205459 - DNA, 25 bp, Artificial sequence
  SiRNA target sequence
ttatagacagattcaattaaattaa

SEQ ID NO: 205460 - DNA, 25 bp, Artificial sequence
  SiRNA target sequence
tatagacagattcaattaaattaaa

SEQ ID NO: 205461 - DNA, 25 bp, Artificial sequence
  SiRNA target sequence
atagacagattcaattaaattaaat

SEQ ID NO: 205462 - DNA, 25 bp, Artificial sequence
  SiRNA target sequence
tagacagattcaattaaattaaatg

SEQ ID NO: 205463 - DNA, 25 bp, Artificial sequence
  SiRNA target sequence
agacagattcaattaaattaaatgt

SEQ ID NO: 205464 - DNA, 25 bp, Artificial sequence
  SiRNA target sequence
gacagattcaattaaattaaatgtt

SEQ ID NO: 205465 - DNA, 25 bp, Artificial sequence
  SiRNA target sequence
acagattcaattaaattaaatgtta

SEQ ID NO: 205466 - DNA, 25 bp, Artificial sequence
  SiRNA target sequence
cagattcaattaaattaaatgttat

SEQ ID NO: 205467 - DNA, 25 bp, Artificial sequence
  SiRNA target sequence
agattcaattaaattaaatgttata

SEQ ID NO: 205468 - DNA, 25 bp, Artificial sequence
  SiRNA target sequence
gattcaattaaattaaatgttatat

SEQ ID NO: 205469 - DNA, 25 bp, Artificial sequence
  SiRNA target sequence
attcaattaaattaaatgttatatt

SEQ ID NO: 205470 - DNA, 25 bp, Artificial sequence
  SiRNA target sequence
ttcaattaaattaaatgttatattg

SEQ ID NO: 205471 - DNA, 25 bp, Artificial sequence
  SiRNA target sequence
tcaattaaattaaatgttatattgt

SEQ ID NO: 205472 - DNA, 25 bp, Artificial sequence
  SiRNA target sequence
caattaaattaaatgttatattgta

SEQ ID NO: 205473 - DNA, 25 bp, Artificial sequence
  SiRNA target sequence
aattaaattaaatgttatattgtaa

SEQ ID NO: 205474 - DNA, 25 bp, Artificial sequence
  SiRNA target sequence
attaaattaaatgttatattgtaaa

SEQ ID NO: 205475 - DNA, 25 bp, Artificial sequence
  SiRNA target sequence
ttaaattaaatgttatattgtaaaa

SEQ ID NO: 205476 - DNA, 25 bp, Artificial sequence
  SiRNA target sequence
taaattaaatgttatattgtaaaaa

SEQ ID NO: 205477 - DNA, 25 bp, Artificial sequence
  SiRNA target sequence
aaattaaatgttatattgtaaaaaa

SEQ ID NO: 205478 - DNA, 25 bp, Artificial sequence
  SiRNA target sequence
aattaaatgttatattgtaaaaaaa

SEQ ID NO: 205479 - DNA, 25 bp, Artificial sequence
  SiRNA target sequence
attaaatgttatattgtaaaaaaag

SEQ ID NO: 205480 - DNA, 25 bp, Artificial sequence
  SiRNA target sequence
ttaaatgttatattgtaaaaaaaga

SEQ ID NO: 205481 - DNA, 25 bp, Artificial sequence
  SiRNA target sequence
taaatgttatattgtaaaaaaagac

SEQ ID NO: 205482 - DNA, 25 bp, Artificial sequence
  SiRNA target sequence
aaatgttatattgtaaaaaaagact

SEQ ID NO: 205483 - DNA, 25 bp, Artificial sequence
  SiRNA target sequence
aatgttatattgtaaaaaaagacta

SEQ ID NO: 205484 - DNA, 25 bp, Artificial sequence
  SiRNA target sequence
atgttatattgtaaaaaaagactat

SEQ ID NO: 205485 - DNA, 25 bp, Artificial sequence
  SiRNA target sequence
tgttatattgtaaaaaaagactatt

SEQ ID NO: 205486 - DNA, 25 bp, Artificial sequence
  SiRNA target sequence
gttatattgtaaaaaaagactatta

SEQ ID NO: 205487 - DNA, 25 bp, Artificial sequence
  SiRNA target sequence
ttatattgtaaaaaaagactattat

SEQ ID NO: 205488 - DNA, 25 bp, Artificial sequence
  SiRNA target sequence
tatattgtaaaaaaagactattata

SEQ ID NO: 205489 - DNA, 25 bp, Artificial sequence
  SiRNA target sequence
atattgtaaaaaaagactattatac

SEQ ID NO: 205490 - DNA, 25 bp, Artificial sequence
  SiRNA target sequence
tattgtaaaaaaagactattataca

SEQ ID NO: 205491 - DNA, 25 bp, Artificial sequence
  SiRNA target sequence
attgtaaaaaaagactattatacaa

SEQ ID NO: 205492 - DNA, 25 bp, Artificial sequence
  SiRNA target sequence
ttgtaaaaaaagactattatacaaa

SEQ ID NO: 205493 - DNA, 25 bp, Artificial sequence
  SiRNA target sequence
tgtaaaaaaagactattatacaaag

SEQ ID NO: 205494 - DNA, 25 bp, Artificial sequence
  SiRNA target sequence
gtaaaaaaagactattatacaaagt

SEQ ID NO: 205495 - DNA, 25 bp, Artificial sequence
  SiRNA target sequence
taaaaaaagactattatacaaagtg

SEQ ID NO: 205496 - DNA, 25 bp, Artificial sequence
  SiRNA target sequence
aaaaaaagactattatacaaagtga

SEQ ID NO: 205497 - DNA, 25 bp, Artificial sequence
  SiRNA target sequence
aaaaaagactattatacaaagtgac

SEQ ID NO: 205498 - DNA, 25 bp, Artificial sequence
  SiRNA target sequence
aaaaagactattatacaaagtgaca

SEQ ID NO: 205499 - DNA, 25 bp, Artificial sequence
  SiRNA target sequence
aaaagactattatacaaagtgacat

SEQ ID NO: 205500 - DNA, 25 bp, Artificial sequence
  SiRNA target sequence
aaagactattatacaaagtgacatt

SEQ ID NO: 205501 - DNA, 25 bp, Artificial sequence
  SiRNA target sequence
aagactattatacaaagtgacatta

SEQ ID NO: 205502 - DNA, 25 bp, Artificial sequence
  SiRNA target sequence
agactattatacaaagtgacattaa

SEQ ID NO: 205503 - DNA, 25 bp, Artificial sequence
  SiRNA target sequence
gactattatacaaagtgacattaat

SEQ ID NO: 205504 - DNA, 25 bp, Artificial sequence
  SiRNA target sequence
actattatacaaagtgacattaata

SEQ ID NO: 205505 - DNA, 25 bp, Artificial sequence
  SiRNA target sequence
ctattatacaaagtgacattaataa

SEQ ID NO: 205506 - DNA, 25 bp, Artificial sequence
  SiRNA target sequence
tattatacaaagtgacattaataat

SEQ ID NO: 205507 - DNA, 25 bp, Artificial sequence
  SiRNA target sequence
attatacaaagtgacattaataatt

SEQ ID NO: 205508 - DNA, 25 bp, Artificial sequence
  SiRNA target sequence
ttatacaaagtgacattaataattt

SEQ ID NO: 205509 - DNA, 25 bp, Artificial sequence
  SiRNA target sequence
tatacaaagtgacattaataatttt

SEQ ID NO: 205510 - DNA, 25 bp, Artificial sequence
  SiRNA target sequence
atacaaagtgacattaataattttg

SEQ ID NO: 205511 - DNA, 25 bp, Artificial sequence
  SiRNA target sequence
tacaaagtgacattaataattttga

SEQ ID NO: 205512 - DNA, 25 bp, Artificial sequence
  SiRNA target sequence
acaaagtgacattaataattttgat

SEQ ID NO: 205513 - DNA, 25 bp, Artificial sequence
  SiRNA target sequence
caaagtgacattaataattttgatt

SEQ ID NO: 205514 - DNA, 25 bp, Artificial sequence
  SiRNA target sequence
aaagtgacattaataattttgattt

SEQ ID NO: 205515 - DNA, 25 bp, Artificial sequence
  SiRNA target sequence
aagtgacattaataattttgatttc

SEQ ID NO: 205516 - DNA, 25 bp, Artificial sequence
  SiRNA target sequence
agtgacattaataattttgatttca

SEQ ID NO: 205517 - DNA, 25 bp, Artificial sequence
  SiRNA target sequence
gtgacattaataattttgatttcat

SEQ ID NO: 205518 - DNA, 25 bp, Artificial sequence
  SiRNA target sequence
tgacattaataattttgatttcatc

SEQ ID NO: 205519 - DNA, 25 bp, Artificial sequence
  SiRNA target sequence
gacattaataattttgatttcatca

SEQ ID NO: 205520 - DNA, 25 bp, Artificial sequence
  SiRNA target sequence
acattaataattttgatttcatcat

SEQ ID NO: 205521 - DNA, 25 bp, Artificial sequence
  SiRNA target sequence
cattaataattttgatttcatcatt

SEQ ID NO: 205522 - DNA, 25 bp, Artificial sequence
  SiRNA target sequence
attaataattttgatttcatcatta

SEQ ID NO: 205523 - DNA, 25 bp, Artificial sequence
  SiRNA target sequence
ttaataattttgatttcatcattat

SEQ ID NO: 205524 - DNA, 25 bp, Artificial sequence
  SiRNA target sequence
taataattttgatttcatcattata

SEQ ID NO: 205525 - DNA, 25 bp, Artificial sequence
  SiRNA target sequence
aataattttgatttcatcattatac

SEQ ID NO: 205526 - DNA, 25 bp, Artificial sequence
  SiRNA target sequence
ataattttgatttcatcattatact

SEQ ID NO: 205527 - DNA, 25 bp, Artificial sequence
  SiRNA target sequence
taattttgatttcatcattatacta

SEQ ID NO: 205528 - DNA, 25 bp, Artificial sequence
  SiRNA target sequence
aattttgatttcatcattatactaa

SEQ ID NO: 205529 - DNA, 25 bp, Artificial sequence
  SiRNA target sequence
attttgatttcatcattatactaat

SEQ ID NO: 205530 - DNA, 25 bp, Artificial sequence
  SiRNA target sequence
ttttgatttcatcattatactaata

SEQ ID NO: 205531 - DNA, 25 bp, Artificial sequence
  SiRNA target sequence
tttgatttcatcattatactaatac

SEQ ID NO: 205532 - DNA, 25 bp, Artificial sequence
  SiRNA target sequence
ttgatttcatcattatactaatacc

SEQ ID NO: 205533 - DNA, 25 bp, Artificial sequence
  SiRNA target sequence
tgatttcatcattatactaatacct

SEQ ID NO: 205534 - DNA, 25 bp, Artificial sequence
  SiRNA target sequence
gatttcatcattatactaatacctt

SEQ ID NO: 205535 - DNA, 25 bp, Artificial sequence
  SiRNA target sequence
atttcatcattatactaataccttc

SEQ ID NO: 205536 - DNA, 25 bp, Artificial sequence
  SiRNA target sequence
tttcatcattatactaataccttcg

SEQ ID NO: 205537 - DNA, 25 bp, Artificial sequence
  SiRNA target sequence
ttcatcattatactaataccttcgg

SEQ ID NO: 205538 - DNA, 25 bp, Artificial sequence
  SiRNA target sequence
tcatcattatactaataccttcgga

SEQ ID NO: 205539 - DNA, 25 bp, Artificial sequence
  SiRNA target sequence
catcattatactaataccttcggag

SEQ ID NO: 205540 - DNA, 25 bp, Artificial sequence
  SiRNA target sequence
atcattatactaataccttcggaga

SEQ ID NO: 205541 - DNA, 25 bp, Artificial sequence
  SiRNA target sequence
tcattatactaataccttcggagaa

SEQ ID NO: 205542 - DNA, 25 bp, Artificial sequence
  SiRNA target sequence
cattatactaataccttcggagaaa

SEQ ID NO: 205543 - DNA, 25 bp, Artificial sequence
  SiRNA target sequence
attatactaataccttcggagaaac

SEQ ID NO: 205544 - DNA, 25 bp, Artificial sequence
  SiRNA target sequence
ttatactaataccttcggagaaacc

SEQ ID NO: 205545 - DNA, 25 bp, Artificial sequence
  SiRNA target sequence
tatactaataccttcggagaaacct

SEQ ID NO: 205546 - DNA, 25 bp, Artificial sequence
  SiRNA target sequence
atactaataccttcggagaaaccta

SEQ ID NO: 205547 - DNA, 25 bp, Artificial sequence
  SiRNA target sequence
tactaataccttcggagaaacctac

SEQ ID NO: 205548 - DNA, 25 bp, Artificial sequence
  SiRNA target sequence
actaataccttcggagaaacctaca

SEQ ID NO: 205549 - DNA, 25 bp, Artificial sequence
  SiRNA target sequence
ctaataccttcggagaaacctacac

SEQ ID NO: 205550 - DNA, 25 bp, Artificial sequence
  SiRNA target sequence
taataccttcggagaaacctacact

SEQ ID NO: 205551 - DNA, 25 bp, Artificial sequence
  SiRNA target sequence
aataccttcggagaaacctacacta

SEQ ID NO: 205552 - DNA, 25 bp, Artificial sequence
  SiRNA target sequence
ataccttcggagaaacctacactaa

SEQ ID NO: 205553 - DNA, 25 bp, Artificial sequence
  SiRNA target sequence
taccttcggagaaacctacactaac

SEQ ID NO: 205554 - DNA, 25 bp, Artificial sequence
  SiRNA target sequence
accttcggagaaacctacactaact

SEQ ID NO: 205555 - DNA, 25 bp, Artificial sequence
  SiRNA target sequence
ccttcggagaaacctacactaactt

SEQ ID NO: 205556 - DNA, 25 bp, Artificial sequence
  SiRNA target sequence
cttcggagaaacctacactaacttt

SEQ ID NO: 205557 - DNA, 25 bp, Artificial sequence
  SiRNA target sequence
ttcggagaaacctacactaactttt

SEQ ID NO: 205558 - DNA, 25 bp, Artificial sequence
  SiRNA target sequence
tcggagaaacctacactaacttttt

SEQ ID NO: 205559 - DNA, 25 bp, Artificial sequence
  SiRNA target sequence
cggagaaacctacactaactttttg

SEQ ID NO: 205560 - DNA, 25 bp, Artificial sequence
  SiRNA target sequence
ggagaaacctacactaactttttgt

SEQ ID NO: 205561 - DNA, 25 bp, Artificial sequence
  SiRNA target sequence
gagaaacctacactaactttttgtt

SEQ ID NO: 205562 - DNA, 25 bp, Artificial sequence
  SiRNA target sequence
agaaacctacactaactttttgttt

SEQ ID NO: 205563 - DNA, 25 bp, Artificial sequence
  SiRNA target sequence
gaaacctacactaactttttgtttc

SEQ ID NO: 205564 - DNA, 25 bp, Artificial sequence
  SiRNA target sequence
aaacctacactaactttttgtttct

SEQ ID NO: 205565 - DNA, 25 bp, Artificial sequence
  SiRNA target sequence
aacctacactaactttttgtttctt

SEQ ID NO: 205566 - DNA, 25 bp, Artificial sequence
  SiRNA target sequence
acctacactaactttttgtttcttt

SEQ ID NO: 205567 - DNA, 25 bp, Artificial sequence
  SiRNA target sequence
cctacactaactttttgtttctttt

SEQ ID NO: 205568 - DNA, 25 bp, Artificial sequence
  SiRNA target sequence
ctacactaactttttgtttcttttt

SEQ ID NO: 205569 - DNA, 25 bp, Artificial sequence
  SiRNA target sequence
tacactaactttttgtttctttttt

SEQ ID NO: 205570 - DNA, 25 bp, Artificial sequence
  SiRNA target sequence
acactaactttttgtttctttttta

SEQ ID NO: 205571 - DNA, 25 bp, Artificial sequence
  SiRNA target sequence
cactaactttttgtttcttttttat

SEQ ID NO: 205572 - DNA, 25 bp, Artificial sequence
  SiRNA target sequence
actaactttttgtttcttttttatc

SEQ ID NO: 205573 - DNA, 25 bp, Artificial sequence
  SiRNA target sequence
ctaactttttgtttcttttttatcg

SEQ ID NO: 205574 - DNA, 25 bp, Artificial sequence
  SiRNA target sequence
taactttttgtttcttttttatcgt

SEQ ID NO: 205575 - DNA, 25 bp, Artificial sequence
  SiRNA target sequence
aactttttgtttcttttttatcgta

SEQ ID NO: 205576 - DNA, 25 bp, Artificial sequence
  SiRNA target sequence
actttttgtttcttttttatcgtat

SEQ ID NO: 205577 - DNA, 25 bp, Artificial sequence
  SiRNA target sequence
ctttttgtttcttttttatcgtatt

SEQ ID NO: 205578 - DNA, 25 bp, Artificial sequence
  SiRNA target sequence
tttttgtttcttttttatcgtatta

SEQ ID NO: 205579 - DNA, 25 bp, Artificial sequence
  SiRNA target sequence
ttttgtttcttttttatcgtattag

SEQ ID NO: 205580 - DNA, 25 bp, Artificial sequence
  SiRNA target sequence
tttgtttcttttttatcgtattaga

SEQ ID NO: 205581 - DNA, 25 bp, Artificial sequence
  SiRNA target sequence
ttgtttcttttttatcgtattagaa

SEQ ID NO: 205582 - DNA, 25 bp, Artificial sequence
  SiRNA target sequence
tgtttcttttttatcgtattagaag

SEQ ID NO: 205583 - DNA, 25 bp, Artificial sequence
  SiRNA target sequence
gtttcttttttatcgtattagaagg

SEQ ID NO: 205584 - DNA, 25 bp, Artificial sequence
  SiRNA target sequence
tttcttttttatcgtattagaaggt

SEQ ID NO: 205585 - DNA, 25 bp, Artificial sequence
  SiRNA target sequence
ttcttttttatcgtattagaaggta

SEQ ID NO: 205586 - DNA, 25 bp, Artificial sequence
  SiRNA target sequence
tcttttttatcgtattagaaggtat

SEQ ID NO: 205587 - DNA, 25 bp, Artificial sequence
  SiRNA target sequence
cttttttatcgtattagaaggtata

SEQ ID NO: 205588 - DNA, 25 bp, Artificial sequence
  SiRNA target sequence
ttttttatcgtattagaaggtataa

SEQ ID NO: 205589 - DNA, 25 bp, Artificial sequence
  SiRNA target sequence
tttttatcgtattagaaggtataaa

SEQ ID NO: 205590 - DNA, 25 bp, Artificial sequence
  SiRNA target sequence
ttttatcgtattagaaggtataaat

SEQ ID NO: 205591 - DNA, 25 bp, Artificial sequence
  SiRNA target sequence
tttatcgtattagaaggtataaata

SEQ ID NO: 205592 - DNA, 25 bp, Artificial sequence
  SiRNA target sequence
ttatcgtattagaaggtataaatat

SEQ ID NO: 205593 - DNA, 25 bp, Artificial sequence
  SiRNA target sequence
tatcgtattagaaggtataaatatt

SEQ ID NO: 205594 - DNA, 25 bp, Artificial sequence
  SiRNA target sequence
atcgtattagaaggtataaatattg

SEQ ID NO: 205595 - DNA, 25 bp, Artificial sequence
  SiRNA target sequence
tcgtattagaaggtataaatattgg

SEQ ID NO: 205596 - DNA, 25 bp, Artificial sequence
  SiRNA target sequence
cgtattagaaggtataaatattggt

SEQ ID NO: 205597 - DNA, 25 bp, Artificial sequence
  SiRNA target sequence
gtattagaaggtataaatattggta

SEQ ID NO: 205598 - DNA, 25 bp, Artificial sequence
  SiRNA target sequence
tattagaaggtataaatattggtac

SEQ ID NO: 205599 - DNA, 25 bp, Artificial sequence
  SiRNA target sequence
attagaaggtataaatattggtaca

SEQ ID NO: 205600 - DNA, 25 bp, Artificial sequence
  SiRNA target sequence
ttagaaggtataaatattggtacac

SEQ ID NO: 205601 - DNA, 25 bp, Artificial sequence
  SiRNA target sequence
tagaaggtataaatattggtacact

SEQ ID NO: 205602 - DNA, 25 bp, Artificial sequence
  SiRNA target sequence
agaaggtataaatattggtacactc

SEQ ID NO: 205603 - DNA, 25 bp, Artificial sequence
  SiRNA target sequence
gaaggtataaatattggtacactca

SEQ ID NO: 205604 - DNA, 25 bp, Artificial sequence
  SiRNA target sequence
aaggtataaatattggtacactcat

SEQ ID NO: 205605 - DNA, 25 bp, Artificial sequence
  SiRNA target sequence
aggtataaatattggtacactcatt

SEQ ID NO: 205606 - DNA, 25 bp, Artificial sequence
  SiRNA target sequence
ggtataaatattggtacactcatta

SEQ ID NO: 205607 - DNA, 25 bp, Artificial sequence
  SiRNA target sequence
gtataaatattggtacactcattat

SEQ ID NO: 205608 - DNA, 25 bp, Artificial sequence
  SiRNA target sequence
tataaatattggtacactcattatt

SEQ ID NO: 205609 - DNA, 25 bp, Artificial sequence
  SiRNA target sequence
ataaatattggtacactcattattt

SEQ ID NO: 205610 - DNA, 25 bp, Artificial sequence
  SiRNA target sequence
taaatattggtacactcattatttt

SEQ ID NO: 205611 - DNA, 25 bp, Artificial sequence
  SiRNA target sequence
aaatattggtacactcattatttta

SEQ ID NO: 205612 - DNA, 25 bp, Artificial sequence
  SiRNA target sequence
aatattggtacactcattattttat

SEQ ID NO: 205613 - DNA, 25 bp, Artificial sequence
  SiRNA target sequence
atattggtacactcattattttatt

SEQ ID NO: 205614 - DNA, 25 bp, Artificial sequence
  SiRNA target sequence
tattggtacactcattattttattc

SEQ ID NO: 205615 - DNA, 25 bp, Artificial sequence
  SiRNA target sequence
attggtacactcattattttattct

SEQ ID NO: 205616 - DNA, 25 bp, Artificial sequence
  SiRNA target sequence
ttggtacactcattattttattctc

SEQ ID NO: 205617 - DNA, 25 bp, Artificial sequence
  SiRNA target sequence
tggtacactcattattttattctcg

SEQ ID NO: 205618 - DNA, 25 bp, Artificial sequence
  SiRNA target sequence
ggtacactcattattttattctcga

SEQ ID NO: 205619 - DNA, 25 bp, Artificial sequence
  SiRNA target sequence
gtacactcattattttattctcgaa

SEQ ID NO: 205620 - DNA, 25 bp, Artificial sequence
  SiRNA target sequence
tacactcattattttattctcgaaa

SEQ ID NO: 205621 - DNA, 25 bp, Artificial sequence
  SiRNA target sequence
acactcattattttattctcgaaat

SEQ ID NO: 205622 - DNA, 25 bp, Artificial sequence
  SiRNA target sequence
cactcattattttattctcgaaata

SEQ ID NO: 205623 - DNA, 25 bp, Artificial sequence
  SiRNA target sequence
actcattattttattctcgaaataa

SEQ ID NO: 205624 - DNA, 25 bp, Artificial sequence
  SiRNA target sequence
ctcattattttattctcgaaataat

SEQ ID NO: 205625 - DNA, 25 bp, Artificial sequence
  SiRNA target sequence
tcattattttattctcgaaataata

SEQ ID NO: 205626 - DNA, 25 bp, Artificial sequence
  SiRNA target sequence
cattattttattctcgaaataatat

SEQ ID NO: 205627 - DNA, 25 bp, Artificial sequence
  SiRNA target sequence
attattttattctcgaaataatatt

SEQ ID NO: 205628 - DNA, 25 bp, Artificial sequence
  SiRNA target sequence
ttattttattctcgaaataatattt

SEQ ID NO: 205629 - DNA, 25 bp, Artificial sequence
  SiRNA target sequence
tattttattctcgaaataatatttc

SEQ ID NO: 205630 - DNA, 25 bp, Artificial sequence
  SiRNA target sequence
attttattctcgaaataatatttca

SEQ ID NO: 205631 - DNA, 25 bp, Artificial sequence
  SiRNA target sequence
ttttattctcgaaataatatttcat

SEQ ID NO: 205632 - DNA, 25 bp, Artificial sequence
  SiRNA target sequence
tttattctcgaaataatatttcatg

SEQ ID NO: 205633 - DNA, 25 bp, Artificial sequence
  SiRNA target sequence
ttattctcgaaataatatttcatgt

SEQ ID NO: 205634 - DNA, 25 bp, Artificial sequence
  SiRNA target sequence
tattctcgaaataatatttcatgta

SEQ ID NO: 205635 - DNA, 25 bp, Artificial sequence
  SiRNA target sequence
attctcgaaataatatttcatgtac

SEQ ID NO: 205636 - DNA, 25 bp, Artificial sequence
  SiRNA target sequence
ttctcgaaataatatttcatgtaca

SEQ ID NO: 205637 - DNA, 25 bp, Artificial sequence
  SiRNA target sequence
tctcgaaataatatttcatgtacat

SEQ ID NO: 205638 - DNA, 25 bp, Artificial sequence
  SiRNA target sequence
ctcgaaataatatttcatgtacatt

SEQ ID NO: 205639 - DNA, 25 bp, Artificial sequence
  SiRNA target sequence
tcgaaataatatttcatgtacatta

SEQ ID NO: 205640 - DNA, 25 bp, Artificial sequence
  SiRNA target sequence
cgaaataatatttcatgtacattaa

SEQ ID NO: 205641 - DNA, 25 bp, Artificial sequence
  SiRNA target sequence
gaaataatatttcatgtacattaat

SEQ ID NO: 205642 - DNA, 25 bp, Artificial sequence
  SiRNA target sequence
aaataatatttcatgtacattaata

SEQ ID NO: 205643 - DNA, 25 bp, Artificial sequence
  SiRNA target sequence
aataatatttcatgtacattaatat

SEQ ID NO: 205644 - DNA, 25 bp, Artificial sequence
  SiRNA target sequence
ataatatttcatgtacattaatatt

SEQ ID NO: 205645 - DNA, 25 bp, Artificial sequence
  SiRNA target sequence
taatatttcatgtacattaatatta

SEQ ID NO: 205646 - DNA, 25 bp, Artificial sequence
  SiRNA target sequence
aatatttcatgtacattaatattag

SEQ ID NO: 205647 - DNA, 25 bp, Artificial sequence
  SiRNA target sequence
atatttcatgtacattaatattaga

SEQ ID NO: 205648 - DNA, 25 bp, Artificial sequence
  SiRNA target sequence
tatttcatgtacattaatattagac

SEQ ID NO: 205649 - DNA, 25 bp, Artificial sequence
  SiRNA target sequence
atttcatgtacattaatattagaca

SEQ ID NO: 205650 - DNA, 25 bp, Artificial sequence
  SiRNA target sequence
tttcatgtacattaatattagacat

SEQ ID NO: 205651 - DNA, 25 bp, Artificial sequence
  SiRNA target sequence
ttcatgtacattaatattagacata

SEQ ID NO: 205652 - DNA, 25 bp, Artificial sequence
  SiRNA target sequence
tcatgtacattaatattagacatat

SEQ ID NO: 205653 - DNA, 25 bp, Artificial sequence
  SiRNA target sequence
catgtacattaatattagacatata

SEQ ID NO: 205654 - DNA, 25 bp, Artificial sequence
  SiRNA target sequence
atgtacattaatattagacatatac

SEQ ID NO: 205655 - DNA, 25 bp, Artificial sequence
  SiRNA target sequence
tgtacattaatattagacatatacc

SEQ ID NO: 205656 - DNA, 25 bp, Artificial sequence
  SiRNA target sequence
gtacattaatattagacatataccg

SEQ ID NO: 205657 - DNA, 25 bp, Artificial sequence
  SiRNA target sequence
tacattaatattagacatataccgc

SEQ ID NO: 205658 - DNA, 25 bp, Artificial sequence
  SiRNA target sequence
acattaatattagacatataccgcc

SEQ ID NO: 205659 - DNA, 25 bp, Artificial sequence
  SiRNA target sequence
cattaatattagacatataccgccc

SEQ ID NO: 205660 - DNA, 25 bp, Artificial sequence
  SiRNA target sequence
attaatattagacatataccgccca

SEQ ID NO: 205661 - DNA, 25 bp, Artificial sequence
  SiRNA target sequence
ttaatattagacatataccgcccat

SEQ ID NO: 205662 - DNA, 25 bp, Artificial sequence
  SiRNA target sequence
taatattagacatataccgcccatg

SEQ ID NO: 205663 - DNA, 25 bp, Artificial sequence
  SiRNA target sequence
aatattagacatataccgcccatgg

SEQ ID NO: 205664 - DNA, 25 bp, Artificial sequence
  SiRNA target sequence
atattagacatataccgcccatggc

SEQ ID NO: 205665 - DNA, 25 bp, Artificial sequence
  SiRNA target sequence
tattagacatataccgcccatggca

SEQ ID NO: 205666 - DNA, 25 bp, Artificial sequence
  SiRNA target sequence
attagacatataccgcccatggcaa

SEQ ID NO: 205667 - DNA, 25 bp, Artificial sequence
  SiRNA target sequence
ttagacatataccgcccatggcaat

SEQ ID NO: 205668 - DNA, 25 bp, Artificial sequence
  SiRNA target sequence
tagacatataccgcccatggcaata

SEQ ID NO: 205669 - DNA, 25 bp, Artificial sequence
  SiRNA target sequence
agacatataccgcccatggcaataa

SEQ ID NO: 205670 - DNA, 25 bp, Artificial sequence
  SiRNA target sequence
gacatataccgcccatggcaataaa

SEQ ID NO: 205671 - DNA, 25 bp, Artificial sequence
  SiRNA target sequence
acatataccgcccatggcaataaaa

SEQ ID NO: 205672 - DNA, 25 bp, Artificial sequence
  SiRNA target sequence
catataccgcccatggcaataaaaa

SEQ ID NO: 205673 - DNA, 25 bp, Artificial sequence
  SiRNA target sequence
atataccgcccatggcaataaaaac

SEQ ID NO: 205674 - DNA, 25 bp, Artificial sequence
  SiRNA target sequence
tataccgcccatggcaataaaaacc

SEQ ID NO: 205675 - DNA, 25 bp, Artificial sequence
  SiRNA target sequence
ataccgcccatggcaataaaaaccg

SEQ ID NO: 205676 - DNA, 25 bp, Artificial sequence
  SiRNA target sequence
taccgcccatggcaataaaaaccga

SEQ ID NO: 205677 - DNA, 25 bp, Artificial sequence
  SiRNA target sequence
accgcccatggcaataaaaaccgaa

SEQ ID NO: 205678 - DNA, 25 bp, Artificial sequence
  SiRNA target sequence
ccgcccatggcaataaaaaccgaag

SEQ ID NO: 205679 - DNA, 25 bp, Artificial sequence
  SiRNA target sequence
cgcccatggcaataaaaaccgaaga

SEQ ID NO: 205680 - DNA, 25 bp, Artificial sequence
  SiRNA target sequence
gcccatggcaataaaaaccgaagaa

SEQ ID NO: 205681 - DNA, 25 bp, Artificial sequence
  SiRNA target sequence
cccatggcaataaaaaccgaagaat

SEQ ID NO: 205682 - DNA, 25 bp, Artificial sequence
  SiRNA target sequence
ccatggcaataaaaaccgaagaata

SEQ ID NO: 205683 - DNA, 25 bp, Artificial sequence
  SiRNA target sequence
catggcaataaaaaccgaagaatat

SEQ ID NO: 205684 - DNA, 25 bp, Artificial sequence
  SiRNA target sequence
atggcaataaaaaccgaagaatata

SEQ ID NO: 205685 - DNA, 25 bp, Artificial sequence
  SiRNA target sequence
tggcaataaaaaccgaagaatataa

SEQ ID NO: 205686 - DNA, 25 bp, Artificial sequence
  SiRNA target sequence
ggcaataaaaaccgaagaatataat

SEQ ID NO: 205687 - DNA, 25 bp, Artificial sequence
  SiRNA target sequence
gcaataaaaaccgaagaatataata

SEQ ID NO: 205688 - DNA, 25 bp, Artificial sequence
  SiRNA target sequence
caataaaaaccgaagaatataataa

SEQ ID NO: 205689 - DNA, 25 bp, Artificial sequence
  SiRNA target sequence
aataaaaaccgaagaatataataac

SEQ ID NO: 205690 - DNA, 25 bp, Artificial sequence
  SiRNA target sequence
ataaaaaccgaagaatataataact

SEQ ID NO: 205691 - DNA, 25 bp, Artificial sequence
  SiRNA target sequence
taaaaaccgaagaatataataactg

SEQ ID NO: 205692 - DNA, 25 bp, Artificial sequence
  SiRNA target sequence
aaaaaccgaagaatataataactga

SEQ ID NO: 205693 - DNA, 25 bp, Artificial sequence
  SiRNA target sequence
aaaaccgaagaatataataactgat

SEQ ID NO: 205694 - DNA, 25 bp, Artificial sequence
  SiRNA target sequence
aaaccgaagaatataataactgatt

SEQ ID NO: 205695 - DNA, 25 bp, Artificial sequence
  SiRNA target sequence
aaccgaagaatataataactgattt

SEQ ID NO: 205696 - DNA, 25 bp, Artificial sequence
  SiRNA target sequence
accgaagaatataataactgatttt

SEQ ID NO: 205697 - DNA, 25 bp, Artificial sequence
  SiRNA target sequence
ccgaagaatataataactgattttg

SEQ ID NO: 205698 - DNA, 25 bp, Artificial sequence
  SiRNA target sequence
cgaagaatataataactgattttgc

SEQ ID NO: 205699 - DNA, 25 bp, Artificial sequence
  SiRNA target sequence
gaagaatataataactgattttgct

SEQ ID NO: 205700 - DNA, 25 bp, Artificial sequence
  SiRNA target sequence
aagaatataataactgattttgctc

SEQ ID NO: 205701 - DNA, 25 bp, Artificial sequence
  SiRNA target sequence
agaatataataactgattttgctca

SEQ ID NO: 205702 - DNA, 25 bp, Artificial sequence
  SiRNA target sequence
gaatataataactgattttgctcat

SEQ ID NO: 205703 - DNA, 25 bp, Artificial sequence
  SiRNA target sequence
aatataataactgattttgctcata

SEQ ID NO: 205704 - DNA, 25 bp, Artificial sequence
  SiRNA target sequence
atataataactgattttgctcatag

SEQ ID NO: 205705 - DNA, 25 bp, Artificial sequence
  SiRNA target sequence
tataataactgattttgctcatagc

SEQ ID NO: 205706 - DNA, 25 bp, Artificial sequence
  SiRNA target sequence
ataataactgattttgctcatagct

SEQ ID NO: 205707 - DNA, 25 bp, Artificial sequence
  SiRNA target sequence
taataactgattttgctcatagcta

SEQ ID NO: 205708 - DNA, 25 bp, Artificial sequence
  SiRNA target sequence
aataactgattttgctcatagctaa

SEQ ID NO: 205709 - DNA, 25 bp, Artificial sequence
  SiRNA target sequence
ataactgattttgctcatagctaaa

SEQ ID NO: 205710 - DNA, 25 bp, Artificial sequence
  SiRNA target sequence
taactgattttgctcatagctaaat

SEQ ID NO: 205711 - DNA, 25 bp, Artificial sequence
  SiRNA target sequence
aactgattttgctcatagctaaatc

SEQ ID NO: 205712 - DNA, 25 bp, Artificial sequence
  SiRNA target sequence
actgattttgctcatagctaaatcc

SEQ ID NO: 205713 - DNA, 25 bp, Artificial sequence
  SiRNA target sequence
ctgattttgctcatagctaaatcct

SEQ ID NO: 205714 - DNA, 25 bp, Artificial sequence
  SiRNA target sequence
tgattttgctcatagctaaatcctt

SEQ ID NO: 205715 - DNA, 25 bp, Artificial sequence
  SiRNA target sequence
gattttgctcatagctaaatccttt

SEQ ID NO: 205716 - DNA, 25 bp, Artificial sequence
  SiRNA target sequence
attttgctcatagctaaatcctttt

SEQ ID NO: 205717 - DNA, 25 bp, Artificial sequence
  SiRNA target sequence
ttttgctcatagctaaatccttttc

SEQ ID NO: 205718 - DNA, 25 bp, Artificial sequence
  SiRNA target sequence
tttgctcatagctaaatccttttcg

SEQ ID NO: 205719 - DNA, 25 bp, Artificial sequence
  SiRNA target sequence
ttgctcatagctaaatccttttcgc

SEQ ID NO: 205720 - DNA, 25 bp, Artificial sequence
  SiRNA target sequence
tgctcatagctaaatccttttcgca

SEQ ID NO: 205721 - DNA, 25 bp, Artificial sequence
  SiRNA target sequence
gctcatagctaaatccttttcgcaa

SEQ ID NO: 205722 - DNA, 25 bp, Artificial sequence
  SiRNA target sequence
ctcatagctaaatccttttcgcaat

SEQ ID NO: 205723 - DNA, 25 bp, Artificial sequence
  SiRNA target sequence
tcatagctaaatccttttcgcaatt

SEQ ID NO: 205724 - DNA, 25 bp, Artificial sequence
  SiRNA target sequence
catagctaaatccttttcgcaattc

SEQ ID NO: 205725 - DNA, 25 bp, Artificial sequence
  SiRNA target sequence
atagctaaatccttttcgcaattct

SEQ ID NO: 205726 - DNA, 25 bp, Artificial sequence
  SiRNA target sequence
tagctaaatccttttcgcaattctc

SEQ ID NO: 205727 - DNA, 25 bp, Artificial sequence
  SiRNA target sequence
agctaaatccttttcgcaattctct

SEQ ID NO: 205728 - DNA, 25 bp, Artificial sequence
  SiRNA target sequence
gctaaatccttttcgcaattctctg

SEQ ID NO: 205729 - DNA, 25 bp, Artificial sequence
  SiRNA target sequence
ctaaatccttttcgcaattctctga

SEQ ID NO: 205730 - DNA, 25 bp, Artificial sequence
  SiRNA target sequence
taaatccttttcgcaattctctgaa

SEQ ID NO: 205731 - DNA, 25 bp, Artificial sequence
  SiRNA target sequence
aaatccttttcgcaattctctgaaa

SEQ ID NO: 205732 - DNA, 25 bp, Artificial sequence
  SiRNA target sequence
aatccttttcgcaattctctgaaag

SEQ ID NO: 205733 - DNA, 25 bp, Artificial sequence
  SiRNA target sequence
atccttttcgcaattctctgaaaga

SEQ ID NO: 205734 - DNA, 25 bp, Artificial sequence
  SiRNA target sequence
tccttttcgcaattctctgaaagaa

SEQ ID NO: 205735 - DNA, 25 bp, Artificial sequence
  SiRNA target sequence
ccttttcgcaattctctgaaagaac

SEQ ID NO: 205736 - DNA, 25 bp, Artificial sequence
  SiRNA target sequence
cttttcgcaattctctgaaagaact

SEQ ID NO: 205737 - DNA, 25 bp, Artificial sequence
  SiRNA target sequence
ttttcgcaattctctgaaagaacta

SEQ ID NO: 205738 - DNA, 25 bp, Artificial sequence
  SiRNA target sequence
tttcgcaattctctgaaagaactac

SEQ ID NO: 205739 - DNA, 25 bp, Artificial sequence
  SiRNA target sequence
ttcgcaattctctgaaagaactact

SEQ ID NO: 205740 - DNA, 25 bp, Artificial sequence
  SiRNA target sequence
tcgcaattctctgaaagaactactg

SEQ ID NO: 205741 - DNA, 25 bp, Artificial sequence
  SiRNA target sequence
cgcaattctctgaaagaactactgg

SEQ ID NO: 205742 - DNA, 25 bp, Artificial sequence
  SiRNA target sequence
gcaattctctgaaagaactactggc

SEQ ID NO: 205743 - DNA, 25 bp, Artificial sequence
  SiRNA target sequence
caattctctgaaagaactactggct

SEQ ID NO: 205744 - DNA, 25 bp, Artificial sequence
  SiRNA target sequence
aattctctgaaagaactactggcta

SEQ ID NO: 205745 - DNA, 25 bp, Artificial sequence
  SiRNA target sequence
attctctgaaagaactactggctaa

SEQ ID NO: 205746 - DNA, 25 bp, Artificial sequence
  SiRNA target sequence
ttctctgaaagaactactggctaat

SEQ ID NO: 205747 - DNA, 25 bp, Artificial sequence
  SiRNA target sequence
tctctgaaagaactactggctaatc

SEQ ID NO: 205748 - DNA, 25 bp, Artificial sequence
  SiRNA target sequence
ctctgaaagaactactggctaatcc

SEQ ID NO: 205749 - DNA, 25 bp, Artificial sequence
  SiRNA target sequence
tctgaaagaactactggctaatcca

SEQ ID NO: 205750 - DNA, 25 bp, Artificial sequence
  SiRNA target sequence
ctgaaagaactactggctaatccag

SEQ ID NO: 205751 - DNA, 25 bp, Artificial sequence
  SiRNA target sequence
tgaaagaactactggctaatccaga

SEQ ID NO: 205752 - DNA, 25 bp, Artificial sequence
  SiRNA target sequence
gaaagaactactggctaatccagat

SEQ ID NO: 205753 - DNA, 25 bp, Artificial sequence
  SiRNA target sequence
aaagaactactggctaatccagata

SEQ ID NO: 205754 - DNA, 25 bp, Artificial sequence
  SiRNA target sequence
aagaactactggctaatccagatac

SEQ ID NO: 205755 - DNA, 25 bp, Artificial sequence
  SiRNA target sequence
agaactactggctaatccagatact

SEQ ID NO: 205756 - DNA, 25 bp, Artificial sequence
  SiRNA target sequence
gaactactggctaatccagatacta

SEQ ID NO: 205757 - DNA, 25 bp, Artificial sequence
  SiRNA target sequence
aactactggctaatccagatactag

SEQ ID NO: 205758 - DNA, 25 bp, Artificial sequence
  SiRNA target sequence
actactggctaatccagatactagt

SEQ ID NO: 205759 - DNA, 25 bp, Artificial sequence
  SiRNA target sequence
ctactggctaatccagatactagta

SEQ ID NO: 205760 - DNA, 25 bp, Artificial sequence
  SiRNA target sequence
tactggctaatccagatactagtaa

SEQ ID NO: 205761 - DNA, 25 bp, Artificial sequence
  SiRNA target sequence
actggctaatccagatactagtaaa

SEQ ID NO: 205762 - DNA, 25 bp, Artificial sequence
  SiRNA target sequence
ctggctaatccagatactagtaaag

SEQ ID NO: 205763 - DNA, 25 bp, Artificial sequence
  SiRNA target sequence
tggctaatccagatactagtaaagc

SEQ ID NO: 205764 - DNA, 25 bp, Artificial sequence
  SiRNA target sequence
ggctaatccagatactagtaaagct

SEQ ID NO: 205765 - DNA, 25 bp, Artificial sequence
  SiRNA target sequence
gctaatccagatactagtaaagcta

SEQ ID NO: 205766 - DNA, 25 bp, Artificial sequence
  SiRNA target sequence
ctaatccagatactagtaaagctaa

SEQ ID NO: 205767 - DNA, 25 bp, Artificial sequence
  SiRNA target sequence
taatccagatactagtaaagctaaa

SEQ ID NO: 205768 - DNA, 25 bp, Artificial sequence
  SiRNA target sequence
aatccagatactagtaaagctaaat

SEQ ID NO: 205769 - DNA, 25 bp, Artificial sequence
  SiRNA target sequence
atccagatactagtaaagctaaatt

SEQ ID NO: 205770 - DNA, 25 bp, Artificial sequence
  SiRNA target sequence
tccagatactagtaaagctaaattt

SEQ ID NO: 205771 - DNA, 25 bp, Artificial sequence
  SiRNA target sequence
ccagatactagtaaagctaaatttg

SEQ ID NO: 205772 - DNA, 25 bp, Artificial sequence
  SiRNA target sequence
cagatactagtaaagctaaatttgc

SEQ ID NO: 205773 - DNA, 25 bp, Artificial sequence
  SiRNA target sequence
agatactagtaaagctaaatttgct

SEQ ID NO: 205774 - DNA, 25 bp, Artificial sequence
  SiRNA target sequence
gatactagtaaagctaaatttgcta

SEQ ID NO: 205775 - DNA, 25 bp, Artificial sequence
  SiRNA target sequence
atactagtaaagctaaatttgctat

SEQ ID NO: 205776 - DNA, 25 bp, Artificial sequence
  SiRNA target sequence
tactagtaaagctaaatttgctatt

SEQ ID NO: 205777 - DNA, 25 bp, Artificial sequence
  SiRNA target sequence
actagtaaagctaaatttgctatta

SEQ ID NO: 205778 - DNA, 25 bp, Artificial sequence
  SiRNA target sequence
ctagtaaagctaaatttgctattat

SEQ ID NO: 205779 - DNA, 25 bp, Artificial sequence
  SiRNA target sequence
tagtaaagctaaatttgctattatg

SEQ ID NO: 205780 - DNA, 25 bp, Artificial sequence
  SiRNA target sequence
agtaaagctaaatttgctattatgt

SEQ ID NO: 205781 - DNA, 25 bp, Artificial sequence
  SiRNA target sequence
gtaaagctaaatttgctattatgta

SEQ ID NO: 205782 - DNA, 25 bp, Artificial sequence
  SiRNA target sequence
taaagctaaatttgctattatgtaa

SEQ ID NO: 205783 - DNA, 25 bp, Artificial sequence
  SiRNA target sequence
aaagctaaatttgctattatgtaaa

SEQ ID NO: 205784 - DNA, 25 bp, Artificial sequence
  SiRNA target sequence
aagctaaatttgctattatgtaaaa

SEQ ID NO: 205785 - DNA, 25 bp, Artificial sequence
  SiRNA target sequence
agctaaatttgctattatgtaaaaa

SEQ ID NO: 205786 - DNA, 25 bp, Artificial sequence
  SiRNA target sequence
gctaaatttgctattatgtaaaaag

SEQ ID NO: 205787 - DNA, 25 bp, Artificial sequence
  SiRNA target sequence
ctaaatttgctattatgtaaaaagg

SEQ ID NO: 205788 - DNA, 25 bp, Artificial sequence
  SiRNA target sequence
taaatttgctattatgtaaaaaggt

SEQ ID NO: 205789 - DNA, 25 bp, Artificial sequence
  SiRNA target sequence
aaatttgctattatgtaaaaaggtg

SEQ ID NO: 205790 - DNA, 25 bp, Artificial sequence
  SiRNA target sequence
aatttgctattatgtaaaaaggtgg

SEQ ID NO: 205791 - DNA, 25 bp, Artificial sequence
  SiRNA target sequence
atttgctattatgtaaaaaggtggt

SEQ ID NO: 205792 - DNA, 25 bp, Artificial sequence
  SiRNA target sequence
tttgctattatgtaaaaaggtggta

SEQ ID NO: 205793 - DNA, 25 bp, Artificial sequence
  SiRNA target sequence
ttgctattatgtaaaaaggtggtaa

SEQ ID NO: 205794 - DNA, 25 bp, Artificial sequence
  SiRNA target sequence
tgctattatgtaaaaaggtggtaaa

SEQ ID NO: 205795 - DNA, 25 bp, Artificial sequence
  SiRNA target sequence
gctattatgtaaaaaggtggtaaaa

SEQ ID NO: 205796 - DNA, 25 bp, Artificial sequence
  SiRNA target sequence
ctattatgtaaaaaggtggtaaaaa

SEQ ID NO: 205797 - DNA, 25 bp, Artificial sequence
  SiRNA target sequence
tattatgtaaaaaggtggtaaaaat

SEQ ID NO: 205798 - DNA, 25 bp, Artificial sequence
  SiRNA target sequence
attatgtaaaaaggtggtaaaaatc

SEQ ID NO: 205799 - DNA, 25 bp, Artificial sequence
  SiRNA target sequence
ttatgtaaaaaggtggtaaaaatct

SEQ ID NO: 205800 - DNA, 25 bp, Artificial sequence
  SiRNA target sequence
tatgtaaaaaggtggtaaaaatctt

SEQ ID NO: 205801 - DNA, 25 bp, Artificial sequence
  SiRNA target sequence
atgtaaaaaggtggtaaaaatcttg

SEQ ID NO: 205802 - DNA, 25 bp, Artificial sequence
  SiRNA target sequence
tgtaaaaaggtggtaaaaatcttgt

SEQ ID NO: 205803 - DNA, 25 bp, Artificial sequence
  SiRNA target sequence
gtaaaaaggtggtaaaaatcttgta

SEQ ID NO: 205804 - DNA, 25 bp, Artificial sequence
  SiRNA target sequence
taaaaaggtggtaaaaatcttgtaa

SEQ ID NO: 205805 - DNA, 25 bp, Artificial sequence
  SiRNA target sequence
aaaaaggtggtaaaaatcttgtaaa

SEQ ID NO: 205806 - DNA, 25 bp, Artificial sequence
  SiRNA target sequence
aaaaggtggtaaaaatcttgtaaac

SEQ ID NO: 205807 - DNA, 25 bp, Artificial sequence
  SiRNA target sequence
aaaggtggtaaaaatcttgtaaact

SEQ ID NO: 205808 - DNA, 25 bp, Artificial sequence
  SiRNA target sequence
aaggtggtaaaaatcttgtaaactg

SEQ ID NO: 205809 - DNA, 25 bp, Artificial sequence
  SiRNA target sequence
aggtggtaaaaatcttgtaaactgt

SEQ ID NO: 205810 - DNA, 25 bp, Artificial sequence
  SiRNA target sequence
ggtggtaaaaatcttgtaaactgtc

SEQ ID NO: 205811 - DNA, 25 bp, Artificial sequence
  SiRNA target sequence
gtggtaaaaatcttgtaaactgtct

SEQ ID NO: 205812 - DNA, 25 bp, Artificial sequence
  SiRNA target sequence
tggtaaaaatcttgtaaactgtctg

SEQ ID NO: 205813 - DNA, 25 bp, Artificial sequence
  SiRNA target sequence
ggtaaaaatcttgtaaactgtctga

SEQ ID NO: 205814 - DNA, 25 bp, Artificial sequence
  SiRNA target sequence
gtaaaaatcttgtaaactgtctgat

SEQ ID NO: 205815 - DNA, 25 bp, Artificial sequence
  SiRNA target sequence
taaaaatcttgtaaactgtctgata

SEQ ID NO: 205816 - DNA, 25 bp, Artificial sequence
  SiRNA target sequence
aaaaatcttgtaaactgtctgatag

SEQ ID NO: 205817 - DNA, 25 bp, Artificial sequence
  SiRNA target sequence
aaaatcttgtaaactgtctgatagt

SEQ ID NO: 205818 - DNA, 25 bp, Artificial sequence
  SiRNA target sequence
aaatcttgtaaactgtctgatagta

SEQ ID NO: 205819 - DNA, 25 bp, Artificial sequence
  SiRNA target sequence
aatcttgtaaactgtctgatagtac

SEQ ID NO: 205820 - DNA, 25 bp, Artificial sequence
  SiRNA target sequence
atcttgtaaactgtctgatagtaca

SEQ ID NO: 205821 - DNA, 25 bp, Artificial sequence
  SiRNA target sequence
tcttgtaaactgtctgatagtacaa

SEQ ID NO: 205822 - DNA, 25 bp, Artificial sequence
  SiRNA target sequence
cttgtaaactgtctgatagtacaac

SEQ ID NO: 205823 - DNA, 25 bp, Artificial sequence
  SiRNA target sequence
ttgtaaactgtctgatagtacaact

SEQ ID NO: 205824 - DNA, 25 bp, Artificial sequence
  SiRNA target sequence
tgtaaactgtctgatagtacaactt

SEQ ID NO: 205825 - DNA, 25 bp, Artificial sequence
  SiRNA target sequence
gtaaactgtctgatagtacaacttt

SEQ ID NO: 205826 - DNA, 25 bp, Artificial sequence
  SiRNA target sequence
taaactgtctgatagtacaactttc

SEQ ID NO: 205827 - DNA, 25 bp, Artificial sequence
  SiRNA target sequence
aaactgtctgatagtacaactttca

SEQ ID NO: 205828 - DNA, 25 bp, Artificial sequence
  SiRNA target sequence
aactgtctgatagtacaactttcat

SEQ ID NO: 205829 - DNA, 25 bp, Artificial sequence
  SiRNA target sequence
actgtctgatagtacaactttcatt

SEQ ID NO: 205830 - DNA, 25 bp, Artificial sequence
  SiRNA target sequence
ctgtctgatagtacaactttcattt

SEQ ID NO: 205831 - DNA, 25 bp, Artificial sequence
  SiRNA target sequence
tgtctgatagtacaactttcattta

SEQ ID NO: 205832 - DNA, 25 bp, Artificial sequence
  SiRNA target sequence
gtctgatagtacaactttcatttaa

SEQ ID NO: 205833 - DNA, 25 bp, Artificial sequence
  SiRNA target sequence
tctgatagtacaactttcatttaaa

SEQ ID NO: 205834 - DNA, 25 bp, Artificial sequence
  SiRNA target sequence
ctgatagtacaactttcatttaaaa

SEQ ID NO: 205835 - DNA, 25 bp, Artificial sequence
  SiRNA target sequence
tgatagtacaactttcatttaaaaa

SEQ ID NO: 205836 - DNA, 25 bp, Artificial sequence
  SiRNA target sequence
gatagtacaactttcatttaaaaaa

SEQ ID NO: 205837 - DNA, 25 bp, Artificial sequence
  SiRNA target sequence
atagtacaactttcatttaaaaaac

SEQ ID NO: 205838 - DNA, 25 bp, Artificial sequence
  SiRNA target sequence
tagtacaactttcatttaaaaaact

SEQ ID NO: 205839 - DNA, 25 bp, Artificial sequence
  SiRNA target sequence
agtacaactttcatttaaaaaactc

SEQ ID NO: 205840 - DNA, 25 bp, Artificial sequence
  SiRNA target sequence
gtacaactttcatttaaaaaactca

SEQ ID NO: 205841 - DNA, 25 bp, Artificial sequence
  SiRNA target sequence
tacaactttcatttaaaaaactcat

SEQ ID NO: 205842 - DNA, 25 bp, Artificial sequence
  SiRNA target sequence
acaactttcatttaaaaaactcatg

SEQ ID NO: 205843 - DNA, 25 bp, Artificial sequence
  SiRNA target sequence
caactttcatttaaaaaactcatgt

SEQ ID NO: 205844 - DNA, 25 bp, Artificial sequence
  SiRNA target sequence
aactttcatttaaaaaactcatgta

SEQ ID NO: 205845 - DNA, 25 bp, Artificial sequence
  SiRNA target sequence
actttcatttaaaaaactcatgtat

SEQ ID NO: 205846 - DNA, 25 bp, Artificial sequence
  SiRNA target sequence
ctttcatttaaaaaactcatgtata

SEQ ID NO: 205847 - DNA, 25 bp, Artificial sequence
  SiRNA target sequence
tttcatttaaaaaactcatgtataa

SEQ ID NO: 205848 - DNA, 25 bp, Artificial sequence
  SiRNA target sequence
ttcatttaaaaaactcatgtataaa

SEQ ID NO: 205849 - DNA, 25 bp, Artificial sequence
  SiRNA target sequence
tcatttaaaaaactcatgtataaat

SEQ ID NO: 205850 - DNA, 25 bp, Artificial sequence
  SiRNA target sequence
catttaaaaaactcatgtataaata

SEQ ID NO: 205851 - DNA, 25 bp, Artificial sequence
  SiRNA target sequence
atttaaaaaactcatgtataaataa

SEQ ID NO: 205852 - DNA, 25 bp, Artificial sequence
  SiRNA target sequence
tttaaaaaactcatgtataaataag

SEQ ID NO: 205853 - DNA, 25 bp, Artificial sequence
  SiRNA target sequence
ttaaaaaactcatgtataaataagc

SEQ ID NO: 205854 - DNA, 25 bp, Artificial sequence
  SiRNA target sequence
taaaaaactcatgtataaataagcc

SEQ ID NO: 205855 - DNA, 25 bp, Artificial sequence
  SiRNA target sequence
aaaaaactcatgtataaataagcca

SEQ ID NO: 205856 - DNA, 25 bp, Artificial sequence
  SiRNA target sequence
aaaaactcatgtataaataagccat

SEQ ID NO: 205857 - DNA, 25 bp, Artificial sequence
  SiRNA target sequence
aaaactcatgtataaataagccata

SEQ ID NO: 205858 - DNA, 25 bp, Artificial sequence
  SiRNA target sequence
aaactcatgtataaataagccataa

SEQ ID NO: 205859 - DNA, 25 bp, Artificial sequence
  SiRNA target sequence
aactcatgtataaataagccataag

SEQ ID NO: 205860 - DNA, 25 bp, Artificial sequence
  SiRNA target sequence
actcatgtataaataagccataagt

SEQ ID NO: 205861 - DNA, 25 bp, Artificial sequence
  SiRNA target sequence
ctcatgtataaataagccataagta

SEQ ID NO: 205862 - DNA, 25 bp, Artificial sequence
  SiRNA target sequence
tcatgtataaataagccataagtaa

SEQ ID NO: 205863 - DNA, 25 bp, Artificial sequence
  SiRNA target sequence
catgtataaataagccataagtaaa

SEQ ID NO: 205864 - DNA, 25 bp, Artificial sequence
  SiRNA target sequence
atgtataaataagccataagtaaac

SEQ ID NO: 205865 - DNA, 25 bp, Artificial sequence
  SiRNA target sequence
tgtataaataagccataagtaaact

SEQ ID NO: 205866 - DNA, 25 bp, Artificial sequence
  SiRNA target sequence
gtataaataagccataagtaaactg

SEQ ID NO: 205867 - DNA, 25 bp, Artificial sequence
  SiRNA target sequence
tataaataagccataagtaaactgc

SEQ ID NO: 205868 - DNA, 25 bp, Artificial sequence
  SiRNA target sequence
ataaataagccataagtaaactgcc

SEQ ID NO: 205869 - DNA, 25 bp, Artificial sequence
  SiRNA target sequence
taaataagccataagtaaactgccc

SEQ ID NO: 205870 - DNA, 25 bp, Artificial sequence
  SiRNA target sequence
aaataagccataagtaaactgcccc

SEQ ID NO: 205871 - DNA, 25 bp, Artificial sequence
  SiRNA target sequence
aataagccataagtaaactgcccca

SEQ ID NO: 205872 - DNA, 25 bp, Artificial sequence
  SiRNA target sequence
ataagccataagtaaactgccccac

SEQ ID NO: 205873 - DNA, 25 bp, Artificial sequence
  SiRNA target sequence
taagccataagtaaactgccccaca

SEQ ID NO: 205874 - DNA, 25 bp, Artificial sequence
  SiRNA target sequence
aagccataagtaaactgccccacat

SEQ ID NO: 205875 - DNA, 25 bp, Artificial sequence
  SiRNA target sequence
agccataagtaaactgccccacatt

SEQ ID NO: 205876 - DNA, 25 bp, Artificial sequence
  SiRNA target sequence
gccataagtaaactgccccacattt

SEQ ID NO: 205877 - DNA, 25 bp, Artificial sequence
  SiRNA target sequence
ccataagtaaactgccccacatttc

SEQ ID NO: 205878 - DNA, 25 bp, Artificial sequence
  SiRNA target sequence
cataagtaaactgccccacatttct

SEQ ID NO: 205879 - DNA, 25 bp, Artificial sequence
  SiRNA target sequence
ataagtaaactgccccacatttctg

SEQ ID NO: 205880 - DNA, 25 bp, Artificial sequence
  SiRNA target sequence
taagtaaactgccccacatttctgc

SEQ ID NO: 205881 - DNA, 25 bp, Artificial sequence
  SiRNA target sequence
aagtaaactgccccacatttctgct

SEQ ID NO: 205882 - DNA, 25 bp, Artificial sequence
  SiRNA target sequence
agtaaactgccccacatttctgcta

SEQ ID NO: 205883 - DNA, 25 bp, Artificial sequence
  SiRNA target sequence
gtaaactgccccacatttctgctat

SEQ ID NO: 205884 - DNA, 25 bp, Artificial sequence
  SiRNA target sequence
taaactgccccacatttctgctatt

SEQ ID NO: 205885 - DNA, 25 bp, Artificial sequence
  SiRNA target sequence
aaactgccccacatttctgctatta

SEQ ID NO: 205886 - DNA, 25 bp, Artificial sequence
  SiRNA target sequence
aactgccccacatttctgctattat

SEQ ID NO: 205887 - DNA, 25 bp, Artificial sequence
  SiRNA target sequence
actgccccacatttctgctattata

SEQ ID NO: 205888 - DNA, 25 bp, Artificial sequence
  SiRNA target sequence
ctgccccacatttctgctattataa

SEQ ID NO: 205889 - DNA, 25 bp, Artificial sequence
  SiRNA target sequence
tgccccacatttctgctattataaa

SEQ ID NO: 205890 - DNA, 25 bp, Artificial sequence
  SiRNA target sequence
gccccacatttctgctattataaaa

SEQ ID NO: 205891 - DNA, 25 bp, Artificial sequence
  SiRNA target sequence
ccccacatttctgctattataaaaa

SEQ ID NO: 205892 - DNA, 25 bp, Artificial sequence
  SiRNA target sequence
cccacatttctgctattataaaaat

SEQ ID NO: 205893 - DNA, 25 bp, Artificial sequence
  SiRNA target sequence
ccacatttctgctattataaaaata

SEQ ID NO: 205894 - DNA, 25 bp, Artificial sequence
  SiRNA target sequence
cacatttctgctattataaaaatac

SEQ ID NO: 205895 - DNA, 25 bp, Artificial sequence
  SiRNA target sequence
acatttctgctattataaaaataca

SEQ ID NO: 205896 - DNA, 25 bp, Artificial sequence
  SiRNA target sequence
catttctgctattataaaaatacaa

SEQ ID NO: 205897 - DNA, 25 bp, Artificial sequence
  SiRNA target sequence
atttctgctattataaaaatacaag

SEQ ID NO: 205898 - DNA, 25 bp, Artificial sequence
  SiRNA target sequence
tttctgctattataaaaatacaagt

SEQ ID NO: 205899 - DNA, 25 bp, Artificial sequence
  SiRNA target sequence
ttctgctattataaaaatacaagtt

SEQ ID NO: 205900 - DNA, 25 bp, Artificial sequence
  SiRNA target sequence
tctgctattataaaaatacaagttg

SEQ ID NO: 205901 - DNA, 25 bp, Artificial sequence
  SiRNA target sequence
ctgctattataaaaatacaagttga

SEQ ID NO: 205902 - DNA, 25 bp, Artificial sequence
  SiRNA target sequence
tgctattataaaaatacaagttgaa

SEQ ID NO: 205903 - DNA, 25 bp, Artificial sequence
  SiRNA target sequence
gctattataaaaatacaagttgaaa

SEQ ID NO: 205904 - DNA, 25 bp, Artificial sequence
  SiRNA target sequence
ctattataaaaatacaagttgaaac

SEQ ID NO: 205905 - DNA, 25 bp, Artificial sequence
  SiRNA target sequence
tattataaaaatacaagttgaaacg

SEQ ID NO: 205906 - DNA, 25 bp, Artificial sequence
  SiRNA target sequence
attataaaaatacaagttgaaacgg

SEQ ID NO: 205907 - DNA, 25 bp, Artificial sequence
  SiRNA target sequence
ttataaaaatacaagttgaaacggg

SEQ ID NO: 205908 - DNA, 25 bp, Artificial sequence
  SiRNA target sequence
tataaaaatacaagttgaaacgggc

SEQ ID NO: 205909 - DNA, 25 bp, Artificial sequence
  SiRNA target sequence
ataaaaatacaagttgaaacgggct

SEQ ID NO: 205910 - DNA, 25 bp, Artificial sequence
  SiRNA target sequence
taaaaatacaagttgaaacgggctc

SEQ ID NO: 205911 - DNA, 25 bp, Artificial sequence
  SiRNA target sequence
aaaaatacaagttgaaacgggctcg

SEQ ID NO: 205912 - DNA, 25 bp, Artificial sequence
  SiRNA target sequence
aaaatacaagttgaaacgggctcgt

SEQ ID NO: 205913 - DNA, 25 bp, Artificial sequence
  SiRNA target sequence
aaatacaagttgaaacgggctcgtt

SEQ ID NO: 205914 - DNA, 25 bp, Artificial sequence
  SiRNA target sequence
aatacaagttgaaacgggctcgtta

SEQ ID NO: 205915 - DNA, 25 bp, Artificial sequence
  SiRNA target sequence
atacaagttgaaacgggctcgttag

SEQ ID NO: 205916 - DNA, 25 bp, Artificial sequence
  SiRNA target sequence
tacaagttgaaacgggctcgttagc

SEQ ID NO: 205917 - DNA, 25 bp, Artificial sequence
  SiRNA target sequence
acaagttgaaacgggctcgttagct

SEQ ID NO: 205918 - DNA, 25 bp, Artificial sequence
  SiRNA target sequence
caagttgaaacgggctcgttagctg

SEQ ID NO: 205919 - DNA, 25 bp, Artificial sequence
  SiRNA target sequence
aagttgaaacgggctcgttagctgt

SEQ ID NO: 205920 - DNA, 25 bp, Artificial sequence
  SiRNA target sequence
agttgaaacgggctcgttagctgta

SEQ ID NO: 205921 - DNA, 25 bp, Artificial sequence
  SiRNA target sequence
gttgaaacgggctcgttagctgtaa

SEQ ID NO: 205922 - DNA, 25 bp, Artificial sequence
  SiRNA target sequence
ttgaaacgggctcgttagctgtaat

SEQ ID NO: 205923 - DNA, 25 bp, Artificial sequence
  SiRNA target sequence
tgaaacgggctcgttagctgtaatt

SEQ ID NO: 205924 - DNA, 25 bp, Artificial sequence
  SiRNA target sequence
gaaacgggctcgttagctgtaatta

SEQ ID NO: 205925 - DNA, 25 bp, Artificial sequence
  SiRNA target sequence
aaacgggctcgttagctgtaattaa

SEQ ID NO: 205926 - DNA, 25 bp, Artificial sequence
  SiRNA target sequence
aacgggctcgttagctgtaattaaa

SEQ ID NO: 205927 - DNA, 25 bp, Artificial sequence
  SiRNA target sequence
acgggctcgttagctgtaattaaaa

SEQ ID NO: 205928 - DNA, 25 bp, Artificial sequence
  SiRNA target sequence
cgggctcgttagctgtaattaaaaa

SEQ ID NO: 205929 - DNA, 25 bp, Artificial sequence
  SiRNA target sequence
gggctcgttagctgtaattaaaaaa

SEQ ID NO: 205930 - DNA, 25 bp, Artificial sequence
  SiRNA target sequence
ggctcgttagctgtaattaaaaaat

SEQ ID NO: 205931 - DNA, 25 bp, Artificial sequence
  SiRNA target sequence
gctcgttagctgtaattaaaaaata

SEQ ID NO: 205932 - DNA, 25 bp, Artificial sequence
  SiRNA target sequence
ctcgttagctgtaattaaaaaatat

SEQ ID NO: 205933 - DNA, 25 bp, Artificial sequence
  SiRNA target sequence
tcgttagctgtaattaaaaaatatt

SEQ ID NO: 205934 - DNA, 25 bp, Artificial sequence
  SiRNA target sequence
cgttagctgtaattaaaaaatattt

SEQ ID NO: 205935 - DNA, 25 bp, Artificial sequence
  SiRNA target sequence
gttagctgtaattaaaaaatatttt

SEQ ID NO: 205936 - DNA, 25 bp, Artificial sequence
  SiRNA target sequence
ttagctgtaattaaaaaatatttta

SEQ ID NO: 205937 - DNA, 25 bp, Artificial sequence
  SiRNA target sequence
tagctgtaattaaaaaatattttat

SEQ ID NO: 205938 - DNA, 25 bp, Artificial sequence
  SiRNA target sequence
agctgtaattaaaaaatattttata

SEQ ID NO: 205939 - DNA, 25 bp, Artificial sequence
  SiRNA target sequence
gctgtaattaaaaaatattttataa

SEQ ID NO: 205940 - DNA, 25 bp, Artificial sequence
  SiRNA target sequence
ctgtaattaaaaaatattttataaa

SEQ ID NO: 205941 - DNA, 25 bp, Artificial sequence
  SiRNA target sequence
tgtaattaaaaaatattttataaag

SEQ ID NO: 205942 - DNA, 25 bp, Artificial sequence
  SiRNA target sequence
gtaattaaaaaatattttataaagt

SEQ ID NO: 205943 - DNA, 25 bp, Artificial sequence
  SiRNA target sequence
taattaaaaaatattttataaagtt

SEQ ID NO: 205944 - DNA, 25 bp, Artificial sequence
  SiRNA target sequence
aattaaaaaatattttataaagttc

SEQ ID NO: 205945 - DNA, 25 bp, Artificial sequence
  SiRNA target sequence
attaaaaaatattttataaagttca

SEQ ID NO: 205946 - DNA, 25 bp, Artificial sequence
  SiRNA target sequence
ttaaaaaatattttataaagttcaa

SEQ ID NO: 205947 - DNA, 25 bp, Artificial sequence
  SiRNA target sequence
taaaaaatattttataaagttcaat

SEQ ID NO: 205948 - DNA, 25 bp, Artificial sequence
  SiRNA target sequence
aaaaaatattttataaagttcaatc

SEQ ID NO: 205949 - DNA, 25 bp, Artificial sequence
  SiRNA target sequence
aaaaatattttataaagttcaatcc

SEQ ID NO: 205950 - DNA, 25 bp, Artificial sequence
  SiRNA target sequence
aaaatattttataaagttcaatccc

SEQ ID NO: 205951 - DNA, 25 bp, Artificial sequence
  SiRNA target sequence
aaatattttataaagttcaatccct

SEQ ID NO: 205952 - DNA, 25 bp, Artificial sequence
  SiRNA target sequence
aatattttataaagttcaatccctt

SEQ ID NO: 205953 - DNA, 25 bp, Artificial sequence
  SiRNA target sequence
atattttataaagttcaatcccttc

SEQ ID NO: 205954 - DNA, 25 bp, Artificial sequence
  SiRNA target sequence
tattttataaagttcaatcccttca

SEQ ID NO: 205955 - DNA, 25 bp, Artificial sequence
  SiRNA target sequence
attttataaagttcaatcccttcaa

SEQ ID NO: 205956 - DNA, 25 bp, Artificial sequence
  SiRNA target sequence
ttttataaagttcaatcccttcaat

SEQ ID NO: 205957 - DNA, 25 bp, Artificial sequence
  SiRNA target sequence
tttataaagttcaatcccttcaatg

SEQ ID NO: 205958 - DNA, 25 bp, Artificial sequence
  SiRNA target sequence
ttataaagttcaatcccttcaatgc

SEQ ID NO: 205959 - DNA, 25 bp, Artificial sequence
  SiRNA target sequence
tataaagttcaatcccttcaatgca

SEQ ID NO: 205960 - DNA, 25 bp, Artificial sequence
  SiRNA target sequence
ataaagttcaatcccttcaatgcac

SEQ ID NO: 205961 - DNA, 25 bp, Artificial sequence
  SiRNA target sequence
taaagttcaatcccttcaatgcacc

SEQ ID NO: 205962 - DNA, 25 bp, Artificial sequence
  SiRNA target sequence
aaagttcaatcccttcaatgcacct

SEQ ID NO: 205963 - DNA, 25 bp, Artificial sequence
  SiRNA target sequence
aagttcaatcccttcaatgcacctt

SEQ ID NO: 205964 - DNA, 25 bp, Artificial sequence
  SiRNA target sequence
agttcaatcccttcaatgcaccttt

SEQ ID NO: 205965 - DNA, 25 bp, Artificial sequence
  SiRNA target sequence
gttcaatcccttcaatgcacctttg

SEQ ID NO: 205966 - DNA, 25 bp, Artificial sequence
  SiRNA target sequence
ttcaatcccttcaatgcacctttgt

SEQ ID NO: 205967 - DNA, 25 bp, Artificial sequence
  SiRNA target sequence
tcaatcccttcaatgcacctttgtt

SEQ ID NO: 205968 - DNA, 25 bp, Artificial sequence
  SiRNA target sequence
caatcccttcaatgcacctttgtta

SEQ ID NO: 205969 - DNA, 25 bp, Artificial sequence
  SiRNA target sequence
aatcccttcaatgcacctttgttat

SEQ ID NO: 205970 - DNA, 25 bp, Artificial sequence
  SiRNA target sequence
atcccttcaatgcacctttgttatc

SEQ ID NO: 205971 - DNA, 25 bp, Artificial sequence
  SiRNA target sequence
tcccttcaatgcacctttgttatca

SEQ ID NO: 205972 - DNA, 25 bp, Artificial sequence
  SiRNA target sequence
cccttcaatgcacctttgttatcag

SEQ ID NO: 205973 - DNA, 25 bp, Artificial sequence
  SiRNA target sequence
ccttcaatgcacctttgttatcagc

SEQ ID NO: 205974 - DNA, 25 bp, Artificial sequence
  SiRNA target sequence
cttcaatgcacctttgttatcagcg

SEQ ID NO: 205975 - DNA, 25 bp, Artificial sequence
  SiRNA target sequence
ttcaatgcacctttgttatcagcga

SEQ ID NO: 205976 - DNA, 25 bp, Artificial sequence
  SiRNA target sequence
tcaatgcacctttgttatcagcgaa

SEQ ID NO: 205977 - DNA, 25 bp, Artificial sequence
  SiRNA target sequence
caatgcacctttgttatcagcgaaa

SEQ ID NO: 205978 - DNA, 25 bp, Artificial sequence
  SiRNA target sequence
aatgcacctttgttatcagcgaaaa

SEQ ID NO: 205979 - DNA, 25 bp, Artificial sequence
  SiRNA target sequence
atgcacctttgttatcagcgaaaat

SEQ ID NO: 205980 - DNA, 25 bp, Artificial sequence
  SiRNA target sequence
tgcacctttgttatcagcgaaaata

SEQ ID NO: 205981 - DNA, 25 bp, Artificial sequence
  SiRNA target sequence
gcacctttgttatcagcgaaaatat

SEQ ID NO: 205982 - DNA, 25 bp, Artificial sequence
  SiRNA target sequence
cacctttgttatcagcgaaaatatc

SEQ ID NO: 205983 - DNA, 25 bp, Artificial sequence
  SiRNA target sequence
acctttgttatcagcgaaaatatct

SEQ ID NO: 205984 - DNA, 25 bp, Artificial sequence
  SiRNA target sequence
cctttgttatcagcgaaaatatctc

SEQ ID NO: 205985 - DNA, 25 bp, Artificial sequence
  SiRNA target sequence
ctttgttatcagcgaaaatatctct

SEQ ID NO: 205986 - DNA, 25 bp, Artificial sequence
  SiRNA target sequence
tttgttatcagcgaaaatatctcta

SEQ ID NO: 205987 - DNA, 25 bp, Artificial sequence
  SiRNA target sequence
ttgttatcagcgaaaatatctctaa

SEQ ID NO: 205988 - DNA, 25 bp, Artificial sequence
  SiRNA target sequence
tgttatcagcgaaaatatctctaaa

SEQ ID NO: 205989 - DNA, 25 bp, Artificial sequence
  SiRNA target sequence
gttatcagcgaaaatatctctaaat

SEQ ID NO: 205990 - DNA, 25 bp, Artificial sequence
  SiRNA target sequence
ttatcagcgaaaatatctctaaata

SEQ ID NO: 205991 - DNA, 25 bp, Artificial sequence
  SiRNA target sequence
tatcagcgaaaatatctctaaataa

SEQ ID NO: 205992 - DNA, 25 bp, Artificial sequence
  SiRNA target sequence
atcagcgaaaatatctctaaataaa

SEQ ID NO: 205993 - DNA, 25 bp, Artificial sequence
  SiRNA target sequence
tcagcgaaaatatctctaaataaaa

SEQ ID NO: 205994 - DNA, 25 bp, Artificial sequence
  SiRNA target sequence
cagcgaaaatatctctaaataaaaa

SEQ ID NO: 205995 - DNA, 25 bp, Artificial sequence
  SiRNA target sequence
agcgaaaatatctctaaataaaaag

SEQ ID NO: 205996 - DNA, 25 bp, Artificial sequence
  SiRNA target sequence
gcgaaaatatctctaaataaaaagc

SEQ ID NO: 205997 - DNA, 25 bp, Artificial sequence
  SiRNA target sequence
cgaaaatatctctaaataaaaagct

SEQ ID NO: 205998 - DNA, 25 bp, Artificial sequence
  SiRNA target sequence
gaaaatatctctaaataaaaagcta

SEQ ID NO: 205999 - DNA, 25 bp, Artificial sequence
  SiRNA target sequence
aaaatatctctaaataaaaagctag

SEQ ID NO: 206000 - DNA, 25 bp, Artificial sequence
  SiRNA target sequence
aaatatctctaaataaaaagctaga

SEQ ID NO: 206001 - DNA, 25 bp, Artificial sequence
  SiRNA target sequence
aatatctctaaataaaaagctagat

SEQ ID NO: 206002 - DNA, 25 bp, Artificial sequence
  SiRNA target sequence
atatctctaaataaaaagctagatg

SEQ ID NO: 206003 - DNA, 25 bp, Artificial sequence
  SiRNA target sequence
tatctctaaataaaaagctagatgg

SEQ ID NO: 206004 - DNA, 25 bp, Artificial sequence
  SiRNA target sequence
atctctaaataaaaagctagatggt

SEQ ID NO: 206005 - DNA, 25 bp, Artificial sequence
  SiRNA target sequence
tctctaaataaaaagctagatggtg

SEQ ID NO: 206006 - DNA, 25 bp, Artificial sequence
  SiRNA target sequence
ctctaaataaaaagctagatggtgt

SEQ ID NO: 206007 - DNA, 25 bp, Artificial sequence
  SiRNA target sequence
tctaaataaaaagctagatggtgtt

SEQ ID NO: 206008 - DNA, 25 bp, Artificial sequence
  SiRNA target sequence
ctaaataaaaagctagatggtgtta

SEQ ID NO: 206009 - DNA, 25 bp, Artificial sequence
  SiRNA target sequence
taaataaaaagctagatggtgttac

SEQ ID NO: 206010 - DNA, 25 bp, Artificial sequence
  SiRNA target sequence
aaataaaaagctagatggtgttact

SEQ ID NO: 206011 - DNA, 25 bp, Artificial sequence
  SiRNA target sequence
aataaaaagctagatggtgttactt

SEQ ID NO: 206012 - DNA, 25 bp, Artificial sequence
  SiRNA target sequence
ataaaaagctagatggtgttacttt

SEQ ID NO: 206013 - DNA, 25 bp, Artificial sequence
  SiRNA target sequence
taaaaagctagatggtgttactttc

SEQ ID NO: 206014 - DNA, 25 bp, Artificial sequence
  SiRNA target sequence
aaaaagctagatggtgttactttct

SEQ ID NO: 206015 - DNA, 25 bp, Artificial sequence
  SiRNA target sequence
aaaagctagatggtgttactttctc

SEQ ID NO: 206016 - DNA, 25 bp, Artificial sequence
  SiRNA target sequence
aaagctagatggtgttactttctct

SEQ ID NO: 206017 - DNA, 25 bp, Artificial sequence
  SiRNA target sequence
aagctagatggtgttactttctctt

SEQ ID NO: 206018 - DNA, 25 bp, Artificial sequence
  SiRNA target sequence
agctagatggtgttactttctcttc

SEQ ID NO: 206019 - DNA, 25 bp, Artificial sequence
  SiRNA target sequence
gctagatggtgttactttctcttca

SEQ ID NO: 206020 - DNA, 25 bp, Artificial sequence
  SiRNA target sequence
ctagatggtgttactttctcttcaa

SEQ ID NO: 206021 - DNA, 25 bp, Artificial sequence
  SiRNA target sequence
tagatggtgttactttctcttcaaa

SEQ ID NO: 206022 - DNA, 25 bp, Artificial sequence
  SiRNA target sequence
agatggtgttactttctcttcaaac

SEQ ID NO: 206023 - DNA, 25 bp, Artificial sequence
  SiRNA target sequence
gatggtgttactttctcttcaaaca

SEQ ID NO: 206024 - DNA, 25 bp, Artificial sequence
  SiRNA target sequence
atggtgttactttctcttcaaacaa

SEQ ID NO: 206025 - DNA, 25 bp, Artificial sequence
  SiRNA target sequence
tggtgttactttctcttcaaacaaa

SEQ ID NO: 206026 - DNA, 25 bp, Artificial sequence
  SiRNA target sequence
ggtgttactttctcttcaaacaaaa

SEQ ID NO: 206027 - DNA, 25 bp, Artificial sequence
  SiRNA target sequence
gtgttactttctcttcaaacaaaaa

SEQ ID NO: 206028 - DNA, 25 bp, Artificial sequence
  SiRNA target sequence
tgttactttctcttcaaacaaaaag

SEQ ID NO: 206029 - DNA, 25 bp, Artificial sequence
  SiRNA target sequence
gttactttctcttcaaacaaaaaga

SEQ ID NO: 206030 - DNA, 25 bp, Artificial sequence
  SiRNA target sequence
ttactttctcttcaaacaaaaagat

SEQ ID NO: 206031 - DNA, 25 bp, Artificial sequence
  SiRNA target sequence
tactttctcttcaaacaaaaagatt

SEQ ID NO: 206032 - DNA, 25 bp, Artificial sequence
  SiRNA target sequence
actttctcttcaaacaaaaagattg

SEQ ID NO: 206033 - DNA, 25 bp, Artificial sequence
  SiRNA target sequence
ctttctcttcaaacaaaaagattgc

SEQ ID NO: 206034 - DNA, 25 bp, Artificial sequence
  SiRNA target sequence
tttctcttcaaacaaaaagattgcc

SEQ ID NO: 206035 - DNA, 25 bp, Artificial sequence
  SiRNA target sequence
ttctcttcaaacaaaaagattgccc

SEQ ID NO: 206036 - DNA, 25 bp, Artificial sequence
  SiRNA target sequence
tctcttcaaacaaaaagattgcccc

SEQ ID NO: 206037 - DNA, 25 bp, Artificial sequence
  SiRNA target sequence
ctcttcaaacaaaaagattgcccct

SEQ ID NO: 206038 - DNA, 25 bp, Artificial sequence
  SiRNA target sequence
tcttcaaacaaaaagattgccccta

SEQ ID NO: 206039 - DNA, 25 bp, Artificial sequence
  SiRNA target sequence
cttcaaacaaaaagattgcccctag

SEQ ID NO: 206040 - DNA, 25 bp, Artificial sequence
  SiRNA target sequence
ttcaaacaaaaagattgcccctagt

SEQ ID NO: 206041 - DNA, 25 bp, Artificial sequence
  SiRNA target sequence
tcaaacaaaaagattgcccctagtc

SEQ ID NO: 206042 - DNA, 25 bp, Artificial sequence
  SiRNA target sequence
caaacaaaaagattgcccctagtcc

SEQ ID NO: 206043 - DNA, 25 bp, Artificial sequence
  SiRNA target sequence
aaacaaaaagattgcccctagtccg

SEQ ID NO: 206044 - DNA, 25 bp, Artificial sequence
  SiRNA target sequence
aacaaaaagattgcccctagtccga

SEQ ID NO: 206045 - DNA, 25 bp, Artificial sequence
  SiRNA target sequence
acaaaaagattgcccctagtccgaa

SEQ ID NO: 206046 - DNA, 25 bp, Artificial sequence
  SiRNA target sequence
caaaaagattgcccctagtccgaag

SEQ ID NO: 206047 - DNA, 25 bp, Artificial sequence
  SiRNA target sequence
aaaaagattgcccctagtccgaaga

SEQ ID NO: 206048 - DNA, 25 bp, Artificial sequence
  SiRNA target sequence
aaaagattgcccctagtccgaagaa

SEQ ID NO: 206049 - DNA, 25 bp, Artificial sequence
  SiRNA target sequence
aaagattgcccctagtccgaagaaa

SEQ ID NO: 206050 - DNA, 25 bp, Artificial sequence
  SiRNA target sequence
aagattgcccctagtccgaagaaaa

SEQ ID NO: 206051 - DNA, 25 bp, Artificial sequence
  SiRNA target sequence
agattgcccctagtccgaagaaaaa

SEQ ID NO: 206052 - DNA, 25 bp, Artificial sequence
  SiRNA target sequence
gattgcccctagtccgaagaaaaat

SEQ ID NO: 206053 - DNA, 25 bp, Artificial sequence
  SiRNA target sequence
attgcccctagtccgaagaaaaatg

SEQ ID NO: 206054 - DNA, 25 bp, Artificial sequence
  SiRNA target sequence
ttgcccctagtccgaagaaaaatgc

SEQ ID NO: 206055 - DNA, 25 bp, Artificial sequence
  SiRNA target sequence
tgcccctagtccgaagaaaaatgca

SEQ ID NO: 206056 - DNA, 25 bp, Artificial sequence
  SiRNA target sequence
gcccctagtccgaagaaaaatgcag

SEQ ID NO: 206057 - DNA, 25 bp, Artificial sequence
  SiRNA target sequence
cccctagtccgaagaaaaatgcagt

SEQ ID NO: 206058 - DNA, 25 bp, Artificial sequence
  SiRNA target sequence
ccctagtccgaagaaaaatgcagta

SEQ ID NO: 206059 - DNA, 25 bp, Artificial sequence
  SiRNA target sequence
cctagtccgaagaaaaatgcagtaa

SEQ ID NO: 206060 - DNA, 25 bp, Artificial sequence
  SiRNA target sequence
ctagtccgaagaaaaatgcagtaaa

SEQ ID NO: 206061 - DNA, 25 bp, Artificial sequence
  SiRNA target sequence
tagtccgaagaaaaatgcagtaaaa

SEQ ID NO: 206062 - DNA, 25 bp, Artificial sequence
  SiRNA target sequence
agtccgaagaaaaatgcagtaaaaa

SEQ ID NO: 206063 - DNA, 25 bp, Artificial sequence
  SiRNA target sequence
gtccgaagaaaaatgcagtaaaaat

SEQ ID NO: 206064 - DNA, 25 bp, Artificial sequence
  SiRNA target sequence
tccgaagaaaaatgcagtaaaaatt

SEQ ID NO: 206065 - DNA, 25 bp, Artificial sequence
  SiRNA target sequence
ccgaagaaaaatgcagtaaaaatta

SEQ ID NO: 206066 - DNA, 25 bp, Artificial sequence
  SiRNA target sequence
cgaagaaaaatgcagtaaaaattat

SEQ ID NO: 206067 - DNA, 25 bp, Artificial sequence
  SiRNA target sequence
gaagaaaaatgcagtaaaaattatt

SEQ ID NO: 206068 - DNA, 25 bp, Artificial sequence
  SiRNA target sequence
aagaaaaatgcagtaaaaattatta

SEQ ID NO: 206069 - DNA, 25 bp, Artificial sequence
  SiRNA target sequence
agaaaaatgcagtaaaaattattag

SEQ ID NO: 206070 - DNA, 25 bp, Artificial sequence
  SiRNA target sequence
gaaaaatgcagtaaaaattattaga

SEQ ID NO: 206071 - DNA, 25 bp, Artificial sequence
  SiRNA target sequence
aaaaatgcagtaaaaattattagaa

SEQ ID NO: 206072 - DNA, 25 bp, Artificial sequence
  SiRNA target sequence
aaaatgcagtaaaaattattagaaa

SEQ ID NO: 206073 - DNA, 25 bp, Artificial sequence
  SiRNA target sequence
aaatgcagtaaaaattattagaaat

SEQ ID NO: 206074 - DNA, 25 bp, Artificial sequence
  SiRNA target sequence
aatgcagtaaaaattattagaaata

SEQ ID NO: 206075 - DNA, 25 bp, Artificial sequence
  SiRNA target sequence
atgcagtaaaaattattagaaatag

SEQ ID NO: 206076 - DNA, 25 bp, Artificial sequence
  SiRNA target sequence
tgcagtaaaaattattagaaataga

SEQ ID NO: 206077 - DNA, 25 bp, Artificial sequence
  SiRNA target sequence
gcagtaaaaattattagaaatagat

SEQ ID NO: 206078 - DNA, 25 bp, Artificial sequence
  SiRNA target sequence
cagtaaaaattattagaaatagatt

SEQ ID NO: 206079 - DNA, 25 bp, Artificial sequence
  SiRNA target sequence
agtaaaaattattagaaatagatta

SEQ ID NO: 206080 - DNA, 25 bp, Artificial sequence
  SiRNA target sequence
gtaaaaattattagaaatagattaa

SEQ ID NO: 206081 - DNA, 25 bp, Artificial sequence
  SiRNA target sequence
taaaaattattagaaatagattaaa

SEQ ID NO: 206082 - DNA, 25 bp, Artificial sequence
  SiRNA target sequence
aaaaattattagaaatagattaaaa

SEQ ID NO: 206083 - DNA, 25 bp, Artificial sequence
  SiRNA target sequence
aaaattattagaaatagattaaaaa

SEQ ID NO: 206084 - DNA, 25 bp, Artificial sequence
  SiRNA target sequence
aaattattagaaatagattaaaaat

SEQ ID NO: 206085 - DNA, 25 bp, Artificial sequence
  SiRNA target sequence
aattattagaaatagattaaaaatc

SEQ ID NO: 206086 - DNA, 25 bp, Artificial sequence
  SiRNA target sequence
attattagaaatagattaaaaatcg

SEQ ID NO: 206087 - DNA, 25 bp, Artificial sequence
  SiRNA target sequence
ttattagaaatagattaaaaatcga

SEQ ID NO: 206088 - DNA, 25 bp, Artificial sequence
  SiRNA target sequence
tattagaaatagattaaaaatcgat

SEQ ID NO: 206089 - DNA, 25 bp, Artificial sequence
  SiRNA target sequence
attagaaatagattaaaaatcgatg

SEQ ID NO: 206090 - DNA, 25 bp, Artificial sequence
  SiRNA target sequence
ttagaaatagattaaaaatcgatga

SEQ ID NO: 206091 - DNA, 25 bp, Artificial sequence
  SiRNA target sequence
tagaaatagattaaaaatcgatgat

SEQ ID NO: 206092 - DNA, 25 bp, Artificial sequence
  SiRNA target sequence
agaaatagattaaaaatcgatgata

SEQ ID NO: 206093 - DNA, 25 bp, Artificial sequence
  SiRNA target sequence
gaaatagattaaaaatcgatgatac

SEQ ID NO: 206094 - DNA, 25 bp, Artificial sequence
  SiRNA target sequence
aaatagattaaaaatcgatgataca

SEQ ID NO: 206095 - DNA, 25 bp, Artificial sequence
  SiRNA target sequence
aatagattaaaaatcgatgatacag

SEQ ID NO: 206096 - DNA, 25 bp, Artificial sequence
  SiRNA target sequence
atagattaaaaatcgatgatacagg

SEQ ID NO: 206097 - DNA, 25 bp, Artificial sequence
  SiRNA target sequence
tagattaaaaatcgatgatacaggt

SEQ ID NO: 206098 - DNA, 25 bp, Artificial sequence
  SiRNA target sequence
agattaaaaatcgatgatacaggtt

SEQ ID NO: 206099 - DNA, 25 bp, Artificial sequence
  SiRNA target sequence
gattaaaaatcgatgatacaggttt

SEQ ID NO: 206100 - DNA, 25 bp, Artificial sequence
  SiRNA target sequence
attaaaaatcgatgatacaggttta

SEQ ID NO: 206101 - DNA, 25 bp, Artificial sequence
  SiRNA target sequence
ttaaaaatcgatgatacaggtttat

SEQ ID NO: 206102 - DNA, 25 bp, Artificial sequence
  SiRNA target sequence
taaaaatcgatgatacaggtttatt

SEQ ID NO: 206103 - DNA, 25 bp, Artificial sequence
  SiRNA target sequence
aaaaatcgatgatacaggtttattt

SEQ ID NO: 206104 - DNA, 25 bp, Artificial sequence
  SiRNA target sequence
aaaatcgatgatacaggtttatttt

SEQ ID NO: 206105 - DNA, 25 bp, Artificial sequence
  SiRNA target sequence
aaatcgatgatacaggtttattttg

SEQ ID NO: 206106 - DNA, 25 bp, Artificial sequence
  SiRNA target sequence
aatcgatgatacaggtttattttgc

SEQ ID NO: 206107 - DNA, 25 bp, Artificial sequence
  SiRNA target sequence
atcgatgatacaggtttattttgca

SEQ ID NO: 206108 - DNA, 25 bp, Artificial sequence
  SiRNA target sequence
tcgatgatacaggtttattttgcat

SEQ ID NO: 206109 - DNA, 25 bp, Artificial sequence
  SiRNA target sequence
cgatgatacaggtttattttgcata

SEQ ID NO: 206110 - DNA, 25 bp, Artificial sequence
  SiRNA target sequence
gatgatacaggtttattttgcataa

SEQ ID NO: 206111 - DNA, 25 bp, Artificial sequence
  SiRNA target sequence
atgatacaggtttattttgcataag

SEQ ID NO: 206112 - DNA, 25 bp, Artificial sequence
  SiRNA target sequence
tgatacaggtttattttgcataagc

SEQ ID NO: 206113 - DNA, 25 bp, Artificial sequence
  SiRNA target sequence
gatacaggtttattttgcataagcc

SEQ ID NO: 206114 - DNA, 25 bp, Artificial sequence
  SiRNA target sequence
atacaggtttattttgcataagcca

SEQ ID NO: 206115 - DNA, 25 bp, Artificial sequence
  SiRNA target sequence
tacaggtttattttgcataagccac

SEQ ID NO: 206116 - DNA, 25 bp, Artificial sequence
  SiRNA target sequence
acaggtttattttgcataagccact

SEQ ID NO: 206117 - DNA, 25 bp, Artificial sequence
  SiRNA target sequence
caggtttattttgcataagccactg

SEQ ID NO: 206118 - DNA, 25 bp, Artificial sequence
  SiRNA target sequence
aggtttattttgcataagccactgt

SEQ ID NO: 206119 - DNA, 25 bp, Artificial sequence
  SiRNA target sequence
ggtttattttgcataagccactgta

SEQ ID NO: 206120 - DNA, 25 bp, Artificial sequence
  SiRNA target sequence
gtttattttgcataagccactgtat

SEQ ID NO: 206121 - DNA, 25 bp, Artificial sequence
  SiRNA target sequence
tttattttgcataagccactgtatt

SEQ ID NO: 206122 - DNA, 25 bp, Artificial sequence
  SiRNA target sequence
ttattttgcataagccactgtatta

SEQ ID NO: 206123 - DNA, 25 bp, Artificial sequence
  SiRNA target sequence
tattttgcataagccactgtattaa

SEQ ID NO: 206124 - DNA, 25 bp, Artificial sequence
  SiRNA target sequence
attttgcataagccactgtattaaa

SEQ ID NO: 206125 - DNA, 25 bp, Artificial sequence
  SiRNA target sequence
ttttgcataagccactgtattaaaa

SEQ ID NO: 206126 - DNA, 25 bp, Artificial sequence
  SiRNA target sequence
tttgcataagccactgtattaaaat

SEQ ID NO: 206127 - DNA, 25 bp, Artificial sequence
  SiRNA target sequence
ttgcataagccactgtattaaaatt

SEQ ID NO: 206128 - DNA, 25 bp, Artificial sequence
  SiRNA target sequence
tgcataagccactgtattaaaatta

SEQ ID NO: 206129 - DNA, 25 bp, Artificial sequence
  SiRNA target sequence
gcataagccactgtattaaaattac

SEQ ID NO: 206130 - DNA, 25 bp, Artificial sequence
  SiRNA target sequence
cataagccactgtattaaaattaca

SEQ ID NO: 206131 - DNA, 25 bp, Artificial sequence
  SiRNA target sequence
ataagccactgtattaaaattacag

SEQ ID NO: 206132 - DNA, 25 bp, Artificial sequence
  SiRNA target sequence
taagccactgtattaaaattacaga

SEQ ID NO: 206133 - DNA, 25 bp, Artificial sequence
  SiRNA target sequence
aagccactgtattaaaattacagat

SEQ ID NO: 206134 - DNA, 25 bp, Artificial sequence
  SiRNA target sequence
agccactgtattaaaattacagatg

SEQ ID NO: 206135 - DNA, 25 bp, Artificial sequence
  SiRNA target sequence
gccactgtattaaaattacagatgc

SEQ ID NO: 206136 - DNA, 25 bp, Artificial sequence
  SiRNA target sequence
ccactgtattaaaattacagatgca

SEQ ID NO: 206137 - DNA, 25 bp, Artificial sequence
  SiRNA target sequence
cactgtattaaaattacagatgcaa

SEQ ID NO: 206138 - DNA, 25 bp, Artificial sequence
  SiRNA target sequence
actgtattaaaattacagatgcaaa

SEQ ID NO: 206139 - DNA, 25 bp, Artificial sequence
  SiRNA target sequence
ctgtattaaaattacagatgcaaaa

SEQ ID NO: 206140 - DNA, 25 bp, Artificial sequence
  SiRNA target sequence
tgtattaaaattacagatgcaaaag

SEQ ID NO: 206141 - DNA, 25 bp, Artificial sequence
  SiRNA target sequence
gtattaaaattacagatgcaaaaga

SEQ ID NO: 206142 - DNA, 25 bp, Artificial sequence
  SiRNA target sequence
tattaaaattacagatgcaaaagat

SEQ ID NO: 206143 - DNA, 25 bp, Artificial sequence
  SiRNA target sequence
attaaaattacagatgcaaaagata

SEQ ID NO: 206144 - DNA, 25 bp, Artificial sequence
  SiRNA target sequence
ttaaaattacagatgcaaaagatat

SEQ ID NO: 206145 - DNA, 25 bp, Artificial sequence
  SiRNA target sequence
taaaattacagatgcaaaagatata

SEQ ID NO: 206146 - DNA, 25 bp, Artificial sequence
  SiRNA target sequence
aaaattacagatgcaaaagatatag

SEQ ID NO: 206147 - DNA, 25 bp, Artificial sequence
  SiRNA target sequence
aaattacagatgcaaaagatatagg

SEQ ID NO: 206148 - DNA, 25 bp, Artificial sequence
  SiRNA target sequence
aattacagatgcaaaagatatagga

SEQ ID NO: 206149 - DNA, 25 bp, Artificial sequence
  SiRNA target sequence
attacagatgcaaaagatataggaa

SEQ ID NO: 206150 - DNA, 25 bp, Artificial sequence
  SiRNA target sequence
ttacagatgcaaaagatataggaag

SEQ ID NO: 206151 - DNA, 25 bp, Artificial sequence
  SiRNA target sequence
tacagatgcaaaagatataggaaga

SEQ ID NO: 206152 - DNA, 25 bp, Artificial sequence
  SiRNA target sequence
acagatgcaaaagatataggaagaa

SEQ ID NO: 206153 - DNA, 25 bp, Artificial sequence
  SiRNA target sequence
cagatgcaaaagatataggaagaac

SEQ ID NO: 206154 - DNA, 25 bp, Artificial sequence
  SiRNA target sequence
agatgcaaaagatataggaagaaca

SEQ ID NO: 206155 - DNA, 25 bp, Artificial sequence
  SiRNA target sequence
gatgcaaaagatataggaagaacat

SEQ ID NO: 206156 - DNA, 25 bp, Artificial sequence
  SiRNA target sequence
atgcaaaagatataggaagaacata

SEQ ID NO: 206157 - DNA, 25 bp, Artificial sequence
  SiRNA target sequence
tgcaaaagatataggaagaacataa

SEQ ID NO: 206158 - DNA, 25 bp, Artificial sequence
  SiRNA target sequence
gcaaaagatataggaagaacataaa

SEQ ID NO: 206159 - DNA, 25 bp, Artificial sequence
  SiRNA target sequence
caaaagatataggaagaacataaaa

SEQ ID NO: 206160 - DNA, 25 bp, Artificial sequence
  SiRNA target sequence
aaaagatataggaagaacataaaaa

SEQ ID NO: 206161 - DNA, 25 bp, Artificial sequence
  SiRNA target sequence
aaagatataggaagaacataaaaaa

SEQ ID NO: 206162 - DNA, 25 bp, Artificial sequence
  SiRNA target sequence
aagatataggaagaacataaaaaat

SEQ ID NO: 206163 - DNA, 25 bp, Artificial sequence
  SiRNA target sequence
agatataggaagaacataaaaaatt

SEQ ID NO: 206164 - DNA, 25 bp, Artificial sequence
  SiRNA target sequence
gatataggaagaacataaaaaattt

SEQ ID NO: 206165 - DNA, 25 bp, Artificial sequence
  SiRNA target sequence
atataggaagaacataaaaaatttt

SEQ ID NO: 206166 - DNA, 25 bp, Artificial sequence
  SiRNA target sequence
tataggaagaacataaaaaattttc

SEQ ID NO: 206167 - DNA, 25 bp, Artificial sequence
  SiRNA target sequence
ataggaagaacataaaaaattttca

SEQ ID NO: 206168 - DNA, 25 bp, Artificial sequence
  SiRNA target sequence
taggaagaacataaaaaattttcat

SEQ ID NO: 206169 - DNA, 25 bp, Artificial sequence
  SiRNA target sequence
aggaagaacataaaaaattttcata

SEQ ID NO: 206170 - DNA, 25 bp, Artificial sequence
  SiRNA target sequence
ggaagaacataaaaaattttcataa

SEQ ID NO: 206171 - DNA, 25 bp, Artificial sequence
  SiRNA target sequence
gaagaacataaaaaattttcataaa

SEQ ID NO: 206172 - DNA, 25 bp, Artificial sequence
  SiRNA target sequence
aagaacataaaaaattttcataaac

SEQ ID NO: 206173 - DNA, 25 bp, Artificial sequence
  SiRNA target sequence
agaacataaaaaattttcataaaca

SEQ ID NO: 206174 - DNA, 25 bp, Artificial sequence
  SiRNA target sequence
gaacataaaaaattttcataaacat

SEQ ID NO: 206175 - DNA, 25 bp, Artificial sequence
  SiRNA target sequence
aacataaaaaattttcataaacata

SEQ ID NO: 206176 - DNA, 25 bp, Artificial sequence
  SiRNA target sequence
acataaaaaattttcataaacataa

SEQ ID NO: 206177 - DNA, 25 bp, Artificial sequence
  SiRNA target sequence
cataaaaaattttcataaacataat

SEQ ID NO: 206178 - DNA, 25 bp, Artificial sequence
  SiRNA target sequence
ataaaaaattttcataaacataatt

SEQ ID NO: 206179 - DNA, 25 bp, Artificial sequence
  SiRNA target sequence
taaaaaattttcataaacataattg

SEQ ID NO: 206180 - DNA, 25 bp, Artificial sequence
  SiRNA target sequence
aaaaaattttcataaacataattga

SEQ ID NO: 206181 - DNA, 25 bp, Artificial sequence
  SiRNA target sequence
aaaaattttcataaacataattgaa

SEQ ID NO: 206182 - DNA, 25 bp, Artificial sequence
  SiRNA target sequence
aaaattttcataaacataattgaat

SEQ ID NO: 206183 - DNA, 25 bp, Artificial sequence
  SiRNA target sequence
aaattttcataaacataattgaatt

SEQ ID NO: 206184 - DNA, 25 bp, Artificial sequence
  SiRNA target sequence
aattttcataaacataattgaattc

SEQ ID NO: 206185 - DNA, 25 bp, Artificial sequence
  SiRNA target sequence
attttcataaacataattgaattct

SEQ ID NO: 206186 - DNA, 25 bp, Artificial sequence
  SiRNA target sequence
ttttcataaacataattgaattctg

SEQ ID NO: 206187 - DNA, 25 bp, Artificial sequence
  SiRNA target sequence
tttcataaacataattgaattctga

SEQ ID NO: 206188 - DNA, 25 bp, Artificial sequence
  SiRNA target sequence
ttcataaacataattgaattctgat

SEQ ID NO: 206189 - DNA, 25 bp, Artificial sequence
  SiRNA target sequence
tcataaacataattgaattctgatc

SEQ ID NO: 206190 - DNA, 25 bp, Artificial sequence
  SiRNA target sequence
cataaacataattgaattctgatct

SEQ ID NO: 206191 - DNA, 25 bp, Artificial sequence
  SiRNA target sequence
ataaacataattgaattctgatctt

SEQ ID NO: 206192 - DNA, 25 bp, Artificial sequence
  SiRNA target sequence
taaacataattgaattctgatcttg

SEQ ID NO: 206193 - DNA, 25 bp, Artificial sequence
  SiRNA target sequence
aaacataattgaattctgatcttgc

SEQ ID NO: 206194 - DNA, 25 bp, Artificial sequence
  SiRNA target sequence
aacataattgaattctgatcttgcc

SEQ ID NO: 206195 - DNA, 25 bp, Artificial sequence
  SiRNA target sequence
acataattgaattctgatcttgcct

SEQ ID NO: 206196 - DNA, 25 bp, Artificial sequence
  SiRNA target sequence
cataattgaattctgatcttgcctt

SEQ ID NO: 206197 - DNA, 25 bp, Artificial sequence
  SiRNA target sequence
ataattgaattctgatcttgcctta

SEQ ID NO: 206198 - DNA, 25 bp, Artificial sequence
  SiRNA target sequence
taattgaattctgatcttgccttac

SEQ ID NO: 206199 - DNA, 25 bp, Artificial sequence
  SiRNA target sequence
aattgaattctgatcttgccttacc

SEQ ID NO: 206200 - DNA, 25 bp, Artificial sequence
  SiRNA target sequence
attgaattctgatcttgccttacca

SEQ ID NO: 206201 - DNA, 25 bp, Artificial sequence
  SiRNA target sequence
ttgaattctgatcttgccttaccat

SEQ ID NO: 206202 - DNA, 25 bp, Artificial sequence
  SiRNA target sequence
tgaattctgatcttgccttaccatc

SEQ ID NO: 206203 - DNA, 25 bp, Artificial sequence
  SiRNA target sequence
gaattctgatcttgccttaccatca

SEQ ID NO: 206204 - DNA, 25 bp, Artificial sequence
  SiRNA target sequence
aattctgatcttgccttaccatcac

SEQ ID NO: 206205 - DNA, 25 bp, Artificial sequence
  SiRNA target sequence
attctgatcttgccttaccatcaca

SEQ ID NO: 206206 - DNA, 25 bp, Artificial sequence
  SiRNA target sequence
ttctgatcttgccttaccatcacaa

SEQ ID NO: 206207 - DNA, 25 bp, Artificial sequence
  SiRNA target sequence
tctgatcttgccttaccatcacaaa

SEQ ID NO: 206208 - DNA, 25 bp, Artificial sequence
  SiRNA target sequence
ctgatcttgccttaccatcacaaat

SEQ ID NO: 206209 - DNA, 25 bp, Artificial sequence
  SiRNA target sequence
tgatcttgccttaccatcacaaata

SEQ ID NO: 206210 - DNA, 25 bp, Artificial sequence
  SiRNA target sequence
gatcttgccttaccatcacaaataa

SEQ ID NO: 206211 - DNA, 25 bp, Artificial sequence
  SiRNA target sequence
atcttgccttaccatcacaaataaa

SEQ ID NO: 206212 - DNA, 25 bp, Artificial sequence
  SiRNA target sequence
tcttgccttaccatcacaaataaat

SEQ ID NO: 206213 - DNA, 25 bp, Artificial sequence
  SiRNA target sequence
cttgccttaccatcacaaataaatc

SEQ ID NO: 206214 - DNA, 25 bp, Artificial sequence
  SiRNA target sequence
ttgccttaccatcacaaataaatct

SEQ ID NO: 206215 - DNA, 25 bp, Artificial sequence
  SiRNA target sequence
tgccttaccatcacaaataaatctt

SEQ ID NO: 206216 - DNA, 25 bp, Artificial sequence
  SiRNA target sequence
gccttaccatcacaaataaatcttt

SEQ ID NO: 206217 - DNA, 25 bp, Artificial sequence
  SiRNA target sequence
ccttaccatcacaaataaatctttt

SEQ ID NO: 206218 - DNA, 25 bp, Artificial sequence
  SiRNA target sequence
cttaccatcacaaataaatctttta

SEQ ID NO: 206219 - DNA, 25 bp, Artificial sequence
  SiRNA target sequence
ttaccatcacaaataaatcttttaa

SEQ ID NO: 206220 - DNA, 25 bp, Artificial sequence
  SiRNA target sequence
taccatcacaaataaatcttttaaa

SEQ ID NO: 206221 - DNA, 25 bp, Artificial sequence
  SiRNA target sequence
accatcacaaataaatcttttaaaa

SEQ ID NO: 206222 - DNA, 25 bp, Artificial sequence
  SiRNA target sequence
ccatcacaaataaatcttttaaaat

SEQ ID NO: 206223 - DNA, 25 bp, Artificial sequence
  SiRNA target sequence
catcacaaataaatcttttaaaatt

SEQ ID NO: 206224 - DNA, 25 bp, Artificial sequence
  SiRNA target sequence
atcacaaataaatcttttaaaattc

SEQ ID NO: 206225 - DNA, 25 bp, Artificial sequence
  SiRNA target sequence
tcacaaataaatcttttaaaattct

SEQ ID NO: 206226 - DNA, 25 bp, Artificial sequence
  SiRNA target sequence
cacaaataaatcttttaaaattctt

SEQ ID NO: 206227 - DNA, 25 bp, Artificial sequence
  SiRNA target sequence
acaaataaatcttttaaaattctta

SEQ ID NO: 206228 - DNA, 25 bp, Artificial sequence
  SiRNA target sequence
caaataaatcttttaaaattcttaa

SEQ ID NO: 206229 - DNA, 25 bp, Artificial sequence
  SiRNA target sequence
aaataaatcttttaaaattcttaaa

SEQ ID NO: 206230 - DNA, 25 bp, Artificial sequence
  SiRNA target sequence
aataaatcttttaaaattcttaaaa

SEQ ID NO: 206231 - DNA, 25 bp, Artificial sequence
  SiRNA target sequence
ataaatcttttaaaattcttaaaaa

SEQ ID NO: 206232 - DNA, 25 bp, Artificial sequence
  SiRNA target sequence
taaatcttttaaaattcttaaaaat

SEQ ID NO: 206233 - DNA, 25 bp, Artificial sequence
  SiRNA target sequence
aaatcttttaaaattcttaaaaatg

SEQ ID NO: 206234 - DNA, 25 bp, Artificial sequence
  SiRNA target sequence
aatcttttaaaattcttaaaaatga

SEQ ID NO: 206235 - DNA, 25 bp, Artificial sequence
  SiRNA target sequence
atcttttaaaattcttaaaaatgaa

SEQ ID NO: 206236 - DNA, 25 bp, Artificial sequence
  SiRNA target sequence
tcttttaaaattcttaaaaatgaat

SEQ ID NO: 206237 - DNA, 25 bp, Artificial sequence
  SiRNA target sequence
cttttaaaattcttaaaaatgaata

SEQ ID NO: 206238 - DNA, 25 bp, Artificial sequence
  SiRNA target sequence
ttttaaaattcttaaaaatgaatac

SEQ ID NO: 206239 - DNA, 25 bp, Artificial sequence
  SiRNA target sequence
tttaaaattcttaaaaatgaataca

SEQ ID NO: 206240 - DNA, 25 bp, Artificial sequence
  SiRNA target sequence
ttaaaattcttaaaaatgaatacac

SEQ ID NO: 206241 - DNA, 25 bp, Artificial sequence
  SiRNA target sequence
taaaattcttaaaaatgaatacaca

SEQ ID NO: 206242 - DNA, 25 bp, Artificial sequence
  SiRNA target sequence
aaaattcttaaaaatgaatacacaa

SEQ ID NO: 206243 - DNA, 25 bp, Artificial sequence
  SiRNA target sequence
aaattcttaaaaatgaatacacaaa

SEQ ID NO: 206244 - DNA, 25 bp, Artificial sequence
  SiRNA target sequence
aattcttaaaaatgaatacacaaag

SEQ ID NO: 206245 - DNA, 25 bp, Artificial sequence
  SiRNA target sequence
attcttaaaaatgaatacacaaagt

SEQ ID NO: 206246 - DNA, 25 bp, Artificial sequence
  SiRNA target sequence
ttcttaaaaatgaatacacaaagtt

SEQ ID NO: 206247 - DNA, 25 bp, Artificial sequence
  SiRNA target sequence
tcttaaaaatgaatacacaaagtta

SEQ ID NO: 206248 - DNA, 25 bp, Artificial sequence
  SiRNA target sequence
cttaaaaatgaatacacaaagttaa

SEQ ID NO: 206249 - DNA, 25 bp, Artificial sequence
  SiRNA target sequence
ttaaaaatgaatacacaaagttaat

SEQ ID NO: 206250 - DNA, 25 bp, Artificial sequence
  SiRNA target sequence
taaaaatgaatacacaaagttaatt

SEQ ID NO: 206251 - DNA, 25 bp, Artificial sequence
  SiRNA target sequence
aaaaatgaatacacaaagttaatta

SEQ ID NO: 206252 - DNA, 25 bp, Artificial sequence
  SiRNA target sequence
aaaatgaatacacaaagttaattaa

SEQ ID NO: 206253 - DNA, 25 bp, Artificial sequence
  SiRNA target sequence
aaatgaatacacaaagttaattaat

SEQ ID NO: 206254 - DNA, 25 bp, Artificial sequence
  SiRNA target sequence
aatgaatacacaaagttaattaatc

SEQ ID NO: 206255 - DNA, 25 bp, Artificial sequence
  SiRNA target sequence
atgaatacacaaagttaattaatcc

SEQ ID NO: 206256 - DNA, 25 bp, Artificial sequence
  SiRNA target sequence
tgaatacacaaagttaattaatcca

SEQ ID NO: 206257 - DNA, 25 bp, Artificial sequence
  SiRNA target sequence
gaatacacaaagttaattaatccaa

SEQ ID NO: 206258 - DNA, 25 bp, Artificial sequence
  SiRNA target sequence
aatacacaaagttaattaatccaaa

SEQ ID NO: 206259 - DNA, 25 bp, Artificial sequence
  SiRNA target sequence
atacacaaagttaattaatccaaac

SEQ ID NO: 206260 - DNA, 25 bp, Artificial sequence
  SiRNA target sequence
tacacaaagttaattaatccaaaca

SEQ ID NO: 206261 - DNA, 25 bp, Artificial sequence
  SiRNA target sequence
acacaaagttaattaatccaaacat

SEQ ID NO: 206262 - DNA, 25 bp, Artificial sequence
  SiRNA target sequence
cacaaagttaattaatccaaacata

SEQ ID NO: 206263 - DNA, 25 bp, Artificial sequence
  SiRNA target sequence
acaaagttaattaatccaaacataa

SEQ ID NO: 206264 - DNA, 25 bp, Artificial sequence
  SiRNA target sequence
caaagttaattaatccaaacataat

SEQ ID NO: 206265 - DNA, 25 bp, Artificial sequence
  SiRNA target sequence
aaagttaattaatccaaacataata

SEQ ID NO: 206266 - DNA, 25 bp, Artificial sequence
  SiRNA target sequence
aagttaattaatccaaacataatac

SEQ ID NO: 206267 - DNA, 25 bp, Artificial sequence
  SiRNA target sequence
agttaattaatccaaacataatacc

SEQ ID NO: 206268 - DNA, 25 bp, Artificial sequence
  SiRNA target sequence
gttaattaatccaaacataatacca

SEQ ID NO: 206269 - DNA, 25 bp, Artificial sequence
  SiRNA target sequence
ttaattaatccaaacataataccaa

SEQ ID NO: 206270 - DNA, 25 bp, Artificial sequence
  SiRNA target sequence
taattaatccaaacataataccaag

SEQ ID NO: 206271 - DNA, 25 bp, Artificial sequence
  SiRNA target sequence
aattaatccaaacataataccaagt

SEQ ID NO: 206272 - DNA, 25 bp, Artificial sequence
  SiRNA target sequence
attaatccaaacataataccaagta

SEQ ID NO: 206273 - DNA, 25 bp, Artificial sequence
  SiRNA target sequence
ttaatccaaacataataccaagtat

SEQ ID NO: 206274 - DNA, 25 bp, Artificial sequence
  SiRNA target sequence
taatccaaacataataccaagtata

SEQ ID NO: 206275 - DNA, 25 bp, Artificial sequence
  SiRNA target sequence
aatccaaacataataccaagtataa

SEQ ID NO: 206276 - DNA, 25 bp, Artificial sequence
  SiRNA target sequence
atccaaacataataccaagtataaa

SEQ ID NO: 206277 - DNA, 25 bp, Artificial sequence
  SiRNA target sequence
tccaaacataataccaagtataaaa

SEQ ID NO: 206278 - DNA, 25 bp, Artificial sequence
  SiRNA target sequence
ccaaacataataccaagtataaaaa

SEQ ID NO: 206279 - DNA, 25 bp, Artificial sequence
  SiRNA target sequence
caaacataataccaagtataaaaaa

SEQ ID NO: 206280 - DNA, 25 bp, Artificial sequence
  SiRNA target sequence
aaacataataccaagtataaaaaat

SEQ ID NO: 206281 - DNA, 25 bp, Artificial sequence
  SiRNA target sequence
aacataataccaagtataaaaaatt

SEQ ID NO: 206282 - DNA, 25 bp, Artificial sequence
  SiRNA target sequence
acataataccaagtataaaaaattt

SEQ ID NO: 206283 - DNA, 25 bp, Artificial sequence
  SiRNA target sequence
cataataccaagtataaaaaattta

SEQ ID NO: 206284 - DNA, 25 bp, Artificial sequence
  SiRNA target sequence
ataataccaagtataaaaaatttag

SEQ ID NO: 206285 - DNA, 25 bp, Artificial sequence
  SiRNA target sequence
taataccaagtataaaaaatttagg

SEQ ID NO: 206286 - DNA, 25 bp, Artificial sequence
  SiRNA target sequence
aataccaagtataaaaaatttaggc

SEQ ID NO: 206287 - DNA, 25 bp, Artificial sequence
  SiRNA target sequence
ataccaagtataaaaaatttaggca

SEQ ID NO: 206288 - DNA, 25 bp, Artificial sequence
  SiRNA target sequence
taccaagtataaaaaatttaggcat

SEQ ID NO: 206289 - DNA, 25 bp, Artificial sequence
  SiRNA target sequence
accaagtataaaaaatttaggcatt

SEQ ID NO: 206290 - DNA, 25 bp, Artificial sequence
  SiRNA target sequence
ccaagtataaaaaatttaggcattt

SEQ ID NO: 206291 - DNA, 25 bp, Artificial sequence
  SiRNA target sequence
caagtataaaaaatttaggcatttc

SEQ ID NO: 206292 - DNA, 25 bp, Artificial sequence
  SiRNA target sequence
aagtataaaaaatttaggcatttca

SEQ ID NO: 206293 - DNA, 25 bp, Artificial sequence
  SiRNA target sequence
agtataaaaaatttaggcatttcaa

SEQ ID NO: 206294 - DNA, 25 bp, Artificial sequence
  SiRNA target sequence
gtataaaaaatttaggcatttcaac

SEQ ID NO: 206295 - DNA, 25 bp, Artificial sequence
  SiRNA target sequence
tataaaaaatttaggcatttcaacc

SEQ ID NO: 206296 - DNA, 25 bp, Artificial sequence
  SiRNA target sequence
ataaaaaatttaggcatttcaacct

SEQ ID NO: 206297 - DNA, 25 bp, Artificial sequence
  SiRNA target sequence
taaaaaatttaggcatttcaacctt

SEQ ID NO: 206298 - DNA, 25 bp, Artificial sequence
  SiRNA target sequence
aaaaaatttaggcatttcaacctta

SEQ ID NO: 206299 - DNA, 25 bp, Artificial sequence
  SiRNA target sequence
aaaaatttaggcatttcaaccttag

SEQ ID NO: 206300 - DNA, 25 bp, Artificial sequence
  SiRNA target sequence
aaaatttaggcatttcaaccttagc

SEQ ID NO: 206301 - DNA, 25 bp, Artificial sequence
  SiRNA target sequence
aaatttaggcatttcaaccttagca

SEQ ID NO: 206302 - DNA, 25 bp, Artificial sequence
  SiRNA target sequence
aatttaggcatttcaaccttagcaa

SEQ ID NO: 206303 - DNA, 25 bp, Artificial sequence
  SiRNA target sequence
atttaggcatttcaaccttagcaac

SEQ ID NO: 206304 - DNA, 25 bp, Artificial sequence
  SiRNA target sequence
tttaggcatttcaaccttagcaact

SEQ ID NO: 206305 - DNA, 25 bp, Artificial sequence
  SiRNA target sequence
ttaggcatttcaaccttagcaactt

SEQ ID NO: 206306 - DNA, 25 bp, Artificial sequence
  SiRNA target sequence
taggcatttcaaccttagcaacttt

SEQ ID NO: 206307 - DNA, 25 bp, Artificial sequence
  SiRNA target sequence
aggcatttcaaccttagcaacttta

SEQ ID NO: 206308 - DNA, 25 bp, Artificial sequence
  SiRNA target sequence
ggcatttcaaccttagcaactttaa

SEQ ID NO: 206309 - DNA, 25 bp, Artificial sequence
  SiRNA target sequence
gcatttcaaccttagcaactttaaa

SEQ ID NO: 206310 - DNA, 25 bp, Artificial sequence
  SiRNA target sequence
catttcaaccttagcaactttaaaa

SEQ ID NO: 206311 - DNA, 25 bp, Artificial sequence
  SiRNA target sequence
atttcaaccttagcaactttaaaat

SEQ ID NO: 206312 - DNA, 25 bp, Artificial sequence
  SiRNA target sequence
tttcaaccttagcaactttaaaata

SEQ ID NO: 206313 - DNA, 25 bp, Artificial sequence
  SiRNA target sequence
ttcaaccttagcaactttaaaataa

SEQ ID NO: 206314 - DNA, 25 bp, Artificial sequence
  SiRNA target sequence
tcaaccttagcaactttaaaataac

SEQ ID NO: 206315 - DNA, 25 bp, Artificial sequence
  SiRNA target sequence
caaccttagcaactttaaaataact

SEQ ID NO: 206316 - DNA, 25 bp, Artificial sequence
  SiRNA target sequence
aaccttagcaactttaaaataactc

SEQ ID NO: 206317 - DNA, 25 bp, Artificial sequence
  SiRNA target sequence
accttagcaactttaaaataactca

SEQ ID NO: 206318 - DNA, 25 bp, Artificial sequence
  SiRNA target sequence
ccttagcaactttaaaataactcag

SEQ ID NO: 206319 - DNA, 25 bp, Artificial sequence
  SiRNA target sequence
cttagcaactttaaaataactcagt

SEQ ID NO: 206320 - DNA, 25 bp, Artificial sequence
  SiRNA target sequence
ttagcaactttaaaataactcagta

SEQ ID NO: 206321 - DNA, 25 bp, Artificial sequence
  SiRNA target sequence
tagcaactttaaaataactcagtaa

SEQ ID NO: 206322 - DNA, 25 bp, Artificial sequence
  SiRNA target sequence
agcaactttaaaataactcagtaat

SEQ ID NO: 206323 - DNA, 25 bp, Artificial sequence
  SiRNA target sequence
gcaactttaaaataactcagtaatc

SEQ ID NO: 206324 - DNA, 25 bp, Artificial sequence
  SiRNA target sequence
caactttaaaataactcagtaatcc

SEQ ID NO: 206325 - DNA, 25 bp, Artificial sequence
  SiRNA target sequence
aactttaaaataactcagtaatcct

SEQ ID NO: 206326 - DNA, 25 bp, Artificial sequence
  SiRNA target sequence
actttaaaataactcagtaatcctg

SEQ ID NO: 206327 - DNA, 25 bp, Artificial sequence
  SiRNA target sequence
ctttaaaataactcagtaatcctgt

SEQ ID NO: 206328 - DNA, 25 bp, Artificial sequence
  SiRNA target sequence
tttaaaataactcagtaatcctgtt

SEQ ID NO: 206329 - DNA, 25 bp, Artificial sequence
  SiRNA target sequence
ttaaaataactcagtaatcctgttc

SEQ ID NO: 206330 - DNA, 25 bp, Artificial sequence
  SiRNA target sequence
taaaataactcagtaatcctgttct

SEQ ID NO: 206331 - DNA, 25 bp, Artificial sequence
  SiRNA target sequence
aaaataactcagtaatcctgttctt

SEQ ID NO: 206332 - DNA, 25 bp, Artificial sequence
  SiRNA target sequence
aaataactcagtaatcctgttcttg

SEQ ID NO: 206333 - DNA, 25 bp, Artificial sequence
  SiRNA target sequence
aataactcagtaatcctgttcttga

SEQ ID NO: 206334 - DNA, 25 bp, Artificial sequence
  SiRNA target sequence
ataactcagtaatcctgttcttgaa

SEQ ID NO: 206335 - DNA, 25 bp, Artificial sequence
  SiRNA target sequence
taactcagtaatcctgttcttgaat

SEQ ID NO: 206336 - DNA, 25 bp, Artificial sequence
  SiRNA target sequence
aactcagtaatcctgttcttgaatt

SEQ ID NO: 206337 - DNA, 25 bp, Artificial sequence
  SiRNA target sequence
actcagtaatcctgttcttgaattt

SEQ ID NO: 206338 - DNA, 25 bp, Artificial sequence
  SiRNA target sequence
ctcagtaatcctgttcttgaatttg

SEQ ID NO: 206339 - DNA, 25 bp, Artificial sequence
  SiRNA target sequence
tcagtaatcctgttcttgaatttgc

SEQ ID NO: 206340 - DNA, 25 bp, Artificial sequence
  SiRNA target sequence
cagtaatcctgttcttgaatttgct

SEQ ID NO: 206341 - DNA, 25 bp, Artificial sequence
  SiRNA target sequence
agtaatcctgttcttgaatttgcta

SEQ ID NO: 206342 - DNA, 25 bp, Artificial sequence
  SiRNA target sequence
gtaatcctgttcttgaatttgctaa

SEQ ID NO: 206343 - DNA, 25 bp, Artificial sequence
  SiRNA target sequence
taatcctgttcttgaatttgctaat

SEQ ID NO: 206344 - DNA, 25 bp, Artificial sequence
  SiRNA target sequence
aatcctgttcttgaatttgctaatt

SEQ ID NO: 206345 - DNA, 25 bp, Artificial sequence
  SiRNA target sequence
atcctgttcttgaatttgctaattg

SEQ ID NO: 206346 - DNA, 25 bp, Artificial sequence
  SiRNA target sequence
tcctgttcttgaatttgctaattga

SEQ ID NO: 206347 - DNA, 25 bp, Artificial sequence
  SiRNA target sequence
cctgttcttgaatttgctaattgat

SEQ ID NO: 206348 - DNA, 25 bp, Artificial sequence
  SiRNA target sequence
ctgttcttgaatttgctaattgatc

SEQ ID NO: 206349 - DNA, 25 bp, Artificial sequence
  SiRNA target sequence
tgttcttgaatttgctaattgatca

SEQ ID NO: 206350 - DNA, 25 bp, Artificial sequence
  SiRNA target sequence
gttcttgaatttgctaattgatcaa

SEQ ID NO: 206351 - DNA, 25 bp, Artificial sequence
  SiRNA target sequence
ttcttgaatttgctaattgatcaat

SEQ ID NO: 206352 - DNA, 25 bp, Artificial sequence
  SiRNA target sequence
tcttgaatttgctaattgatcaatc

SEQ ID NO: 206353 - DNA, 25 bp, Artificial sequence
  SiRNA target sequence
cttgaatttgctaattgatcaatct

SEQ ID NO: 206354 - DNA, 25 bp, Artificial sequence
  SiRNA target sequence
ttgaatttgctaattgatcaatctc

SEQ ID NO: 206355 - DNA, 25 bp, Artificial sequence
  SiRNA target sequence
tgaatttgctaattgatcaatctca

SEQ ID NO: 206356 - DNA, 25 bp, Artificial sequence
  SiRNA target sequence
gaatttgctaattgatcaatctcat

SEQ ID NO: 206357 - DNA, 25 bp, Artificial sequence
  SiRNA target sequence
aatttgctaattgatcaatctcatc

SEQ ID NO: 206358 - DNA, 25 bp, Artificial sequence
  SiRNA target sequence
atttgctaattgatcaatctcatct

SEQ ID NO: 206359 - DNA, 25 bp, Artificial sequence
  SiRNA target sequence
tttgctaattgatcaatctcatctt

SEQ ID NO: 206360 - DNA, 25 bp, Artificial sequence
  SiRNA target sequence
ttgctaattgatcaatctcatcttc

SEQ ID NO: 206361 - DNA, 25 bp, Artificial sequence
  SiRNA target sequence
tgctaattgatcaatctcatcttcc

SEQ ID NO: 206362 - DNA, 25 bp, Artificial sequence
  SiRNA target sequence
gctaattgatcaatctcatcttccg

SEQ ID NO: 206363 - DNA, 25 bp, Artificial sequence
  SiRNA target sequence
ctaattgatcaatctcatcttccgt

SEQ ID NO: 206364 - DNA, 25 bp, Artificial sequence
  SiRNA target sequence
taattgatcaatctcatcttccgta

SEQ ID NO: 206365 - DNA, 25 bp, Artificial sequence
  SiRNA target sequence
aattgatcaatctcatcttccgtag

SEQ ID NO: 206366 - DNA, 25 bp, Artificial sequence
  SiRNA target sequence
attgatcaatctcatcttccgtagg

SEQ ID NO: 206367 - DNA, 25 bp, Artificial sequence
  SiRNA target sequence
ttgatcaatctcatcttccgtaggt

SEQ ID NO: 206368 - DNA, 25 bp, Artificial sequence
  SiRNA target sequence
tgatcaatctcatcttccgtaggta

SEQ ID NO: 206369 - DNA, 25 bp, Artificial sequence
  SiRNA target sequence
gatcaatctcatcttccgtaggtaa

SEQ ID NO: 206370 - DNA, 25 bp, Artificial sequence
  SiRNA target sequence
atcaatctcatcttccgtaggtaag

SEQ ID NO: 206371 - DNA, 25 bp, Artificial sequence
  SiRNA target sequence
tcaatctcatcttccgtaggtaagt

SEQ ID NO: 206372 - DNA, 25 bp, Artificial sequence
  SiRNA target sequence
caatctcatcttccgtaggtaagtt

SEQ ID NO: 206373 - DNA, 25 bp, Artificial sequence
  SiRNA target sequence
aatctcatcttccgtaggtaagttg

SEQ ID NO: 206374 - DNA, 25 bp, Artificial sequence
  SiRNA target sequence
atctcatcttccgtaggtaagttgt

SEQ ID NO: 206375 - DNA, 25 bp, Artificial sequence
  SiRNA target sequence
tctcatcttccgtaggtaagttgtt

SEQ ID NO: 206376 - DNA, 25 bp, Artificial sequence
  SiRNA target sequence
ctcatcttccgtaggtaagttgttt

SEQ ID NO: 206377 - DNA, 25 bp, Artificial sequence
  SiRNA target sequence
tcatcttccgtaggtaagttgtttt

SEQ ID NO: 206378 - DNA, 25 bp, Artificial sequence
  SiRNA target sequence
catcttccgtaggtaagttgttttc

SEQ ID NO: 206379 - DNA, 25 bp, Artificial sequence
  SiRNA target sequence
atcttccgtaggtaagttgttttca

SEQ ID NO: 206380 - DNA, 25 bp, Artificial sequence
  SiRNA target sequence
tcttccgtaggtaagttgttttcag

SEQ ID NO: 206381 - DNA, 25 bp, Artificial sequence
  SiRNA target sequence
cttccgtaggtaagttgttttcagg

SEQ ID NO: 206382 - DNA, 25 bp, Artificial sequence
  SiRNA target sequence
ttccgtaggtaagttgttttcaggt

SEQ ID NO: 206383 - DNA, 25 bp, Artificial sequence
  SiRNA target sequence
tccgtaggtaagttgttttcaggtg

SEQ ID NO: 206384 - DNA, 25 bp, Artificial sequence
  SiRNA target sequence
ccgtaggtaagttgttttcaggtgt

SEQ ID NO: 206385 - DNA, 25 bp, Artificial sequence
  SiRNA target sequence
cgtaggtaagttgttttcaggtgtt

SEQ ID NO: 206386 - DNA, 25 bp, Artificial sequence
  SiRNA target sequence
gtaggtaagttgttttcaggtgttt

SEQ ID NO: 206387 - DNA, 25 bp, Artificial sequence
  SiRNA target sequence
taggtaagttgttttcaggtgtttc

SEQ ID NO: 206388 - DNA, 25 bp, Artificial sequence
  SiRNA target sequence
aggtaagttgttttcaggtgtttca

SEQ ID NO: 206389 - DNA, 25 bp, Artificial sequence
  SiRNA target sequence
ggtaagttgttttcaggtgtttcat

SEQ ID NO: 206390 - DNA, 25 bp, Artificial sequence
  SiRNA target sequence
gtaagttgttttcaggtgtttcatt

SEQ ID NO: 206391 - DNA, 25 bp, Artificial sequence
  SiRNA target sequence
taagttgttttcaggtgtttcattt

SEQ ID NO: 206392 - DNA, 25 bp, Artificial sequence
  SiRNA target sequence
aagttgttttcaggtgtttcattta

SEQ ID NO: 206393 - DNA, 25 bp, Artificial sequence
  SiRNA target sequence
agttgttttcaggtgtttcatttat

SEQ ID NO: 206394 - DNA, 25 bp, Artificial sequence
  SiRNA target sequence
gttgttttcaggtgtttcatttatt

SEQ ID NO: 206395 - DNA, 25 bp, Artificial sequence
  SiRNA target sequence
ttgttttcaggtgtttcatttatta

SEQ ID NO: 206396 - DNA, 25 bp, Artificial sequence
  SiRNA target sequence
tgttttcaggtgtttcatttattac

SEQ ID NO: 206397 - DNA, 25 bp, Artificial sequence
  SiRNA target sequence
gttttcaggtgtttcatttattaca

SEQ ID NO: 206398 - DNA, 25 bp, Artificial sequence
  SiRNA target sequence
ttttcaggtgtttcatttattacac

SEQ ID NO: 206399 - DNA, 25 bp, Artificial sequence
  SiRNA target sequence
tttcaggtgtttcatttattacact

SEQ ID NO: 206400 - DNA, 25 bp, Artificial sequence
  SiRNA target sequence
ttcaggtgtttcatttattacactc

SEQ ID NO: 206401 - DNA, 25 bp, Artificial sequence
  SiRNA target sequence
tcaggtgtttcatttattacactca

SEQ ID NO: 206402 - DNA, 25 bp, Artificial sequence
  SiRNA target sequence
caggtgtttcatttattacactcat

SEQ ID NO: 206403 - DNA, 26 bp, Artificial sequence
  SiRNA target sequence
ttattctgcgttttcttttttgtcgt

SEQ ID NO: 206404 - DNA, 26 bp, Artificial sequence
  SiRNA target sequence
tattctgcgttttcttttttgtcgtc

SEQ ID NO: 206405 - DNA, 26 bp, Artificial sequence
  SiRNA target sequence
attctgcgttttcttttttgtcgtct

SEQ ID NO: 206406 - DNA, 26 bp, Artificial sequence
  SiRNA target sequence
ttctgcgttttcttttttgtcgtctt

SEQ ID NO: 206407 - DNA, 26 bp, Artificial sequence
  SiRNA target sequence
tctgcgttttcttttttgtcgtcttt

SEQ ID NO: 206408 - DNA, 26 bp, Artificial sequence
  SiRNA target sequence
ctgcgttttcttttttgtcgtctttt

SEQ ID NO: 206409 - DNA, 26 bp, Artificial sequence
  SiRNA target sequence
tgcgttttcttttttgtcgtctttta

SEQ ID NO: 206410 - DNA, 26 bp, Artificial sequence
  SiRNA target sequence
gcgttttcttttttgtcgtcttttat

SEQ ID NO: 206411 - DNA, 26 bp, Artificial sequence
  SiRNA target sequence
cgttttcttttttgtcgtcttttatt

SEQ ID NO: 206412 - DNA, 26 bp, Artificial sequence
  SiRNA target sequence
gttttcttttttgtcgtcttttatta

SEQ ID NO: 206413 - DNA, 26 bp, Artificial sequence
  SiRNA target sequence
ttttcttttttgtcgtcttttattaa

SEQ ID NO: 206414 - DNA, 26 bp, Artificial sequence
  SiRNA target sequence
tttcttttttgtcgtcttttattaaa

SEQ ID NO: 206415 - DNA, 26 bp, Artificial sequence
  SiRNA target sequence
ttcttttttgtcgtcttttattaaat

SEQ ID NO: 206416 - DNA, 26 bp, Artificial sequence
  SiRNA target sequence
tcttttttgtcgtcttttattaaatc

SEQ ID NO: 206417 - DNA, 26 bp, Artificial sequence
  SiRNA target sequence
cttttttgtcgtcttttattaaatct

SEQ ID NO: 206418 - DNA, 26 bp, Artificial sequence
  SiRNA target sequence
ttttttgtcgtcttttattaaatcta

SEQ ID NO: 206419 - DNA, 26 bp, Artificial sequence
  SiRNA target sequence
tttttgtcgtcttttattaaatctat

SEQ ID NO: 206420 - DNA, 26 bp, Artificial sequence
  SiRNA target sequence
ttttgtcgtcttttattaaatctatg

SEQ ID NO: 206421 - DNA, 26 bp, Artificial sequence
  SiRNA target sequence
tttgtcgtcttttattaaatctatgt

SEQ ID NO: 206422 - DNA, 26 bp, Artificial sequence
  SiRNA target sequence
ttgtcgtcttttattaaatctatgtc

SEQ ID NO: 206423 - DNA, 26 bp, Artificial sequence
  SiRNA target sequence
tgtcgtcttttattaaatctatgtct

SEQ ID NO: 206424 - DNA, 26 bp, Artificial sequence
  SiRNA target sequence
gtcgtcttttattaaatctatgtcta

SEQ ID NO: 206425 - DNA, 26 bp, Artificial sequence
  SiRNA target sequence
tcgtcttttattaaatctatgtctac

SEQ ID NO: 206426 - DNA, 26 bp, Artificial sequence
  SiRNA target sequence
cgtcttttattaaatctatgtctaca

SEQ ID NO: 206427 - DNA, 26 bp, Artificial sequence
  SiRNA target sequence
gtcttttattaaatctatgtctacac

SEQ ID NO: 206428 - DNA, 26 bp, Artificial sequence
  SiRNA target sequence
tcttttattaaatctatgtctacact

SEQ ID NO: 206429 - DNA, 26 bp, Artificial sequence
  SiRNA target sequence
cttttattaaatctatgtctacactt

SEQ ID NO: 206430 - DNA, 26 bp, Artificial sequence
  SiRNA target sequence
ttttattaaatctatgtctacacttg

SEQ ID NO: 206431 - DNA, 26 bp, Artificial sequence
  SiRNA target sequence
tttattaaatctatgtctacacttgt

SEQ ID NO: 206432 - DNA, 26 bp, Artificial sequence
  SiRNA target sequence
ttattaaatctatgtctacacttgta

SEQ ID NO: 206433 - DNA, 26 bp, Artificial sequence
  SiRNA target sequence
tattaaatctatgtctacacttgtat

SEQ ID NO: 206434 - DNA, 26 bp, Artificial sequence
  SiRNA target sequence
attaaatctatgtctacacttgtatt

SEQ ID NO: 206435 - DNA, 26 bp, Artificial sequence
  SiRNA target sequence
ttaaatctatgtctacacttgtatta

SEQ ID NO: 206436 - DNA, 26 bp, Artificial sequence
  SiRNA target sequence
taaatctatgtctacacttgtattat

SEQ ID NO: 206437 - DNA, 26 bp, Artificial sequence
  SiRNA target sequence
aaatctatgtctacacttgtattatt

SEQ ID NO: 206438 - DNA, 26 bp, Artificial sequence
  SiRNA target sequence
aatctatgtctacacttgtattattt

SEQ ID NO: 206439 - DNA, 26 bp, Artificial sequence
  SiRNA target sequence
atctatgtctacacttgtattatttt

SEQ ID NO: 206440 - DNA, 26 bp, Artificial sequence
  SiRNA target sequence
tctatgtctacacttgtattattttt

SEQ ID NO: 206441 - DNA, 26 bp, Artificial sequence
  SiRNA target sequence
ctatgtctacacttgtattattttta

SEQ ID NO: 206442 - DNA, 26 bp, Artificial sequence
  SiRNA target sequence
tatgtctacacttgtattatttttaa

SEQ ID NO: 206443 - DNA, 26 bp, Artificial sequence
  SiRNA target sequence
atgtctacacttgtattatttttaat

SEQ ID NO: 206444 - DNA, 26 bp, Artificial sequence
  SiRNA target sequence
tgtctacacttgtattatttttaatt

SEQ ID NO: 206445 - DNA, 26 bp, Artificial sequence
  SiRNA target sequence
gtctacacttgtattatttttaattg

SEQ ID NO: 206446 - DNA, 26 bp, Artificial sequence
  SiRNA target sequence
tctacacttgtattatttttaattga

SEQ ID NO: 206447 - DNA, 26 bp, Artificial sequence
  SiRNA target sequence
ctacacttgtattatttttaattgaa

SEQ ID NO: 206448 - DNA, 26 bp, Artificial sequence
  SiRNA target sequence
tacacttgtattatttttaattgaaa

SEQ ID NO: 206449 - DNA, 26 bp, Artificial sequence
  SiRNA target sequence
acacttgtattatttttaattgaaac

SEQ ID NO: 206450 - DNA, 26 bp, Artificial sequence
  SiRNA target sequence
cacttgtattatttttaattgaaacg

SEQ ID NO: 206451 - DNA, 26 bp, Artificial sequence
  SiRNA target sequence
acttgtattatttttaattgaaacgt

SEQ ID NO: 206452 - DNA, 26 bp, Artificial sequence
  SiRNA target sequence
cttgtattatttttaattgaaacgtt

SEQ ID NO: 206453 - DNA, 26 bp, Artificial sequence
  SiRNA target sequence
ttgtattatttttaattgaaacgtta

SEQ ID NO: 206454 - DNA, 26 bp, Artificial sequence
  SiRNA target sequence
tgtattatttttaattgaaacgttat

SEQ ID NO: 206455 - DNA, 26 bp, Artificial sequence
  SiRNA target sequence
gtattatttttaattgaaacgttata

SEQ ID NO: 206456 - DNA, 26 bp, Artificial sequence
  SiRNA target sequence
tattatttttaattgaaacgttatat

SEQ ID NO: 206457 - DNA, 26 bp, Artificial sequence
  SiRNA target sequence
attatttttaattgaaacgttatatg

SEQ ID NO: 206458 - DNA, 26 bp, Artificial sequence
  SiRNA target sequence
ttatttttaattgaaacgttatatgc

SEQ ID NO: 206459 - DNA, 26 bp, Artificial sequence
  SiRNA target sequence
tatttttaattgaaacgttatatgca

SEQ ID NO: 206460 - DNA, 26 bp, Artificial sequence
  SiRNA target sequence
atttttaattgaaacgttatatgcac

SEQ ID NO: 206461 - DNA, 26 bp, Artificial sequence
  SiRNA target sequence
tttttaattgaaacgttatatgcacc

SEQ ID NO: 206462 - DNA, 26 bp, Artificial sequence
  SiRNA target sequence
ttttaattgaaacgttatatgcaccc

SEQ ID NO: 206463 - DNA, 26 bp, Artificial sequence
  SiRNA target sequence
tttaattgaaacgttatatgcacccg

SEQ ID NO: 206464 - DNA, 26 bp, Artificial sequence
  SiRNA target sequence
ttaattgaaacgttatatgcacccgc

SEQ ID NO: 206465 - DNA, 26 bp, Artificial sequence
  SiRNA target sequence
taattgaaacgttatatgcacccgct

SEQ ID NO: 206466 - DNA, 26 bp, Artificial sequence
  SiRNA target sequence
aattgaaacgttatatgcacccgcta

SEQ ID NO: 206467 - DNA, 26 bp, Artificial sequence
  SiRNA target sequence
attgaaacgttatatgcacccgctaa

SEQ ID NO: 206468 - DNA, 26 bp, Artificial sequence
  SiRNA target sequence
ttgaaacgttatatgcacccgctaaa

SEQ ID NO: 206469 - DNA, 26 bp, Artificial sequence
  SiRNA target sequence
tgaaacgttatatgcacccgctaaat

SEQ ID NO: 206470 - DNA, 26 bp, Artificial sequence
  SiRNA target sequence
gaaacgttatatgcacccgctaaata

SEQ ID NO: 206471 - DNA, 26 bp, Artificial sequence
  SiRNA target sequence
aaacgttatatgcacccgctaaatag

SEQ ID NO: 206472 - DNA, 26 bp, Artificial sequence
  SiRNA target sequence
aacgttatatgcacccgctaaataga

SEQ ID NO: 206473 - DNA, 26 bp, Artificial sequence
  SiRNA target sequence
acgttatatgcacccgctaaatagat

SEQ ID NO: 206474 - DNA, 26 bp, Artificial sequence
  SiRNA target sequence
cgttatatgcacccgctaaatagatt

SEQ ID NO: 206475 - DNA, 26 bp, Artificial sequence
  SiRNA target sequence
gttatatgcacccgctaaatagatta

SEQ ID NO: 206476 - DNA, 26 bp, Artificial sequence
  SiRNA target sequence
ttatatgcacccgctaaatagattat

SEQ ID NO: 206477 - DNA, 26 bp, Artificial sequence
  SiRNA target sequence
tatatgcacccgctaaatagattata

SEQ ID NO: 206478 - DNA, 26 bp, Artificial sequence
  SiRNA target sequence
atatgcacccgctaaatagattatag

SEQ ID NO: 206479 - DNA, 26 bp, Artificial sequence
  SiRNA target sequence
tatgcacccgctaaatagattatagc

SEQ ID NO: 206480 - DNA, 26 bp, Artificial sequence
  SiRNA target sequence
atgcacccgctaaatagattatagct

SEQ ID NO: 206481 - DNA, 26 bp, Artificial sequence
  SiRNA target sequence
tgcacccgctaaatagattatagctc

SEQ ID NO: 206482 - DNA, 26 bp, Artificial sequence
  SiRNA target sequence
gcacccgctaaatagattatagctct

SEQ ID NO: 206483 - DNA, 26 bp, Artificial sequence
  SiRNA target sequence
cacccgctaaatagattatagctcta

SEQ ID NO: 206484 - DNA, 26 bp, Artificial sequence
  SiRNA target sequence
acccgctaaatagattatagctctaa

SEQ ID NO: 206485 - DNA, 26 bp, Artificial sequence
  SiRNA target sequence
cccgctaaatagattatagctctaat

SEQ ID NO: 206486 - DNA, 26 bp, Artificial sequence
  SiRNA target sequence
ccgctaaatagattatagctctaatc

SEQ ID NO: 206487 - DNA, 26 bp, Artificial sequence
  SiRNA target sequence
cgctaaatagattatagctctaatcc

SEQ ID NO: 206488 - DNA, 26 bp, Artificial sequence
  SiRNA target sequence
gctaaatagattatagctctaatcca

SEQ ID NO: 206489 - DNA, 26 bp, Artificial sequence
  SiRNA target sequence
ctaaatagattatagctctaatccaa

SEQ ID NO: 206490 - DNA, 26 bp, Artificial sequence
  SiRNA target sequence
taaatagattatagctctaatccaaa

SEQ ID NO: 206491 - DNA, 26 bp, Artificial sequence
  SiRNA target sequence
aaatagattatagctctaatccaaat

SEQ ID NO: 206492 - DNA, 26 bp, Artificial sequence
  SiRNA target sequence
aatagattatagctctaatccaaata

SEQ ID NO: 206493 - DNA, 26 bp, Artificial sequence
  SiRNA target sequence
atagattatagctctaatccaaatat

SEQ ID NO: 206494 - DNA, 26 bp, Artificial sequence
  SiRNA target sequence
tagattatagctctaatccaaatata

SEQ ID NO: 206495 - DNA, 26 bp, Artificial sequence
  SiRNA target sequence
agattatagctctaatccaaatataa

SEQ ID NO: 206496 - DNA, 26 bp, Artificial sequence
  SiRNA target sequence
gattatagctctaatccaaatataaa

SEQ ID NO: 206497 - DNA, 26 bp, Artificial sequence
  SiRNA target sequence
attatagctctaatccaaatataaat

SEQ ID NO: 206498 - DNA, 26 bp, Artificial sequence
  SiRNA target sequence
ttatagctctaatccaaatataaatc

SEQ ID NO: 206499 - DNA, 26 bp, Artificial sequence
  SiRNA target sequence
tatagctctaatccaaatataaatca

SEQ ID NO: 206500 - DNA, 26 bp, Artificial sequence
  SiRNA target sequence
atagctctaatccaaatataaatcaa

SEQ ID NO: 206501 - DNA, 26 bp, Artificial sequence
  SiRNA target sequence
tagctctaatccaaatataaatcaat

SEQ ID NO: 206502 - DNA, 26 bp, Artificial sequence
  SiRNA target sequence
agctctaatccaaatataaatcaata

SEQ ID NO: 206503 - DNA, 26 bp, Artificial sequence
  SiRNA target sequence
gctctaatccaaatataaatcaatat

SEQ ID NO: 206504 - DNA, 26 bp, Artificial sequence
  SiRNA target sequence
ctctaatccaaatataaatcaatatt

SEQ ID NO: 206505 - DNA, 26 bp, Artificial sequence
  SiRNA target sequence
tctaatccaaatataaatcaatatta

SEQ ID NO: 206506 - DNA, 26 bp, Artificial sequence
  SiRNA target sequence
ctaatccaaatataaatcaatattat

SEQ ID NO: 206507 - DNA, 26 bp, Artificial sequence
  SiRNA target sequence
taatccaaatataaatcaatattatt

SEQ ID NO: 206508 - DNA, 26 bp, Artificial sequence
  SiRNA target sequence
aatccaaatataaatcaatattattg

SEQ ID NO: 206509 - DNA, 26 bp, Artificial sequence
  SiRNA target sequence
atccaaatataaatcaatattattgc

SEQ ID NO: 206510 - DNA, 26 bp, Artificial sequence
  SiRNA target sequence
tccaaatataaatcaatattattgca

SEQ ID NO: 206511 - DNA, 26 bp, Artificial sequence
  SiRNA target sequence
ccaaatataaatcaatattattgcaa

SEQ ID NO: 206512 - DNA, 26 bp, Artificial sequence
  SiRNA target sequence
caaatataaatcaatattattgcaat

SEQ ID NO: 206513 - DNA, 26 bp, Artificial sequence
  SiRNA target sequence
aaatataaatcaatattattgcaatc

SEQ ID NO: 206514 - DNA, 26 bp, Artificial sequence
  SiRNA target sequence
aatataaatcaatattattgcaatcg

SEQ ID NO: 206515 - DNA, 26 bp, Artificial sequence
  SiRNA target sequence
atataaatcaatattattgcaatcgt

SEQ ID NO: 206516 - DNA, 26 bp, Artificial sequence
  SiRNA target sequence
tataaatcaatattattgcaatcgtt

SEQ ID NO: 206517 - DNA, 26 bp, Artificial sequence
  SiRNA target sequence
ataaatcaatattattgcaatcgtta

SEQ ID NO: 206518 - DNA, 26 bp, Artificial sequence
  SiRNA target sequence
taaatcaatattattgcaatcgttaa

SEQ ID NO: 206519 - DNA, 26 bp, Artificial sequence
  SiRNA target sequence
aaatcaatattattgcaatcgttaat

SEQ ID NO: 206520 - DNA, 26 bp, Artificial sequence
  SiRNA target sequence
aatcaatattattgcaatcgttaatg

SEQ ID NO: 206521 - DNA, 26 bp, Artificial sequence
  SiRNA target sequence
atcaatattattgcaatcgttaatgt

SEQ ID NO: 206522 - DNA, 26 bp, Artificial sequence
  SiRNA target sequence
tcaatattattgcaatcgttaatgtg

SEQ ID NO: 206523 - DNA, 26 bp, Artificial sequence
  SiRNA target sequence
caatattattgcaatcgttaatgtga

SEQ ID NO: 206524 - DNA, 26 bp, Artificial sequence
  SiRNA target sequence
aatattattgcaatcgttaatgtgat

SEQ ID NO: 206525 - DNA, 26 bp, Artificial sequence
  SiRNA target sequence
atattattgcaatcgttaatgtgatt

SEQ ID NO: 206526 - DNA, 26 bp, Artificial sequence
  SiRNA target sequence
tattattgcaatcgttaatgtgattg

SEQ ID NO: 206527 - DNA, 26 bp, Artificial sequence
  SiRNA target sequence
attattgcaatcgttaatgtgattgg

SEQ ID NO: 206528 - DNA, 26 bp, Artificial sequence
  SiRNA target sequence
ttattgcaatcgttaatgtgattgga

SEQ ID NO: 206529 - DNA, 26 bp, Artificial sequence
  SiRNA target sequence
tattgcaatcgttaatgtgattggac

SEQ ID NO: 206530 - DNA, 26 bp, Artificial sequence
  SiRNA target sequence
attgcaatcgttaatgtgattggact

SEQ ID NO: 206531 - DNA, 26 bp, Artificial sequence
  SiRNA target sequence
ttgcaatcgttaatgtgattggacta

SEQ ID NO: 206532 - DNA, 26 bp, Artificial sequence
  SiRNA target sequence
tgcaatcgttaatgtgattggactac

SEQ ID NO: 206533 - DNA, 26 bp, Artificial sequence
  SiRNA target sequence
gcaatcgttaatgtgattggactacc

SEQ ID NO: 206534 - DNA, 26 bp, Artificial sequence
  SiRNA target sequence
caatcgttaatgtgattggactaccc

SEQ ID NO: 206535 - DNA, 26 bp, Artificial sequence
  SiRNA target sequence
aatcgttaatgtgattggactaccct

SEQ ID NO: 206536 - DNA, 26 bp, Artificial sequence
  SiRNA target sequence
atcgttaatgtgattggactaccctt

SEQ ID NO: 206537 - DNA, 26 bp, Artificial sequence
  SiRNA target sequence
tcgttaatgtgattggactacccttc

SEQ ID NO: 206538 - DNA, 26 bp, Artificial sequence
  SiRNA target sequence
cgttaatgtgattggactacccttcc

SEQ ID NO: 206539 - DNA, 26 bp, Artificial sequence
  SiRNA target sequence
gttaatgtgattggactacccttcct

SEQ ID NO: 206540 - DNA, 26 bp, Artificial sequence
  SiRNA target sequence
ttaatgtgattggactacccttcctt

SEQ ID NO: 206541 - DNA, 26 bp, Artificial sequence
  SiRNA target sequence
taatgtgattggactacccttcctta

SEQ ID NO: 206542 - DNA, 26 bp, Artificial sequence
  SiRNA target sequence
aatgtgattggactacccttccttac

SEQ ID NO: 206543 - DNA, 26 bp, Artificial sequence
  SiRNA target sequence
atgtgattggactacccttccttaca

SEQ ID NO: 206544 - DNA, 26 bp, Artificial sequence
  SiRNA target sequence
tgtgattggactacccttccttacat

SEQ ID NO: 206545 - DNA, 26 bp, Artificial sequence
  SiRNA target sequence
gtgattggactacccttccttacatt

SEQ ID NO: 206546 - DNA, 26 bp, Artificial sequence
  SiRNA target sequence
tgattggactacccttccttacatta

SEQ ID NO: 206547 - DNA, 26 bp, Artificial sequence
  SiRNA target sequence
gattggactacccttccttacattat

SEQ ID NO: 206548 - DNA, 26 bp, Artificial sequence
  SiRNA target sequence
attggactacccttccttacattatc

SEQ ID NO: 206549 - DNA, 26 bp, Artificial sequence
  SiRNA target sequence
ttggactacccttccttacattatca

SEQ ID NO: 206550 - DNA, 26 bp, Artificial sequence
  SiRNA target sequence
tggactacccttccttacattatcag

SEQ ID NO: 206551 - DNA, 26 bp, Artificial sequence
  SiRNA target sequence
ggactacccttccttacattatcagt

SEQ ID NO: 206552 - DNA, 26 bp, Artificial sequence
  SiRNA target sequence
gactacccttccttacattatcagta

SEQ ID NO: 206553 - DNA, 26 bp, Artificial sequence
  SiRNA target sequence
actacccttccttacattatcagtat

SEQ ID NO: 206554 - DNA, 26 bp, Artificial sequence
  SiRNA target sequence
ctacccttccttacattatcagtatc

SEQ ID NO: 206555 - DNA, 26 bp, Artificial sequence
  SiRNA target sequence
tacccttccttacattatcagtatca

SEQ ID NO: 206556 - DNA, 26 bp, Artificial sequence
  SiRNA target sequence
acccttccttacattatcagtatcaa

SEQ ID NO: 206557 - DNA, 26 bp, Artificial sequence
  SiRNA target sequence
cccttccttacattatcagtatcaag

SEQ ID NO: 206558 - DNA, 26 bp, Artificial sequence
  SiRNA target sequence
ccttccttacattatcagtatcaagt

SEQ ID NO: 206559 - DNA, 26 bp, Artificial sequence
  SiRNA target sequence
cttccttacattatcagtatcaagtg

SEQ ID NO: 206560 - DNA, 26 bp, Artificial sequence
  SiRNA target sequence
ttccttacattatcagtatcaagtgc

SEQ ID NO: 206561 - DNA, 26 bp, Artificial sequence
  SiRNA target sequence
tccttacattatcagtatcaagtgct

SEQ ID NO: 206562 - DNA, 26 bp, Artificial sequence
  SiRNA target sequence
ccttacattatcagtatcaagtgcta

SEQ ID NO: 206563 - DNA, 26 bp, Artificial sequence
  SiRNA target sequence
cttacattatcagtatcaagtgctac

SEQ ID NO: 206564 - DNA, 26 bp, Artificial sequence
  SiRNA target sequence
ttacattatcagtatcaagtgctact

SEQ ID NO: 206565 - DNA, 26 bp, Artificial sequence
  SiRNA target sequence
tacattatcagtatcaagtgctacta

SEQ ID NO: 206566 - DNA, 26 bp, Artificial sequence
  SiRNA target sequence
acattatcagtatcaagtgctactaa

SEQ ID NO: 206567 - DNA, 26 bp, Artificial sequence
  SiRNA target sequence
cattatcagtatcaagtgctactaat

SEQ ID NO: 206568 - DNA, 26 bp, Artificial sequence
  SiRNA target sequence
attatcagtatcaagtgctactaata

SEQ ID NO: 206569 - DNA, 26 bp, Artificial sequence
  SiRNA target sequence
ttatcagtatcaagtgctactaatat

SEQ ID NO: 206570 - DNA, 26 bp, Artificial sequence
  SiRNA target sequence
tatcagtatcaagtgctactaatatg

SEQ ID NO: 206571 - DNA, 26 bp, Artificial sequence
  SiRNA target sequence
atcagtatcaagtgctactaatatgg

SEQ ID NO: 206572 - DNA, 26 bp, Artificial sequence
  SiRNA target sequence
tcagtatcaagtgctactaatatggc

SEQ ID NO: 206573 - DNA, 26 bp, Artificial sequence
  SiRNA target sequence
cagtatcaagtgctactaatatggct

SEQ ID NO: 206574 - DNA, 26 bp, Artificial sequence
  SiRNA target sequence
agtatcaagtgctactaatatggcta

SEQ ID NO: 206575 - DNA, 26 bp, Artificial sequence
  SiRNA target sequence
gtatcaagtgctactaatatggctag

SEQ ID NO: 206576 - DNA, 26 bp, Artificial sequence
  SiRNA target sequence
tatcaagtgctactaatatggctagt

SEQ ID NO: 206577 - DNA, 26 bp, Artificial sequence
  SiRNA target sequence
atcaagtgctactaatatggctagtc

SEQ ID NO: 206578 - DNA, 26 bp, Artificial sequence
  SiRNA target sequence
tcaagtgctactaatatggctagtcc

SEQ ID NO: 206579 - DNA, 26 bp, Artificial sequence
  SiRNA target sequence
caagtgctactaatatggctagtcca

SEQ ID NO: 206580 - DNA, 26 bp, Artificial sequence
  SiRNA target sequence
aagtgctactaatatggctagtccat

SEQ ID NO: 206581 - DNA, 26 bp, Artificial sequence
  SiRNA target sequence
agtgctactaatatggctagtccata

SEQ ID NO: 206582 - DNA, 26 bp, Artificial sequence
  SiRNA target sequence
gtgctactaatatggctagtccatat

SEQ ID NO: 206583 - DNA, 26 bp, Artificial sequence
  SiRNA target sequence
tgctactaatatggctagtccatata

SEQ ID NO: 206584 - DNA, 26 bp, Artificial sequence
  SiRNA target sequence
gctactaatatggctagtccatataa

SEQ ID NO: 206585 - DNA, 26 bp, Artificial sequence
  SiRNA target sequence
ctactaatatggctagtccatataat

SEQ ID NO: 206586 - DNA, 26 bp, Artificial sequence
  SiRNA target sequence
tactaatatggctagtccatataatg

SEQ ID NO: 206587 - DNA, 26 bp, Artificial sequence
  SiRNA target sequence
actaatatggctagtccatataatga

SEQ ID NO: 206588 - DNA, 26 bp, Artificial sequence
  SiRNA target sequence
ctaatatggctagtccatataatgaa

SEQ ID NO: 206589 - DNA, 26 bp, Artificial sequence
  SiRNA target sequence
taatatggctagtccatataatgaac

SEQ ID NO: 206590 - DNA, 26 bp, Artificial sequence
  SiRNA target sequence
aatatggctagtccatataatgaacc

SEQ ID NO: 206591 - DNA, 26 bp, Artificial sequence
  SiRNA target sequence
atatggctagtccatataatgaacca

SEQ ID NO: 206592 - DNA, 26 bp, Artificial sequence
  SiRNA target sequence
tatggctagtccatataatgaaccaa

SEQ ID NO: 206593 - DNA, 26 bp, Artificial sequence
  SiRNA target sequence
atggctagtccatataatgaaccaat

SEQ ID NO: 206594 - DNA, 26 bp, Artificial sequence
  SiRNA target sequence
tggctagtccatataatgaaccaata

SEQ ID NO: 206595 - DNA, 26 bp, Artificial sequence
  SiRNA target sequence
ggctagtccatataatgaaccaatag

SEQ ID NO: 206596 - DNA, 26 bp, Artificial sequence
  SiRNA target sequence
gctagtccatataatgaaccaataga

SEQ ID NO: 206597 - DNA, 26 bp, Artificial sequence
  SiRNA target sequence
ctagtccatataatgaaccaatagat

SEQ ID NO: 206598 - DNA, 26 bp, Artificial sequence
  SiRNA target sequence
tagtccatataatgaaccaatagatt

SEQ ID NO: 206599 - DNA, 26 bp, Artificial sequence
  SiRNA target sequence
agtccatataatgaaccaatagattt

SEQ ID NO: 206600 - DNA, 26 bp, Artificial sequence
  SiRNA target sequence
gtccatataatgaaccaatagatttt

SEQ ID NO: 206601 - DNA, 26 bp, Artificial sequence
  SiRNA target sequence
tccatataatgaaccaatagattttc

SEQ ID NO: 206602 - DNA, 26 bp, Artificial sequence
  SiRNA target sequence
ccatataatgaaccaatagattttcc

SEQ ID NO: 206603 - DNA, 26 bp, Artificial sequence
  SiRNA target sequence
catataatgaaccaatagattttcct

SEQ ID NO: 206604 - DNA, 26 bp, Artificial sequence
  SiRNA target sequence
atataatgaaccaatagattttccta

SEQ ID NO: 206605 - DNA, 26 bp, Artificial sequence
  SiRNA target sequence
tataatgaaccaatagattttcctaa

SEQ ID NO: 206606 - DNA, 26 bp, Artificial sequence
  SiRNA target sequence
ataatgaaccaatagattttcctaat

SEQ ID NO: 206607 - DNA, 26 bp, Artificial sequence
  SiRNA target sequence
taatgaaccaatagattttcctaatt

SEQ ID NO: 206608 - DNA, 26 bp, Artificial sequence
  SiRNA target sequence
aatgaaccaatagattttcctaattt

SEQ ID NO: 206609 - DNA, 26 bp, Artificial sequence
  SiRNA target sequence
atgaaccaatagattttcctaattta

SEQ ID NO: 206610 - DNA, 26 bp, Artificial sequence
  SiRNA target sequence
tgaaccaatagattttcctaatttat

SEQ ID NO: 206611 - DNA, 26 bp, Artificial sequence
  SiRNA target sequence
gaaccaatagattttcctaatttatt

SEQ ID NO: 206612 - DNA, 26 bp, Artificial sequence
  SiRNA target sequence
aaccaatagattttcctaatttatta

SEQ ID NO: 206613 - DNA, 26 bp, Artificial sequence
  SiRNA target sequence
accaatagattttcctaatttattaa

SEQ ID NO: 206614 - DNA, 26 bp, Artificial sequence
  SiRNA target sequence
ccaatagattttcctaatttattaaa

SEQ ID NO: 206615 - DNA, 26 bp, Artificial sequence
  SiRNA target sequence
caatagattttcctaatttattaaaa

SEQ ID NO: 206616 - DNA, 26 bp, Artificial sequence
  SiRNA target sequence
aatagattttcctaatttattaaaaa

SEQ ID NO: 206617 - DNA, 26 bp, Artificial sequence
  SiRNA target sequence
atagattttcctaatttattaaaaat

SEQ ID NO: 206618 - DNA, 26 bp, Artificial sequence
  SiRNA target sequence
tagattttcctaatttattaaaaata

SEQ ID NO: 206619 - DNA, 26 bp, Artificial sequence
  SiRNA target sequence
agattttcctaatttattaaaaatac

SEQ ID NO: 206620 - DNA, 26 bp, Artificial sequence
  SiRNA target sequence
gattttcctaatttattaaaaatacc

SEQ ID NO: 206621 - DNA, 26 bp, Artificial sequence
  SiRNA target sequence
attttcctaatttattaaaaatacca

SEQ ID NO: 206622 - DNA, 26 bp, Artificial sequence
  SiRNA target sequence
ttttcctaatttattaaaaataccat

SEQ ID NO: 206623 - DNA, 26 bp, Artificial sequence
  SiRNA target sequence
tttcctaatttattaaaaataccatc

SEQ ID NO: 206624 - DNA, 26 bp, Artificial sequence
  SiRNA target sequence
ttcctaatttattaaaaataccatca

SEQ ID NO: 206625 - DNA, 26 bp, Artificial sequence
  SiRNA target sequence
tcctaatttattaaaaataccatcat

SEQ ID NO: 206626 - DNA, 26 bp, Artificial sequence
  SiRNA target sequence
cctaatttattaaaaataccatcata

SEQ ID NO: 206627 - DNA, 26 bp, Artificial sequence
  SiRNA target sequence
ctaatttattaaaaataccatcataa

SEQ ID NO: 206628 - DNA, 26 bp, Artificial sequence
  SiRNA target sequence
taatttattaaaaataccatcataaa

SEQ ID NO: 206629 - DNA, 26 bp, Artificial sequence
  SiRNA target sequence
aatttattaaaaataccatcataaac

SEQ ID NO: 206630 - DNA, 26 bp, Artificial sequence
  SiRNA target sequence
atttattaaaaataccatcataaaca

SEQ ID NO: 206631 - DNA, 26 bp, Artificial sequence
  SiRNA target sequence
tttattaaaaataccatcataaacac

SEQ ID NO: 206632 - DNA, 26 bp, Artificial sequence
  SiRNA target sequence
ttattaaaaataccatcataaacact

SEQ ID NO: 206633 - DNA, 26 bp, Artificial sequence
  SiRNA target sequence
tattaaaaataccatcataaacactt

SEQ ID NO: 206634 - DNA, 26 bp, Artificial sequence
  SiRNA target sequence
attaaaaataccatcataaacacttt

SEQ ID NO: 206635 - DNA, 26 bp, Artificial sequence
  SiRNA target sequence
ttaaaaataccatcataaacactttt

SEQ ID NO: 206636 - DNA, 26 bp, Artificial sequence
  SiRNA target sequence
taaaaataccatcataaacactttta

SEQ ID NO: 206637 - DNA, 26 bp, Artificial sequence
  SiRNA target sequence
aaaaataccatcataaacacttttaa

SEQ ID NO: 206638 - DNA, 26 bp, Artificial sequence
  SiRNA target sequence
aaaataccatcataaacacttttaaa

SEQ ID NO: 206639 - DNA, 26 bp, Artificial sequence
  SiRNA target sequence
aaataccatcataaacacttttaaac

SEQ ID NO: 206640 - DNA, 26 bp, Artificial sequence
  SiRNA target sequence
aataccatcataaacacttttaaacc

SEQ ID NO: 206641 - DNA, 26 bp, Artificial sequence
  SiRNA target sequence
ataccatcataaacacttttaaaccg

SEQ ID NO: 206642 - DNA, 26 bp, Artificial sequence
  SiRNA target sequence
taccatcataaacacttttaaaccgt

SEQ ID NO: 206643 - DNA, 26 bp, Artificial sequence
  SiRNA target sequence
accatcataaacacttttaaaccgtg

SEQ ID NO: 206644 - DNA, 26 bp, Artificial sequence
  SiRNA target sequence
ccatcataaacacttttaaaccgtgc

SEQ ID NO: 206645 - DNA, 26 bp, Artificial sequence
  SiRNA target sequence
catcataaacacttttaaaccgtgcc

SEQ ID NO: 206646 - DNA, 26 bp, Artificial sequence
  SiRNA target sequence
atcataaacacttttaaaccgtgccc

SEQ ID NO: 206647 - DNA, 26 bp, Artificial sequence
  SiRNA target sequence
tcataaacacttttaaaccgtgccct

SEQ ID NO: 206648 - DNA, 26 bp, Artificial sequence
  SiRNA target sequence
cataaacacttttaaaccgtgccctg

SEQ ID NO: 206649 - DNA, 26 bp, Artificial sequence
  SiRNA target sequence
ataaacacttttaaaccgtgccctgt

SEQ ID NO: 206650 - DNA, 26 bp, Artificial sequence
  SiRNA target sequence
taaacacttttaaaccgtgccctgtg

SEQ ID NO: 206651 - DNA, 26 bp, Artificial sequence
  SiRNA target sequence
aaacacttttaaaccgtgccctgtgt

SEQ ID NO: 206652 - DNA, 26 bp, Artificial sequence
  SiRNA target sequence
aacacttttaaaccgtgccctgtgtg

SEQ ID NO: 206653 - DNA, 26 bp, Artificial sequence
  SiRNA target sequence
acacttttaaaccgtgccctgtgtgc

SEQ ID NO: 206654 - DNA, 26 bp, Artificial sequence
  SiRNA target sequence
cacttttaaaccgtgccctgtgtgca

SEQ ID NO: 206655 - DNA, 26 bp, Artificial sequence
  SiRNA target sequence
acttttaaaccgtgccctgtgtgcag

SEQ ID NO: 206656 - DNA, 26 bp, Artificial sequence
  SiRNA target sequence
cttttaaaccgtgccctgtgtgcagg

SEQ ID NO: 206657 - DNA, 26 bp, Artificial sequence
  SiRNA target sequence
ttttaaaccgtgccctgtgtgcagga

SEQ ID NO: 206658 - DNA, 26 bp, Artificial sequence
  SiRNA target sequence
tttaaaccgtgccctgtgtgcaggat

SEQ ID NO: 206659 - DNA, 26 bp, Artificial sequence
  SiRNA target sequence
ttaaaccgtgccctgtgtgcaggatc

SEQ ID NO: 206660 - DNA, 26 bp, Artificial sequence
  SiRNA target sequence
taaaccgtgccctgtgtgcaggatcg

SEQ ID NO: 206661 - DNA, 26 bp, Artificial sequence
  SiRNA target sequence
aaaccgtgccctgtgtgcaggatcga

SEQ ID NO: 206662 - DNA, 26 bp, Artificial sequence
  SiRNA target sequence
aaccgtgccctgtgtgcaggatcgat

SEQ ID NO: 206663 - DNA, 26 bp, Artificial sequence
  SiRNA target sequence
accgtgccctgtgtgcaggatcgatt

SEQ ID NO: 206664 - DNA, 26 bp, Artificial sequence
  SiRNA target sequence
ccgtgccctgtgtgcaggatcgattc

SEQ ID NO: 206665 - DNA, 26 bp, Artificial sequence
  SiRNA target sequence
cgtgccctgtgtgcaggatcgattct

SEQ ID NO: 206666 - DNA, 26 bp, Artificial sequence
  SiRNA target sequence
gtgccctgtgtgcaggatcgattctc

SEQ ID NO: 206667 - DNA, 26 bp, Artificial sequence
  SiRNA target sequence
tgccctgtgtgcaggatcgattctca

SEQ ID NO: 206668 - DNA, 26 bp, Artificial sequence
  SiRNA target sequence
gccctgtgtgcaggatcgattctcat

SEQ ID NO: 206669 - DNA, 26 bp, Artificial sequence
  SiRNA target sequence
ccctgtgtgcaggatcgattctcata

SEQ ID NO: 206670 - DNA, 26 bp, Artificial sequence
  SiRNA target sequence
cctgtgtgcaggatcgattctcatac

SEQ ID NO: 206671 - DNA, 26 bp, Artificial sequence
  SiRNA target sequence
ctgtgtgcaggatcgattctcatacc

SEQ ID NO: 206672 - DNA, 26 bp, Artificial sequence
  SiRNA target sequence
tgtgtgcaggatcgattctcataccc

SEQ ID NO: 206673 - DNA, 26 bp, Artificial sequence
  SiRNA target sequence
gtgtgcaggatcgattctcataccca

SEQ ID NO: 206674 - DNA, 26 bp, Artificial sequence
  SiRNA target sequence
tgtgcaggatcgattctcatacccat

SEQ ID NO: 206675 - DNA, 26 bp, Artificial sequence
  SiRNA target sequence
gtgcaggatcgattctcatacccatt

SEQ ID NO: 206676 - DNA, 26 bp, Artificial sequence
  SiRNA target sequence
tgcaggatcgattctcatacccattt

SEQ ID NO: 206677 - DNA, 26 bp, Artificial sequence
  SiRNA target sequence
gcaggatcgattctcatacccatttt

SEQ ID NO: 206678 - DNA, 26 bp, Artificial sequence
  SiRNA target sequence
caggatcgattctcatacccattttc

SEQ ID NO: 206679 - DNA, 26 bp, Artificial sequence
  SiRNA target sequence
aggatcgattctcatacccattttct

SEQ ID NO: 206680 - DNA, 26 bp, Artificial sequence
  SiRNA target sequence
ggatcgattctcatacccattttctc

SEQ ID NO: 206681 - DNA, 26 bp, Artificial sequence
  SiRNA target sequence
gatcgattctcatacccattttctct

SEQ ID NO: 206682 - DNA, 26 bp, Artificial sequence
  SiRNA target sequence
atcgattctcatacccattttctctt

SEQ ID NO: 206683 - DNA, 26 bp, Artificial sequence
  SiRNA target sequence
tcgattctcatacccattttctcttt

SEQ ID NO: 206684 - DNA, 26 bp, Artificial sequence
  SiRNA target sequence
cgattctcatacccattttctcttta

SEQ ID NO: 206685 - DNA, 26 bp, Artificial sequence
  SiRNA target sequence
gattctcatacccattttctctttac

SEQ ID NO: 206686 - DNA, 26 bp, Artificial sequence
  SiRNA target sequence
attctcatacccattttctctttaca

SEQ ID NO: 206687 - DNA, 26 bp, Artificial sequence
  SiRNA target sequence
ttctcatacccattttctctttacaa

SEQ ID NO: 206688 - DNA, 26 bp, Artificial sequence
  SiRNA target sequence
tctcatacccattttctctttacaaa

SEQ ID NO: 206689 - DNA, 26 bp, Artificial sequence
  SiRNA target sequence
ctcatacccattttctctttacaaat

SEQ ID NO: 206690 - DNA, 26 bp, Artificial sequence
  SiRNA target sequence
tcatacccattttctctttacaaata

SEQ ID NO: 206691 - DNA, 26 bp, Artificial sequence
  SiRNA target sequence
catacccattttctctttacaaatat

SEQ ID NO: 206692 - DNA, 26 bp, Artificial sequence
  SiRNA target sequence
atacccattttctctttacaaatatc

SEQ ID NO: 206693 - DNA, 26 bp, Artificial sequence
  SiRNA target sequence
tacccattttctctttacaaatatca

SEQ ID NO: 206694 - DNA, 26 bp, Artificial sequence
  SiRNA target sequence
acccattttctctttacaaatatcaa

SEQ ID NO: 206695 - DNA, 26 bp, Artificial sequence
  SiRNA target sequence
cccattttctctttacaaatatcaaa

SEQ ID NO: 206696 - DNA, 26 bp, Artificial sequence
  SiRNA target sequence
ccattttctctttacaaatatcaaag

SEQ ID NO: 206697 - DNA, 26 bp, Artificial sequence
  SiRNA target sequence
cattttctctttacaaatatcaaagg

SEQ ID NO: 206698 - DNA, 26 bp, Artificial sequence
  SiRNA target sequence
attttctctttacaaatatcaaaggc

SEQ ID NO: 206699 - DNA, 26 bp, Artificial sequence
  SiRNA target sequence
ttttctctttacaaatatcaaaggct

SEQ ID NO: 206700 - DNA, 26 bp, Artificial sequence
  SiRNA target sequence
tttctctttacaaatatcaaaggctg

SEQ ID NO: 206701 - DNA, 26 bp, Artificial sequence
  SiRNA target sequence
ttctctttacaaatatcaaaggctga

SEQ ID NO: 206702 - DNA, 26 bp, Artificial sequence
  SiRNA target sequence
tctctttacaaatatcaaaggctgaa

SEQ ID NO: 206703 - DNA, 26 bp, Artificial sequence
  SiRNA target sequence
ctctttacaaatatcaaaggctgaat

SEQ ID NO: 206704 - DNA, 26 bp, Artificial sequence
  SiRNA target sequence
tctttacaaatatcaaaggctgaata

SEQ ID NO: 206705 - DNA, 26 bp, Artificial sequence
  SiRNA target sequence
ctttacaaatatcaaaggctgaatat

SEQ ID NO: 206706 - DNA, 26 bp, Artificial sequence
  SiRNA target sequence
tttacaaatatcaaaggctgaatatt

SEQ ID NO: 206707 - DNA, 26 bp, Artificial sequence
  SiRNA target sequence
ttacaaatatcaaaggctgaatattt

SEQ ID NO: 206708 - DNA, 26 bp, Artificial sequence
  SiRNA target sequence
tacaaatatcaaaggctgaatatttt

SEQ ID NO: 206709 - DNA, 26 bp, Artificial sequence
  SiRNA target sequence
acaaatatcaaaggctgaatatttta

SEQ ID NO: 206710 - DNA, 26 bp, Artificial sequence
  SiRNA target sequence
caaatatcaaaggctgaatattttaa

SEQ ID NO: 206711 - DNA, 26 bp, Artificial sequence
  SiRNA target sequence
aaatatcaaaggctgaatattttaat

SEQ ID NO: 206712 - DNA, 26 bp, Artificial sequence
  SiRNA target sequence
aatatcaaaggctgaatattttaata

SEQ ID NO: 206713 - DNA, 26 bp, Artificial sequence
  SiRNA target sequence
atatcaaaggctgaatattttaatac

SEQ ID NO: 206714 - DNA, 26 bp, Artificial sequence
  SiRNA target sequence
tatcaaaggctgaatattttaatact

SEQ ID NO: 206715 - DNA, 26 bp, Artificial sequence
  SiRNA target sequence
atcaaaggctgaatattttaatactt

SEQ ID NO: 206716 - DNA, 26 bp, Artificial sequence
  SiRNA target sequence
tcaaaggctgaatattttaatacttt

SEQ ID NO: 206717 - DNA, 26 bp, Artificial sequence
  SiRNA target sequence
caaaggctgaatattttaatactttt

SEQ ID NO: 206718 - DNA, 26 bp, Artificial sequence
  SiRNA target sequence
aaaggctgaatattttaatactttta

SEQ ID NO: 206719 - DNA, 26 bp, Artificial sequence
  SiRNA target sequence
aaggctgaatattttaatacttttat

SEQ ID NO: 206720 - DNA, 26 bp, Artificial sequence
  SiRNA target sequence
aggctgaatattttaatacttttatg

SEQ ID NO: 206721 - DNA, 26 bp, Artificial sequence
  SiRNA target sequence
ggctgaatattttaatacttttatga

SEQ ID NO: 206722 - DNA, 26 bp, Artificial sequence
  SiRNA target sequence
gctgaatattttaatacttttatgaa

SEQ ID NO: 206723 - DNA, 26 bp, Artificial sequence
  SiRNA target sequence
ctgaatattttaatacttttatgaat

SEQ ID NO: 206724 - DNA, 26 bp, Artificial sequence
  SiRNA target sequence
tgaatattttaatacttttatgaatg

SEQ ID NO: 206725 - DNA, 26 bp, Artificial sequence
  SiRNA target sequence
gaatattttaatacttttatgaatgc

SEQ ID NO: 206726 - DNA, 26 bp, Artificial sequence
  SiRNA target sequence
aatattttaatacttttatgaatgct

SEQ ID NO: 206727 - DNA, 26 bp, Artificial sequence
  SiRNA target sequence
atattttaatacttttatgaatgcta

SEQ ID NO: 206728 - DNA, 26 bp, Artificial sequence
  SiRNA target sequence
tattttaatacttttatgaatgctaa

SEQ ID NO: 206729 - DNA, 26 bp, Artificial sequence
  SiRNA target sequence
attttaatacttttatgaatgctaaa

SEQ ID NO: 206730 - DNA, 26 bp, Artificial sequence
  SiRNA target sequence
ttttaatacttttatgaatgctaaaa

SEQ ID NO: 206731 - DNA, 26 bp, Artificial sequence
  SiRNA target sequence
tttaatacttttatgaatgctaaaaa

SEQ ID NO: 206732 - DNA, 26 bp, Artificial sequence
  SiRNA target sequence
ttaatacttttatgaatgctaaaaag

SEQ ID NO: 206733 - DNA, 26 bp, Artificial sequence
  SiRNA target sequence
taatacttttatgaatgctaaaaaga

SEQ ID NO: 206734 - DNA, 26 bp, Artificial sequence
  SiRNA target sequence
aatacttttatgaatgctaaaaagaa

SEQ ID NO: 206735 - DNA, 26 bp, Artificial sequence
  SiRNA target sequence
atacttttatgaatgctaaaaagaac

SEQ ID NO: 206736 - DNA, 26 bp, Artificial sequence
  SiRNA target sequence
tacttttatgaatgctaaaaagaaca

SEQ ID NO: 206737 - DNA, 26 bp, Artificial sequence
  SiRNA target sequence
acttttatgaatgctaaaaagaacat

SEQ ID NO: 206738 - DNA, 26 bp, Artificial sequence
  SiRNA target sequence
cttttatgaatgctaaaaagaacatt

SEQ ID NO: 206739 - DNA, 26 bp, Artificial sequence
  SiRNA target sequence
ttttatgaatgctaaaaagaacattc

SEQ ID NO: 206740 - DNA, 26 bp, Artificial sequence
  SiRNA target sequence
tttatgaatgctaaaaagaacattcc

SEQ ID NO: 206741 - DNA, 26 bp, Artificial sequence
  SiRNA target sequence
ttatgaatgctaaaaagaacattcca

SEQ ID NO: 206742 - DNA, 26 bp, Artificial sequence
  SiRNA target sequence
tatgaatgctaaaaagaacattccac

SEQ ID NO: 206743 - DNA, 26 bp, Artificial sequence
  SiRNA target sequence
atgaatgctaaaaagaacattccact

SEQ ID NO: 206744 - DNA, 26 bp, Artificial sequence
  SiRNA target sequence
tgaatgctaaaaagaacattccactg

SEQ ID NO: 206745 - DNA, 26 bp, Artificial sequence
  SiRNA target sequence
gaatgctaaaaagaacattccactgt

SEQ ID NO: 206746 - DNA, 26 bp, Artificial sequence
  SiRNA target sequence
aatgctaaaaagaacattccactgta

SEQ ID NO: 206747 - DNA, 26 bp, Artificial sequence
  SiRNA target sequence
atgctaaaaagaacattccactgtaa

SEQ ID NO: 206748 - DNA, 26 bp, Artificial sequence
  SiRNA target sequence
tgctaaaaagaacattccactgtaat

SEQ ID NO: 206749 - DNA, 26 bp, Artificial sequence
  SiRNA target sequence
gctaaaaagaacattccactgtaatt

SEQ ID NO: 206750 - DNA, 26 bp, Artificial sequence
  SiRNA target sequence
ctaaaaagaacattccactgtaattt

SEQ ID NO: 206751 - DNA, 26 bp, Artificial sequence
  SiRNA target sequence
taaaaagaacattccactgtaatttt

SEQ ID NO: 206752 - DNA, 26 bp, Artificial sequence
  SiRNA target sequence
aaaaagaacattccactgtaattttc

SEQ ID NO: 206753 - DNA, 26 bp, Artificial sequence
  SiRNA target sequence
aaaagaacattccactgtaattttcg

SEQ ID NO: 206754 - DNA, 26 bp, Artificial sequence
  SiRNA target sequence
aaagaacattccactgtaattttcga

SEQ ID NO: 206755 - DNA, 26 bp, Artificial sequence
  SiRNA target sequence
aagaacattccactgtaattttcgat

SEQ ID NO: 206756 - DNA, 26 bp, Artificial sequence
  SiRNA target sequence
agaacattccactgtaattttcgatc

SEQ ID NO: 206757 - DNA, 26 bp, Artificial sequence
  SiRNA target sequence
gaacattccactgtaattttcgatcg

SEQ ID NO: 206758 - DNA, 26 bp, Artificial sequence
  SiRNA target sequence
aacattccactgtaattttcgatcgt

SEQ ID NO: 206759 - DNA, 26 bp, Artificial sequence
  SiRNA target sequence
acattccactgtaattttcgatcgta

SEQ ID NO: 206760 - DNA, 26 bp, Artificial sequence
  SiRNA target sequence
cattccactgtaattttcgatcgtat

SEQ ID NO: 206761 - DNA, 26 bp, Artificial sequence
  SiRNA target sequence
attccactgtaattttcgatcgtata

SEQ ID NO: 206762 - DNA, 26 bp, Artificial sequence
  SiRNA target sequence
ttccactgtaattttcgatcgtataa

SEQ ID NO: 206763 - DNA, 26 bp, Artificial sequence
  SiRNA target sequence
tccactgtaattttcgatcgtataaa

SEQ ID NO: 206764 - DNA, 26 bp, Artificial sequence
  SiRNA target sequence
ccactgtaattttcgatcgtataaat

SEQ ID NO: 206765 - DNA, 26 bp, Artificial sequence
  SiRNA target sequence
cactgtaattttcgatcgtataaatg

SEQ ID NO: 206766 - DNA, 26 bp, Artificial sequence
  SiRNA target sequence
actgtaattttcgatcgtataaatgt

SEQ ID NO: 206767 - DNA, 26 bp, Artificial sequence
  SiRNA target sequence
ctgtaattttcgatcgtataaatgta

SEQ ID NO: 206768 - DNA, 26 bp, Artificial sequence
  SiRNA target sequence
tgtaattttcgatcgtataaatgtac

SEQ ID NO: 206769 - DNA, 26 bp, Artificial sequence
  SiRNA target sequence
gtaattttcgatcgtataaatgtacg

SEQ ID NO: 206770 - DNA, 26 bp, Artificial sequence
  SiRNA target sequence
taattttcgatcgtataaatgtacga

SEQ ID NO: 206771 - DNA, 26 bp, Artificial sequence
  SiRNA target sequence
aattttcgatcgtataaatgtacgac

SEQ ID NO: 206772 - DNA, 26 bp, Artificial sequence
  SiRNA target sequence
attttcgatcgtataaatgtacgaca

SEQ ID NO: 206773 - DNA, 26 bp, Artificial sequence
  SiRNA target sequence
ttttcgatcgtataaatgtacgacat

SEQ ID NO: 206774 - DNA, 26 bp, Artificial sequence
  SiRNA target sequence
tttcgatcgtataaatgtacgacatt

SEQ ID NO: 206775 - DNA, 26 bp, Artificial sequence
  SiRNA target sequence
ttcgatcgtataaatgtacgacattt

SEQ ID NO: 206776 - DNA, 26 bp, Artificial sequence
  SiRNA target sequence
tcgatcgtataaatgtacgacatttt

SEQ ID NO: 206777 - DNA, 26 bp, Artificial sequence
  SiRNA target sequence
cgatcgtataaatgtacgacattttt

SEQ ID NO: 206778 - DNA, 26 bp, Artificial sequence
  SiRNA target sequence
gatcgtataaatgtacgacatttttt

SEQ ID NO: 206779 - DNA, 26 bp, Artificial sequence
  SiRNA target sequence
atcgtataaatgtacgacattttttt

SEQ ID NO: 206780 - DNA, 26 bp, Artificial sequence
  SiRNA target sequence
tcgtataaatgtacgacattttttta

SEQ ID NO: 206781 - DNA, 26 bp, Artificial sequence
  SiRNA target sequence
cgtataaatgtacgacatttttttaa

SEQ ID NO: 206782 - DNA, 26 bp, Artificial sequence
  SiRNA target sequence
gtataaatgtacgacatttttttaaa

SEQ ID NO: 206783 - DNA, 26 bp, Artificial sequence
  SiRNA target sequence
tataaatgtacgacatttttttaaaa

SEQ ID NO: 206784 - DNA, 26 bp, Artificial sequence
  SiRNA target sequence
ataaatgtacgacatttttttaaaaa

SEQ ID NO: 206785 - DNA, 26 bp, Artificial sequence
  SiRNA target sequence
taaatgtacgacatttttttaaaaaa

SEQ ID NO: 206786 - DNA, 26 bp, Artificial sequence
  SiRNA target sequence
aaatgtacgacatttttttaaaaaat

SEQ ID NO: 206787 - DNA, 26 bp, Artificial sequence
  SiRNA target sequence
aatgtacgacatttttttaaaaaata

SEQ ID NO: 206788 - DNA, 26 bp, Artificial sequence
  SiRNA target sequence
atgtacgacatttttttaaaaaatac

SEQ ID NO: 206789 - DNA, 26 bp, Artificial sequence
  SiRNA target sequence
tgtacgacatttttttaaaaaataca

SEQ ID NO: 206790 - DNA, 26 bp, Artificial sequence
  SiRNA target sequence
gtacgacatttttttaaaaaatacag

SEQ ID NO: 206791 - DNA, 26 bp, Artificial sequence
  SiRNA target sequence
tacgacatttttttaaaaaatacaga

SEQ ID NO: 206792 - DNA, 26 bp, Artificial sequence
  SiRNA target sequence
acgacatttttttaaaaaatacagaa

SEQ ID NO: 206793 - DNA, 26 bp, Artificial sequence
  SiRNA target sequence
cgacatttttttaaaaaatacagaaa

SEQ ID NO: 206794 - DNA, 26 bp, Artificial sequence
  SiRNA target sequence
gacatttttttaaaaaatacagaaat

SEQ ID NO: 206795 - DNA, 26 bp, Artificial sequence
  SiRNA target sequence
acatttttttaaaaaatacagaaatc

SEQ ID NO: 206796 - DNA, 26 bp, Artificial sequence
  SiRNA target sequence
catttttttaaaaaatacagaaatcc

SEQ ID NO: 206797 - DNA, 26 bp, Artificial sequence
  SiRNA target sequence
atttttttaaaaaatacagaaatcca

SEQ ID NO: 206798 - DNA, 26 bp, Artificial sequence
  SiRNA target sequence
tttttttaaaaaatacagaaatccat

SEQ ID NO: 206799 - DNA, 26 bp, Artificial sequence
  SiRNA target sequence
ttttttaaaaaatacagaaatccatg

SEQ ID NO: 206800 - DNA, 26 bp, Artificial sequence
  SiRNA target sequence
tttttaaaaaatacagaaatccatga

SEQ ID NO: 206801 - DNA, 26 bp, Artificial sequence
  SiRNA target sequence
ttttaaaaaatacagaaatccatgaa

SEQ ID NO: 206802 - DNA, 26 bp, Artificial sequence
  SiRNA target sequence
tttaaaaaatacagaaatccatgaaa

SEQ ID NO: 206803 - DNA, 26 bp, Artificial sequence
  SiRNA target sequence
ttaaaaaatacagaaatccatgaaaa

SEQ ID NO: 206804 - DNA, 26 bp, Artificial sequence
  SiRNA target sequence
taaaaaatacagaaatccatgaaaaa

SEQ ID NO: 206805 - DNA, 26 bp, Artificial sequence
  SiRNA target sequence
aaaaaatacagaaatccatgaaaaag

SEQ ID NO: 206806 - DNA, 26 bp, Artificial sequence
  SiRNA target sequence
aaaaatacagaaatccatgaaaaagc

SEQ ID NO: 206807 - DNA, 26 bp, Artificial sequence
  SiRNA target sequence
aaaatacagaaatccatgaaaaagca

SEQ ID NO: 206808 - DNA, 26 bp, Artificial sequence
  SiRNA target sequence
aaatacagaaatccatgaaaaagcaa

SEQ ID NO: 206809 - DNA, 26 bp, Artificial sequence
  SiRNA target sequence
aatacagaaatccatgaaaaagcaag

SEQ ID NO: 206810 - DNA, 26 bp, Artificial sequence
  SiRNA target sequence
atacagaaatccatgaaaaagcaagt

SEQ ID NO: 206811 - DNA, 26 bp, Artificial sequence
  SiRNA target sequence
tacagaaatccatgaaaaagcaagtc

SEQ ID NO: 206812 - DNA, 26 bp, Artificial sequence
  SiRNA target sequence
acagaaatccatgaaaaagcaagtcc

SEQ ID NO: 206813 - DNA, 26 bp, Artificial sequence
  SiRNA target sequence
cagaaatccatgaaaaagcaagtcct

SEQ ID NO: 206814 - DNA, 26 bp, Artificial sequence
  SiRNA target sequence
agaaatccatgaaaaagcaagtcctt

SEQ ID NO: 206815 - DNA, 26 bp, Artificial sequence
  SiRNA target sequence
gaaatccatgaaaaagcaagtccttc

SEQ ID NO: 206816 - DNA, 26 bp, Artificial sequence
  SiRNA target sequence
aaatccatgaaaaagcaagtccttca

SEQ ID NO: 206817 - DNA, 26 bp, Artificial sequence
  SiRNA target sequence
aatccatgaaaaagcaagtccttcaa

SEQ ID NO: 206818 - DNA, 26 bp, Artificial sequence
  SiRNA target sequence
atccatgaaaaagcaagtccttcaat

SEQ ID NO: 206819 - DNA, 26 bp, Artificial sequence
  SiRNA target sequence
tccatgaaaaagcaagtccttcaatg

SEQ ID NO: 206820 - DNA, 26 bp, Artificial sequence
  SiRNA target sequence
ccatgaaaaagcaagtccttcaatgg

SEQ ID NO: 206821 - DNA, 26 bp, Artificial sequence
  SiRNA target sequence
catgaaaaagcaagtccttcaatggc

SEQ ID NO: 206822 - DNA, 26 bp, Artificial sequence
  SiRNA target sequence
atgaaaaagcaagtccttcaatggca

SEQ ID NO: 206823 - DNA, 26 bp, Artificial sequence
  SiRNA target sequence
tgaaaaagcaagtccttcaatggcag

SEQ ID NO: 206824 - DNA, 26 bp, Artificial sequence
  SiRNA target sequence
gaaaaagcaagtccttcaatggcaga

SEQ ID NO: 206825 - DNA, 26 bp, Artificial sequence
  SiRNA target sequence
aaaaagcaagtccttcaatggcagaa

SEQ ID NO: 206826 - DNA, 26 bp, Artificial sequence
  SiRNA target sequence
aaaagcaagtccttcaatggcagaat

SEQ ID NO: 206827 - DNA, 26 bp, Artificial sequence
  SiRNA target sequence
aaagcaagtccttcaatggcagaatt

SEQ ID NO: 206828 - DNA, 26 bp, Artificial sequence
  SiRNA target sequence
aagcaagtccttcaatggcagaattg

SEQ ID NO: 206829 - DNA, 26 bp, Artificial sequence
  SiRNA target sequence
agcaagtccttcaatggcagaattgt

SEQ ID NO: 206830 - DNA, 26 bp, Artificial sequence
  SiRNA target sequence
gcaagtccttcaatggcagaattgta

SEQ ID NO: 206831 - DNA, 26 bp, Artificial sequence
  SiRNA target sequence
caagtccttcaatggcagaattgtag

SEQ ID NO: 206832 - DNA, 26 bp, Artificial sequence
  SiRNA target sequence
aagtccttcaatggcagaattgtaga

SEQ ID NO: 206833 - DNA, 26 bp, Artificial sequence
  SiRNA target sequence
agtccttcaatggcagaattgtagat

SEQ ID NO: 206834 - DNA, 26 bp, Artificial sequence
  SiRNA target sequence
gtccttcaatggcagaattgtagatt

SEQ ID NO: 206835 - DNA, 26 bp, Artificial sequence
  SiRNA target sequence
tccttcaatggcagaattgtagattg

SEQ ID NO: 206836 - DNA, 26 bp, Artificial sequence
  SiRNA target sequence
ccttcaatggcagaattgtagattga

SEQ ID NO: 206837 - DNA, 26 bp, Artificial sequence
  SiRNA target sequence
cttcaatggcagaattgtagattgat

SEQ ID NO: 206838 - DNA, 26 bp, Artificial sequence
  SiRNA target sequence
ttcaatggcagaattgtagattgatg

SEQ ID NO: 206839 - DNA, 26 bp, Artificial sequence
  SiRNA target sequence
tcaatggcagaattgtagattgatgc

SEQ ID NO: 206840 - DNA, 26 bp, Artificial sequence
  SiRNA target sequence
caatggcagaattgtagattgatgct

SEQ ID NO: 206841 - DNA, 26 bp, Artificial sequence
  SiRNA target sequence
aatggcagaattgtagattgatgctc

SEQ ID NO: 206842 - DNA, 26 bp, Artificial sequence
  SiRNA target sequence
atggcagaattgtagattgatgctcc

SEQ ID NO: 206843 - DNA, 26 bp, Artificial sequence
  SiRNA target sequence
tggcagaattgtagattgatgctccc

SEQ ID NO: 206844 - DNA, 26 bp, Artificial sequence
  SiRNA target sequence
ggcagaattgtagattgatgctccca

SEQ ID NO: 206845 - DNA, 26 bp, Artificial sequence
  SiRNA target sequence
gcagaattgtagattgatgctcccat

SEQ ID NO: 206846 - DNA, 26 bp, Artificial sequence
  SiRNA target sequence
cagaattgtagattgatgctcccata

SEQ ID NO: 206847 - DNA, 26 bp, Artificial sequence
  SiRNA target sequence
agaattgtagattgatgctcccataa

SEQ ID NO: 206848 - DNA, 26 bp, Artificial sequence
  SiRNA target sequence
gaattgtagattgatgctcccataac

SEQ ID NO: 206849 - DNA, 26 bp, Artificial sequence
  SiRNA target sequence
aattgtagattgatgctcccataacg

SEQ ID NO: 206850 - DNA, 26 bp, Artificial sequence
  SiRNA target sequence
attgtagattgatgctcccataacga

SEQ ID NO: 206851 - DNA, 26 bp, Artificial sequence
  SiRNA target sequence
ttgtagattgatgctcccataacgat

SEQ ID NO: 206852 - DNA, 26 bp, Artificial sequence
  SiRNA target sequence
tgtagattgatgctcccataacgatt

SEQ ID NO: 206853 - DNA, 26 bp, Artificial sequence
  SiRNA target sequence
gtagattgatgctcccataacgatta

SEQ ID NO: 206854 - DNA, 26 bp, Artificial sequence
  SiRNA target sequence
tagattgatgctcccataacgattat

SEQ ID NO: 206855 - DNA, 26 bp, Artificial sequence
  SiRNA target sequence
agattgatgctcccataacgattatt

SEQ ID NO: 206856 - DNA, 26 bp, Artificial sequence
  SiRNA target sequence
gattgatgctcccataacgattattg

SEQ ID NO: 206857 - DNA, 26 bp, Artificial sequence
  SiRNA target sequence
attgatgctcccataacgattattga

SEQ ID NO: 206858 - DNA, 26 bp, Artificial sequence
  SiRNA target sequence
ttgatgctcccataacgattattgac

SEQ ID NO: 206859 - DNA, 26 bp, Artificial sequence
  SiRNA target sequence
tgatgctcccataacgattattgacc

SEQ ID NO: 206860 - DNA, 26 bp, Artificial sequence
  SiRNA target sequence
gatgctcccataacgattattgaccc

SEQ ID NO: 206861 - DNA, 26 bp, Artificial sequence
  SiRNA target sequence
atgctcccataacgattattgacccc

SEQ ID NO: 206862 - DNA, 26 bp, Artificial sequence
  SiRNA target sequence
tgctcccataacgattattgacccca

SEQ ID NO: 206863 - DNA, 26 bp, Artificial sequence
  SiRNA target sequence
gctcccataacgattattgaccccaa

SEQ ID NO: 206864 - DNA, 26 bp, Artificial sequence
  SiRNA target sequence
ctcccataacgattattgaccccaac

SEQ ID NO: 206865 - DNA, 26 bp, Artificial sequence
  SiRNA target sequence
tcccataacgattattgaccccaaca

SEQ ID NO: 206866 - DNA, 26 bp, Artificial sequence
  SiRNA target sequence
cccataacgattattgaccccaacaa

SEQ ID NO: 206867 - DNA, 26 bp, Artificial sequence
  SiRNA target sequence
ccataacgattattgaccccaacaac

SEQ ID NO: 206868 - DNA, 26 bp, Artificial sequence
  SiRNA target sequence
cataacgattattgaccccaacaaca

SEQ ID NO: 206869 - DNA, 26 bp, Artificial sequence
  SiRNA target sequence
ataacgattattgaccccaacaacaa

SEQ ID NO: 206870 - DNA, 26 bp, Artificial sequence
  SiRNA target sequence
taacgattattgaccccaacaacaag

SEQ ID NO: 206871 - DNA, 26 bp, Artificial sequence
  SiRNA target sequence
aacgattattgaccccaacaacaaga

SEQ ID NO: 206872 - DNA, 26 bp, Artificial sequence
  SiRNA target sequence
acgattattgaccccaacaacaagaa

SEQ ID NO: 206873 - DNA, 26 bp, Artificial sequence
  SiRNA target sequence
cgattattgaccccaacaacaagaat

SEQ ID NO: 206874 - DNA, 26 bp, Artificial sequence
  SiRNA target sequence
gattattgaccccaacaacaagaata

SEQ ID NO: 206875 - DNA, 26 bp, Artificial sequence
  SiRNA target sequence
attattgaccccaacaacaagaataa

SEQ ID NO: 206876 - DNA, 26 bp, Artificial sequence
  SiRNA target sequence
ttattgaccccaacaacaagaataaa

SEQ ID NO: 206877 - DNA, 26 bp, Artificial sequence
  SiRNA target sequence
tattgaccccaacaacaagaataaag

SEQ ID NO: 206878 - DNA, 26 bp, Artificial sequence
  SiRNA target sequence
attgaccccaacaacaagaataaagg

SEQ ID NO: 206879 - DNA, 26 bp, Artificial sequence
  SiRNA target sequence
ttgaccccaacaacaagaataaaggt

SEQ ID NO: 206880 - DNA, 26 bp, Artificial sequence
  SiRNA target sequence
tgaccccaacaacaagaataaaggtg

SEQ ID NO: 206881 - DNA, 26 bp, Artificial sequence
  SiRNA target sequence
gaccccaacaacaagaataaaggtgt

SEQ ID NO: 206882 - DNA, 26 bp, Artificial sequence
  SiRNA target sequence
accccaacaacaagaataaaggtgtt

SEQ ID NO: 206883 - DNA, 26 bp, Artificial sequence
  SiRNA target sequence
ccccaacaacaagaataaaggtgtta

SEQ ID NO: 206884 - DNA, 26 bp, Artificial sequence
  SiRNA target sequence
cccaacaacaagaataaaggtgttaa

SEQ ID NO: 206885 - DNA, 26 bp, Artificial sequence
  SiRNA target sequence
ccaacaacaagaataaaggtgttaag

SEQ ID NO: 206886 - DNA, 26 bp, Artificial sequence
  SiRNA target sequence
caacaacaagaataaaggtgttaaga

SEQ ID NO: 206887 - DNA, 26 bp, Artificial sequence
  SiRNA target sequence
aacaacaagaataaaggtgttaagag

SEQ ID NO: 206888 - DNA, 26 bp, Artificial sequence
  SiRNA target sequence
acaacaagaataaaggtgttaagagt

SEQ ID NO: 206889 - DNA, 26 bp, Artificial sequence
  SiRNA target sequence
caacaagaataaaggtgttaagagtc

SEQ ID NO: 206890 - DNA, 26 bp, Artificial sequence
  SiRNA target sequence
aacaagaataaaggtgttaagagtcc

SEQ ID NO: 206891 - DNA, 26 bp, Artificial sequence
  SiRNA target sequence
acaagaataaaggtgttaagagtccc

SEQ ID NO: 206892 - DNA, 26 bp, Artificial sequence
  SiRNA target sequence
caagaataaaggtgttaagagtccca

SEQ ID NO: 206893 - DNA, 26 bp, Artificial sequence
  SiRNA target sequence
aagaataaaggtgttaagagtcccat

SEQ ID NO: 206894 - DNA, 26 bp, Artificial sequence
  SiRNA target sequence
agaataaaggtgttaagagtcccata

SEQ ID NO: 206895 - DNA, 26 bp, Artificial sequence
  SiRNA target sequence
gaataaaggtgttaagagtcccatag

SEQ ID NO: 206896 - DNA, 26 bp, Artificial sequence
  SiRNA target sequence
aataaaggtgttaagagtcccatagt

SEQ ID NO: 206897 - DNA, 26 bp, Artificial sequence
  SiRNA target sequence
ataaaggtgttaagagtcccatagta

SEQ ID NO: 206898 - DNA, 26 bp, Artificial sequence
  SiRNA target sequence
taaaggtgttaagagtcccatagtaa

SEQ ID NO: 206899 - DNA, 26 bp, Artificial sequence
  SiRNA target sequence
aaaggtgttaagagtcccatagtaat

SEQ ID NO: 206900 - DNA, 26 bp, Artificial sequence
  SiRNA target sequence
aaggtgttaagagtcccatagtaatc

SEQ ID NO: 206901 - DNA, 26 bp, Artificial sequence
  SiRNA target sequence
aggtgttaagagtcccatagtaatcc

SEQ ID NO: 206902 - DNA, 26 bp, Artificial sequence
  SiRNA target sequence
ggtgttaagagtcccatagtaatcca

SEQ ID NO: 206903 - DNA, 26 bp, Artificial sequence
  SiRNA target sequence
gtgttaagagtcccatagtaatccat

SEQ ID NO: 206904 - DNA, 26 bp, Artificial sequence
  SiRNA target sequence
tgttaagagtcccatagtaatccatc

SEQ ID NO: 206905 - DNA, 26 bp, Artificial sequence
  SiRNA target sequence
gttaagagtcccatagtaatccatcc

SEQ ID NO: 206906 - DNA, 26 bp, Artificial sequence
  SiRNA target sequence
ttaagagtcccatagtaatccatcca

SEQ ID NO: 206907 - DNA, 26 bp, Artificial sequence
  SiRNA target sequence
taagagtcccatagtaatccatccac

SEQ ID NO: 206908 - DNA, 26 bp, Artificial sequence
  SiRNA target sequence
aagagtcccatagtaatccatccact

SEQ ID NO: 206909 - DNA, 26 bp, Artificial sequence
  SiRNA target sequence
agagtcccatagtaatccatccacta

SEQ ID NO: 206910 - DNA, 26 bp, Artificial sequence
  SiRNA target sequence
gagtcccatagtaatccatccactac

SEQ ID NO: 206911 - DNA, 26 bp, Artificial sequence
  SiRNA target sequence
agtcccatagtaatccatccactact

SEQ ID NO: 206912 - DNA, 26 bp, Artificial sequence
  SiRNA target sequence
gtcccatagtaatccatccactactt

SEQ ID NO: 206913 - DNA, 26 bp, Artificial sequence
  SiRNA target sequence
tcccatagtaatccatccactacttt

SEQ ID NO: 206914 - DNA, 26 bp, Artificial sequence
  SiRNA target sequence
cccatagtaatccatccactactttc

SEQ ID NO: 206915 - DNA, 26 bp, Artificial sequence
  SiRNA target sequence
ccatagtaatccatccactactttct

SEQ ID NO: 206916 - DNA, 26 bp, Artificial sequence
  SiRNA target sequence
catagtaatccatccactactttcta

SEQ ID NO: 206917 - DNA, 26 bp, Artificial sequence
  SiRNA target sequence
atagtaatccatccactactttctac

SEQ ID NO: 206918 - DNA, 26 bp, Artificial sequence
  SiRNA target sequence
tagtaatccatccactactttctact

SEQ ID NO: 206919 - DNA, 26 bp, Artificial sequence
  SiRNA target sequence
agtaatccatccactactttctacta

SEQ ID NO: 206920 - DNA, 26 bp, Artificial sequence
  SiRNA target sequence
gtaatccatccactactttctactaa

SEQ ID NO: 206921 - DNA, 26 bp, Artificial sequence
  SiRNA target sequence
taatccatccactactttctactaaa

SEQ ID NO: 206922 - DNA, 26 bp, Artificial sequence
  SiRNA target sequence
aatccatccactactttctactaaag

SEQ ID NO: 206923 - DNA, 26 bp, Artificial sequence
  SiRNA target sequence
atccatccactactttctactaaagt

SEQ ID NO: 206924 - DNA, 26 bp, Artificial sequence
  SiRNA target sequence
tccatccactactttctactaaagta

SEQ ID NO: 206925 - DNA, 26 bp, Artificial sequence
  SiRNA target sequence
ccatccactactttctactaaagtag

SEQ ID NO: 206926 - DNA, 26 bp, Artificial sequence
  SiRNA target sequence
catccactactttctactaaagtaga

SEQ ID NO: 206927 - DNA, 26 bp, Artificial sequence
  SiRNA target sequence
atccactactttctactaaagtagaa

SEQ ID NO: 206928 - DNA, 26 bp, Artificial sequence
  SiRNA target sequence
tccactactttctactaaagtagaaa

SEQ ID NO: 206929 - DNA, 26 bp, Artificial sequence
  SiRNA target sequence
ccactactttctactaaagtagaaaa

SEQ ID NO: 206930 - DNA, 26 bp, Artificial sequence
  SiRNA target sequence
cactactttctactaaagtagaaaat

SEQ ID NO: 206931 - DNA, 26 bp, Artificial sequence
  SiRNA target sequence
actactttctactaaagtagaaaatg

SEQ ID NO: 206932 - DNA, 26 bp, Artificial sequence
  SiRNA target sequence
ctactttctactaaagtagaaaatgc

SEQ ID NO: 206933 - DNA, 26 bp, Artificial sequence
  SiRNA target sequence
tactttctactaaagtagaaaatgct

SEQ ID NO: 206934 - DNA, 26 bp, Artificial sequence
  SiRNA target sequence
actttctactaaagtagaaaatgctg

SEQ ID NO: 206935 - DNA, 26 bp, Artificial sequence
  SiRNA target sequence
ctttctactaaagtagaaaatgctga

SEQ ID NO: 206936 - DNA, 26 bp, Artificial sequence
  SiRNA target sequence
tttctactaaagtagaaaatgctgac

SEQ ID NO: 206937 - DNA, 26 bp, Artificial sequence
  SiRNA target sequence
ttctactaaagtagaaaatgctgaca

SEQ ID NO: 206938 - DNA, 26 bp, Artificial sequence
  SiRNA target sequence
tctactaaagtagaaaatgctgacaa

SEQ ID NO: 206939 - DNA, 26 bp, Artificial sequence
  SiRNA target sequence
ctactaaagtagaaaatgctgacaaa

SEQ ID NO: 206940 - DNA, 26 bp, Artificial sequence
  SiRNA target sequence
tactaaagtagaaaatgctgacaaat

SEQ ID NO: 206941 - DNA, 26 bp, Artificial sequence
  SiRNA target sequence
actaaagtagaaaatgctgacaaatt

SEQ ID NO: 206942 - DNA, 26 bp, Artificial sequence
  SiRNA target sequence
ctaaagtagaaaatgctgacaaatta

SEQ ID NO: 206943 - DNA, 26 bp, Artificial sequence
  SiRNA target sequence
taaagtagaaaatgctgacaaattaa

SEQ ID NO: 206944 - DNA, 26 bp, Artificial sequence
  SiRNA target sequence
aaagtagaaaatgctgacaaattaag

SEQ ID NO: 206945 - DNA, 26 bp, Artificial sequence
  SiRNA target sequence
aagtagaaaatgctgacaaattaagt

SEQ ID NO: 206946 - DNA, 26 bp, Artificial sequence
  SiRNA target sequence
agtagaaaatgctgacaaattaagtg

SEQ ID NO: 206947 - DNA, 26 bp, Artificial sequence
  SiRNA target sequence
gtagaaaatgctgacaaattaagtgt

SEQ ID NO: 206948 - DNA, 26 bp, Artificial sequence
  SiRNA target sequence
tagaaaatgctgacaaattaagtgtt

SEQ ID NO: 206949 - DNA, 26 bp, Artificial sequence
  SiRNA target sequence
agaaaatgctgacaaattaagtgtta

SEQ ID NO: 206950 - DNA, 26 bp, Artificial sequence
  SiRNA target sequence
gaaaatgctgacaaattaagtgttat

SEQ ID NO: 206951 - DNA, 26 bp, Artificial sequence
  SiRNA target sequence
aaaatgctgacaaattaagtgttatt

SEQ ID NO: 206952 - DNA, 26 bp, Artificial sequence
  SiRNA target sequence
aaatgctgacaaattaagtgttatta

SEQ ID NO: 206953 - DNA, 26 bp, Artificial sequence
  SiRNA target sequence
aatgctgacaaattaagtgttattac

SEQ ID NO: 206954 - DNA, 26 bp, Artificial sequence
  SiRNA target sequence
atgctgacaaattaagtgttattaca

SEQ ID NO: 206955 - DNA, 26 bp, Artificial sequence
  SiRNA target sequence
tgctgacaaattaagtgttattacag

SEQ ID NO: 206956 - DNA, 26 bp, Artificial sequence
  SiRNA target sequence
gctgacaaattaagtgttattacagt

SEQ ID NO: 206957 - DNA, 26 bp, Artificial sequence
  SiRNA target sequence
ctgacaaattaagtgttattacagta

SEQ ID NO: 206958 - DNA, 26 bp, Artificial sequence
  SiRNA target sequence
tgacaaattaagtgttattacagtaa

SEQ ID NO: 206959 - DNA, 26 bp, Artificial sequence
  SiRNA target sequence
gacaaattaagtgttattacagtaac

SEQ ID NO: 206960 - DNA, 26 bp, Artificial sequence
  SiRNA target sequence
acaaattaagtgttattacagtaact

SEQ ID NO: 206961 - DNA, 26 bp, Artificial sequence
  SiRNA target sequence
caaattaagtgttattacagtaactg

SEQ ID NO: 206962 - DNA, 26 bp, Artificial sequence
  SiRNA target sequence
aaattaagtgttattacagtaactgc

SEQ ID NO: 206963 - DNA, 26 bp, Artificial sequence
  SiRNA target sequence
aattaagtgttattacagtaactgct

SEQ ID NO: 206964 - DNA, 26 bp, Artificial sequence
  SiRNA target sequence
attaagtgttattacagtaactgcta

SEQ ID NO: 206965 - DNA, 26 bp, Artificial sequence
  SiRNA target sequence
ttaagtgttattacagtaactgctac

SEQ ID NO: 206966 - DNA, 26 bp, Artificial sequence
  SiRNA target sequence
taagtgttattacagtaactgctacc

SEQ ID NO: 206967 - DNA, 26 bp, Artificial sequence
  SiRNA target sequence
aagtgttattacagtaactgctacca

SEQ ID NO: 206968 - DNA, 26 bp, Artificial sequence
  SiRNA target sequence
agtgttattacagtaactgctaccaa

SEQ ID NO: 206969 - DNA, 26 bp, Artificial sequence
  SiRNA target sequence
gtgttattacagtaactgctaccaat

SEQ ID NO: 206970 - DNA, 26 bp, Artificial sequence
  SiRNA target sequence
tgttattacagtaactgctaccaata

SEQ ID NO: 206971 - DNA, 26 bp, Artificial sequence
  SiRNA target sequence
gttattacagtaactgctaccaatat

SEQ ID NO: 206972 - DNA, 26 bp, Artificial sequence
  SiRNA target sequence
ttattacagtaactgctaccaatatt

SEQ ID NO: 206973 - DNA, 26 bp, Artificial sequence
  SiRNA target sequence
tattacagtaactgctaccaatattt

SEQ ID NO: 206974 - DNA, 26 bp, Artificial sequence
  SiRNA target sequence
attacagtaactgctaccaatatttg

SEQ ID NO: 206975 - DNA, 26 bp, Artificial sequence
  SiRNA target sequence
ttacagtaactgctaccaatatttga

SEQ ID NO: 206976 - DNA, 26 bp, Artificial sequence
  SiRNA target sequence
tacagtaactgctaccaatatttgat

SEQ ID NO: 206977 - DNA, 26 bp, Artificial sequence
  SiRNA target sequence
acagtaactgctaccaatatttgatc

SEQ ID NO: 206978 - DNA, 26 bp, Artificial sequence
  SiRNA target sequence
cagtaactgctaccaatatttgatct

SEQ ID NO: 206979 - DNA, 26 bp, Artificial sequence
  SiRNA target sequence
agtaactgctaccaatatttgatcta

SEQ ID NO: 206980 - DNA, 26 bp, Artificial sequence
  SiRNA target sequence
gtaactgctaccaatatttgatctat

SEQ ID NO: 206981 - DNA, 26 bp, Artificial sequence
  SiRNA target sequence
taactgctaccaatatttgatctatt

SEQ ID NO: 206982 - DNA, 26 bp, Artificial sequence
  SiRNA target sequence
aactgctaccaatatttgatctattg

SEQ ID NO: 206983 - DNA, 26 bp, Artificial sequence
  SiRNA target sequence
actgctaccaatatttgatctattgt

SEQ ID NO: 206984 - DNA, 26 bp, Artificial sequence
  SiRNA target sequence
ctgctaccaatatttgatctattgta

SEQ ID NO: 206985 - DNA, 26 bp, Artificial sequence
  SiRNA target sequence
tgctaccaatatttgatctattgtat

SEQ ID NO: 206986 - DNA, 26 bp, Artificial sequence
  SiRNA target sequence
gctaccaatatttgatctattgtatt

SEQ ID NO: 206987 - DNA, 26 bp, Artificial sequence
  SiRNA target sequence
ctaccaatatttgatctattgtatta

SEQ ID NO: 206988 - DNA, 26 bp, Artificial sequence
  SiRNA target sequence
taccaatatttgatctattgtattaa

SEQ ID NO: 206989 - DNA, 26 bp, Artificial sequence
  SiRNA target sequence
accaatatttgatctattgtattaaa

SEQ ID NO: 206990 - DNA, 26 bp, Artificial sequence
  SiRNA target sequence
ccaatatttgatctattgtattaaat

SEQ ID NO: 206991 - DNA, 26 bp, Artificial sequence
  SiRNA target sequence
caatatttgatctattgtattaaatt

SEQ ID NO: 206992 - DNA, 26 bp, Artificial sequence
  SiRNA target sequence
aatatttgatctattgtattaaattt

SEQ ID NO: 206993 - DNA, 26 bp, Artificial sequence
  SiRNA target sequence
atatttgatctattgtattaaatttg

SEQ ID NO: 206994 - DNA, 26 bp, Artificial sequence
  SiRNA target sequence
tatttgatctattgtattaaatttgc

SEQ ID NO: 206995 - DNA, 26 bp, Artificial sequence
  SiRNA target sequence
atttgatctattgtattaaatttgcc

SEQ ID NO: 206996 - DNA, 26 bp, Artificial sequence
  SiRNA target sequence
tttgatctattgtattaaatttgccg

SEQ ID NO: 206997 - DNA, 26 bp, Artificial sequence
  SiRNA target sequence
ttgatctattgtattaaatttgccgg

SEQ ID NO: 206998 - DNA, 26 bp, Artificial sequence
  SiRNA target sequence
tgatctattgtattaaatttgccgga

SEQ ID NO: 206999 - DNA, 26 bp, Artificial sequence
  SiRNA target sequence
gatctattgtattaaatttgccggag

SEQ ID NO: 207000 - DNA, 26 bp, Artificial sequence
  SiRNA target sequence
atctattgtattaaatttgccggagt

SEQ ID NO: 207001 - DNA, 26 bp, Artificial sequence
  SiRNA target sequence
tctattgtattaaatttgccggagta

SEQ ID NO: 207002 - DNA, 26 bp, Artificial sequence
  SiRNA target sequence
ctattgtattaaatttgccggagtat

SEQ ID NO: 207003 - DNA, 26 bp, Artificial sequence
  SiRNA target sequence
tattgtattaaatttgccggagtatt

SEQ ID NO: 207004 - DNA, 26 bp, Artificial sequence
  SiRNA target sequence
attgtattaaatttgccggagtattc

SEQ ID NO: 207005 - DNA, 26 bp, Artificial sequence
  SiRNA target sequence
ttgtattaaatttgccggagtattct

SEQ ID NO: 207006 - DNA, 26 bp, Artificial sequence
  SiRNA target sequence
tgtattaaatttgccggagtattctc

SEQ ID NO: 207007 - DNA, 26 bp, Artificial sequence
  SiRNA target sequence
gtattaaatttgccggagtattctcc

SEQ ID NO: 207008 - DNA, 26 bp, Artificial sequence
  SiRNA target sequence
tattaaatttgccggagtattctcct

SEQ ID NO: 207009 - DNA, 26 bp, Artificial sequence
  SiRNA target sequence
attaaatttgccggagtattctccta

SEQ ID NO: 207010 - DNA, 26 bp, Artificial sequence
  SiRNA target sequence
ttaaatttgccggagtattctcctac

SEQ ID NO: 207011 - DNA, 26 bp, Artificial sequence
  SiRNA target sequence
taaatttgccggagtattctcctacc

SEQ ID NO: 207012 - DNA, 26 bp, Artificial sequence
  SiRNA target sequence
aaatttgccggagtattctcctacct

SEQ ID NO: 207013 - DNA, 26 bp, Artificial sequence
  SiRNA target sequence
aatttgccggagtattctcctacctc

SEQ ID NO: 207014 - DNA, 26 bp, Artificial sequence
  SiRNA target sequence
atttgccggagtattctcctacctct

SEQ ID NO: 207015 - DNA, 26 bp, Artificial sequence
  SiRNA target sequence
tttgccggagtattctcctacctcta

SEQ ID NO: 207016 - DNA, 26 bp, Artificial sequence
  SiRNA target sequence
ttgccggagtattctcctacctctaa

SEQ ID NO: 207017 - DNA, 26 bp, Artificial sequence
  SiRNA target sequence
tgccggagtattctcctacctctaat

SEQ ID NO: 207018 - DNA, 26 bp, Artificial sequence
  SiRNA target sequence
gccggagtattctcctacctctaatc

SEQ ID NO: 207019 - DNA, 26 bp, Artificial sequence
  SiRNA target sequence
ccggagtattctcctacctctaatcc

SEQ ID NO: 207020 - DNA, 26 bp, Artificial sequence
  SiRNA target sequence
cggagtattctcctacctctaatcct

SEQ ID NO: 207021 - DNA, 26 bp, Artificial sequence
  SiRNA target sequence
ggagtattctcctacctctaatccta

SEQ ID NO: 207022 - DNA, 26 bp, Artificial sequence
  SiRNA target sequence
gagtattctcctacctctaatcctaa

SEQ ID NO: 207023 - DNA, 26 bp, Artificial sequence
  SiRNA target sequence
agtattctcctacctctaatcctaaa

SEQ ID NO: 207024 - DNA, 26 bp, Artificial sequence
  SiRNA target sequence
gtattctcctacctctaatcctaaac

SEQ ID NO: 207025 - DNA, 26 bp, Artificial sequence
  SiRNA target sequence
tattctcctacctctaatcctaaact

SEQ ID NO: 207026 - DNA, 26 bp, Artificial sequence
  SiRNA target sequence
attctcctacctctaatcctaaactt

SEQ ID NO: 207027 - DNA, 26 bp, Artificial sequence
  SiRNA target sequence
ttctcctacctctaatcctaaacttt

SEQ ID NO: 207028 - DNA, 26 bp, Artificial sequence
  SiRNA target sequence
tctcctacctctaatcctaaactttt

SEQ ID NO: 207029 - DNA, 26 bp, Artificial sequence
  SiRNA target sequence
ctcctacctctaatcctaaacttttt

SEQ ID NO: 207030 - DNA, 26 bp, Artificial sequence
  SiRNA target sequence
tcctacctctaatcctaaactttttg

SEQ ID NO: 207031 - DNA, 26 bp, Artificial sequence
  SiRNA target sequence
cctacctctaatcctaaactttttga

SEQ ID NO: 207032 - DNA, 26 bp, Artificial sequence
  SiRNA target sequence
ctacctctaatcctaaactttttgac

SEQ ID NO: 207033 - DNA, 26 bp, Artificial sequence
  SiRNA target sequence
tacctctaatcctaaactttttgacg

SEQ ID NO: 207034 - DNA, 26 bp, Artificial sequence
  SiRNA target sequence
acctctaatcctaaactttttgacgc

SEQ ID NO: 207035 - DNA, 26 bp, Artificial sequence
  SiRNA target sequence
cctctaatcctaaactttttgacgca

SEQ ID NO: 207036 - DNA, 26 bp, Artificial sequence
  SiRNA target sequence
ctctaatcctaaactttttgacgcag

SEQ ID NO: 207037 - DNA, 26 bp, Artificial sequence
  SiRNA target sequence
tctaatcctaaactttttgacgcagc

SEQ ID NO: 207038 - DNA, 26 bp, Artificial sequence
  SiRNA target sequence
ctaatcctaaactttttgacgcagct

SEQ ID NO: 207039 - DNA, 26 bp, Artificial sequence
  SiRNA target sequence
taatcctaaactttttgacgcagctt

SEQ ID NO: 207040 - DNA, 26 bp, Artificial sequence
  SiRNA target sequence
aatcctaaactttttgacgcagcttt

SEQ ID NO: 207041 - DNA, 26 bp, Artificial sequence
  SiRNA target sequence
atcctaaactttttgacgcagcttta

SEQ ID NO: 207042 - DNA, 26 bp, Artificial sequence
  SiRNA target sequence
tcctaaactttttgacgcagctttaa

SEQ ID NO: 207043 - DNA, 26 bp, Artificial sequence
  SiRNA target sequence
cctaaactttttgacgcagctttaat

SEQ ID NO: 207044 - DNA, 26 bp, Artificial sequence
  SiRNA target sequence
ctaaactttttgacgcagctttaatt

SEQ ID NO: 207045 - DNA, 26 bp, Artificial sequence
  SiRNA target sequence
taaactttttgacgcagctttaattc

SEQ ID NO: 207046 - DNA, 26 bp, Artificial sequence
  SiRNA target sequence
aaactttttgacgcagctttaattcc

SEQ ID NO: 207047 - DNA, 26 bp, Artificial sequence
  SiRNA target sequence
aactttttgacgcagctttaattcct

SEQ ID NO: 207048 - DNA, 26 bp, Artificial sequence
  SiRNA target sequence
actttttgacgcagctttaattcctg

SEQ ID NO: 207049 - DNA, 26 bp, Artificial sequence
  SiRNA target sequence
ctttttgacgcagctttaattcctgc

SEQ ID NO: 207050 - DNA, 26 bp, Artificial sequence
  SiRNA target sequence
tttttgacgcagctttaattcctgct

SEQ ID NO: 207051 - DNA, 26 bp, Artificial sequence
  SiRNA target sequence
ttttgacgcagctttaattcctgctt

SEQ ID NO: 207052 - DNA, 26 bp, Artificial sequence
  SiRNA target sequence
tttgacgcagctttaattcctgcttt

SEQ ID NO: 207053 - DNA, 26 bp, Artificial sequence
  SiRNA target sequence
ttgacgcagctttaattcctgcttta

SEQ ID NO: 207054 - DNA, 26 bp, Artificial sequence
  SiRNA target sequence
tgacgcagctttaattcctgctttat

SEQ ID NO: 207055 - DNA, 26 bp, Artificial sequence
  SiRNA target sequence
gacgcagctttaattcctgctttata

SEQ ID NO: 207056 - DNA, 26 bp, Artificial sequence
  SiRNA target sequence
acgcagctttaattcctgctttatag

SEQ ID NO: 207057 - DNA, 26 bp, Artificial sequence
  SiRNA target sequence
cgcagctttaattcctgctttataga

SEQ ID NO: 207058 - DNA, 26 bp, Artificial sequence
  SiRNA target sequence
gcagctttaattcctgctttatagac

SEQ ID NO: 207059 - DNA, 26 bp, Artificial sequence
  SiRNA target sequence
cagctttaattcctgctttatagaca

SEQ ID NO: 207060 - DNA, 26 bp, Artificial sequence
  SiRNA target sequence
agctttaattcctgctttatagacag

SEQ ID NO: 207061 - DNA, 26 bp, Artificial sequence
  SiRNA target sequence
gctttaattcctgctttatagacaga

SEQ ID NO: 207062 - DNA, 26 bp, Artificial sequence
  SiRNA target sequence
ctttaattcctgctttatagacagat

SEQ ID NO: 207063 - DNA, 26 bp, Artificial sequence
  SiRNA target sequence
tttaattcctgctttatagacagatt

SEQ ID NO: 207064 - DNA, 26 bp, Artificial sequence
  SiRNA target sequence
ttaattcctgctttatagacagattc

SEQ ID NO: 207065 - DNA, 26 bp, Artificial sequence
  SiRNA target sequence
taattcctgctttatagacagattca

SEQ ID NO: 207066 - DNA, 26 bp, Artificial sequence
  SiRNA target sequence
aattcctgctttatagacagattcaa

SEQ ID NO: 207067 - DNA, 26 bp, Artificial sequence
  SiRNA target sequence
attcctgctttatagacagattcaat

SEQ ID NO: 207068 - DNA, 26 bp, Artificial sequence
  SiRNA target sequence
ttcctgctttatagacagattcaatt

SEQ ID NO: 207069 - DNA, 26 bp, Artificial sequence
  SiRNA target sequence
tcctgctttatagacagattcaatta

SEQ ID NO: 207070 - DNA, 26 bp, Artificial sequence
  SiRNA target sequence
cctgctttatagacagattcaattaa

SEQ ID NO: 207071 - DNA, 26 bp, Artificial sequence
  SiRNA target sequence
ctgctttatagacagattcaattaaa

SEQ ID NO: 207072 - DNA, 26 bp, Artificial sequence
  SiRNA target sequence
tgctttatagacagattcaattaaat

SEQ ID NO: 207073 - DNA, 26 bp, Artificial sequence
  SiRNA target sequence
gctttatagacagattcaattaaatt

SEQ ID NO: 207074 - DNA, 26 bp, Artificial sequence
  SiRNA target sequence
ctttatagacagattcaattaaatta

SEQ ID NO: 207075 - DNA, 26 bp, Artificial sequence
  SiRNA target sequence
tttatagacagattcaattaaattaa

SEQ ID NO: 207076 - DNA, 26 bp, Artificial sequence
  SiRNA target sequence
ttatagacagattcaattaaattaaa

SEQ ID NO: 207077 - DNA, 26 bp, Artificial sequence
  SiRNA target sequence
tatagacagattcaattaaattaaat

SEQ ID NO: 207078 - DNA, 26 bp, Artificial sequence
  SiRNA target sequence
atagacagattcaattaaattaaatg

SEQ ID NO: 207079 - DNA, 26 bp, Artificial sequence
  SiRNA target sequence
tagacagattcaattaaattaaatgt

SEQ ID NO: 207080 - DNA, 26 bp, Artificial sequence
  SiRNA target sequence
agacagattcaattaaattaaatgtt

SEQ ID NO: 207081 - DNA, 26 bp, Artificial sequence
  SiRNA target sequence
gacagattcaattaaattaaatgtta

SEQ ID NO: 207082 - DNA, 26 bp, Artificial sequence
  SiRNA target sequence
acagattcaattaaattaaatgttat

SEQ ID NO: 207083 - DNA, 26 bp, Artificial sequence
  SiRNA target sequence
cagattcaattaaattaaatgttata

SEQ ID NO: 207084 - DNA, 26 bp, Artificial sequence
  SiRNA target sequence
agattcaattaaattaaatgttatat

SEQ ID NO: 207085 - DNA, 26 bp, Artificial sequence
  SiRNA target sequence
gattcaattaaattaaatgttatatt

SEQ ID NO: 207086 - DNA, 26 bp, Artificial sequence
  SiRNA target sequence
attcaattaaattaaatgttatattg

SEQ ID NO: 207087 - DNA, 26 bp, Artificial sequence
  SiRNA target sequence
ttcaattaaattaaatgttatattgt

SEQ ID NO: 207088 - DNA, 26 bp, Artificial sequence
  SiRNA target sequence
tcaattaaattaaatgttatattgta

SEQ ID NO: 207089 - DNA, 26 bp, Artificial sequence
  SiRNA target sequence
caattaaattaaatgttatattgtaa

SEQ ID NO: 207090 - DNA, 26 bp, Artificial sequence
  SiRNA target sequence
aattaaattaaatgttatattgtaaa

SEQ ID NO: 207091 - DNA, 26 bp, Artificial sequence
  SiRNA target sequence
attaaattaaatgttatattgtaaaa

SEQ ID NO: 207092 - DNA, 26 bp, Artificial sequence
  SiRNA target sequence
ttaaattaaatgttatattgtaaaaa

SEQ ID NO: 207093 - DNA, 26 bp, Artificial sequence
  SiRNA target sequence
taaattaaatgttatattgtaaaaaa

SEQ ID NO: 207094 - DNA, 26 bp, Artificial sequence
  SiRNA target sequence
aaattaaatgttatattgtaaaaaaa

SEQ ID NO: 207095 - DNA, 26 bp, Artificial sequence
  SiRNA target sequence
aattaaatgttatattgtaaaaaaag

SEQ ID NO: 207096 - DNA, 26 bp, Artificial sequence
  SiRNA target sequence
attaaatgttatattgtaaaaaaaga

SEQ ID NO: 207097 - DNA, 26 bp, Artificial sequence
  SiRNA target sequence
ttaaatgttatattgtaaaaaaagac

SEQ ID NO: 207098 - DNA, 26 bp, Artificial sequence
  SiRNA target sequence
taaatgttatattgtaaaaaaagact

SEQ ID NO: 207099 - DNA, 26 bp, Artificial sequence
  SiRNA target sequence
aaatgttatattgtaaaaaaagacta

SEQ ID NO: 207100 - DNA, 26 bp, Artificial sequence
  SiRNA target sequence
aatgttatattgtaaaaaaagactat

SEQ ID NO: 207101 - DNA, 26 bp, Artificial sequence
  SiRNA target sequence
atgttatattgtaaaaaaagactatt

SEQ ID NO: 207102 - DNA, 26 bp, Artificial sequence
  SiRNA target sequence
tgttatattgtaaaaaaagactatta

SEQ ID NO: 207103 - DNA, 26 bp, Artificial sequence
  SiRNA target sequence
gttatattgtaaaaaaagactattat

SEQ ID NO: 207104 - DNA, 26 bp, Artificial sequence
  SiRNA target sequence
ttatattgtaaaaaaagactattata

SEQ ID NO: 207105 - DNA, 26 bp, Artificial sequence
  SiRNA target sequence
tatattgtaaaaaaagactattatac

SEQ ID NO: 207106 - DNA, 26 bp, Artificial sequence
  SiRNA target sequence
atattgtaaaaaaagactattataca

SEQ ID NO: 207107 - DNA, 26 bp, Artificial sequence
  SiRNA target sequence
tattgtaaaaaaagactattatacaa

SEQ ID NO: 207108 - DNA, 26 bp, Artificial sequence
  SiRNA target sequence
attgtaaaaaaagactattatacaaa

SEQ ID NO: 207109 - DNA, 26 bp, Artificial sequence
  SiRNA target sequence
ttgtaaaaaaagactattatacaaag

SEQ ID NO: 207110 - DNA, 26 bp, Artificial sequence
  SiRNA target sequence
tgtaaaaaaagactattatacaaagt

SEQ ID NO: 207111 - DNA, 26 bp, Artificial sequence
  SiRNA target sequence
gtaaaaaaagactattatacaaagtg

SEQ ID NO: 207112 - DNA, 26 bp, Artificial sequence
  SiRNA target sequence
taaaaaaagactattatacaaagtga

SEQ ID NO: 207113 - DNA, 26 bp, Artificial sequence
  SiRNA target sequence
aaaaaaagactattatacaaagtgac

SEQ ID NO: 207114 - DNA, 26 bp, Artificial sequence
  SiRNA target sequence
aaaaaagactattatacaaagtgaca

SEQ ID NO: 207115 - DNA, 26 bp, Artificial sequence
  SiRNA target sequence
aaaaagactattatacaaagtgacat

SEQ ID NO: 207116 - DNA, 26 bp, Artificial sequence
  SiRNA target sequence
aaaagactattatacaaagtgacatt

SEQ ID NO: 207117 - DNA, 26 bp, Artificial sequence
  SiRNA target sequence
aaagactattatacaaagtgacatta

SEQ ID NO: 207118 - DNA, 26 bp, Artificial sequence
  SiRNA target sequence
aagactattatacaaagtgacattaa

SEQ ID NO: 207119 - DNA, 26 bp, Artificial sequence
  SiRNA target sequence
agactattatacaaagtgacattaat

SEQ ID NO: 207120 - DNA, 26 bp, Artificial sequence
  SiRNA target sequence
gactattatacaaagtgacattaata

SEQ ID NO: 207121 - DNA, 26 bp, Artificial sequence
  SiRNA target sequence
actattatacaaagtgacattaataa

SEQ ID NO: 207122 - DNA, 26 bp, Artificial sequence
  SiRNA target sequence
ctattatacaaagtgacattaataat

SEQ ID NO: 207123 - DNA, 26 bp, Artificial sequence
  SiRNA target sequence
tattatacaaagtgacattaataatt

SEQ ID NO: 207124 - DNA, 26 bp, Artificial sequence
  SiRNA target sequence
attatacaaagtgacattaataattt

SEQ ID NO: 207125 - DNA, 26 bp, Artificial sequence
  SiRNA target sequence
ttatacaaagtgacattaataatttt

SEQ ID NO: 207126 - DNA, 26 bp, Artificial sequence
  SiRNA target sequence
tatacaaagtgacattaataattttg

SEQ ID NO: 207127 - DNA, 26 bp, Artificial sequence
  SiRNA target sequence
atacaaagtgacattaataattttga

SEQ ID NO: 207128 - DNA, 26 bp, Artificial sequence
  SiRNA target sequence
tacaaagtgacattaataattttgat

SEQ ID NO: 207129 - DNA, 26 bp, Artificial sequence
  SiRNA target sequence
acaaagtgacattaataattttgatt

SEQ ID NO: 207130 - DNA, 26 bp, Artificial sequence
  SiRNA target sequence
caaagtgacattaataattttgattt

SEQ ID NO: 207131 - DNA, 26 bp, Artificial sequence
  SiRNA target sequence
aaagtgacattaataattttgatttc

SEQ ID NO: 207132 - DNA, 26 bp, Artificial sequence
  SiRNA target sequence
aagtgacattaataattttgatttca

SEQ ID NO: 207133 - DNA, 26 bp, Artificial sequence
  SiRNA target sequence
agtgacattaataattttgatttcat

SEQ ID NO: 207134 - DNA, 26 bp, Artificial sequence
  SiRNA target sequence
gtgacattaataattttgatttcatc

SEQ ID NO: 207135 - DNA, 26 bp, Artificial sequence
  SiRNA target sequence
tgacattaataattttgatttcatca

SEQ ID NO: 207136 - DNA, 26 bp, Artificial sequence
  SiRNA target sequence
gacattaataattttgatttcatcat

SEQ ID NO: 207137 - DNA, 26 bp, Artificial sequence
  SiRNA target sequence
acattaataattttgatttcatcatt

SEQ ID NO: 207138 - DNA, 26 bp, Artificial sequence
  SiRNA target sequence
cattaataattttgatttcatcatta

SEQ ID NO: 207139 - DNA, 26 bp, Artificial sequence
  SiRNA target sequence
attaataattttgatttcatcattat

SEQ ID NO: 207140 - DNA, 26 bp, Artificial sequence
  SiRNA target sequence
ttaataattttgatttcatcattata

SEQ ID NO: 207141 - DNA, 26 bp, Artificial sequence
  SiRNA target sequence
taataattttgatttcatcattatac

SEQ ID NO: 207142 - DNA, 26 bp, Artificial sequence
  SiRNA target sequence
aataattttgatttcatcattatact

SEQ ID NO: 207143 - DNA, 26 bp, Artificial sequence
  SiRNA target sequence
ataattttgatttcatcattatacta

SEQ ID NO: 207144 - DNA, 26 bp, Artificial sequence
  SiRNA target sequence
taattttgatttcatcattatactaa

SEQ ID NO: 207145 - DNA, 26 bp, Artificial sequence
  SiRNA target sequence
aattttgatttcatcattatactaat

SEQ ID NO: 207146 - DNA, 26 bp, Artificial sequence
  SiRNA target sequence
attttgatttcatcattatactaata

SEQ ID NO: 207147 - DNA, 26 bp, Artificial sequence
  SiRNA target sequence
ttttgatttcatcattatactaatac

SEQ ID NO: 207148 - DNA, 26 bp, Artificial sequence
  SiRNA target sequence
tttgatttcatcattatactaatacc

SEQ ID NO: 207149 - DNA, 26 bp, Artificial sequence
  SiRNA target sequence
ttgatttcatcattatactaatacct

SEQ ID NO: 207150 - DNA, 26 bp, Artificial sequence
  SiRNA target sequence
tgatttcatcattatactaatacctt

SEQ ID NO: 207151 - DNA, 26 bp, Artificial sequence
  SiRNA target sequence
gatttcatcattatactaataccttc

SEQ ID NO: 207152 - DNA, 26 bp, Artificial sequence
  SiRNA target sequence
atttcatcattatactaataccttcg

SEQ ID NO: 207153 - DNA, 26 bp, Artificial sequence
  SiRNA target sequence
tttcatcattatactaataccttcgg

SEQ ID NO: 207154 - DNA, 26 bp, Artificial sequence
  SiRNA target sequence
ttcatcattatactaataccttcgga

SEQ ID NO: 207155 - DNA, 26 bp, Artificial sequence
  SiRNA target sequence
tcatcattatactaataccttcggag

SEQ ID NO: 207156 - DNA, 26 bp, Artificial sequence
  SiRNA target sequence
catcattatactaataccttcggaga

SEQ ID NO: 207157 - DNA, 26 bp, Artificial sequence
  SiRNA target sequence
atcattatactaataccttcggagaa

SEQ ID NO: 207158 - DNA, 26 bp, Artificial sequence
  SiRNA target sequence
tcattatactaataccttcggagaaa

SEQ ID NO: 207159 - DNA, 26 bp, Artificial sequence
  SiRNA target sequence
cattatactaataccttcggagaaac

SEQ ID NO: 207160 - DNA, 26 bp, Artificial sequence
  SiRNA target sequence
attatactaataccttcggagaaacc

SEQ ID NO: 207161 - DNA, 26 bp, Artificial sequence
  SiRNA target sequence
ttatactaataccttcggagaaacct

SEQ ID NO: 207162 - DNA, 26 bp, Artificial sequence
  SiRNA target sequence
tatactaataccttcggagaaaccta

SEQ ID NO: 207163 - DNA, 26 bp, Artificial sequence
  SiRNA target sequence
atactaataccttcggagaaacctac

SEQ ID NO: 207164 - DNA, 26 bp, Artificial sequence
  SiRNA target sequence
tactaataccttcggagaaacctaca

SEQ ID NO: 207165 - DNA, 26 bp, Artificial sequence
  SiRNA target sequence
actaataccttcggagaaacctacac

SEQ ID NO: 207166 - DNA, 26 bp, Artificial sequence
  SiRNA target sequence
ctaataccttcggagaaacctacact

SEQ ID NO: 207167 - DNA, 26 bp, Artificial sequence
  SiRNA target sequence
taataccttcggagaaacctacacta

SEQ ID NO: 207168 - DNA, 26 bp, Artificial sequence
  SiRNA target sequence
aataccttcggagaaacctacactaa

SEQ ID NO: 207169 - DNA, 26 bp, Artificial sequence
  SiRNA target sequence
ataccttcggagaaacctacactaac

SEQ ID NO: 207170 - DNA, 26 bp, Artificial sequence
  SiRNA target sequence
taccttcggagaaacctacactaact

SEQ ID NO: 207171 - DNA, 26 bp, Artificial sequence
  SiRNA target sequence
accttcggagaaacctacactaactt

SEQ ID NO: 207172 - DNA, 26 bp, Artificial sequence
  SiRNA target sequence
ccttcggagaaacctacactaacttt

SEQ ID NO: 207173 - DNA, 26 bp, Artificial sequence
  SiRNA target sequence
cttcggagaaacctacactaactttt

SEQ ID NO: 207174 - DNA, 26 bp, Artificial sequence
  SiRNA target sequence
ttcggagaaacctacactaacttttt

SEQ ID NO: 207175 - DNA, 26 bp, Artificial sequence
  SiRNA target sequence
tcggagaaacctacactaactttttg

SEQ ID NO: 207176 - DNA, 26 bp, Artificial sequence
  SiRNA target sequence
cggagaaacctacactaactttttgt

SEQ ID NO: 207177 - DNA, 26 bp, Artificial sequence
  SiRNA target sequence
ggagaaacctacactaactttttgtt

SEQ ID NO: 207178 - DNA, 26 bp, Artificial sequence
  SiRNA target sequence
gagaaacctacactaactttttgttt

SEQ ID NO: 207179 - DNA, 26 bp, Artificial sequence
  SiRNA target sequence
agaaacctacactaactttttgtttc

SEQ ID NO: 207180 - DNA, 26 bp, Artificial sequence
  SiRNA target sequence
gaaacctacactaactttttgtttct

SEQ ID NO: 207181 - DNA, 26 bp, Artificial sequence
  SiRNA target sequence
aaacctacactaactttttgtttctt

SEQ ID NO: 207182 - DNA, 26 bp, Artificial sequence
  SiRNA target sequence
aacctacactaactttttgtttcttt

SEQ ID NO: 207183 - DNA, 26 bp, Artificial sequence
  SiRNA target sequence
acctacactaactttttgtttctttt

SEQ ID NO: 207184 - DNA, 26 bp, Artificial sequence
  SiRNA target sequence
cctacactaactttttgtttcttttt

SEQ ID NO: 207185 - DNA, 26 bp, Artificial sequence
  SiRNA target sequence
ctacactaactttttgtttctttttt

SEQ ID NO: 207186 - DNA, 26 bp, Artificial sequence
  SiRNA target sequence
tacactaactttttgtttctttttta

SEQ ID NO: 207187 - DNA, 26 bp, Artificial sequence
  SiRNA target sequence
acactaactttttgtttcttttttat

SEQ ID NO: 207188 - DNA, 26 bp, Artificial sequence
  SiRNA target sequence
cactaactttttgtttcttttttatc

SEQ ID NO: 207189 - DNA, 26 bp, Artificial sequence
  SiRNA target sequence
actaactttttgtttcttttttatcg

SEQ ID NO: 207190 - DNA, 26 bp, Artificial sequence
  SiRNA target sequence
ctaactttttgtttcttttttatcgt

SEQ ID NO: 207191 - DNA, 26 bp, Artificial sequence
  SiRNA target sequence
taactttttgtttcttttttatcgta

SEQ ID NO: 207192 - DNA, 26 bp, Artificial sequence
  SiRNA target sequence
aactttttgtttcttttttatcgtat

SEQ ID NO: 207193 - DNA, 26 bp, Artificial sequence
  SiRNA target sequence
actttttgtttcttttttatcgtatt

SEQ ID NO: 207194 - DNA, 26 bp, Artificial sequence
  SiRNA target sequence
ctttttgtttcttttttatcgtatta

SEQ ID NO: 207195 - DNA, 26 bp, Artificial sequence
  SiRNA target sequence
tttttgtttcttttttatcgtattag

SEQ ID NO: 207196 - DNA, 26 bp, Artificial sequence
  SiRNA target sequence
ttttgtttcttttttatcgtattaga

SEQ ID NO: 207197 - DNA, 26 bp, Artificial sequence
  SiRNA target sequence
tttgtttcttttttatcgtattagaa

SEQ ID NO: 207198 - DNA, 26 bp, Artificial sequence
  SiRNA target sequence
ttgtttcttttttatcgtattagaag

SEQ ID NO: 207199 - DNA, 26 bp, Artificial sequence
  SiRNA target sequence
tgtttcttttttatcgtattagaagg

SEQ ID NO: 207200 - DNA, 26 bp, Artificial sequence
  SiRNA target sequence
gtttcttttttatcgtattagaaggt

SEQ ID NO: 207201 - DNA, 26 bp, Artificial sequence
  SiRNA target sequence
tttcttttttatcgtattagaaggta

SEQ ID NO: 207202 - DNA, 26 bp, Artificial sequence
  SiRNA target sequence
ttcttttttatcgtattagaaggtat

SEQ ID NO: 207203 - DNA, 26 bp, Artificial sequence
  SiRNA target sequence
tcttttttatcgtattagaaggtata

SEQ ID NO: 207204 - DNA, 26 bp, Artificial sequence
  SiRNA target sequence
cttttttatcgtattagaaggtataa

SEQ ID NO: 207205 - DNA, 26 bp, Artificial sequence
  SiRNA target sequence
ttttttatcgtattagaaggtataaa

SEQ ID NO: 207206 - DNA, 26 bp, Artificial sequence
  SiRNA target sequence
tttttatcgtattagaaggtataaat

SEQ ID NO: 207207 - DNA, 26 bp, Artificial sequence
  SiRNA target sequence
ttttatcgtattagaaggtataaata

SEQ ID NO: 207208 - DNA, 26 bp, Artificial sequence
  SiRNA target sequence
tttatcgtattagaaggtataaatat

SEQ ID NO: 207209 - DNA, 26 bp, Artificial sequence
  SiRNA target sequence
ttatcgtattagaaggtataaatatt

SEQ ID NO: 207210 - DNA, 26 bp, Artificial sequence
  SiRNA target sequence
tatcgtattagaaggtataaatattg

SEQ ID NO: 207211 - DNA, 26 bp, Artificial sequence
  SiRNA target sequence
atcgtattagaaggtataaatattgg

SEQ ID NO: 207212 - DNA, 26 bp, Artificial sequence
  SiRNA target sequence
tcgtattagaaggtataaatattggt

SEQ ID NO: 207213 - DNA, 26 bp, Artificial sequence
  SiRNA target sequence
cgtattagaaggtataaatattggta

SEQ ID NO: 207214 - DNA, 26 bp, Artificial sequence
  SiRNA target sequence
gtattagaaggtataaatattggtac

SEQ ID NO: 207215 - DNA, 26 bp, Artificial sequence
  SiRNA target sequence
tattagaaggtataaatattggtaca

SEQ ID NO: 207216 - DNA, 26 bp, Artificial sequence
  SiRNA target sequence
attagaaggtataaatattggtacac

SEQ ID NO: 207217 - DNA, 26 bp, Artificial sequence
  SiRNA target sequence
ttagaaggtataaatattggtacact

SEQ ID NO: 207218 - DNA, 26 bp, Artificial sequence
  SiRNA target sequence
tagaaggtataaatattggtacactc

SEQ ID NO: 207219 - DNA, 26 bp, Artificial sequence
  SiRNA target sequence
agaaggtataaatattggtacactca

SEQ ID NO: 207220 - DNA, 26 bp, Artificial sequence
  SiRNA target sequence
gaaggtataaatattggtacactcat

SEQ ID NO: 207221 - DNA, 26 bp, Artificial sequence
  SiRNA target sequence
aaggtataaatattggtacactcatt

SEQ ID NO: 207222 - DNA, 26 bp, Artificial sequence
  SiRNA target sequence
aggtataaatattggtacactcatta

SEQ ID NO: 207223 - DNA, 26 bp, Artificial sequence
  SiRNA target sequence
ggtataaatattggtacactcattat

SEQ ID NO: 207224 - DNA, 26 bp, Artificial sequence
  SiRNA target sequence
gtataaatattggtacactcattatt

SEQ ID NO: 207225 - DNA, 26 bp, Artificial sequence
  SiRNA target sequence
tataaatattggtacactcattattt

SEQ ID NO: 207226 - DNA, 26 bp, Artificial sequence
  SiRNA target sequence
ataaatattggtacactcattatttt

SEQ ID NO: 207227 - DNA, 26 bp, Artificial sequence
  SiRNA target sequence
taaatattggtacactcattatttta

SEQ ID NO: 207228 - DNA, 26 bp, Artificial sequence
  SiRNA target sequence
aaatattggtacactcattattttat

SEQ ID NO: 207229 - DNA, 26 bp, Artificial sequence
  SiRNA target sequence
aatattggtacactcattattttatt

SEQ ID NO: 207230 - DNA, 26 bp, Artificial sequence
  SiRNA target sequence
atattggtacactcattattttattc

SEQ ID NO: 207231 - DNA, 26 bp, Artificial sequence
  SiRNA target sequence
tattggtacactcattattttattct

SEQ ID NO: 207232 - DNA, 26 bp, Artificial sequence
  SiRNA target sequence
attggtacactcattattttattctc

SEQ ID NO: 207233 - DNA, 26 bp, Artificial sequence
  SiRNA target sequence
ttggtacactcattattttattctcg

SEQ ID NO: 207234 - DNA, 26 bp, Artificial sequence
  SiRNA target sequence
tggtacactcattattttattctcga

SEQ ID NO: 207235 - DNA, 26 bp, Artificial sequence
  SiRNA target sequence
ggtacactcattattttattctcgaa

SEQ ID NO: 207236 - DNA, 26 bp, Artificial sequence
  SiRNA target sequence
gtacactcattattttattctcgaaa

SEQ ID NO: 207237 - DNA, 26 bp, Artificial sequence
  SiRNA target sequence
tacactcattattttattctcgaaat

SEQ ID NO: 207238 - DNA, 26 bp, Artificial sequence
  SiRNA target sequence
acactcattattttattctcgaaata

SEQ ID NO: 207239 - DNA, 26 bp, Artificial sequence
  SiRNA target sequence
cactcattattttattctcgaaataa

SEQ ID NO: 207240 - DNA, 26 bp, Artificial sequence
  SiRNA target sequence
actcattattttattctcgaaataat

SEQ ID NO: 207241 - DNA, 26 bp, Artificial sequence
  SiRNA target sequence
ctcattattttattctcgaaataata

SEQ ID NO: 207242 - DNA, 26 bp, Artificial sequence
  SiRNA target sequence
tcattattttattctcgaaataatat

SEQ ID NO: 207243 - DNA, 26 bp, Artificial sequence
  SiRNA target sequence
cattattttattctcgaaataatatt

SEQ ID NO: 207244 - DNA, 26 bp, Artificial sequence
  SiRNA target sequence
attattttattctcgaaataatattt

SEQ ID NO: 207245 - DNA, 26 bp, Artificial sequence
  SiRNA target sequence
ttattttattctcgaaataatatttc

SEQ ID NO: 207246 - DNA, 26 bp, Artificial sequence
  SiRNA target sequence
tattttattctcgaaataatatttca

SEQ ID NO: 207247 - DNA, 26 bp, Artificial sequence
  SiRNA target sequence
attttattctcgaaataatatttcat

SEQ ID NO: 207248 - DNA, 26 bp, Artificial sequence
  SiRNA target sequence
ttttattctcgaaataatatttcatg

SEQ ID NO: 207249 - DNA, 26 bp, Artificial sequence
  SiRNA target sequence
tttattctcgaaataatatttcatgt

SEQ ID NO: 207250 - DNA, 26 bp, Artificial sequence
  SiRNA target sequence
ttattctcgaaataatatttcatgta

SEQ ID NO: 207251 - DNA, 26 bp, Artificial sequence
  SiRNA target sequence
tattctcgaaataatatttcatgtac

SEQ ID NO: 207252 - DNA, 26 bp, Artificial sequence
  SiRNA target sequence
attctcgaaataatatttcatgtaca

SEQ ID NO: 207253 - DNA, 26 bp, Artificial sequence
  SiRNA target sequence
ttctcgaaataatatttcatgtacat

SEQ ID NO: 207254 - DNA, 26 bp, Artificial sequence
  SiRNA target sequence
tctcgaaataatatttcatgtacatt

SEQ ID NO: 207255 - DNA, 26 bp, Artificial sequence
  SiRNA target sequence
ctcgaaataatatttcatgtacatta

SEQ ID NO: 207256 - DNA, 26 bp, Artificial sequence
  SiRNA target sequence
tcgaaataatatttcatgtacattaa

SEQ ID NO: 207257 - DNA, 26 bp, Artificial sequence
  SiRNA target sequence
cgaaataatatttcatgtacattaat

SEQ ID NO: 207258 - DNA, 26 bp, Artificial sequence
  SiRNA target sequence
gaaataatatttcatgtacattaata

SEQ ID NO: 207259 - DNA, 26 bp, Artificial sequence
  SiRNA target sequence
aaataatatttcatgtacattaatat

SEQ ID NO: 207260 - DNA, 26 bp, Artificial sequence
  SiRNA target sequence
aataatatttcatgtacattaatatt

SEQ ID NO: 207261 - DNA, 26 bp, Artificial sequence
  SiRNA target sequence
ataatatttcatgtacattaatatta

SEQ ID NO: 207262 - DNA, 26 bp, Artificial sequence
  SiRNA target sequence
taatatttcatgtacattaatattag

SEQ ID NO: 207263 - DNA, 26 bp, Artificial sequence
  SiRNA target sequence
aatatttcatgtacattaatattaga

SEQ ID NO: 207264 - DNA, 26 bp, Artificial sequence
  SiRNA target sequence
atatttcatgtacattaatattagac

SEQ ID NO: 207265 - DNA, 26 bp, Artificial sequence
  SiRNA target sequence
tatttcatgtacattaatattagaca

SEQ ID NO: 207266 - DNA, 26 bp, Artificial sequence
  SiRNA target sequence
atttcatgtacattaatattagacat

SEQ ID NO: 207267 - DNA, 26 bp, Artificial sequence
  SiRNA target sequence
tttcatgtacattaatattagacata

SEQ ID NO: 207268 - DNA, 26 bp, Artificial sequence
  SiRNA target sequence
ttcatgtacattaatattagacatat

SEQ ID NO: 207269 - DNA, 26 bp, Artificial sequence
  SiRNA target sequence
tcatgtacattaatattagacatata

SEQ ID NO: 207270 - DNA, 26 bp, Artificial sequence
  SiRNA target sequence
catgtacattaatattagacatatac

SEQ ID NO: 207271 - DNA, 26 bp, Artificial sequence
  SiRNA target sequence
atgtacattaatattagacatatacc

SEQ ID NO: 207272 - DNA, 26 bp, Artificial sequence
  SiRNA target sequence
tgtacattaatattagacatataccg

SEQ ID NO: 207273 - DNA, 26 bp, Artificial sequence
  SiRNA target sequence
gtacattaatattagacatataccgc

SEQ ID NO: 207274 - DNA, 26 bp, Artificial sequence
  SiRNA target sequence
tacattaatattagacatataccgcc

SEQ ID NO: 207275 - DNA, 26 bp, Artificial sequence
  SiRNA target sequence
acattaatattagacatataccgccc

SEQ ID NO: 207276 - DNA, 26 bp, Artificial sequence
  SiRNA target sequence
cattaatattagacatataccgccca

SEQ ID NO: 207277 - DNA, 26 bp, Artificial sequence
  SiRNA target sequence
attaatattagacatataccgcccat

SEQ ID NO: 207278 - DNA, 26 bp, Artificial sequence
  SiRNA target sequence
ttaatattagacatataccgcccatg

SEQ ID NO: 207279 - DNA, 26 bp, Artificial sequence
  SiRNA target sequence
taatattagacatataccgcccatgg

SEQ ID NO: 207280 - DNA, 26 bp, Artificial sequence
  SiRNA target sequence
aatattagacatataccgcccatggc

SEQ ID NO: 207281 - DNA, 26 bp, Artificial sequence
  SiRNA target sequence
atattagacatataccgcccatggca

SEQ ID NO: 207282 - DNA, 26 bp, Artificial sequence
  SiRNA target sequence
tattagacatataccgcccatggcaa

SEQ ID NO: 207283 - DNA, 26 bp, Artificial sequence
  SiRNA target sequence
attagacatataccgcccatggcaat

SEQ ID NO: 207284 - DNA, 26 bp, Artificial sequence
  SiRNA target sequence
ttagacatataccgcccatggcaata

SEQ ID NO: 207285 - DNA, 26 bp, Artificial sequence
  SiRNA target sequence
tagacatataccgcccatggcaataa

SEQ ID NO: 207286 - DNA, 26 bp, Artificial sequence
  SiRNA target sequence
agacatataccgcccatggcaataaa

SEQ ID NO: 207287 - DNA, 26 bp, Artificial sequence
  SiRNA target sequence
gacatataccgcccatggcaataaaa

SEQ ID NO: 207288 - DNA, 26 bp, Artificial sequence
  SiRNA target sequence
acatataccgcccatggcaataaaaa

SEQ ID NO: 207289 - DNA, 26 bp, Artificial sequence
  SiRNA target sequence
catataccgcccatggcaataaaaac

SEQ ID NO: 207290 - DNA, 26 bp, Artificial sequence
  SiRNA target sequence
atataccgcccatggcaataaaaacc

SEQ ID NO: 207291 - DNA, 26 bp, Artificial sequence
  SiRNA target sequence
tataccgcccatggcaataaaaaccg

SEQ ID NO: 207292 - DNA, 26 bp, Artificial sequence
  SiRNA target sequence
ataccgcccatggcaataaaaaccga

SEQ ID NO: 207293 - DNA, 26 bp, Artificial sequence
  SiRNA target sequence
taccgcccatggcaataaaaaccgaa

SEQ ID NO: 207294 - DNA, 26 bp, Artificial sequence
  SiRNA target sequence
accgcccatggcaataaaaaccgaag

SEQ ID NO: 207295 - DNA, 26 bp, Artificial sequence
  SiRNA target sequence
ccgcccatggcaataaaaaccgaaga

SEQ ID NO: 207296 - DNA, 26 bp, Artificial sequence
  SiRNA target sequence
cgcccatggcaataaaaaccgaagaa

SEQ ID NO: 207297 - DNA, 26 bp, Artificial sequence
  SiRNA target sequence
gcccatggcaataaaaaccgaagaat

SEQ ID NO: 207298 - DNA, 26 bp, Artificial sequence
  SiRNA target sequence
cccatggcaataaaaaccgaagaata

SEQ ID NO: 207299 - DNA, 26 bp, Artificial sequence
  SiRNA target sequence
ccatggcaataaaaaccgaagaatat

SEQ ID NO: 207300 - DNA, 26 bp, Artificial sequence
  SiRNA target sequence
catggcaataaaaaccgaagaatata

SEQ ID NO: 207301 - DNA, 26 bp, Artificial sequence
  SiRNA target sequence
atggcaataaaaaccgaagaatataa

SEQ ID NO: 207302 - DNA, 26 bp, Artificial sequence
  SiRNA target sequence
tggcaataaaaaccgaagaatataat

SEQ ID NO: 207303 - DNA, 26 bp, Artificial sequence
  SiRNA target sequence
ggcaataaaaaccgaagaatataata

SEQ ID NO: 207304 - DNA, 26 bp, Artificial sequence
  SiRNA target sequence
gcaataaaaaccgaagaatataataa

SEQ ID NO: 207305 - DNA, 26 bp, Artificial sequence
  SiRNA target sequence
caataaaaaccgaagaatataataac

SEQ ID NO: 207306 - DNA, 26 bp, Artificial sequence
  SiRNA target sequence
aataaaaaccgaagaatataataact

SEQ ID NO: 207307 - DNA, 26 bp, Artificial sequence
  SiRNA target sequence
ataaaaaccgaagaatataataactg

SEQ ID NO: 207308 - DNA, 26 bp, Artificial sequence
  SiRNA target sequence
taaaaaccgaagaatataataactga

SEQ ID NO: 207309 - DNA, 26 bp, Artificial sequence
  SiRNA target sequence
aaaaaccgaagaatataataactgat

SEQ ID NO: 207310 - DNA, 26 bp, Artificial sequence
  SiRNA target sequence
aaaaccgaagaatataataactgatt

SEQ ID NO: 207311 - DNA, 26 bp, Artificial sequence
  SiRNA target sequence
aaaccgaagaatataataactgattt

SEQ ID NO: 207312 - DNA, 26 bp, Artificial sequence
  SiRNA target sequence
aaccgaagaatataataactgatttt

SEQ ID NO: 207313 - DNA, 26 bp, Artificial sequence
  SiRNA target sequence
accgaagaatataataactgattttg

SEQ ID NO: 207314 - DNA, 26 bp, Artificial sequence
  SiRNA target sequence
ccgaagaatataataactgattttgc

SEQ ID NO: 207315 - DNA, 26 bp, Artificial sequence
  SiRNA target sequence
cgaagaatataataactgattttgct

SEQ ID NO: 207316 - DNA, 26 bp, Artificial sequence
  SiRNA target sequence
gaagaatataataactgattttgctc

SEQ ID NO: 207317 - DNA, 26 bp, Artificial sequence
  SiRNA target sequence
aagaatataataactgattttgctca

SEQ ID NO: 207318 - DNA, 26 bp, Artificial sequence
  SiRNA target sequence
agaatataataactgattttgctcat

SEQ ID NO: 207319 - DNA, 26 bp, Artificial sequence
  SiRNA target sequence
gaatataataactgattttgctcata

SEQ ID NO: 207320 - DNA, 26 bp, Artificial sequence
  SiRNA target sequence
aatataataactgattttgctcatag

SEQ ID NO: 207321 - DNA, 26 bp, Artificial sequence
  SiRNA target sequence
atataataactgattttgctcatagc

SEQ ID NO: 207322 - DNA, 26 bp, Artificial sequence
  SiRNA target sequence
tataataactgattttgctcatagct

SEQ ID NO: 207323 - DNA, 26 bp, Artificial sequence
  SiRNA target sequence
ataataactgattttgctcatagcta

SEQ ID NO: 207324 - DNA, 26 bp, Artificial sequence
  SiRNA target sequence
taataactgattttgctcatagctaa

SEQ ID NO: 207325 - DNA, 26 bp, Artificial sequence
  SiRNA target sequence
aataactgattttgctcatagctaaa

SEQ ID NO: 207326 - DNA, 26 bp, Artificial sequence
  SiRNA target sequence
ataactgattttgctcatagctaaat

SEQ ID NO: 207327 - DNA, 26 bp, Artificial sequence
  SiRNA target sequence
taactgattttgctcatagctaaatc

SEQ ID NO: 207328 - DNA, 26 bp, Artificial sequence
  SiRNA target sequence
aactgattttgctcatagctaaatcc

SEQ ID NO: 207329 - DNA, 26 bp, Artificial sequence
  SiRNA target sequence
actgattttgctcatagctaaatcct

SEQ ID NO: 207330 - DNA, 26 bp, Artificial sequence
  SiRNA target sequence
ctgattttgctcatagctaaatcctt

SEQ ID NO: 207331 - DNA, 26 bp, Artificial sequence
  SiRNA target sequence
tgattttgctcatagctaaatccttt

SEQ ID NO: 207332 - DNA, 26 bp, Artificial sequence
  SiRNA target sequence
gattttgctcatagctaaatcctttt

SEQ ID NO: 207333 - DNA, 26 bp, Artificial sequence
  SiRNA target sequence
attttgctcatagctaaatccttttc

SEQ ID NO: 207334 - DNA, 26 bp, Artificial sequence
  SiRNA target sequence
ttttgctcatagctaaatccttttcg

SEQ ID NO: 207335 - DNA, 26 bp, Artificial sequence
  SiRNA target sequence
tttgctcatagctaaatccttttcgc

SEQ ID NO: 207336 - DNA, 26 bp, Artificial sequence
  SiRNA target sequence
ttgctcatagctaaatccttttcgca

SEQ ID NO: 207337 - DNA, 26 bp, Artificial sequence
  SiRNA target sequence
tgctcatagctaaatccttttcgcaa

SEQ ID NO: 207338 - DNA, 26 bp, Artificial sequence
  SiRNA target sequence
gctcatagctaaatccttttcgcaat

SEQ ID NO: 207339 - DNA, 26 bp, Artificial sequence
  SiRNA target sequence
ctcatagctaaatccttttcgcaatt

SEQ ID NO: 207340 - DNA, 26 bp, Artificial sequence
  SiRNA target sequence
tcatagctaaatccttttcgcaattc

SEQ ID NO: 207341 - DNA, 26 bp, Artificial sequence
  SiRNA target sequence
catagctaaatccttttcgcaattct

SEQ ID NO: 207342 - DNA, 26 bp, Artificial sequence
  SiRNA target sequence
atagctaaatccttttcgcaattctc

SEQ ID NO: 207343 - DNA, 26 bp, Artificial sequence
  SiRNA target sequence
tagctaaatccttttcgcaattctct

SEQ ID NO: 207344 - DNA, 26 bp, Artificial sequence
  SiRNA target sequence
agctaaatccttttcgcaattctctg

SEQ ID NO: 207345 - DNA, 26 bp, Artificial sequence
  SiRNA target sequence
gctaaatccttttcgcaattctctga

SEQ ID NO: 207346 - DNA, 26 bp, Artificial sequence
  SiRNA target sequence
ctaaatccttttcgcaattctctgaa

SEQ ID NO: 207347 - DNA, 26 bp, Artificial sequence
  SiRNA target sequence
taaatccttttcgcaattctctgaaa

SEQ ID NO: 207348 - DNA, 26 bp, Artificial sequence
  SiRNA target sequence
aaatccttttcgcaattctctgaaag

SEQ ID NO: 207349 - DNA, 26 bp, Artificial sequence
  SiRNA target sequence
aatccttttcgcaattctctgaaaga

SEQ ID NO: 207350 - DNA, 26 bp, Artificial sequence
  SiRNA target sequence
atccttttcgcaattctctgaaagaa

SEQ ID NO: 207351 - DNA, 26 bp, Artificial sequence
  SiRNA target sequence
tccttttcgcaattctctgaaagaac

SEQ ID NO: 207352 - DNA, 26 bp, Artificial sequence
  SiRNA target sequence
ccttttcgcaattctctgaaagaact

SEQ ID NO: 207353 - DNA, 26 bp, Artificial sequence
  SiRNA target sequence
cttttcgcaattctctgaaagaacta

SEQ ID NO: 207354 - DNA, 26 bp, Artificial sequence
  SiRNA target sequence
ttttcgcaattctctgaaagaactac

SEQ ID NO: 207355 - DNA, 26 bp, Artificial sequence
  SiRNA target sequence
tttcgcaattctctgaaagaactact

SEQ ID NO: 207356 - DNA, 26 bp, Artificial sequence
  SiRNA target sequence
ttcgcaattctctgaaagaactactg

SEQ ID NO: 207357 - DNA, 26 bp, Artificial sequence
  SiRNA target sequence
tcgcaattctctgaaagaactactgg

SEQ ID NO: 207358 - DNA, 26 bp, Artificial sequence
  SiRNA target sequence
cgcaattctctgaaagaactactggc

SEQ ID NO: 207359 - DNA, 26 bp, Artificial sequence
  SiRNA target sequence
gcaattctctgaaagaactactggct

SEQ ID NO: 207360 - DNA, 26 bp, Artificial sequence
  SiRNA target sequence
caattctctgaaagaactactggcta

SEQ ID NO: 207361 - DNA, 26 bp, Artificial sequence
  SiRNA target sequence
aattctctgaaagaactactggctaa

SEQ ID NO: 207362 - DNA, 26 bp, Artificial sequence
  SiRNA target sequence
attctctgaaagaactactggctaat

SEQ ID NO: 207363 - DNA, 26 bp, Artificial sequence
  SiRNA target sequence
ttctctgaaagaactactggctaatc

SEQ ID NO: 207364 - DNA, 26 bp, Artificial sequence
  SiRNA target sequence
tctctgaaagaactactggctaatcc

SEQ ID NO: 207365 - DNA, 26 bp, Artificial sequence
  SiRNA target sequence
ctctgaaagaactactggctaatcca

SEQ ID NO: 207366 - DNA, 26 bp, Artificial sequence
  SiRNA target sequence
tctgaaagaactactggctaatccag

SEQ ID NO: 207367 - DNA, 26 bp, Artificial sequence
  SiRNA target sequence
ctgaaagaactactggctaatccaga

SEQ ID NO: 207368 - DNA, 26 bp, Artificial sequence
  SiRNA target sequence
tgaaagaactactggctaatccagat

SEQ ID NO: 207369 - DNA, 26 bp, Artificial sequence
  SiRNA target sequence
gaaagaactactggctaatccagata

SEQ ID NO: 207370 - DNA, 26 bp, Artificial sequence
  SiRNA target sequence
aaagaactactggctaatccagatac

SEQ ID NO: 207371 - DNA, 26 bp, Artificial sequence
  SiRNA target sequence
aagaactactggctaatccagatact

SEQ ID NO: 207372 - DNA, 26 bp, Artificial sequence
  SiRNA target sequence
agaactactggctaatccagatacta

SEQ ID NO: 207373 - DNA, 26 bp, Artificial sequence
  SiRNA target sequence
gaactactggctaatccagatactag

SEQ ID NO: 207374 - DNA, 26 bp, Artificial sequence
  SiRNA target sequence
aactactggctaatccagatactagt

SEQ ID NO: 207375 - DNA, 26 bp, Artificial sequence
  SiRNA target sequence
actactggctaatccagatactagta

SEQ ID NO: 207376 - DNA, 26 bp, Artificial sequence
  SiRNA target sequence
ctactggctaatccagatactagtaa

SEQ ID NO: 207377 - DNA, 26 bp, Artificial sequence
  SiRNA target sequence
tactggctaatccagatactagtaaa

SEQ ID NO: 207378 - DNA, 26 bp, Artificial sequence
  SiRNA target sequence
actggctaatccagatactagtaaag

SEQ ID NO: 207379 - DNA, 26 bp, Artificial sequence
  SiRNA target sequence
ctggctaatccagatactagtaaagc

SEQ ID NO: 207380 - DNA, 26 bp, Artificial sequence
  SiRNA target sequence
tggctaatccagatactagtaaagct

SEQ ID NO: 207381 - DNA, 26 bp, Artificial sequence
  SiRNA target sequence
ggctaatccagatactagtaaagcta

SEQ ID NO: 207382 - DNA, 26 bp, Artificial sequence
  SiRNA target sequence
gctaatccagatactagtaaagctaa

SEQ ID NO: 207383 - DNA, 26 bp, Artificial sequence
  SiRNA target sequence
ctaatccagatactagtaaagctaaa

SEQ ID NO: 207384 - DNA, 26 bp, Artificial sequence
  SiRNA target sequence
taatccagatactagtaaagctaaat

SEQ ID NO: 207385 - DNA, 26 bp, Artificial sequence
  SiRNA target sequence
aatccagatactagtaaagctaaatt

SEQ ID NO: 207386 - DNA, 26 bp, Artificial sequence
  SiRNA target sequence
atccagatactagtaaagctaaattt

SEQ ID NO: 207387 - DNA, 26 bp, Artificial sequence
  SiRNA target sequence
tccagatactagtaaagctaaatttg

SEQ ID NO: 207388 - DNA, 26 bp, Artificial sequence
  SiRNA target sequence
ccagatactagtaaagctaaatttgc

SEQ ID NO: 207389 - DNA, 26 bp, Artificial sequence
  SiRNA target sequence
cagatactagtaaagctaaatttgct

SEQ ID NO: 207390 - DNA, 26 bp, Artificial sequence
  SiRNA target sequence
agatactagtaaagctaaatttgcta

SEQ ID NO: 207391 - DNA, 26 bp, Artificial sequence
  SiRNA target sequence
gatactagtaaagctaaatttgctat

SEQ ID NO: 207392 - DNA, 26 bp, Artificial sequence
  SiRNA target sequence
atactagtaaagctaaatttgctatt

SEQ ID NO: 207393 - DNA, 26 bp, Artificial sequence
  SiRNA target sequence
tactagtaaagctaaatttgctatta

SEQ ID NO: 207394 - DNA, 26 bp, Artificial sequence
  SiRNA target sequence
actagtaaagctaaatttgctattat

SEQ ID NO: 207395 - DNA, 26 bp, Artificial sequence
  SiRNA target sequence
ctagtaaagctaaatttgctattatg

SEQ ID NO: 207396 - DNA, 26 bp, Artificial sequence
  SiRNA target sequence
tagtaaagctaaatttgctattatgt

SEQ ID NO: 207397 - DNA, 26 bp, Artificial sequence
  SiRNA target sequence
agtaaagctaaatttgctattatgta

SEQ ID NO: 207398 - DNA, 26 bp, Artificial sequence
  SiRNA target sequence
gtaaagctaaatttgctattatgtaa

SEQ ID NO: 207399 - DNA, 26 bp, Artificial sequence
  SiRNA target sequence
taaagctaaatttgctattatgtaaa

SEQ ID NO: 207400 - DNA, 26 bp, Artificial sequence
  SiRNA target sequence
aaagctaaatttgctattatgtaaaa

SEQ ID NO: 207401 - DNA, 26 bp, Artificial sequence
  SiRNA target sequence
aagctaaatttgctattatgtaaaaa

SEQ ID NO: 207402 - DNA, 26 bp, Artificial sequence
  SiRNA target sequence
agctaaatttgctattatgtaaaaag

SEQ ID NO: 207403 - DNA, 26 bp, Artificial sequence
  SiRNA target sequence
gctaaatttgctattatgtaaaaagg

SEQ ID NO: 207404 - DNA, 26 bp, Artificial sequence
  SiRNA target sequence
ctaaatttgctattatgtaaaaaggt

SEQ ID NO: 207405 - DNA, 26 bp, Artificial sequence
  SiRNA target sequence
taaatttgctattatgtaaaaaggtg

SEQ ID NO: 207406 - DNA, 26 bp, Artificial sequence
  SiRNA target sequence
aaatttgctattatgtaaaaaggtgg

SEQ ID NO: 207407 - DNA, 26 bp, Artificial sequence
  SiRNA target sequence
aatttgctattatgtaaaaaggtggt

SEQ ID NO: 207408 - DNA, 26 bp, Artificial sequence
  SiRNA target sequence
atttgctattatgtaaaaaggtggta

SEQ ID NO: 207409 - DNA, 26 bp, Artificial sequence
  SiRNA target sequence
tttgctattatgtaaaaaggtggtaa

SEQ ID NO: 207410 - DNA, 26 bp, Artificial sequence
  SiRNA target sequence
ttgctattatgtaaaaaggtggtaaa

SEQ ID NO: 207411 - DNA, 26 bp, Artificial sequence
  SiRNA target sequence
tgctattatgtaaaaaggtggtaaaa

SEQ ID NO: 207412 - DNA, 26 bp, Artificial sequence
  SiRNA target sequence
gctattatgtaaaaaggtggtaaaaa

SEQ ID NO: 207413 - DNA, 26 bp, Artificial sequence
  SiRNA target sequence
ctattatgtaaaaaggtggtaaaaat

SEQ ID NO: 207414 - DNA, 26 bp, Artificial sequence
  SiRNA target sequence
tattatgtaaaaaggtggtaaaaatc

SEQ ID NO: 207415 - DNA, 26 bp, Artificial sequence
  SiRNA target sequence
attatgtaaaaaggtggtaaaaatct

SEQ ID NO: 207416 - DNA, 26 bp, Artificial sequence
  SiRNA target sequence
ttatgtaaaaaggtggtaaaaatctt

SEQ ID NO: 207417 - DNA, 26 bp, Artificial sequence
  SiRNA target sequence
tatgtaaaaaggtggtaaaaatcttg

SEQ ID NO: 207418 - DNA, 26 bp, Artificial sequence
  SiRNA target sequence
atgtaaaaaggtggtaaaaatcttgt

SEQ ID NO: 207419 - DNA, 26 bp, Artificial sequence
  SiRNA target sequence
tgtaaaaaggtggtaaaaatcttgta

SEQ ID NO: 207420 - DNA, 26 bp, Artificial sequence
  SiRNA target sequence
gtaaaaaggtggtaaaaatcttgtaa

SEQ ID NO: 207421 - DNA, 26 bp, Artificial sequence
  SiRNA target sequence
taaaaaggtggtaaaaatcttgtaaa

SEQ ID NO: 207422 - DNA, 26 bp, Artificial sequence
  SiRNA target sequence
aaaaaggtggtaaaaatcttgtaaac

SEQ ID NO: 207423 - DNA, 26 bp, Artificial sequence
  SiRNA target sequence
aaaaggtggtaaaaatcttgtaaact

SEQ ID NO: 207424 - DNA, 26 bp, Artificial sequence
  SiRNA target sequence
aaaggtggtaaaaatcttgtaaactg

SEQ ID NO: 207425 - DNA, 26 bp, Artificial sequence
  SiRNA target sequence
aaggtggtaaaaatcttgtaaactgt

SEQ ID NO: 207426 - DNA, 26 bp, Artificial sequence
  SiRNA target sequence
aggtggtaaaaatcttgtaaactgtc

SEQ ID NO: 207427 - DNA, 26 bp, Artificial sequence
  SiRNA target sequence
ggtggtaaaaatcttgtaaactgtct

SEQ ID NO: 207428 - DNA, 26 bp, Artificial sequence
  SiRNA target sequence
gtggtaaaaatcttgtaaactgtctg

SEQ ID NO: 207429 - DNA, 26 bp, Artificial sequence
  SiRNA target sequence
tggtaaaaatcttgtaaactgtctga

SEQ ID NO: 207430 - DNA, 26 bp, Artificial sequence
  SiRNA target sequence
ggtaaaaatcttgtaaactgtctgat

SEQ ID NO: 207431 - DNA, 26 bp, Artificial sequence
  SiRNA target sequence
gtaaaaatcttgtaaactgtctgata

SEQ ID NO: 207432 - DNA, 26 bp, Artificial sequence
  SiRNA target sequence
taaaaatcttgtaaactgtctgatag

SEQ ID NO: 207433 - DNA, 26 bp, Artificial sequence
  SiRNA target sequence
aaaaatcttgtaaactgtctgatagt

SEQ ID NO: 207434 - DNA, 26 bp, Artificial sequence
  SiRNA target sequence
aaaatcttgtaaactgtctgatagta

SEQ ID NO: 207435 - DNA, 26 bp, Artificial sequence
  SiRNA target sequence
aaatcttgtaaactgtctgatagtac

SEQ ID NO: 207436 - DNA, 26 bp, Artificial sequence
  SiRNA target sequence
aatcttgtaaactgtctgatagtaca

SEQ ID NO: 207437 - DNA, 26 bp, Artificial sequence
  SiRNA target sequence
atcttgtaaactgtctgatagtacaa

SEQ ID NO: 207438 - DNA, 26 bp, Artificial sequence
  SiRNA target sequence
tcttgtaaactgtctgatagtacaac

SEQ ID NO: 207439 - DNA, 26 bp, Artificial sequence
  SiRNA target sequence
cttgtaaactgtctgatagtacaact

SEQ ID NO: 207440 - DNA, 26 bp, Artificial sequence
  SiRNA target sequence
ttgtaaactgtctgatagtacaactt

SEQ ID NO: 207441 - DNA, 26 bp, Artificial sequence
  SiRNA target sequence
tgtaaactgtctgatagtacaacttt

SEQ ID NO: 207442 - DNA, 26 bp, Artificial sequence
  SiRNA target sequence
gtaaactgtctgatagtacaactttc

SEQ ID NO: 207443 - DNA, 26 bp, Artificial sequence
  SiRNA target sequence
taaactgtctgatagtacaactttca

SEQ ID NO: 207444 - DNA, 26 bp, Artificial sequence
  SiRNA target sequence
aaactgtctgatagtacaactttcat

SEQ ID NO: 207445 - DNA, 26 bp, Artificial sequence
  SiRNA target sequence
aactgtctgatagtacaactttcatt

SEQ ID NO: 207446 - DNA, 26 bp, Artificial sequence
  SiRNA target sequence
actgtctgatagtacaactttcattt

SEQ ID NO: 207447 - DNA, 26 bp, Artificial sequence
  SiRNA target sequence
ctgtctgatagtacaactttcattta

SEQ ID NO: 207448 - DNA, 26 bp, Artificial sequence
  SiRNA target sequence
tgtctgatagtacaactttcatttaa

SEQ ID NO: 207449 - DNA, 26 bp, Artificial sequence
  SiRNA target sequence
gtctgatagtacaactttcatttaaa

SEQ ID NO: 207450 - DNA, 26 bp, Artificial sequence
  SiRNA target sequence
tctgatagtacaactttcatttaaaa

SEQ ID NO: 207451 - DNA, 26 bp, Artificial sequence
  SiRNA target sequence
ctgatagtacaactttcatttaaaaa

SEQ ID NO: 207452 - DNA, 26 bp, Artificial sequence
  SiRNA target sequence
tgatagtacaactttcatttaaaaaa

SEQ ID NO: 207453 - DNA, 26 bp, Artificial sequence
  SiRNA target sequence
gatagtacaactttcatttaaaaaac

SEQ ID NO: 207454 - DNA, 26 bp, Artificial sequence
  SiRNA target sequence
atagtacaactttcatttaaaaaact

SEQ ID NO: 207455 - DNA, 26 bp, Artificial sequence
  SiRNA target sequence
tagtacaactttcatttaaaaaactc

SEQ ID NO: 207456 - DNA, 26 bp, Artificial sequence
  SiRNA target sequence
agtacaactttcatttaaaaaactca

SEQ ID NO: 207457 - DNA, 26 bp, Artificial sequence
  SiRNA target sequence
gtacaactttcatttaaaaaactcat

SEQ ID NO: 207458 - DNA, 26 bp, Artificial sequence
  SiRNA target sequence
tacaactttcatttaaaaaactcatg

SEQ ID NO: 207459 - DNA, 26 bp, Artificial sequence
  SiRNA target sequence
acaactttcatttaaaaaactcatgt

SEQ ID NO: 207460 - DNA, 26 bp, Artificial sequence
  SiRNA target sequence
caactttcatttaaaaaactcatgta

SEQ ID NO: 207461 - DNA, 26 bp, Artificial sequence
  SiRNA target sequence
aactttcatttaaaaaactcatgtat

SEQ ID NO: 207462 - DNA, 26 bp, Artificial sequence
  SiRNA target sequence
actttcatttaaaaaactcatgtata

SEQ ID NO: 207463 - DNA, 26 bp, Artificial sequence
  SiRNA target sequence
ctttcatttaaaaaactcatgtataa

SEQ ID NO: 207464 - DNA, 26 bp, Artificial sequence
  SiRNA target sequence
tttcatttaaaaaactcatgtataaa

SEQ ID NO: 207465 - DNA, 26 bp, Artificial sequence
  SiRNA target sequence
ttcatttaaaaaactcatgtataaat

SEQ ID NO: 207466 - DNA, 26 bp, Artificial sequence
  SiRNA target sequence
tcatttaaaaaactcatgtataaata

SEQ ID NO: 207467 - DNA, 26 bp, Artificial sequence
  SiRNA target sequence
catttaaaaaactcatgtataaataa

SEQ ID NO: 207468 - DNA, 26 bp, Artificial sequence
  SiRNA target sequence
atttaaaaaactcatgtataaataag

SEQ ID NO: 207469 - DNA, 26 bp, Artificial sequence
  SiRNA target sequence
tttaaaaaactcatgtataaataagc

SEQ ID NO: 207470 - DNA, 26 bp, Artificial sequence
  SiRNA target sequence
ttaaaaaactcatgtataaataagcc

SEQ ID NO: 207471 - DNA, 26 bp, Artificial sequence
  SiRNA target sequence
taaaaaactcatgtataaataagcca

SEQ ID NO: 207472 - DNA, 26 bp, Artificial sequence
  SiRNA target sequence
aaaaaactcatgtataaataagccat

SEQ ID NO: 207473 - DNA, 26 bp, Artificial sequence
  SiRNA target sequence
aaaaactcatgtataaataagccata

SEQ ID NO: 207474 - DNA, 26 bp, Artificial sequence
  SiRNA target sequence
aaaactcatgtataaataagccataa

SEQ ID NO: 207475 - DNA, 26 bp, Artificial sequence
  SiRNA target sequence
aaactcatgtataaataagccataag

SEQ ID NO: 207476 - DNA, 26 bp, Artificial sequence
  SiRNA target sequence
aactcatgtataaataagccataagt

SEQ ID NO: 207477 - DNA, 26 bp, Artificial sequence
  SiRNA target sequence
actcatgtataaataagccataagta

SEQ ID NO: 207478 - DNA, 26 bp, Artificial sequence
  SiRNA target sequence
ctcatgtataaataagccataagtaa

SEQ ID NO: 207479 - DNA, 26 bp, Artificial sequence
  SiRNA target sequence
tcatgtataaataagccataagtaaa

SEQ ID NO: 207480 - DNA, 26 bp, Artificial sequence
  SiRNA target sequence
catgtataaataagccataagtaaac

SEQ ID NO: 207481 - DNA, 26 bp, Artificial sequence
  SiRNA target sequence
atgtataaataagccataagtaaact

SEQ ID NO: 207482 - DNA, 26 bp, Artificial sequence
  SiRNA target sequence
tgtataaataagccataagtaaactg

SEQ ID NO: 207483 - DNA, 26 bp, Artificial sequence
  SiRNA target sequence
gtataaataagccataagtaaactgc

SEQ ID NO: 207484 - DNA, 26 bp, Artificial sequence
  SiRNA target sequence
tataaataagccataagtaaactgcc

SEQ ID NO: 207485 - DNA, 26 bp, Artificial sequence
  SiRNA target sequence
ataaataagccataagtaaactgccc

SEQ ID NO: 207486 - DNA, 26 bp, Artificial sequence
  SiRNA target sequence
taaataagccataagtaaactgcccc

SEQ ID NO: 207487 - DNA, 26 bp, Artificial sequence
  SiRNA target sequence
aaataagccataagtaaactgcccca

SEQ ID NO: 207488 - DNA, 26 bp, Artificial sequence
  SiRNA target sequence
aataagccataagtaaactgccccac

SEQ ID NO: 207489 - DNA, 26 bp, Artificial sequence
  SiRNA target sequence
ataagccataagtaaactgccccaca

SEQ ID NO: 207490 - DNA, 26 bp, Artificial sequence
  SiRNA target sequence
taagccataagtaaactgccccacat

SEQ ID NO: 207491 - DNA, 26 bp, Artificial sequence
  SiRNA target sequence
aagccataagtaaactgccccacatt

SEQ ID NO: 207492 - DNA, 26 bp, Artificial sequence
  SiRNA target sequence
agccataagtaaactgccccacattt

SEQ ID NO: 207493 - DNA, 26 bp, Artificial sequence
  SiRNA target sequence
gccataagtaaactgccccacatttc

SEQ ID NO: 207494 - DNA, 26 bp, Artificial sequence
  SiRNA target sequence
ccataagtaaactgccccacatttct

SEQ ID NO: 207495 - DNA, 26 bp, Artificial sequence
  SiRNA target sequence
cataagtaaactgccccacatttctg

SEQ ID NO: 207496 - DNA, 26 bp, Artificial sequence
  SiRNA target sequence
ataagtaaactgccccacatttctgc

SEQ ID NO: 207497 - DNA, 26 bp, Artificial sequence
  SiRNA target sequence
taagtaaactgccccacatttctgct

SEQ ID NO: 207498 - DNA, 26 bp, Artificial sequence
  SiRNA target sequence
aagtaaactgccccacatttctgcta

SEQ ID NO: 207499 - DNA, 26 bp, Artificial sequence
  SiRNA target sequence
agtaaactgccccacatttctgctat

SEQ ID NO: 207500 - DNA, 26 bp, Artificial sequence
  SiRNA target sequence
gtaaactgccccacatttctgctatt

SEQ ID NO: 207501 - DNA, 26 bp, Artificial sequence
  SiRNA target sequence
taaactgccccacatttctgctatta

SEQ ID NO: 207502 - DNA, 26 bp, Artificial sequence
  SiRNA target sequence
aaactgccccacatttctgctattat

SEQ ID NO: 207503 - DNA, 26 bp, Artificial sequence
  SiRNA target sequence
aactgccccacatttctgctattata

SEQ ID NO: 207504 - DNA, 26 bp, Artificial sequence
  SiRNA target sequence
actgccccacatttctgctattataa

SEQ ID NO: 207505 - DNA, 26 bp, Artificial sequence
  SiRNA target sequence
ctgccccacatttctgctattataaa

SEQ ID NO: 207506 - DNA, 26 bp, Artificial sequence
  SiRNA target sequence
tgccccacatttctgctattataaaa

SEQ ID NO: 207507 - DNA, 26 bp, Artificial sequence
  SiRNA target sequence
gccccacatttctgctattataaaaa

SEQ ID NO: 207508 - DNA, 26 bp, Artificial sequence
  SiRNA target sequence
ccccacatttctgctattataaaaat

SEQ ID NO: 207509 - DNA, 26 bp, Artificial sequence
  SiRNA target sequence
cccacatttctgctattataaaaata

SEQ ID NO: 207510 - DNA, 26 bp, Artificial sequence
  SiRNA target sequence
ccacatttctgctattataaaaatac

SEQ ID NO: 207511 - DNA, 26 bp, Artificial sequence
  SiRNA target sequence
cacatttctgctattataaaaataca

SEQ ID NO: 207512 - DNA, 26 bp, Artificial sequence
  SiRNA target sequence
acatttctgctattataaaaatacaa

SEQ ID NO: 207513 - DNA, 26 bp, Artificial sequence
  SiRNA target sequence
catttctgctattataaaaatacaag

SEQ ID NO: 207514 - DNA, 26 bp, Artificial sequence
  SiRNA target sequence
atttctgctattataaaaatacaagt

SEQ ID NO: 207515 - DNA, 26 bp, Artificial sequence
  SiRNA target sequence
tttctgctattataaaaatacaagtt

SEQ ID NO: 207516 - DNA, 26 bp, Artificial sequence
  SiRNA target sequence
ttctgctattataaaaatacaagttg

SEQ ID NO: 207517 - DNA, 26 bp, Artificial sequence
  SiRNA target sequence
tctgctattataaaaatacaagttga

SEQ ID NO: 207518 - DNA, 26 bp, Artificial sequence
  SiRNA target sequence
ctgctattataaaaatacaagttgaa

SEQ ID NO: 207519 - DNA, 26 bp, Artificial sequence
  SiRNA target sequence
tgctattataaaaatacaagttgaaa

SEQ ID NO: 207520 - DNA, 26 bp, Artificial sequence
  SiRNA target sequence
gctattataaaaatacaagttgaaac

SEQ ID NO: 207521 - DNA, 26 bp, Artificial sequence
  SiRNA target sequence
ctattataaaaatacaagttgaaacg

SEQ ID NO: 207522 - DNA, 26 bp, Artificial sequence
  SiRNA target sequence
tattataaaaatacaagttgaaacgg

SEQ ID NO: 207523 - DNA, 26 bp, Artificial sequence
  SiRNA target sequence
attataaaaatacaagttgaaacggg

SEQ ID NO: 207524 - DNA, 26 bp, Artificial sequence
  SiRNA target sequence
ttataaaaatacaagttgaaacgggc

SEQ ID NO: 207525 - DNA, 26 bp, Artificial sequence
  SiRNA target sequence
tataaaaatacaagttgaaacgggct

SEQ ID NO: 207526 - DNA, 26 bp, Artificial sequence
  SiRNA target sequence
ataaaaatacaagttgaaacgggctc

SEQ ID NO: 207527 - DNA, 26 bp, Artificial sequence
  SiRNA target sequence
taaaaatacaagttgaaacgggctcg

SEQ ID NO: 207528 - DNA, 26 bp, Artificial sequence
  SiRNA target sequence
aaaaatacaagttgaaacgggctcgt

SEQ ID NO: 207529 - DNA, 26 bp, Artificial sequence
  SiRNA target sequence
aaaatacaagttgaaacgggctcgtt

SEQ ID NO: 207530 - DNA, 26 bp, Artificial sequence
  SiRNA target sequence
aaatacaagttgaaacgggctcgtta

SEQ ID NO: 207531 - DNA, 26 bp, Artificial sequence
  SiRNA target sequence
aatacaagttgaaacgggctcgttag

SEQ ID NO: 207532 - DNA, 26 bp, Artificial sequence
  SiRNA target sequence
atacaagttgaaacgggctcgttagc

SEQ ID NO: 207533 - DNA, 26 bp, Artificial sequence
  SiRNA target sequence
tacaagttgaaacgggctcgttagct

SEQ ID NO: 207534 - DNA, 26 bp, Artificial sequence
  SiRNA target sequence
acaagttgaaacgggctcgttagctg

SEQ ID NO: 207535 - DNA, 26 bp, Artificial sequence
  SiRNA target sequence
caagttgaaacgggctcgttagctgt

SEQ ID NO: 207536 - DNA, 26 bp, Artificial sequence
  SiRNA target sequence
aagttgaaacgggctcgttagctgta

SEQ ID NO: 207537 - DNA, 26 bp, Artificial sequence
  SiRNA target sequence
agttgaaacgggctcgttagctgtaa

SEQ ID NO: 207538 - DNA, 26 bp, Artificial sequence
  SiRNA target sequence
gttgaaacgggctcgttagctgtaat

SEQ ID NO: 207539 - DNA, 26 bp, Artificial sequence
  SiRNA target sequence
ttgaaacgggctcgttagctgtaatt

SEQ ID NO: 207540 - DNA, 26 bp, Artificial sequence
  SiRNA target sequence
tgaaacgggctcgttagctgtaatta

SEQ ID NO: 207541 - DNA, 26 bp, Artificial sequence
  SiRNA target sequence
gaaacgggctcgttagctgtaattaa

SEQ ID NO: 207542 - DNA, 26 bp, Artificial sequence
  SiRNA target sequence
aaacgggctcgttagctgtaattaaa

SEQ ID NO: 207543 - DNA, 26 bp, Artificial sequence
  SiRNA target sequence
aacgggctcgttagctgtaattaaaa

SEQ ID NO: 207544 - DNA, 26 bp, Artificial sequence
  SiRNA target sequence
acgggctcgttagctgtaattaaaaa

SEQ ID NO: 207545 - DNA, 26 bp, Artificial sequence
  SiRNA target sequence
cgggctcgttagctgtaattaaaaaa

SEQ ID NO: 207546 - DNA, 26 bp, Artificial sequence
  SiRNA target sequence
gggctcgttagctgtaattaaaaaat

SEQ ID NO: 207547 - DNA, 26 bp, Artificial sequence
  SiRNA target sequence
ggctcgttagctgtaattaaaaaata

SEQ ID NO: 207548 - DNA, 26 bp, Artificial sequence
  SiRNA target sequence
gctcgttagctgtaattaaaaaatat

SEQ ID NO: 207549 - DNA, 26 bp, Artificial sequence
  SiRNA target sequence
ctcgttagctgtaattaaaaaatatt

SEQ ID NO: 207550 - DNA, 26 bp, Artificial sequence
  SiRNA target sequence
tcgttagctgtaattaaaaaatattt

SEQ ID NO: 207551 - DNA, 26 bp, Artificial sequence
  SiRNA target sequence
cgttagctgtaattaaaaaatatttt

SEQ ID NO: 207552 - DNA, 26 bp, Artificial sequence
  SiRNA target sequence
gttagctgtaattaaaaaatatttta

SEQ ID NO: 207553 - DNA, 26 bp, Artificial sequence
  SiRNA target sequence
ttagctgtaattaaaaaatattttat

SEQ ID NO: 207554 - DNA, 26 bp, Artificial sequence
  SiRNA target sequence
tagctgtaattaaaaaatattttata

SEQ ID NO: 207555 - DNA, 26 bp, Artificial sequence
  SiRNA target sequence
agctgtaattaaaaaatattttataa

SEQ ID NO: 207556 - DNA, 26 bp, Artificial sequence
  SiRNA target sequence
gctgtaattaaaaaatattttataaa

SEQ ID NO: 207557 - DNA, 26 bp, Artificial sequence
  SiRNA target sequence
ctgtaattaaaaaatattttataaag

SEQ ID NO: 207558 - DNA, 26 bp, Artificial sequence
  SiRNA target sequence
tgtaattaaaaaatattttataaagt

SEQ ID NO: 207559 - DNA, 26 bp, Artificial sequence
  SiRNA target sequence
gtaattaaaaaatattttataaagtt

SEQ ID NO: 207560 - DNA, 26 bp, Artificial sequence
  SiRNA target sequence
taattaaaaaatattttataaagttc

SEQ ID NO: 207561 - DNA, 26 bp, Artificial sequence
  SiRNA target sequence
aattaaaaaatattttataaagttca

SEQ ID NO: 207562 - DNA, 26 bp, Artificial sequence
  SiRNA target sequence
attaaaaaatattttataaagttcaa

SEQ ID NO: 207563 - DNA, 26 bp, Artificial sequence
  SiRNA target sequence
ttaaaaaatattttataaagttcaat

SEQ ID NO: 207564 - DNA, 26 bp, Artificial sequence
  SiRNA target sequence
taaaaaatattttataaagttcaatc

SEQ ID NO: 207565 - DNA, 26 bp, Artificial sequence
  SiRNA target sequence
aaaaaatattttataaagttcaatcc

SEQ ID NO: 207566 - DNA, 26 bp, Artificial sequence
  SiRNA target sequence
aaaaatattttataaagttcaatccc

SEQ ID NO: 207567 - DNA, 26 bp, Artificial sequence
  SiRNA target sequence
aaaatattttataaagttcaatccct

SEQ ID NO: 207568 - DNA, 26 bp, Artificial sequence
  SiRNA target sequence
aaatattttataaagttcaatccctt

SEQ ID NO: 207569 - DNA, 26 bp, Artificial sequence
  SiRNA target sequence
aatattttataaagttcaatcccttc

SEQ ID NO: 207570 - DNA, 26 bp, Artificial sequence
  SiRNA target sequence
atattttataaagttcaatcccttca

SEQ ID NO: 207571 - DNA, 26 bp, Artificial sequence
  SiRNA target sequence
tattttataaagttcaatcccttcaa

SEQ ID NO: 207572 - DNA, 26 bp, Artificial sequence
  SiRNA target sequence
attttataaagttcaatcccttcaat

SEQ ID NO: 207573 - DNA, 26 bp, Artificial sequence
  SiRNA target sequence
ttttataaagttcaatcccttcaatg

SEQ ID NO: 207574 - DNA, 26 bp, Artificial sequence
  SiRNA target sequence
tttataaagttcaatcccttcaatgc

SEQ ID NO: 207575 - DNA, 26 bp, Artificial sequence
  SiRNA target sequence
ttataaagttcaatcccttcaatgca

SEQ ID NO: 207576 - DNA, 26 bp, Artificial sequence
  SiRNA target sequence
tataaagttcaatcccttcaatgcac

SEQ ID NO: 207577 - DNA, 26 bp, Artificial sequence
  SiRNA target sequence
ataaagttcaatcccttcaatgcacc

SEQ ID NO: 207578 - DNA, 26 bp, Artificial sequence
  SiRNA target sequence
taaagttcaatcccttcaatgcacct

SEQ ID NO: 207579 - DNA, 26 bp, Artificial sequence
  SiRNA target sequence
aaagttcaatcccttcaatgcacctt

SEQ ID NO: 207580 - DNA, 26 bp, Artificial sequence
  SiRNA target sequence
aagttcaatcccttcaatgcaccttt

SEQ ID NO: 207581 - DNA, 26 bp, Artificial sequence
  SiRNA target sequence
agttcaatcccttcaatgcacctttg

SEQ ID NO: 207582 - DNA, 26 bp, Artificial sequence
  SiRNA target sequence
gttcaatcccttcaatgcacctttgt

SEQ ID NO: 207583 - DNA, 26 bp, Artificial sequence
  SiRNA target sequence
ttcaatcccttcaatgcacctttgtt

SEQ ID NO: 207584 - DNA, 26 bp, Artificial sequence
  SiRNA target sequence
tcaatcccttcaatgcacctttgtta

SEQ ID NO: 207585 - DNA, 26 bp, Artificial sequence
  SiRNA target sequence
caatcccttcaatgcacctttgttat

SEQ ID NO: 207586 - DNA, 26 bp, Artificial sequence
  SiRNA target sequence
aatcccttcaatgcacctttgttatc

SEQ ID NO: 207587 - DNA, 26 bp, Artificial sequence
  SiRNA target sequence
atcccttcaatgcacctttgttatca

SEQ ID NO: 207588 - DNA, 26 bp, Artificial sequence
  SiRNA target sequence
tcccttcaatgcacctttgttatcag

SEQ ID NO: 207589 - DNA, 26 bp, Artificial sequence
  SiRNA target sequence
cccttcaatgcacctttgttatcagc

SEQ ID NO: 207590 - DNA, 26 bp, Artificial sequence
  SiRNA target sequence
ccttcaatgcacctttgttatcagcg

SEQ ID NO: 207591 - DNA, 26 bp, Artificial sequence
  SiRNA target sequence
cttcaatgcacctttgttatcagcga

SEQ ID NO: 207592 - DNA, 26 bp, Artificial sequence
  SiRNA target sequence
ttcaatgcacctttgttatcagcgaa

SEQ ID NO: 207593 - DNA, 26 bp, Artificial sequence
  SiRNA target sequence
tcaatgcacctttgttatcagcgaaa

SEQ ID NO: 207594 - DNA, 26 bp, Artificial sequence
  SiRNA target sequence
caatgcacctttgttatcagcgaaaa

SEQ ID NO: 207595 - DNA, 26 bp, Artificial sequence
  SiRNA target sequence
aatgcacctttgttatcagcgaaaat

SEQ ID NO: 207596 - DNA, 26 bp, Artificial sequence
  SiRNA target sequence
atgcacctttgttatcagcgaaaata

SEQ ID NO: 207597 - DNA, 26 bp, Artificial sequence
  SiRNA target sequence
tgcacctttgttatcagcgaaaatat

SEQ ID NO: 207598 - DNA, 26 bp, Artificial sequence
  SiRNA target sequence
gcacctttgttatcagcgaaaatatc

SEQ ID NO: 207599 - DNA, 26 bp, Artificial sequence
  SiRNA target sequence
cacctttgttatcagcgaaaatatct

SEQ ID NO: 207600 - DNA, 26 bp, Artificial sequence
  SiRNA target sequence
acctttgttatcagcgaaaatatctc

SEQ ID NO: 207601 - DNA, 26 bp, Artificial sequence
  SiRNA target sequence
cctttgttatcagcgaaaatatctct

SEQ ID NO: 207602 - DNA, 26 bp, Artificial sequence
  SiRNA target sequence
ctttgttatcagcgaaaatatctcta

SEQ ID NO: 207603 - DNA, 26 bp, Artificial sequence
  SiRNA target sequence
tttgttatcagcgaaaatatctctaa

SEQ ID NO: 207604 - DNA, 26 bp, Artificial sequence
  SiRNA target sequence
ttgttatcagcgaaaatatctctaaa

SEQ ID NO: 207605 - DNA, 26 bp, Artificial sequence
  SiRNA target sequence
tgttatcagcgaaaatatctctaaat

SEQ ID NO: 207606 - DNA, 26 bp, Artificial sequence
  SiRNA target sequence
gttatcagcgaaaatatctctaaata

SEQ ID NO: 207607 - DNA, 26 bp, Artificial sequence
  SiRNA target sequence
ttatcagcgaaaatatctctaaataa

SEQ ID NO: 207608 - DNA, 26 bp, Artificial sequence
  SiRNA target sequence
tatcagcgaaaatatctctaaataaa

SEQ ID NO: 207609 - DNA, 26 bp, Artificial sequence
  SiRNA target sequence
atcagcgaaaatatctctaaataaaa

SEQ ID NO: 207610 - DNA, 26 bp, Artificial sequence
  SiRNA target sequence
tcagcgaaaatatctctaaataaaaa

SEQ ID NO: 207611 - DNA, 26 bp, Artificial sequence
  SiRNA target sequence
cagcgaaaatatctctaaataaaaag

SEQ ID NO: 207612 - DNA, 26 bp, Artificial sequence
  SiRNA target sequence
agcgaaaatatctctaaataaaaagc

SEQ ID NO: 207613 - DNA, 26 bp, Artificial sequence
  SiRNA target sequence
gcgaaaatatctctaaataaaaagct

SEQ ID NO: 207614 - DNA, 26 bp, Artificial sequence
  SiRNA target sequence
cgaaaatatctctaaataaaaagcta

SEQ ID NO: 207615 - DNA, 26 bp, Artificial sequence
  SiRNA target sequence
gaaaatatctctaaataaaaagctag

SEQ ID NO: 207616 - DNA, 26 bp, Artificial sequence
  SiRNA target sequence
aaaatatctctaaataaaaagctaga

SEQ ID NO: 207617 - DNA, 26 bp, Artificial sequence
  SiRNA target sequence
aaatatctctaaataaaaagctagat

SEQ ID NO: 207618 - DNA, 26 bp, Artificial sequence
  SiRNA target sequence
aatatctctaaataaaaagctagatg

SEQ ID NO: 207619 - DNA, 26 bp, Artificial sequence
  SiRNA target sequence
atatctctaaataaaaagctagatgg

SEQ ID NO: 207620 - DNA, 26 bp, Artificial sequence
  SiRNA target sequence
tatctctaaataaaaagctagatggt

SEQ ID NO: 207621 - DNA, 26 bp, Artificial sequence
  SiRNA target sequence
atctctaaataaaaagctagatggtg

SEQ ID NO: 207622 - DNA, 26 bp, Artificial sequence
  SiRNA target sequence
tctctaaataaaaagctagatggtgt

SEQ ID NO: 207623 - DNA, 26 bp, Artificial sequence
  SiRNA target sequence
ctctaaataaaaagctagatggtgtt

SEQ ID NO: 207624 - DNA, 26 bp, Artificial sequence
  SiRNA target sequence
tctaaataaaaagctagatggtgtta

SEQ ID NO: 207625 - DNA, 26 bp, Artificial sequence
  SiRNA target sequence
ctaaataaaaagctagatggtgttac

SEQ ID NO: 207626 - DNA, 26 bp, Artificial sequence
  SiRNA target sequence
taaataaaaagctagatggtgttact

SEQ ID NO: 207627 - DNA, 26 bp, Artificial sequence
  SiRNA target sequence
aaataaaaagctagatggtgttactt

SEQ ID NO: 207628 - DNA, 26 bp, Artificial sequence
  SiRNA target sequence
aataaaaagctagatggtgttacttt

SEQ ID NO: 207629 - DNA, 26 bp, Artificial sequence
  SiRNA target sequence
ataaaaagctagatggtgttactttc

SEQ ID NO: 207630 - DNA, 26 bp, Artificial sequence
  SiRNA target sequence
taaaaagctagatggtgttactttct

SEQ ID NO: 207631 - DNA, 26 bp, Artificial sequence
  SiRNA target sequence
aaaaagctagatggtgttactttctc

SEQ ID NO: 207632 - DNA, 26 bp, Artificial sequence
  SiRNA target sequence
aaaagctagatggtgttactttctct

SEQ ID NO: 207633 - DNA, 26 bp, Artificial sequence
  SiRNA target sequence
aaagctagatggtgttactttctctt

SEQ ID NO: 207634 - DNA, 26 bp, Artificial sequence
  SiRNA target sequence
aagctagatggtgttactttctcttc

SEQ ID NO: 207635 - DNA, 26 bp, Artificial sequence
  SiRNA target sequence
agctagatggtgttactttctcttca

SEQ ID NO: 207636 - DNA, 26 bp, Artificial sequence
  SiRNA target sequence
gctagatggtgttactttctcttcaa

SEQ ID NO: 207637 - DNA, 26 bp, Artificial sequence
  SiRNA target sequence
ctagatggtgttactttctcttcaaa

SEQ ID NO: 207638 - DNA, 26 bp, Artificial sequence
  SiRNA target sequence
tagatggtgttactttctcttcaaac

SEQ ID NO: 207639 - DNA, 26 bp, Artificial sequence
  SiRNA target sequence
agatggtgttactttctcttcaaaca

SEQ ID NO: 207640 - DNA, 26 bp, Artificial sequence
  SiRNA target sequence
gatggtgttactttctcttcaaacaa

SEQ ID NO: 207641 - DNA, 26 bp, Artificial sequence
  SiRNA target sequence
atggtgttactttctcttcaaacaaa

SEQ ID NO: 207642 - DNA, 26 bp, Artificial sequence
  SiRNA target sequence
tggtgttactttctcttcaaacaaaa

SEQ ID NO: 207643 - DNA, 26 bp, Artificial sequence
  SiRNA target sequence
ggtgttactttctcttcaaacaaaaa

SEQ ID NO: 207644 - DNA, 26 bp, Artificial sequence
  SiRNA target sequence
gtgttactttctcttcaaacaaaaag

SEQ ID NO: 207645 - DNA, 26 bp, Artificial sequence
  SiRNA target sequence
tgttactttctcttcaaacaaaaaga

SEQ ID NO: 207646 - DNA, 26 bp, Artificial sequence
  SiRNA target sequence
gttactttctcttcaaacaaaaagat

SEQ ID NO: 207647 - DNA, 26 bp, Artificial sequence
  SiRNA target sequence
ttactttctcttcaaacaaaaagatt

SEQ ID NO: 207648 - DNA, 26 bp, Artificial sequence
  SiRNA target sequence
tactttctcttcaaacaaaaagattg

SEQ ID NO: 207649 - DNA, 26 bp, Artificial sequence
  SiRNA target sequence
actttctcttcaaacaaaaagattgc

SEQ ID NO: 207650 - DNA, 26 bp, Artificial sequence
  SiRNA target sequence
ctttctcttcaaacaaaaagattgcc

SEQ ID NO: 207651 - DNA, 26 bp, Artificial sequence
  SiRNA target sequence
tttctcttcaaacaaaaagattgccc

SEQ ID NO: 207652 - DNA, 26 bp, Artificial sequence
  SiRNA target sequence
ttctcttcaaacaaaaagattgcccc

SEQ ID NO: 207653 - DNA, 26 bp, Artificial sequence
  SiRNA target sequence
tctcttcaaacaaaaagattgcccct

SEQ ID NO: 207654 - DNA, 26 bp, Artificial sequence
  SiRNA target sequence
ctcttcaaacaaaaagattgccccta

SEQ ID NO: 207655 - DNA, 26 bp, Artificial sequence
  SiRNA target sequence
tcttcaaacaaaaagattgcccctag

SEQ ID NO: 207656 - DNA, 26 bp, Artificial sequence
  SiRNA target sequence
cttcaaacaaaaagattgcccctagt

SEQ ID NO: 207657 - DNA, 26 bp, Artificial sequence
  SiRNA target sequence
ttcaaacaaaaagattgcccctagtc

SEQ ID NO: 207658 - DNA, 26 bp, Artificial sequence
  SiRNA target sequence
tcaaacaaaaagattgcccctagtcc

SEQ ID NO: 207659 - DNA, 26 bp, Artificial sequence
  SiRNA target sequence
caaacaaaaagattgcccctagtccg

SEQ ID NO: 207660 - DNA, 26 bp, Artificial sequence
  SiRNA target sequence
aaacaaaaagattgcccctagtccga

SEQ ID NO: 207661 - DNA, 26 bp, Artificial sequence
  SiRNA target sequence
aacaaaaagattgcccctagtccgaa

SEQ ID NO: 207662 - DNA, 26 bp, Artificial sequence
  SiRNA target sequence
acaaaaagattgcccctagtccgaag

SEQ ID NO: 207663 - DNA, 26 bp, Artificial sequence
  SiRNA target sequence
caaaaagattgcccctagtccgaaga

SEQ ID NO: 207664 - DNA, 26 bp, Artificial sequence
  SiRNA target sequence
aaaaagattgcccctagtccgaagaa

SEQ ID NO: 207665 - DNA, 26 bp, Artificial sequence
  SiRNA target sequence
aaaagattgcccctagtccgaagaaa

SEQ ID NO: 207666 - DNA, 26 bp, Artificial sequence
  SiRNA target sequence
aaagattgcccctagtccgaagaaaa

SEQ ID NO: 207667 - DNA, 26 bp, Artificial sequence
  SiRNA target sequence
aagattgcccctagtccgaagaaaaa

SEQ ID NO: 207668 - DNA, 26 bp, Artificial sequence
  SiRNA target sequence
agattgcccctagtccgaagaaaaat

SEQ ID NO: 207669 - DNA, 26 bp, Artificial sequence
  SiRNA target sequence
gattgcccctagtccgaagaaaaatg

SEQ ID NO: 207670 - DNA, 26 bp, Artificial sequence
  SiRNA target sequence
attgcccctagtccgaagaaaaatgc

SEQ ID NO: 207671 - DNA, 26 bp, Artificial sequence
  SiRNA target sequence
ttgcccctagtccgaagaaaaatgca

SEQ ID NO: 207672 - DNA, 26 bp, Artificial sequence
  SiRNA target sequence
tgcccctagtccgaagaaaaatgcag

SEQ ID NO: 207673 - DNA, 26 bp, Artificial sequence
  SiRNA target sequence
gcccctagtccgaagaaaaatgcagt

SEQ ID NO: 207674 - DNA, 26 bp, Artificial sequence
  SiRNA target sequence
cccctagtccgaagaaaaatgcagta

SEQ ID NO: 207675 - DNA, 26 bp, Artificial sequence
  SiRNA target sequence
ccctagtccgaagaaaaatgcagtaa

SEQ ID NO: 207676 - DNA, 26 bp, Artificial sequence
  SiRNA target sequence
cctagtccgaagaaaaatgcagtaaa

SEQ ID NO: 207677 - DNA, 26 bp, Artificial sequence
  SiRNA target sequence
ctagtccgaagaaaaatgcagtaaaa

SEQ ID NO: 207678 - DNA, 26 bp, Artificial sequence
  SiRNA target sequence
tagtccgaagaaaaatgcagtaaaaa

SEQ ID NO: 207679 - DNA, 26 bp, Artificial sequence
  SiRNA target sequence
agtccgaagaaaaatgcagtaaaaat

SEQ ID NO: 207680 - DNA, 26 bp, Artificial sequence
  SiRNA target sequence
gtccgaagaaaaatgcagtaaaaatt

SEQ ID NO: 207681 - DNA, 26 bp, Artificial sequence
  SiRNA target sequence
tccgaagaaaaatgcagtaaaaatta

SEQ ID NO: 207682 - DNA, 26 bp, Artificial sequence
  SiRNA target sequence
ccgaagaaaaatgcagtaaaaattat

SEQ ID NO: 207683 - DNA, 26 bp, Artificial sequence
  SiRNA target sequence
cgaagaaaaatgcagtaaaaattatt

SEQ ID NO: 207684 - DNA, 26 bp, Artificial sequence
  SiRNA target sequence
gaagaaaaatgcagtaaaaattatta

SEQ ID NO: 207685 - DNA, 26 bp, Artificial sequence
  SiRNA target sequence
aagaaaaatgcagtaaaaattattag

SEQ ID NO: 207686 - DNA, 26 bp, Artificial sequence
  SiRNA target sequence
agaaaaatgcagtaaaaattattaga

SEQ ID NO: 207687 - DNA, 26 bp, Artificial sequence
  SiRNA target sequence
gaaaaatgcagtaaaaattattagaa

SEQ ID NO: 207688 - DNA, 26 bp, Artificial sequence
  SiRNA target sequence
aaaaatgcagtaaaaattattagaaa

SEQ ID NO: 207689 - DNA, 26 bp, Artificial sequence
  SiRNA target sequence
aaaatgcagtaaaaattattagaaat

SEQ ID NO: 207690 - DNA, 26 bp, Artificial sequence
  SiRNA target sequence
aaatgcagtaaaaattattagaaata

SEQ ID NO: 207691 - DNA, 26 bp, Artificial sequence
  SiRNA target sequence
aatgcagtaaaaattattagaaatag

SEQ ID NO: 207692 - DNA, 26 bp, Artificial sequence
  SiRNA target sequence
atgcagtaaaaattattagaaataga

SEQ ID NO: 207693 - DNA, 26 bp, Artificial sequence
  SiRNA target sequence
tgcagtaaaaattattagaaatagat

SEQ ID NO: 207694 - DNA, 26 bp, Artificial sequence
  SiRNA target sequence
gcagtaaaaattattagaaatagatt

SEQ ID NO: 207695 - DNA, 26 bp, Artificial sequence
  SiRNA target sequence
cagtaaaaattattagaaatagatta

SEQ ID NO: 207696 - DNA, 26 bp, Artificial sequence
  SiRNA target sequence
agtaaaaattattagaaatagattaa

SEQ ID NO: 207697 - DNA, 26 bp, Artificial sequence
  SiRNA target sequence
gtaaaaattattagaaatagattaaa

SEQ ID NO: 207698 - DNA, 26 bp, Artificial sequence
  SiRNA target sequence
taaaaattattagaaatagattaaaa

SEQ ID NO: 207699 - DNA, 26 bp, Artificial sequence
  SiRNA target sequence
aaaaattattagaaatagattaaaaa

SEQ ID NO: 207700 - DNA, 26 bp, Artificial sequence
  SiRNA target sequence
aaaattattagaaatagattaaaaat

SEQ ID NO: 207701 - DNA, 26 bp, Artificial sequence
  SiRNA target sequence
aaattattagaaatagattaaaaatc

SEQ ID NO: 207702 - DNA, 26 bp, Artificial sequence
  SiRNA target sequence
aattattagaaatagattaaaaatcg

SEQ ID NO: 207703 - DNA, 26 bp, Artificial sequence
  SiRNA target sequence
attattagaaatagattaaaaatcga

SEQ ID NO: 207704 - DNA, 26 bp, Artificial sequence
  SiRNA target sequence
ttattagaaatagattaaaaatcgat

SEQ ID NO: 207705 - DNA, 26 bp, Artificial sequence
  SiRNA target sequence
tattagaaatagattaaaaatcgatg

SEQ ID NO: 207706 - DNA, 26 bp, Artificial sequence
  SiRNA target sequence
attagaaatagattaaaaatcgatga

SEQ ID NO: 207707 - DNA, 26 bp, Artificial sequence
  SiRNA target sequence
ttagaaatagattaaaaatcgatgat

SEQ ID NO: 207708 - DNA, 26 bp, Artificial sequence
  SiRNA target sequence
tagaaatagattaaaaatcgatgata

SEQ ID NO: 207709 - DNA, 26 bp, Artificial sequence
  SiRNA target sequence
agaaatagattaaaaatcgatgatac

SEQ ID NO: 207710 - DNA, 26 bp, Artificial sequence
  SiRNA target sequence
gaaatagattaaaaatcgatgataca

SEQ ID NO: 207711 - DNA, 26 bp, Artificial sequence
  SiRNA target sequence
aaatagattaaaaatcgatgatacag

SEQ ID NO: 207712 - DNA, 26 bp, Artificial sequence
  SiRNA target sequence
aatagattaaaaatcgatgatacagg

SEQ ID NO: 207713 - DNA, 26 bp, Artificial sequence
  SiRNA target sequence
atagattaaaaatcgatgatacaggt

SEQ ID NO: 207714 - DNA, 26 bp, Artificial sequence
  SiRNA target sequence
tagattaaaaatcgatgatacaggtt

SEQ ID NO: 207715 - DNA, 26 bp, Artificial sequence
  SiRNA target sequence
agattaaaaatcgatgatacaggttt

SEQ ID NO: 207716 - DNA, 26 bp, Artificial sequence
  SiRNA target sequence
gattaaaaatcgatgatacaggttta

SEQ ID NO: 207717 - DNA, 26 bp, Artificial sequence
  SiRNA target sequence
attaaaaatcgatgatacaggtttat

SEQ ID NO: 207718 - DNA, 26 bp, Artificial sequence
  SiRNA target sequence
ttaaaaatcgatgatacaggtttatt

SEQ ID NO: 207719 - DNA, 26 bp, Artificial sequence
  SiRNA target sequence
taaaaatcgatgatacaggtttattt

SEQ ID NO: 207720 - DNA, 26 bp, Artificial sequence
  SiRNA target sequence
aaaaatcgatgatacaggtttatttt

SEQ ID NO: 207721 - DNA, 26 bp, Artificial sequence
  SiRNA target sequence
aaaatcgatgatacaggtttattttg

SEQ ID NO: 207722 - DNA, 26 bp, Artificial sequence
  SiRNA target sequence
aaatcgatgatacaggtttattttgc

SEQ ID NO: 207723 - DNA, 26 bp, Artificial sequence
  SiRNA target sequence
aatcgatgatacaggtttattttgca

SEQ ID NO: 207724 - DNA, 26 bp, Artificial sequence
  SiRNA target sequence
atcgatgatacaggtttattttgcat

SEQ ID NO: 207725 - DNA, 26 bp, Artificial sequence
  SiRNA target sequence
tcgatgatacaggtttattttgcata

SEQ ID NO: 207726 - DNA, 26 bp, Artificial sequence
  SiRNA target sequence
cgatgatacaggtttattttgcataa

SEQ ID NO: 207727 - DNA, 26 bp, Artificial sequence
  SiRNA target sequence
gatgatacaggtttattttgcataag

SEQ ID NO: 207728 - DNA, 26 bp, Artificial sequence
  SiRNA target sequence
atgatacaggtttattttgcataagc

SEQ ID NO: 207729 - DNA, 26 bp, Artificial sequence
  SiRNA target sequence
tgatacaggtttattttgcataagcc

SEQ ID NO: 207730 - DNA, 26 bp, Artificial sequence
  SiRNA target sequence
gatacaggtttattttgcataagcca

SEQ ID NO: 207731 - DNA, 26 bp, Artificial sequence
  SiRNA target sequence
atacaggtttattttgcataagccac

SEQ ID NO: 207732 - DNA, 26 bp, Artificial sequence
  SiRNA target sequence
tacaggtttattttgcataagccact

SEQ ID NO: 207733 - DNA, 26 bp, Artificial sequence
  SiRNA target sequence
acaggtttattttgcataagccactg

SEQ ID NO: 207734 - DNA, 26 bp, Artificial sequence
  SiRNA target sequence
caggtttattttgcataagccactgt

SEQ ID NO: 207735 - DNA, 26 bp, Artificial sequence
  SiRNA target sequence
aggtttattttgcataagccactgta

SEQ ID NO: 207736 - DNA, 26 bp, Artificial sequence
  SiRNA target sequence
ggtttattttgcataagccactgtat

SEQ ID NO: 207737 - DNA, 26 bp, Artificial sequence
  SiRNA target sequence
gtttattttgcataagccactgtatt

SEQ ID NO: 207738 - DNA, 26 bp, Artificial sequence
  SiRNA target sequence
tttattttgcataagccactgtatta

SEQ ID NO: 207739 - DNA, 26 bp, Artificial sequence
  SiRNA target sequence
ttattttgcataagccactgtattaa

SEQ ID NO: 207740 - DNA, 26 bp, Artificial sequence
  SiRNA target sequence
tattttgcataagccactgtattaaa

SEQ ID NO: 207741 - DNA, 26 bp, Artificial sequence
  SiRNA target sequence
attttgcataagccactgtattaaaa

SEQ ID NO: 207742 - DNA, 26 bp, Artificial sequence
  SiRNA target sequence
ttttgcataagccactgtattaaaat

SEQ ID NO: 207743 - DNA, 26 bp, Artificial sequence
  SiRNA target sequence
tttgcataagccactgtattaaaatt

SEQ ID NO: 207744 - DNA, 26 bp, Artificial sequence
  SiRNA target sequence
ttgcataagccactgtattaaaatta

SEQ ID NO: 207745 - DNA, 26 bp, Artificial sequence
  SiRNA target sequence
tgcataagccactgtattaaaattac

SEQ ID NO: 207746 - DNA, 26 bp, Artificial sequence
  SiRNA target sequence
gcataagccactgtattaaaattaca

SEQ ID NO: 207747 - DNA, 26 bp, Artificial sequence
  SiRNA target sequence
cataagccactgtattaaaattacag

SEQ ID NO: 207748 - DNA, 26 bp, Artificial sequence
  SiRNA target sequence
ataagccactgtattaaaattacaga

SEQ ID NO: 207749 - DNA, 26 bp, Artificial sequence
  SiRNA target sequence
taagccactgtattaaaattacagat

SEQ ID NO: 207750 - DNA, 26 bp, Artificial sequence
  SiRNA target sequence
aagccactgtattaaaattacagatg

SEQ ID NO: 207751 - DNA, 26 bp, Artificial sequence
  SiRNA target sequence
agccactgtattaaaattacagatgc

SEQ ID NO: 207752 - DNA, 26 bp, Artificial sequence
  SiRNA target sequence
gccactgtattaaaattacagatgca

SEQ ID NO: 207753 - DNA, 26 bp, Artificial sequence
  SiRNA target sequence
ccactgtattaaaattacagatgcaa

SEQ ID NO: 207754 - DNA, 26 bp, Artificial sequence
  SiRNA target sequence
cactgtattaaaattacagatgcaaa

SEQ ID NO: 207755 - DNA, 26 bp, Artificial sequence
  SiRNA target sequence
actgtattaaaattacagatgcaaaa

SEQ ID NO: 207756 - DNA, 26 bp, Artificial sequence
  SiRNA target sequence
ctgtattaaaattacagatgcaaaag

SEQ ID NO: 207757 - DNA, 26 bp, Artificial sequence
  SiRNA target sequence
tgtattaaaattacagatgcaaaaga

SEQ ID NO: 207758 - DNA, 26 bp, Artificial sequence
  SiRNA target sequence
gtattaaaattacagatgcaaaagat

SEQ ID NO: 207759 - DNA, 26 bp, Artificial sequence
  SiRNA target sequence
tattaaaattacagatgcaaaagata

SEQ ID NO: 207760 - DNA, 26 bp, Artificial sequence
  SiRNA target sequence
attaaaattacagatgcaaaagatat

SEQ ID NO: 207761 - DNA, 26 bp, Artificial sequence
  SiRNA target sequence
ttaaaattacagatgcaaaagatata

SEQ ID NO: 207762 - DNA, 26 bp, Artificial sequence
  SiRNA target sequence
taaaattacagatgcaaaagatatag

SEQ ID NO: 207763 - DNA, 26 bp, Artificial sequence
  SiRNA target sequence
aaaattacagatgcaaaagatatagg

SEQ ID NO: 207764 - DNA, 26 bp, Artificial sequence
  SiRNA target sequence
aaattacagatgcaaaagatatagga

SEQ ID NO: 207765 - DNA, 26 bp, Artificial sequence
  SiRNA target sequence
aattacagatgcaaaagatataggaa

SEQ ID NO: 207766 - DNA, 26 bp, Artificial sequence
  SiRNA target sequence
attacagatgcaaaagatataggaag

SEQ ID NO: 207767 - DNA, 26 bp, Artificial sequence
  SiRNA target sequence
ttacagatgcaaaagatataggaaga

SEQ ID NO: 207768 - DNA, 26 bp, Artificial sequence
  SiRNA target sequence
tacagatgcaaaagatataggaagaa

SEQ ID NO: 207769 - DNA, 26 bp, Artificial sequence
  SiRNA target sequence
acagatgcaaaagatataggaagaac

SEQ ID NO: 207770 - DNA, 26 bp, Artificial sequence
  SiRNA target sequence
cagatgcaaaagatataggaagaaca

SEQ ID NO: 207771 - DNA, 26 bp, Artificial sequence
  SiRNA target sequence
agatgcaaaagatataggaagaacat

SEQ ID NO: 207772 - DNA, 26 bp, Artificial sequence
  SiRNA target sequence
gatgcaaaagatataggaagaacata

SEQ ID NO: 207773 - DNA, 26 bp, Artificial sequence
  SiRNA target sequence
atgcaaaagatataggaagaacataa

SEQ ID NO: 207774 - DNA, 26 bp, Artificial sequence
  SiRNA target sequence
tgcaaaagatataggaagaacataaa

SEQ ID NO: 207775 - DNA, 26 bp, Artificial sequence
  SiRNA target sequence
gcaaaagatataggaagaacataaaa

SEQ ID NO: 207776 - DNA, 26 bp, Artificial sequence
  SiRNA target sequence
caaaagatataggaagaacataaaaa

SEQ ID NO: 207777 - DNA, 26 bp, Artificial sequence
  SiRNA target sequence
aaaagatataggaagaacataaaaaa

SEQ ID NO: 207778 - DNA, 26 bp, Artificial sequence
  SiRNA target sequence
aaagatataggaagaacataaaaaat

SEQ ID NO: 207779 - DNA, 26 bp, Artificial sequence
  SiRNA target sequence
aagatataggaagaacataaaaaatt

SEQ ID NO: 207780 - DNA, 26 bp, Artificial sequence
  SiRNA target sequence
agatataggaagaacataaaaaattt

SEQ ID NO: 207781 - DNA, 26 bp, Artificial sequence
  SiRNA target sequence
gatataggaagaacataaaaaatttt

SEQ ID NO: 207782 - DNA, 26 bp, Artificial sequence
  SiRNA target sequence
atataggaagaacataaaaaattttc

SEQ ID NO: 207783 - DNA, 26 bp, Artificial sequence
  SiRNA target sequence
tataggaagaacataaaaaattttca

SEQ ID NO: 207784 - DNA, 26 bp, Artificial sequence
  SiRNA target sequence
ataggaagaacataaaaaattttcat

SEQ ID NO: 207785 - DNA, 26 bp, Artificial sequence
  SiRNA target sequence
taggaagaacataaaaaattttcata

SEQ ID NO: 207786 - DNA, 26 bp, Artificial sequence
  SiRNA target sequence
aggaagaacataaaaaattttcataa

SEQ ID NO: 207787 - DNA, 26 bp, Artificial sequence
  SiRNA target sequence
ggaagaacataaaaaattttcataaa

SEQ ID NO: 207788 - DNA, 26 bp, Artificial sequence
  SiRNA target sequence
gaagaacataaaaaattttcataaac

SEQ ID NO: 207789 - DNA, 26 bp, Artificial sequence
  SiRNA target sequence
aagaacataaaaaattttcataaaca

SEQ ID NO: 207790 - DNA, 26 bp, Artificial sequence
  SiRNA target sequence
agaacataaaaaattttcataaacat

SEQ ID NO: 207791 - DNA, 26 bp, Artificial sequence
  SiRNA target sequence
gaacataaaaaattttcataaacata

SEQ ID NO: 207792 - DNA, 26 bp, Artificial sequence
  SiRNA target sequence
aacataaaaaattttcataaacataa

SEQ ID NO: 207793 - DNA, 26 bp, Artificial sequence
  SiRNA target sequence
acataaaaaattttcataaacataat

SEQ ID NO: 207794 - DNA, 26 bp, Artificial sequence
  SiRNA target sequence
cataaaaaattttcataaacataatt

SEQ ID NO: 207795 - DNA, 26 bp, Artificial sequence
  SiRNA target sequence
ataaaaaattttcataaacataattg

SEQ ID NO: 207796 - DNA, 26 bp, Artificial sequence
  SiRNA target sequence
taaaaaattttcataaacataattga

SEQ ID NO: 207797 - DNA, 26 bp, Artificial sequence
  SiRNA target sequence
aaaaaattttcataaacataattgaa

SEQ ID NO: 207798 - DNA, 26 bp, Artificial sequence
  SiRNA target sequence
aaaaattttcataaacataattgaat

SEQ ID NO: 207799 - DNA, 26 bp, Artificial sequence
  SiRNA target sequence
aaaattttcataaacataattgaatt

SEQ ID NO: 207800 - DNA, 26 bp, Artificial sequence
  SiRNA target sequence
aaattttcataaacataattgaattc

SEQ ID NO: 207801 - DNA, 26 bp, Artificial sequence
  SiRNA target sequence
aattttcataaacataattgaattct

SEQ ID NO: 207802 - DNA, 26 bp, Artificial sequence
  SiRNA target sequence
attttcataaacataattgaattctg

SEQ ID NO: 207803 - DNA, 26 bp, Artificial sequence
  SiRNA target sequence
ttttcataaacataattgaattctga

SEQ ID NO: 207804 - DNA, 26 bp, Artificial sequence
  SiRNA target sequence
tttcataaacataattgaattctgat

SEQ ID NO: 207805 - DNA, 26 bp, Artificial sequence
  SiRNA target sequence
ttcataaacataattgaattctgatc

SEQ ID NO: 207806 - DNA, 26 bp, Artificial sequence
  SiRNA target sequence
tcataaacataattgaattctgatct

SEQ ID NO: 207807 - DNA, 26 bp, Artificial sequence
  SiRNA target sequence
cataaacataattgaattctgatctt

SEQ ID NO: 207808 - DNA, 26 bp, Artificial sequence
  SiRNA target sequence
ataaacataattgaattctgatcttg

SEQ ID NO: 207809 - DNA, 26 bp, Artificial sequence
  SiRNA target sequence
taaacataattgaattctgatcttgc

SEQ ID NO: 207810 - DNA, 26 bp, Artificial sequence
  SiRNA target sequence
aaacataattgaattctgatcttgcc

SEQ ID NO: 207811 - DNA, 26 bp, Artificial sequence
  SiRNA target sequence
aacataattgaattctgatcttgcct

SEQ ID NO: 207812 - DNA, 26 bp, Artificial sequence
  SiRNA target sequence
acataattgaattctgatcttgcctt

SEQ ID NO: 207813 - DNA, 26 bp, Artificial sequence
  SiRNA target sequence
cataattgaattctgatcttgcctta

SEQ ID NO: 207814 - DNA, 26 bp, Artificial sequence
  SiRNA target sequence
ataattgaattctgatcttgccttac

SEQ ID NO: 207815 - DNA, 26 bp, Artificial sequence
  SiRNA target sequence
taattgaattctgatcttgccttacc

SEQ ID NO: 207816 - DNA, 26 bp, Artificial sequence
  SiRNA target sequence
aattgaattctgatcttgccttacca

SEQ ID NO: 207817 - DNA, 26 bp, Artificial sequence
  SiRNA target sequence
attgaattctgatcttgccttaccat

SEQ ID NO: 207818 - DNA, 26 bp, Artificial sequence
  SiRNA target sequence
ttgaattctgatcttgccttaccatc

SEQ ID NO: 207819 - DNA, 26 bp, Artificial sequence
  SiRNA target sequence
tgaattctgatcttgccttaccatca

SEQ ID NO: 207820 - DNA, 26 bp, Artificial sequence
  SiRNA target sequence
gaattctgatcttgccttaccatcac

SEQ ID NO: 207821 - DNA, 26 bp, Artificial sequence
  SiRNA target sequence
aattctgatcttgccttaccatcaca

SEQ ID NO: 207822 - DNA, 26 bp, Artificial sequence
  SiRNA target sequence
attctgatcttgccttaccatcacaa

SEQ ID NO: 207823 - DNA, 26 bp, Artificial sequence
  SiRNA target sequence
ttctgatcttgccttaccatcacaaa

SEQ ID NO: 207824 - DNA, 26 bp, Artificial sequence
  SiRNA target sequence
tctgatcttgccttaccatcacaaat

SEQ ID NO: 207825 - DNA, 26 bp, Artificial sequence
  SiRNA target sequence
ctgatcttgccttaccatcacaaata

SEQ ID NO: 207826 - DNA, 26 bp, Artificial sequence
  SiRNA target sequence
tgatcttgccttaccatcacaaataa

SEQ ID NO: 207827 - DNA, 26 bp, Artificial sequence
  SiRNA target sequence
gatcttgccttaccatcacaaataaa

SEQ ID NO: 207828 - DNA, 26 bp, Artificial sequence
  SiRNA target sequence
atcttgccttaccatcacaaataaat

SEQ ID NO: 207829 - DNA, 26 bp, Artificial sequence
  SiRNA target sequence
tcttgccttaccatcacaaataaatc

SEQ ID NO: 207830 - DNA, 26 bp, Artificial sequence
  SiRNA target sequence
cttgccttaccatcacaaataaatct

SEQ ID NO: 207831 - DNA, 26 bp, Artificial sequence
  SiRNA target sequence
ttgccttaccatcacaaataaatctt

SEQ ID NO: 207832 - DNA, 26 bp, Artificial sequence
  SiRNA target sequence
tgccttaccatcacaaataaatcttt

SEQ ID NO: 207833 - DNA, 26 bp, Artificial sequence
  SiRNA target sequence
gccttaccatcacaaataaatctttt

SEQ ID NO: 207834 - DNA, 26 bp, Artificial sequence
  SiRNA target sequence
ccttaccatcacaaataaatctttta

SEQ ID NO: 207835 - DNA, 26 bp, Artificial sequence
  SiRNA target sequence
cttaccatcacaaataaatcttttaa

SEQ ID NO: 207836 - DNA, 26 bp, Artificial sequence
  SiRNA target sequence
ttaccatcacaaataaatcttttaaa

SEQ ID NO: 207837 - DNA, 26 bp, Artificial sequence
  SiRNA target sequence
taccatcacaaataaatcttttaaaa

SEQ ID NO: 207838 - DNA, 26 bp, Artificial sequence
  SiRNA target sequence
accatcacaaataaatcttttaaaat

SEQ ID NO: 207839 - DNA, 26 bp, Artificial sequence
  SiRNA target sequence
ccatcacaaataaatcttttaaaatt

SEQ ID NO: 207840 - DNA, 26 bp, Artificial sequence
  SiRNA target sequence
catcacaaataaatcttttaaaattc

SEQ ID NO: 207841 - DNA, 26 bp, Artificial sequence
  SiRNA target sequence
atcacaaataaatcttttaaaattct

SEQ ID NO: 207842 - DNA, 26 bp, Artificial sequence
  SiRNA target sequence
tcacaaataaatcttttaaaattctt

SEQ ID NO: 207843 - DNA, 26 bp, Artificial sequence
  SiRNA target sequence
cacaaataaatcttttaaaattctta

SEQ ID NO: 207844 - DNA, 26 bp, Artificial sequence
  SiRNA target sequence
acaaataaatcttttaaaattcttaa

SEQ ID NO: 207845 - DNA, 26 bp, Artificial sequence
  SiRNA target sequence
caaataaatcttttaaaattcttaaa

SEQ ID NO: 207846 - DNA, 26 bp, Artificial sequence
  SiRNA target sequence
aaataaatcttttaaaattcttaaaa

SEQ ID NO: 207847 - DNA, 26 bp, Artificial sequence
  SiRNA target sequence
aataaatcttttaaaattcttaaaaa

SEQ ID NO: 207848 - DNA, 26 bp, Artificial sequence
  SiRNA target sequence
ataaatcttttaaaattcttaaaaat

SEQ ID NO: 207849 - DNA, 26 bp, Artificial sequence
  SiRNA target sequence
taaatcttttaaaattcttaaaaatg

SEQ ID NO: 207850 - DNA, 26 bp, Artificial sequence
  SiRNA target sequence
aaatcttttaaaattcttaaaaatga

SEQ ID NO: 207851 - DNA, 26 bp, Artificial sequence
  SiRNA target sequence
aatcttttaaaattcttaaaaatgaa

SEQ ID NO: 207852 - DNA, 26 bp, Artificial sequence
  SiRNA target sequence
atcttttaaaattcttaaaaatgaat

SEQ ID NO: 207853 - DNA, 26 bp, Artificial sequence
  SiRNA target sequence
tcttttaaaattcttaaaaatgaata

SEQ ID NO: 207854 - DNA, 26 bp, Artificial sequence
  SiRNA target sequence
cttttaaaattcttaaaaatgaatac

SEQ ID NO: 207855 - DNA, 26 bp, Artificial sequence
  SiRNA target sequence
ttttaaaattcttaaaaatgaataca

SEQ ID NO: 207856 - DNA, 26 bp, Artificial sequence
  SiRNA target sequence
tttaaaattcttaaaaatgaatacac

SEQ ID NO: 207857 - DNA, 26 bp, Artificial sequence
  SiRNA target sequence
ttaaaattcttaaaaatgaatacaca

SEQ ID NO: 207858 - DNA, 26 bp, Artificial sequence
  SiRNA target sequence
taaaattcttaaaaatgaatacacaa

SEQ ID NO: 207859 - DNA, 26 bp, Artificial sequence
  SiRNA target sequence
aaaattcttaaaaatgaatacacaaa

SEQ ID NO: 207860 - DNA, 26 bp, Artificial sequence
  SiRNA target sequence
aaattcttaaaaatgaatacacaaag

SEQ ID NO: 207861 - DNA, 26 bp, Artificial sequence
  SiRNA target sequence
aattcttaaaaatgaatacacaaagt

SEQ ID NO: 207862 - DNA, 26 bp, Artificial sequence
  SiRNA target sequence
attcttaaaaatgaatacacaaagtt

SEQ ID NO: 207863 - DNA, 26 bp, Artificial sequence
  SiRNA target sequence
ttcttaaaaatgaatacacaaagtta

SEQ ID NO: 207864 - DNA, 26 bp, Artificial sequence
  SiRNA target sequence
tcttaaaaatgaatacacaaagttaa

SEQ ID NO: 207865 - DNA, 26 bp, Artificial sequence
  SiRNA target sequence
cttaaaaatgaatacacaaagttaat

SEQ ID NO: 207866 - DNA, 26 bp, Artificial sequence
  SiRNA target sequence
ttaaaaatgaatacacaaagttaatt

SEQ ID NO: 207867 - DNA, 26 bp, Artificial sequence
  SiRNA target sequence
taaaaatgaatacacaaagttaatta

SEQ ID NO: 207868 - DNA, 26 bp, Artificial sequence
  SiRNA target sequence
aaaaatgaatacacaaagttaattaa

SEQ ID NO: 207869 - DNA, 26 bp, Artificial sequence
  SiRNA target sequence
aaaatgaatacacaaagttaattaat

SEQ ID NO: 207870 - DNA, 26 bp, Artificial sequence
  SiRNA target sequence
aaatgaatacacaaagttaattaatc

SEQ ID NO: 207871 - DNA, 26 bp, Artificial sequence
  SiRNA target sequence
aatgaatacacaaagttaattaatcc

SEQ ID NO: 207872 - DNA, 26 bp, Artificial sequence
  SiRNA target sequence
atgaatacacaaagttaattaatcca

SEQ ID NO: 207873 - DNA, 26 bp, Artificial sequence
  SiRNA target sequence
tgaatacacaaagttaattaatccaa

SEQ ID NO: 207874 - DNA, 26 bp, Artificial sequence
  SiRNA target sequence
gaatacacaaagttaattaatccaaa

SEQ ID NO: 207875 - DNA, 26 bp, Artificial sequence
  SiRNA target sequence
aatacacaaagttaattaatccaaac

SEQ ID NO: 207876 - DNA, 26 bp, Artificial sequence
  SiRNA target sequence
atacacaaagttaattaatccaaaca

SEQ ID NO: 207877 - DNA, 26 bp, Artificial sequence
  SiRNA target sequence
tacacaaagttaattaatccaaacat

SEQ ID NO: 207878 - DNA, 26 bp, Artificial sequence
  SiRNA target sequence
acacaaagttaattaatccaaacata

SEQ ID NO: 207879 - DNA, 26 bp, Artificial sequence
  SiRNA target sequence
cacaaagttaattaatccaaacataa

SEQ ID NO: 207880 - DNA, 26 bp, Artificial sequence
  SiRNA target sequence
acaaagttaattaatccaaacataat

SEQ ID NO: 207881 - DNA, 26 bp, Artificial sequence
  SiRNA target sequence
caaagttaattaatccaaacataata

SEQ ID NO: 207882 - DNA, 26 bp, Artificial sequence
  SiRNA target sequence
aaagttaattaatccaaacataatac

SEQ ID NO: 207883 - DNA, 26 bp, Artificial sequence
  SiRNA target sequence
aagttaattaatccaaacataatacc

SEQ ID NO: 207884 - DNA, 26 bp, Artificial sequence
  SiRNA target sequence
agttaattaatccaaacataatacca

SEQ ID NO: 207885 - DNA, 26 bp, Artificial sequence
  SiRNA target sequence
gttaattaatccaaacataataccaa

SEQ ID NO: 207886 - DNA, 26 bp, Artificial sequence
  SiRNA target sequence
ttaattaatccaaacataataccaag

SEQ ID NO: 207887 - DNA, 26 bp, Artificial sequence
  SiRNA target sequence
taattaatccaaacataataccaagt

SEQ ID NO: 207888 - DNA, 26 bp, Artificial sequence
  SiRNA target sequence
aattaatccaaacataataccaagta

SEQ ID NO: 207889 - DNA, 26 bp, Artificial sequence
  SiRNA target sequence
attaatccaaacataataccaagtat

SEQ ID NO: 207890 - DNA, 26 bp, Artificial sequence
  SiRNA target sequence
ttaatccaaacataataccaagtata

SEQ ID NO: 207891 - DNA, 26 bp, Artificial sequence
  SiRNA target sequence
taatccaaacataataccaagtataa

SEQ ID NO: 207892 - DNA, 26 bp, Artificial sequence
  SiRNA target sequence
aatccaaacataataccaagtataaa

SEQ ID NO: 207893 - DNA, 26 bp, Artificial sequence
  SiRNA target sequence
atccaaacataataccaagtataaaa

SEQ ID NO: 207894 - DNA, 26 bp, Artificial sequence
  SiRNA target sequence
tccaaacataataccaagtataaaaa

SEQ ID NO: 207895 - DNA, 26 bp, Artificial sequence
  SiRNA target sequence
ccaaacataataccaagtataaaaaa

SEQ ID NO: 207896 - DNA, 26 bp, Artificial sequence
  SiRNA target sequence
caaacataataccaagtataaaaaat

SEQ ID NO: 207897 - DNA, 26 bp, Artificial sequence
  SiRNA target sequence
aaacataataccaagtataaaaaatt

SEQ ID NO: 207898 - DNA, 26 bp, Artificial sequence
  SiRNA target sequence
aacataataccaagtataaaaaattt

SEQ ID NO: 207899 - DNA, 26 bp, Artificial sequence
  SiRNA target sequence
acataataccaagtataaaaaattta

SEQ ID NO: 207900 - DNA, 26 bp, Artificial sequence
  SiRNA target sequence
cataataccaagtataaaaaatttag

SEQ ID NO: 207901 - DNA, 26 bp, Artificial sequence
  SiRNA target sequence
ataataccaagtataaaaaatttagg

SEQ ID NO: 207902 - DNA, 26 bp, Artificial sequence
  SiRNA target sequence
taataccaagtataaaaaatttaggc

SEQ ID NO: 207903 - DNA, 26 bp, Artificial sequence
  SiRNA target sequence
aataccaagtataaaaaatttaggca

SEQ ID NO: 207904 - DNA, 26 bp, Artificial sequence
  SiRNA target sequence
ataccaagtataaaaaatttaggcat

SEQ ID NO: 207905 - DNA, 26 bp, Artificial sequence
  SiRNA target sequence
taccaagtataaaaaatttaggcatt

SEQ ID NO: 207906 - DNA, 26 bp, Artificial sequence
  SiRNA target sequence
accaagtataaaaaatttaggcattt

SEQ ID NO: 207907 - DNA, 26 bp, Artificial sequence
  SiRNA target sequence
ccaagtataaaaaatttaggcatttc

SEQ ID NO: 207908 - DNA, 26 bp, Artificial sequence
  SiRNA target sequence
caagtataaaaaatttaggcatttca

SEQ ID NO: 207909 - DNA, 26 bp, Artificial sequence
  SiRNA target sequence
aagtataaaaaatttaggcatttcaa

SEQ ID NO: 207910 - DNA, 26 bp, Artificial sequence
  SiRNA target sequence
agtataaaaaatttaggcatttcaac

SEQ ID NO: 207911 - DNA, 26 bp, Artificial sequence
  SiRNA target sequence
gtataaaaaatttaggcatttcaacc

SEQ ID NO: 207912 - DNA, 26 bp, Artificial sequence
  SiRNA target sequence
tataaaaaatttaggcatttcaacct

SEQ ID NO: 207913 - DNA, 26 bp, Artificial sequence
  SiRNA target sequence
ataaaaaatttaggcatttcaacctt

SEQ ID NO: 207914 - DNA, 26 bp, Artificial sequence
  SiRNA target sequence
taaaaaatttaggcatttcaacctta

SEQ ID NO: 207915 - DNA, 26 bp, Artificial sequence
  SiRNA target sequence
aaaaaatttaggcatttcaaccttag

SEQ ID NO: 207916 - DNA, 26 bp, Artificial sequence
  SiRNA target sequence
aaaaatttaggcatttcaaccttagc

SEQ ID NO: 207917 - DNA, 26 bp, Artificial sequence
  SiRNA target sequence
aaaatttaggcatttcaaccttagca

SEQ ID NO: 207918 - DNA, 26 bp, Artificial sequence
  SiRNA target sequence
aaatttaggcatttcaaccttagcaa

SEQ ID NO: 207919 - DNA, 26 bp, Artificial sequence
  SiRNA target sequence
aatttaggcatttcaaccttagcaac

SEQ ID NO: 207920 - DNA, 26 bp, Artificial sequence
  SiRNA target sequence
atttaggcatttcaaccttagcaact

SEQ ID NO: 207921 - DNA, 26 bp, Artificial sequence
  SiRNA target sequence
tttaggcatttcaaccttagcaactt

SEQ ID NO: 207922 - DNA, 26 bp, Artificial sequence
  SiRNA target sequence
ttaggcatttcaaccttagcaacttt

SEQ ID NO: 207923 - DNA, 26 bp, Artificial sequence
  SiRNA target sequence
taggcatttcaaccttagcaacttta

SEQ ID NO: 207924 - DNA, 26 bp, Artificial sequence
  SiRNA target sequence
aggcatttcaaccttagcaactttaa

SEQ ID NO: 207925 - DNA, 26 bp, Artificial sequence
  SiRNA target sequence
ggcatttcaaccttagcaactttaaa

SEQ ID NO: 207926 - DNA, 26 bp, Artificial sequence
  SiRNA target sequence
gcatttcaaccttagcaactttaaaa

SEQ ID NO: 207927 - DNA, 26 bp, Artificial sequence
  SiRNA target sequence
catttcaaccttagcaactttaaaat

SEQ ID NO: 207928 - DNA, 26 bp, Artificial sequence
  SiRNA target sequence
atttcaaccttagcaactttaaaata

SEQ ID NO: 207929 - DNA, 26 bp, Artificial sequence
  SiRNA target sequence
tttcaaccttagcaactttaaaataa

SEQ ID NO: 207930 - DNA, 26 bp, Artificial sequence
  SiRNA target sequence
ttcaaccttagcaactttaaaataac

SEQ ID NO: 207931 - DNA, 26 bp, Artificial sequence
  SiRNA target sequence
tcaaccttagcaactttaaaataact

SEQ ID NO: 207932 - DNA, 26 bp, Artificial sequence
  SiRNA target sequence
caaccttagcaactttaaaataactc

SEQ ID NO: 207933 - DNA, 26 bp, Artificial sequence
  SiRNA target sequence
aaccttagcaactttaaaataactca

SEQ ID NO: 207934 - DNA, 26 bp, Artificial sequence
  SiRNA target sequence
accttagcaactttaaaataactcag

SEQ ID NO: 207935 - DNA, 26 bp, Artificial sequence
  SiRNA target sequence
ccttagcaactttaaaataactcagt

SEQ ID NO: 207936 - DNA, 26 bp, Artificial sequence
  SiRNA target sequence
cttagcaactttaaaataactcagta

SEQ ID NO: 207937 - DNA, 26 bp, Artificial sequence
  SiRNA target sequence
ttagcaactttaaaataactcagtaa

SEQ ID NO: 207938 - DNA, 26 bp, Artificial sequence
  SiRNA target sequence
tagcaactttaaaataactcagtaat

SEQ ID NO: 207939 - DNA, 26 bp, Artificial sequence
  SiRNA target sequence
agcaactttaaaataactcagtaatc

SEQ ID NO: 207940 - DNA, 26 bp, Artificial sequence
  SiRNA target sequence
gcaactttaaaataactcagtaatcc

SEQ ID NO: 207941 - DNA, 26 bp, Artificial sequence
  SiRNA target sequence
caactttaaaataactcagtaatcct

SEQ ID NO: 207942 - DNA, 26 bp, Artificial sequence
  SiRNA target sequence
aactttaaaataactcagtaatcctg

SEQ ID NO: 207943 - DNA, 26 bp, Artificial sequence
  SiRNA target sequence
actttaaaataactcagtaatcctgt

SEQ ID NO: 207944 - DNA, 26 bp, Artificial sequence
  SiRNA target sequence
ctttaaaataactcagtaatcctgtt

SEQ ID NO: 207945 - DNA, 26 bp, Artificial sequence
  SiRNA target sequence
tttaaaataactcagtaatcctgttc

SEQ ID NO: 207946 - DNA, 26 bp, Artificial sequence
  SiRNA target sequence
ttaaaataactcagtaatcctgttct

SEQ ID NO: 207947 - DNA, 26 bp, Artificial sequence
  SiRNA target sequence
taaaataactcagtaatcctgttctt

SEQ ID NO: 207948 - DNA, 26 bp, Artificial sequence
  SiRNA target sequence
aaaataactcagtaatcctgttcttg

SEQ ID NO: 207949 - DNA, 26 bp, Artificial sequence
  SiRNA target sequence
aaataactcagtaatcctgttcttga

SEQ ID NO: 207950 - DNA, 26 bp, Artificial sequence
  SiRNA target sequence
aataactcagtaatcctgttcttgaa

SEQ ID NO: 207951 - DNA, 26 bp, Artificial sequence
  SiRNA target sequence
ataactcagtaatcctgttcttgaat

SEQ ID NO: 207952 - DNA, 26 bp, Artificial sequence
  SiRNA target sequence
taactcagtaatcctgttcttgaatt

SEQ ID NO: 207953 - DNA, 26 bp, Artificial sequence
  SiRNA target sequence
aactcagtaatcctgttcttgaattt

SEQ ID NO: 207954 - DNA, 26 bp, Artificial sequence
  SiRNA target sequence
actcagtaatcctgttcttgaatttg

SEQ ID NO: 207955 - DNA, 26 bp, Artificial sequence
  SiRNA target sequence
ctcagtaatcctgttcttgaatttgc

SEQ ID NO: 207956 - DNA, 26 bp, Artificial sequence
  SiRNA target sequence
tcagtaatcctgttcttgaatttgct

SEQ ID NO: 207957 - DNA, 26 bp, Artificial sequence
  SiRNA target sequence
cagtaatcctgttcttgaatttgcta

SEQ ID NO: 207958 - DNA, 26 bp, Artificial sequence
  SiRNA target sequence
agtaatcctgttcttgaatttgctaa

SEQ ID NO: 207959 - DNA, 26 bp, Artificial sequence
  SiRNA target sequence
gtaatcctgttcttgaatttgctaat

SEQ ID NO: 207960 - DNA, 26 bp, Artificial sequence
  SiRNA target sequence
taatcctgttcttgaatttgctaatt

SEQ ID NO: 207961 - DNA, 26 bp, Artificial sequence
  SiRNA target sequence
aatcctgttcttgaatttgctaattg

SEQ ID NO: 207962 - DNA, 26 bp, Artificial sequence
  SiRNA target sequence
atcctgttcttgaatttgctaattga

SEQ ID NO: 207963 - DNA, 26 bp, Artificial sequence
  SiRNA target sequence
tcctgttcttgaatttgctaattgat

SEQ ID NO: 207964 - DNA, 26 bp, Artificial sequence
  SiRNA target sequence
cctgttcttgaatttgctaattgatc

SEQ ID NO: 207965 - DNA, 26 bp, Artificial sequence
  SiRNA target sequence
ctgttcttgaatttgctaattgatca

SEQ ID NO: 207966 - DNA, 26 bp, Artificial sequence
  SiRNA target sequence
tgttcttgaatttgctaattgatcaa

SEQ ID NO: 207967 - DNA, 26 bp, Artificial sequence
  SiRNA target sequence
gttcttgaatttgctaattgatcaat

SEQ ID NO: 207968 - DNA, 26 bp, Artificial sequence
  SiRNA target sequence
ttcttgaatttgctaattgatcaatc

SEQ ID NO: 207969 - DNA, 26 bp, Artificial sequence
  SiRNA target sequence
tcttgaatttgctaattgatcaatct

SEQ ID NO: 207970 - DNA, 26 bp, Artificial sequence
  SiRNA target sequence
cttgaatttgctaattgatcaatctc

SEQ ID NO: 207971 - DNA, 26 bp, Artificial sequence
  SiRNA target sequence
ttgaatttgctaattgatcaatctca

SEQ ID NO: 207972 - DNA, 26 bp, Artificial sequence
  SiRNA target sequence
tgaatttgctaattgatcaatctcat

SEQ ID NO: 207973 - DNA, 26 bp, Artificial sequence
  SiRNA target sequence
gaatttgctaattgatcaatctcatc

SEQ ID NO: 207974 - DNA, 26 bp, Artificial sequence
  SiRNA target sequence
aatttgctaattgatcaatctcatct

SEQ ID NO: 207975 - DNA, 26 bp, Artificial sequence
  SiRNA target sequence
atttgctaattgatcaatctcatctt

SEQ ID NO: 207976 - DNA, 26 bp, Artificial sequence
  SiRNA target sequence
tttgctaattgatcaatctcatcttc

SEQ ID NO: 207977 - DNA, 26 bp, Artificial sequence
  SiRNA target sequence
ttgctaattgatcaatctcatcttcc

SEQ ID NO: 207978 - DNA, 26 bp, Artificial sequence
  SiRNA target sequence
tgctaattgatcaatctcatcttccg

SEQ ID NO: 207979 - DNA, 26 bp, Artificial sequence
  SiRNA target sequence
gctaattgatcaatctcatcttccgt

SEQ ID NO: 207980 - DNA, 26 bp, Artificial sequence
  SiRNA target sequence
ctaattgatcaatctcatcttccgta

SEQ ID NO: 207981 - DNA, 26 bp, Artificial sequence
  SiRNA target sequence
taattgatcaatctcatcttccgtag

SEQ ID NO: 207982 - DNA, 26 bp, Artificial sequence
  SiRNA target sequence
aattgatcaatctcatcttccgtagg

SEQ ID NO: 207983 - DNA, 26 bp, Artificial sequence
  SiRNA target sequence
attgatcaatctcatcttccgtaggt

SEQ ID NO: 207984 - DNA, 26 bp, Artificial sequence
  SiRNA target sequence
ttgatcaatctcatcttccgtaggta

SEQ ID NO: 207985 - DNA, 26 bp, Artificial sequence
  SiRNA target sequence
tgatcaatctcatcttccgtaggtaa

SEQ ID NO: 207986 - DNA, 26 bp, Artificial sequence
  SiRNA target sequence
gatcaatctcatcttccgtaggtaag

SEQ ID NO: 207987 - DNA, 26 bp, Artificial sequence
  SiRNA target sequence
atcaatctcatcttccgtaggtaagt

SEQ ID NO: 207988 - DNA, 26 bp, Artificial sequence
  SiRNA target sequence
tcaatctcatcttccgtaggtaagtt

SEQ ID NO: 207989 - DNA, 26 bp, Artificial sequence
  SiRNA target sequence
caatctcatcttccgtaggtaagttg

SEQ ID NO: 207990 - DNA, 26 bp, Artificial sequence
  SiRNA target sequence
aatctcatcttccgtaggtaagttgt

SEQ ID NO: 207991 - DNA, 26 bp, Artificial sequence
  SiRNA target sequence
atctcatcttccgtaggtaagttgtt

SEQ ID NO: 207992 - DNA, 26 bp, Artificial sequence
  SiRNA target sequence
tctcatcttccgtaggtaagttgttt

SEQ ID NO: 207993 - DNA, 26 bp, Artificial sequence
  SiRNA target sequence
ctcatcttccgtaggtaagttgtttt

SEQ ID NO: 207994 - DNA, 26 bp, Artificial sequence
  SiRNA target sequence
tcatcttccgtaggtaagttgttttc

SEQ ID NO: 207995 - DNA, 26 bp, Artificial sequence
  SiRNA target sequence
catcttccgtaggtaagttgttttca

SEQ ID NO: 207996 - DNA, 26 bp, Artificial sequence
  SiRNA target sequence
atcttccgtaggtaagttgttttcag

SEQ ID NO: 207997 - DNA, 26 bp, Artificial sequence
  SiRNA target sequence
tcttccgtaggtaagttgttttcagg

SEQ ID NO: 207998 - DNA, 26 bp, Artificial sequence
  SiRNA target sequence
cttccgtaggtaagttgttttcaggt

SEQ ID NO: 207999 - DNA, 26 bp, Artificial sequence
  SiRNA target sequence
ttccgtaggtaagttgttttcaggtg

SEQ ID NO: 208000 - DNA, 26 bp, Artificial sequence
  SiRNA target sequence
tccgtaggtaagttgttttcaggtgt

SEQ ID NO: 208001 - DNA, 26 bp, Artificial sequence
  SiRNA target sequence
ccgtaggtaagttgttttcaggtgtt

SEQ ID NO: 208002 - DNA, 26 bp, Artificial sequence
  SiRNA target sequence
cgtaggtaagttgttttcaggtgttt

SEQ ID NO: 208003 - DNA, 26 bp, Artificial sequence
  SiRNA target sequence
gtaggtaagttgttttcaggtgtttc

SEQ ID NO: 208004 - DNA, 26 bp, Artificial sequence
  SiRNA target sequence
taggtaagttgttttcaggtgtttca

SEQ ID NO: 208005 - DNA, 26 bp, Artificial sequence
  SiRNA target sequence
aggtaagttgttttcaggtgtttcat

SEQ ID NO: 208006 - DNA, 26 bp, Artificial sequence
  SiRNA target sequence
ggtaagttgttttcaggtgtttcatt

SEQ ID NO: 208007 - DNA, 26 bp, Artificial sequence
  SiRNA target sequence
gtaagttgttttcaggtgtttcattt

SEQ ID NO: 208008 - DNA, 26 bp, Artificial sequence
  SiRNA target sequence
taagttgttttcaggtgtttcattta

SEQ ID NO: 208009 - DNA, 26 bp, Artificial sequence
  SiRNA target sequence
aagttgttttcaggtgtttcatttat

SEQ ID NO: 208010 - DNA, 26 bp, Artificial sequence
  SiRNA target sequence
agttgttttcaggtgtttcatttatt

SEQ ID NO: 208011 - DNA, 26 bp, Artificial sequence
  SiRNA target sequence
gttgttttcaggtgtttcatttatta

SEQ ID NO: 208012 - DNA, 26 bp, Artificial sequence
  SiRNA target sequence
ttgttttcaggtgtttcatttattac

SEQ ID NO: 208013 - DNA, 26 bp, Artificial sequence
  SiRNA target sequence
tgttttcaggtgtttcatttattaca

SEQ ID NO: 208014 - DNA, 26 bp, Artificial sequence
  SiRNA target sequence
gttttcaggtgtttcatttattacac

SEQ ID NO: 208015 - DNA, 26 bp, Artificial sequence
  SiRNA target sequence
ttttcaggtgtttcatttattacact

SEQ ID NO: 208016 - DNA, 26 bp, Artificial sequence
  SiRNA target sequence
tttcaggtgtttcatttattacactc

SEQ ID NO: 208017 - DNA, 26 bp, Artificial sequence
  SiRNA target sequence
ttcaggtgtttcatttattacactca

SEQ ID NO: 208018 - DNA, 26 bp, Artificial sequence
  SiRNA target sequence
tcaggtgtttcatttattacactcat

SEQ ID NO: 208019 - DNA, 27 bp, Artificial sequence
  SiRNA target sequence
ttattctgcgttttcttttttgtcgtc

SEQ ID NO: 208020 - DNA, 27 bp, Artificial sequence
  SiRNA target sequence
tattctgcgttttcttttttgtcgtct

SEQ ID NO: 208021 - DNA, 27 bp, Artificial sequence
  SiRNA target sequence
attctgcgttttcttttttgtcgtctt

SEQ ID NO: 208022 - DNA, 27 bp, Artificial sequence
  SiRNA target sequence
ttctgcgttttcttttttgtcgtcttt

SEQ ID NO: 208023 - DNA, 27 bp, Artificial sequence
  SiRNA target sequence
tctgcgttttcttttttgtcgtctttt

SEQ ID NO: 208024 - DNA, 27 bp, Artificial sequence
  SiRNA target sequence
ctgcgttttcttttttgtcgtctttta

SEQ ID NO: 208025 - DNA, 27 bp, Artificial sequence
  SiRNA target sequence
tgcgttttcttttttgtcgtcttttat

SEQ ID NO: 208026 - DNA, 27 bp, Artificial sequence
  SiRNA target sequence
gcgttttcttttttgtcgtcttttatt

SEQ ID NO: 208027 - DNA, 27 bp, Artificial sequence
  SiRNA target sequence
cgttttcttttttgtcgtcttttatta

SEQ ID NO: 208028 - DNA, 27 bp, Artificial sequence
  SiRNA target sequence
gttttcttttttgtcgtcttttattaa

SEQ ID NO: 208029 - DNA, 27 bp, Artificial sequence
  SiRNA target sequence
ttttcttttttgtcgtcttttattaaa

SEQ ID NO: 208030 - DNA, 27 bp, Artificial sequence
  SiRNA target sequence
tttcttttttgtcgtcttttattaaat

SEQ ID NO: 208031 - DNA, 27 bp, Artificial sequence
  SiRNA target sequence
ttcttttttgtcgtcttttattaaatc

SEQ ID NO: 208032 - DNA, 27 bp, Artificial sequence
  SiRNA target sequence
tcttttttgtcgtcttttattaaatct

SEQ ID NO: 208033 - DNA, 27 bp, Artificial sequence
  SiRNA target sequence
cttttttgtcgtcttttattaaatcta

SEQ ID NO: 208034 - DNA, 27 bp, Artificial sequence
  SiRNA target sequence
ttttttgtcgtcttttattaaatctat

SEQ ID NO: 208035 - DNA, 27 bp, Artificial sequence
  SiRNA target sequence
tttttgtcgtcttttattaaatctatg

SEQ ID NO: 208036 - DNA, 27 bp, Artificial sequence
  SiRNA target sequence
ttttgtcgtcttttattaaatctatgt

SEQ ID NO: 208037 - DNA, 27 bp, Artificial sequence
  SiRNA target sequence
tttgtcgtcttttattaaatctatgtc

SEQ ID NO: 208038 - DNA, 27 bp, Artificial sequence
  SiRNA target sequence
ttgtcgtcttttattaaatctatgtct

SEQ ID NO: 208039 - DNA, 27 bp, Artificial sequence
  SiRNA target sequence
tgtcgtcttttattaaatctatgtcta

SEQ ID NO: 208040 - DNA, 27 bp, Artificial sequence
  SiRNA target sequence
gtcgtcttttattaaatctatgtctac

SEQ ID NO: 208041 - DNA, 27 bp, Artificial sequence
  SiRNA target sequence
tcgtcttttattaaatctatgtctaca

SEQ ID NO: 208042 - DNA, 27 bp, Artificial sequence
  SiRNA target sequence
cgtcttttattaaatctatgtctacac

SEQ ID NO: 208043 - DNA, 27 bp, Artificial sequence
  SiRNA target sequence
gtcttttattaaatctatgtctacact

SEQ ID NO: 208044 - DNA, 27 bp, Artificial sequence
  SiRNA target sequence
tcttttattaaatctatgtctacactt

SEQ ID NO: 208045 - DNA, 27 bp, Artificial sequence
  SiRNA target sequence
cttttattaaatctatgtctacacttg

SEQ ID NO: 208046 - DNA, 27 bp, Artificial sequence
  SiRNA target sequence
ttttattaaatctatgtctacacttgt

SEQ ID NO: 208047 - DNA, 27 bp, Artificial sequence
  SiRNA target sequence
tttattaaatctatgtctacacttgta

SEQ ID NO: 208048 - DNA, 27 bp, Artificial sequence
  SiRNA target sequence
ttattaaatctatgtctacacttgtat

SEQ ID NO: 208049 - DNA, 27 bp, Artificial sequence
  SiRNA target sequence
tattaaatctatgtctacacttgtatt

SEQ ID NO: 208050 - DNA, 27 bp, Artificial sequence
  SiRNA target sequence
attaaatctatgtctacacttgtatta

SEQ ID NO: 208051 - DNA, 27 bp, Artificial sequence
  SiRNA target sequence
ttaaatctatgtctacacttgtattat

SEQ ID NO: 208052 - DNA, 27 bp, Artificial sequence
  SiRNA target sequence
taaatctatgtctacacttgtattatt

SEQ ID NO: 208053 - DNA, 27 bp, Artificial sequence
  SiRNA target sequence
aaatctatgtctacacttgtattattt

SEQ ID NO: 208054 - DNA, 27 bp, Artificial sequence
  SiRNA target sequence
aatctatgtctacacttgtattatttt

SEQ ID NO: 208055 - DNA, 27 bp, Artificial sequence
  SiRNA target sequence
atctatgtctacacttgtattattttt

SEQ ID NO: 208056 - DNA, 27 bp, Artificial sequence
  SiRNA target sequence
tctatgtctacacttgtattattttta

SEQ ID NO: 208057 - DNA, 27 bp, Artificial sequence
  SiRNA target sequence
ctatgtctacacttgtattatttttaa

SEQ ID NO: 208058 - DNA, 27 bp, Artificial sequence
  SiRNA target sequence
tatgtctacacttgtattatttttaat

SEQ ID NO: 208059 - DNA, 27 bp, Artificial sequence
  SiRNA target sequence
atgtctacacttgtattatttttaatt

SEQ ID NO: 208060 - DNA, 27 bp, Artificial sequence
  SiRNA target sequence
tgtctacacttgtattatttttaattg

SEQ ID NO: 208061 - DNA, 27 bp, Artificial sequence
  SiRNA target sequence
gtctacacttgtattatttttaattga

SEQ ID NO: 208062 - DNA, 27 bp, Artificial sequence
  SiRNA target sequence
tctacacttgtattatttttaattgaa

SEQ ID NO: 208063 - DNA, 27 bp, Artificial sequence
  SiRNA target sequence
ctacacttgtattatttttaattgaaa

SEQ ID NO: 208064 - DNA, 27 bp, Artificial sequence
  SiRNA target sequence
tacacttgtattatttttaattgaaac

SEQ ID NO: 208065 - DNA, 27 bp, Artificial sequence
  SiRNA target sequence
acacttgtattatttttaattgaaacg

SEQ ID NO: 208066 - DNA, 27 bp, Artificial sequence
  SiRNA target sequence
cacttgtattatttttaattgaaacgt

SEQ ID NO: 208067 - DNA, 27 bp, Artificial sequence
  SiRNA target sequence
acttgtattatttttaattgaaacgtt

SEQ ID NO: 208068 - DNA, 27 bp, Artificial sequence
  SiRNA target sequence
cttgtattatttttaattgaaacgtta

SEQ ID NO: 208069 - DNA, 27 bp, Artificial sequence
  SiRNA target sequence
ttgtattatttttaattgaaacgttat

SEQ ID NO: 208070 - DNA, 27 bp, Artificial sequence
  SiRNA target sequence
tgtattatttttaattgaaacgttata

SEQ ID NO: 208071 - DNA, 27 bp, Artificial sequence
  SiRNA target sequence
gtattatttttaattgaaacgttatat

SEQ ID NO: 208072 - DNA, 27 bp, Artificial sequence
  SiRNA target sequence
tattatttttaattgaaacgttatatg

SEQ ID NO: 208073 - DNA, 27 bp, Artificial sequence
  SiRNA target sequence
attatttttaattgaaacgttatatgc

SEQ ID NO: 208074 - DNA, 27 bp, Artificial sequence
  SiRNA target sequence
ttatttttaattgaaacgttatatgca

SEQ ID NO: 208075 - DNA, 27 bp, Artificial sequence
  SiRNA target sequence
tatttttaattgaaacgttatatgcac

SEQ ID NO: 208076 - DNA, 27 bp, Artificial sequence
  SiRNA target sequence
atttttaattgaaacgttatatgcacc

SEQ ID NO: 208077 - DNA, 27 bp, Artificial sequence
  SiRNA target sequence
tttttaattgaaacgttatatgcaccc

SEQ ID NO: 208078 - DNA, 27 bp, Artificial sequence
  SiRNA target sequence
ttttaattgaaacgttatatgcacccg

SEQ ID NO: 208079 - DNA, 27 bp, Artificial sequence
  SiRNA target sequence
tttaattgaaacgttatatgcacccgc

SEQ ID NO: 208080 - DNA, 27 bp, Artificial sequence
  SiRNA target sequence
ttaattgaaacgttatatgcacccgct

SEQ ID NO: 208081 - DNA, 27 bp, Artificial sequence
  SiRNA target sequence
taattgaaacgttatatgcacccgcta

SEQ ID NO: 208082 - DNA, 27 bp, Artificial sequence
  SiRNA target sequence
aattgaaacgttatatgcacccgctaa

SEQ ID NO: 208083 - DNA, 27 bp, Artificial sequence
  SiRNA target sequence
attgaaacgttatatgcacccgctaaa

SEQ ID NO: 208084 - DNA, 27 bp, Artificial sequence
  SiRNA target sequence
ttgaaacgttatatgcacccgctaaat

SEQ ID NO: 208085 - DNA, 27 bp, Artificial sequence
  SiRNA target sequence
tgaaacgttatatgcacccgctaaata

SEQ ID NO: 208086 - DNA, 27 bp, Artificial sequence
  SiRNA target sequence
gaaacgttatatgcacccgctaaatag

SEQ ID NO: 208087 - DNA, 27 bp, Artificial sequence
  SiRNA target sequence
aaacgttatatgcacccgctaaataga

SEQ ID NO: 208088 - DNA, 27 bp, Artificial sequence
  SiRNA target sequence
aacgttatatgcacccgctaaatagat

SEQ ID NO: 208089 - DNA, 27 bp, Artificial sequence
  SiRNA target sequence
acgttatatgcacccgctaaatagatt

SEQ ID NO: 208090 - DNA, 27 bp, Artificial sequence
  SiRNA target sequence
cgttatatgcacccgctaaatagatta

SEQ ID NO: 208091 - DNA, 27 bp, Artificial sequence
  SiRNA target sequence
gttatatgcacccgctaaatagattat

SEQ ID NO: 208092 - DNA, 27 bp, Artificial sequence
  SiRNA target sequence
ttatatgcacccgctaaatagattata

SEQ ID NO: 208093 - DNA, 27 bp, Artificial sequence
  SiRNA target sequence
tatatgcacccgctaaatagattatag

SEQ ID NO: 208094 - DNA, 27 bp, Artificial sequence
  SiRNA target sequence
atatgcacccgctaaatagattatagc

SEQ ID NO: 208095 - DNA, 27 bp, Artificial sequence
  SiRNA target sequence
tatgcacccgctaaatagattatagct

SEQ ID NO: 208096 - DNA, 27 bp, Artificial sequence
  SiRNA target sequence
atgcacccgctaaatagattatagctc

SEQ ID NO: 208097 - DNA, 27 bp, Artificial sequence
  SiRNA target sequence
tgcacccgctaaatagattatagctct

SEQ ID NO: 208098 - DNA, 27 bp, Artificial sequence
  SiRNA target sequence
gcacccgctaaatagattatagctcta

SEQ ID NO: 208099 - DNA, 27 bp, Artificial sequence
  SiRNA target sequence
cacccgctaaatagattatagctctaa

SEQ ID NO: 208100 - DNA, 27 bp, Artificial sequence
  SiRNA target sequence
acccgctaaatagattatagctctaat

SEQ ID NO: 208101 - DNA, 27 bp, Artificial sequence
  SiRNA target sequence
cccgctaaatagattatagctctaatc

SEQ ID NO: 208102 - DNA, 27 bp, Artificial sequence
  SiRNA target sequence
ccgctaaatagattatagctctaatcc

SEQ ID NO: 208103 - DNA, 27 bp, Artificial sequence
  SiRNA target sequence
cgctaaatagattatagctctaatcca

SEQ ID NO: 208104 - DNA, 27 bp, Artificial sequence
  SiRNA target sequence
gctaaatagattatagctctaatccaa

SEQ ID NO: 208105 - DNA, 27 bp, Artificial sequence
  SiRNA target sequence
ctaaatagattatagctctaatccaaa

SEQ ID NO: 208106 - DNA, 27 bp, Artificial sequence
  SiRNA target sequence
taaatagattatagctctaatccaaat

SEQ ID NO: 208107 - DNA, 27 bp, Artificial sequence
  SiRNA target sequence
aaatagattatagctctaatccaaata

SEQ ID NO: 208108 - DNA, 27 bp, Artificial sequence
  SiRNA target sequence
aatagattatagctctaatccaaatat

SEQ ID NO: 208109 - DNA, 27 bp, Artificial sequence
  SiRNA target sequence
atagattatagctctaatccaaatata

SEQ ID NO: 208110 - DNA, 27 bp, Artificial sequence
  SiRNA target sequence
tagattatagctctaatccaaatataa

SEQ ID NO: 208111 - DNA, 27 bp, Artificial sequence
  SiRNA target sequence
agattatagctctaatccaaatataaa

SEQ ID NO: 208112 - DNA, 27 bp, Artificial sequence
  SiRNA target sequence
gattatagctctaatccaaatataaat

SEQ ID NO: 208113 - DNA, 27 bp, Artificial sequence
  SiRNA target sequence
attatagctctaatccaaatataaatc

SEQ ID NO: 208114 - DNA, 27 bp, Artificial sequence
  SiRNA target sequence
ttatagctctaatccaaatataaatca

SEQ ID NO: 208115 - DNA, 27 bp, Artificial sequence
  SiRNA target sequence
tatagctctaatccaaatataaatcaa

SEQ ID NO: 208116 - DNA, 27 bp, Artificial sequence
  SiRNA target sequence
atagctctaatccaaatataaatcaat

SEQ ID NO: 208117 - DNA, 27 bp, Artificial sequence
  SiRNA target sequence
tagctctaatccaaatataaatcaata

SEQ ID NO: 208118 - DNA, 27 bp, Artificial sequence
  SiRNA target sequence
agctctaatccaaatataaatcaatat

SEQ ID NO: 208119 - DNA, 27 bp, Artificial sequence
  SiRNA target sequence
gctctaatccaaatataaatcaatatt

SEQ ID NO: 208120 - DNA, 27 bp, Artificial sequence
  SiRNA target sequence
ctctaatccaaatataaatcaatatta

SEQ ID NO: 208121 - DNA, 27 bp, Artificial sequence
  SiRNA target sequence
tctaatccaaatataaatcaatattat

SEQ ID NO: 208122 - DNA, 27 bp, Artificial sequence
  SiRNA target sequence
ctaatccaaatataaatcaatattatt

SEQ ID NO: 208123 - DNA, 27 bp, Artificial sequence
  SiRNA target sequence
taatccaaatataaatcaatattattg

SEQ ID NO: 208124 - DNA, 27 bp, Artificial sequence
  SiRNA target sequence
aatccaaatataaatcaatattattgc

SEQ ID NO: 208125 - DNA, 27 bp, Artificial sequence
  SiRNA target sequence
atccaaatataaatcaatattattgca

SEQ ID NO: 208126 - DNA, 27 bp, Artificial sequence
  SiRNA target sequence
tccaaatataaatcaatattattgcaa

SEQ ID NO: 208127 - DNA, 27 bp, Artificial sequence
  SiRNA target sequence
ccaaatataaatcaatattattgcaat

SEQ ID NO: 208128 - DNA, 27 bp, Artificial sequence
  SiRNA target sequence
caaatataaatcaatattattgcaatc

SEQ ID NO: 208129 - DNA, 27 bp, Artificial sequence
  SiRNA target sequence
aaatataaatcaatattattgcaatcg

SEQ ID NO: 208130 - DNA, 27 bp, Artificial sequence
  SiRNA target sequence
aatataaatcaatattattgcaatcgt

SEQ ID NO: 208131 - DNA, 27 bp, Artificial sequence
  SiRNA target sequence
atataaatcaatattattgcaatcgtt

SEQ ID NO: 208132 - DNA, 27 bp, Artificial sequence
  SiRNA target sequence
tataaatcaatattattgcaatcgtta

SEQ ID NO: 208133 - DNA, 27 bp, Artificial sequence
  SiRNA target sequence
ataaatcaatattattgcaatcgttaa

SEQ ID NO: 208134 - DNA, 27 bp, Artificial sequence
  SiRNA target sequence
taaatcaatattattgcaatcgttaat

SEQ ID NO: 208135 - DNA, 27 bp, Artificial sequence
  SiRNA target sequence
aaatcaatattattgcaatcgttaatg

SEQ ID NO: 208136 - DNA, 27 bp, Artificial sequence
  SiRNA target sequence
aatcaatattattgcaatcgttaatgt

SEQ ID NO: 208137 - DNA, 27 bp, Artificial sequence
  SiRNA target sequence
atcaatattattgcaatcgttaatgtg

SEQ ID NO: 208138 - DNA, 27 bp, Artificial sequence
  SiRNA target sequence
tcaatattattgcaatcgttaatgtga

SEQ ID NO: 208139 - DNA, 27 bp, Artificial sequence
  SiRNA target sequence
caatattattgcaatcgttaatgtgat

SEQ ID NO: 208140 - DNA, 27 bp, Artificial sequence
  SiRNA target sequence
aatattattgcaatcgttaatgtgatt

SEQ ID NO: 208141 - DNA, 27 bp, Artificial sequence
  SiRNA target sequence
atattattgcaatcgttaatgtgattg

SEQ ID NO: 208142 - DNA, 27 bp, Artificial sequence
  SiRNA target sequence
tattattgcaatcgttaatgtgattgg

SEQ ID NO: 208143 - DNA, 27 bp, Artificial sequence
  SiRNA target sequence
attattgcaatcgttaatgtgattgga

SEQ ID NO: 208144 - DNA, 27 bp, Artificial sequence
  SiRNA target sequence
ttattgcaatcgttaatgtgattggac

SEQ ID NO: 208145 - DNA, 27 bp, Artificial sequence
  SiRNA target sequence
tattgcaatcgttaatgtgattggact

SEQ ID NO: 208146 - DNA, 27 bp, Artificial sequence
  SiRNA target sequence
attgcaatcgttaatgtgattggacta

SEQ ID NO: 208147 - DNA, 27 bp, Artificial sequence
  SiRNA target sequence
ttgcaatcgttaatgtgattggactac

SEQ ID NO: 208148 - DNA, 27 bp, Artificial sequence
  SiRNA target sequence
tgcaatcgttaatgtgattggactacc

SEQ ID NO: 208149 - DNA, 27 bp, Artificial sequence
  SiRNA target sequence
gcaatcgttaatgtgattggactaccc

SEQ ID NO: 208150 - DNA, 27 bp, Artificial sequence
  SiRNA target sequence
caatcgttaatgtgattggactaccct

SEQ ID NO: 208151 - DNA, 27 bp, Artificial sequence
  SiRNA target sequence
aatcgttaatgtgattggactaccctt

SEQ ID NO: 208152 - DNA, 27 bp, Artificial sequence
  SiRNA target sequence
atcgttaatgtgattggactacccttc

SEQ ID NO: 208153 - DNA, 27 bp, Artificial sequence
  SiRNA target sequence
tcgttaatgtgattggactacccttcc

SEQ ID NO: 208154 - DNA, 27 bp, Artificial sequence
  SiRNA target sequence
cgttaatgtgattggactacccttcct

SEQ ID NO: 208155 - DNA, 27 bp, Artificial sequence
  SiRNA target sequence
gttaatgtgattggactacccttcctt

SEQ ID NO: 208156 - DNA, 27 bp, Artificial sequence
  SiRNA target sequence
ttaatgtgattggactacccttcctta

SEQ ID NO: 208157 - DNA, 27 bp, Artificial sequence
  SiRNA target sequence
taatgtgattggactacccttccttac

SEQ ID NO: 208158 - DNA, 27 bp, Artificial sequence
  SiRNA target sequence
aatgtgattggactacccttccttaca

SEQ ID NO: 208159 - DNA, 27 bp, Artificial sequence
  SiRNA target sequence
atgtgattggactacccttccttacat

SEQ ID NO: 208160 - DNA, 27 bp, Artificial sequence
  SiRNA target sequence
tgtgattggactacccttccttacatt

SEQ ID NO: 208161 - DNA, 27 bp, Artificial sequence
  SiRNA target sequence
gtgattggactacccttccttacatta

SEQ ID NO: 208162 - DNA, 27 bp, Artificial sequence
  SiRNA target sequence
tgattggactacccttccttacattat

SEQ ID NO: 208163 - DNA, 27 bp, Artificial sequence
  SiRNA target sequence
gattggactacccttccttacattatc

SEQ ID NO: 208164 - DNA, 27 bp, Artificial sequence
  SiRNA target sequence
attggactacccttccttacattatca

SEQ ID NO: 208165 - DNA, 27 bp, Artificial sequence
  SiRNA target sequence
ttggactacccttccttacattatcag

SEQ ID NO: 208166 - DNA, 27 bp, Artificial sequence
  SiRNA target sequence
tggactacccttccttacattatcagt

SEQ ID NO: 208167 - DNA, 27 bp, Artificial sequence
  SiRNA target sequence
ggactacccttccttacattatcagta

SEQ ID NO: 208168 - DNA, 27 bp, Artificial sequence
  SiRNA target sequence
gactacccttccttacattatcagtat

SEQ ID NO: 208169 - DNA, 27 bp, Artificial sequence
  SiRNA target sequence
actacccttccttacattatcagtatc

SEQ ID NO: 208170 - DNA, 27 bp, Artificial sequence
  SiRNA target sequence
ctacccttccttacattatcagtatca

SEQ ID NO: 208171 - DNA, 27 bp, Artificial sequence
  SiRNA target sequence
tacccttccttacattatcagtatcaa

SEQ ID NO: 208172 - DNA, 27 bp, Artificial sequence
  SiRNA target sequence
acccttccttacattatcagtatcaag

SEQ ID NO: 208173 - DNA, 27 bp, Artificial sequence
  SiRNA target sequence
cccttccttacattatcagtatcaagt

SEQ ID NO: 208174 - DNA, 27 bp, Artificial sequence
  SiRNA target sequence
ccttccttacattatcagtatcaagtg

SEQ ID NO: 208175 - DNA, 27 bp, Artificial sequence
  SiRNA target sequence
cttccttacattatcagtatcaagtgc

SEQ ID NO: 208176 - DNA, 27 bp, Artificial sequence
  SiRNA target sequence
ttccttacattatcagtatcaagtgct

SEQ ID NO: 208177 - DNA, 27 bp, Artificial sequence
  SiRNA target sequence
tccttacattatcagtatcaagtgcta

SEQ ID NO: 208178 - DNA, 27 bp, Artificial sequence
  SiRNA target sequence
ccttacattatcagtatcaagtgctac

SEQ ID NO: 208179 - DNA, 27 bp, Artificial sequence
  SiRNA target sequence
cttacattatcagtatcaagtgctact

SEQ ID NO: 208180 - DNA, 27 bp, Artificial sequence
  SiRNA target sequence
ttacattatcagtatcaagtgctacta

SEQ ID NO: 208181 - DNA, 27 bp, Artificial sequence
  SiRNA target sequence
tacattatcagtatcaagtgctactaa

SEQ ID NO: 208182 - DNA, 27 bp, Artificial sequence
  SiRNA target sequence
acattatcagtatcaagtgctactaat

SEQ ID NO: 208183 - DNA, 27 bp, Artificial sequence
  SiRNA target sequence
cattatcagtatcaagtgctactaata

SEQ ID NO: 208184 - DNA, 27 bp, Artificial sequence
  SiRNA target sequence
attatcagtatcaagtgctactaatat

SEQ ID NO: 208185 - DNA, 27 bp, Artificial sequence
  SiRNA target sequence
ttatcagtatcaagtgctactaatatg

SEQ ID NO: 208186 - DNA, 27 bp, Artificial sequence
  SiRNA target sequence
tatcagtatcaagtgctactaatatgg

SEQ ID NO: 208187 - DNA, 27 bp, Artificial sequence
  SiRNA target sequence
atcagtatcaagtgctactaatatggc

SEQ ID NO: 208188 - DNA, 27 bp, Artificial sequence
  SiRNA target sequence
tcagtatcaagtgctactaatatggct

SEQ ID NO: 208189 - DNA, 27 bp, Artificial sequence
  SiRNA target sequence
cagtatcaagtgctactaatatggcta

SEQ ID NO: 208190 - DNA, 27 bp, Artificial sequence
  SiRNA target sequence
agtatcaagtgctactaatatggctag

SEQ ID NO: 208191 - DNA, 27 bp, Artificial sequence
  SiRNA target sequence
gtatcaagtgctactaatatggctagt

SEQ ID NO: 208192 - DNA, 27 bp, Artificial sequence
  SiRNA target sequence
tatcaagtgctactaatatggctagtc

SEQ ID NO: 208193 - DNA, 27 bp, Artificial sequence
  SiRNA target sequence
atcaagtgctactaatatggctagtcc

SEQ ID NO: 208194 - DNA, 27 bp, Artificial sequence
  SiRNA target sequence
tcaagtgctactaatatggctagtcca

SEQ ID NO: 208195 - DNA, 27 bp, Artificial sequence
  SiRNA target sequence
caagtgctactaatatggctagtccat

SEQ ID NO: 208196 - DNA, 27 bp, Artificial sequence
  SiRNA target sequence
aagtgctactaatatggctagtccata

SEQ ID NO: 208197 - DNA, 27 bp, Artificial sequence
  SiRNA target sequence
agtgctactaatatggctagtccatat

SEQ ID NO: 208198 - DNA, 27 bp, Artificial sequence
  SiRNA target sequence
gtgctactaatatggctagtccatata

SEQ ID NO: 208199 - DNA, 27 bp, Artificial sequence
  SiRNA target sequence
tgctactaatatggctagtccatataa

SEQ ID NO: 208200 - DNA, 27 bp, Artificial sequence
  SiRNA target sequence
gctactaatatggctagtccatataat

SEQ ID NO: 208201 - DNA, 27 bp, Artificial sequence
  SiRNA target sequence
ctactaatatggctagtccatataatg

SEQ ID NO: 208202 - DNA, 27 bp, Artificial sequence
  SiRNA target sequence
tactaatatggctagtccatataatga

SEQ ID NO: 208203 - DNA, 27 bp, Artificial sequence
  SiRNA target sequence
actaatatggctagtccatataatgaa

SEQ ID NO: 208204 - DNA, 27 bp, Artificial sequence
  SiRNA target sequence
ctaatatggctagtccatataatgaac

SEQ ID NO: 208205 - DNA, 27 bp, Artificial sequence
  SiRNA target sequence
taatatggctagtccatataatgaacc

SEQ ID NO: 208206 - DNA, 27 bp, Artificial sequence
  SiRNA target sequence
aatatggctagtccatataatgaacca

SEQ ID NO: 208207 - DNA, 27 bp, Artificial sequence
  SiRNA target sequence
atatggctagtccatataatgaaccaa

SEQ ID NO: 208208 - DNA, 27 bp, Artificial sequence
  SiRNA target sequence
tatggctagtccatataatgaaccaat

SEQ ID NO: 208209 - DNA, 27 bp, Artificial sequence
  SiRNA target sequence
atggctagtccatataatgaaccaata

SEQ ID NO: 208210 - DNA, 27 bp, Artificial sequence
  SiRNA target sequence
tggctagtccatataatgaaccaatag

SEQ ID NO: 208211 - DNA, 27 bp, Artificial sequence
  SiRNA target sequence
ggctagtccatataatgaaccaataga

SEQ ID NO: 208212 - DNA, 27 bp, Artificial sequence
  SiRNA target sequence
gctagtccatataatgaaccaatagat

SEQ ID NO: 208213 - DNA, 27 bp, Artificial sequence
  SiRNA target sequence
ctagtccatataatgaaccaatagatt

SEQ ID NO: 208214 - DNA, 27 bp, Artificial sequence
  SiRNA target sequence
tagtccatataatgaaccaatagattt

SEQ ID NO: 208215 - DNA, 27 bp, Artificial sequence
  SiRNA target sequence
agtccatataatgaaccaatagatttt

SEQ ID NO: 208216 - DNA, 27 bp, Artificial sequence
  SiRNA target sequence
gtccatataatgaaccaatagattttc

SEQ ID NO: 208217 - DNA, 27 bp, Artificial sequence
  SiRNA target sequence
tccatataatgaaccaatagattttcc

SEQ ID NO: 208218 - DNA, 27 bp, Artificial sequence
  SiRNA target sequence
ccatataatgaaccaatagattttcct

SEQ ID NO: 208219 - DNA, 27 bp, Artificial sequence
  SiRNA target sequence
catataatgaaccaatagattttccta

SEQ ID NO: 208220 - DNA, 27 bp, Artificial sequence
  SiRNA target sequence
atataatgaaccaatagattttcctaa

SEQ ID NO: 208221 - DNA, 27 bp, Artificial sequence
  SiRNA target sequence
tataatgaaccaatagattttcctaat

SEQ ID NO: 208222 - DNA, 27 bp, Artificial sequence
  SiRNA target sequence
ataatgaaccaatagattttcctaatt

SEQ ID NO: 208223 - DNA, 27 bp, Artificial sequence
  SiRNA target sequence
taatgaaccaatagattttcctaattt

SEQ ID NO: 208224 - DNA, 27 bp, Artificial sequence
  SiRNA target sequence
aatgaaccaatagattttcctaattta

SEQ ID NO: 208225 - DNA, 27 bp, Artificial sequence
  SiRNA target sequence
atgaaccaatagattttcctaatttat

SEQ ID NO: 208226 - DNA, 27 bp, Artificial sequence
  SiRNA target sequence
tgaaccaatagattttcctaatttatt

SEQ ID NO: 208227 - DNA, 27 bp, Artificial sequence
  SiRNA target sequence
gaaccaatagattttcctaatttatta

SEQ ID NO: 208228 - DNA, 27 bp, Artificial sequence
  SiRNA target sequence
aaccaatagattttcctaatttattaa

SEQ ID NO: 208229 - DNA, 27 bp, Artificial sequence
  SiRNA target sequence
accaatagattttcctaatttattaaa

SEQ ID NO: 208230 - DNA, 27 bp, Artificial sequence
  SiRNA target sequence
ccaatagattttcctaatttattaaaa

SEQ ID NO: 208231 - DNA, 27 bp, Artificial sequence
  SiRNA target sequence
caatagattttcctaatttattaaaaa

SEQ ID NO: 208232 - DNA, 27 bp, Artificial sequence
  SiRNA target sequence
aatagattttcctaatttattaaaaat

SEQ ID NO: 208233 - DNA, 27 bp, Artificial sequence
  SiRNA target sequence
atagattttcctaatttattaaaaata

SEQ ID NO: 208234 - DNA, 27 bp, Artificial sequence
  SiRNA target sequence
tagattttcctaatttattaaaaatac

SEQ ID NO: 208235 - DNA, 27 bp, Artificial sequence
  SiRNA target sequence
agattttcctaatttattaaaaatacc

SEQ ID NO: 208236 - DNA, 27 bp, Artificial sequence
  SiRNA target sequence
gattttcctaatttattaaaaatacca

SEQ ID NO: 208237 - DNA, 27 bp, Artificial sequence
  SiRNA target sequence
attttcctaatttattaaaaataccat

SEQ ID NO: 208238 - DNA, 27 bp, Artificial sequence
  SiRNA target sequence
ttttcctaatttattaaaaataccatc

SEQ ID NO: 208239 - DNA, 27 bp, Artificial sequence
  SiRNA target sequence
tttcctaatttattaaaaataccatca

SEQ ID NO: 208240 - DNA, 27 bp, Artificial sequence
  SiRNA target sequence
ttcctaatttattaaaaataccatcat

SEQ ID NO: 208241 - DNA, 27 bp, Artificial sequence
  SiRNA target sequence
tcctaatttattaaaaataccatcata

SEQ ID NO: 208242 - DNA, 27 bp, Artificial sequence
  SiRNA target sequence
cctaatttattaaaaataccatcataa

SEQ ID NO: 208243 - DNA, 27 bp, Artificial sequence
  SiRNA target sequence
ctaatttattaaaaataccatcataaa

SEQ ID NO: 208244 - DNA, 27 bp, Artificial sequence
  SiRNA target sequence
taatttattaaaaataccatcataaac

SEQ ID NO: 208245 - DNA, 27 bp, Artificial sequence
  SiRNA target sequence
aatttattaaaaataccatcataaaca

SEQ ID NO: 208246 - DNA, 27 bp, Artificial sequence
  SiRNA target sequence
atttattaaaaataccatcataaacac

SEQ ID NO: 208247 - DNA, 27 bp, Artificial sequence
  SiRNA target sequence
tttattaaaaataccatcataaacact

SEQ ID NO: 208248 - DNA, 27 bp, Artificial sequence
  SiRNA target sequence
ttattaaaaataccatcataaacactt

SEQ ID NO: 208249 - DNA, 27 bp, Artificial sequence
  SiRNA target sequence
tattaaaaataccatcataaacacttt

SEQ ID NO: 208250 - DNA, 27 bp, Artificial sequence
  SiRNA target sequence
attaaaaataccatcataaacactttt

SEQ ID NO: 208251 - DNA, 27 bp, Artificial sequence
  SiRNA target sequence
ttaaaaataccatcataaacactttta

SEQ ID NO: 208252 - DNA, 27 bp, Artificial sequence
  SiRNA target sequence
taaaaataccatcataaacacttttaa

SEQ ID NO: 208253 - DNA, 27 bp, Artificial sequence
  SiRNA target sequence
aaaaataccatcataaacacttttaaa

SEQ ID NO: 208254 - DNA, 27 bp, Artificial sequence
  SiRNA target sequence
aaaataccatcataaacacttttaaac

SEQ ID NO: 208255 - DNA, 27 bp, Artificial sequence
  SiRNA target sequence
aaataccatcataaacacttttaaacc

SEQ ID NO: 208256 - DNA, 27 bp, Artificial sequence
  SiRNA target sequence
aataccatcataaacacttttaaaccg

SEQ ID NO: 208257 - DNA, 27 bp, Artificial sequence
  SiRNA target sequence
ataccatcataaacacttttaaaccgt

SEQ ID NO: 208258 - DNA, 27 bp, Artificial sequence
  SiRNA target sequence
taccatcataaacacttttaaaccgtg

SEQ ID NO: 208259 - DNA, 27 bp, Artificial sequence
  SiRNA target sequence
accatcataaacacttttaaaccgtgc

SEQ ID NO: 208260 - DNA, 27 bp, Artificial sequence
  SiRNA target sequence
ccatcataaacacttttaaaccgtgcc

SEQ ID NO: 208261 - DNA, 27 bp, Artificial sequence
  SiRNA target sequence
catcataaacacttttaaaccgtgccc

SEQ ID NO: 208262 - DNA, 27 bp, Artificial sequence
  SiRNA target sequence
atcataaacacttttaaaccgtgccct

SEQ ID NO: 208263 - DNA, 27 bp, Artificial sequence
  SiRNA target sequence
tcataaacacttttaaaccgtgccctg

SEQ ID NO: 208264 - DNA, 27 bp, Artificial sequence
  SiRNA target sequence
cataaacacttttaaaccgtgccctgt

SEQ ID NO: 208265 - DNA, 27 bp, Artificial sequence
  SiRNA target sequence
ataaacacttttaaaccgtgccctgtg

SEQ ID NO: 208266 - DNA, 27 bp, Artificial sequence
  SiRNA target sequence
taaacacttttaaaccgtgccctgtgt

SEQ ID NO: 208267 - DNA, 27 bp, Artificial sequence
  SiRNA target sequence
aaacacttttaaaccgtgccctgtgtg

SEQ ID NO: 208268 - DNA, 27 bp, Artificial sequence
  SiRNA target sequence
aacacttttaaaccgtgccctgtgtgc

SEQ ID NO: 208269 - DNA, 27 bp, Artificial sequence
  SiRNA target sequence
acacttttaaaccgtgccctgtgtgca

SEQ ID NO: 208270 - DNA, 27 bp, Artificial sequence
  SiRNA target sequence
cacttttaaaccgtgccctgtgtgcag

SEQ ID NO: 208271 - DNA, 27 bp, Artificial sequence
  SiRNA target sequence
acttttaaaccgtgccctgtgtgcagg

SEQ ID NO: 208272 - DNA, 27 bp, Artificial sequence
  SiRNA target sequence
cttttaaaccgtgccctgtgtgcagga

SEQ ID NO: 208273 - DNA, 27 bp, Artificial sequence
  SiRNA target sequence
ttttaaaccgtgccctgtgtgcaggat

SEQ ID NO: 208274 - DNA, 27 bp, Artificial sequence
  SiRNA target sequence
tttaaaccgtgccctgtgtgcaggatc

SEQ ID NO: 208275 - DNA, 27 bp, Artificial sequence
  SiRNA target sequence
ttaaaccgtgccctgtgtgcaggatcg

SEQ ID NO: 208276 - DNA, 27 bp, Artificial sequence
  SiRNA target sequence
taaaccgtgccctgtgtgcaggatcga

SEQ ID NO: 208277 - DNA, 27 bp, Artificial sequence
  SiRNA target sequence
aaaccgtgccctgtgtgcaggatcgat

SEQ ID NO: 208278 - DNA, 27 bp, Artificial sequence
  SiRNA target sequence
aaccgtgccctgtgtgcaggatcgatt

SEQ ID NO: 208279 - DNA, 27 bp, Artificial sequence
  SiRNA target sequence
accgtgccctgtgtgcaggatcgattc

SEQ ID NO: 208280 - DNA, 27 bp, Artificial sequence
  SiRNA target sequence
ccgtgccctgtgtgcaggatcgattct

SEQ ID NO: 208281 - DNA, 27 bp, Artificial sequence
  SiRNA target sequence
cgtgccctgtgtgcaggatcgattctc

SEQ ID NO: 208282 - DNA, 27 bp, Artificial sequence
  SiRNA target sequence
gtgccctgtgtgcaggatcgattctca

SEQ ID NO: 208283 - DNA, 27 bp, Artificial sequence
  SiRNA target sequence
tgccctgtgtgcaggatcgattctcat

SEQ ID NO: 208284 - DNA, 27 bp, Artificial sequence
  SiRNA target sequence
gccctgtgtgcaggatcgattctcata

SEQ ID NO: 208285 - DNA, 27 bp, Artificial sequence
  SiRNA target sequence
ccctgtgtgcaggatcgattctcatac

SEQ ID NO: 208286 - DNA, 27 bp, Artificial sequence
  SiRNA target sequence
cctgtgtgcaggatcgattctcatacc

SEQ ID NO: 208287 - DNA, 27 bp, Artificial sequence
  SiRNA target sequence
ctgtgtgcaggatcgattctcataccc

SEQ ID NO: 208288 - DNA, 27 bp, Artificial sequence
  SiRNA target sequence
tgtgtgcaggatcgattctcataccca

SEQ ID NO: 208289 - DNA, 27 bp, Artificial sequence
  SiRNA target sequence
gtgtgcaggatcgattctcatacccat

SEQ ID NO: 208290 - DNA, 27 bp, Artificial sequence
  SiRNA target sequence
tgtgcaggatcgattctcatacccatt

SEQ ID NO: 208291 - DNA, 27 bp, Artificial sequence
  SiRNA target sequence
gtgcaggatcgattctcatacccattt

SEQ ID NO: 208292 - DNA, 27 bp, Artificial sequence
  SiRNA target sequence
tgcaggatcgattctcatacccatttt

SEQ ID NO: 208293 - DNA, 27 bp, Artificial sequence
  SiRNA target sequence
gcaggatcgattctcatacccattttc

SEQ ID NO: 208294 - DNA, 27 bp, Artificial sequence
  SiRNA target sequence
caggatcgattctcatacccattttct

SEQ ID NO: 208295 - DNA, 27 bp, Artificial sequence
  SiRNA target sequence
aggatcgattctcatacccattttctc

SEQ ID NO: 208296 - DNA, 27 bp, Artificial sequence
  SiRNA target sequence
ggatcgattctcatacccattttctct

SEQ ID NO: 208297 - DNA, 27 bp, Artificial sequence
  SiRNA target sequence
gatcgattctcatacccattttctctt

SEQ ID NO: 208298 - DNA, 27 bp, Artificial sequence
  SiRNA target sequence
atcgattctcatacccattttctcttt

SEQ ID NO: 208299 - DNA, 27 bp, Artificial sequence
  SiRNA target sequence
tcgattctcatacccattttctcttta

SEQ ID NO: 208300 - DNA, 27 bp, Artificial sequence
  SiRNA target sequence
cgattctcatacccattttctctttac

SEQ ID NO: 208301 - DNA, 27 bp, Artificial sequence
  SiRNA target sequence
gattctcatacccattttctctttaca

SEQ ID NO: 208302 - DNA, 27 bp, Artificial sequence
  SiRNA target sequence
attctcatacccattttctctttacaa

SEQ ID NO: 208303 - DNA, 27 bp, Artificial sequence
  SiRNA target sequence
ttctcatacccattttctctttacaaa

SEQ ID NO: 208304 - DNA, 27 bp, Artificial sequence
  SiRNA target sequence
tctcatacccattttctctttacaaat

SEQ ID NO: 208305 - DNA, 27 bp, Artificial sequence
  SiRNA target sequence
ctcatacccattttctctttacaaata

SEQ ID NO: 208306 - DNA, 27 bp, Artificial sequence
  SiRNA target sequence
tcatacccattttctctttacaaatat

SEQ ID NO: 208307 - DNA, 27 bp, Artificial sequence
  SiRNA target sequence
catacccattttctctttacaaatatc

SEQ ID NO: 208308 - DNA, 27 bp, Artificial sequence
  SiRNA target sequence
atacccattttctctttacaaatatca

SEQ ID NO: 208309 - DNA, 27 bp, Artificial sequence
  SiRNA target sequence
tacccattttctctttacaaatatcaa

SEQ ID NO: 208310 - DNA, 27 bp, Artificial sequence
  SiRNA target sequence
acccattttctctttacaaatatcaaa

SEQ ID NO: 208311 - DNA, 27 bp, Artificial sequence
  SiRNA target sequence
cccattttctctttacaaatatcaaag

SEQ ID NO: 208312 - DNA, 27 bp, Artificial sequence
  SiRNA target sequence
ccattttctctttacaaatatcaaagg

SEQ ID NO: 208313 - DNA, 27 bp, Artificial sequence
  SiRNA target sequence
cattttctctttacaaatatcaaaggc

SEQ ID NO: 208314 - DNA, 27 bp, Artificial sequence
  SiRNA target sequence
attttctctttacaaatatcaaaggct

SEQ ID NO: 208315 - DNA, 27 bp, Artificial sequence
  SiRNA target sequence
ttttctctttacaaatatcaaaggctg

SEQ ID NO: 208316 - DNA, 27 bp, Artificial sequence
  SiRNA target sequence
tttctctttacaaatatcaaaggctga

SEQ ID NO: 208317 - DNA, 27 bp, Artificial sequence
  SiRNA target sequence
ttctctttacaaatatcaaaggctgaa

SEQ ID NO: 208318 - DNA, 27 bp, Artificial sequence
  SiRNA target sequence
tctctttacaaatatcaaaggctgaat

SEQ ID NO: 208319 - DNA, 27 bp, Artificial sequence
  SiRNA target sequence
ctctttacaaatatcaaaggctgaata

SEQ ID NO: 208320 - DNA, 27 bp, Artificial sequence
  SiRNA target sequence
tctttacaaatatcaaaggctgaatat

SEQ ID NO: 208321 - DNA, 27 bp, Artificial sequence
  SiRNA target sequence
ctttacaaatatcaaaggctgaatatt

SEQ ID NO: 208322 - DNA, 27 bp, Artificial sequence
  SiRNA target sequence
tttacaaatatcaaaggctgaatattt

SEQ ID NO: 208323 - DNA, 27 bp, Artificial sequence
  SiRNA target sequence
ttacaaatatcaaaggctgaatatttt

SEQ ID NO: 208324 - DNA, 27 bp, Artificial sequence
  SiRNA target sequence
tacaaatatcaaaggctgaatatttta

SEQ ID NO: 208325 - DNA, 27 bp, Artificial sequence
  SiRNA target sequence
acaaatatcaaaggctgaatattttaa

SEQ ID NO: 208326 - DNA, 27 bp, Artificial sequence
  SiRNA target sequence
caaatatcaaaggctgaatattttaat

SEQ ID NO: 208327 - DNA, 27 bp, Artificial sequence
  SiRNA target sequence
aaatatcaaaggctgaatattttaata

SEQ ID NO: 208328 - DNA, 27 bp, Artificial sequence
  SiRNA target sequence
aatatcaaaggctgaatattttaatac

SEQ ID NO: 208329 - DNA, 27 bp, Artificial sequence
  SiRNA target sequence
atatcaaaggctgaatattttaatact

SEQ ID NO: 208330 - DNA, 27 bp, Artificial sequence
  SiRNA target sequence
tatcaaaggctgaatattttaatactt

SEQ ID NO: 208331 - DNA, 27 bp, Artificial sequence
  SiRNA target sequence
atcaaaggctgaatattttaatacttt

SEQ ID NO: 208332 - DNA, 27 bp, Artificial sequence
  SiRNA target sequence
tcaaaggctgaatattttaatactttt

SEQ ID NO: 208333 - DNA, 27 bp, Artificial sequence
  SiRNA target sequence
caaaggctgaatattttaatactttta

SEQ ID NO: 208334 - DNA, 27 bp, Artificial sequence
  SiRNA target sequence
aaaggctgaatattttaatacttttat

SEQ ID NO: 208335 - DNA, 27 bp, Artificial sequence
  SiRNA target sequence
aaggctgaatattttaatacttttatg

SEQ ID NO: 208336 - DNA, 27 bp, Artificial sequence
  SiRNA target sequence
aggctgaatattttaatacttttatga

SEQ ID NO: 208337 - DNA, 27 bp, Artificial sequence
  SiRNA target sequence
ggctgaatattttaatacttttatgaa

SEQ ID NO: 208338 - DNA, 27 bp, Artificial sequence
  SiRNA target sequence
gctgaatattttaatacttttatgaat

SEQ ID NO: 208339 - DNA, 27 bp, Artificial sequence
  SiRNA target sequence
ctgaatattttaatacttttatgaatg

SEQ ID NO: 208340 - DNA, 27 bp, Artificial sequence
  SiRNA target sequence
tgaatattttaatacttttatgaatgc

SEQ ID NO: 208341 - DNA, 27 bp, Artificial sequence
  SiRNA target sequence
gaatattttaatacttttatgaatgct

SEQ ID NO: 208342 - DNA, 27 bp, Artificial sequence
  SiRNA target sequence
aatattttaatacttttatgaatgcta

SEQ ID NO: 208343 - DNA, 27 bp, Artificial sequence
  SiRNA target sequence
atattttaatacttttatgaatgctaa

SEQ ID NO: 208344 - DNA, 27 bp, Artificial sequence
  SiRNA target sequence
tattttaatacttttatgaatgctaaa

SEQ ID NO: 208345 - DNA, 27 bp, Artificial sequence
  SiRNA target sequence
attttaatacttttatgaatgctaaaa

SEQ ID NO: 208346 - DNA, 27 bp, Artificial sequence
  SiRNA target sequence
ttttaatacttttatgaatgctaaaaa

SEQ ID NO: 208347 - DNA, 27 bp, Artificial sequence
  SiRNA target sequence
tttaatacttttatgaatgctaaaaag

SEQ ID NO: 208348 - DNA, 27 bp, Artificial sequence
  SiRNA target sequence
ttaatacttttatgaatgctaaaaaga

SEQ ID NO: 208349 - DNA, 27 bp, Artificial sequence
  SiRNA target sequence
taatacttttatgaatgctaaaaagaa

SEQ ID NO: 208350 - DNA, 27 bp, Artificial sequence
  SiRNA target sequence
aatacttttatgaatgctaaaaagaac

SEQ ID NO: 208351 - DNA, 27 bp, Artificial sequence
  SiRNA target sequence
atacttttatgaatgctaaaaagaaca

SEQ ID NO: 208352 - DNA, 27 bp, Artificial sequence
  SiRNA target sequence
tacttttatgaatgctaaaaagaacat

SEQ ID NO: 208353 - DNA, 27 bp, Artificial sequence
  SiRNA target sequence
acttttatgaatgctaaaaagaacatt

SEQ ID NO: 208354 - DNA, 27 bp, Artificial sequence
  SiRNA target sequence
cttttatgaatgctaaaaagaacattc

SEQ ID NO: 208355 - DNA, 27 bp, Artificial sequence
  SiRNA target sequence
ttttatgaatgctaaaaagaacattcc

SEQ ID NO: 208356 - DNA, 27 bp, Artificial sequence
  SiRNA target sequence
tttatgaatgctaaaaagaacattcca

SEQ ID NO: 208357 - DNA, 27 bp, Artificial sequence
  SiRNA target sequence
ttatgaatgctaaaaagaacattccac

SEQ ID NO: 208358 - DNA, 27 bp, Artificial sequence
  SiRNA target sequence
tatgaatgctaaaaagaacattccact

SEQ ID NO: 208359 - DNA, 27 bp, Artificial sequence
  SiRNA target sequence
atgaatgctaaaaagaacattccactg

SEQ ID NO: 208360 - DNA, 27 bp, Artificial sequence
  SiRNA target sequence
tgaatgctaaaaagaacattccactgt

SEQ ID NO: 208361 - DNA, 27 bp, Artificial sequence
  SiRNA target sequence
gaatgctaaaaagaacattccactgta

SEQ ID NO: 208362 - DNA, 27 bp, Artificial sequence
  SiRNA target sequence
aatgctaaaaagaacattccactgtaa

SEQ ID NO: 208363 - DNA, 27 bp, Artificial sequence
  SiRNA target sequence
atgctaaaaagaacattccactgtaat

SEQ ID NO: 208364 - DNA, 27 bp, Artificial sequence
  SiRNA target sequence
tgctaaaaagaacattccactgtaatt

SEQ ID NO: 208365 - DNA, 27 bp, Artificial sequence
  SiRNA target sequence
gctaaaaagaacattccactgtaattt

SEQ ID NO: 208366 - DNA, 27 bp, Artificial sequence
  SiRNA target sequence
ctaaaaagaacattccactgtaatttt

SEQ ID NO: 208367 - DNA, 27 bp, Artificial sequence
  SiRNA target sequence
taaaaagaacattccactgtaattttc

SEQ ID NO: 208368 - DNA, 27 bp, Artificial sequence
  SiRNA target sequence
aaaaagaacattccactgtaattttcg

SEQ ID NO: 208369 - DNA, 27 bp, Artificial sequence
  SiRNA target sequence
aaaagaacattccactgtaattttcga

SEQ ID NO: 208370 - DNA, 27 bp, Artificial sequence
  SiRNA target sequence
aaagaacattccactgtaattttcgat

SEQ ID NO: 208371 - DNA, 27 bp, Artificial sequence
  SiRNA target sequence
aagaacattccactgtaattttcgatc

SEQ ID NO: 208372 - DNA, 27 bp, Artificial sequence
  SiRNA target sequence
agaacattccactgtaattttcgatcg

SEQ ID NO: 208373 - DNA, 27 bp, Artificial sequence
  SiRNA target sequence
gaacattccactgtaattttcgatcgt

SEQ ID NO: 208374 - DNA, 27 bp, Artificial sequence
  SiRNA target sequence
aacattccactgtaattttcgatcgta

SEQ ID NO: 208375 - DNA, 27 bp, Artificial sequence
  SiRNA target sequence
acattccactgtaattttcgatcgtat

SEQ ID NO: 208376 - DNA, 27 bp, Artificial sequence
  SiRNA target sequence
cattccactgtaattttcgatcgtata

SEQ ID NO: 208377 - DNA, 27 bp, Artificial sequence
  SiRNA target sequence
attccactgtaattttcgatcgtataa

SEQ ID NO: 208378 - DNA, 27 bp, Artificial sequence
  SiRNA target sequence
ttccactgtaattttcgatcgtataaa

SEQ ID NO: 208379 - DNA, 27 bp, Artificial sequence
  SiRNA target sequence
tccactgtaattttcgatcgtataaat

SEQ ID NO: 208380 - DNA, 27 bp, Artificial sequence
  SiRNA target sequence
ccactgtaattttcgatcgtataaatg

SEQ ID NO: 208381 - DNA, 27 bp, Artificial sequence
  SiRNA target sequence
cactgtaattttcgatcgtataaatgt

SEQ ID NO: 208382 - DNA, 27 bp, Artificial sequence
  SiRNA target sequence
actgtaattttcgatcgtataaatgta

SEQ ID NO: 208383 - DNA, 27 bp, Artificial sequence
  SiRNA target sequence
ctgtaattttcgatcgtataaatgtac

SEQ ID NO: 208384 - DNA, 27 bp, Artificial sequence
  SiRNA target sequence
tgtaattttcgatcgtataaatgtacg

SEQ ID NO: 208385 - DNA, 27 bp, Artificial sequence
  SiRNA target sequence
gtaattttcgatcgtataaatgtacga

SEQ ID NO: 208386 - DNA, 27 bp, Artificial sequence
  SiRNA target sequence
taattttcgatcgtataaatgtacgac

SEQ ID NO: 208387 - DNA, 27 bp, Artificial sequence
  SiRNA target sequence
aattttcgatcgtataaatgtacgaca

SEQ ID NO: 208388 - DNA, 27 bp, Artificial sequence
  SiRNA target sequence
attttcgatcgtataaatgtacgacat

SEQ ID NO: 208389 - DNA, 27 bp, Artificial sequence
  SiRNA target sequence
ttttcgatcgtataaatgtacgacatt

SEQ ID NO: 208390 - DNA, 27 bp, Artificial sequence
  SiRNA target sequence
tttcgatcgtataaatgtacgacattt

SEQ ID NO: 208391 - DNA, 27 bp, Artificial sequence
  SiRNA target sequence
ttcgatcgtataaatgtacgacatttt

SEQ ID NO: 208392 - DNA, 27 bp, Artificial sequence
  SiRNA target sequence
tcgatcgtataaatgtacgacattttt

SEQ ID NO: 208393 - DNA, 27 bp, Artificial sequence
  SiRNA target sequence
cgatcgtataaatgtacgacatttttt

SEQ ID NO: 208394 - DNA, 27 bp, Artificial sequence
  SiRNA target sequence
gatcgtataaatgtacgacattttttt

SEQ ID NO: 208395 - DNA, 27 bp, Artificial sequence
  SiRNA target sequence
atcgtataaatgtacgacattttttta

SEQ ID NO: 208396 - DNA, 27 bp, Artificial sequence
  SiRNA target sequence
tcgtataaatgtacgacatttttttaa

SEQ ID NO: 208397 - DNA, 27 bp, Artificial sequence
  SiRNA target sequence
cgtataaatgtacgacatttttttaaa

SEQ ID NO: 208398 - DNA, 27 bp, Artificial sequence
  SiRNA target sequence
gtataaatgtacgacatttttttaaaa

SEQ ID NO: 208399 - DNA, 27 bp, Artificial sequence
  SiRNA target sequence
tataaatgtacgacatttttttaaaaa

SEQ ID NO: 208400 - DNA, 27 bp, Artificial sequence
  SiRNA target sequence
ataaatgtacgacatttttttaaaaaa

SEQ ID NO: 208401 - DNA, 27 bp, Artificial sequence
  SiRNA target sequence
taaatgtacgacatttttttaaaaaat

SEQ ID NO: 208402 - DNA, 27 bp, Artificial sequence
  SiRNA target sequence
aaatgtacgacatttttttaaaaaata

SEQ ID NO: 208403 - DNA, 27 bp, Artificial sequence
  SiRNA target sequence
aatgtacgacatttttttaaaaaatac

SEQ ID NO: 208404 - DNA, 27 bp, Artificial sequence
  SiRNA target sequence
atgtacgacatttttttaaaaaataca

SEQ ID NO: 208405 - DNA, 27 bp, Artificial sequence
  SiRNA target sequence
tgtacgacatttttttaaaaaatacag

SEQ ID NO: 208406 - DNA, 27 bp, Artificial sequence
  SiRNA target sequence
gtacgacatttttttaaaaaatacaga

SEQ ID NO: 208407 - DNA, 27 bp, Artificial sequence
  SiRNA target sequence
tacgacatttttttaaaaaatacagaa

SEQ ID NO: 208408 - DNA, 27 bp, Artificial sequence
  SiRNA target sequence
acgacatttttttaaaaaatacagaaa

SEQ ID NO: 208409 - DNA, 27 bp, Artificial sequence
  SiRNA target sequence
cgacatttttttaaaaaatacagaaat

SEQ ID NO: 208410 - DNA, 27 bp, Artificial sequence
  SiRNA target sequence
gacatttttttaaaaaatacagaaatc

SEQ ID NO: 208411 - DNA, 27 bp, Artificial sequence
  SiRNA target sequence
acatttttttaaaaaatacagaaatcc

SEQ ID NO: 208412 - DNA, 27 bp, Artificial sequence
  SiRNA target sequence
catttttttaaaaaatacagaaatcca

SEQ ID NO: 208413 - DNA, 27 bp, Artificial sequence
  SiRNA target sequence
atttttttaaaaaatacagaaatccat

SEQ ID NO: 208414 - DNA, 27 bp, Artificial sequence
  SiRNA target sequence
tttttttaaaaaatacagaaatccatg

SEQ ID NO: 208415 - DNA, 27 bp, Artificial sequence
  SiRNA target sequence
ttttttaaaaaatacagaaatccatga

SEQ ID NO: 208416 - DNA, 27 bp, Artificial sequence
  SiRNA target sequence
tttttaaaaaatacagaaatccatgaa

SEQ ID NO: 208417 - DNA, 27 bp, Artificial sequence
  SiRNA target sequence
ttttaaaaaatacagaaatccatgaaa

SEQ ID NO: 208418 - DNA, 27 bp, Artificial sequence
  SiRNA target sequence
tttaaaaaatacagaaatccatgaaaa

SEQ ID NO: 208419 - DNA, 27 bp, Artificial sequence
  SiRNA target sequence
ttaaaaaatacagaaatccatgaaaaa

SEQ ID NO: 208420 - DNA, 27 bp, Artificial sequence
  SiRNA target sequence
taaaaaatacagaaatccatgaaaaag

SEQ ID NO: 208421 - DNA, 27 bp, Artificial sequence
  SiRNA target sequence
aaaaaatacagaaatccatgaaaaagc

SEQ ID NO: 208422 - DNA, 27 bp, Artificial sequence
  SiRNA target sequence
aaaaatacagaaatccatgaaaaagca

SEQ ID NO: 208423 - DNA, 27 bp, Artificial sequence
  SiRNA target sequence
aaaatacagaaatccatgaaaaagcaa

SEQ ID NO: 208424 - DNA, 27 bp, Artificial sequence
  SiRNA target sequence
aaatacagaaatccatgaaaaagcaag

SEQ ID NO: 208425 - DNA, 27 bp, Artificial sequence
  SiRNA target sequence
aatacagaaatccatgaaaaagcaagt

SEQ ID NO: 208426 - DNA, 27 bp, Artificial sequence
  SiRNA target sequence
atacagaaatccatgaaaaagcaagtc

SEQ ID NO: 208427 - DNA, 27 bp, Artificial sequence
  SiRNA target sequence
tacagaaatccatgaaaaagcaagtcc

SEQ ID NO: 208428 - DNA, 27 bp, Artificial sequence
  SiRNA target sequence
acagaaatccatgaaaaagcaagtcct

SEQ ID NO: 208429 - DNA, 27 bp, Artificial sequence
  SiRNA target sequence
cagaaatccatgaaaaagcaagtcctt

SEQ ID NO: 208430 - DNA, 27 bp, Artificial sequence
  SiRNA target sequence
agaaatccatgaaaaagcaagtccttc

SEQ ID NO: 208431 - DNA, 27 bp, Artificial sequence
  SiRNA target sequence
gaaatccatgaaaaagcaagtccttca

SEQ ID NO: 208432 - DNA, 27 bp, Artificial sequence
  SiRNA target sequence
aaatccatgaaaaagcaagtccttcaa

SEQ ID NO: 208433 - DNA, 27 bp, Artificial sequence
  SiRNA target sequence
aatccatgaaaaagcaagtccttcaat

SEQ ID NO: 208434 - DNA, 27 bp, Artificial sequence
  SiRNA target sequence
atccatgaaaaagcaagtccttcaatg

SEQ ID NO: 208435 - DNA, 27 bp, Artificial sequence
  SiRNA target sequence
tccatgaaaaagcaagtccttcaatgg

SEQ ID NO: 208436 - DNA, 27 bp, Artificial sequence
  SiRNA target sequence
ccatgaaaaagcaagtccttcaatggc

SEQ ID NO: 208437 - DNA, 27 bp, Artificial sequence
  SiRNA target sequence
catgaaaaagcaagtccttcaatggca

SEQ ID NO: 208438 - DNA, 27 bp, Artificial sequence
  SiRNA target sequence
atgaaaaagcaagtccttcaatggcag

SEQ ID NO: 208439 - DNA, 27 bp, Artificial sequence
  SiRNA target sequence
tgaaaaagcaagtccttcaatggcaga

SEQ ID NO: 208440 - DNA, 27 bp, Artificial sequence
  SiRNA target sequence
gaaaaagcaagtccttcaatggcagaa

SEQ ID NO: 208441 - DNA, 27 bp, Artificial sequence
  SiRNA target sequence
aaaaagcaagtccttcaatggcagaat

SEQ ID NO: 208442 - DNA, 27 bp, Artificial sequence
  SiRNA target sequence
aaaagcaagtccttcaatggcagaatt

SEQ ID NO: 208443 - DNA, 27 bp, Artificial sequence
  SiRNA target sequence
aaagcaagtccttcaatggcagaattg

SEQ ID NO: 208444 - DNA, 27 bp, Artificial sequence
  SiRNA target sequence
aagcaagtccttcaatggcagaattgt

SEQ ID NO: 208445 - DNA, 27 bp, Artificial sequence
  SiRNA target sequence
agcaagtccttcaatggcagaattgta

SEQ ID NO: 208446 - DNA, 27 bp, Artificial sequence
  SiRNA target sequence
gcaagtccttcaatggcagaattgtag

SEQ ID NO: 208447 - DNA, 27 bp, Artificial sequence
  SiRNA target sequence
caagtccttcaatggcagaattgtaga

SEQ ID NO: 208448 - DNA, 27 bp, Artificial sequence
  SiRNA target sequence
aagtccttcaatggcagaattgtagat

SEQ ID NO: 208449 - DNA, 27 bp, Artificial sequence
  SiRNA target sequence
agtccttcaatggcagaattgtagatt

SEQ ID NO: 208450 - DNA, 27 bp, Artificial sequence
  SiRNA target sequence
gtccttcaatggcagaattgtagattg

SEQ ID NO: 208451 - DNA, 27 bp, Artificial sequence
  SiRNA target sequence
tccttcaatggcagaattgtagattga

SEQ ID NO: 208452 - DNA, 27 bp, Artificial sequence
  SiRNA target sequence
ccttcaatggcagaattgtagattgat

SEQ ID NO: 208453 - DNA, 27 bp, Artificial sequence
  SiRNA target sequence
cttcaatggcagaattgtagattgatg

SEQ ID NO: 208454 - DNA, 27 bp, Artificial sequence
  SiRNA target sequence
ttcaatggcagaattgtagattgatgc

SEQ ID NO: 208455 - DNA, 27 bp, Artificial sequence
  SiRNA target sequence
tcaatggcagaattgtagattgatgct

SEQ ID NO: 208456 - DNA, 27 bp, Artificial sequence
  SiRNA target sequence
caatggcagaattgtagattgatgctc

SEQ ID NO: 208457 - DNA, 27 bp, Artificial sequence
  SiRNA target sequence
aatggcagaattgtagattgatgctcc

SEQ ID NO: 208458 - DNA, 27 bp, Artificial sequence
  SiRNA target sequence
atggcagaattgtagattgatgctccc

SEQ ID NO: 208459 - DNA, 27 bp, Artificial sequence
  SiRNA target sequence
tggcagaattgtagattgatgctccca

SEQ ID NO: 208460 - DNA, 27 bp, Artificial sequence
  SiRNA target sequence
ggcagaattgtagattgatgctcccat

SEQ ID NO: 208461 - DNA, 27 bp, Artificial sequence
  SiRNA target sequence
gcagaattgtagattgatgctcccata

SEQ ID NO: 208462 - DNA, 27 bp, Artificial sequence
  SiRNA target sequence
cagaattgtagattgatgctcccataa

SEQ ID NO: 208463 - DNA, 27 bp, Artificial sequence
  SiRNA target sequence
agaattgtagattgatgctcccataac

SEQ ID NO: 208464 - DNA, 27 bp, Artificial sequence
  SiRNA target sequence
gaattgtagattgatgctcccataacg

SEQ ID NO: 208465 - DNA, 27 bp, Artificial sequence
  SiRNA target sequence
aattgtagattgatgctcccataacga

SEQ ID NO: 208466 - DNA, 27 bp, Artificial sequence
  SiRNA target sequence
attgtagattgatgctcccataacgat

SEQ ID NO: 208467 - DNA, 27 bp, Artificial sequence
  SiRNA target sequence
ttgtagattgatgctcccataacgatt

SEQ ID NO: 208468 - DNA, 27 bp, Artificial sequence
  SiRNA target sequence
tgtagattgatgctcccataacgatta

SEQ ID NO: 208469 - DNA, 27 bp, Artificial sequence
  SiRNA target sequence
gtagattgatgctcccataacgattat

SEQ ID NO: 208470 - DNA, 27 bp, Artificial sequence
  SiRNA target sequence
tagattgatgctcccataacgattatt

SEQ ID NO: 208471 - DNA, 27 bp, Artificial sequence
  SiRNA target sequence
agattgatgctcccataacgattattg

SEQ ID NO: 208472 - DNA, 27 bp, Artificial sequence
  SiRNA target sequence
gattgatgctcccataacgattattga

SEQ ID NO: 208473 - DNA, 27 bp, Artificial sequence
  SiRNA target sequence
attgatgctcccataacgattattgac

SEQ ID NO: 208474 - DNA, 27 bp, Artificial sequence
  SiRNA target sequence
ttgatgctcccataacgattattgacc

SEQ ID NO: 208475 - DNA, 27 bp, Artificial sequence
  SiRNA target sequence
tgatgctcccataacgattattgaccc

SEQ ID NO: 208476 - DNA, 27 bp, Artificial sequence
  SiRNA target sequence
gatgctcccataacgattattgacccc

SEQ ID NO: 208477 - DNA, 27 bp, Artificial sequence
  SiRNA target sequence
atgctcccataacgattattgacccca

SEQ ID NO: 208478 - DNA, 27 bp, Artificial sequence
  SiRNA target sequence
tgctcccataacgattattgaccccaa

SEQ ID NO: 208479 - DNA, 27 bp, Artificial sequence
  SiRNA target sequence
gctcccataacgattattgaccccaac

SEQ ID NO: 208480 - DNA, 27 bp, Artificial sequence
  SiRNA target sequence
ctcccataacgattattgaccccaaca

SEQ ID NO: 208481 - DNA, 27 bp, Artificial sequence
  SiRNA target sequence
tcccataacgattattgaccccaacaa

SEQ ID NO: 208482 - DNA, 27 bp, Artificial sequence
  SiRNA target sequence
cccataacgattattgaccccaacaac

SEQ ID NO: 208483 - DNA, 27 bp, Artificial sequence
  SiRNA target sequence
ccataacgattattgaccccaacaaca

SEQ ID NO: 208484 - DNA, 27 bp, Artificial sequence
  SiRNA target sequence
cataacgattattgaccccaacaacaa

SEQ ID NO: 208485 - DNA, 27 bp, Artificial sequence
  SiRNA target sequence
ataacgattattgaccccaacaacaag

SEQ ID NO: 208486 - DNA, 27 bp, Artificial sequence
  SiRNA target sequence
taacgattattgaccccaacaacaaga

SEQ ID NO: 208487 - DNA, 27 bp, Artificial sequence
  SiRNA target sequence
aacgattattgaccccaacaacaagaa

SEQ ID NO: 208488 - DNA, 27 bp, Artificial sequence
  SiRNA target sequence
acgattattgaccccaacaacaagaat

SEQ ID NO: 208489 - DNA, 27 bp, Artificial sequence
  SiRNA target sequence
cgattattgaccccaacaacaagaata

SEQ ID NO: 208490 - DNA, 27 bp, Artificial sequence
  SiRNA target sequence
gattattgaccccaacaacaagaataa

SEQ ID NO: 208491 - DNA, 27 bp, Artificial sequence
  SiRNA target sequence
attattgaccccaacaacaagaataaa

SEQ ID NO: 208492 - DNA, 27 bp, Artificial sequence
  SiRNA target sequence
ttattgaccccaacaacaagaataaag

SEQ ID NO: 208493 - DNA, 27 bp, Artificial sequence
  SiRNA target sequence
tattgaccccaacaacaagaataaagg

SEQ ID NO: 208494 - DNA, 27 bp, Artificial sequence
  SiRNA target sequence
attgaccccaacaacaagaataaaggt

SEQ ID NO: 208495 - DNA, 27 bp, Artificial sequence
  SiRNA target sequence
ttgaccccaacaacaagaataaaggtg

SEQ ID NO: 208496 - DNA, 27 bp, Artificial sequence
  SiRNA target sequence
tgaccccaacaacaagaataaaggtgt

SEQ ID NO: 208497 - DNA, 27 bp, Artificial sequence
  SiRNA target sequence
gaccccaacaacaagaataaaggtgtt

SEQ ID NO: 208498 - DNA, 27 bp, Artificial sequence
  SiRNA target sequence
accccaacaacaagaataaaggtgtta

SEQ ID NO: 208499 - DNA, 27 bp, Artificial sequence
  SiRNA target sequence
ccccaacaacaagaataaaggtgttaa

SEQ ID NO: 208500 - DNA, 27 bp, Artificial sequence
  SiRNA target sequence
cccaacaacaagaataaaggtgttaag

SEQ ID NO: 208501 - DNA, 27 bp, Artificial sequence
  SiRNA target sequence
ccaacaacaagaataaaggtgttaaga

SEQ ID NO: 208502 - DNA, 27 bp, Artificial sequence
  SiRNA target sequence
caacaacaagaataaaggtgttaagag

SEQ ID NO: 208503 - DNA, 27 bp, Artificial sequence
  SiRNA target sequence
aacaacaagaataaaggtgttaagagt

SEQ ID NO: 208504 - DNA, 27 bp, Artificial sequence
  SiRNA target sequence
acaacaagaataaaggtgttaagagtc

SEQ ID NO: 208505 - DNA, 27 bp, Artificial sequence
  SiRNA target sequence
caacaagaataaaggtgttaagagtcc

SEQ ID NO: 208506 - DNA, 27 bp, Artificial sequence
  SiRNA target sequence
aacaagaataaaggtgttaagagtccc

SEQ ID NO: 208507 - DNA, 27 bp, Artificial sequence
  SiRNA target sequence
acaagaataaaggtgttaagagtccca

SEQ ID NO: 208508 - DNA, 27 bp, Artificial sequence
  SiRNA target sequence
caagaataaaggtgttaagagtcccat

SEQ ID NO: 208509 - DNA, 27 bp, Artificial sequence
  SiRNA target sequence
aagaataaaggtgttaagagtcccata

SEQ ID NO: 208510 - DNA, 27 bp, Artificial sequence
  SiRNA target sequence
agaataaaggtgttaagagtcccatag

SEQ ID NO: 208511 - DNA, 27 bp, Artificial sequence
  SiRNA target sequence
gaataaaggtgttaagagtcccatagt

SEQ ID NO: 208512 - DNA, 27 bp, Artificial sequence
  SiRNA target sequence
aataaaggtgttaagagtcccatagta

SEQ ID NO: 208513 - DNA, 27 bp, Artificial sequence
  SiRNA target sequence
ataaaggtgttaagagtcccatagtaa

SEQ ID NO: 208514 - DNA, 27 bp, Artificial sequence
  SiRNA target sequence
taaaggtgttaagagtcccatagtaat

SEQ ID NO: 208515 - DNA, 27 bp, Artificial sequence
  SiRNA target sequence
aaaggtgttaagagtcccatagtaatc

SEQ ID NO: 208516 - DNA, 27 bp, Artificial sequence
  SiRNA target sequence
aaggtgttaagagtcccatagtaatcc

SEQ ID NO: 208517 - DNA, 27 bp, Artificial sequence
  SiRNA target sequence
aggtgttaagagtcccatagtaatcca

SEQ ID NO: 208518 - DNA, 27 bp, Artificial sequence
  SiRNA target sequence
ggtgttaagagtcccatagtaatccat

SEQ ID NO: 208519 - DNA, 27 bp, Artificial sequence
  SiRNA target sequence
gtgttaagagtcccatagtaatccatc

SEQ ID NO: 208520 - DNA, 27 bp, Artificial sequence
  SiRNA target sequence
tgttaagagtcccatagtaatccatcc

SEQ ID NO: 208521 - DNA, 27 bp, Artificial sequence
  SiRNA target sequence
gttaagagtcccatagtaatccatcca

SEQ ID NO: 208522 - DNA, 27 bp, Artificial sequence
  SiRNA target sequence
ttaagagtcccatagtaatccatccac

SEQ ID NO: 208523 - DNA, 27 bp, Artificial sequence
  SiRNA target sequence
taagagtcccatagtaatccatccact

SEQ ID NO: 208524 - DNA, 27 bp, Artificial sequence
  SiRNA target sequence
aagagtcccatagtaatccatccacta

SEQ ID NO: 208525 - DNA, 27 bp, Artificial sequence
  SiRNA target sequence
agagtcccatagtaatccatccactac

SEQ ID NO: 208526 - DNA, 27 bp, Artificial sequence
  SiRNA target sequence
gagtcccatagtaatccatccactact

SEQ ID NO: 208527 - DNA, 27 bp, Artificial sequence
  SiRNA target sequence
agtcccatagtaatccatccactactt

SEQ ID NO: 208528 - DNA, 27 bp, Artificial sequence
  SiRNA target sequence
gtcccatagtaatccatccactacttt

SEQ ID NO: 208529 - DNA, 27 bp, Artificial sequence
  SiRNA target sequence
tcccatagtaatccatccactactttc

SEQ ID NO: 208530 - DNA, 27 bp, Artificial sequence
  SiRNA target sequence
cccatagtaatccatccactactttct

SEQ ID NO: 208531 - DNA, 27 bp, Artificial sequence
  SiRNA target sequence
ccatagtaatccatccactactttcta

SEQ ID NO: 208532 - DNA, 27 bp, Artificial sequence
  SiRNA target sequence
catagtaatccatccactactttctac

SEQ ID NO: 208533 - DNA, 27 bp, Artificial sequence
  SiRNA target sequence
atagtaatccatccactactttctact

SEQ ID NO: 208534 - DNA, 27 bp, Artificial sequence
  SiRNA target sequence
tagtaatccatccactactttctacta

SEQ ID NO: 208535 - DNA, 27 bp, Artificial sequence
  SiRNA target sequence
agtaatccatccactactttctactaa

SEQ ID NO: 208536 - DNA, 27 bp, Artificial sequence
  SiRNA target sequence
gtaatccatccactactttctactaaa

SEQ ID NO: 208537 - DNA, 27 bp, Artificial sequence
  SiRNA target sequence
taatccatccactactttctactaaag

SEQ ID NO: 208538 - DNA, 27 bp, Artificial sequence
  SiRNA target sequence
aatccatccactactttctactaaagt

SEQ ID NO: 208539 - DNA, 27 bp, Artificial sequence
  SiRNA target sequence
atccatccactactttctactaaagta

SEQ ID NO: 208540 - DNA, 27 bp, Artificial sequence
  SiRNA target sequence
tccatccactactttctactaaagtag

SEQ ID NO: 208541 - DNA, 27 bp, Artificial sequence
  SiRNA target sequence
ccatccactactttctactaaagtaga

SEQ ID NO: 208542 - DNA, 27 bp, Artificial sequence
  SiRNA target sequence
catccactactttctactaaagtagaa

SEQ ID NO: 208543 - DNA, 27 bp, Artificial sequence
  SiRNA target sequence
atccactactttctactaaagtagaaa

SEQ ID NO: 208544 - DNA, 27 bp, Artificial sequence
  SiRNA target sequence
tccactactttctactaaagtagaaaa

SEQ ID NO: 208545 - DNA, 27 bp, Artificial sequence
  SiRNA target sequence
ccactactttctactaaagtagaaaat

SEQ ID NO: 208546 - DNA, 27 bp, Artificial sequence
  SiRNA target sequence
cactactttctactaaagtagaaaatg

SEQ ID NO: 208547 - DNA, 27 bp, Artificial sequence
  SiRNA target sequence
actactttctactaaagtagaaaatgc

SEQ ID NO: 208548 - DNA, 27 bp, Artificial sequence
  SiRNA target sequence
ctactttctactaaagtagaaaatgct

SEQ ID NO: 208549 - DNA, 27 bp, Artificial sequence
  SiRNA target sequence
tactttctactaaagtagaaaatgctg

SEQ ID NO: 208550 - DNA, 27 bp, Artificial sequence
  SiRNA target sequence
actttctactaaagtagaaaatgctga

SEQ ID NO: 208551 - DNA, 27 bp, Artificial sequence
  SiRNA target sequence
ctttctactaaagtagaaaatgctgac

SEQ ID NO: 208552 - DNA, 27 bp, Artificial sequence
  SiRNA target sequence
tttctactaaagtagaaaatgctgaca

SEQ ID NO: 208553 - DNA, 27 bp, Artificial sequence
  SiRNA target sequence
ttctactaaagtagaaaatgctgacaa

SEQ ID NO: 208554 - DNA, 27 bp, Artificial sequence
  SiRNA target sequence
tctactaaagtagaaaatgctgacaaa

SEQ ID NO: 208555 - DNA, 27 bp, Artificial sequence
  SiRNA target sequence
ctactaaagtagaaaatgctgacaaat

SEQ ID NO: 208556 - DNA, 27 bp, Artificial sequence
  SiRNA target sequence
tactaaagtagaaaatgctgacaaatt

SEQ ID NO: 208557 - DNA, 27 bp, Artificial sequence
  SiRNA target sequence
actaaagtagaaaatgctgacaaatta

SEQ ID NO: 208558 - DNA, 27 bp, Artificial sequence
  SiRNA target sequence
ctaaagtagaaaatgctgacaaattaa

SEQ ID NO: 208559 - DNA, 27 bp, Artificial sequence
  SiRNA target sequence
taaagtagaaaatgctgacaaattaag

SEQ ID NO: 208560 - DNA, 27 bp, Artificial sequence
  SiRNA target sequence
aaagtagaaaatgctgacaaattaagt

SEQ ID NO: 208561 - DNA, 27 bp, Artificial sequence
  SiRNA target sequence
aagtagaaaatgctgacaaattaagtg

SEQ ID NO: 208562 - DNA, 27 bp, Artificial sequence
  SiRNA target sequence
agtagaaaatgctgacaaattaagtgt

SEQ ID NO: 208563 - DNA, 27 bp, Artificial sequence
  SiRNA target sequence
gtagaaaatgctgacaaattaagtgtt

SEQ ID NO: 208564 - DNA, 27 bp, Artificial sequence
  SiRNA target sequence
tagaaaatgctgacaaattaagtgtta

SEQ ID NO: 208565 - DNA, 27 bp, Artificial sequence
  SiRNA target sequence
agaaaatgctgacaaattaagtgttat

SEQ ID NO: 208566 - DNA, 27 bp, Artificial sequence
  SiRNA target sequence
gaaaatgctgacaaattaagtgttatt

SEQ ID NO: 208567 - DNA, 27 bp, Artificial sequence
  SiRNA target sequence
aaaatgctgacaaattaagtgttatta

SEQ ID NO: 208568 - DNA, 27 bp, Artificial sequence
  SiRNA target sequence
aaatgctgacaaattaagtgttattac

SEQ ID NO: 208569 - DNA, 27 bp, Artificial sequence
  SiRNA target sequence
aatgctgacaaattaagtgttattaca

SEQ ID NO: 208570 - DNA, 27 bp, Artificial sequence
  SiRNA target sequence
atgctgacaaattaagtgttattacag

SEQ ID NO: 208571 - DNA, 27 bp, Artificial sequence
  SiRNA target sequence
tgctgacaaattaagtgttattacagt

SEQ ID NO: 208572 - DNA, 27 bp, Artificial sequence
  SiRNA target sequence
gctgacaaattaagtgttattacagta

SEQ ID NO: 208573 - DNA, 27 bp, Artificial sequence
  SiRNA target sequence
ctgacaaattaagtgttattacagtaa

SEQ ID NO: 208574 - DNA, 27 bp, Artificial sequence
  SiRNA target sequence
tgacaaattaagtgttattacagtaac

SEQ ID NO: 208575 - DNA, 27 bp, Artificial sequence
  SiRNA target sequence
gacaaattaagtgttattacagtaact

SEQ ID NO: 208576 - DNA, 27 bp, Artificial sequence
  SiRNA target sequence
acaaattaagtgttattacagtaactg

SEQ ID NO: 208577 - DNA, 27 bp, Artificial sequence
  SiRNA target sequence
caaattaagtgttattacagtaactgc

SEQ ID NO: 208578 - DNA, 27 bp, Artificial sequence
  SiRNA target sequence
aaattaagtgttattacagtaactgct

SEQ ID NO: 208579 - DNA, 27 bp, Artificial sequence
  SiRNA target sequence
aattaagtgttattacagtaactgcta

SEQ ID NO: 208580 - DNA, 27 bp, Artificial sequence
  SiRNA target sequence
attaagtgttattacagtaactgctac

SEQ ID NO: 208581 - DNA, 27 bp, Artificial sequence
  SiRNA target sequence
ttaagtgttattacagtaactgctacc

SEQ ID NO: 208582 - DNA, 27 bp, Artificial sequence
  SiRNA target sequence
taagtgttattacagtaactgctacca

SEQ ID NO: 208583 - DNA, 27 bp, Artificial sequence
  SiRNA target sequence
aagtgttattacagtaactgctaccaa

SEQ ID NO: 208584 - DNA, 27 bp, Artificial sequence
  SiRNA target sequence
agtgttattacagtaactgctaccaat

SEQ ID NO: 208585 - DNA, 27 bp, Artificial sequence
  SiRNA target sequence
gtgttattacagtaactgctaccaata

SEQ ID NO: 208586 - DNA, 27 bp, Artificial sequence
  SiRNA target sequence
tgttattacagtaactgctaccaatat

SEQ ID NO: 208587 - DNA, 27 bp, Artificial sequence
  SiRNA target sequence
gttattacagtaactgctaccaatatt

SEQ ID NO: 208588 - DNA, 27 bp, Artificial sequence
  SiRNA target sequence
ttattacagtaactgctaccaatattt

SEQ ID NO: 208589 - DNA, 27 bp, Artificial sequence
  SiRNA target sequence
tattacagtaactgctaccaatatttg

SEQ ID NO: 208590 - DNA, 27 bp, Artificial sequence
  SiRNA target sequence
attacagtaactgctaccaatatttga

SEQ ID NO: 208591 - DNA, 27 bp, Artificial sequence
  SiRNA target sequence
ttacagtaactgctaccaatatttgat

SEQ ID NO: 208592 - DNA, 27 bp, Artificial sequence
  SiRNA target sequence
tacagtaactgctaccaatatttgatc

SEQ ID NO: 208593 - DNA, 27 bp, Artificial sequence
  SiRNA target sequence
acagtaactgctaccaatatttgatct

SEQ ID NO: 208594 - DNA, 27 bp, Artificial sequence
  SiRNA target sequence
cagtaactgctaccaatatttgatcta

SEQ ID NO: 208595 - DNA, 27 bp, Artificial sequence
  SiRNA target sequence
agtaactgctaccaatatttgatctat

SEQ ID NO: 208596 - DNA, 27 bp, Artificial sequence
  SiRNA target sequence
gtaactgctaccaatatttgatctatt

SEQ ID NO: 208597 - DNA, 27 bp, Artificial sequence
  SiRNA target sequence
taactgctaccaatatttgatctattg

SEQ ID NO: 208598 - DNA, 27 bp, Artificial sequence
  SiRNA target sequence
aactgctaccaatatttgatctattgt

SEQ ID NO: 208599 - DNA, 27 bp, Artificial sequence
  SiRNA target sequence
actgctaccaatatttgatctattgta

SEQ ID NO: 208600 - DNA, 27 bp, Artificial sequence
  SiRNA target sequence
ctgctaccaatatttgatctattgtat

SEQ ID NO: 208601 - DNA, 27 bp, Artificial sequence
  SiRNA target sequence
tgctaccaatatttgatctattgtatt

SEQ ID NO: 208602 - DNA, 27 bp, Artificial sequence
  SiRNA target sequence
gctaccaatatttgatctattgtatta

SEQ ID NO: 208603 - DNA, 27 bp, Artificial sequence
  SiRNA target sequence
ctaccaatatttgatctattgtattaa

SEQ ID NO: 208604 - DNA, 27 bp, Artificial sequence
  SiRNA target sequence
taccaatatttgatctattgtattaaa

SEQ ID NO: 208605 - DNA, 27 bp, Artificial sequence
  SiRNA target sequence
accaatatttgatctattgtattaaat

SEQ ID NO: 208606 - DNA, 27 bp, Artificial sequence
  SiRNA target sequence
ccaatatttgatctattgtattaaatt

SEQ ID NO: 208607 - DNA, 27 bp, Artificial sequence
  SiRNA target sequence
caatatttgatctattgtattaaattt

SEQ ID NO: 208608 - DNA, 27 bp, Artificial sequence
  SiRNA target sequence
aatatttgatctattgtattaaatttg

SEQ ID NO: 208609 - DNA, 27 bp, Artificial sequence
  SiRNA target sequence
atatttgatctattgtattaaatttgc

SEQ ID NO: 208610 - DNA, 27 bp, Artificial sequence
  SiRNA target sequence
tatttgatctattgtattaaatttgcc

SEQ ID NO: 208611 - DNA, 27 bp, Artificial sequence
  SiRNA target sequence
atttgatctattgtattaaatttgccg

SEQ ID NO: 208612 - DNA, 27 bp, Artificial sequence
  SiRNA target sequence
tttgatctattgtattaaatttgccgg

SEQ ID NO: 208613 - DNA, 27 bp, Artificial sequence
  SiRNA target sequence
ttgatctattgtattaaatttgccgga

SEQ ID NO: 208614 - DNA, 27 bp, Artificial sequence
  SiRNA target sequence
tgatctattgtattaaatttgccggag

SEQ ID NO: 208615 - DNA, 27 bp, Artificial sequence
  SiRNA target sequence
gatctattgtattaaatttgccggagt

SEQ ID NO: 208616 - DNA, 27 bp, Artificial sequence
  SiRNA target sequence
atctattgtattaaatttgccggagta

SEQ ID NO: 208617 - DNA, 27 bp, Artificial sequence
  SiRNA target sequence
tctattgtattaaatttgccggagtat

SEQ ID NO: 208618 - DNA, 27 bp, Artificial sequence
  SiRNA target sequence
ctattgtattaaatttgccggagtatt

SEQ ID NO: 208619 - DNA, 27 bp, Artificial sequence
  SiRNA target sequence
tattgtattaaatttgccggagtattc

SEQ ID NO: 208620 - DNA, 27 bp, Artificial sequence
  SiRNA target sequence
attgtattaaatttgccggagtattct

SEQ ID NO: 208621 - DNA, 27 bp, Artificial sequence
  SiRNA target sequence
ttgtattaaatttgccggagtattctc

SEQ ID NO: 208622 - DNA, 27 bp, Artificial sequence
  SiRNA target sequence
tgtattaaatttgccggagtattctcc

SEQ ID NO: 208623 - DNA, 27 bp, Artificial sequence
  SiRNA target sequence
gtattaaatttgccggagtattctcct

SEQ ID NO: 208624 - DNA, 27 bp, Artificial sequence
  SiRNA target sequence
tattaaatttgccggagtattctccta

SEQ ID NO: 208625 - DNA, 27 bp, Artificial sequence
  SiRNA target sequence
attaaatttgccggagtattctcctac

SEQ ID NO: 208626 - DNA, 27 bp, Artificial sequence
  SiRNA target sequence
ttaaatttgccggagtattctcctacc

SEQ ID NO: 208627 - DNA, 27 bp, Artificial sequence
  SiRNA target sequence
taaatttgccggagtattctcctacct

SEQ ID NO: 208628 - DNA, 27 bp, Artificial sequence
  SiRNA target sequence
aaatttgccggagtattctcctacctc

SEQ ID NO: 208629 - DNA, 27 bp, Artificial sequence
  SiRNA target sequence
aatttgccggagtattctcctacctct

SEQ ID NO: 208630 - DNA, 27 bp, Artificial sequence
  SiRNA target sequence
atttgccggagtattctcctacctcta

SEQ ID NO: 208631 - DNA, 27 bp, Artificial sequence
  SiRNA target sequence
tttgccggagtattctcctacctctaa

SEQ ID NO: 208632 - DNA, 27 bp, Artificial sequence
  SiRNA target sequence
ttgccggagtattctcctacctctaat

SEQ ID NO: 208633 - DNA, 27 bp, Artificial sequence
  SiRNA target sequence
tgccggagtattctcctacctctaatc

SEQ ID NO: 208634 - DNA, 27 bp, Artificial sequence
  SiRNA target sequence
gccggagtattctcctacctctaatcc

SEQ ID NO: 208635 - DNA, 27 bp, Artificial sequence
  SiRNA target sequence
ccggagtattctcctacctctaatcct

SEQ ID NO: 208636 - DNA, 27 bp, Artificial sequence
  SiRNA target sequence
cggagtattctcctacctctaatccta

SEQ ID NO: 208637 - DNA, 27 bp, Artificial sequence
  SiRNA target sequence
ggagtattctcctacctctaatcctaa

SEQ ID NO: 208638 - DNA, 27 bp, Artificial sequence
  SiRNA target sequence
gagtattctcctacctctaatcctaaa

SEQ ID NO: 208639 - DNA, 27 bp, Artificial sequence
  SiRNA target sequence
agtattctcctacctctaatcctaaac

SEQ ID NO: 208640 - DNA, 27 bp, Artificial sequence
  SiRNA target sequence
gtattctcctacctctaatcctaaact

SEQ ID NO: 208641 - DNA, 27 bp, Artificial sequence
  SiRNA target sequence
tattctcctacctctaatcctaaactt

SEQ ID NO: 208642 - DNA, 27 bp, Artificial sequence
  SiRNA target sequence
attctcctacctctaatcctaaacttt

SEQ ID NO: 208643 - DNA, 27 bp, Artificial sequence
  SiRNA target sequence
ttctcctacctctaatcctaaactttt

SEQ ID NO: 208644 - DNA, 27 bp, Artificial sequence
  SiRNA target sequence
tctcctacctctaatcctaaacttttt

SEQ ID NO: 208645 - DNA, 27 bp, Artificial sequence
  SiRNA target sequence
ctcctacctctaatcctaaactttttg

SEQ ID NO: 208646 - DNA, 27 bp, Artificial sequence
  SiRNA target sequence
tcctacctctaatcctaaactttttga

SEQ ID NO: 208647 - DNA, 27 bp, Artificial sequence
  SiRNA target sequence
cctacctctaatcctaaactttttgac

SEQ ID NO: 208648 - DNA, 27 bp, Artificial sequence
  SiRNA target sequence
ctacctctaatcctaaactttttgacg

SEQ ID NO: 208649 - DNA, 27 bp, Artificial sequence
  SiRNA target sequence
tacctctaatcctaaactttttgacgc

SEQ ID NO: 208650 - DNA, 27 bp, Artificial sequence
  SiRNA target sequence
acctctaatcctaaactttttgacgca

SEQ ID NO: 208651 - DNA, 27 bp, Artificial sequence
  SiRNA target sequence
cctctaatcctaaactttttgacgcag

SEQ ID NO: 208652 - DNA, 27 bp, Artificial sequence
  SiRNA target sequence
ctctaatcctaaactttttgacgcagc

SEQ ID NO: 208653 - DNA, 27 bp, Artificial sequence
  SiRNA target sequence
tctaatcctaaactttttgacgcagct

SEQ ID NO: 208654 - DNA, 27 bp, Artificial sequence
  SiRNA target sequence
ctaatcctaaactttttgacgcagctt

SEQ ID NO: 208655 - DNA, 27 bp, Artificial sequence
  SiRNA target sequence
taatcctaaactttttgacgcagcttt

SEQ ID NO: 208656 - DNA, 27 bp, Artificial sequence
  SiRNA target sequence
aatcctaaactttttgacgcagcttta

SEQ ID NO: 208657 - DNA, 27 bp, Artificial sequence
  SiRNA target sequence
atcctaaactttttgacgcagctttaa

SEQ ID NO: 208658 - DNA, 27 bp, Artificial sequence
  SiRNA target sequence
tcctaaactttttgacgcagctttaat

SEQ ID NO: 208659 - DNA, 27 bp, Artificial sequence
  SiRNA target sequence
cctaaactttttgacgcagctttaatt

SEQ ID NO: 208660 - DNA, 27 bp, Artificial sequence
  SiRNA target sequence
ctaaactttttgacgcagctttaattc

SEQ ID NO: 208661 - DNA, 27 bp, Artificial sequence
  SiRNA target sequence
taaactttttgacgcagctttaattcc

SEQ ID NO: 208662 - DNA, 27 bp, Artificial sequence
  SiRNA target sequence
aaactttttgacgcagctttaattcct

SEQ ID NO: 208663 - DNA, 27 bp, Artificial sequence
  SiRNA target sequence
aactttttgacgcagctttaattcctg

SEQ ID NO: 208664 - DNA, 27 bp, Artificial sequence
  SiRNA target sequence
actttttgacgcagctttaattcctgc

SEQ ID NO: 208665 - DNA, 27 bp, Artificial sequence
  SiRNA target sequence
ctttttgacgcagctttaattcctgct

SEQ ID NO: 208666 - DNA, 27 bp, Artificial sequence
  SiRNA target sequence
tttttgacgcagctttaattcctgctt

SEQ ID NO: 208667 - DNA, 27 bp, Artificial sequence
  SiRNA target sequence
ttttgacgcagctttaattcctgcttt

SEQ ID NO: 208668 - DNA, 27 bp, Artificial sequence
  SiRNA target sequence
tttgacgcagctttaattcctgcttta

SEQ ID NO: 208669 - DNA, 27 bp, Artificial sequence
  SiRNA target sequence
ttgacgcagctttaattcctgctttat

SEQ ID NO: 208670 - DNA, 27 bp, Artificial sequence
  SiRNA target sequence
tgacgcagctttaattcctgctttata

SEQ ID NO: 208671 - DNA, 27 bp, Artificial sequence
  SiRNA target sequence
gacgcagctttaattcctgctttatag

SEQ ID NO: 208672 - DNA, 27 bp, Artificial sequence
  SiRNA target sequence
acgcagctttaattcctgctttataga

SEQ ID NO: 208673 - DNA, 27 bp, Artificial sequence
  SiRNA target sequence
cgcagctttaattcctgctttatagac

SEQ ID NO: 208674 - DNA, 27 bp, Artificial sequence
  SiRNA target sequence
gcagctttaattcctgctttatagaca

SEQ ID NO: 208675 - DNA, 27 bp, Artificial sequence
  SiRNA target sequence
cagctttaattcctgctttatagacag

SEQ ID NO: 208676 - DNA, 27 bp, Artificial sequence
  SiRNA target sequence
agctttaattcctgctttatagacaga

SEQ ID NO: 208677 - DNA, 27 bp, Artificial sequence
  SiRNA target sequence
gctttaattcctgctttatagacagat

SEQ ID NO: 208678 - DNA, 27 bp, Artificial sequence
  SiRNA target sequence
ctttaattcctgctttatagacagatt

SEQ ID NO: 208679 - DNA, 27 bp, Artificial sequence
  SiRNA target sequence
tttaattcctgctttatagacagattc

SEQ ID NO: 208680 - DNA, 27 bp, Artificial sequence
  SiRNA target sequence
ttaattcctgctttatagacagattca

SEQ ID NO: 208681 - DNA, 27 bp, Artificial sequence
  SiRNA target sequence
taattcctgctttatagacagattcaa

SEQ ID NO: 208682 - DNA, 27 bp, Artificial sequence
  SiRNA target sequence
aattcctgctttatagacagattcaat

SEQ ID NO: 208683 - DNA, 27 bp, Artificial sequence
  SiRNA target sequence
attcctgctttatagacagattcaatt

SEQ ID NO: 208684 - DNA, 27 bp, Artificial sequence
  SiRNA target sequence
ttcctgctttatagacagattcaatta

SEQ ID NO: 208685 - DNA, 27 bp, Artificial sequence
  SiRNA target sequence
tcctgctttatagacagattcaattaa

SEQ ID NO: 208686 - DNA, 27 bp, Artificial sequence
  SiRNA target sequence
cctgctttatagacagattcaattaaa

SEQ ID NO: 208687 - DNA, 27 bp, Artificial sequence
  SiRNA target sequence
ctgctttatagacagattcaattaaat

SEQ ID NO: 208688 - DNA, 27 bp, Artificial sequence
  SiRNA target sequence
tgctttatagacagattcaattaaatt

SEQ ID NO: 208689 - DNA, 27 bp, Artificial sequence
  SiRNA target sequence
gctttatagacagattcaattaaatta

SEQ ID NO: 208690 - DNA, 27 bp, Artificial sequence
  SiRNA target sequence
ctttatagacagattcaattaaattaa

SEQ ID NO: 208691 - DNA, 27 bp, Artificial sequence
  SiRNA target sequence
tttatagacagattcaattaaattaaa

SEQ ID NO: 208692 - DNA, 27 bp, Artificial sequence
  SiRNA target sequence
ttatagacagattcaattaaattaaat

SEQ ID NO: 208693 - DNA, 27 bp, Artificial sequence
  SiRNA target sequence
tatagacagattcaattaaattaaatg

SEQ ID NO: 208694 - DNA, 27 bp, Artificial sequence
  SiRNA target sequence
atagacagattcaattaaattaaatgt

SEQ ID NO: 208695 - DNA, 27 bp, Artificial sequence
  SiRNA target sequence
tagacagattcaattaaattaaatgtt

SEQ ID NO: 208696 - DNA, 27 bp, Artificial sequence
  SiRNA target sequence
agacagattcaattaaattaaatgtta

SEQ ID NO: 208697 - DNA, 27 bp, Artificial sequence
  SiRNA target sequence
gacagattcaattaaattaaatgttat

SEQ ID NO: 208698 - DNA, 27 bp, Artificial sequence
  SiRNA target sequence
acagattcaattaaattaaatgttata

SEQ ID NO: 208699 - DNA, 27 bp, Artificial sequence
  SiRNA target sequence
cagattcaattaaattaaatgttatat

SEQ ID NO: 208700 - DNA, 27 bp, Artificial sequence
  SiRNA target sequence
agattcaattaaattaaatgttatatt

SEQ ID NO: 208701 - DNA, 27 bp, Artificial sequence
  SiRNA target sequence
gattcaattaaattaaatgttatattg

SEQ ID NO: 208702 - DNA, 27 bp, Artificial sequence
  SiRNA target sequence
attcaattaaattaaatgttatattgt

SEQ ID NO: 208703 - DNA, 27 bp, Artificial sequence
  SiRNA target sequence
ttcaattaaattaaatgttatattgta

SEQ ID NO: 208704 - DNA, 27 bp, Artificial sequence
  SiRNA target sequence
tcaattaaattaaatgttatattgtaa

SEQ ID NO: 208705 - DNA, 27 bp, Artificial sequence
  SiRNA target sequence
caattaaattaaatgttatattgtaaa

SEQ ID NO: 208706 - DNA, 27 bp, Artificial sequence
  SiRNA target sequence
aattaaattaaatgttatattgtaaaa

SEQ ID NO: 208707 - DNA, 27 bp, Artificial sequence
  SiRNA target sequence
attaaattaaatgttatattgtaaaaa

SEQ ID NO: 208708 - DNA, 27 bp, Artificial sequence
  SiRNA target sequence
ttaaattaaatgttatattgtaaaaaa

SEQ ID NO: 208709 - DNA, 27 bp, Artificial sequence
  SiRNA target sequence
taaattaaatgttatattgtaaaaaaa

SEQ ID NO: 208710 - DNA, 27 bp, Artificial sequence
  SiRNA target sequence
aaattaaatgttatattgtaaaaaaag

SEQ ID NO: 208711 - DNA, 27 bp, Artificial sequence
  SiRNA target sequence
aattaaatgttatattgtaaaaaaaga

SEQ ID NO: 208712 - DNA, 27 bp, Artificial sequence
  SiRNA target sequence
attaaatgttatattgtaaaaaaagac

SEQ ID NO: 208713 - DNA, 27 bp, Artificial sequence
  SiRNA target sequence
ttaaatgttatattgtaaaaaaagact

SEQ ID NO: 208714 - DNA, 27 bp, Artificial sequence
  SiRNA target sequence
taaatgttatattgtaaaaaaagacta

SEQ ID NO: 208715 - DNA, 27 bp, Artificial sequence
  SiRNA target sequence
aaatgttatattgtaaaaaaagactat

SEQ ID NO: 208716 - DNA, 27 bp, Artificial sequence
  SiRNA target sequence
aatgttatattgtaaaaaaagactatt

SEQ ID NO: 208717 - DNA, 27 bp, Artificial sequence
  SiRNA target sequence
atgttatattgtaaaaaaagactatta

SEQ ID NO: 208718 - DNA, 27 bp, Artificial sequence
  SiRNA target sequence
tgttatattgtaaaaaaagactattat

SEQ ID NO: 208719 - DNA, 27 bp, Artificial sequence
  SiRNA target sequence
gttatattgtaaaaaaagactattata

SEQ ID NO: 208720 - DNA, 27 bp, Artificial sequence
  SiRNA target sequence
ttatattgtaaaaaaagactattatac

SEQ ID NO: 208721 - DNA, 27 bp, Artificial sequence
  SiRNA target sequence
tatattgtaaaaaaagactattataca

SEQ ID NO: 208722 - DNA, 27 bp, Artificial sequence
  SiRNA target sequence
atattgtaaaaaaagactattatacaa

SEQ ID NO: 208723 - DNA, 27 bp, Artificial sequence
  SiRNA target sequence
tattgtaaaaaaagactattatacaaa

SEQ ID NO: 208724 - DNA, 27 bp, Artificial sequence
  SiRNA target sequence
attgtaaaaaaagactattatacaaag

SEQ ID NO: 208725 - DNA, 27 bp, Artificial sequence
  SiRNA target sequence
ttgtaaaaaaagactattatacaaagt

SEQ ID NO: 208726 - DNA, 27 bp, Artificial sequence
  SiRNA target sequence
tgtaaaaaaagactattatacaaagtg

SEQ ID NO: 208727 - DNA, 27 bp, Artificial sequence
  SiRNA target sequence
gtaaaaaaagactattatacaaagtga

SEQ ID NO: 208728 - DNA, 27 bp, Artificial sequence
  SiRNA target sequence
taaaaaaagactattatacaaagtgac

SEQ ID NO: 208729 - DNA, 27 bp, Artificial sequence
  SiRNA target sequence
aaaaaaagactattatacaaagtgaca

SEQ ID NO: 208730 - DNA, 27 bp, Artificial sequence
  SiRNA target sequence
aaaaaagactattatacaaagtgacat

SEQ ID NO: 208731 - DNA, 27 bp, Artificial sequence
  SiRNA target sequence
aaaaagactattatacaaagtgacatt

SEQ ID NO: 208732 - DNA, 27 bp, Artificial sequence
  SiRNA target sequence
aaaagactattatacaaagtgacatta

SEQ ID NO: 208733 - DNA, 27 bp, Artificial sequence
  SiRNA target sequence
aaagactattatacaaagtgacattaa

SEQ ID NO: 208734 - DNA, 27 bp, Artificial sequence
  SiRNA target sequence
aagactattatacaaagtgacattaat

SEQ ID NO: 208735 - DNA, 27 bp, Artificial sequence
  SiRNA target sequence
agactattatacaaagtgacattaata

SEQ ID NO: 208736 - DNA, 27 bp, Artificial sequence
  SiRNA target sequence
gactattatacaaagtgacattaataa

SEQ ID NO: 208737 - DNA, 27 bp, Artificial sequence
  SiRNA target sequence
actattatacaaagtgacattaataat

SEQ ID NO: 208738 - DNA, 27 bp, Artificial sequence
  SiRNA target sequence
ctattatacaaagtgacattaataatt

SEQ ID NO: 208739 - DNA, 27 bp, Artificial sequence
  SiRNA target sequence
tattatacaaagtgacattaataattt

SEQ ID NO: 208740 - DNA, 27 bp, Artificial sequence
  SiRNA target sequence
attatacaaagtgacattaataatttt

SEQ ID NO: 208741 - DNA, 27 bp, Artificial sequence
  SiRNA target sequence
ttatacaaagtgacattaataattttg

SEQ ID NO: 208742 - DNA, 27 bp, Artificial sequence
  SiRNA target sequence
tatacaaagtgacattaataattttga

SEQ ID NO: 208743 - DNA, 27 bp, Artificial sequence
  SiRNA target sequence
atacaaagtgacattaataattttgat

SEQ ID NO: 208744 - DNA, 27 bp, Artificial sequence
  SiRNA target sequence
tacaaagtgacattaataattttgatt

SEQ ID NO: 208745 - DNA, 27 bp, Artificial sequence
  SiRNA target sequence
acaaagtgacattaataattttgattt

SEQ ID NO: 208746 - DNA, 27 bp, Artificial sequence
  SiRNA target sequence
caaagtgacattaataattttgatttc

SEQ ID NO: 208747 - DNA, 27 bp, Artificial sequence
  SiRNA target sequence
aaagtgacattaataattttgatttca

SEQ ID NO: 208748 - DNA, 27 bp, Artificial sequence
  SiRNA target sequence
aagtgacattaataattttgatttcat

SEQ ID NO: 208749 - DNA, 27 bp, Artificial sequence
  SiRNA target sequence
agtgacattaataattttgatttcatc

SEQ ID NO: 208750 - DNA, 27 bp, Artificial sequence
  SiRNA target sequence
gtgacattaataattttgatttcatca

SEQ ID NO: 208751 - DNA, 27 bp, Artificial sequence
  SiRNA target sequence
tgacattaataattttgatttcatcat

SEQ ID NO: 208752 - DNA, 27 bp, Artificial sequence
  SiRNA target sequence
gacattaataattttgatttcatcatt

SEQ ID NO: 208753 - DNA, 27 bp, Artificial sequence
  SiRNA target sequence
acattaataattttgatttcatcatta

SEQ ID NO: 208754 - DNA, 27 bp, Artificial sequence
  SiRNA target sequence
cattaataattttgatttcatcattat

SEQ ID NO: 208755 - DNA, 27 bp, Artificial sequence
  SiRNA target sequence
attaataattttgatttcatcattata

SEQ ID NO: 208756 - DNA, 27 bp, Artificial sequence
  SiRNA target sequence
ttaataattttgatttcatcattatac

SEQ ID NO: 208757 - DNA, 27 bp, Artificial sequence
  SiRNA target sequence
taataattttgatttcatcattatact

SEQ ID NO: 208758 - DNA, 27 bp, Artificial sequence
  SiRNA target sequence
aataattttgatttcatcattatacta

SEQ ID NO: 208759 - DNA, 27 bp, Artificial sequence
  SiRNA target sequence
ataattttgatttcatcattatactaa

SEQ ID NO: 208760 - DNA, 27 bp, Artificial sequence
  SiRNA target sequence
taattttgatttcatcattatactaat

SEQ ID NO: 208761 - DNA, 27 bp, Artificial sequence
  SiRNA target sequence
aattttgatttcatcattatactaata

SEQ ID NO: 208762 - DNA, 27 bp, Artificial sequence
  SiRNA target sequence
attttgatttcatcattatactaatac

SEQ ID NO: 208763 - DNA, 27 bp, Artificial sequence
  SiRNA target sequence
ttttgatttcatcattatactaatacc

SEQ ID NO: 208764 - DNA, 27 bp, Artificial sequence
  SiRNA target sequence
tttgatttcatcattatactaatacct

SEQ ID NO: 208765 - DNA, 27 bp, Artificial sequence
  SiRNA target sequence
ttgatttcatcattatactaatacctt

SEQ ID NO: 208766 - DNA, 27 bp, Artificial sequence
  SiRNA target sequence
tgatttcatcattatactaataccttc

SEQ ID NO: 208767 - DNA, 27 bp, Artificial sequence
  SiRNA target sequence
gatttcatcattatactaataccttcg

SEQ ID NO: 208768 - DNA, 27 bp, Artificial sequence
  SiRNA target sequence
atttcatcattatactaataccttcgg

SEQ ID NO: 208769 - DNA, 27 bp, Artificial sequence
  SiRNA target sequence
tttcatcattatactaataccttcgga

SEQ ID NO: 208770 - DNA, 27 bp, Artificial sequence
  SiRNA target sequence
ttcatcattatactaataccttcggag

SEQ ID NO: 208771 - DNA, 27 bp, Artificial sequence
  SiRNA target sequence
tcatcattatactaataccttcggaga

SEQ ID NO: 208772 - DNA, 27 bp, Artificial sequence
  SiRNA target sequence
catcattatactaataccttcggagaa

SEQ ID NO: 208773 - DNA, 27 bp, Artificial sequence
  SiRNA target sequence
atcattatactaataccttcggagaaa

SEQ ID NO: 208774 - DNA, 27 bp, Artificial sequence
  SiRNA target sequence
tcattatactaataccttcggagaaac

SEQ ID NO: 208775 - DNA, 27 bp, Artificial sequence
  SiRNA target sequence
cattatactaataccttcggagaaacc

SEQ ID NO: 208776 - DNA, 27 bp, Artificial sequence
  SiRNA target sequence
attatactaataccttcggagaaacct

SEQ ID NO: 208777 - DNA, 27 bp, Artificial sequence
  SiRNA target sequence
ttatactaataccttcggagaaaccta

SEQ ID NO: 208778 - DNA, 27 bp, Artificial sequence
  SiRNA target sequence
tatactaataccttcggagaaacctac

SEQ ID NO: 208779 - DNA, 27 bp, Artificial sequence
  SiRNA target sequence
atactaataccttcggagaaacctaca

SEQ ID NO: 208780 - DNA, 27 bp, Artificial sequence
  SiRNA target sequence
tactaataccttcggagaaacctacac

SEQ ID NO: 208781 - DNA, 27 bp, Artificial sequence
  SiRNA target sequence
actaataccttcggagaaacctacact

SEQ ID NO: 208782 - DNA, 27 bp, Artificial sequence
  SiRNA target sequence
ctaataccttcggagaaacctacacta

SEQ ID NO: 208783 - DNA, 27 bp, Artificial sequence
  SiRNA target sequence
taataccttcggagaaacctacactaa

SEQ ID NO: 208784 - DNA, 27 bp, Artificial sequence
  SiRNA target sequence
aataccttcggagaaacctacactaac

SEQ ID NO: 208785 - DNA, 27 bp, Artificial sequence
  SiRNA target sequence
ataccttcggagaaacctacactaact

SEQ ID NO: 208786 - DNA, 27 bp, Artificial sequence
  SiRNA target sequence
taccttcggagaaacctacactaactt

SEQ ID NO: 208787 - DNA, 27 bp, Artificial sequence
  SiRNA target sequence
accttcggagaaacctacactaacttt

SEQ ID NO: 208788 - DNA, 27 bp, Artificial sequence
  SiRNA target sequence
ccttcggagaaacctacactaactttt

SEQ ID NO: 208789 - DNA, 27 bp, Artificial sequence
  SiRNA target sequence
cttcggagaaacctacactaacttttt

SEQ ID NO: 208790 - DNA, 27 bp, Artificial sequence
  SiRNA target sequence
ttcggagaaacctacactaactttttg

SEQ ID NO: 208791 - DNA, 27 bp, Artificial sequence
  SiRNA target sequence
tcggagaaacctacactaactttttgt

SEQ ID NO: 208792 - DNA, 27 bp, Artificial sequence
  SiRNA target sequence
cggagaaacctacactaactttttgtt

SEQ ID NO: 208793 - DNA, 27 bp, Artificial sequence
  SiRNA target sequence
ggagaaacctacactaactttttgttt

SEQ ID NO: 208794 - DNA, 27 bp, Artificial sequence
  SiRNA target sequence
gagaaacctacactaactttttgtttc

SEQ ID NO: 208795 - DNA, 27 bp, Artificial sequence
  SiRNA target sequence
agaaacctacactaactttttgtttct

SEQ ID NO: 208796 - DNA, 27 bp, Artificial sequence
  SiRNA target sequence
gaaacctacactaactttttgtttctt

SEQ ID NO: 208797 - DNA, 27 bp, Artificial sequence
  SiRNA target sequence
aaacctacactaactttttgtttcttt

SEQ ID NO: 208798 - DNA, 27 bp, Artificial sequence
  SiRNA target sequence
aacctacactaactttttgtttctttt

SEQ ID NO: 208799 - DNA, 27 bp, Artificial sequence
  SiRNA target sequence
acctacactaactttttgtttcttttt

SEQ ID NO: 208800 - DNA, 27 bp, Artificial sequence
  SiRNA target sequence
cctacactaactttttgtttctttttt

SEQ ID NO: 208801 - DNA, 27 bp, Artificial sequence
  SiRNA target sequence
ctacactaactttttgtttctttttta

SEQ ID NO: 208802 - DNA, 27 bp, Artificial sequence
  SiRNA target sequence
tacactaactttttgtttcttttttat

SEQ ID NO: 208803 - DNA, 27 bp, Artificial sequence
  SiRNA target sequence
acactaactttttgtttcttttttatc

SEQ ID NO: 208804 - DNA, 27 bp, Artificial sequence
  SiRNA target sequence
cactaactttttgtttcttttttatcg

SEQ ID NO: 208805 - DNA, 27 bp, Artificial sequence
  SiRNA target sequence
actaactttttgtttcttttttatcgt

SEQ ID NO: 208806 - DNA, 27 bp, Artificial sequence
  SiRNA target sequence
ctaactttttgtttcttttttatcgta

SEQ ID NO: 208807 - DNA, 27 bp, Artificial sequence
  SiRNA target sequence
taactttttgtttcttttttatcgtat

SEQ ID NO: 208808 - DNA, 27 bp, Artificial sequence
  SiRNA target sequence
aactttttgtttcttttttatcgtatt

SEQ ID NO: 208809 - DNA, 27 bp, Artificial sequence
  SiRNA target sequence
actttttgtttcttttttatcgtatta

SEQ ID NO: 208810 - DNA, 27 bp, Artificial sequence
  SiRNA target sequence
ctttttgtttcttttttatcgtattag

SEQ ID NO: 208811 - DNA, 27 bp, Artificial sequence
  SiRNA target sequence
tttttgtttcttttttatcgtattaga

SEQ ID NO: 208812 - DNA, 27 bp, Artificial sequence
  SiRNA target sequence
ttttgtttcttttttatcgtattagaa

SEQ ID NO: 208813 - DNA, 27 bp, Artificial sequence
  SiRNA target sequence
tttgtttcttttttatcgtattagaag

SEQ ID NO: 208814 - DNA, 27 bp, Artificial sequence
  SiRNA target sequence
ttgtttcttttttatcgtattagaagg

SEQ ID NO: 208815 - DNA, 27 bp, Artificial sequence
  SiRNA target sequence
tgtttcttttttatcgtattagaaggt

SEQ ID NO: 208816 - DNA, 27 bp, Artificial sequence
  SiRNA target sequence
gtttcttttttatcgtattagaaggta

SEQ ID NO: 208817 - DNA, 27 bp, Artificial sequence
  SiRNA target sequence
tttcttttttatcgtattagaaggtat

SEQ ID NO: 208818 - DNA, 27 bp, Artificial sequence
  SiRNA target sequence
ttcttttttatcgtattagaaggtata

SEQ ID NO: 208819 - DNA, 27 bp, Artificial sequence
  SiRNA target sequence
tcttttttatcgtattagaaggtataa

SEQ ID NO: 208820 - DNA, 27 bp, Artificial sequence
  SiRNA target sequence
cttttttatcgtattagaaggtataaa

SEQ ID NO: 208821 - DNA, 27 bp, Artificial sequence
  SiRNA target sequence
ttttttatcgtattagaaggtataaat

SEQ ID NO: 208822 - DNA, 27 bp, Artificial sequence
  SiRNA target sequence
tttttatcgtattagaaggtataaata

SEQ ID NO: 208823 - DNA, 27 bp, Artificial sequence
  SiRNA target sequence
ttttatcgtattagaaggtataaatat

SEQ ID NO: 208824 - DNA, 27 bp, Artificial sequence
  SiRNA target sequence
tttatcgtattagaaggtataaatatt

SEQ ID NO: 208825 - DNA, 27 bp, Artificial sequence
  SiRNA target sequence
ttatcgtattagaaggtataaatattg

SEQ ID NO: 208826 - DNA, 27 bp, Artificial sequence
  SiRNA target sequence
tatcgtattagaaggtataaatattgg

SEQ ID NO: 208827 - DNA, 27 bp, Artificial sequence
  SiRNA target sequence
atcgtattagaaggtataaatattggt

SEQ ID NO: 208828 - DNA, 27 bp, Artificial sequence
  SiRNA target sequence
tcgtattagaaggtataaatattggta

SEQ ID NO: 208829 - DNA, 27 bp, Artificial sequence
  SiRNA target sequence
cgtattagaaggtataaatattggtac

SEQ ID NO: 208830 - DNA, 27 bp, Artificial sequence
  SiRNA target sequence
gtattagaaggtataaatattggtaca

SEQ ID NO: 208831 - DNA, 27 bp, Artificial sequence
  SiRNA target sequence
tattagaaggtataaatattggtacac

SEQ ID NO: 208832 - DNA, 27 bp, Artificial sequence
  SiRNA target sequence
attagaaggtataaatattggtacact

SEQ ID NO: 208833 - DNA, 27 bp, Artificial sequence
  SiRNA target sequence
ttagaaggtataaatattggtacactc

SEQ ID NO: 208834 - DNA, 27 bp, Artificial sequence
  SiRNA target sequence
tagaaggtataaatattggtacactca

SEQ ID NO: 208835 - DNA, 27 bp, Artificial sequence
  SiRNA target sequence
agaaggtataaatattggtacactcat

SEQ ID NO: 208836 - DNA, 27 bp, Artificial sequence
  SiRNA target sequence
gaaggtataaatattggtacactcatt

SEQ ID NO: 208837 - DNA, 27 bp, Artificial sequence
  SiRNA target sequence
aaggtataaatattggtacactcatta

SEQ ID NO: 208838 - DNA, 27 bp, Artificial sequence
  SiRNA target sequence
aggtataaatattggtacactcattat

SEQ ID NO: 208839 - DNA, 27 bp, Artificial sequence
  SiRNA target sequence
ggtataaatattggtacactcattatt

SEQ ID NO: 208840 - DNA, 27 bp, Artificial sequence
  SiRNA target sequence
gtataaatattggtacactcattattt

SEQ ID NO: 208841 - DNA, 27 bp, Artificial sequence
  SiRNA target sequence
tataaatattggtacactcattatttt

SEQ ID NO: 208842 - DNA, 27 bp, Artificial sequence
  SiRNA target sequence
ataaatattggtacactcattatttta

SEQ ID NO: 208843 - DNA, 27 bp, Artificial sequence
  SiRNA target sequence
taaatattggtacactcattattttat

SEQ ID NO: 208844 - DNA, 27 bp, Artificial sequence
  SiRNA target sequence
aaatattggtacactcattattttatt

SEQ ID NO: 208845 - DNA, 27 bp, Artificial sequence
  SiRNA target sequence
aatattggtacactcattattttattc

SEQ ID NO: 208846 - DNA, 27 bp, Artificial sequence
  SiRNA target sequence
atattggtacactcattattttattct

SEQ ID NO: 208847 - DNA, 27 bp, Artificial sequence
  SiRNA target sequence
tattggtacactcattattttattctc

SEQ ID NO: 208848 - DNA, 27 bp, Artificial sequence
  SiRNA target sequence
attggtacactcattattttattctcg

SEQ ID NO: 208849 - DNA, 27 bp, Artificial sequence
  SiRNA target sequence
ttggtacactcattattttattctcga

SEQ ID NO: 208850 - DNA, 27 bp, Artificial sequence
  SiRNA target sequence
tggtacactcattattttattctcgaa

SEQ ID NO: 208851 - DNA, 27 bp, Artificial sequence
  SiRNA target sequence
ggtacactcattattttattctcgaaa

SEQ ID NO: 208852 - DNA, 27 bp, Artificial sequence
  SiRNA target sequence
gtacactcattattttattctcgaaat

SEQ ID NO: 208853 - DNA, 27 bp, Artificial sequence
  SiRNA target sequence
tacactcattattttattctcgaaata

SEQ ID NO: 208854 - DNA, 27 bp, Artificial sequence
  SiRNA target sequence
acactcattattttattctcgaaataa

SEQ ID NO: 208855 - DNA, 27 bp, Artificial sequence
  SiRNA target sequence
cactcattattttattctcgaaataat

SEQ ID NO: 208856 - DNA, 27 bp, Artificial sequence
  SiRNA target sequence
actcattattttattctcgaaataata

SEQ ID NO: 208857 - DNA, 27 bp, Artificial sequence
  SiRNA target sequence
ctcattattttattctcgaaataatat

SEQ ID NO: 208858 - DNA, 27 bp, Artificial sequence
  SiRNA target sequence
tcattattttattctcgaaataatatt

SEQ ID NO: 208859 - DNA, 27 bp, Artificial sequence
  SiRNA target sequence
cattattttattctcgaaataatattt

SEQ ID NO: 208860 - DNA, 27 bp, Artificial sequence
  SiRNA target sequence
attattttattctcgaaataatatttc

SEQ ID NO: 208861 - DNA, 27 bp, Artificial sequence
  SiRNA target sequence
ttattttattctcgaaataatatttca

SEQ ID NO: 208862 - DNA, 27 bp, Artificial sequence
  SiRNA target sequence
tattttattctcgaaataatatttcat

SEQ ID NO: 208863 - DNA, 27 bp, Artificial sequence
  SiRNA target sequence
attttattctcgaaataatatttcatg

SEQ ID NO: 208864 - DNA, 27 bp, Artificial sequence
  SiRNA target sequence
ttttattctcgaaataatatttcatgt

SEQ ID NO: 208865 - DNA, 27 bp, Artificial sequence
  SiRNA target sequence
tttattctcgaaataatatttcatgta

SEQ ID NO: 208866 - DNA, 27 bp, Artificial sequence
  SiRNA target sequence
ttattctcgaaataatatttcatgtac

SEQ ID NO: 208867 - DNA, 27 bp, Artificial sequence
  SiRNA target sequence
tattctcgaaataatatttcatgtaca

SEQ ID NO: 208868 - DNA, 27 bp, Artificial sequence
  SiRNA target sequence
attctcgaaataatatttcatgtacat

SEQ ID NO: 208869 - DNA, 27 bp, Artificial sequence
  SiRNA target sequence
ttctcgaaataatatttcatgtacatt

SEQ ID NO: 208870 - DNA, 27 bp, Artificial sequence
  SiRNA target sequence
tctcgaaataatatttcatgtacatta

SEQ ID NO: 208871 - DNA, 27 bp, Artificial sequence
  SiRNA target sequence
ctcgaaataatatttcatgtacattaa

SEQ ID NO: 208872 - DNA, 27 bp, Artificial sequence
  SiRNA target sequence
tcgaaataatatttcatgtacattaat

SEQ ID NO: 208873 - DNA, 27 bp, Artificial sequence
  SiRNA target sequence
cgaaataatatttcatgtacattaata

SEQ ID NO: 208874 - DNA, 27 bp, Artificial sequence
  SiRNA target sequence
gaaataatatttcatgtacattaatat

SEQ ID NO: 208875 - DNA, 27 bp, Artificial sequence
  SiRNA target sequence
aaataatatttcatgtacattaatatt

SEQ ID NO: 208876 - DNA, 27 bp, Artificial sequence
  SiRNA target sequence
aataatatttcatgtacattaatatta

SEQ ID NO: 208877 - DNA, 27 bp, Artificial sequence
  SiRNA target sequence
ataatatttcatgtacattaatattag

SEQ ID NO: 208878 - DNA, 27 bp, Artificial sequence
  SiRNA target sequence
taatatttcatgtacattaatattaga

SEQ ID NO: 208879 - DNA, 27 bp, Artificial sequence
  SiRNA target sequence
aatatttcatgtacattaatattagac

SEQ ID NO: 208880 - DNA, 27 bp, Artificial sequence
  SiRNA target sequence
atatttcatgtacattaatattagaca

SEQ ID NO: 208881 - DNA, 27 bp, Artificial sequence
  SiRNA target sequence
tatttcatgtacattaatattagacat

SEQ ID NO: 208882 - DNA, 27 bp, Artificial sequence
  SiRNA target sequence
atttcatgtacattaatattagacata

SEQ ID NO: 208883 - DNA, 27 bp, Artificial sequence
  SiRNA target sequence
tttcatgtacattaatattagacatat

SEQ ID NO: 208884 - DNA, 27 bp, Artificial sequence
  SiRNA target sequence
ttcatgtacattaatattagacatata

SEQ ID NO: 208885 - DNA, 27 bp, Artificial sequence
  SiRNA target sequence
tcatgtacattaatattagacatatac

SEQ ID NO: 208886 - DNA, 27 bp, Artificial sequence
  SiRNA target sequence
catgtacattaatattagacatatacc

SEQ ID NO: 208887 - DNA, 27 bp, Artificial sequence
  SiRNA target sequence
atgtacattaatattagacatataccg

SEQ ID NO: 208888 - DNA, 27 bp, Artificial sequence
  SiRNA target sequence
tgtacattaatattagacatataccgc

SEQ ID NO: 208889 - DNA, 27 bp, Artificial sequence
  SiRNA target sequence
gtacattaatattagacatataccgcc

SEQ ID NO: 208890 - DNA, 27 bp, Artificial sequence
  SiRNA target sequence
tacattaatattagacatataccgccc

SEQ ID NO: 208891 - DNA, 27 bp, Artificial sequence
  SiRNA target sequence
acattaatattagacatataccgccca

SEQ ID NO: 208892 - DNA, 27 bp, Artificial sequence
  SiRNA target sequence
cattaatattagacatataccgcccat

SEQ ID NO: 208893 - DNA, 27 bp, Artificial sequence
  SiRNA target sequence
attaatattagacatataccgcccatg

SEQ ID NO: 208894 - DNA, 27 bp, Artificial sequence
  SiRNA target sequence
ttaatattagacatataccgcccatgg

SEQ ID NO: 208895 - DNA, 27 bp, Artificial sequence
  SiRNA target sequence
taatattagacatataccgcccatggc

SEQ ID NO: 208896 - DNA, 27 bp, Artificial sequence
  SiRNA target sequence
aatattagacatataccgcccatggca

SEQ ID NO: 208897 - DNA, 27 bp, Artificial sequence
  SiRNA target sequence
atattagacatataccgcccatggcaa

SEQ ID NO: 208898 - DNA, 27 bp, Artificial sequence
  SiRNA target sequence
tattagacatataccgcccatggcaat

SEQ ID NO: 208899 - DNA, 27 bp, Artificial sequence
  SiRNA target sequence
attagacatataccgcccatggcaata

SEQ ID NO: 208900 - DNA, 27 bp, Artificial sequence
  SiRNA target sequence
ttagacatataccgcccatggcaataa

SEQ ID NO: 208901 - DNA, 27 bp, Artificial sequence
  SiRNA target sequence
tagacatataccgcccatggcaataaa

SEQ ID NO: 208902 - DNA, 27 bp, Artificial sequence
  SiRNA target sequence
agacatataccgcccatggcaataaaa

SEQ ID NO: 208903 - DNA, 27 bp, Artificial sequence
  SiRNA target sequence
gacatataccgcccatggcaataaaaa

SEQ ID NO: 208904 - DNA, 27 bp, Artificial sequence
  SiRNA target sequence
acatataccgcccatggcaataaaaac

SEQ ID NO: 208905 - DNA, 27 bp, Artificial sequence
  SiRNA target sequence
catataccgcccatggcaataaaaacc

SEQ ID NO: 208906 - DNA, 27 bp, Artificial sequence
  SiRNA target sequence
atataccgcccatggcaataaaaaccg

SEQ ID NO: 208907 - DNA, 27 bp, Artificial sequence
  SiRNA target sequence
tataccgcccatggcaataaaaaccga

SEQ ID NO: 208908 - DNA, 27 bp, Artificial sequence
  SiRNA target sequence
ataccgcccatggcaataaaaaccgaa

SEQ ID NO: 208909 - DNA, 27 bp, Artificial sequence
  SiRNA target sequence
taccgcccatggcaataaaaaccgaag

SEQ ID NO: 208910 - DNA, 27 bp, Artificial sequence
  SiRNA target sequence
accgcccatggcaataaaaaccgaaga

SEQ ID NO: 208911 - DNA, 27 bp, Artificial sequence
  SiRNA target sequence
ccgcccatggcaataaaaaccgaagaa

SEQ ID NO: 208912 - DNA, 27 bp, Artificial sequence
  SiRNA target sequence
cgcccatggcaataaaaaccgaagaat

SEQ ID NO: 208913 - DNA, 27 bp, Artificial sequence
  SiRNA target sequence
gcccatggcaataaaaaccgaagaata

SEQ ID NO: 208914 - DNA, 27 bp, Artificial sequence
  SiRNA target sequence
cccatggcaataaaaaccgaagaatat

SEQ ID NO: 208915 - DNA, 27 bp, Artificial sequence
  SiRNA target sequence
ccatggcaataaaaaccgaagaatata

SEQ ID NO: 208916 - DNA, 27 bp, Artificial sequence
  SiRNA target sequence
catggcaataaaaaccgaagaatataa

SEQ ID NO: 208917 - DNA, 27 bp, Artificial sequence
  SiRNA target sequence
atggcaataaaaaccgaagaatataat

SEQ ID NO: 208918 - DNA, 27 bp, Artificial sequence
  SiRNA target sequence
tggcaataaaaaccgaagaatataata

SEQ ID NO: 208919 - DNA, 27 bp, Artificial sequence
  SiRNA target sequence
ggcaataaaaaccgaagaatataataa

SEQ ID NO: 208920 - DNA, 27 bp, Artificial sequence
  SiRNA target sequence
gcaataaaaaccgaagaatataataac

SEQ ID NO: 208921 - DNA, 27 bp, Artificial sequence
  SiRNA target sequence
caataaaaaccgaagaatataataact

SEQ ID NO: 208922 - DNA, 27 bp, Artificial sequence
  SiRNA target sequence
aataaaaaccgaagaatataataactg

SEQ ID NO: 208923 - DNA, 27 bp, Artificial sequence
  SiRNA target sequence
ataaaaaccgaagaatataataactga

SEQ ID NO: 208924 - DNA, 27 bp, Artificial sequence
  SiRNA target sequence
taaaaaccgaagaatataataactgat

SEQ ID NO: 208925 - DNA, 27 bp, Artificial sequence
  SiRNA target sequence
aaaaaccgaagaatataataactgatt

SEQ ID NO: 208926 - DNA, 27 bp, Artificial sequence
  SiRNA target sequence
aaaaccgaagaatataataactgattt

SEQ ID NO: 208927 - DNA, 27 bp, Artificial sequence
  SiRNA target sequence
aaaccgaagaatataataactgatttt

SEQ ID NO: 208928 - DNA, 27 bp, Artificial sequence
  SiRNA target sequence
aaccgaagaatataataactgattttg

SEQ ID NO: 208929 - DNA, 27 bp, Artificial sequence
  SiRNA target sequence
accgaagaatataataactgattttgc

SEQ ID NO: 208930 - DNA, 27 bp, Artificial sequence
  SiRNA target sequence
ccgaagaatataataactgattttgct

SEQ ID NO: 208931 - DNA, 27 bp, Artificial sequence
  SiRNA target sequence
cgaagaatataataactgattttgctc

SEQ ID NO: 208932 - DNA, 27 bp, Artificial sequence
  SiRNA target sequence
gaagaatataataactgattttgctca

SEQ ID NO: 208933 - DNA, 27 bp, Artificial sequence
  SiRNA target sequence
aagaatataataactgattttgctcat

SEQ ID NO: 208934 - DNA, 27 bp, Artificial sequence
  SiRNA target sequence
agaatataataactgattttgctcata

SEQ ID NO: 208935 - DNA, 27 bp, Artificial sequence
  SiRNA target sequence
gaatataataactgattttgctcatag

SEQ ID NO: 208936 - DNA, 27 bp, Artificial sequence
  SiRNA target sequence
aatataataactgattttgctcatagc

SEQ ID NO: 208937 - DNA, 27 bp, Artificial sequence
  SiRNA target sequence
atataataactgattttgctcatagct

SEQ ID NO: 208938 - DNA, 27 bp, Artificial sequence
  SiRNA target sequence
tataataactgattttgctcatagcta

SEQ ID NO: 208939 - DNA, 27 bp, Artificial sequence
  SiRNA target sequence
ataataactgattttgctcatagctaa

SEQ ID NO: 208940 - DNA, 27 bp, Artificial sequence
  SiRNA target sequence
taataactgattttgctcatagctaaa

SEQ ID NO: 208941 - DNA, 27 bp, Artificial sequence
  SiRNA target sequence
aataactgattttgctcatagctaaat

SEQ ID NO: 208942 - DNA, 27 bp, Artificial sequence
  SiRNA target sequence
ataactgattttgctcatagctaaatc

SEQ ID NO: 208943 - DNA, 27 bp, Artificial sequence
  SiRNA target sequence
taactgattttgctcatagctaaatcc

SEQ ID NO: 208944 - DNA, 27 bp, Artificial sequence
  SiRNA target sequence
aactgattttgctcatagctaaatcct

SEQ ID NO: 208945 - DNA, 27 bp, Artificial sequence
  SiRNA target sequence
actgattttgctcatagctaaatcctt

SEQ ID NO: 208946 - DNA, 27 bp, Artificial sequence
  SiRNA target sequence
ctgattttgctcatagctaaatccttt

SEQ ID NO: 208947 - DNA, 27 bp, Artificial sequence
  SiRNA target sequence
tgattttgctcatagctaaatcctttt

SEQ ID NO: 208948 - DNA, 27 bp, Artificial sequence
  SiRNA target sequence
gattttgctcatagctaaatccttttc

SEQ ID NO: 208949 - DNA, 27 bp, Artificial sequence
  SiRNA target sequence
attttgctcatagctaaatccttttcg

SEQ ID NO: 208950 - DNA, 27 bp, Artificial sequence
  SiRNA target sequence
ttttgctcatagctaaatccttttcgc

SEQ ID NO: 208951 - DNA, 27 bp, Artificial sequence
  SiRNA target sequence
tttgctcatagctaaatccttttcgca

SEQ ID NO: 208952 - DNA, 27 bp, Artificial sequence
  SiRNA target sequence
ttgctcatagctaaatccttttcgcaa

SEQ ID NO: 208953 - DNA, 27 bp, Artificial sequence
  SiRNA target sequence
tgctcatagctaaatccttttcgcaat

SEQ ID NO: 208954 - DNA, 27 bp, Artificial sequence
  SiRNA target sequence
gctcatagctaaatccttttcgcaatt

SEQ ID NO: 208955 - DNA, 27 bp, Artificial sequence
  SiRNA target sequence
ctcatagctaaatccttttcgcaattc

SEQ ID NO: 208956 - DNA, 27 bp, Artificial sequence
  SiRNA target sequence
tcatagctaaatccttttcgcaattct

SEQ ID NO: 208957 - DNA, 27 bp, Artificial sequence
  SiRNA target sequence
catagctaaatccttttcgcaattctc

SEQ ID NO: 208958 - DNA, 27 bp, Artificial sequence
  SiRNA target sequence
atagctaaatccttttcgcaattctct

SEQ ID NO: 208959 - DNA, 27 bp, Artificial sequence
  SiRNA target sequence
tagctaaatccttttcgcaattctctg

SEQ ID NO: 208960 - DNA, 27 bp, Artificial sequence
  SiRNA target sequence
agctaaatccttttcgcaattctctga

SEQ ID NO: 208961 - DNA, 27 bp, Artificial sequence
  SiRNA target sequence
gctaaatccttttcgcaattctctgaa

SEQ ID NO: 208962 - DNA, 27 bp, Artificial sequence
  SiRNA target sequence
ctaaatccttttcgcaattctctgaaa

SEQ ID NO: 208963 - DNA, 27 bp, Artificial sequence
  SiRNA target sequence
taaatccttttcgcaattctctgaaag

SEQ ID NO: 208964 - DNA, 27 bp, Artificial sequence
  SiRNA target sequence
aaatccttttcgcaattctctgaaaga

SEQ ID NO: 208965 - DNA, 27 bp, Artificial sequence
  SiRNA target sequence
aatccttttcgcaattctctgaaagaa

SEQ ID NO: 208966 - DNA, 27 bp, Artificial sequence
  SiRNA target sequence
atccttttcgcaattctctgaaagaac

SEQ ID NO: 208967 - DNA, 27 bp, Artificial sequence
  SiRNA target sequence
tccttttcgcaattctctgaaagaact

SEQ ID NO: 208968 - DNA, 27 bp, Artificial sequence
  SiRNA target sequence
ccttttcgcaattctctgaaagaacta

SEQ ID NO: 208969 - DNA, 27 bp, Artificial sequence
  SiRNA target sequence
cttttcgcaattctctgaaagaactac

SEQ ID NO: 208970 - DNA, 27 bp, Artificial sequence
  SiRNA target sequence
ttttcgcaattctctgaaagaactact

SEQ ID NO: 208971 - DNA, 27 bp, Artificial sequence
  SiRNA target sequence
tttcgcaattctctgaaagaactactg

SEQ ID NO: 208972 - DNA, 27 bp, Artificial sequence
  SiRNA target sequence
ttcgcaattctctgaaagaactactgg

SEQ ID NO: 208973 - DNA, 27 bp, Artificial sequence
  SiRNA target sequence
tcgcaattctctgaaagaactactggc

SEQ ID NO: 208974 - DNA, 27 bp, Artificial sequence
  SiRNA target sequence
cgcaattctctgaaagaactactggct

SEQ ID NO: 208975 - DNA, 27 bp, Artificial sequence
  SiRNA target sequence
gcaattctctgaaagaactactggcta

SEQ ID NO: 208976 - DNA, 27 bp, Artificial sequence
  SiRNA target sequence
caattctctgaaagaactactggctaa

SEQ ID NO: 208977 - DNA, 27 bp, Artificial sequence
  SiRNA target sequence
aattctctgaaagaactactggctaat

SEQ ID NO: 208978 - DNA, 27 bp, Artificial sequence
  SiRNA target sequence
attctctgaaagaactactggctaatc

SEQ ID NO: 208979 - DNA, 27 bp, Artificial sequence
  SiRNA target sequence
ttctctgaaagaactactggctaatcc

SEQ ID NO: 208980 - DNA, 27 bp, Artificial sequence
  SiRNA target sequence
tctctgaaagaactactggctaatcca

SEQ ID NO: 208981 - DNA, 27 bp, Artificial sequence
  SiRNA target sequence
ctctgaaagaactactggctaatccag

SEQ ID NO: 208982 - DNA, 27 bp, Artificial sequence
  SiRNA target sequence
tctgaaagaactactggctaatccaga

SEQ ID NO: 208983 - DNA, 27 bp, Artificial sequence
  SiRNA target sequence
ctgaaagaactactggctaatccagat

SEQ ID NO: 208984 - DNA, 27 bp, Artificial sequence
  SiRNA target sequence
tgaaagaactactggctaatccagata

SEQ ID NO: 208985 - DNA, 27 bp, Artificial sequence
  SiRNA target sequence
gaaagaactactggctaatccagatac

SEQ ID NO: 208986 - DNA, 27 bp, Artificial sequence
  SiRNA target sequence
aaagaactactggctaatccagatact

SEQ ID NO: 208987 - DNA, 27 bp, Artificial sequence
  SiRNA target sequence
aagaactactggctaatccagatacta

SEQ ID NO: 208988 - DNA, 27 bp, Artificial sequence
  SiRNA target sequence
agaactactggctaatccagatactag

SEQ ID NO: 208989 - DNA, 27 bp, Artificial sequence
  SiRNA target sequence
gaactactggctaatccagatactagt

SEQ ID NO: 208990 - DNA, 27 bp, Artificial sequence
  SiRNA target sequence
aactactggctaatccagatactagta

SEQ ID NO: 208991 - DNA, 27 bp, Artificial sequence
  SiRNA target sequence
actactggctaatccagatactagtaa

SEQ ID NO: 208992 - DNA, 27 bp, Artificial sequence
  SiRNA target sequence
ctactggctaatccagatactagtaaa

SEQ ID NO: 208993 - DNA, 27 bp, Artificial sequence
  SiRNA target sequence
tactggctaatccagatactagtaaag

SEQ ID NO: 208994 - DNA, 27 bp, Artificial sequence
  SiRNA target sequence
actggctaatccagatactagtaaagc

SEQ ID NO: 208995 - DNA, 27 bp, Artificial sequence
  SiRNA target sequence
ctggctaatccagatactagtaaagct

SEQ ID NO: 208996 - DNA, 27 bp, Artificial sequence
  SiRNA target sequence
tggctaatccagatactagtaaagcta

SEQ ID NO: 208997 - DNA, 27 bp, Artificial sequence
  SiRNA target sequence
ggctaatccagatactagtaaagctaa

SEQ ID NO: 208998 - DNA, 27 bp, Artificial sequence
  SiRNA target sequence
gctaatccagatactagtaaagctaaa

SEQ ID NO: 208999 - DNA, 27 bp, Artificial sequence
  SiRNA target sequence
ctaatccagatactagtaaagctaaat

SEQ ID NO: 209000 - DNA, 27 bp, Artificial sequence
  SiRNA target sequence
taatccagatactagtaaagctaaatt

SEQ ID NO: 209001 - DNA, 27 bp, Artificial sequence
  SiRNA target sequence
aatccagatactagtaaagctaaattt

SEQ ID NO: 209002 - DNA, 27 bp, Artificial sequence
  SiRNA target sequence
atccagatactagtaaagctaaatttg

SEQ ID NO: 209003 - DNA, 27 bp, Artificial sequence
  SiRNA target sequence
tccagatactagtaaagctaaatttgc

SEQ ID NO: 209004 - DNA, 27 bp, Artificial sequence
  SiRNA target sequence
ccagatactagtaaagctaaatttgct

SEQ ID NO: 209005 - DNA, 27 bp, Artificial sequence
  SiRNA target sequence
cagatactagtaaagctaaatttgcta

SEQ ID NO: 209006 - DNA, 27 bp, Artificial sequence
  SiRNA target sequence
agatactagtaaagctaaatttgctat

SEQ ID NO: 209007 - DNA, 27 bp, Artificial sequence
  SiRNA target sequence
gatactagtaaagctaaatttgctatt

SEQ ID NO: 209008 - DNA, 27 bp, Artificial sequence
  SiRNA target sequence
atactagtaaagctaaatttgctatta

SEQ ID NO: 209009 - DNA, 27 bp, Artificial sequence
  SiRNA target sequence
tactagtaaagctaaatttgctattat

SEQ ID NO: 209010 - DNA, 27 bp, Artificial sequence
  SiRNA target sequence
actagtaaagctaaatttgctattatg

SEQ ID NO: 209011 - DNA, 27 bp, Artificial sequence
  SiRNA target sequence
ctagtaaagctaaatttgctattatgt

SEQ ID NO: 209012 - DNA, 27 bp, Artificial sequence
  SiRNA target sequence
tagtaaagctaaatttgctattatgta

SEQ ID NO: 209013 - DNA, 27 bp, Artificial sequence
  SiRNA target sequence
agtaaagctaaatttgctattatgtaa

SEQ ID NO: 209014 - DNA, 27 bp, Artificial sequence
  SiRNA target sequence
gtaaagctaaatttgctattatgtaaa

SEQ ID NO: 209015 - DNA, 27 bp, Artificial sequence
  SiRNA target sequence
taaagctaaatttgctattatgtaaaa

SEQ ID NO: 209016 - DNA, 27 bp, Artificial sequence
  SiRNA target sequence
aaagctaaatttgctattatgtaaaaa

SEQ ID NO: 209017 - DNA, 27 bp, Artificial sequence
  SiRNA target sequence
aagctaaatttgctattatgtaaaaag

SEQ ID NO: 209018 - DNA, 27 bp, Artificial sequence
  SiRNA target sequence
agctaaatttgctattatgtaaaaagg

SEQ ID NO: 209019 - DNA, 27 bp, Artificial sequence
  SiRNA target sequence
gctaaatttgctattatgtaaaaaggt

SEQ ID NO: 209020 - DNA, 27 bp, Artificial sequence
  SiRNA target sequence
ctaaatttgctattatgtaaaaaggtg

SEQ ID NO: 209021 - DNA, 27 bp, Artificial sequence
  SiRNA target sequence
taaatttgctattatgtaaaaaggtgg

SEQ ID NO: 209022 - DNA, 27 bp, Artificial sequence
  SiRNA target sequence
aaatttgctattatgtaaaaaggtggt

SEQ ID NO: 209023 - DNA, 27 bp, Artificial sequence
  SiRNA target sequence
aatttgctattatgtaaaaaggtggta

SEQ ID NO: 209024 - DNA, 27 bp, Artificial sequence
  SiRNA target sequence
atttgctattatgtaaaaaggtggtaa

SEQ ID NO: 209025 - DNA, 27 bp, Artificial sequence
  SiRNA target sequence
tttgctattatgtaaaaaggtggtaaa

SEQ ID NO: 209026 - DNA, 27 bp, Artificial sequence
  SiRNA target sequence
ttgctattatgtaaaaaggtggtaaaa

SEQ ID NO: 209027 - DNA, 27 bp, Artificial sequence
  SiRNA target sequence
tgctattatgtaaaaaggtggtaaaaa

SEQ ID NO: 209028 - DNA, 27 bp, Artificial sequence
  SiRNA target sequence
gctattatgtaaaaaggtggtaaaaat

SEQ ID NO: 209029 - DNA, 27 bp, Artificial sequence
  SiRNA target sequence
ctattatgtaaaaaggtggtaaaaatc

SEQ ID NO: 209030 - DNA, 27 bp, Artificial sequence
  SiRNA target sequence
tattatgtaaaaaggtggtaaaaatct

SEQ ID NO: 209031 - DNA, 27 bp, Artificial sequence
  SiRNA target sequence
attatgtaaaaaggtggtaaaaatctt

SEQ ID NO: 209032 - DNA, 27 bp, Artificial sequence
  SiRNA target sequence
ttatgtaaaaaggtggtaaaaatcttg

SEQ ID NO: 209033 - DNA, 27 bp, Artificial sequence
  SiRNA target sequence
tatgtaaaaaggtggtaaaaatcttgt

SEQ ID NO: 209034 - DNA, 27 bp, Artificial sequence
  SiRNA target sequence
atgtaaaaaggtggtaaaaatcttgta

SEQ ID NO: 209035 - DNA, 27 bp, Artificial sequence
  SiRNA target sequence
tgtaaaaaggtggtaaaaatcttgtaa

SEQ ID NO: 209036 - DNA, 27 bp, Artificial sequence
  SiRNA target sequence
gtaaaaaggtggtaaaaatcttgtaaa

SEQ ID NO: 209037 - DNA, 27 bp, Artificial sequence
  SiRNA target sequence
taaaaaggtggtaaaaatcttgtaaac

SEQ ID NO: 209038 - DNA, 27 bp, Artificial sequence
  SiRNA target sequence
aaaaaggtggtaaaaatcttgtaaact

SEQ ID NO: 209039 - DNA, 27 bp, Artificial sequence
  SiRNA target sequence
aaaaggtggtaaaaatcttgtaaactg

SEQ ID NO: 209040 - DNA, 27 bp, Artificial sequence
  SiRNA target sequence
aaaggtggtaaaaatcttgtaaactgt

SEQ ID NO: 209041 - DNA, 27 bp, Artificial sequence
  SiRNA target sequence
aaggtggtaaaaatcttgtaaactgtc

SEQ ID NO: 209042 - DNA, 27 bp, Artificial sequence
  SiRNA target sequence
aggtggtaaaaatcttgtaaactgtct

SEQ ID NO: 209043 - DNA, 27 bp, Artificial sequence
  SiRNA target sequence
ggtggtaaaaatcttgtaaactgtctg

SEQ ID NO: 209044 - DNA, 27 bp, Artificial sequence
  SiRNA target sequence
gtggtaaaaatcttgtaaactgtctga

SEQ ID NO: 209045 - DNA, 27 bp, Artificial sequence
  SiRNA target sequence
tggtaaaaatcttgtaaactgtctgat

SEQ ID NO: 209046 - DNA, 27 bp, Artificial sequence
  SiRNA target sequence
ggtaaaaatcttgtaaactgtctgata

SEQ ID NO: 209047 - DNA, 27 bp, Artificial sequence
  SiRNA target sequence
gtaaaaatcttgtaaactgtctgatag

SEQ ID NO: 209048 - DNA, 27 bp, Artificial sequence
  SiRNA target sequence
taaaaatcttgtaaactgtctgatagt

SEQ ID NO: 209049 - DNA, 27 bp, Artificial sequence
  SiRNA target sequence
aaaaatcttgtaaactgtctgatagta

SEQ ID NO: 209050 - DNA, 27 bp, Artificial sequence
  SiRNA target sequence
aaaatcttgtaaactgtctgatagtac

SEQ ID NO: 209051 - DNA, 27 bp, Artificial sequence
  SiRNA target sequence
aaatcttgtaaactgtctgatagtaca

SEQ ID NO: 209052 - DNA, 27 bp, Artificial sequence
  SiRNA target sequence
aatcttgtaaactgtctgatagtacaa

SEQ ID NO: 209053 - DNA, 27 bp, Artificial sequence
  SiRNA target sequence
atcttgtaaactgtctgatagtacaac

SEQ ID NO: 209054 - DNA, 27 bp, Artificial sequence
  SiRNA target sequence
tcttgtaaactgtctgatagtacaact

SEQ ID NO: 209055 - DNA, 27 bp, Artificial sequence
  SiRNA target sequence
cttgtaaactgtctgatagtacaactt

SEQ ID NO: 209056 - DNA, 27 bp, Artificial sequence
  SiRNA target sequence
ttgtaaactgtctgatagtacaacttt

SEQ ID NO: 209057 - DNA, 27 bp, Artificial sequence
  SiRNA target sequence
tgtaaactgtctgatagtacaactttc

SEQ ID NO: 209058 - DNA, 27 bp, Artificial sequence
  SiRNA target sequence
gtaaactgtctgatagtacaactttca

SEQ ID NO: 209059 - DNA, 27 bp, Artificial sequence
  SiRNA target sequence
taaactgtctgatagtacaactttcat

SEQ ID NO: 209060 - DNA, 27 bp, Artificial sequence
  SiRNA target sequence
aaactgtctgatagtacaactttcatt

SEQ ID NO: 209061 - DNA, 27 bp, Artificial sequence
  SiRNA target sequence
aactgtctgatagtacaactttcattt

SEQ ID NO: 209062 - DNA, 27 bp, Artificial sequence
  SiRNA target sequence
actgtctgatagtacaactttcattta

SEQ ID NO: 209063 - DNA, 27 bp, Artificial sequence
  SiRNA target sequence
ctgtctgatagtacaactttcatttaa

SEQ ID NO: 209064 - DNA, 27 bp, Artificial sequence
  SiRNA target sequence
tgtctgatagtacaactttcatttaaa

SEQ ID NO: 209065 - DNA, 27 bp, Artificial sequence
  SiRNA target sequence
gtctgatagtacaactttcatttaaaa

SEQ ID NO: 209066 - DNA, 27 bp, Artificial sequence
  SiRNA target sequence
tctgatagtacaactttcatttaaaaa

SEQ ID NO: 209067 - DNA, 27 bp, Artificial sequence
  SiRNA target sequence
ctgatagtacaactttcatttaaaaaa

SEQ ID NO: 209068 - DNA, 27 bp, Artificial sequence
  SiRNA target sequence
tgatagtacaactttcatttaaaaaac

SEQ ID NO: 209069 - DNA, 27 bp, Artificial sequence
  SiRNA target sequence
gatagtacaactttcatttaaaaaact

SEQ ID NO: 209070 - DNA, 27 bp, Artificial sequence
  SiRNA target sequence
atagtacaactttcatttaaaaaactc

SEQ ID NO: 209071 - DNA, 27 bp, Artificial sequence
  SiRNA target sequence
tagtacaactttcatttaaaaaactca

SEQ ID NO: 209072 - DNA, 27 bp, Artificial sequence
  SiRNA target sequence
agtacaactttcatttaaaaaactcat

SEQ ID NO: 209073 - DNA, 27 bp, Artificial sequence
  SiRNA target sequence
gtacaactttcatttaaaaaactcatg

SEQ ID NO: 209074 - DNA, 27 bp, Artificial sequence
  SiRNA target sequence
tacaactttcatttaaaaaactcatgt

SEQ ID NO: 209075 - DNA, 27 bp, Artificial sequence
  SiRNA target sequence
acaactttcatttaaaaaactcatgta

SEQ ID NO: 209076 - DNA, 27 bp, Artificial sequence
  SiRNA target sequence
caactttcatttaaaaaactcatgtat

SEQ ID NO: 209077 - DNA, 27 bp, Artificial sequence
  SiRNA target sequence
aactttcatttaaaaaactcatgtata

SEQ ID NO: 209078 - DNA, 27 bp, Artificial sequence
  SiRNA target sequence
actttcatttaaaaaactcatgtataa

SEQ ID NO: 209079 - DNA, 27 bp, Artificial sequence
  SiRNA target sequence
ctttcatttaaaaaactcatgtataaa

SEQ ID NO: 209080 - DNA, 27 bp, Artificial sequence
  SiRNA target sequence
tttcatttaaaaaactcatgtataaat

SEQ ID NO: 209081 - DNA, 27 bp, Artificial sequence
  SiRNA target sequence
ttcatttaaaaaactcatgtataaata

SEQ ID NO: 209082 - DNA, 27 bp, Artificial sequence
  SiRNA target sequence
tcatttaaaaaactcatgtataaataa

SEQ ID NO: 209083 - DNA, 27 bp, Artificial sequence
  SiRNA target sequence
catttaaaaaactcatgtataaataag

SEQ ID NO: 209084 - DNA, 27 bp, Artificial sequence
  SiRNA target sequence
atttaaaaaactcatgtataaataagc

SEQ ID NO: 209085 - DNA, 27 bp, Artificial sequence
  SiRNA target sequence
tttaaaaaactcatgtataaataagcc

SEQ ID NO: 209086 - DNA, 27 bp, Artificial sequence
  SiRNA target sequence
ttaaaaaactcatgtataaataagcca

SEQ ID NO: 209087 - DNA, 27 bp, Artificial sequence
  SiRNA target sequence
taaaaaactcatgtataaataagccat

SEQ ID NO: 209088 - DNA, 27 bp, Artificial sequence
  SiRNA target sequence
aaaaaactcatgtataaataagccata

SEQ ID NO: 209089 - DNA, 27 bp, Artificial sequence
  SiRNA target sequence
aaaaactcatgtataaataagccataa

SEQ ID NO: 209090 - DNA, 27 bp, Artificial sequence
  SiRNA target sequence
aaaactcatgtataaataagccataag

SEQ ID NO: 209091 - DNA, 27 bp, Artificial sequence
  SiRNA target sequence
aaactcatgtataaataagccataagt

SEQ ID NO: 209092 - DNA, 27 bp, Artificial sequence
  SiRNA target sequence
aactcatgtataaataagccataagta

SEQ ID NO: 209093 - DNA, 27 bp, Artificial sequence
  SiRNA target sequence
actcatgtataaataagccataagtaa

SEQ ID NO: 209094 - DNA, 27 bp, Artificial sequence
  SiRNA target sequence
ctcatgtataaataagccataagtaaa

SEQ ID NO: 209095 - DNA, 27 bp, Artificial sequence
  SiRNA target sequence
tcatgtataaataagccataagtaaac

SEQ ID NO: 209096 - DNA, 27 bp, Artificial sequence
  SiRNA target sequence
catgtataaataagccataagtaaact

SEQ ID NO: 209097 - DNA, 27 bp, Artificial sequence
  SiRNA target sequence
atgtataaataagccataagtaaactg

SEQ ID NO: 209098 - DNA, 27 bp, Artificial sequence
  SiRNA target sequence
tgtataaataagccataagtaaactgc

SEQ ID NO: 209099 - DNA, 27 bp, Artificial sequence
  SiRNA target sequence
gtataaataagccataagtaaactgcc

SEQ ID NO: 209100 - DNA, 27 bp, Artificial sequence
  SiRNA target sequence
tataaataagccataagtaaactgccc

SEQ ID NO: 209101 - DNA, 27 bp, Artificial sequence
  SiRNA target sequence
ataaataagccataagtaaactgcccc

SEQ ID NO: 209102 - DNA, 27 bp, Artificial sequence
  SiRNA target sequence
taaataagccataagtaaactgcccca

SEQ ID NO: 209103 - DNA, 27 bp, Artificial sequence
  SiRNA target sequence
aaataagccataagtaaactgccccac

SEQ ID NO: 209104 - DNA, 27 bp, Artificial sequence
  SiRNA target sequence
aataagccataagtaaactgccccaca

SEQ ID NO: 209105 - DNA, 27 bp, Artificial sequence
  SiRNA target sequence
ataagccataagtaaactgccccacat

SEQ ID NO: 209106 - DNA, 27 bp, Artificial sequence
  SiRNA target sequence
taagccataagtaaactgccccacatt

SEQ ID NO: 209107 - DNA, 27 bp, Artificial sequence
  SiRNA target sequence
aagccataagtaaactgccccacattt

SEQ ID NO: 209108 - DNA, 27 bp, Artificial sequence
  SiRNA target sequence
agccataagtaaactgccccacatttc

SEQ ID NO: 209109 - DNA, 27 bp, Artificial sequence
  SiRNA target sequence
gccataagtaaactgccccacatttct

SEQ ID NO: 209110 - DNA, 27 bp, Artificial sequence
  SiRNA target sequence
ccataagtaaactgccccacatttctg

SEQ ID NO: 209111 - DNA, 27 bp, Artificial sequence
  SiRNA target sequence
cataagtaaactgccccacatttctgc

SEQ ID NO: 209112 - DNA, 27 bp, Artificial sequence
  SiRNA target sequence
ataagtaaactgccccacatttctgct

SEQ ID NO: 209113 - DNA, 27 bp, Artificial sequence
  SiRNA target sequence
taagtaaactgccccacatttctgcta

SEQ ID NO: 209114 - DNA, 27 bp, Artificial sequence
  SiRNA target sequence
aagtaaactgccccacatttctgctat

SEQ ID NO: 209115 - DNA, 27 bp, Artificial sequence
  SiRNA target sequence
agtaaactgccccacatttctgctatt

SEQ ID NO: 209116 - DNA, 27 bp, Artificial sequence
  SiRNA target sequence
gtaaactgccccacatttctgctatta

SEQ ID NO: 209117 - DNA, 27 bp, Artificial sequence
  SiRNA target sequence
taaactgccccacatttctgctattat

SEQ ID NO: 209118 - DNA, 27 bp, Artificial sequence
  SiRNA target sequence
aaactgccccacatttctgctattata

SEQ ID NO: 209119 - DNA, 27 bp, Artificial sequence
  SiRNA target sequence
aactgccccacatttctgctattataa

SEQ ID NO: 209120 - DNA, 27 bp, Artificial sequence
  SiRNA target sequence
actgccccacatttctgctattataaa

SEQ ID NO: 209121 - DNA, 27 bp, Artificial sequence
  SiRNA target sequence
ctgccccacatttctgctattataaaa

SEQ ID NO: 209122 - DNA, 27 bp, Artificial sequence
  SiRNA target sequence
tgccccacatttctgctattataaaaa

SEQ ID NO: 209123 - DNA, 27 bp, Artificial sequence
  SiRNA target sequence
gccccacatttctgctattataaaaat

SEQ ID NO: 209124 - DNA, 27 bp, Artificial sequence
  SiRNA target sequence
ccccacatttctgctattataaaaata

SEQ ID NO: 209125 - DNA, 27 bp, Artificial sequence
  SiRNA target sequence
cccacatttctgctattataaaaatac

SEQ ID NO: 209126 - DNA, 27 bp, Artificial sequence
  SiRNA target sequence
ccacatttctgctattataaaaataca

SEQ ID NO: 209127 - DNA, 27 bp, Artificial sequence
  SiRNA target sequence
cacatttctgctattataaaaatacaa

SEQ ID NO: 209128 - DNA, 27 bp, Artificial sequence
  SiRNA target sequence
acatttctgctattataaaaatacaag

SEQ ID NO: 209129 - DNA, 27 bp, Artificial sequence
  SiRNA target sequence
catttctgctattataaaaatacaagt

SEQ ID NO: 209130 - DNA, 27 bp, Artificial sequence
  SiRNA target sequence
atttctgctattataaaaatacaagtt

SEQ ID NO: 209131 - DNA, 27 bp, Artificial sequence
  SiRNA target sequence
tttctgctattataaaaatacaagttg

SEQ ID NO: 209132 - DNA, 27 bp, Artificial sequence
  SiRNA target sequence
ttctgctattataaaaatacaagttga

SEQ ID NO: 209133 - DNA, 27 bp, Artificial sequence
  SiRNA target sequence
tctgctattataaaaatacaagttgaa

SEQ ID NO: 209134 - DNA, 27 bp, Artificial sequence
  SiRNA target sequence
ctgctattataaaaatacaagttgaaa

SEQ ID NO: 209135 - DNA, 27 bp, Artificial sequence
  SiRNA target sequence
tgctattataaaaatacaagttgaaac

SEQ ID NO: 209136 - DNA, 27 bp, Artificial sequence
  SiRNA target sequence
gctattataaaaatacaagttgaaacg

SEQ ID NO: 209137 - DNA, 27 bp, Artificial sequence
  SiRNA target sequence
ctattataaaaatacaagttgaaacgg

SEQ ID NO: 209138 - DNA, 27 bp, Artificial sequence
  SiRNA target sequence
tattataaaaatacaagttgaaacggg

SEQ ID NO: 209139 - DNA, 27 bp, Artificial sequence
  SiRNA target sequence
attataaaaatacaagttgaaacgggc

SEQ ID NO: 209140 - DNA, 27 bp, Artificial sequence
  SiRNA target sequence
ttataaaaatacaagttgaaacgggct

SEQ ID NO: 209141 - DNA, 27 bp, Artificial sequence
  SiRNA target sequence
tataaaaatacaagttgaaacgggctc

SEQ ID NO: 209142 - DNA, 27 bp, Artificial sequence
  SiRNA target sequence
ataaaaatacaagttgaaacgggctcg

SEQ ID NO: 209143 - DNA, 27 bp, Artificial sequence
  SiRNA target sequence
taaaaatacaagttgaaacgggctcgt

SEQ ID NO: 209144 - DNA, 27 bp, Artificial sequence
  SiRNA target sequence
aaaaatacaagttgaaacgggctcgtt

SEQ ID NO: 209145 - DNA, 27 bp, Artificial sequence
  SiRNA target sequence
aaaatacaagttgaaacgggctcgtta

SEQ ID NO: 209146 - DNA, 27 bp, Artificial sequence
  SiRNA target sequence
aaatacaagttgaaacgggctcgttag

SEQ ID NO: 209147 - DNA, 27 bp, Artificial sequence
  SiRNA target sequence
aatacaagttgaaacgggctcgttagc

SEQ ID NO: 209148 - DNA, 27 bp, Artificial sequence
  SiRNA target sequence
atacaagttgaaacgggctcgttagct

SEQ ID NO: 209149 - DNA, 27 bp, Artificial sequence
  SiRNA target sequence
tacaagttgaaacgggctcgttagctg

SEQ ID NO: 209150 - DNA, 27 bp, Artificial sequence
  SiRNA target sequence
acaagttgaaacgggctcgttagctgt

SEQ ID NO: 209151 - DNA, 27 bp, Artificial sequence
  SiRNA target sequence
caagttgaaacgggctcgttagctgta

SEQ ID NO: 209152 - DNA, 27 bp, Artificial sequence
  SiRNA target sequence
aagttgaaacgggctcgttagctgtaa

SEQ ID NO: 209153 - DNA, 27 bp, Artificial sequence
  SiRNA target sequence
agttgaaacgggctcgttagctgtaat

SEQ ID NO: 209154 - DNA, 27 bp, Artificial sequence
  SiRNA target sequence
gttgaaacgggctcgttagctgtaatt

SEQ ID NO: 209155 - DNA, 27 bp, Artificial sequence
  SiRNA target sequence
ttgaaacgggctcgttagctgtaatta

SEQ ID NO: 209156 - DNA, 27 bp, Artificial sequence
  SiRNA target sequence
tgaaacgggctcgttagctgtaattaa

SEQ ID NO: 209157 - DNA, 27 bp, Artificial sequence
  SiRNA target sequence
gaaacgggctcgttagctgtaattaaa

SEQ ID NO: 209158 - DNA, 27 bp, Artificial sequence
  SiRNA target sequence
aaacgggctcgttagctgtaattaaaa

SEQ ID NO: 209159 - DNA, 27 bp, Artificial sequence
  SiRNA target sequence
aacgggctcgttagctgtaattaaaaa

SEQ ID NO: 209160 - DNA, 27 bp, Artificial sequence
  SiRNA target sequence
acgggctcgttagctgtaattaaaaaa

SEQ ID NO: 209161 - DNA, 27 bp, Artificial sequence
  SiRNA target sequence
cgggctcgttagctgtaattaaaaaat

SEQ ID NO: 209162 - DNA, 27 bp, Artificial sequence
  SiRNA target sequence
gggctcgttagctgtaattaaaaaata

SEQ ID NO: 209163 - DNA, 27 bp, Artificial sequence
  SiRNA target sequence
ggctcgttagctgtaattaaaaaatat

SEQ ID NO: 209164 - DNA, 27 bp, Artificial sequence
  SiRNA target sequence
gctcgttagctgtaattaaaaaatatt

SEQ ID NO: 209165 - DNA, 27 bp, Artificial sequence
  SiRNA target sequence
ctcgttagctgtaattaaaaaatattt

SEQ ID NO: 209166 - DNA, 27 bp, Artificial sequence
  SiRNA target sequence
tcgttagctgtaattaaaaaatatttt

SEQ ID NO: 209167 - DNA, 27 bp, Artificial sequence
  SiRNA target sequence
cgttagctgtaattaaaaaatatttta

SEQ ID NO: 209168 - DNA, 27 bp, Artificial sequence
  SiRNA target sequence
gttagctgtaattaaaaaatattttat

SEQ ID NO: 209169 - DNA, 27 bp, Artificial sequence
  SiRNA target sequence
ttagctgtaattaaaaaatattttata

SEQ ID NO: 209170 - DNA, 27 bp, Artificial sequence
  SiRNA target sequence
tagctgtaattaaaaaatattttataa

SEQ ID NO: 209171 - DNA, 27 bp, Artificial sequence
  SiRNA target sequence
agctgtaattaaaaaatattttataaa

SEQ ID NO: 209172 - DNA, 27 bp, Artificial sequence
  SiRNA target sequence
gctgtaattaaaaaatattttataaag

SEQ ID NO: 209173 - DNA, 27 bp, Artificial sequence
  SiRNA target sequence
ctgtaattaaaaaatattttataaagt

SEQ ID NO: 209174 - DNA, 27 bp, Artificial sequence
  SiRNA target sequence
tgtaattaaaaaatattttataaagtt

SEQ ID NO: 209175 - DNA, 27 bp, Artificial sequence
  SiRNA target sequence
gtaattaaaaaatattttataaagttc

SEQ ID NO: 209176 - DNA, 27 bp, Artificial sequence
  SiRNA target sequence
taattaaaaaatattttataaagttca

SEQ ID NO: 209177 - DNA, 27 bp, Artificial sequence
  SiRNA target sequence
aattaaaaaatattttataaagttcaa

SEQ ID NO: 209178 - DNA, 27 bp, Artificial sequence
  SiRNA target sequence
attaaaaaatattttataaagttcaat

SEQ ID NO: 209179 - DNA, 27 bp, Artificial sequence
  SiRNA target sequence
ttaaaaaatattttataaagttcaatc

SEQ ID NO: 209180 - DNA, 27 bp, Artificial sequence
  SiRNA target sequence
taaaaaatattttataaagttcaatcc

SEQ ID NO: 209181 - DNA, 27 bp, Artificial sequence
  SiRNA target sequence
aaaaaatattttataaagttcaatccc

SEQ ID NO: 209182 - DNA, 27 bp, Artificial sequence
  SiRNA target sequence
aaaaatattttataaagttcaatccct

SEQ ID NO: 209183 - DNA, 27 bp, Artificial sequence
  SiRNA target sequence
aaaatattttataaagttcaatccctt

SEQ ID NO: 209184 - DNA, 27 bp, Artificial sequence
  SiRNA target sequence
aaatattttataaagttcaatcccttc

SEQ ID NO: 209185 - DNA, 27 bp, Artificial sequence
  SiRNA target sequence
aatattttataaagttcaatcccttca

SEQ ID NO: 209186 - DNA, 27 bp, Artificial sequence
  SiRNA target sequence
atattttataaagttcaatcccttcaa

SEQ ID NO: 209187 - DNA, 27 bp, Artificial sequence
  SiRNA target sequence
tattttataaagttcaatcccttcaat

SEQ ID NO: 209188 - DNA, 27 bp, Artificial sequence
  SiRNA target sequence
attttataaagttcaatcccttcaatg

SEQ ID NO: 209189 - DNA, 27 bp, Artificial sequence
  SiRNA target sequence
ttttataaagttcaatcccttcaatgc

SEQ ID NO: 209190 - DNA, 27 bp, Artificial sequence
  SiRNA target sequence
tttataaagttcaatcccttcaatgca

SEQ ID NO: 209191 - DNA, 27 bp, Artificial sequence
  SiRNA target sequence
ttataaagttcaatcccttcaatgcac

SEQ ID NO: 209192 - DNA, 27 bp, Artificial sequence
  SiRNA target sequence
tataaagttcaatcccttcaatgcacc

SEQ ID NO: 209193 - DNA, 27 bp, Artificial sequence
  SiRNA target sequence
ataaagttcaatcccttcaatgcacct

SEQ ID NO: 209194 - DNA, 27 bp, Artificial sequence
  SiRNA target sequence
taaagttcaatcccttcaatgcacctt

SEQ ID NO: 209195 - DNA, 27 bp, Artificial sequence
  SiRNA target sequence
aaagttcaatcccttcaatgcaccttt

SEQ ID NO: 209196 - DNA, 27 bp, Artificial sequence
  SiRNA target sequence
aagttcaatcccttcaatgcacctttg

SEQ ID NO: 209197 - DNA, 27 bp, Artificial sequence
  SiRNA target sequence
agttcaatcccttcaatgcacctttgt

SEQ ID NO: 209198 - DNA, 27 bp, Artificial sequence
  SiRNA target sequence
gttcaatcccttcaatgcacctttgtt

SEQ ID NO: 209199 - DNA, 27 bp, Artificial sequence
  SiRNA target sequence
ttcaatcccttcaatgcacctttgtta

SEQ ID NO: 209200 - DNA, 27 bp, Artificial sequence
  SiRNA target sequence
tcaatcccttcaatgcacctttgttat

SEQ ID NO: 209201 - DNA, 27 bp, Artificial sequence
  SiRNA target sequence
caatcccttcaatgcacctttgttatc

SEQ ID NO: 209202 - DNA, 27 bp, Artificial sequence
  SiRNA target sequence
aatcccttcaatgcacctttgttatca

SEQ ID NO: 209203 - DNA, 27 bp, Artificial sequence
  SiRNA target sequence
atcccttcaatgcacctttgttatcag

SEQ ID NO: 209204 - DNA, 27 bp, Artificial sequence
  SiRNA target sequence
tcccttcaatgcacctttgttatcagc

SEQ ID NO: 209205 - DNA, 27 bp, Artificial sequence
  SiRNA target sequence
cccttcaatgcacctttgttatcagcg

SEQ ID NO: 209206 - DNA, 27 bp, Artificial sequence
  SiRNA target sequence
ccttcaatgcacctttgttatcagcga

SEQ ID NO: 209207 - DNA, 27 bp, Artificial sequence
  SiRNA target sequence
cttcaatgcacctttgttatcagcgaa

SEQ ID NO: 209208 - DNA, 27 bp, Artificial sequence
  SiRNA target sequence
ttcaatgcacctttgttatcagcgaaa

SEQ ID NO: 209209 - DNA, 27 bp, Artificial sequence
  SiRNA target sequence
tcaatgcacctttgttatcagcgaaaa

SEQ ID NO: 209210 - DNA, 27 bp, Artificial sequence
  SiRNA target sequence
caatgcacctttgttatcagcgaaaat

SEQ ID NO: 209211 - DNA, 27 bp, Artificial sequence
  SiRNA target sequence
aatgcacctttgttatcagcgaaaata

SEQ ID NO: 209212 - DNA, 27 bp, Artificial sequence
  SiRNA target sequence
atgcacctttgttatcagcgaaaatat

SEQ ID NO: 209213 - DNA, 27 bp, Artificial sequence
  SiRNA target sequence
tgcacctttgttatcagcgaaaatatc

SEQ ID NO: 209214 - DNA, 27 bp, Artificial sequence
  SiRNA target sequence
gcacctttgttatcagcgaaaatatct

SEQ ID NO: 209215 - DNA, 27 bp, Artificial sequence
  SiRNA target sequence
cacctttgttatcagcgaaaatatctc

SEQ ID NO: 209216 - DNA, 27 bp, Artificial sequence
  SiRNA target sequence
acctttgttatcagcgaaaatatctct

SEQ ID NO: 209217 - DNA, 27 bp, Artificial sequence
  SiRNA target sequence
cctttgttatcagcgaaaatatctcta

SEQ ID NO: 209218 - DNA, 27 bp, Artificial sequence
  SiRNA target sequence
ctttgttatcagcgaaaatatctctaa

SEQ ID NO: 209219 - DNA, 27 bp, Artificial sequence
  SiRNA target sequence
tttgttatcagcgaaaatatctctaaa

SEQ ID NO: 209220 - DNA, 27 bp, Artificial sequence
  SiRNA target sequence
ttgttatcagcgaaaatatctctaaat

SEQ ID NO: 209221 - DNA, 27 bp, Artificial sequence
  SiRNA target sequence
tgttatcagcgaaaatatctctaaata

SEQ ID NO: 209222 - DNA, 27 bp, Artificial sequence
  SiRNA target sequence
gttatcagcgaaaatatctctaaataa

SEQ ID NO: 209223 - DNA, 27 bp, Artificial sequence
  SiRNA target sequence
ttatcagcgaaaatatctctaaataaa

SEQ ID NO: 209224 - DNA, 27 bp, Artificial sequence
  SiRNA target sequence
tatcagcgaaaatatctctaaataaaa

SEQ ID NO: 209225 - DNA, 27 bp, Artificial sequence
  SiRNA target sequence
atcagcgaaaatatctctaaataaaaa

SEQ ID NO: 209226 - DNA, 27 bp, Artificial sequence
  SiRNA target sequence
tcagcgaaaatatctctaaataaaaag

SEQ ID NO: 209227 - DNA, 27 bp, Artificial sequence
  SiRNA target sequence
cagcgaaaatatctctaaataaaaagc

SEQ ID NO: 209228 - DNA, 27 bp, Artificial sequence
  SiRNA target sequence
agcgaaaatatctctaaataaaaagct

SEQ ID NO: 209229 - DNA, 27 bp, Artificial sequence
  SiRNA target sequence
gcgaaaatatctctaaataaaaagcta

SEQ ID NO: 209230 - DNA, 27 bp, Artificial sequence
  SiRNA target sequence
cgaaaatatctctaaataaaaagctag

SEQ ID NO: 209231 - DNA, 27 bp, Artificial sequence
  SiRNA target sequence
gaaaatatctctaaataaaaagctaga

SEQ ID NO: 209232 - DNA, 27 bp, Artificial sequence
  SiRNA target sequence
aaaatatctctaaataaaaagctagat

SEQ ID NO: 209233 - DNA, 27 bp, Artificial sequence
  SiRNA target sequence
aaatatctctaaataaaaagctagatg

SEQ ID NO: 209234 - DNA, 27 bp, Artificial sequence
  SiRNA target sequence
aatatctctaaataaaaagctagatgg

SEQ ID NO: 209235 - DNA, 27 bp, Artificial sequence
  SiRNA target sequence
atatctctaaataaaaagctagatggt

SEQ ID NO: 209236 - DNA, 27 bp, Artificial sequence
  SiRNA target sequence
tatctctaaataaaaagctagatggtg

SEQ ID NO: 209237 - DNA, 27 bp, Artificial sequence
  SiRNA target sequence
atctctaaataaaaagctagatggtgt

SEQ ID NO: 209238 - DNA, 27 bp, Artificial sequence
  SiRNA target sequence
tctctaaataaaaagctagatggtgtt

SEQ ID NO: 209239 - DNA, 27 bp, Artificial sequence
  SiRNA target sequence
ctctaaataaaaagctagatggtgtta

SEQ ID NO: 209240 - DNA, 27 bp, Artificial sequence
  SiRNA target sequence
tctaaataaaaagctagatggtgttac

SEQ ID NO: 209241 - DNA, 27 bp, Artificial sequence
  SiRNA target sequence
ctaaataaaaagctagatggtgttact

SEQ ID NO: 209242 - DNA, 27 bp, Artificial sequence
  SiRNA target sequence
taaataaaaagctagatggtgttactt

SEQ ID NO: 209243 - DNA, 27 bp, Artificial sequence
  SiRNA target sequence
aaataaaaagctagatggtgttacttt

SEQ ID NO: 209244 - DNA, 27 bp, Artificial sequence
  SiRNA target sequence
aataaaaagctagatggtgttactttc

SEQ ID NO: 209245 - DNA, 27 bp, Artificial sequence
  SiRNA target sequence
ataaaaagctagatggtgttactttct

SEQ ID NO: 209246 - DNA, 27 bp, Artificial sequence
  SiRNA target sequence
taaaaagctagatggtgttactttctc

SEQ ID NO: 209247 - DNA, 27 bp, Artificial sequence
  SiRNA target sequence
aaaaagctagatggtgttactttctct

SEQ ID NO: 209248 - DNA, 27 bp, Artificial sequence
  SiRNA target sequence
aaaagctagatggtgttactttctctt

SEQ ID NO: 209249 - DNA, 27 bp, Artificial sequence
  SiRNA target sequence
aaagctagatggtgttactttctcttc

SEQ ID NO: 209250 - DNA, 27 bp, Artificial sequence
  SiRNA target sequence
aagctagatggtgttactttctcttca

SEQ ID NO: 209251 - DNA, 27 bp, Artificial sequence
  SiRNA target sequence
agctagatggtgttactttctcttcaa

SEQ ID NO: 209252 - DNA, 27 bp, Artificial sequence
  SiRNA target sequence
gctagatggtgttactttctcttcaaa

SEQ ID NO: 209253 - DNA, 27 bp, Artificial sequence
  SiRNA target sequence
ctagatggtgttactttctcttcaaac

SEQ ID NO: 209254 - DNA, 27 bp, Artificial sequence
  SiRNA target sequence
tagatggtgttactttctcttcaaaca

SEQ ID NO: 209255 - DNA, 27 bp, Artificial sequence
  SiRNA target sequence
agatggtgttactttctcttcaaacaa

SEQ ID NO: 209256 - DNA, 27 bp, Artificial sequence
  SiRNA target sequence
gatggtgttactttctcttcaaacaaa

SEQ ID NO: 209257 - DNA, 27 bp, Artificial sequence
  SiRNA target sequence
atggtgttactttctcttcaaacaaaa

SEQ ID NO: 209258 - DNA, 27 bp, Artificial sequence
  SiRNA target sequence
tggtgttactttctcttcaaacaaaaa

SEQ ID NO: 209259 - DNA, 27 bp, Artificial sequence
  SiRNA target sequence
ggtgttactttctcttcaaacaaaaag

SEQ ID NO: 209260 - DNA, 27 bp, Artificial sequence
  SiRNA target sequence
gtgttactttctcttcaaacaaaaaga

SEQ ID NO: 209261 - DNA, 27 bp, Artificial sequence
  SiRNA target sequence
tgttactttctcttcaaacaaaaagat

SEQ ID NO: 209262 - DNA, 27 bp, Artificial sequence
  SiRNA target sequence
gttactttctcttcaaacaaaaagatt

SEQ ID NO: 209263 - DNA, 27 bp, Artificial sequence
  SiRNA target sequence
ttactttctcttcaaacaaaaagattg

SEQ ID NO: 209264 - DNA, 27 bp, Artificial sequence
  SiRNA target sequence
tactttctcttcaaacaaaaagattgc

SEQ ID NO: 209265 - DNA, 27 bp, Artificial sequence
  SiRNA target sequence
actttctcttcaaacaaaaagattgcc

SEQ ID NO: 209266 - DNA, 27 bp, Artificial sequence
  SiRNA target sequence
ctttctcttcaaacaaaaagattgccc

SEQ ID NO: 209267 - DNA, 27 bp, Artificial sequence
  SiRNA target sequence
tttctcttcaaacaaaaagattgcccc

SEQ ID NO: 209268 - DNA, 27 bp, Artificial sequence
  SiRNA target sequence
ttctcttcaaacaaaaagattgcccct

SEQ ID NO: 209269 - DNA, 27 bp, Artificial sequence
  SiRNA target sequence
tctcttcaaacaaaaagattgccccta

SEQ ID NO: 209270 - DNA, 27 bp, Artificial sequence
  SiRNA target sequence
ctcttcaaacaaaaagattgcccctag

SEQ ID NO: 209271 - DNA, 27 bp, Artificial sequence
  SiRNA target sequence
tcttcaaacaaaaagattgcccctagt

SEQ ID NO: 209272 - DNA, 27 bp, Artificial sequence
  SiRNA target sequence
cttcaaacaaaaagattgcccctagtc

SEQ ID NO: 209273 - DNA, 27 bp, Artificial sequence
  SiRNA target sequence
ttcaaacaaaaagattgcccctagtcc

SEQ ID NO: 209274 - DNA, 27 bp, Artificial sequence
  SiRNA target sequence
tcaaacaaaaagattgcccctagtccg

SEQ ID NO: 209275 - DNA, 27 bp, Artificial sequence
  SiRNA target sequence
caaacaaaaagattgcccctagtccga

SEQ ID NO: 209276 - DNA, 27 bp, Artificial sequence
  SiRNA target sequence
aaacaaaaagattgcccctagtccgaa

SEQ ID NO: 209277 - DNA, 27 bp, Artificial sequence
  SiRNA target sequence
aacaaaaagattgcccctagtccgaag

SEQ ID NO: 209278 - DNA, 27 bp, Artificial sequence
  SiRNA target sequence
acaaaaagattgcccctagtccgaaga

SEQ ID NO: 209279 - DNA, 27 bp, Artificial sequence
  SiRNA target sequence
caaaaagattgcccctagtccgaagaa

SEQ ID NO: 209280 - DNA, 27 bp, Artificial sequence
  SiRNA target sequence
aaaaagattgcccctagtccgaagaaa

SEQ ID NO: 209281 - DNA, 27 bp, Artificial sequence
  SiRNA target sequence
aaaagattgcccctagtccgaagaaaa

SEQ ID NO: 209282 - DNA, 27 bp, Artificial sequence
  SiRNA target sequence
aaagattgcccctagtccgaagaaaaa

SEQ ID NO: 209283 - DNA, 27 bp, Artificial sequence
  SiRNA target sequence
aagattgcccctagtccgaagaaaaat

SEQ ID NO: 209284 - DNA, 27 bp, Artificial sequence
  SiRNA target sequence
agattgcccctagtccgaagaaaaatg

SEQ ID NO: 209285 - DNA, 27 bp, Artificial sequence
  SiRNA target sequence
gattgcccctagtccgaagaaaaatgc

SEQ ID NO: 209286 - DNA, 27 bp, Artificial sequence
  SiRNA target sequence
attgcccctagtccgaagaaaaatgca

SEQ ID NO: 209287 - DNA, 27 bp, Artificial sequence
  SiRNA target sequence
ttgcccctagtccgaagaaaaatgcag

SEQ ID NO: 209288 - DNA, 27 bp, Artificial sequence
  SiRNA target sequence
tgcccctagtccgaagaaaaatgcagt

SEQ ID NO: 209289 - DNA, 27 bp, Artificial sequence
  SiRNA target sequence
gcccctagtccgaagaaaaatgcagta

SEQ ID NO: 209290 - DNA, 27 bp, Artificial sequence
  SiRNA target sequence
cccctagtccgaagaaaaatgcagtaa

SEQ ID NO: 209291 - DNA, 27 bp, Artificial sequence
  SiRNA target sequence
ccctagtccgaagaaaaatgcagtaaa

SEQ ID NO: 209292 - DNA, 27 bp, Artificial sequence
  SiRNA target sequence
cctagtccgaagaaaaatgcagtaaaa

SEQ ID NO: 209293 - DNA, 27 bp, Artificial sequence
  SiRNA target sequence
ctagtccgaagaaaaatgcagtaaaaa

SEQ ID NO: 209294 - DNA, 27 bp, Artificial sequence
  SiRNA target sequence
tagtccgaagaaaaatgcagtaaaaat

SEQ ID NO: 209295 - DNA, 27 bp, Artificial sequence
  SiRNA target sequence
agtccgaagaaaaatgcagtaaaaatt

SEQ ID NO: 209296 - DNA, 27 bp, Artificial sequence
  SiRNA target sequence
gtccgaagaaaaatgcagtaaaaatta

SEQ ID NO: 209297 - DNA, 27 bp, Artificial sequence
  SiRNA target sequence
tccgaagaaaaatgcagtaaaaattat

SEQ ID NO: 209298 - DNA, 27 bp, Artificial sequence
  SiRNA target sequence
ccgaagaaaaatgcagtaaaaattatt

SEQ ID NO: 209299 - DNA, 27 bp, Artificial sequence
  SiRNA target sequence
cgaagaaaaatgcagtaaaaattatta

SEQ ID NO: 209300 - DNA, 27 bp, Artificial sequence
  SiRNA target sequence
gaagaaaaatgcagtaaaaattattag

SEQ ID NO: 209301 - DNA, 27 bp, Artificial sequence
  SiRNA target sequence
aagaaaaatgcagtaaaaattattaga

SEQ ID NO: 209302 - DNA, 27 bp, Artificial sequence
  SiRNA target sequence
agaaaaatgcagtaaaaattattagaa

SEQ ID NO: 209303 - DNA, 27 bp, Artificial sequence
  SiRNA target sequence
gaaaaatgcagtaaaaattattagaaa

SEQ ID NO: 209304 - DNA, 27 bp, Artificial sequence
  SiRNA target sequence
aaaaatgcagtaaaaattattagaaat

SEQ ID NO: 209305 - DNA, 27 bp, Artificial sequence
  SiRNA target sequence
aaaatgcagtaaaaattattagaaata

SEQ ID NO: 209306 - DNA, 27 bp, Artificial sequence
  SiRNA target sequence
aaatgcagtaaaaattattagaaatag

SEQ ID NO: 209307 - DNA, 27 bp, Artificial sequence
  SiRNA target sequence
aatgcagtaaaaattattagaaataga

SEQ ID NO: 209308 - DNA, 27 bp, Artificial sequence
  SiRNA target sequence
atgcagtaaaaattattagaaatagat

SEQ ID NO: 209309 - DNA, 27 bp, Artificial sequence
  SiRNA target sequence
tgcagtaaaaattattagaaatagatt

SEQ ID NO: 209310 - DNA, 27 bp, Artificial sequence
  SiRNA target sequence
gcagtaaaaattattagaaatagatta

SEQ ID NO: 209311 - DNA, 27 bp, Artificial sequence
  SiRNA target sequence
cagtaaaaattattagaaatagattaa

SEQ ID NO: 209312 - DNA, 27 bp, Artificial sequence
  SiRNA target sequence
agtaaaaattattagaaatagattaaa

SEQ ID NO: 209313 - DNA, 27 bp, Artificial sequence
  SiRNA target sequence
gtaaaaattattagaaatagattaaaa

SEQ ID NO: 209314 - DNA, 27 bp, Artificial sequence
  SiRNA target sequence
taaaaattattagaaatagattaaaaa

SEQ ID NO: 209315 - DNA, 27 bp, Artificial sequence
  SiRNA target sequence
aaaaattattagaaatagattaaaaat

SEQ ID NO: 209316 - DNA, 27 bp, Artificial sequence
  SiRNA target sequence
aaaattattagaaatagattaaaaatc

SEQ ID NO: 209317 - DNA, 27 bp, Artificial sequence
  SiRNA target sequence
aaattattagaaatagattaaaaatcg

SEQ ID NO: 209318 - DNA, 27 bp, Artificial sequence
  SiRNA target sequence
aattattagaaatagattaaaaatcga

SEQ ID NO: 209319 - DNA, 27 bp, Artificial sequence
  SiRNA target sequence
attattagaaatagattaaaaatcgat

SEQ ID NO: 209320 - DNA, 27 bp, Artificial sequence
  SiRNA target sequence
ttattagaaatagattaaaaatcgatg

SEQ ID NO: 209321 - DNA, 27 bp, Artificial sequence
  SiRNA target sequence
tattagaaatagattaaaaatcgatga

SEQ ID NO: 209322 - DNA, 27 bp, Artificial sequence
  SiRNA target sequence
attagaaatagattaaaaatcgatgat

SEQ ID NO: 209323 - DNA, 27 bp, Artificial sequence
  SiRNA target sequence
ttagaaatagattaaaaatcgatgata

SEQ ID NO: 209324 - DNA, 27 bp, Artificial sequence
  SiRNA target sequence
tagaaatagattaaaaatcgatgatac

SEQ ID NO: 209325 - DNA, 27 bp, Artificial sequence
  SiRNA target sequence
agaaatagattaaaaatcgatgataca

SEQ ID NO: 209326 - DNA, 27 bp, Artificial sequence
  SiRNA target sequence
gaaatagattaaaaatcgatgatacag

SEQ ID NO: 209327 - DNA, 27 bp, Artificial sequence
  SiRNA target sequence
aaatagattaaaaatcgatgatacagg

SEQ ID NO: 209328 - DNA, 27 bp, Artificial sequence
  SiRNA target sequence
aatagattaaaaatcgatgatacaggt

SEQ ID NO: 209329 - DNA, 27 bp, Artificial sequence
  SiRNA target sequence
atagattaaaaatcgatgatacaggtt

SEQ ID NO: 209330 - DNA, 27 bp, Artificial sequence
  SiRNA target sequence
tagattaaaaatcgatgatacaggttt

SEQ ID NO: 209331 - DNA, 27 bp, Artificial sequence
  SiRNA target sequence
agattaaaaatcgatgatacaggttta

SEQ ID NO: 209332 - DNA, 27 bp, Artificial sequence
  SiRNA target sequence
gattaaaaatcgatgatacaggtttat

SEQ ID NO: 209333 - DNA, 27 bp, Artificial sequence
  SiRNA target sequence
attaaaaatcgatgatacaggtttatt

SEQ ID NO: 209334 - DNA, 27 bp, Artificial sequence
  SiRNA target sequence
ttaaaaatcgatgatacaggtttattt

SEQ ID NO: 209335 - DNA, 27 bp, Artificial sequence
  SiRNA target sequence
taaaaatcgatgatacaggtttatttt

SEQ ID NO: 209336 - DNA, 27 bp, Artificial sequence
  SiRNA target sequence
aaaaatcgatgatacaggtttattttg

SEQ ID NO: 209337 - DNA, 27 bp, Artificial sequence
  SiRNA target sequence
aaaatcgatgatacaggtttattttgc

SEQ ID NO: 209338 - DNA, 27 bp, Artificial sequence
  SiRNA target sequence
aaatcgatgatacaggtttattttgca

SEQ ID NO: 209339 - DNA, 27 bp, Artificial sequence
  SiRNA target sequence
aatcgatgatacaggtttattttgcat

SEQ ID NO: 209340 - DNA, 27 bp, Artificial sequence
  SiRNA target sequence
atcgatgatacaggtttattttgcata

SEQ ID NO: 209341 - DNA, 27 bp, Artificial sequence
  SiRNA target sequence
tcgatgatacaggtttattttgcataa

SEQ ID NO: 209342 - DNA, 27 bp, Artificial sequence
  SiRNA target sequence
cgatgatacaggtttattttgcataag

SEQ ID NO: 209343 - DNA, 27 bp, Artificial sequence
  SiRNA target sequence
gatgatacaggtttattttgcataagc

SEQ ID NO: 209344 - DNA, 27 bp, Artificial sequence
  SiRNA target sequence
atgatacaggtttattttgcataagcc

SEQ ID NO: 209345 - DNA, 27 bp, Artificial sequence
  SiRNA target sequence
tgatacaggtttattttgcataagcca

SEQ ID NO: 209346 - DNA, 27 bp, Artificial sequence
  SiRNA target sequence
gatacaggtttattttgcataagccac

SEQ ID NO: 209347 - DNA, 27 bp, Artificial sequence
  SiRNA target sequence
atacaggtttattttgcataagccact

SEQ ID NO: 209348 - DNA, 27 bp, Artificial sequence
  SiRNA target sequence
tacaggtttattttgcataagccactg

SEQ ID NO: 209349 - DNA, 27 bp, Artificial sequence
  SiRNA target sequence
acaggtttattttgcataagccactgt

SEQ ID NO: 209350 - DNA, 27 bp, Artificial sequence
  SiRNA target sequence
caggtttattttgcataagccactgta

SEQ ID NO: 209351 - DNA, 27 bp, Artificial sequence
  SiRNA target sequence
aggtttattttgcataagccactgtat

SEQ ID NO: 209352 - DNA, 27 bp, Artificial sequence
  SiRNA target sequence
ggtttattttgcataagccactgtatt

SEQ ID NO: 209353 - DNA, 27 bp, Artificial sequence
  SiRNA target sequence
gtttattttgcataagccactgtatta

SEQ ID NO: 209354 - DNA, 27 bp, Artificial sequence
  SiRNA target sequence
tttattttgcataagccactgtattaa

SEQ ID NO: 209355 - DNA, 27 bp, Artificial sequence
  SiRNA target sequence
ttattttgcataagccactgtattaaa

SEQ ID NO: 209356 - DNA, 27 bp, Artificial sequence
  SiRNA target sequence
tattttgcataagccactgtattaaaa

SEQ ID NO: 209357 - DNA, 27 bp, Artificial sequence
  SiRNA target sequence
attttgcataagccactgtattaaaat

SEQ ID NO: 209358 - DNA, 27 bp, Artificial sequence
  SiRNA target sequence
ttttgcataagccactgtattaaaatt

SEQ ID NO: 209359 - DNA, 27 bp, Artificial sequence
  SiRNA target sequence
tttgcataagccactgtattaaaatta

SEQ ID NO: 209360 - DNA, 27 bp, Artificial sequence
  SiRNA target sequence
ttgcataagccactgtattaaaattac

SEQ ID NO: 209361 - DNA, 27 bp, Artificial sequence
  SiRNA target sequence
tgcataagccactgtattaaaattaca

SEQ ID NO: 209362 - DNA, 27 bp, Artificial sequence
  SiRNA target sequence
gcataagccactgtattaaaattacag

SEQ ID NO: 209363 - DNA, 27 bp, Artificial sequence
  SiRNA target sequence
cataagccactgtattaaaattacaga

SEQ ID NO: 209364 - DNA, 27 bp, Artificial sequence
  SiRNA target sequence
ataagccactgtattaaaattacagat

SEQ ID NO: 209365 - DNA, 27 bp, Artificial sequence
  SiRNA target sequence
taagccactgtattaaaattacagatg

SEQ ID NO: 209366 - DNA, 27 bp, Artificial sequence
  SiRNA target sequence
aagccactgtattaaaattacagatgc

SEQ ID NO: 209367 - DNA, 27 bp, Artificial sequence
  SiRNA target sequence
agccactgtattaaaattacagatgca

SEQ ID NO: 209368 - DNA, 27 bp, Artificial sequence
  SiRNA target sequence
gccactgtattaaaattacagatgcaa

SEQ ID NO: 209369 - DNA, 27 bp, Artificial sequence
  SiRNA target sequence
ccactgtattaaaattacagatgcaaa

SEQ ID NO: 209370 - DNA, 27 bp, Artificial sequence
  SiRNA target sequence
cactgtattaaaattacagatgcaaaa

SEQ ID NO: 209371 - DNA, 27 bp, Artificial sequence
  SiRNA target sequence
actgtattaaaattacagatgcaaaag

SEQ ID NO: 209372 - DNA, 27 bp, Artificial sequence
  SiRNA target sequence
ctgtattaaaattacagatgcaaaaga

SEQ ID NO: 209373 - DNA, 27 bp, Artificial sequence
  SiRNA target sequence
tgtattaaaattacagatgcaaaagat

SEQ ID NO: 209374 - DNA, 27 bp, Artificial sequence
  SiRNA target sequence
gtattaaaattacagatgcaaaagata

SEQ ID NO: 209375 - DNA, 27 bp, Artificial sequence
  SiRNA target sequence
tattaaaattacagatgcaaaagatat

SEQ ID NO: 209376 - DNA, 27 bp, Artificial sequence
  SiRNA target sequence
attaaaattacagatgcaaaagatata

SEQ ID NO: 209377 - DNA, 27 bp, Artificial sequence
  SiRNA target sequence
ttaaaattacagatgcaaaagatatag

SEQ ID NO: 209378 - DNA, 27 bp, Artificial sequence
  SiRNA target sequence
taaaattacagatgcaaaagatatagg

SEQ ID NO: 209379 - DNA, 27 bp, Artificial sequence
  SiRNA target sequence
aaaattacagatgcaaaagatatagga

SEQ ID NO: 209380 - DNA, 27 bp, Artificial sequence
  SiRNA target sequence
aaattacagatgcaaaagatataggaa

SEQ ID NO: 209381 - DNA, 27 bp, Artificial sequence
  SiRNA target sequence
aattacagatgcaaaagatataggaag

SEQ ID NO: 209382 - DNA, 27 bp, Artificial sequence
  SiRNA target sequence
attacagatgcaaaagatataggaaga

SEQ ID NO: 209383 - DNA, 27 bp, Artificial sequence
  SiRNA target sequence
ttacagatgcaaaagatataggaagaa

SEQ ID NO: 209384 - DNA, 27 bp, Artificial sequence
  SiRNA target sequence
tacagatgcaaaagatataggaagaac

SEQ ID NO: 209385 - DNA, 27 bp, Artificial sequence
  SiRNA target sequence
acagatgcaaaagatataggaagaaca

SEQ ID NO: 209386 - DNA, 27 bp, Artificial sequence
  SiRNA target sequence
cagatgcaaaagatataggaagaacat

SEQ ID NO: 209387 - DNA, 27 bp, Artificial sequence
  SiRNA target sequence
agatgcaaaagatataggaagaacata

SEQ ID NO: 209388 - DNA, 27 bp, Artificial sequence
  SiRNA target sequence
gatgcaaaagatataggaagaacataa

SEQ ID NO: 209389 - DNA, 27 bp, Artificial sequence
  SiRNA target sequence
atgcaaaagatataggaagaacataaa

SEQ ID NO: 209390 - DNA, 27 bp, Artificial sequence
  SiRNA target sequence
tgcaaaagatataggaagaacataaaa

SEQ ID NO: 209391 - DNA, 27 bp, Artificial sequence
  SiRNA target sequence
gcaaaagatataggaagaacataaaaa

SEQ ID NO: 209392 - DNA, 27 bp, Artificial sequence
  SiRNA target sequence
caaaagatataggaagaacataaaaaa

SEQ ID NO: 209393 - DNA, 27 bp, Artificial sequence
  SiRNA target sequence
aaaagatataggaagaacataaaaaat

SEQ ID NO: 209394 - DNA, 27 bp, Artificial sequence
  SiRNA target sequence
aaagatataggaagaacataaaaaatt

SEQ ID NO: 209395 - DNA, 27 bp, Artificial sequence
  SiRNA target sequence
aagatataggaagaacataaaaaattt

SEQ ID NO: 209396 - DNA, 27 bp, Artificial sequence
  SiRNA target sequence
agatataggaagaacataaaaaatttt

SEQ ID NO: 209397 - DNA, 27 bp, Artificial sequence
  SiRNA target sequence
gatataggaagaacataaaaaattttc

SEQ ID NO: 209398 - DNA, 27 bp, Artificial sequence
  SiRNA target sequence
atataggaagaacataaaaaattttca

SEQ ID NO: 209399 - DNA, 27 bp, Artificial sequence
  SiRNA target sequence
tataggaagaacataaaaaattttcat

SEQ ID NO: 209400 - DNA, 27 bp, Artificial sequence
  SiRNA target sequence
ataggaagaacataaaaaattttcata

SEQ ID NO: 209401 - DNA, 27 bp, Artificial sequence
  SiRNA target sequence
taggaagaacataaaaaattttcataa

SEQ ID NO: 209402 - DNA, 27 bp, Artificial sequence
  SiRNA target sequence
aggaagaacataaaaaattttcataaa

SEQ ID NO: 209403 - DNA, 27 bp, Artificial sequence
  SiRNA target sequence
ggaagaacataaaaaattttcataaac

SEQ ID NO: 209404 - DNA, 27 bp, Artificial sequence
  SiRNA target sequence
gaagaacataaaaaattttcataaaca

SEQ ID NO: 209405 - DNA, 27 bp, Artificial sequence
  SiRNA target sequence
aagaacataaaaaattttcataaacat

SEQ ID NO: 209406 - DNA, 27 bp, Artificial sequence
  SiRNA target sequence
agaacataaaaaattttcataaacata

SEQ ID NO: 209407 - DNA, 27 bp, Artificial sequence
  SiRNA target sequence
gaacataaaaaattttcataaacataa

SEQ ID NO: 209408 - DNA, 27 bp, Artificial sequence
  SiRNA target sequence
aacataaaaaattttcataaacataat

SEQ ID NO: 209409 - DNA, 27 bp, Artificial sequence
  SiRNA target sequence
acataaaaaattttcataaacataatt

SEQ ID NO: 209410 - DNA, 27 bp, Artificial sequence
  SiRNA target sequence
cataaaaaattttcataaacataattg

SEQ ID NO: 209411 - DNA, 27 bp, Artificial sequence
  SiRNA target sequence
ataaaaaattttcataaacataattga

SEQ ID NO: 209412 - DNA, 27 bp, Artificial sequence
  SiRNA target sequence
taaaaaattttcataaacataattgaa

SEQ ID NO: 209413 - DNA, 27 bp, Artificial sequence
  SiRNA target sequence
aaaaaattttcataaacataattgaat

SEQ ID NO: 209414 - DNA, 27 bp, Artificial sequence
  SiRNA target sequence
aaaaattttcataaacataattgaatt

SEQ ID NO: 209415 - DNA, 27 bp, Artificial sequence
  SiRNA target sequence
aaaattttcataaacataattgaattc

SEQ ID NO: 209416 - DNA, 27 bp, Artificial sequence
  SiRNA target sequence
aaattttcataaacataattgaattct

SEQ ID NO: 209417 - DNA, 27 bp, Artificial sequence
  SiRNA target sequence
aattttcataaacataattgaattctg

SEQ ID NO: 209418 - DNA, 27 bp, Artificial sequence
  SiRNA target sequence
attttcataaacataattgaattctga

SEQ ID NO: 209419 - DNA, 27 bp, Artificial sequence
  SiRNA target sequence
ttttcataaacataattgaattctgat

SEQ ID NO: 209420 - DNA, 27 bp, Artificial sequence
  SiRNA target sequence
tttcataaacataattgaattctgatc

SEQ ID NO: 209421 - DNA, 27 bp, Artificial sequence
  SiRNA target sequence
ttcataaacataattgaattctgatct

SEQ ID NO: 209422 - DNA, 27 bp, Artificial sequence
  SiRNA target sequence
tcataaacataattgaattctgatctt

SEQ ID NO: 209423 - DNA, 27 bp, Artificial sequence
  SiRNA target sequence
cataaacataattgaattctgatcttg

SEQ ID NO: 209424 - DNA, 27 bp, Artificial sequence
  SiRNA target sequence
ataaacataattgaattctgatcttgc

SEQ ID NO: 209425 - DNA, 27 bp, Artificial sequence
  SiRNA target sequence
taaacataattgaattctgatcttgcc

SEQ ID NO: 209426 - DNA, 27 bp, Artificial sequence
  SiRNA target sequence
aaacataattgaattctgatcttgcct

SEQ ID NO: 209427 - DNA, 27 bp, Artificial sequence
  SiRNA target sequence
aacataattgaattctgatcttgcctt

SEQ ID NO: 209428 - DNA, 27 bp, Artificial sequence
  SiRNA target sequence
acataattgaattctgatcttgcctta

SEQ ID NO: 209429 - DNA, 27 bp, Artificial sequence
  SiRNA target sequence
cataattgaattctgatcttgccttac

SEQ ID NO: 209430 - DNA, 27 bp, Artificial sequence
  SiRNA target sequence
ataattgaattctgatcttgccttacc

SEQ ID NO: 209431 - DNA, 27 bp, Artificial sequence
  SiRNA target sequence
taattgaattctgatcttgccttacca

SEQ ID NO: 209432 - DNA, 27 bp, Artificial sequence
  SiRNA target sequence
aattgaattctgatcttgccttaccat

SEQ ID NO: 209433 - DNA, 27 bp, Artificial sequence
  SiRNA target sequence
attgaattctgatcttgccttaccatc

SEQ ID NO: 209434 - DNA, 27 bp, Artificial sequence
  SiRNA target sequence
ttgaattctgatcttgccttaccatca

SEQ ID NO: 209435 - DNA, 27 bp, Artificial sequence
  SiRNA target sequence
tgaattctgatcttgccttaccatcac

SEQ ID NO: 209436 - DNA, 27 bp, Artificial sequence
  SiRNA target sequence
gaattctgatcttgccttaccatcaca

SEQ ID NO: 209437 - DNA, 27 bp, Artificial sequence
  SiRNA target sequence
aattctgatcttgccttaccatcacaa

SEQ ID NO: 209438 - DNA, 27 bp, Artificial sequence
  SiRNA target sequence
attctgatcttgccttaccatcacaaa

SEQ ID NO: 209439 - DNA, 27 bp, Artificial sequence
  SiRNA target sequence
ttctgatcttgccttaccatcacaaat

SEQ ID NO: 209440 - DNA, 27 bp, Artificial sequence
  SiRNA target sequence
tctgatcttgccttaccatcacaaata

SEQ ID NO: 209441 - DNA, 27 bp, Artificial sequence
  SiRNA target sequence
ctgatcttgccttaccatcacaaataa

SEQ ID NO: 209442 - DNA, 27 bp, Artificial sequence
  SiRNA target sequence
tgatcttgccttaccatcacaaataaa

SEQ ID NO: 209443 - DNA, 27 bp, Artificial sequence
  SiRNA target sequence
gatcttgccttaccatcacaaataaat

SEQ ID NO: 209444 - DNA, 27 bp, Artificial sequence
  SiRNA target sequence
atcttgccttaccatcacaaataaatc

SEQ ID NO: 209445 - DNA, 27 bp, Artificial sequence
  SiRNA target sequence
tcttgccttaccatcacaaataaatct

SEQ ID NO: 209446 - DNA, 27 bp, Artificial sequence
  SiRNA target sequence
cttgccttaccatcacaaataaatctt

SEQ ID NO: 209447 - DNA, 27 bp, Artificial sequence
  SiRNA target sequence
ttgccttaccatcacaaataaatcttt

SEQ ID NO: 209448 - DNA, 27 bp, Artificial sequence
  SiRNA target sequence
tgccttaccatcacaaataaatctttt

SEQ ID NO: 209449 - DNA, 27 bp, Artificial sequence
  SiRNA target sequence
gccttaccatcacaaataaatctttta

SEQ ID NO: 209450 - DNA, 27 bp, Artificial sequence
  SiRNA target sequence
ccttaccatcacaaataaatcttttaa

SEQ ID NO: 209451 - DNA, 27 bp, Artificial sequence
  SiRNA target sequence
cttaccatcacaaataaatcttttaaa

SEQ ID NO: 209452 - DNA, 27 bp, Artificial sequence
  SiRNA target sequence
ttaccatcacaaataaatcttttaaaa

SEQ ID NO: 209453 - DNA, 27 bp, Artificial sequence
  SiRNA target sequence
taccatcacaaataaatcttttaaaat

SEQ ID NO: 209454 - DNA, 27 bp, Artificial sequence
  SiRNA target sequence
accatcacaaataaatcttttaaaatt

SEQ ID NO: 209455 - DNA, 27 bp, Artificial sequence
  SiRNA target sequence
ccatcacaaataaatcttttaaaattc

SEQ ID NO: 209456 - DNA, 27 bp, Artificial sequence
  SiRNA target sequence
catcacaaataaatcttttaaaattct

SEQ ID NO: 209457 - DNA, 27 bp, Artificial sequence
  SiRNA target sequence
atcacaaataaatcttttaaaattctt

SEQ ID NO: 209458 - DNA, 27 bp, Artificial sequence
  SiRNA target sequence
tcacaaataaatcttttaaaattctta

SEQ ID NO: 209459 - DNA, 27 bp, Artificial sequence
  SiRNA target sequence
cacaaataaatcttttaaaattcttaa

SEQ ID NO: 209460 - DNA, 27 bp, Artificial sequence
  SiRNA target sequence
acaaataaatcttttaaaattcttaaa

SEQ ID NO: 209461 - DNA, 27 bp, Artificial sequence
  SiRNA target sequence
caaataaatcttttaaaattcttaaaa

SEQ ID NO: 209462 - DNA, 27 bp, Artificial sequence
  SiRNA target sequence
aaataaatcttttaaaattcttaaaaa

SEQ ID NO: 209463 - DNA, 27 bp, Artificial sequence
  SiRNA target sequence
aataaatcttttaaaattcttaaaaat

SEQ ID NO: 209464 - DNA, 27 bp, Artificial sequence
  SiRNA target sequence
ataaatcttttaaaattcttaaaaatg

SEQ ID NO: 209465 - DNA, 27 bp, Artificial sequence
  SiRNA target sequence
taaatcttttaaaattcttaaaaatga

SEQ ID NO: 209466 - DNA, 27 bp, Artificial sequence
  SiRNA target sequence
aaatcttttaaaattcttaaaaatgaa

SEQ ID NO: 209467 - DNA, 27 bp, Artificial sequence
  SiRNA target sequence
aatcttttaaaattcttaaaaatgaat

SEQ ID NO: 209468 - DNA, 27 bp, Artificial sequence
  SiRNA target sequence
atcttttaaaattcttaaaaatgaata

SEQ ID NO: 209469 - DNA, 27 bp, Artificial sequence
  SiRNA target sequence
tcttttaaaattcttaaaaatgaatac

SEQ ID NO: 209470 - DNA, 27 bp, Artificial sequence
  SiRNA target sequence
cttttaaaattcttaaaaatgaataca

SEQ ID NO: 209471 - DNA, 27 bp, Artificial sequence
  SiRNA target sequence
ttttaaaattcttaaaaatgaatacac

SEQ ID NO: 209472 - DNA, 27 bp, Artificial sequence
  SiRNA target sequence
tttaaaattcttaaaaatgaatacaca

SEQ ID NO: 209473 - DNA, 27 bp, Artificial sequence
  SiRNA target sequence
ttaaaattcttaaaaatgaatacacaa

SEQ ID NO: 209474 - DNA, 27 bp, Artificial sequence
  SiRNA target sequence
taaaattcttaaaaatgaatacacaaa

SEQ ID NO: 209475 - DNA, 27 bp, Artificial sequence
  SiRNA target sequence
aaaattcttaaaaatgaatacacaaag

SEQ ID NO: 209476 - DNA, 27 bp, Artificial sequence
  SiRNA target sequence
aaattcttaaaaatgaatacacaaagt

SEQ ID NO: 209477 - DNA, 27 bp, Artificial sequence
  SiRNA target sequence
aattcttaaaaatgaatacacaaagtt

SEQ ID NO: 209478 - DNA, 27 bp, Artificial sequence
  SiRNA target sequence
attcttaaaaatgaatacacaaagtta

SEQ ID NO: 209479 - DNA, 27 bp, Artificial sequence
  SiRNA target sequence
ttcttaaaaatgaatacacaaagttaa

SEQ ID NO: 209480 - DNA, 27 bp, Artificial sequence
  SiRNA target sequence
tcttaaaaatgaatacacaaagttaat

SEQ ID NO: 209481 - DNA, 27 bp, Artificial sequence
  SiRNA target sequence
cttaaaaatgaatacacaaagttaatt

SEQ ID NO: 209482 - DNA, 27 bp, Artificial sequence
  SiRNA target sequence
ttaaaaatgaatacacaaagttaatta

SEQ ID NO: 209483 - DNA, 27 bp, Artificial sequence
  SiRNA target sequence
taaaaatgaatacacaaagttaattaa

SEQ ID NO: 209484 - DNA, 27 bp, Artificial sequence
  SiRNA target sequence
aaaaatgaatacacaaagttaattaat

SEQ ID NO: 209485 - DNA, 27 bp, Artificial sequence
  SiRNA target sequence
aaaatgaatacacaaagttaattaatc

SEQ ID NO: 209486 - DNA, 27 bp, Artificial sequence
  SiRNA target sequence
aaatgaatacacaaagttaattaatcc

SEQ ID NO: 209487 - DNA, 27 bp, Artificial sequence
  SiRNA target sequence
aatgaatacacaaagttaattaatcca

SEQ ID NO: 209488 - DNA, 27 bp, Artificial sequence
  SiRNA target sequence
atgaatacacaaagttaattaatccaa

SEQ ID NO: 209489 - DNA, 27 bp, Artificial sequence
  SiRNA target sequence
tgaatacacaaagttaattaatccaaa

SEQ ID NO: 209490 - DNA, 27 bp, Artificial sequence
  SiRNA target sequence
gaatacacaaagttaattaatccaaac

SEQ ID NO: 209491 - DNA, 27 bp, Artificial sequence
  SiRNA target sequence
aatacacaaagttaattaatccaaaca

SEQ ID NO: 209492 - DNA, 27 bp, Artificial sequence
  SiRNA target sequence
atacacaaagttaattaatccaaacat

SEQ ID NO: 209493 - DNA, 27 bp, Artificial sequence
  SiRNA target sequence
tacacaaagttaattaatccaaacata

SEQ ID NO: 209494 - DNA, 27 bp, Artificial sequence
  SiRNA target sequence
acacaaagttaattaatccaaacataa

SEQ ID NO: 209495 - DNA, 27 bp, Artificial sequence
  SiRNA target sequence
cacaaagttaattaatccaaacataat

SEQ ID NO: 209496 - DNA, 27 bp, Artificial sequence
  SiRNA target sequence
acaaagttaattaatccaaacataata

SEQ ID NO: 209497 - DNA, 27 bp, Artificial sequence
  SiRNA target sequence
caaagttaattaatccaaacataatac

SEQ ID NO: 209498 - DNA, 27 bp, Artificial sequence
  SiRNA target sequence
aaagttaattaatccaaacataatacc

SEQ ID NO: 209499 - DNA, 27 bp, Artificial sequence
  SiRNA target sequence
aagttaattaatccaaacataatacca

SEQ ID NO: 209500 - DNA, 27 bp, Artificial sequence
  SiRNA target sequence
agttaattaatccaaacataataccaa

SEQ ID NO: 209501 - DNA, 27 bp, Artificial sequence
  SiRNA target sequence
gttaattaatccaaacataataccaag

SEQ ID NO: 209502 - DNA, 27 bp, Artificial sequence
  SiRNA target sequence
ttaattaatccaaacataataccaagt

SEQ ID NO: 209503 - DNA, 27 bp, Artificial sequence
  SiRNA target sequence
taattaatccaaacataataccaagta

SEQ ID NO: 209504 - DNA, 27 bp, Artificial sequence
  SiRNA target sequence
aattaatccaaacataataccaagtat

SEQ ID NO: 209505 - DNA, 27 bp, Artificial sequence
  SiRNA target sequence
attaatccaaacataataccaagtata

SEQ ID NO: 209506 - DNA, 27 bp, Artificial sequence
  SiRNA target sequence
ttaatccaaacataataccaagtataa

SEQ ID NO: 209507 - DNA, 27 bp, Artificial sequence
  SiRNA target sequence
taatccaaacataataccaagtataaa

SEQ ID NO: 209508 - DNA, 27 bp, Artificial sequence
  SiRNA target sequence
aatccaaacataataccaagtataaaa

SEQ ID NO: 209509 - DNA, 27 bp, Artificial sequence
  SiRNA target sequence
atccaaacataataccaagtataaaaa

SEQ ID NO: 209510 - DNA, 27 bp, Artificial sequence
  SiRNA target sequence
tccaaacataataccaagtataaaaaa

SEQ ID NO: 209511 - DNA, 27 bp, Artificial sequence
  SiRNA target sequence
ccaaacataataccaagtataaaaaat

SEQ ID NO: 209512 - DNA, 27 bp, Artificial sequence
  SiRNA target sequence
caaacataataccaagtataaaaaatt

SEQ ID NO: 209513 - DNA, 27 bp, Artificial sequence
  SiRNA target sequence
aaacataataccaagtataaaaaattt

SEQ ID NO: 209514 - DNA, 27 bp, Artificial sequence
  SiRNA target sequence
aacataataccaagtataaaaaattta

SEQ ID NO: 209515 - DNA, 27 bp, Artificial sequence
  SiRNA target sequence
acataataccaagtataaaaaatttag

SEQ ID NO: 209516 - DNA, 27 bp, Artificial sequence
  SiRNA target sequence
cataataccaagtataaaaaatttagg

SEQ ID NO: 209517 - DNA, 27 bp, Artificial sequence
  SiRNA target sequence
ataataccaagtataaaaaatttaggc

SEQ ID NO: 209518 - DNA, 27 bp, Artificial sequence
  SiRNA target sequence
taataccaagtataaaaaatttaggca

SEQ ID NO: 209519 - DNA, 27 bp, Artificial sequence
  SiRNA target sequence
aataccaagtataaaaaatttaggcat

SEQ ID NO: 209520 - DNA, 27 bp, Artificial sequence
  SiRNA target sequence
ataccaagtataaaaaatttaggcatt

SEQ ID NO: 209521 - DNA, 27 bp, Artificial sequence
  SiRNA target sequence
taccaagtataaaaaatttaggcattt

SEQ ID NO: 209522 - DNA, 27 bp, Artificial sequence
  SiRNA target sequence
accaagtataaaaaatttaggcatttc

SEQ ID NO: 209523 - DNA, 27 bp, Artificial sequence
  SiRNA target sequence
ccaagtataaaaaatttaggcatttca

SEQ ID NO: 209524 - DNA, 27 bp, Artificial sequence
  SiRNA target sequence
caagtataaaaaatttaggcatttcaa

SEQ ID NO: 209525 - DNA, 27 bp, Artificial sequence
  SiRNA target sequence
aagtataaaaaatttaggcatttcaac

SEQ ID NO: 209526 - DNA, 27 bp, Artificial sequence
  SiRNA target sequence
agtataaaaaatttaggcatttcaacc

SEQ ID NO: 209527 - DNA, 27 bp, Artificial sequence
  SiRNA target sequence
gtataaaaaatttaggcatttcaacct

SEQ ID NO: 209528 - DNA, 27 bp, Artificial sequence
  SiRNA target sequence
tataaaaaatttaggcatttcaacctt

SEQ ID NO: 209529 - DNA, 27 bp, Artificial sequence
  SiRNA target sequence
ataaaaaatttaggcatttcaacctta

SEQ ID NO: 209530 - DNA, 27 bp, Artificial sequence
  SiRNA target sequence
taaaaaatttaggcatttcaaccttag

SEQ ID NO: 209531 - DNA, 27 bp, Artificial sequence
  SiRNA target sequence
aaaaaatttaggcatttcaaccttagc

SEQ ID NO: 209532 - DNA, 27 bp, Artificial sequence
  SiRNA target sequence
aaaaatttaggcatttcaaccttagca

SEQ ID NO: 209533 - DNA, 27 bp, Artificial sequence
  SiRNA target sequence
aaaatttaggcatttcaaccttagcaa

SEQ ID NO: 209534 - DNA, 27 bp, Artificial sequence
  SiRNA target sequence
aaatttaggcatttcaaccttagcaac

SEQ ID NO: 209535 - DNA, 27 bp, Artificial sequence
  SiRNA target sequence
aatttaggcatttcaaccttagcaact

SEQ ID NO: 209536 - DNA, 27 bp, Artificial sequence
  SiRNA target sequence
atttaggcatttcaaccttagcaactt

SEQ ID NO: 209537 - DNA, 27 bp, Artificial sequence
  SiRNA target sequence
tttaggcatttcaaccttagcaacttt

SEQ ID NO: 209538 - DNA, 27 bp, Artificial sequence
  SiRNA target sequence
ttaggcatttcaaccttagcaacttta

SEQ ID NO: 209539 - DNA, 27 bp, Artificial sequence
  SiRNA target sequence
taggcatttcaaccttagcaactttaa

SEQ ID NO: 209540 - DNA, 27 bp, Artificial sequence
  SiRNA target sequence
aggcatttcaaccttagcaactttaaa

SEQ ID NO: 209541 - DNA, 27 bp, Artificial sequence
  SiRNA target sequence
ggcatttcaaccttagcaactttaaaa

SEQ ID NO: 209542 - DNA, 27 bp, Artificial sequence
  SiRNA target sequence
gcatttcaaccttagcaactttaaaat

SEQ ID NO: 209543 - DNA, 27 bp, Artificial sequence
  SiRNA target sequence
catttcaaccttagcaactttaaaata

SEQ ID NO: 209544 - DNA, 27 bp, Artificial sequence
  SiRNA target sequence
atttcaaccttagcaactttaaaataa

SEQ ID NO: 209545 - DNA, 27 bp, Artificial sequence
  SiRNA target sequence
tttcaaccttagcaactttaaaataac

SEQ ID NO: 209546 - DNA, 27 bp, Artificial sequence
  SiRNA target sequence
ttcaaccttagcaactttaaaataact

SEQ ID NO: 209547 - DNA, 27 bp, Artificial sequence
  SiRNA target sequence
tcaaccttagcaactttaaaataactc

SEQ ID NO: 209548 - DNA, 27 bp, Artificial sequence
  SiRNA target sequence
caaccttagcaactttaaaataactca

SEQ ID NO: 209549 - DNA, 27 bp, Artificial sequence
  SiRNA target sequence
aaccttagcaactttaaaataactcag

SEQ ID NO: 209550 - DNA, 27 bp, Artificial sequence
  SiRNA target sequence
accttagcaactttaaaataactcagt

SEQ ID NO: 209551 - DNA, 27 bp, Artificial sequence
  SiRNA target sequence
ccttagcaactttaaaataactcagta

SEQ ID NO: 209552 - DNA, 27 bp, Artificial sequence
  SiRNA target sequence
cttagcaactttaaaataactcagtaa

SEQ ID NO: 209553 - DNA, 27 bp, Artificial sequence
  SiRNA target sequence
ttagcaactttaaaataactcagtaat

SEQ ID NO: 209554 - DNA, 27 bp, Artificial sequence
  SiRNA target sequence
tagcaactttaaaataactcagtaatc

SEQ ID NO: 209555 - DNA, 27 bp, Artificial sequence
  SiRNA target sequence
agcaactttaaaataactcagtaatcc

SEQ ID NO: 209556 - DNA, 27 bp, Artificial sequence
  SiRNA target sequence
gcaactttaaaataactcagtaatcct

SEQ ID NO: 209557 - DNA, 27 bp, Artificial sequence
  SiRNA target sequence
caactttaaaataactcagtaatcctg

SEQ ID NO: 209558 - DNA, 27 bp, Artificial sequence
  SiRNA target sequence
aactttaaaataactcagtaatcctgt

SEQ ID NO: 209559 - DNA, 27 bp, Artificial sequence
  SiRNA target sequence
actttaaaataactcagtaatcctgtt

SEQ ID NO: 209560 - DNA, 27 bp, Artificial sequence
  SiRNA target sequence
ctttaaaataactcagtaatcctgttc

SEQ ID NO: 209561 - DNA, 27 bp, Artificial sequence
  SiRNA target sequence
tttaaaataactcagtaatcctgttct

SEQ ID NO: 209562 - DNA, 27 bp, Artificial sequence
  SiRNA target sequence
ttaaaataactcagtaatcctgttctt

SEQ ID NO: 209563 - DNA, 27 bp, Artificial sequence
  SiRNA target sequence
taaaataactcagtaatcctgttcttg

SEQ ID NO: 209564 - DNA, 27 bp, Artificial sequence
  SiRNA target sequence
aaaataactcagtaatcctgttcttga

SEQ ID NO: 209565 - DNA, 27 bp, Artificial sequence
  SiRNA target sequence
aaataactcagtaatcctgttcttgaa

SEQ ID NO: 209566 - DNA, 27 bp, Artificial sequence
  SiRNA target sequence
aataactcagtaatcctgttcttgaat

SEQ ID NO: 209567 - DNA, 27 bp, Artificial sequence
  SiRNA target sequence
ataactcagtaatcctgttcttgaatt

SEQ ID NO: 209568 - DNA, 27 bp, Artificial sequence
  SiRNA target sequence
taactcagtaatcctgttcttgaattt

SEQ ID NO: 209569 - DNA, 27 bp, Artificial sequence
  SiRNA target sequence
aactcagtaatcctgttcttgaatttg

SEQ ID NO: 209570 - DNA, 27 bp, Artificial sequence
  SiRNA target sequence
actcagtaatcctgttcttgaatttgc

SEQ ID NO: 209571 - DNA, 27 bp, Artificial sequence
  SiRNA target sequence
ctcagtaatcctgttcttgaatttgct

SEQ ID NO: 209572 - DNA, 27 bp, Artificial sequence
  SiRNA target sequence
tcagtaatcctgttcttgaatttgcta

SEQ ID NO: 209573 - DNA, 27 bp, Artificial sequence
  SiRNA target sequence
cagtaatcctgttcttgaatttgctaa

SEQ ID NO: 209574 - DNA, 27 bp, Artificial sequence
  SiRNA target sequence
agtaatcctgttcttgaatttgctaat

SEQ ID NO: 209575 - DNA, 27 bp, Artificial sequence
  SiRNA target sequence
gtaatcctgttcttgaatttgctaatt

SEQ ID NO: 209576 - DNA, 27 bp, Artificial sequence
  SiRNA target sequence
taatcctgttcttgaatttgctaattg

SEQ ID NO: 209577 - DNA, 27 bp, Artificial sequence
  SiRNA target sequence
aatcctgttcttgaatttgctaattga

SEQ ID NO: 209578 - DNA, 27 bp, Artificial sequence
  SiRNA target sequence
atcctgttcttgaatttgctaattgat

SEQ ID NO: 209579 - DNA, 27 bp, Artificial sequence
  SiRNA target sequence
tcctgttcttgaatttgctaattgatc

SEQ ID NO: 209580 - DNA, 27 bp, Artificial sequence
  SiRNA target sequence
cctgttcttgaatttgctaattgatca

SEQ ID NO: 209581 - DNA, 27 bp, Artificial sequence
  SiRNA target sequence
ctgttcttgaatttgctaattgatcaa

SEQ ID NO: 209582 - DNA, 27 bp, Artificial sequence
  SiRNA target sequence
tgttcttgaatttgctaattgatcaat

SEQ ID NO: 209583 - DNA, 27 bp, Artificial sequence
  SiRNA target sequence
gttcttgaatttgctaattgatcaatc

SEQ ID NO: 209584 - DNA, 27 bp, Artificial sequence
  SiRNA target sequence
ttcttgaatttgctaattgatcaatct

SEQ ID NO: 209585 - DNA, 27 bp, Artificial sequence
  SiRNA target sequence
tcttgaatttgctaattgatcaatctc

SEQ ID NO: 209586 - DNA, 27 bp, Artificial sequence
  SiRNA target sequence
cttgaatttgctaattgatcaatctca

SEQ ID NO: 209587 - DNA, 27 bp, Artificial sequence
  SiRNA target sequence
ttgaatttgctaattgatcaatctcat

SEQ ID NO: 209588 - DNA, 27 bp, Artificial sequence
  SiRNA target sequence
tgaatttgctaattgatcaatctcatc

SEQ ID NO: 209589 - DNA, 27 bp, Artificial sequence
  SiRNA target sequence
gaatttgctaattgatcaatctcatct

SEQ ID NO: 209590 - DNA, 27 bp, Artificial sequence
  SiRNA target sequence
aatttgctaattgatcaatctcatctt

SEQ ID NO: 209591 - DNA, 27 bp, Artificial sequence
  SiRNA target sequence
atttgctaattgatcaatctcatcttc

SEQ ID NO: 209592 - DNA, 27 bp, Artificial sequence
  SiRNA target sequence
tttgctaattgatcaatctcatcttcc

SEQ ID NO: 209593 - DNA, 27 bp, Artificial sequence
  SiRNA target sequence
ttgctaattgatcaatctcatcttccg

SEQ ID NO: 209594 - DNA, 27 bp, Artificial sequence
  SiRNA target sequence
tgctaattgatcaatctcatcttccgt

SEQ ID NO: 209595 - DNA, 27 bp, Artificial sequence
  SiRNA target sequence
gctaattgatcaatctcatcttccgta

SEQ ID NO: 209596 - DNA, 27 bp, Artificial sequence
  SiRNA target sequence
ctaattgatcaatctcatcttccgtag

SEQ ID NO: 209597 - DNA, 27 bp, Artificial sequence
  SiRNA target sequence
taattgatcaatctcatcttccgtagg

SEQ ID NO: 209598 - DNA, 27 bp, Artificial sequence
  SiRNA target sequence
aattgatcaatctcatcttccgtaggt

SEQ ID NO: 209599 - DNA, 27 bp, Artificial sequence
  SiRNA target sequence
attgatcaatctcatcttccgtaggta

SEQ ID NO: 209600 - DNA, 27 bp, Artificial sequence
  SiRNA target sequence
ttgatcaatctcatcttccgtaggtaa

SEQ ID NO: 209601 - DNA, 27 bp, Artificial sequence
  SiRNA target sequence
tgatcaatctcatcttccgtaggtaag

SEQ ID NO: 209602 - DNA, 27 bp, Artificial sequence
  SiRNA target sequence
gatcaatctcatcttccgtaggtaagt

SEQ ID NO: 209603 - DNA, 27 bp, Artificial sequence
  SiRNA target sequence
atcaatctcatcttccgtaggtaagtt

SEQ ID NO: 209604 - DNA, 27 bp, Artificial sequence
  SiRNA target sequence
tcaatctcatcttccgtaggtaagttg

SEQ ID NO: 209605 - DNA, 27 bp, Artificial sequence
  SiRNA target sequence
caatctcatcttccgtaggtaagttgt

SEQ ID NO: 209606 - DNA, 27 bp, Artificial sequence
  SiRNA target sequence
aatctcatcttccgtaggtaagttgtt

SEQ ID NO: 209607 - DNA, 27 bp, Artificial sequence
  SiRNA target sequence
atctcatcttccgtaggtaagttgttt

SEQ ID NO: 209608 - DNA, 27 bp, Artificial sequence
  SiRNA target sequence
tctcatcttccgtaggtaagttgtttt

SEQ ID NO: 209609 - DNA, 27 bp, Artificial sequence
  SiRNA target sequence
ctcatcttccgtaggtaagttgttttc

SEQ ID NO: 209610 - DNA, 27 bp, Artificial sequence
  SiRNA target sequence
tcatcttccgtaggtaagttgttttca

SEQ ID NO: 209611 - DNA, 27 bp, Artificial sequence
  SiRNA target sequence
catcttccgtaggtaagttgttttcag

SEQ ID NO: 209612 - DNA, 27 bp, Artificial sequence
  SiRNA target sequence
atcttccgtaggtaagttgttttcagg

SEQ ID NO: 209613 - DNA, 27 bp, Artificial sequence
  SiRNA target sequence
tcttccgtaggtaagttgttttcaggt

SEQ ID NO: 209614 - DNA, 27 bp, Artificial sequence
  SiRNA target sequence
cttccgtaggtaagttgttttcaggtg

SEQ ID NO: 209615 - DNA, 27 bp, Artificial sequence
  SiRNA target sequence
ttccgtaggtaagttgttttcaggtgt

SEQ ID NO: 209616 - DNA, 27 bp, Artificial sequence
  SiRNA target sequence
tccgtaggtaagttgttttcaggtgtt

SEQ ID NO: 209617 - DNA, 27 bp, Artificial sequence
  SiRNA target sequence
ccgtaggtaagttgttttcaggtgttt

SEQ ID NO: 209618 - DNA, 27 bp, Artificial sequence
  SiRNA target sequence
cgtaggtaagttgttttcaggtgtttc

SEQ ID NO: 209619 - DNA, 27 bp, Artificial sequence
  SiRNA target sequence
gtaggtaagttgttttcaggtgtttca

SEQ ID NO: 209620 - DNA, 27 bp, Artificial sequence
  SiRNA target sequence
taggtaagttgttttcaggtgtttcat

SEQ ID NO: 209621 - DNA, 27 bp, Artificial sequence
  SiRNA target sequence
aggtaagttgttttcaggtgtttcatt

SEQ ID NO: 209622 - DNA, 27 bp, Artificial sequence
  SiRNA target sequence
ggtaagttgttttcaggtgtttcattt

SEQ ID NO: 209623 - DNA, 27 bp, Artificial sequence
  SiRNA target sequence
gtaagttgttttcaggtgtttcattta

SEQ ID NO: 209624 - DNA, 27 bp, Artificial sequence
  SiRNA target sequence
taagttgttttcaggtgtttcatttat

SEQ ID NO: 209625 - DNA, 27 bp, Artificial sequence
  SiRNA target sequence
aagttgttttcaggtgtttcatttatt

SEQ ID NO: 209626 - DNA, 27 bp, Artificial sequence
  SiRNA target sequence
agttgttttcaggtgtttcatttatta

SEQ ID NO: 209627 - DNA, 27 bp, Artificial sequence
  SiRNA target sequence
gttgttttcaggtgtttcatttattac

SEQ ID NO: 209628 - DNA, 27 bp, Artificial sequence
  SiRNA target sequence
ttgttttcaggtgtttcatttattaca

SEQ ID NO: 209629 - DNA, 27 bp, Artificial sequence
  SiRNA target sequence
tgttttcaggtgtttcatttattacac

SEQ ID NO: 209630 - DNA, 27 bp, Artificial sequence
  SiRNA target sequence
gttttcaggtgtttcatttattacact

SEQ ID NO: 209631 - DNA, 27 bp, Artificial sequence
  SiRNA target sequence
ttttcaggtgtttcatttattacactc

SEQ ID NO: 209632 - DNA, 27 bp, Artificial sequence
  SiRNA target sequence
tttcaggtgtttcatttattacactca

SEQ ID NO: 209633 - DNA, 27 bp, Artificial sequence
  SiRNA target sequence
ttcaggtgtttcatttattacactcat

SEQ ID NO: 209634 - DNA, 19 bp, Artificial sequence
  SiRNA target sequence
atgattgagaggggtatta

SEQ ID NO: 209635 - DNA, 19 bp, Artificial sequence
  SiRNA target sequence
tgattgagaggggtattat

SEQ ID NO: 209636 - DNA, 19 bp, Artificial sequence
  SiRNA target sequence
gattgagaggggtattatg

SEQ ID NO: 209637 - DNA, 19 bp, Artificial sequence
  SiRNA target sequence
attgagaggggtattatgg

SEQ ID NO: 209638 - DNA, 19 bp, Artificial sequence
  SiRNA target sequence
ttgagaggggtattatgga

SEQ ID NO: 209639 - DNA, 19 bp, Artificial sequence
  SiRNA target sequence
tgagaggggtattatggaa

SEQ ID NO: 209640 - DNA, 19 bp, Artificial sequence
  SiRNA target sequence
gagaggggtattatggaaa

SEQ ID NO: 209641 - DNA, 19 bp, Artificial sequence
  SiRNA target sequence
agaggggtattatggaaaa

SEQ ID NO: 209642 - DNA, 19 bp, Artificial sequence
  SiRNA target sequence
gaggggtattatggaaaaa

SEQ ID NO: 209643 - DNA, 19 bp, Artificial sequence
  SiRNA target sequence
aggggtattatggaaaaaa

SEQ ID NO: 209644 - DNA, 19 bp, Artificial sequence
  SiRNA target sequence
ggggtattatggaaaaaat

SEQ ID NO: 209645 - DNA, 19 bp, Artificial sequence
  SiRNA target sequence
gggtattatggaaaaaata

SEQ ID NO: 209646 - DNA, 19 bp, Artificial sequence
  SiRNA target sequence
ggtattatggaaaaaataa

SEQ ID NO: 209647 - DNA, 19 bp, Artificial sequence
  SiRNA target sequence
gtattatggaaaaaataaa

SEQ ID NO: 209648 - DNA, 19 bp, Artificial sequence
  SiRNA target sequence
tattatggaaaaaataaaa

SEQ ID NO: 209649 - DNA, 19 bp, Artificial sequence
  SiRNA target sequence
attatggaaaaaataaaaa

SEQ ID NO: 209650 - DNA, 19 bp, Artificial sequence
  SiRNA target sequence
ttatggaaaaaataaaaaa

SEQ ID NO: 209651 - DNA, 19 bp, Artificial sequence
  SiRNA target sequence
tatggaaaaaataaaaaat

SEQ ID NO: 209652 - DNA, 19 bp, Artificial sequence
  SiRNA target sequence
atggaaaaaataaaaaatt

SEQ ID NO: 209653 - DNA, 19 bp, Artificial sequence
  SiRNA target sequence
tggaaaaaataaaaaattt

SEQ ID NO: 209654 - DNA, 19 bp, Artificial sequence
  SiRNA target sequence
ggaaaaaataaaaaattta

SEQ ID NO: 209655 - DNA, 19 bp, Artificial sequence
  SiRNA target sequence
gaaaaaataaaaaatttat

SEQ ID NO: 209656 - DNA, 19 bp, Artificial sequence
  SiRNA target sequence
aaaaaataaaaaatttatt

SEQ ID NO: 209657 - DNA, 19 bp, Artificial sequence
  SiRNA target sequence
aaaaataaaaaatttatta

SEQ ID NO: 209658 - DNA, 19 bp, Artificial sequence
  SiRNA target sequence
aaaataaaaaatttattaa

SEQ ID NO: 209659 - DNA, 19 bp, Artificial sequence
  SiRNA target sequence
aaataaaaaatttattaac

SEQ ID NO: 209660 - DNA, 19 bp, Artificial sequence
  SiRNA target sequence
aataaaaaatttattaaca

SEQ ID NO: 209661 - DNA, 19 bp, Artificial sequence
  SiRNA target sequence
ataaaaaatttattaacag

SEQ ID NO: 209662 - DNA, 19 bp, Artificial sequence
  SiRNA target sequence
taaaaaatttattaacaga

SEQ ID NO: 209663 - DNA, 19 bp, Artificial sequence
  SiRNA target sequence
aaaaaatttattaacagag

SEQ ID NO: 209664 - DNA, 19 bp, Artificial sequence
  SiRNA target sequence
aaaaatttattaacagagg

SEQ ID NO: 209665 - DNA, 19 bp, Artificial sequence
  SiRNA target sequence
aaaatttattaacagagga

SEQ ID NO: 209666 - DNA, 19 bp, Artificial sequence
  SiRNA target sequence
aaatttattaacagaggat

SEQ ID NO: 209667 - DNA, 19 bp, Artificial sequence
  SiRNA target sequence
aatttattaacagaggatg

SEQ ID NO: 209668 - DNA, 19 bp, Artificial sequence
  SiRNA target sequence
atttattaacagaggatga

SEQ ID NO: 209669 - DNA, 19 bp, Artificial sequence
  SiRNA target sequence
tttattaacagaggatgaa

SEQ ID NO: 209670 - DNA, 19 bp, Artificial sequence
  SiRNA target sequence
ttattaacagaggatgaag

SEQ ID NO: 209671 - DNA, 19 bp, Artificial sequence
  SiRNA target sequence
tattaacagaggatgaagt

SEQ ID NO: 209672 - DNA, 19 bp, Artificial sequence
  SiRNA target sequence
attaacagaggatgaagta

SEQ ID NO: 209673 - DNA, 19 bp, Artificial sequence
  SiRNA target sequence
ttaacagaggatgaagtag

SEQ ID NO: 209674 - DNA, 19 bp, Artificial sequence
  SiRNA target sequence
taacagaggatgaagtaga

SEQ ID NO: 209675 - DNA, 19 bp, Artificial sequence
  SiRNA target sequence
aacagaggatgaagtagaa

SEQ ID NO: 209676 - DNA, 19 bp, Artificial sequence
  SiRNA target sequence
acagaggatgaagtagaag

SEQ ID NO: 209677 - DNA, 19 bp, Artificial sequence
  SiRNA target sequence
cagaggatgaagtagaagc

SEQ ID NO: 209678 - DNA, 19 bp, Artificial sequence
  SiRNA target sequence
agaggatgaagtagaagca

SEQ ID NO: 209679 - DNA, 19 bp, Artificial sequence
  SiRNA target sequence
gaggatgaagtagaagcag

SEQ ID NO: 209680 - DNA, 19 bp, Artificial sequence
  SiRNA target sequence
aggatgaagtagaagcaga

SEQ ID NO: 209681 - DNA, 19 bp, Artificial sequence
  SiRNA target sequence
ggatgaagtagaagcagaa

SEQ ID NO: 209682 - DNA, 19 bp, Artificial sequence
  SiRNA target sequence
gatgaagtagaagcagaag

SEQ ID NO: 209683 - DNA, 19 bp, Artificial sequence
  SiRNA target sequence
atgaagtagaagcagaagc

SEQ ID NO: 209684 - DNA, 19 bp, Artificial sequence
  SiRNA target sequence
tgaagtagaagcagaagca

SEQ ID NO: 209685 - DNA, 19 bp, Artificial sequence
  SiRNA target sequence
gaagtagaagcagaagcaa

SEQ ID NO: 209686 - DNA, 19 bp, Artificial sequence
  SiRNA target sequence
aagtagaagcagaagcaaa

SEQ ID NO: 209687 - DNA, 19 bp, Artificial sequence
  SiRNA target sequence
agtagaagcagaagcaaat

SEQ ID NO: 209688 - DNA, 19 bp, Artificial sequence
  SiRNA target sequence
gtagaagcagaagcaaatt

SEQ ID NO: 209689 - DNA, 19 bp, Artificial sequence
  SiRNA target sequence
tagaagcagaagcaaattc

SEQ ID NO: 209690 - DNA, 19 bp, Artificial sequence
  SiRNA target sequence
agaagcagaagcaaattct

SEQ ID NO: 209691 - DNA, 19 bp, Artificial sequence
  SiRNA target sequence
gaagcagaagcaaattctg

SEQ ID NO: 209692 - DNA, 19 bp, Artificial sequence
  SiRNA target sequence
aagcagaagcaaattctgg

SEQ ID NO: 209693 - DNA, 19 bp, Artificial sequence
  SiRNA target sequence
agcagaagcaaattctgga

SEQ ID NO: 209694 - DNA, 19 bp, Artificial sequence
  SiRNA target sequence
gcagaagcaaattctggaa

SEQ ID NO: 209695 - DNA, 19 bp, Artificial sequence
  SiRNA target sequence
cagaagcaaattctggaag

SEQ ID NO: 209696 - DNA, 19 bp, Artificial sequence
  SiRNA target sequence
agaagcaaattctggaagg

SEQ ID NO: 209697 - DNA, 19 bp, Artificial sequence
  SiRNA target sequence
gaagcaaattctggaaggg

SEQ ID NO: 209698 - DNA, 19 bp, Artificial sequence
  SiRNA target sequence
aagcaaattctggaagggg

SEQ ID NO: 209699 - DNA, 19 bp, Artificial sequence
  SiRNA target sequence
agcaaattctggaaggggc

SEQ ID NO: 209700 - DNA, 19 bp, Artificial sequence
  SiRNA target sequence
gcaaattctggaaggggca

SEQ ID NO: 209701 - DNA, 19 bp, Artificial sequence
  SiRNA target sequence
caaattctggaaggggcat

SEQ ID NO: 209702 - DNA, 19 bp, Artificial sequence
  SiRNA target sequence
aaattctggaaggggcatt

SEQ ID NO: 209703 - DNA, 19 bp, Artificial sequence
  SiRNA target sequence
aattctggaaggggcattt

SEQ ID NO: 209704 - DNA, 19 bp, Artificial sequence
  SiRNA target sequence
attctggaaggggcatttt

SEQ ID NO: 209705 - DNA, 19 bp, Artificial sequence
  SiRNA target sequence
ttctggaaggggcatttta

SEQ ID NO: 209706 - DNA, 19 bp, Artificial sequence
  SiRNA target sequence
tctggaaggggcattttat

SEQ ID NO: 209707 - DNA, 19 bp, Artificial sequence
  SiRNA target sequence
ctggaaggggcattttatc

SEQ ID NO: 209708 - DNA, 19 bp, Artificial sequence
  SiRNA target sequence
tggaaggggcattttatca

SEQ ID NO: 209709 - DNA, 19 bp, Artificial sequence
  SiRNA target sequence
ggaaggggcattttatcaa

SEQ ID NO: 209710 - DNA, 19 bp, Artificial sequence
  SiRNA target sequence
gaaggggcattttatcaat

SEQ ID NO: 209711 - DNA, 19 bp, Artificial sequence
  SiRNA target sequence
aaggggcattttatcaata

SEQ ID NO: 209712 - DNA, 19 bp, Artificial sequence
  SiRNA target sequence
aggggcattttatcaatat

SEQ ID NO: 209713 - DNA, 19 bp, Artificial sequence
  SiRNA target sequence
ggggcattttatcaatatt

SEQ ID NO: 209714 - DNA, 19 bp, Artificial sequence
  SiRNA target sequence
gggcattttatcaatattt

SEQ ID NO: 209715 - DNA, 19 bp, Artificial sequence
  SiRNA target sequence
ggcattttatcaatattta

SEQ ID NO: 209716 - DNA, 19 bp, Artificial sequence
  SiRNA target sequence
gcattttatcaatatttag

SEQ ID NO: 209717 - DNA, 19 bp, Artificial sequence
  SiRNA target sequence
cattttatcaatatttaga

SEQ ID NO: 209718 - DNA, 19 bp, Artificial sequence
  SiRNA target sequence
attttatcaatatttagaa

SEQ ID NO: 209719 - DNA, 19 bp, Artificial sequence
  SiRNA target sequence
ttttatcaatatttagaat

SEQ ID NO: 209720 - DNA, 19 bp, Artificial sequence
  SiRNA target sequence
tttatcaatatttagaatt

SEQ ID NO: 209721 - DNA, 19 bp, Artificial sequence
  SiRNA target sequence
ttatcaatatttagaattg

SEQ ID NO: 209722 - DNA, 19 bp, Artificial sequence
  SiRNA target sequence
tatcaatatttagaattgc

SEQ ID NO: 209723 - DNA, 19 bp, Artificial sequence
  SiRNA target sequence
atcaatatttagaattgct

SEQ ID NO: 209724 - DNA, 19 bp, Artificial sequence
  SiRNA target sequence
tcaatatttagaattgcta

SEQ ID NO: 209725 - DNA, 19 bp, Artificial sequence
  SiRNA target sequence
caatatttagaattgctaa

SEQ ID NO: 209726 - DNA, 19 bp, Artificial sequence
  SiRNA target sequence
aatatttagaattgctaag

SEQ ID NO: 209727 - DNA, 19 bp, Artificial sequence
  SiRNA target sequence
atatttagaattgctaagg

SEQ ID NO: 209728 - DNA, 19 bp, Artificial sequence
  SiRNA target sequence
tatttagaattgctaaggt

SEQ ID NO: 209729 - DNA, 19 bp, Artificial sequence
  SiRNA target sequence
atttagaattgctaaggta

SEQ ID NO: 209730 - DNA, 19 bp, Artificial sequence
  SiRNA target sequence
tttagaattgctaaggtag

SEQ ID NO: 209731 - DNA, 19 bp, Artificial sequence
  SiRNA target sequence
ttagaattgctaaggtaga

SEQ ID NO: 209732 - DNA, 19 bp, Artificial sequence
  SiRNA target sequence
tagaattgctaaggtagaa

SEQ ID NO: 209733 - DNA, 19 bp, Artificial sequence
  SiRNA target sequence
agaattgctaaggtagaaa

SEQ ID NO: 209734 - DNA, 19 bp, Artificial sequence
  SiRNA target sequence
gaattgctaaggtagaaag

SEQ ID NO: 209735 - DNA, 19 bp, Artificial sequence
  SiRNA target sequence
aattgctaaggtagaaaga

SEQ ID NO: 209736 - DNA, 19 bp, Artificial sequence
  SiRNA target sequence
attgctaaggtagaaagaa

SEQ ID NO: 209737 - DNA, 19 bp, Artificial sequence
  SiRNA target sequence
ttgctaaggtagaaagaag

SEQ ID NO: 209738 - DNA, 19 bp, Artificial sequence
  SiRNA target sequence
tgctaaggtagaaagaaga

SEQ ID NO: 209739 - DNA, 19 bp, Artificial sequence
  SiRNA target sequence
gctaaggtagaaagaagaa

SEQ ID NO: 209740 - DNA, 19 bp, Artificial sequence
  SiRNA target sequence
ctaaggtagaaagaagaat

SEQ ID NO: 209741 - DNA, 19 bp, Artificial sequence
  SiRNA target sequence
taaggtagaaagaagaatg

SEQ ID NO: 209742 - DNA, 19 bp, Artificial sequence
  SiRNA target sequence
aaggtagaaagaagaatgt

SEQ ID NO: 209743 - DNA, 19 bp, Artificial sequence
  SiRNA target sequence
aggtagaaagaagaatgtt

SEQ ID NO: 209744 - DNA, 19 bp, Artificial sequence
  SiRNA target sequence
ggtagaaagaagaatgttt

SEQ ID NO: 209745 - DNA, 19 bp, Artificial sequence
  SiRNA target sequence
gtagaaagaagaatgtttt

SEQ ID NO: 209746 - DNA, 19 bp, Artificial sequence
  SiRNA target sequence
tagaaagaagaatgttttg

SEQ ID NO: 209747 - DNA, 19 bp, Artificial sequence
  SiRNA target sequence
agaaagaagaatgttttgg

SEQ ID NO: 209748 - DNA, 19 bp, Artificial sequence
  SiRNA target sequence
gaaagaagaatgttttggc

SEQ ID NO: 209749 - DNA, 19 bp, Artificial sequence
  SiRNA target sequence
aaagaagaatgttttggct

SEQ ID NO: 209750 - DNA, 19 bp, Artificial sequence
  SiRNA target sequence
aagaagaatgttttggctt

SEQ ID NO: 209751 - DNA, 19 bp, Artificial sequence
  SiRNA target sequence
agaagaatgttttggctta

SEQ ID NO: 209752 - DNA, 19 bp, Artificial sequence
  SiRNA target sequence
gaagaatgttttggcttat

SEQ ID NO: 209753 - DNA, 19 bp, Artificial sequence
  SiRNA target sequence
aagaatgttttggcttatg

SEQ ID NO: 209754 - DNA, 19 bp, Artificial sequence
  SiRNA target sequence
agaatgttttggcttatga

SEQ ID NO: 209755 - DNA, 19 bp, Artificial sequence
  SiRNA target sequence
gaatgttttggcttatgac

SEQ ID NO: 209756 - DNA, 19 bp, Artificial sequence
  SiRNA target sequence
aatgttttggcttatgacg

SEQ ID NO: 209757 - DNA, 19 bp, Artificial sequence
  SiRNA target sequence
atgttttggcttatgacgc

SEQ ID NO: 209758 - DNA, 19 bp, Artificial sequence
  SiRNA target sequence
tgttttggcttatgacgct

SEQ ID NO: 209759 - DNA, 19 bp, Artificial sequence
  SiRNA target sequence
gttttggcttatgacgctt

SEQ ID NO: 209760 - DNA, 19 bp, Artificial sequence
  SiRNA target sequence
ttttggcttatgacgctta

SEQ ID NO: 209761 - DNA, 19 bp, Artificial sequence
  SiRNA target sequence
tttggcttatgacgcttat

SEQ ID NO: 209762 - DNA, 19 bp, Artificial sequence
  SiRNA target sequence
ttggcttatgacgcttatg

SEQ ID NO: 209763 - DNA, 19 bp, Artificial sequence
  SiRNA target sequence
tggcttatgacgcttatgt

SEQ ID NO: 209764 - DNA, 19 bp, Artificial sequence
  SiRNA target sequence
ggcttatgacgcttatgtt

SEQ ID NO: 209765 - DNA, 19 bp, Artificial sequence
  SiRNA target sequence
gcttatgacgcttatgttt

SEQ ID NO: 209766 - DNA, 19 bp, Artificial sequence
  SiRNA target sequence
cttatgacgcttatgtttt

SEQ ID NO: 209767 - DNA, 19 bp, Artificial sequence
  SiRNA target sequence
ttatgacgcttatgttttc

SEQ ID NO: 209768 - DNA, 19 bp, Artificial sequence
  SiRNA target sequence
tatgacgcttatgttttcg

SEQ ID NO: 209769 - DNA, 19 bp, Artificial sequence
  SiRNA target sequence
atgacgcttatgttttcgc

SEQ ID NO: 209770 - DNA, 19 bp, Artificial sequence
  SiRNA target sequence
tgacgcttatgttttcgct

SEQ ID NO: 209771 - DNA, 19 bp, Artificial sequence
  SiRNA target sequence
gacgcttatgttttcgctt

SEQ ID NO: 209772 - DNA, 19 bp, Artificial sequence
  SiRNA target sequence
acgcttatgttttcgctta

SEQ ID NO: 209773 - DNA, 19 bp, Artificial sequence
  SiRNA target sequence
cgcttatgttttcgcttat

SEQ ID NO: 209774 - DNA, 19 bp, Artificial sequence
  SiRNA target sequence
gcttatgttttcgcttatt

SEQ ID NO: 209775 - DNA, 19 bp, Artificial sequence
  SiRNA target sequence
cttatgttttcgcttattt

SEQ ID NO: 209776 - DNA, 19 bp, Artificial sequence
  SiRNA target sequence
ttatgttttcgcttatttc

SEQ ID NO: 209777 - DNA, 19 bp, Artificial sequence
  SiRNA target sequence
tatgttttcgcttatttcc

SEQ ID NO: 209778 - DNA, 19 bp, Artificial sequence
  SiRNA target sequence
atgttttcgcttatttcct

SEQ ID NO: 209779 - DNA, 19 bp, Artificial sequence
  SiRNA target sequence
tgttttcgcttatttcctt

SEQ ID NO: 209780 - DNA, 19 bp, Artificial sequence
  SiRNA target sequence
gttttcgcttatttccttt

SEQ ID NO: 209781 - DNA, 19 bp, Artificial sequence
  SiRNA target sequence
ttttcgcttatttccttta

SEQ ID NO: 209782 - DNA, 19 bp, Artificial sequence
  SiRNA target sequence
tttcgcttatttcctttat

SEQ ID NO: 209783 - DNA, 19 bp, Artificial sequence
  SiRNA target sequence
ttcgcttatttcctttatt

SEQ ID NO: 209784 - DNA, 19 bp, Artificial sequence
  SiRNA target sequence
tcgcttatttcctttattt

SEQ ID NO: 209785 - DNA, 19 bp, Artificial sequence
  SiRNA target sequence
cgcttatttcctttattta

SEQ ID NO: 209786 - DNA, 19 bp, Artificial sequence
  SiRNA target sequence
gcttatttcctttatttac

SEQ ID NO: 209787 - DNA, 19 bp, Artificial sequence
  SiRNA target sequence
cttatttcctttatttact

SEQ ID NO: 209788 - DNA, 19 bp, Artificial sequence
  SiRNA target sequence
ttatttcctttatttactc

SEQ ID NO: 209789 - DNA, 19 bp, Artificial sequence
  SiRNA target sequence
tatttcctttatttactca

SEQ ID NO: 209790 - DNA, 19 bp, Artificial sequence
  SiRNA target sequence
atttcctttatttactcag

SEQ ID NO: 209791 - DNA, 19 bp, Artificial sequence
  SiRNA target sequence
tttcctttatttactcagt

SEQ ID NO: 209792 - DNA, 19 bp, Artificial sequence
  SiRNA target sequence
ttcctttatttactcagta

SEQ ID NO: 209793 - DNA, 19 bp, Artificial sequence
  SiRNA target sequence
tcctttatttactcagtag

SEQ ID NO: 209794 - DNA, 19 bp, Artificial sequence
  SiRNA target sequence
cctttatttactcagtagg

SEQ ID NO: 209795 - DNA, 19 bp, Artificial sequence
  SiRNA target sequence
ctttatttactcagtagga

SEQ ID NO: 209796 - DNA, 19 bp, Artificial sequence
  SiRNA target sequence
tttatttactcagtaggac

SEQ ID NO: 209797 - DNA, 19 bp, Artificial sequence
  SiRNA target sequence
ttatttactcagtaggacg

SEQ ID NO: 209798 - DNA, 19 bp, Artificial sequence
  SiRNA target sequence
tatttactcagtaggacga

SEQ ID NO: 209799 - DNA, 19 bp, Artificial sequence
  SiRNA target sequence
atttactcagtaggacgag

SEQ ID NO: 209800 - DNA, 19 bp, Artificial sequence
  SiRNA target sequence
tttactcagtaggacgagt

SEQ ID NO: 209801 - DNA, 19 bp, Artificial sequence
  SiRNA target sequence
ttactcagtaggacgagtg

SEQ ID NO: 209802 - DNA, 19 bp, Artificial sequence
  SiRNA target sequence
tactcagtaggacgagtgt

SEQ ID NO: 209803 - DNA, 19 bp, Artificial sequence
  SiRNA target sequence
actcagtaggacgagtgtt

SEQ ID NO: 209804 - DNA, 19 bp, Artificial sequence
  SiRNA target sequence
ctcagtaggacgagtgtta

SEQ ID NO: 209805 - DNA, 19 bp, Artificial sequence
  SiRNA target sequence
tcagtaggacgagtgttaa

SEQ ID NO: 209806 - DNA, 19 bp, Artificial sequence
  SiRNA target sequence
cagtaggacgagtgttaaa

SEQ ID NO: 209807 - DNA, 19 bp, Artificial sequence
  SiRNA target sequence
agtaggacgagtgttaaaa

SEQ ID NO: 209808 - DNA, 19 bp, Artificial sequence
  SiRNA target sequence
gtaggacgagtgttaaaag

SEQ ID NO: 209809 - DNA, 19 bp, Artificial sequence
  SiRNA target sequence
taggacgagtgttaaaaga

SEQ ID NO: 209810 - DNA, 19 bp, Artificial sequence
  SiRNA target sequence
aggacgagtgttaaaagat

SEQ ID NO: 209811 - DNA, 19 bp, Artificial sequence
  SiRNA target sequence
ggacgagtgttaaaagatg

SEQ ID NO: 209812 - DNA, 19 bp, Artificial sequence
  SiRNA target sequence
gacgagtgttaaaagatgc

SEQ ID NO: 209813 - DNA, 19 bp, Artificial sequence
  SiRNA target sequence
acgagtgttaaaagatgca

SEQ ID NO: 209814 - DNA, 19 bp, Artificial sequence
  SiRNA target sequence
cgagtgttaaaagatgcag

SEQ ID NO: 209815 - DNA, 19 bp, Artificial sequence
  SiRNA target sequence
gagtgttaaaagatgcagc

SEQ ID NO: 209816 - DNA, 19 bp, Artificial sequence
  SiRNA target sequence
agtgttaaaagatgcagca

SEQ ID NO: 209817 - DNA, 19 bp, Artificial sequence
  SiRNA target sequence
gtgttaaaagatgcagcag

SEQ ID NO: 209818 - DNA, 19 bp, Artificial sequence
  SiRNA target sequence
tgttaaaagatgcagcagt

SEQ ID NO: 209819 - DNA, 19 bp, Artificial sequence
  SiRNA target sequence
gttaaaagatgcagcagtt

SEQ ID NO: 209820 - DNA, 19 bp, Artificial sequence
  SiRNA target sequence
ttaaaagatgcagcagttc

SEQ ID NO: 209821 - DNA, 19 bp, Artificial sequence
  SiRNA target sequence
taaaagatgcagcagttct

SEQ ID NO: 209822 - DNA, 19 bp, Artificial sequence
  SiRNA target sequence
aaaagatgcagcagttctt

SEQ ID NO: 209823 - DNA, 19 bp, Artificial sequence
  SiRNA target sequence
aaagatgcagcagttctta

SEQ ID NO: 209824 - DNA, 19 bp, Artificial sequence
  SiRNA target sequence
aagatgcagcagttcttag

SEQ ID NO: 209825 - DNA, 19 bp, Artificial sequence
  SiRNA target sequence
agatgcagcagttcttagt

SEQ ID NO: 209826 - DNA, 19 bp, Artificial sequence
  SiRNA target sequence
gatgcagcagttcttagta

SEQ ID NO: 209827 - DNA, 19 bp, Artificial sequence
  SiRNA target sequence
atgcagcagttcttagtag

SEQ ID NO: 209828 - DNA, 19 bp, Artificial sequence
  SiRNA target sequence
tgcagcagttcttagtaga

SEQ ID NO: 209829 - DNA, 19 bp, Artificial sequence
  SiRNA target sequence
gcagcagttcttagtagac

SEQ ID NO: 209830 - DNA, 19 bp, Artificial sequence
  SiRNA target sequence
cagcagttcttagtagaca

SEQ ID NO: 209831 - DNA, 19 bp, Artificial sequence
  SiRNA target sequence
agcagttcttagtagacag

SEQ ID NO: 209832 - DNA, 19 bp, Artificial sequence
  SiRNA target sequence
gcagttcttagtagacaga

SEQ ID NO: 209833 - DNA, 19 bp, Artificial sequence
  SiRNA target sequence
cagttcttagtagacagat

SEQ ID NO: 209834 - DNA, 19 bp, Artificial sequence
  SiRNA target sequence
agttcttagtagacagatg

SEQ ID NO: 209835 - DNA, 19 bp, Artificial sequence
  SiRNA target sequence
gttcttagtagacagatgc

SEQ ID NO: 209836 - DNA, 19 bp, Artificial sequence
  SiRNA target sequence
ttcttagtagacagatgcc

SEQ ID NO: 209837 - DNA, 19 bp, Artificial sequence
  SiRNA target sequence
tcttagtagacagatgcca

SEQ ID NO: 209838 - DNA, 19 bp, Artificial sequence
  SiRNA target sequence
cttagtagacagatgccac

SEQ ID NO: 209839 - DNA, 19 bp, Artificial sequence
  SiRNA target sequence
ttagtagacagatgccact

SEQ ID NO: 209840 - DNA, 19 bp, Artificial sequence
  SiRNA target sequence
tagtagacagatgccacta

SEQ ID NO: 209841 - DNA, 19 bp, Artificial sequence
  SiRNA target sequence
agtagacagatgccactat

SEQ ID NO: 209842 - DNA, 19 bp, Artificial sequence
  SiRNA target sequence
gtagacagatgccactatc

SEQ ID NO: 209843 - DNA, 19 bp, Artificial sequence
  SiRNA target sequence
tagacagatgccactatcc

SEQ ID NO: 209844 - DNA, 19 bp, Artificial sequence
  SiRNA target sequence
agacagatgccactatcca

SEQ ID NO: 209845 - DNA, 19 bp, Artificial sequence
  SiRNA target sequence
gacagatgccactatccat

SEQ ID NO: 209846 - DNA, 19 bp, Artificial sequence
  SiRNA target sequence
acagatgccactatccatt

SEQ ID NO: 209847 - DNA, 19 bp, Artificial sequence
  SiRNA target sequence
cagatgccactatccatta

SEQ ID NO: 209848 - DNA, 19 bp, Artificial sequence
  SiRNA target sequence
agatgccactatccattaa

SEQ ID NO: 209849 - DNA, 19 bp, Artificial sequence
  SiRNA target sequence
gatgccactatccattaat

SEQ ID NO: 209850 - DNA, 19 bp, Artificial sequence
  SiRNA target sequence
atgccactatccattaatt

SEQ ID NO: 209851 - DNA, 19 bp, Artificial sequence
  SiRNA target sequence
tgccactatccattaattg

SEQ ID NO: 209852 - DNA, 19 bp, Artificial sequence
  SiRNA target sequence
gccactatccattaattgt

SEQ ID NO: 209853 - DNA, 19 bp, Artificial sequence
  SiRNA target sequence
ccactatccattaattgtc

SEQ ID NO: 209854 - DNA, 19 bp, Artificial sequence
  SiRNA target sequence
cactatccattaattgtct

SEQ ID NO: 209855 - DNA, 19 bp, Artificial sequence
  SiRNA target sequence
actatccattaattgtctt

SEQ ID NO: 209856 - DNA, 19 bp, Artificial sequence
  SiRNA target sequence
ctatccattaattgtctta

SEQ ID NO: 209857 - DNA, 19 bp, Artificial sequence
  SiRNA target sequence
tatccattaattgtcttaa

SEQ ID NO: 209858 - DNA, 19 bp, Artificial sequence
  SiRNA target sequence
atccattaattgtcttaaa

SEQ ID NO: 209859 - DNA, 19 bp, Artificial sequence
  SiRNA target sequence
tccattaattgtcttaaaa

SEQ ID NO: 209860 - DNA, 19 bp, Artificial sequence
  SiRNA target sequence
ccattaattgtcttaaaag

SEQ ID NO: 209861 - DNA, 19 bp, Artificial sequence
  SiRNA target sequence
cattaattgtcttaaaagc

SEQ ID NO: 209862 - DNA, 19 bp, Artificial sequence
  SiRNA target sequence
attaattgtcttaaaagct

SEQ ID NO: 209863 - DNA, 19 bp, Artificial sequence
  SiRNA target sequence
ttaattgtcttaaaagctt

SEQ ID NO: 209864 - DNA, 19 bp, Artificial sequence
  SiRNA target sequence
taattgtcttaaaagcttt

SEQ ID NO: 209865 - DNA, 19 bp, Artificial sequence
  SiRNA target sequence
aattgtcttaaaagctttg

SEQ ID NO: 209866 - DNA, 19 bp, Artificial sequence
  SiRNA target sequence
attgtcttaaaagctttgt

SEQ ID NO: 209867 - DNA, 19 bp, Artificial sequence
  SiRNA target sequence
ttgtcttaaaagctttgta

SEQ ID NO: 209868 - DNA, 19 bp, Artificial sequence
  SiRNA target sequence
tgtcttaaaagctttgtaa

SEQ ID NO: 209869 - DNA, 19 bp, Artificial sequence
  SiRNA target sequence
gtcttaaaagctttgtaat

SEQ ID NO: 209870 - DNA, 19 bp, Artificial sequence
  SiRNA target sequence
tcttaaaagctttgtaatt

SEQ ID NO: 209871 - DNA, 19 bp, Artificial sequence
  SiRNA target sequence
cttaaaagctttgtaattt

SEQ ID NO: 209872 - DNA, 19 bp, Artificial sequence
  SiRNA target sequence
ttaaaagctttgtaatttt

SEQ ID NO: 209873 - DNA, 19 bp, Artificial sequence
  SiRNA target sequence
taaaagctttgtaatttta

SEQ ID NO: 209874 - DNA, 19 bp, Artificial sequence
  SiRNA target sequence
aaaagctttgtaattttac

SEQ ID NO: 209875 - DNA, 19 bp, Artificial sequence
  SiRNA target sequence
aaagctttgtaattttacc

SEQ ID NO: 209876 - DNA, 19 bp, Artificial sequence
  SiRNA target sequence
aagctttgtaattttacca

SEQ ID NO: 209877 - DNA, 19 bp, Artificial sequence
  SiRNA target sequence
agctttgtaattttaccag

SEQ ID NO: 209878 - DNA, 19 bp, Artificial sequence
  SiRNA target sequence
gctttgtaattttaccagt

SEQ ID NO: 209879 - DNA, 19 bp, Artificial sequence
  SiRNA target sequence
ctttgtaattttaccagtt

SEQ ID NO: 209880 - DNA, 19 bp, Artificial sequence
  SiRNA target sequence
tttgtaattttaccagtta

SEQ ID NO: 209881 - DNA, 19 bp, Artificial sequence
  SiRNA target sequence
ttgtaattttaccagttac

SEQ ID NO: 209882 - DNA, 19 bp, Artificial sequence
  SiRNA target sequence
tgtaattttaccagttact

SEQ ID NO: 209883 - DNA, 19 bp, Artificial sequence
  SiRNA target sequence
gtaattttaccagttactc

SEQ ID NO: 209884 - DNA, 19 bp, Artificial sequence
  SiRNA target sequence
taattttaccagttactct

SEQ ID NO: 209885 - DNA, 19 bp, Artificial sequence
  SiRNA target sequence
aattttaccagttactctt

SEQ ID NO: 209886 - DNA, 19 bp, Artificial sequence
  SiRNA target sequence
attttaccagttactcttg

SEQ ID NO: 209887 - DNA, 19 bp, Artificial sequence
  SiRNA target sequence
ttttaccagttactcttgt

SEQ ID NO: 209888 - DNA, 19 bp, Artificial sequence
  SiRNA target sequence
tttaccagttactcttgtt

SEQ ID NO: 209889 - DNA, 19 bp, Artificial sequence
  SiRNA target sequence
ttaccagttactcttgttt

SEQ ID NO: 209890 - DNA, 19 bp, Artificial sequence
  SiRNA target sequence
taccagttactcttgtttg

SEQ ID NO: 209891 - DNA, 19 bp, Artificial sequence
  SiRNA target sequence
accagttactcttgtttgt

SEQ ID NO: 209892 - DNA, 19 bp, Artificial sequence
  SiRNA target sequence
ccagttactcttgtttgtg

SEQ ID NO: 209893 - DNA, 19 bp, Artificial sequence
  SiRNA target sequence
cagttactcttgtttgtgt

SEQ ID NO: 209894 - DNA, 19 bp, Artificial sequence
  SiRNA target sequence
agttactcttgtttgtgta

SEQ ID NO: 209895 - DNA, 19 bp, Artificial sequence
  SiRNA target sequence
gttactcttgtttgtgtag

SEQ ID NO: 209896 - DNA, 19 bp, Artificial sequence
  SiRNA target sequence
ttactcttgtttgtgtagg

SEQ ID NO: 209897 - DNA, 19 bp, Artificial sequence
  SiRNA target sequence
tactcttgtttgtgtagga

SEQ ID NO: 209898 - DNA, 19 bp, Artificial sequence
  SiRNA target sequence
actcttgtttgtgtaggat

SEQ ID NO: 209899 - DNA, 19 bp, Artificial sequence
  SiRNA target sequence
ctcttgtttgtgtaggatt

SEQ ID NO: 209900 - DNA, 19 bp, Artificial sequence
  SiRNA target sequence
tcttgtttgtgtaggatta

SEQ ID NO: 209901 - DNA, 19 bp, Artificial sequence
  SiRNA target sequence
cttgtttgtgtaggattaa

SEQ ID NO: 209902 - DNA, 19 bp, Artificial sequence
  SiRNA target sequence
ttgtttgtgtaggattaat

SEQ ID NO: 209903 - DNA, 19 bp, Artificial sequence
  SiRNA target sequence
tgtttgtgtaggattaatt

SEQ ID NO: 209904 - DNA, 19 bp, Artificial sequence
  SiRNA target sequence
gtttgtgtaggattaattc

SEQ ID NO: 209905 - DNA, 19 bp, Artificial sequence
  SiRNA target sequence
tttgtgtaggattaattca

SEQ ID NO: 209906 - DNA, 19 bp, Artificial sequence
  SiRNA target sequence
ttgtgtaggattaattcag

SEQ ID NO: 209907 - DNA, 19 bp, Artificial sequence
  SiRNA target sequence
tgtgtaggattaattcaga

SEQ ID NO: 209908 - DNA, 19 bp, Artificial sequence
  SiRNA target sequence
gtgtaggattaattcagaa

SEQ ID NO: 209909 - DNA, 19 bp, Artificial sequence
  SiRNA target sequence
tgtaggattaattcagaag

SEQ ID NO: 209910 - DNA, 19 bp, Artificial sequence
  SiRNA target sequence
gtaggattaattcagaagt

SEQ ID NO: 209911 - DNA, 19 bp, Artificial sequence
  SiRNA target sequence
taggattaattcagaagtc

SEQ ID NO: 209912 - DNA, 19 bp, Artificial sequence
  SiRNA target sequence
aggattaattcagaagtct

SEQ ID NO: 209913 - DNA, 19 bp, Artificial sequence
  SiRNA target sequence
ggattaattcagaagtcta

SEQ ID NO: 209914 - DNA, 19 bp, Artificial sequence
  SiRNA target sequence
gattaattcagaagtctac

SEQ ID NO: 209915 - DNA, 19 bp, Artificial sequence
  SiRNA target sequence
attaattcagaagtctaca

SEQ ID NO: 209916 - DNA, 19 bp, Artificial sequence
  SiRNA target sequence
ttaattcagaagtctacac

SEQ ID NO: 209917 - DNA, 19 bp, Artificial sequence
  SiRNA target sequence
taattcagaagtctacact

SEQ ID NO: 209918 - DNA, 19 bp, Artificial sequence
  SiRNA target sequence
aattcagaagtctacactc

SEQ ID NO: 209919 - DNA, 19 bp, Artificial sequence
  SiRNA target sequence
attcagaagtctacactct

SEQ ID NO: 209920 - DNA, 19 bp, Artificial sequence
  SiRNA target sequence
ttcagaagtctacactctc

SEQ ID NO: 209921 - DNA, 19 bp, Artificial sequence
  SiRNA target sequence
tcagaagtctacactctct

SEQ ID NO: 209922 - DNA, 19 bp, Artificial sequence
  SiRNA target sequence
cagaagtctacactctctt

SEQ ID NO: 209923 - DNA, 19 bp, Artificial sequence
  SiRNA target sequence
agaagtctacactctctta

SEQ ID NO: 209924 - DNA, 19 bp, Artificial sequence
  SiRNA target sequence
gaagtctacactctcttat

SEQ ID NO: 209925 - DNA, 19 bp, Artificial sequence
  SiRNA target sequence
aagtctacactctcttatt

SEQ ID NO: 209926 - DNA, 19 bp, Artificial sequence
  SiRNA target sequence
agtctacactctcttattc

SEQ ID NO: 209927 - DNA, 19 bp, Artificial sequence
  SiRNA target sequence
gtctacactctcttattct

SEQ ID NO: 209928 - DNA, 19 bp, Artificial sequence
  SiRNA target sequence
tctacactctcttattctt

SEQ ID NO: 209929 - DNA, 19 bp, Artificial sequence
  SiRNA target sequence
ctacactctcttattcttt

SEQ ID NO: 209930 - DNA, 19 bp, Artificial sequence
  SiRNA target sequence
tacactctcttattctttt

SEQ ID NO: 209931 - DNA, 19 bp, Artificial sequence
  SiRNA target sequence
acactctcttattctttta

SEQ ID NO: 209932 - DNA, 19 bp, Artificial sequence
  SiRNA target sequence
cactctcttattcttttac

SEQ ID NO: 209933 - DNA, 19 bp, Artificial sequence
  SiRNA target sequence
actctcttattcttttaca

SEQ ID NO: 209934 - DNA, 19 bp, Artificial sequence
  SiRNA target sequence
ctctcttattcttttacaa

SEQ ID NO: 209935 - DNA, 19 bp, Artificial sequence
  SiRNA target sequence
tctcttattcttttacaaa

SEQ ID NO: 209936 - DNA, 19 bp, Artificial sequence
  SiRNA target sequence
ctcttattcttttacaaaa

SEQ ID NO: 209937 - DNA, 19 bp, Artificial sequence
  SiRNA target sequence
tcttattcttttacaaaaa

SEQ ID NO: 209938 - DNA, 19 bp, Artificial sequence
  SiRNA target sequence
cttattcttttacaaaaat

SEQ ID NO: 209939 - DNA, 19 bp, Artificial sequence
  SiRNA target sequence
ttattcttttacaaaaata

SEQ ID NO: 209940 - DNA, 19 bp, Artificial sequence
  SiRNA target sequence
tattcttttacaaaaatat

SEQ ID NO: 209941 - DNA, 19 bp, Artificial sequence
  SiRNA target sequence
attcttttacaaaaatatt

SEQ ID NO: 209942 - DNA, 19 bp, Artificial sequence
  SiRNA target sequence
ttcttttacaaaaatattt

SEQ ID NO: 209943 - DNA, 19 bp, Artificial sequence
  SiRNA target sequence
tcttttacaaaaatatttg

SEQ ID NO: 209944 - DNA, 19 bp, Artificial sequence
  SiRNA target sequence
cttttacaaaaatatttga

SEQ ID NO: 209945 - DNA, 19 bp, Artificial sequence
  SiRNA target sequence
ttttacaaaaatatttgat

SEQ ID NO: 209946 - DNA, 19 bp, Artificial sequence
  SiRNA target sequence
tttacaaaaatatttgatg

SEQ ID NO: 209947 - DNA, 19 bp, Artificial sequence
  SiRNA target sequence
ttacaaaaatatttgatgg

SEQ ID NO: 209948 - DNA, 19 bp, Artificial sequence
  SiRNA target sequence
tacaaaaatatttgatggt

SEQ ID NO: 209949 - DNA, 19 bp, Artificial sequence
  SiRNA target sequence
acaaaaatatttgatggtg

SEQ ID NO: 209950 - DNA, 19 bp, Artificial sequence
  SiRNA target sequence
caaaaatatttgatggtgc

SEQ ID NO: 209951 - DNA, 19 bp, Artificial sequence
  SiRNA target sequence
aaaaatatttgatggtgca

SEQ ID NO: 209952 - DNA, 19 bp, Artificial sequence
  SiRNA target sequence
aaaatatttgatggtgcat

SEQ ID NO: 209953 - DNA, 19 bp, Artificial sequence
  SiRNA target sequence
aaatatttgatggtgcatt

SEQ ID NO: 209954 - DNA, 19 bp, Artificial sequence
  SiRNA target sequence
aatatttgatggtgcattg

SEQ ID NO: 209955 - DNA, 19 bp, Artificial sequence
  SiRNA target sequence
atatttgatggtgcattgt

SEQ ID NO: 209956 - DNA, 19 bp, Artificial sequence
  SiRNA target sequence
tatttgatggtgcattgtt

SEQ ID NO: 209957 - DNA, 19 bp, Artificial sequence
  SiRNA target sequence
atttgatggtgcattgtta

SEQ ID NO: 209958 - DNA, 19 bp, Artificial sequence
  SiRNA target sequence
tttgatggtgcattgttaa

SEQ ID NO: 209959 - DNA, 19 bp, Artificial sequence
  SiRNA target sequence
ttgatggtgcattgttaat

SEQ ID NO: 209960 - DNA, 19 bp, Artificial sequence
  SiRNA target sequence
tgatggtgcattgttaata

SEQ ID NO: 209961 - DNA, 19 bp, Artificial sequence
  SiRNA target sequence
gatggtgcattgttaatat

SEQ ID NO: 209962 - DNA, 19 bp, Artificial sequence
  SiRNA target sequence
atggtgcattgttaatatt

SEQ ID NO: 209963 - DNA, 19 bp, Artificial sequence
  SiRNA target sequence
tggtgcattgttaatattt

SEQ ID NO: 209964 - DNA, 19 bp, Artificial sequence
  SiRNA target sequence
ggtgcattgttaatatttg

SEQ ID NO: 209965 - DNA, 19 bp, Artificial sequence
  SiRNA target sequence
gtgcattgttaatatttgc

SEQ ID NO: 209966 - DNA, 19 bp, Artificial sequence
  SiRNA target sequence
tgcattgttaatatttgct

SEQ ID NO: 209967 - DNA, 19 bp, Artificial sequence
  SiRNA target sequence
gcattgttaatatttgctt

SEQ ID NO: 209968 - DNA, 19 bp, Artificial sequence
  SiRNA target sequence
cattgttaatatttgcttt

SEQ ID NO: 209969 - DNA, 19 bp, Artificial sequence
  SiRNA target sequence
attgttaatatttgctttt

SEQ ID NO: 209970 - DNA, 19 bp, Artificial sequence
  SiRNA target sequence
ttgttaatatttgcttttc

SEQ ID NO: 209971 - DNA, 19 bp, Artificial sequence
  SiRNA target sequence
tgttaatatttgcttttct

SEQ ID NO: 209972 - DNA, 19 bp, Artificial sequence
  SiRNA target sequence
gttaatatttgcttttctt

SEQ ID NO: 209973 - DNA, 19 bp, Artificial sequence
  SiRNA target sequence
ttaatatttgcttttcttt

SEQ ID NO: 209974 - DNA, 19 bp, Artificial sequence
  SiRNA target sequence
taatatttgcttttcttta

SEQ ID NO: 209975 - DNA, 19 bp, Artificial sequence
  SiRNA target sequence
aatatttgcttttctttat

SEQ ID NO: 209976 - DNA, 19 bp, Artificial sequence
  SiRNA target sequence
atatttgcttttctttata

SEQ ID NO: 209977 - DNA, 19 bp, Artificial sequence
  SiRNA target sequence
tatttgcttttctttatat

SEQ ID NO: 209978 - DNA, 19 bp, Artificial sequence
  SiRNA target sequence
atttgcttttctttatatc

SEQ ID NO: 209979 - DNA, 19 bp, Artificial sequence
  SiRNA target sequence
tttgcttttctttatatca

SEQ ID NO: 209980 - DNA, 19 bp, Artificial sequence
  SiRNA target sequence
ttgcttttctttatatcat

SEQ ID NO: 209981 - DNA, 19 bp, Artificial sequence
  SiRNA target sequence
tgcttttctttatatcatt

SEQ ID NO: 209982 - DNA, 19 bp, Artificial sequence
  SiRNA target sequence
gcttttctttatatcattc

SEQ ID NO: 209983 - DNA, 19 bp, Artificial sequence
  SiRNA target sequence
cttttctttatatcattct

SEQ ID NO: 209984 - DNA, 19 bp, Artificial sequence
  SiRNA target sequence
ttttctttatatcattctt

SEQ ID NO: 209985 - DNA, 19 bp, Artificial sequence
  SiRNA target sequence
tttctttatatcattcttg

SEQ ID NO: 209986 - DNA, 19 bp, Artificial sequence
  SiRNA target sequence
ttctttatatcattcttgg

SEQ ID NO: 209987 - DNA, 19 bp, Artificial sequence
  SiRNA target sequence
tctttatatcattcttggt

SEQ ID NO: 209988 - DNA, 19 bp, Artificial sequence
  SiRNA target sequence
ctttatatcattcttggtc

SEQ ID NO: 209989 - DNA, 19 bp, Artificial sequence
  SiRNA target sequence
tttatatcattcttggtct

SEQ ID NO: 209990 - DNA, 19 bp, Artificial sequence
  SiRNA target sequence
ttatatcattcttggtcta

SEQ ID NO: 209991 - DNA, 19 bp, Artificial sequence
  SiRNA target sequence
tatatcattcttggtctag

SEQ ID NO: 209992 - DNA, 19 bp, Artificial sequence
  SiRNA target sequence
atatcattcttggtctagt

SEQ ID NO: 209993 - DNA, 19 bp, Artificial sequence
  SiRNA target sequence
tatcattcttggtctagtt

SEQ ID NO: 209994 - DNA, 19 bp, Artificial sequence
  SiRNA target sequence
atcattcttggtctagttc

SEQ ID NO: 209995 - DNA, 19 bp, Artificial sequence
  SiRNA target sequence
tcattcttggtctagttct

SEQ ID NO: 209996 - DNA, 19 bp, Artificial sequence
  SiRNA target sequence
cattcttggtctagttctt

SEQ ID NO: 209997 - DNA, 19 bp, Artificial sequence
  SiRNA target sequence
attcttggtctagttcttc

SEQ ID NO: 209998 - DNA, 19 bp, Artificial sequence
  SiRNA target sequence
ttcttggtctagttcttct

SEQ ID NO: 209999 - DNA, 19 bp, Artificial sequence
  SiRNA target sequence
tcttggtctagttcttctt

SEQ ID NO: 210000 - DNA, 19 bp, Artificial sequence
  SiRNA target sequence
cttggtctagttcttcttc

SEQ ID NO: 210001 - DNA, 19 bp, Artificial sequence
  SiRNA target sequence
ttggtctagttcttcttcc

SEQ ID NO: 210002 - DNA, 19 bp, Artificial sequence
  SiRNA target sequence
tggtctagttcttcttcca

SEQ ID NO: 210003 - DNA, 19 bp, Artificial sequence
  SiRNA target sequence
ggtctagttcttcttccat

SEQ ID NO: 210004 - DNA, 19 bp, Artificial sequence
  SiRNA target sequence
gtctagttcttcttccata

SEQ ID NO: 210005 - DNA, 19 bp, Artificial sequence
  SiRNA target sequence
tctagttcttcttccatat

SEQ ID NO: 210006 - DNA, 19 bp, Artificial sequence
  SiRNA target sequence
ctagttcttcttccatatt

SEQ ID NO: 210007 - DNA, 19 bp, Artificial sequence
  SiRNA target sequence
tagttcttcttccatattc

SEQ ID NO: 210008 - DNA, 19 bp, Artificial sequence
  SiRNA target sequence
agttcttcttccatattct

SEQ ID NO: 210009 - DNA, 19 bp, Artificial sequence
  SiRNA target sequence
gttcttcttccatattctc

SEQ ID NO: 210010 - DNA, 19 bp, Artificial sequence
  SiRNA target sequence
ttcttcttccatattctca

SEQ ID NO: 210011 - DNA, 19 bp, Artificial sequence
  SiRNA target sequence
tcttcttccatattctcat

SEQ ID NO: 210012 - DNA, 19 bp, Artificial sequence
  SiRNA target sequence
cttcttccatattctcatc

SEQ ID NO: 210013 - DNA, 19 bp, Artificial sequence
  SiRNA target sequence
ttcttccatattctcatct

SEQ ID NO: 210014 - DNA, 19 bp, Artificial sequence
  SiRNA target sequence
tcttccatattctcatctt

SEQ ID NO: 210015 - DNA, 19 bp, Artificial sequence
  SiRNA target sequence
cttccatattctcatcttt

SEQ ID NO: 210016 - DNA, 19 bp, Artificial sequence
  SiRNA target sequence
ttccatattctcatctttt

SEQ ID NO: 210017 - DNA, 19 bp, Artificial sequence
  SiRNA target sequence
tccatattctcatcttttc

SEQ ID NO: 210018 - DNA, 19 bp, Artificial sequence
  SiRNA target sequence
ccatattctcatcttttcc

SEQ ID NO: 210019 - DNA, 19 bp, Artificial sequence
  SiRNA target sequence
catattctcatcttttcca

SEQ ID NO: 210020 - DNA, 19 bp, Artificial sequence
  SiRNA target sequence
atattctcatcttttccag

SEQ ID NO: 210021 - DNA, 19 bp, Artificial sequence
  SiRNA target sequence
tattctcatcttttccagc

SEQ ID NO: 210022 - DNA, 19 bp, Artificial sequence
  SiRNA target sequence
attctcatcttttccagct

SEQ ID NO: 210023 - DNA, 19 bp, Artificial sequence
  SiRNA target sequence
ttctcatcttttccagctt

SEQ ID NO: 210024 - DNA, 19 bp, Artificial sequence
  SiRNA target sequence
tctcatcttttccagcttg

SEQ ID NO: 210025 - DNA, 19 bp, Artificial sequence
  SiRNA target sequence
ctcatcttttccagcttga

SEQ ID NO: 210026 - DNA, 19 bp, Artificial sequence
  SiRNA target sequence
tcatcttttccagcttgat

SEQ ID NO: 210027 - DNA, 19 bp, Artificial sequence
  SiRNA target sequence
catcttttccagcttgata

SEQ ID NO: 210028 - DNA, 19 bp, Artificial sequence
  SiRNA target sequence
atcttttccagcttgatag

SEQ ID NO: 210029 - DNA, 19 bp, Artificial sequence
  SiRNA target sequence
tcttttccagcttgatagt

SEQ ID NO: 210030 - DNA, 19 bp, Artificial sequence
  SiRNA target sequence
cttttccagcttgatagtt

SEQ ID NO: 210031 - DNA, 19 bp, Artificial sequence
  SiRNA target sequence
ttttccagcttgatagtta

SEQ ID NO: 210032 - DNA, 19 bp, Artificial sequence
  SiRNA target sequence
tttccagcttgatagttat

SEQ ID NO: 210033 - DNA, 19 bp, Artificial sequence
  SiRNA target sequence
ttccagcttgatagttatt

SEQ ID NO: 210034 - DNA, 19 bp, Artificial sequence
  SiRNA target sequence
tccagcttgatagttattt

SEQ ID NO: 210035 - DNA, 19 bp, Artificial sequence
  SiRNA target sequence
ccagcttgatagttatttt

SEQ ID NO: 210036 - DNA, 19 bp, Artificial sequence
  SiRNA target sequence
cagcttgatagttattttt

SEQ ID NO: 210037 - DNA, 19 bp, Artificial sequence
  SiRNA target sequence
agcttgatagttatttttt

SEQ ID NO: 210038 - DNA, 19 bp, Artificial sequence
  SiRNA target sequence
gcttgatagttattttttt

SEQ ID NO: 210039 - DNA, 19 bp, Artificial sequence
  SiRNA target sequence
cttgatagttattttttta

SEQ ID NO: 210040 - DNA, 19 bp, Artificial sequence
  SiRNA target sequence
ttgatagttatttttttag

SEQ ID NO: 210041 - DNA, 19 bp, Artificial sequence
  SiRNA target sequence
tgatagttatttttttaga

SEQ ID NO: 210042 - DNA, 19 bp, Artificial sequence
  SiRNA target sequence
gatagttatttttttagag

SEQ ID NO: 210043 - DNA, 19 bp, Artificial sequence
  SiRNA target sequence
atagttatttttttagaga

SEQ ID NO: 210044 - DNA, 19 bp, Artificial sequence
  SiRNA target sequence
tagttatttttttagagac

SEQ ID NO: 210045 - DNA, 19 bp, Artificial sequence
  SiRNA target sequence
agttatttttttagagacc

SEQ ID NO: 210046 - DNA, 19 bp, Artificial sequence
  SiRNA target sequence
gttatttttttagagacct

SEQ ID NO: 210047 - DNA, 19 bp, Artificial sequence
  SiRNA target sequence
ttatttttttagagacctt

SEQ ID NO: 210048 - DNA, 19 bp, Artificial sequence
  SiRNA target sequence
tatttttttagagaccttt

SEQ ID NO: 210049 - DNA, 19 bp, Artificial sequence
  SiRNA target sequence
atttttttagagacctttt

SEQ ID NO: 210050 - DNA, 19 bp, Artificial sequence
  SiRNA target sequence
tttttttagagaccttttt

SEQ ID NO: 210051 - DNA, 19 bp, Artificial sequence
  SiRNA target sequence
ttttttagagaccttttta

SEQ ID NO: 210052 - DNA, 19 bp, Artificial sequence
  SiRNA target sequence
tttttagagacctttttag

SEQ ID NO: 210053 - DNA, 19 bp, Artificial sequence
  SiRNA target sequence
ttttagagacctttttagt

SEQ ID NO: 210054 - DNA, 19 bp, Artificial sequence
  SiRNA target sequence
tttagagacctttttagtg

SEQ ID NO: 210055 - DNA, 19 bp, Artificial sequence
  SiRNA target sequence
ttagagacctttttagtga

SEQ ID NO: 210056 - DNA, 19 bp, Artificial sequence
  SiRNA target sequence
tagagacctttttagtgat

SEQ ID NO: 210057 - DNA, 19 bp, Artificial sequence
  SiRNA target sequence
agagacctttttagtgatg

SEQ ID NO: 210058 - DNA, 19 bp, Artificial sequence
  SiRNA target sequence
gagacctttttagtgatgg

SEQ ID NO: 210059 - DNA, 19 bp, Artificial sequence
  SiRNA target sequence
agacctttttagtgatggg

SEQ ID NO: 210060 - DNA, 19 bp, Artificial sequence
  SiRNA target sequence
gacctttttagtgatggga

SEQ ID NO: 210061 - DNA, 19 bp, Artificial sequence
  SiRNA target sequence
acctttttagtgatgggaa

SEQ ID NO: 210062 - DNA, 19 bp, Artificial sequence
  SiRNA target sequence
cctttttagtgatgggaaa

SEQ ID NO: 210063 - DNA, 19 bp, Artificial sequence
  SiRNA target sequence
ctttttagtgatgggaaat

SEQ ID NO: 210064 - DNA, 19 bp, Artificial sequence
  SiRNA target sequence
tttttagtgatgggaaatg

SEQ ID NO: 210065 - DNA, 19 bp, Artificial sequence
  SiRNA target sequence
ttttagtgatgggaaatgt

SEQ ID NO: 210066 - DNA, 19 bp, Artificial sequence
  SiRNA target sequence
tttagtgatgggaaatgtg

SEQ ID NO: 210067 - DNA, 19 bp, Artificial sequence
  SiRNA target sequence
ttagtgatgggaaatgtgt

SEQ ID NO: 210068 - DNA, 19 bp, Artificial sequence
  SiRNA target sequence
tagtgatgggaaatgtgtt

SEQ ID NO: 210069 - DNA, 19 bp, Artificial sequence
  SiRNA target sequence
agtgatgggaaatgtgttg

SEQ ID NO: 210070 - DNA, 19 bp, Artificial sequence
  SiRNA target sequence
gtgatgggaaatgtgttgt

SEQ ID NO: 210071 - DNA, 19 bp, Artificial sequence
  SiRNA target sequence
tgatgggaaatgtgttgta

SEQ ID NO: 210072 - DNA, 19 bp, Artificial sequence
  SiRNA target sequence
gatgggaaatgtgttgtaa

SEQ ID NO: 210073 - DNA, 19 bp, Artificial sequence
  SiRNA target sequence
atgggaaatgtgttgtaag

SEQ ID NO: 210074 - DNA, 19 bp, Artificial sequence
  SiRNA target sequence
tgggaaatgtgttgtaaga

SEQ ID NO: 210075 - DNA, 19 bp, Artificial sequence
  SiRNA target sequence
gggaaatgtgttgtaagag

SEQ ID NO: 210076 - DNA, 19 bp, Artificial sequence
  SiRNA target sequence
ggaaatgtgttgtaagagg

SEQ ID NO: 210077 - DNA, 19 bp, Artificial sequence
  SiRNA target sequence
gaaatgtgttgtaagaggc

SEQ ID NO: 210078 - DNA, 19 bp, Artificial sequence
  SiRNA target sequence
aaatgtgttgtaagaggct

SEQ ID NO: 210079 - DNA, 19 bp, Artificial sequence
  SiRNA target sequence
aatgtgttgtaagaggcta

SEQ ID NO: 210080 - DNA, 19 bp, Artificial sequence
  SiRNA target sequence
atgtgttgtaagaggctat

SEQ ID NO: 210081 - DNA, 19 bp, Artificial sequence
  SiRNA target sequence
tgtgttgtaagaggctatg

SEQ ID NO: 210082 - DNA, 19 bp, Artificial sequence
  SiRNA target sequence
gtgttgtaagaggctatga

SEQ ID NO: 210083 - DNA, 19 bp, Artificial sequence
  SiRNA target sequence
tgttgtaagaggctatgat

SEQ ID NO: 210084 - DNA, 19 bp, Artificial sequence
  SiRNA target sequence
gttgtaagaggctatgatg

SEQ ID NO: 210085 - DNA, 19 bp, Artificial sequence
  SiRNA target sequence
ttgtaagaggctatgatgc

SEQ ID NO: 210086 - DNA, 19 bp, Artificial sequence
  SiRNA target sequence
tgtaagaggctatgatgct

SEQ ID NO: 210087 - DNA, 19 bp, Artificial sequence
  SiRNA target sequence
gtaagaggctatgatgctt

SEQ ID NO: 210088 - DNA, 19 bp, Artificial sequence
  SiRNA target sequence
taagaggctatgatgcttt

SEQ ID NO: 210089 - DNA, 19 bp, Artificial sequence
  SiRNA target sequence
aagaggctatgatgcttta

SEQ ID NO: 210090 - DNA, 19 bp, Artificial sequence
  SiRNA target sequence
agaggctatgatgctttat

SEQ ID NO: 210091 - DNA, 19 bp, Artificial sequence
  SiRNA target sequence
gaggctatgatgctttatt

SEQ ID NO: 210092 - DNA, 19 bp, Artificial sequence
  SiRNA target sequence
aggctatgatgctttatta

SEQ ID NO: 210093 - DNA, 19 bp, Artificial sequence
  SiRNA target sequence
ggctatgatgctttattat

SEQ ID NO: 210094 - DNA, 19 bp, Artificial sequence
  SiRNA target sequence
gctatgatgctttattatc

SEQ ID NO: 210095 - DNA, 19 bp, Artificial sequence
  SiRNA target sequence
ctatgatgctttattatct

SEQ ID NO: 210096 - DNA, 19 bp, Artificial sequence
  SiRNA target sequence
tatgatgctttattatctt

SEQ ID NO: 210097 - DNA, 19 bp, Artificial sequence
  SiRNA target sequence
atgatgctttattatcttt

SEQ ID NO: 210098 - DNA, 19 bp, Artificial sequence
  SiRNA target sequence
tgatgctttattatctttg

SEQ ID NO: 210099 - DNA, 19 bp, Artificial sequence
  SiRNA target sequence
gatgctttattatctttgg

SEQ ID NO: 210100 - DNA, 19 bp, Artificial sequence
  SiRNA target sequence
atgctttattatctttggc

SEQ ID NO: 210101 - DNA, 19 bp, Artificial sequence
  SiRNA target sequence
tgctttattatctttggca

SEQ ID NO: 210102 - DNA, 19 bp, Artificial sequence
  SiRNA target sequence
gctttattatctttggcac

SEQ ID NO: 210103 - DNA, 19 bp, Artificial sequence
  SiRNA target sequence
ctttattatctttggcact

SEQ ID NO: 210104 - DNA, 19 bp, Artificial sequence
  SiRNA target sequence
tttattatctttggcactg

SEQ ID NO: 210105 - DNA, 19 bp, Artificial sequence
  SiRNA target sequence
ttattatctttggcactgg

SEQ ID NO: 210106 - DNA, 19 bp, Artificial sequence
  SiRNA target sequence
tattatctttggcactggt

SEQ ID NO: 210107 - DNA, 19 bp, Artificial sequence
  SiRNA target sequence
attatctttggcactggtc

SEQ ID NO: 210108 - DNA, 19 bp, Artificial sequence
  SiRNA target sequence
ttatctttggcactggtct

SEQ ID NO: 210109 - DNA, 19 bp, Artificial sequence
  SiRNA target sequence
tatctttggcactggtctt

SEQ ID NO: 210110 - DNA, 19 bp, Artificial sequence
  SiRNA target sequence
atctttggcactggtcttt

SEQ ID NO: 210111 - DNA, 19 bp, Artificial sequence
  SiRNA target sequence
tctttggcactggtcttta

SEQ ID NO: 210112 - DNA, 19 bp, Artificial sequence
  SiRNA target sequence
ctttggcactggtctttaa

SEQ ID NO: 210113 - DNA, 19 bp, Artificial sequence
  SiRNA target sequence
tttggcactggtctttaac

SEQ ID NO: 210114 - DNA, 19 bp, Artificial sequence
  SiRNA target sequence
ttggcactggtctttaacg

SEQ ID NO: 210115 - DNA, 19 bp, Artificial sequence
  SiRNA target sequence
tggcactggtctttaacga

SEQ ID NO: 210116 - DNA, 19 bp, Artificial sequence
  SiRNA target sequence
ggcactggtctttaacgaa

SEQ ID NO: 210117 - DNA, 19 bp, Artificial sequence
  SiRNA target sequence
gcactggtctttaacgaat

SEQ ID NO: 210118 - DNA, 19 bp, Artificial sequence
  SiRNA target sequence
cactggtctttaacgaatg

SEQ ID NO: 210119 - DNA, 19 bp, Artificial sequence
  SiRNA target sequence
actggtctttaacgaatgg

SEQ ID NO: 210120 - DNA, 19 bp, Artificial sequence
  SiRNA target sequence
ctggtctttaacgaatgga

SEQ ID NO: 210121 - DNA, 19 bp, Artificial sequence
  SiRNA target sequence
tggtctttaacgaatggac

SEQ ID NO: 210122 - DNA, 19 bp, Artificial sequence
  SiRNA target sequence
ggtctttaacgaatggaca

SEQ ID NO: 210123 - DNA, 19 bp, Artificial sequence
  SiRNA target sequence
gtctttaacgaatggacat

SEQ ID NO: 210124 - DNA, 19 bp, Artificial sequence
  SiRNA target sequence
tctttaacgaatggacatc

SEQ ID NO: 210125 - DNA, 19 bp, Artificial sequence
  SiRNA target sequence
ctttaacgaatggacatcc

SEQ ID NO: 210126 - DNA, 19 bp, Artificial sequence
  SiRNA target sequence
tttaacgaatggacatcct

SEQ ID NO: 210127 - DNA, 19 bp, Artificial sequence
  SiRNA target sequence
ttaacgaatggacatcctc

SEQ ID NO: 210128 - DNA, 19 bp, Artificial sequence
  SiRNA target sequence
taacgaatggacatcctct

SEQ ID NO: 210129 - DNA, 19 bp, Artificial sequence
  SiRNA target sequence
aacgaatggacatcctctc

SEQ ID NO: 210130 - DNA, 19 bp, Artificial sequence
  SiRNA target sequence
acgaatggacatcctctct

SEQ ID NO: 210131 - DNA, 19 bp, Artificial sequence
  SiRNA target sequence
cgaatggacatcctctcta

SEQ ID NO: 210132 - DNA, 19 bp, Artificial sequence
  SiRNA target sequence
gaatggacatcctctctag

SEQ ID NO: 210133 - DNA, 19 bp, Artificial sequence
  SiRNA target sequence
aatggacatcctctctagt

SEQ ID NO: 210134 - DNA, 19 bp, Artificial sequence
  SiRNA target sequence
atggacatcctctctagtt

SEQ ID NO: 210135 - DNA, 19 bp, Artificial sequence
  SiRNA target sequence
tggacatcctctctagttt

SEQ ID NO: 210136 - DNA, 19 bp, Artificial sequence
  SiRNA target sequence
ggacatcctctctagttta

SEQ ID NO: 210137 - DNA, 19 bp, Artificial sequence
  SiRNA target sequence
gacatcctctctagtttac

SEQ ID NO: 210138 - DNA, 19 bp, Artificial sequence
  SiRNA target sequence
acatcctctctagtttaca

SEQ ID NO: 210139 - DNA, 19 bp, Artificial sequence
  SiRNA target sequence
catcctctctagtttacat

SEQ ID NO: 210140 - DNA, 19 bp, Artificial sequence
  SiRNA target sequence
atcctctctagtttacatt

SEQ ID NO: 210141 - DNA, 19 bp, Artificial sequence
  SiRNA target sequence
tcctctctagtttacattg

SEQ ID NO: 210142 - DNA, 19 bp, Artificial sequence
  SiRNA target sequence
cctctctagtttacattgt

SEQ ID NO: 210143 - DNA, 19 bp, Artificial sequence
  SiRNA target sequence
ctctctagtttacattgtt

SEQ ID NO: 210144 - DNA, 19 bp, Artificial sequence
  SiRNA target sequence
tctctagtttacattgttt

SEQ ID NO: 210145 - DNA, 19 bp, Artificial sequence
  SiRNA target sequence
ctctagtttacattgtttc

SEQ ID NO: 210146 - DNA, 19 bp, Artificial sequence
  SiRNA target sequence
tctagtttacattgtttca

SEQ ID NO: 210147 - DNA, 19 bp, Artificial sequence
  SiRNA target sequence
ctagtttacattgtttcag

SEQ ID NO: 210148 - DNA, 19 bp, Artificial sequence
  SiRNA target sequence
tagtttacattgtttcaga

SEQ ID NO: 210149 - DNA, 19 bp, Artificial sequence
  SiRNA target sequence
agtttacattgtttcagaa

SEQ ID NO: 210150 - DNA, 19 bp, Artificial sequence
  SiRNA target sequence
gtttacattgtttcagaaa

SEQ ID NO: 210151 - DNA, 19 bp, Artificial sequence
  SiRNA target sequence
tttacattgtttcagaaat

SEQ ID NO: 210152 - DNA, 19 bp, Artificial sequence
  SiRNA target sequence
ttacattgtttcagaaatg

SEQ ID NO: 210153 - DNA, 19 bp, Artificial sequence
  SiRNA target sequence
tacattgtttcagaaatgt

SEQ ID NO: 210154 - DNA, 19 bp, Artificial sequence
  SiRNA target sequence
acattgtttcagaaatgtt

SEQ ID NO: 210155 - DNA, 19 bp, Artificial sequence
  SiRNA target sequence
cattgtttcagaaatgttt

SEQ ID NO: 210156 - DNA, 19 bp, Artificial sequence
  SiRNA target sequence
attgtttcagaaatgtttg

SEQ ID NO: 210157 - DNA, 19 bp, Artificial sequence
  SiRNA target sequence
ttgtttcagaaatgtttgg

SEQ ID NO: 210158 - DNA, 19 bp, Artificial sequence
  SiRNA target sequence
tgtttcagaaatgtttggt

SEQ ID NO: 210159 - DNA, 19 bp, Artificial sequence
  SiRNA target sequence
gtttcagaaatgtttggta

SEQ ID NO: 210160 - DNA, 19 bp, Artificial sequence
  SiRNA target sequence
tttcagaaatgtttggtaa

SEQ ID NO: 210161 - DNA, 19 bp, Artificial sequence
  SiRNA target sequence
ttcagaaatgtttggtaat

SEQ ID NO: 210162 - DNA, 19 bp, Artificial sequence
  SiRNA target sequence
tcagaaatgtttggtaatt

SEQ ID NO: 210163 - DNA, 19 bp, Artificial sequence
  SiRNA target sequence
cagaaatgtttggtaattt

SEQ ID NO: 210164 - DNA, 19 bp, Artificial sequence
  SiRNA target sequence
agaaatgtttggtaattta

SEQ ID NO: 210165 - DNA, 19 bp, Artificial sequence
  SiRNA target sequence
gaaatgtttggtaatttag

SEQ ID NO: 210166 - DNA, 19 bp, Artificial sequence
  SiRNA target sequence
aaatgtttggtaatttagt

SEQ ID NO: 210167 - DNA, 19 bp, Artificial sequence
  SiRNA target sequence
aatgtttggtaatttagta

SEQ ID NO: 210168 - DNA, 19 bp, Artificial sequence
  SiRNA target sequence
atgtttggtaatttagtat

SEQ ID NO: 210169 - DNA, 19 bp, Artificial sequence
  SiRNA target sequence
tgtttggtaatttagtatt

SEQ ID NO: 210170 - DNA, 19 bp, Artificial sequence
  SiRNA target sequence
gtttggtaatttagtattg

SEQ ID NO: 210171 - DNA, 19 bp, Artificial sequence
  SiRNA target sequence
tttggtaatttagtattgt

SEQ ID NO: 210172 - DNA, 19 bp, Artificial sequence
  SiRNA target sequence
ttggtaatttagtattgtc

SEQ ID NO: 210173 - DNA, 19 bp, Artificial sequence
  SiRNA target sequence
tggtaatttagtattgtct

SEQ ID NO: 210174 - DNA, 19 bp, Artificial sequence
  SiRNA target sequence
ggtaatttagtattgtctt

SEQ ID NO: 210175 - DNA, 19 bp, Artificial sequence
  SiRNA target sequence
gtaatttagtattgtctta

SEQ ID NO: 210176 - DNA, 19 bp, Artificial sequence
  SiRNA target sequence
taatttagtattgtcttat

SEQ ID NO: 210177 - DNA, 19 bp, Artificial sequence
  SiRNA target sequence
aatttagtattgtcttatt

SEQ ID NO: 210178 - DNA, 19 bp, Artificial sequence
  SiRNA target sequence
atttagtattgtcttattt

SEQ ID NO: 210179 - DNA, 19 bp, Artificial sequence
  SiRNA target sequence
tttagtattgtcttatttc

SEQ ID NO: 210180 - DNA, 19 bp, Artificial sequence
  SiRNA target sequence
ttagtattgtcttatttct

SEQ ID NO: 210181 - DNA, 19 bp, Artificial sequence
  SiRNA target sequence
tagtattgtcttatttctt

SEQ ID NO: 210182 - DNA, 19 bp, Artificial sequence
  SiRNA target sequence
agtattgtcttatttcttc

SEQ ID NO: 210183 - DNA, 19 bp, Artificial sequence
  SiRNA target sequence
gtattgtcttatttcttct

SEQ ID NO: 210184 - DNA, 19 bp, Artificial sequence
  SiRNA target sequence
tattgtcttatttcttctt

SEQ ID NO: 210185 - DNA, 19 bp, Artificial sequence
  SiRNA target sequence
attgtcttatttcttcttg

SEQ ID NO: 210186 - DNA, 19 bp, Artificial sequence
  SiRNA target sequence
ttgtcttatttcttcttga

SEQ ID NO: 210187 - DNA, 19 bp, Artificial sequence
  SiRNA target sequence
tgtcttatttcttcttgac

SEQ ID NO: 210188 - DNA, 19 bp, Artificial sequence
  SiRNA target sequence
gtcttatttcttcttgacg

SEQ ID NO: 210189 - DNA, 19 bp, Artificial sequence
  SiRNA target sequence
tcttatttcttcttgacgt

SEQ ID NO: 210190 - DNA, 19 bp, Artificial sequence
  SiRNA target sequence
cttatttcttcttgacgtt

SEQ ID NO: 210191 - DNA, 19 bp, Artificial sequence
  SiRNA target sequence
ttatttcttcttgacgttt

SEQ ID NO: 210192 - DNA, 19 bp, Artificial sequence
  SiRNA target sequence
tatttcttcttgacgtttg

SEQ ID NO: 210193 - DNA, 19 bp, Artificial sequence
  SiRNA target sequence
atttcttcttgacgtttgc

SEQ ID NO: 210194 - DNA, 19 bp, Artificial sequence
  SiRNA target sequence
tttcttcttgacgtttgct

SEQ ID NO: 210195 - DNA, 19 bp, Artificial sequence
  SiRNA target sequence
ttcttcttgacgtttgcta

SEQ ID NO: 210196 - DNA, 19 bp, Artificial sequence
  SiRNA target sequence
tcttcttgacgtttgctaa

SEQ ID NO: 210197 - DNA, 19 bp, Artificial sequence
  SiRNA target sequence
cttcttgacgtttgctaat

SEQ ID NO: 210198 - DNA, 19 bp, Artificial sequence
  SiRNA target sequence
ttcttgacgtttgctaatt

SEQ ID NO: 210199 - DNA, 19 bp, Artificial sequence
  SiRNA target sequence
tcttgacgtttgctaattc

SEQ ID NO: 210200 - DNA, 19 bp, Artificial sequence
  SiRNA target sequence
cttgacgtttgctaattct

SEQ ID NO: 210201 - DNA, 19 bp, Artificial sequence
  SiRNA target sequence
ttgacgtttgctaattctt

SEQ ID NO: 210202 - DNA, 19 bp, Artificial sequence
  SiRNA target sequence
tgacgtttgctaattcttt

SEQ ID NO: 210203 - DNA, 19 bp, Artificial sequence
  SiRNA target sequence
gacgtttgctaattcttta

SEQ ID NO: 210204 - DNA, 19 bp, Artificial sequence
  SiRNA target sequence
acgtttgctaattctttaa

SEQ ID NO: 210205 - DNA, 19 bp, Artificial sequence
  SiRNA target sequence
cgtttgctaattctttaac

SEQ ID NO: 210206 - DNA, 19 bp, Artificial sequence
  SiRNA target sequence
gtttgctaattctttaaca

SEQ ID NO: 210207 - DNA, 19 bp, Artificial sequence
  SiRNA target sequence
tttgctaattctttaacaa

SEQ ID NO: 210208 - DNA, 19 bp, Artificial sequence
  SiRNA target sequence
ttgctaattctttaacaac

SEQ ID NO: 210209 - DNA, 19 bp, Artificial sequence
  SiRNA target sequence
tgctaattctttaacaact

SEQ ID NO: 210210 - DNA, 19 bp, Artificial sequence
  SiRNA target sequence
gctaattctttaacaactc

SEQ ID NO: 210211 - DNA, 19 bp, Artificial sequence
  SiRNA target sequence
ctaattctttaacaactcc

SEQ ID NO: 210212 - DNA, 19 bp, Artificial sequence
  SiRNA target sequence
taattctttaacaactcca

SEQ ID NO: 210213 - DNA, 19 bp, Artificial sequence
  SiRNA target sequence
aattctttaacaactccag

SEQ ID NO: 210214 - DNA, 19 bp, Artificial sequence
  SiRNA target sequence
attctttaacaactccagg

SEQ ID NO: 210215 - DNA, 19 bp, Artificial sequence
  SiRNA target sequence
ttctttaacaactccagga

SEQ ID NO: 210216 - DNA, 19 bp, Artificial sequence
  SiRNA target sequence
tctttaacaactccaggac

SEQ ID NO: 210217 - DNA, 19 bp, Artificial sequence
  SiRNA target sequence
ctttaacaactccaggaca

SEQ ID NO: 210218 - DNA, 19 bp, Artificial sequence
  SiRNA target sequence
tttaacaactccaggacaa

SEQ ID NO: 210219 - DNA, 19 bp, Artificial sequence
  SiRNA target sequence
ttaacaactccaggacaaa

SEQ ID NO: 210220 - DNA, 19 bp, Artificial sequence
  SiRNA target sequence
taacaactccaggacaaag

SEQ ID NO: 210221 - DNA, 19 bp, Artificial sequence
  SiRNA target sequence
aacaactccaggacaaagt

SEQ ID NO: 210222 - DNA, 19 bp, Artificial sequence
  SiRNA target sequence
acaactccaggacaaagtg

SEQ ID NO: 210223 - DNA, 19 bp, Artificial sequence
  SiRNA target sequence
caactccaggacaaagtgc

SEQ ID NO: 210224 - DNA, 19 bp, Artificial sequence
  SiRNA target sequence
aactccaggacaaagtgca

SEQ ID NO: 210225 - DNA, 19 bp, Artificial sequence
  SiRNA target sequence
actccaggacaaagtgcaa

SEQ ID NO: 210226 - DNA, 19 bp, Artificial sequence
  SiRNA target sequence
ctccaggacaaagtgcaag

SEQ ID NO: 210227 - DNA, 19 bp, Artificial sequence
  SiRNA target sequence
tccaggacaaagtgcaaga

SEQ ID NO: 210228 - DNA, 19 bp, Artificial sequence
  SiRNA target sequence
ccaggacaaagtgcaagat

SEQ ID NO: 210229 - DNA, 19 bp, Artificial sequence
  SiRNA target sequence
caggacaaagtgcaagatt

SEQ ID NO: 210230 - DNA, 19 bp, Artificial sequence
  SiRNA target sequence
aggacaaagtgcaagattc

SEQ ID NO: 210231 - DNA, 19 bp, Artificial sequence
  SiRNA target sequence
ggacaaagtgcaagattca

SEQ ID NO: 210232 - DNA, 19 bp, Artificial sequence
  SiRNA target sequence
gacaaagtgcaagattcat

SEQ ID NO: 210233 - DNA, 19 bp, Artificial sequence
  SiRNA target sequence
acaaagtgcaagattcata

SEQ ID NO: 210234 - DNA, 19 bp, Artificial sequence
  SiRNA target sequence
caaagtgcaagattcatac

SEQ ID NO: 210235 - DNA, 19 bp, Artificial sequence
  SiRNA target sequence
aaagtgcaagattcatacc

SEQ ID NO: 210236 - DNA, 19 bp, Artificial sequence
  SiRNA target sequence
aagtgcaagattcatacct

SEQ ID NO: 210237 - DNA, 19 bp, Artificial sequence
  SiRNA target sequence
agtgcaagattcatacctt

SEQ ID NO: 210238 - DNA, 19 bp, Artificial sequence
  SiRNA target sequence
gtgcaagattcataccttt

SEQ ID NO: 210239 - DNA, 19 bp, Artificial sequence
  SiRNA target sequence
tgcaagattcataccttta

SEQ ID NO: 210240 - DNA, 19 bp, Artificial sequence
  SiRNA target sequence
gcaagattcatacctttat

SEQ ID NO: 210241 - DNA, 19 bp, Artificial sequence
  SiRNA target sequence
caagattcatacctttatt

SEQ ID NO: 210242 - DNA, 19 bp, Artificial sequence
  SiRNA target sequence
aagattcatacctttattt

SEQ ID NO: 210243 - DNA, 19 bp, Artificial sequence
  SiRNA target sequence
agattcatacctttatttt

SEQ ID NO: 210244 - DNA, 19 bp, Artificial sequence
  SiRNA target sequence
gattcatacctttatttta

SEQ ID NO: 210245 - DNA, 19 bp, Artificial sequence
  SiRNA target sequence
attcatacctttattttat

SEQ ID NO: 210246 - DNA, 19 bp, Artificial sequence
  SiRNA target sequence
ttcatacctttattttatg

SEQ ID NO: 210247 - DNA, 19 bp, Artificial sequence
  SiRNA target sequence
tcatacctttattttatgt

SEQ ID NO: 210248 - DNA, 19 bp, Artificial sequence
  SiRNA target sequence
catacctttattttatgtt

SEQ ID NO: 210249 - DNA, 19 bp, Artificial sequence
  SiRNA target sequence
atacctttattttatgttt

SEQ ID NO: 210250 - DNA, 19 bp, Artificial sequence
  SiRNA target sequence
tacctttattttatgtttt

SEQ ID NO: 210251 - DNA, 19 bp, Artificial sequence
  SiRNA target sequence
acctttattttatgttttc

SEQ ID NO: 210252 - DNA, 19 bp, Artificial sequence
  SiRNA target sequence
cctttattttatgttttct

SEQ ID NO: 210253 - DNA, 19 bp, Artificial sequence
  SiRNA target sequence
ctttattttatgttttctc

SEQ ID NO: 210254 - DNA, 19 bp, Artificial sequence
  SiRNA target sequence
tttattttatgttttctcg

SEQ ID NO: 210255 - DNA, 19 bp, Artificial sequence
  SiRNA target sequence
ttattttatgttttctcga

SEQ ID NO: 210256 - DNA, 19 bp, Artificial sequence
  SiRNA target sequence
tattttatgttttctcgaa

SEQ ID NO: 210257 - DNA, 19 bp, Artificial sequence
  SiRNA target sequence
attttatgttttctcgaat

SEQ ID NO: 210258 - DNA, 19 bp, Artificial sequence
  SiRNA target sequence
ttttatgttttctcgaata

SEQ ID NO: 210259 - DNA, 19 bp, Artificial sequence
  SiRNA target sequence
tttatgttttctcgaatat

SEQ ID NO: 210260 - DNA, 19 bp, Artificial sequence
  SiRNA target sequence
ttatgttttctcgaatatt

SEQ ID NO: 210261 - DNA, 19 bp, Artificial sequence
  SiRNA target sequence
tatgttttctcgaatattt

SEQ ID NO: 210262 - DNA, 19 bp, Artificial sequence
  SiRNA target sequence
atgttttctcgaatatttc

SEQ ID NO: 210263 - DNA, 19 bp, Artificial sequence
  SiRNA target sequence
tgttttctcgaatatttct

SEQ ID NO: 210264 - DNA, 19 bp, Artificial sequence
  SiRNA target sequence
gttttctcgaatatttctc

SEQ ID NO: 210265 - DNA, 19 bp, Artificial sequence
  SiRNA target sequence
ttttctcgaatatttctct

SEQ ID NO: 210266 - DNA, 19 bp, Artificial sequence
  SiRNA target sequence
tttctcgaatatttctctt

SEQ ID NO: 210267 - DNA, 19 bp, Artificial sequence
  SiRNA target sequence
ttctcgaatatttctcttt

SEQ ID NO: 210268 - DNA, 19 bp, Artificial sequence
  SiRNA target sequence
tctcgaatatttctctttt

SEQ ID NO: 210269 - DNA, 19 bp, Artificial sequence
  SiRNA target sequence
ctcgaatatttctcttttc

SEQ ID NO: 210270 - DNA, 19 bp, Artificial sequence
  SiRNA target sequence
tcgaatatttctcttttct

SEQ ID NO: 210271 - DNA, 19 bp, Artificial sequence
  SiRNA target sequence
cgaatatttctcttttctt

SEQ ID NO: 210272 - DNA, 19 bp, Artificial sequence
  SiRNA target sequence
gaatatttctcttttctta

SEQ ID NO: 210273 - DNA, 19 bp, Artificial sequence
  SiRNA target sequence
aatatttctcttttcttat

SEQ ID NO: 210274 - DNA, 19 bp, Artificial sequence
  SiRNA target sequence
atatttctcttttcttatc

SEQ ID NO: 210275 - DNA, 19 bp, Artificial sequence
  SiRNA target sequence
tatttctcttttcttatct

SEQ ID NO: 210276 - DNA, 19 bp, Artificial sequence
  SiRNA target sequence
atttctcttttcttatctt

SEQ ID NO: 210277 - DNA, 19 bp, Artificial sequence
  SiRNA target sequence
tttctcttttcttatcttc

SEQ ID NO: 210278 - DNA, 19 bp, Artificial sequence
  SiRNA target sequence
ttctcttttcttatcttct

SEQ ID NO: 210279 - DNA, 19 bp, Artificial sequence
  SiRNA target sequence
tctcttttcttatcttctc

SEQ ID NO: 210280 - DNA, 19 bp, Artificial sequence
  SiRNA target sequence
ctcttttcttatcttctca

SEQ ID NO: 210281 - DNA, 19 bp, Artificial sequence
  SiRNA target sequence
tcttttcttatcttctcaa

SEQ ID NO: 210282 - DNA, 19 bp, Artificial sequence
  SiRNA target sequence
cttttcttatcttctcaag

SEQ ID NO: 210283 - DNA, 19 bp, Artificial sequence
  SiRNA target sequence
ttttcttatcttctcaagt

SEQ ID NO: 210284 - DNA, 19 bp, Artificial sequence
  SiRNA target sequence
tttcttatcttctcaagtg

SEQ ID NO: 210285 - DNA, 19 bp, Artificial sequence
  SiRNA target sequence
ttcttatcttctcaagtga

SEQ ID NO: 210286 - DNA, 19 bp, Artificial sequence
  SiRNA target sequence
tcttatcttctcaagtgac

SEQ ID NO: 210287 - DNA, 19 bp, Artificial sequence
  SiRNA target sequence
cttatcttctcaagtgaca

SEQ ID NO: 210288 - DNA, 19 bp, Artificial sequence
  SiRNA target sequence
ttatcttctcaagtgacag

SEQ ID NO: 210289 - DNA, 19 bp, Artificial sequence
  SiRNA target sequence
tatcttctcaagtgacaga

SEQ ID NO: 210290 - DNA, 19 bp, Artificial sequence
  SiRNA target sequence
atcttctcaagtgacagaa

SEQ ID NO: 210291 - DNA, 19 bp, Artificial sequence
  SiRNA target sequence
tcttctcaagtgacagaac

SEQ ID NO: 210292 - DNA, 19 bp, Artificial sequence
  SiRNA target sequence
cttctcaagtgacagaact

SEQ ID NO: 210293 - DNA, 19 bp, Artificial sequence
  SiRNA target sequence
ttctcaagtgacagaactt

SEQ ID NO: 210294 - DNA, 19 bp, Artificial sequence
  SiRNA target sequence
tctcaagtgacagaacttt

SEQ ID NO: 210295 - DNA, 19 bp, Artificial sequence
  SiRNA target sequence
ctcaagtgacagaactttt

SEQ ID NO: 210296 - DNA, 19 bp, Artificial sequence
  SiRNA target sequence
tcaagtgacagaacttttt

SEQ ID NO: 210297 - DNA, 19 bp, Artificial sequence
  SiRNA target sequence
caagtgacagaacttttta

SEQ ID NO: 210298 - DNA, 19 bp, Artificial sequence
  SiRNA target sequence
aagtgacagaactttttac

SEQ ID NO: 210299 - DNA, 19 bp, Artificial sequence
  SiRNA target sequence
agtgacagaactttttaca

SEQ ID NO: 210300 - DNA, 19 bp, Artificial sequence
  SiRNA target sequence
gtgacagaactttttacaa

SEQ ID NO: 210301 - DNA, 19 bp, Artificial sequence
  SiRNA target sequence
tgacagaactttttacaag

SEQ ID NO: 210302 - DNA, 19 bp, Artificial sequence
  SiRNA target sequence
gacagaactttttacaaga

SEQ ID NO: 210303 - DNA, 19 bp, Artificial sequence
  SiRNA target sequence
acagaactttttacaagat

SEQ ID NO: 210304 - DNA, 19 bp, Artificial sequence
  SiRNA target sequence
cagaactttttacaagata

SEQ ID NO: 210305 - DNA, 19 bp, Artificial sequence
  SiRNA target sequence
agaactttttacaagatat

SEQ ID NO: 210306 - DNA, 19 bp, Artificial sequence
  SiRNA target sequence
gaactttttacaagatata

SEQ ID NO: 210307 - DNA, 19 bp, Artificial sequence
  SiRNA target sequence
aactttttacaagatatag

SEQ ID NO: 210308 - DNA, 19 bp, Artificial sequence
  SiRNA target sequence
actttttacaagatataga

SEQ ID NO: 210309 - DNA, 19 bp, Artificial sequence
  SiRNA target sequence
ctttttacaagatatagat

SEQ ID NO: 210310 - DNA, 19 bp, Artificial sequence
  SiRNA target sequence
tttttacaagatatagatc

SEQ ID NO: 210311 - DNA, 19 bp, Artificial sequence
  SiRNA target sequence
ttttacaagatatagatca

SEQ ID NO: 210312 - DNA, 19 bp, Artificial sequence
  SiRNA target sequence
tttacaagatatagatcaa

SEQ ID NO: 210313 - DNA, 19 bp, Artificial sequence
  SiRNA target sequence
ttacaagatatagatcaaa

SEQ ID NO: 210314 - DNA, 19 bp, Artificial sequence
  SiRNA target sequence
tacaagatatagatcaaag

SEQ ID NO: 210315 - DNA, 19 bp, Artificial sequence
  SiRNA target sequence
acaagatatagatcaaagc

SEQ ID NO: 210316 - DNA, 19 bp, Artificial sequence
  SiRNA target sequence
caagatatagatcaaagct

SEQ ID NO: 210317 - DNA, 19 bp, Artificial sequence
  SiRNA target sequence
aagatatagatcaaagctc

SEQ ID NO: 210318 - DNA, 19 bp, Artificial sequence
  SiRNA target sequence
agatatagatcaaagctca

SEQ ID NO: 210319 - DNA, 19 bp, Artificial sequence
  SiRNA target sequence
gatatagatcaaagctcac

SEQ ID NO: 210320 - DNA, 19 bp, Artificial sequence
  SiRNA target sequence
atatagatcaaagctcact

SEQ ID NO: 210321 - DNA, 19 bp, Artificial sequence
  SiRNA target sequence
tatagatcaaagctcactt

SEQ ID NO: 210322 - DNA, 19 bp, Artificial sequence
  SiRNA target sequence
atagatcaaagctcacttt

SEQ ID NO: 210323 - DNA, 19 bp, Artificial sequence
  SiRNA target sequence
tagatcaaagctcactttc

SEQ ID NO: 210324 - DNA, 19 bp, Artificial sequence
  SiRNA target sequence
agatcaaagctcactttct

SEQ ID NO: 210325 - DNA, 19 bp, Artificial sequence
  SiRNA target sequence
gatcaaagctcactttctc

SEQ ID NO: 210326 - DNA, 19 bp, Artificial sequence
  SiRNA target sequence
atcaaagctcactttctca

SEQ ID NO: 210327 - DNA, 19 bp, Artificial sequence
  SiRNA target sequence
tcaaagctcactttctcag

SEQ ID NO: 210328 - DNA, 19 bp, Artificial sequence
  SiRNA target sequence
caaagctcactttctcaga

SEQ ID NO: 210329 - DNA, 19 bp, Artificial sequence
  SiRNA target sequence
aaagctcactttctcagag

SEQ ID NO: 210330 - DNA, 19 bp, Artificial sequence
  SiRNA target sequence
aagctcactttctcagagg

SEQ ID NO: 210331 - DNA, 19 bp, Artificial sequence
  SiRNA target sequence
agctcactttctcagaggc

SEQ ID NO: 210332 - DNA, 19 bp, Artificial sequence
  SiRNA target sequence
gctcactttctcagaggcg

SEQ ID NO: 210333 - DNA, 19 bp, Artificial sequence
  SiRNA target sequence
ctcactttctcagaggcgg

SEQ ID NO: 210334 - DNA, 19 bp, Artificial sequence
  SiRNA target sequence
tcactttctcagaggcgga

SEQ ID NO: 210335 - DNA, 19 bp, Artificial sequence
  SiRNA target sequence
cactttctcagaggcggaa

SEQ ID NO: 210336 - DNA, 19 bp, Artificial sequence
  SiRNA target sequence
actttctcagaggcggaat

SEQ ID NO: 210337 - DNA, 19 bp, Artificial sequence
  SiRNA target sequence
ctttctcagaggcggaatt

SEQ ID NO: 210338 - DNA, 19 bp, Artificial sequence
  SiRNA target sequence
tttctcagaggcggaattt

SEQ ID NO: 210339 - DNA, 19 bp, Artificial sequence
  SiRNA target sequence
ttctcagaggcggaatttt

SEQ ID NO: 210340 - DNA, 19 bp, Artificial sequence
  SiRNA target sequence
tctcagaggcggaattttt

SEQ ID NO: 210341 - DNA, 19 bp, Artificial sequence
  SiRNA target sequence
ctcagaggcggaattttta

SEQ ID NO: 210342 - DNA, 19 bp, Artificial sequence
  SiRNA target sequence
tcagaggcggaatttttat

SEQ ID NO: 210343 - DNA, 19 bp, Artificial sequence
  SiRNA target sequence
cagaggcggaatttttata

SEQ ID NO: 210344 - DNA, 19 bp, Artificial sequence
  SiRNA target sequence
agaggcggaatttttatat

SEQ ID NO: 210345 - DNA, 19 bp, Artificial sequence
  SiRNA target sequence
gaggcggaatttttatata

SEQ ID NO: 210346 - DNA, 19 bp, Artificial sequence
  SiRNA target sequence
aggcggaatttttatataa

SEQ ID NO: 210347 - DNA, 19 bp, Artificial sequence
  SiRNA target sequence
ggcggaatttttatataat

SEQ ID NO: 210348 - DNA, 19 bp, Artificial sequence
  SiRNA target sequence
gcggaatttttatataatg

SEQ ID NO: 210349 - DNA, 19 bp, Artificial sequence
  SiRNA target sequence
cggaatttttatataatgg

SEQ ID NO: 210350 - DNA, 19 bp, Artificial sequence
  SiRNA target sequence
ggaatttttatataatggc

SEQ ID NO: 210351 - DNA, 19 bp, Artificial sequence
  SiRNA target sequence
gaatttttatataatggct

SEQ ID NO: 210352 - DNA, 19 bp, Artificial sequence
  SiRNA target sequence
aatttttatataatggctt

SEQ ID NO: 210353 - DNA, 19 bp, Artificial sequence
  SiRNA target sequence
atttttatataatggcttt

SEQ ID NO: 210354 - DNA, 19 bp, Artificial sequence
  SiRNA target sequence
tttttatataatggctttt

SEQ ID NO: 210355 - DNA, 19 bp, Artificial sequence
  SiRNA target sequence
ttttatataatggcttttt

SEQ ID NO: 210356 - DNA, 19 bp, Artificial sequence
  SiRNA target sequence
tttatataatggctttttt

SEQ ID NO: 210357 - DNA, 19 bp, Artificial sequence
  SiRNA target sequence
ttatataatggcttttttg

SEQ ID NO: 210358 - DNA, 19 bp, Artificial sequence
  SiRNA target sequence
tatataatggcttttttgt

SEQ ID NO: 210359 - DNA, 19 bp, Artificial sequence
  SiRNA target sequence
atataatggcttttttgta

SEQ ID NO: 210360 - DNA, 19 bp, Artificial sequence
  SiRNA target sequence
tataatggcttttttgtat

SEQ ID NO: 210361 - DNA, 19 bp, Artificial sequence
  SiRNA target sequence
ataatggcttttttgtatt

SEQ ID NO: 210362 - DNA, 19 bp, Artificial sequence
  SiRNA target sequence
taatggcttttttgtattt

SEQ ID NO: 210363 - DNA, 19 bp, Artificial sequence
  SiRNA target sequence
aatggcttttttgtatttt

SEQ ID NO: 210364 - DNA, 19 bp, Artificial sequence
  SiRNA target sequence
atggcttttttgtattttc

SEQ ID NO: 210365 - DNA, 19 bp, Artificial sequence
  SiRNA target sequence
tggcttttttgtattttct

SEQ ID NO: 210366 - DNA, 19 bp, Artificial sequence
  SiRNA target sequence
ggcttttttgtattttctg

SEQ ID NO: 210367 - DNA, 19 bp, Artificial sequence
  SiRNA target sequence
gcttttttgtattttctgg

SEQ ID NO: 210368 - DNA, 19 bp, Artificial sequence
  SiRNA target sequence
cttttttgtattttctgga

SEQ ID NO: 210369 - DNA, 19 bp, Artificial sequence
  SiRNA target sequence
ttttttgtattttctggag

SEQ ID NO: 210370 - DNA, 19 bp, Artificial sequence
  SiRNA target sequence
tttttgtattttctggagt

SEQ ID NO: 210371 - DNA, 19 bp, Artificial sequence
  SiRNA target sequence
ttttgtattttctggagtt

SEQ ID NO: 210372 - DNA, 19 bp, Artificial sequence
  SiRNA target sequence
tttgtattttctggagttc

SEQ ID NO: 210373 - DNA, 19 bp, Artificial sequence
  SiRNA target sequence
ttgtattttctggagttct

SEQ ID NO: 210374 - DNA, 19 bp, Artificial sequence
  SiRNA target sequence
tgtattttctggagttcta

SEQ ID NO: 210375 - DNA, 19 bp, Artificial sequence
  SiRNA target sequence
gtattttctggagttctag

SEQ ID NO: 210376 - DNA, 19 bp, Artificial sequence
  SiRNA target sequence
tattttctggagttctagt

SEQ ID NO: 210377 - DNA, 19 bp, Artificial sequence
  SiRNA target sequence
attttctggagttctagta

SEQ ID NO: 210378 - DNA, 19 bp, Artificial sequence
  SiRNA target sequence
ttttctggagttctagtaa

SEQ ID NO: 210379 - DNA, 19 bp, Artificial sequence
  SiRNA target sequence
tttctggagttctagtaat

SEQ ID NO: 210380 - DNA, 19 bp, Artificial sequence
  SiRNA target sequence
ttctggagttctagtaata

SEQ ID NO: 210381 - DNA, 19 bp, Artificial sequence
  SiRNA target sequence
tctggagttctagtaatag

SEQ ID NO: 210382 - DNA, 19 bp, Artificial sequence
  SiRNA target sequence
ctggagttctagtaatagt

SEQ ID NO: 210383 - DNA, 19 bp, Artificial sequence
  SiRNA target sequence
tggagttctagtaatagtt

SEQ ID NO: 210384 - DNA, 19 bp, Artificial sequence
  SiRNA target sequence
ggagttctagtaatagtta

SEQ ID NO: 210385 - DNA, 19 bp, Artificial sequence
  SiRNA target sequence
gagttctagtaatagttat

SEQ ID NO: 210386 - DNA, 19 bp, Artificial sequence
  SiRNA target sequence
agttctagtaatagttata

SEQ ID NO: 210387 - DNA, 19 bp, Artificial sequence
  SiRNA target sequence
gttctagtaatagttatat

SEQ ID NO: 210388 - DNA, 19 bp, Artificial sequence
  SiRNA target sequence
ttctagtaatagttatatt

SEQ ID NO: 210389 - DNA, 19 bp, Artificial sequence
  SiRNA target sequence
tctagtaatagttatattt

SEQ ID NO: 210390 - DNA, 19 bp, Artificial sequence
  SiRNA target sequence
ctagtaatagttatatttt

SEQ ID NO: 210391 - DNA, 19 bp, Artificial sequence
  SiRNA target sequence
tagtaatagttatattttt

SEQ ID NO: 210392 - DNA, 19 bp, Artificial sequence
  SiRNA target sequence
agtaatagttatattttta

SEQ ID NO: 210393 - DNA, 19 bp, Artificial sequence
  SiRNA target sequence
gtaatagttatatttttaa

SEQ ID NO: 210394 - DNA, 19 bp, Artificial sequence
  SiRNA target sequence
taatagttatatttttaat

SEQ ID NO: 210395 - DNA, 19 bp, Artificial sequence
  SiRNA target sequence
aatagttatatttttaatt

SEQ ID NO: 210396 - DNA, 19 bp, Artificial sequence
  SiRNA target sequence
atagttatatttttaatta

SEQ ID NO: 210397 - DNA, 19 bp, Artificial sequence
  SiRNA target sequence
tagttatatttttaattaa

SEQ ID NO: 210398 - DNA, 19 bp, Artificial sequence
  SiRNA target sequence
agttatatttttaattaaa

SEQ ID NO: 210399 - DNA, 19 bp, Artificial sequence
  SiRNA target sequence
gttatatttttaattaaaa

SEQ ID NO: 210400 - DNA, 19 bp, Artificial sequence
  SiRNA target sequence
ttatatttttaattaaaaa

SEQ ID NO: 210401 - DNA, 19 bp, Artificial sequence
  SiRNA target sequence
tatatttttaattaaaaaa

SEQ ID NO: 210402 - DNA, 19 bp, Artificial sequence
  SiRNA target sequence
atatttttaattaaaaaat

SEQ ID NO: 210403 - DNA, 19 bp, Artificial sequence
  SiRNA target sequence
tatttttaattaaaaaata

SEQ ID NO: 210404 - DNA, 19 bp, Artificial sequence
  SiRNA target sequence
atttttaattaaaaaatat

SEQ ID NO: 210405 - DNA, 19 bp, Artificial sequence
  SiRNA target sequence
tttttaattaaaaaatatt

SEQ ID NO: 210406 - DNA, 19 bp, Artificial sequence
  SiRNA target sequence
ttttaattaaaaaatattt

SEQ ID NO: 210407 - DNA, 19 bp, Artificial sequence
  SiRNA target sequence
tttaattaaaaaatatttg

SEQ ID NO: 210408 - DNA, 19 bp, Artificial sequence
  SiRNA target sequence
ttaattaaaaaatatttgg

SEQ ID NO: 210409 - DNA, 19 bp, Artificial sequence
  SiRNA target sequence
taattaaaaaatatttgga

SEQ ID NO: 210410 - DNA, 19 bp, Artificial sequence
  SiRNA target sequence
aattaaaaaatatttggag

SEQ ID NO: 210411 - DNA, 19 bp, Artificial sequence
  SiRNA target sequence
attaaaaaatatttggaga

SEQ ID NO: 210412 - DNA, 19 bp, Artificial sequence
  SiRNA target sequence
ttaaaaaatatttggagag

SEQ ID NO: 210413 - DNA, 19 bp, Artificial sequence
  SiRNA target sequence
taaaaaatatttggagagg

SEQ ID NO: 210414 - DNA, 19 bp, Artificial sequence
  SiRNA target sequence
aaaaaatatttggagagga

SEQ ID NO: 210415 - DNA, 19 bp, Artificial sequence
  SiRNA target sequence
aaaaatatttggagaggaa

SEQ ID NO: 210416 - DNA, 19 bp, Artificial sequence
  SiRNA target sequence
aaaatatttggagaggaat

SEQ ID NO: 210417 - DNA, 19 bp, Artificial sequence
  SiRNA target sequence
aaatatttggagaggaatg

SEQ ID NO: 210418 - DNA, 19 bp, Artificial sequence
  SiRNA target sequence
aatatttggagaggaatgt

SEQ ID NO: 210419 - DNA, 19 bp, Artificial sequence
  SiRNA target sequence
atatttggagaggaatgtg

SEQ ID NO: 210420 - DNA, 19 bp, Artificial sequence
  SiRNA target sequence
tatttggagaggaatgtga

SEQ ID NO: 210421 - DNA, 19 bp, Artificial sequence
  SiRNA target sequence
atttggagaggaatgtgac

SEQ ID NO: 210422 - DNA, 19 bp, Artificial sequence
  SiRNA target sequence
tttggagaggaatgtgact

SEQ ID NO: 210423 - DNA, 19 bp, Artificial sequence
  SiRNA target sequence
ttggagaggaatgtgacta

SEQ ID NO: 210424 - DNA, 19 bp, Artificial sequence
  SiRNA target sequence
tggagaggaatgtgactaa

SEQ ID NO: 210425 - DNA, 19 bp, Artificial sequence
  SiRNA target sequence
ggagaggaatgtgactaac

SEQ ID NO: 210426 - DNA, 19 bp, Artificial sequence
  SiRNA target sequence
gagaggaatgtgactaaca

SEQ ID NO: 210427 - DNA, 19 bp, Artificial sequence
  SiRNA target sequence
agaggaatgtgactaacaa

SEQ ID NO: 210428 - DNA, 19 bp, Artificial sequence
  SiRNA target sequence
gaggaatgtgactaacaaa

SEQ ID NO: 210429 - DNA, 19 bp, Artificial sequence
  SiRNA target sequence
aggaatgtgactaacaaac

SEQ ID NO: 210430 - DNA, 19 bp, Artificial sequence
  SiRNA target sequence
ggaatgtgactaacaaacc

SEQ ID NO: 210431 - DNA, 19 bp, Artificial sequence
  SiRNA target sequence
gaatgtgactaacaaacct

SEQ ID NO: 210432 - DNA, 19 bp, Artificial sequence
  SiRNA target sequence
aatgtgactaacaaacctt

SEQ ID NO: 210433 - DNA, 19 bp, Artificial sequence
  SiRNA target sequence
atgtgactaacaaaccttt

SEQ ID NO: 210434 - DNA, 19 bp, Artificial sequence
  SiRNA target sequence
tgtgactaacaaacctttg

SEQ ID NO: 210435 - DNA, 19 bp, Artificial sequence
  SiRNA target sequence
gtgactaacaaacctttgt

SEQ ID NO: 210436 - DNA, 19 bp, Artificial sequence
  SiRNA target sequence
tgactaacaaacctttgtt

SEQ ID NO: 210437 - DNA, 19 bp, Artificial sequence
  SiRNA target sequence
gactaacaaacctttgttt

SEQ ID NO: 210438 - DNA, 19 bp, Artificial sequence
  SiRNA target sequence
actaacaaacctttgtttg

SEQ ID NO: 210439 - DNA, 19 bp, Artificial sequence
  SiRNA target sequence
ctaacaaacctttgtttgt

SEQ ID NO: 210440 - DNA, 19 bp, Artificial sequence
  SiRNA target sequence
taacaaacctttgtttgtt

SEQ ID NO: 210441 - DNA, 19 bp, Artificial sequence
  SiRNA target sequence
aacaaacctttgtttgttg

SEQ ID NO: 210442 - DNA, 19 bp, Artificial sequence
  SiRNA target sequence
acaaacctttgtttgttgt

SEQ ID NO: 210443 - DNA, 19 bp, Artificial sequence
  SiRNA target sequence
caaacctttgtttgttgta

SEQ ID NO: 210444 - DNA, 19 bp, Artificial sequence
  SiRNA target sequence
aaacctttgtttgttgtaa

SEQ ID NO: 210445 - DNA, 19 bp, Artificial sequence
  SiRNA target sequence
aacctttgtttgttgtaaa

SEQ ID NO: 210446 - DNA, 19 bp, Artificial sequence
  SiRNA target sequence
acctttgtttgttgtaaaa

SEQ ID NO: 210447 - DNA, 19 bp, Artificial sequence
  SiRNA target sequence
cctttgtttgttgtaaaat

SEQ ID NO: 210448 - DNA, 19 bp, Artificial sequence
  SiRNA target sequence
ctttgtttgttgtaaaatc

SEQ ID NO: 210449 - DNA, 19 bp, Artificial sequence
  SiRNA target sequence
tttgtttgttgtaaaatct

SEQ ID NO: 210450 - DNA, 19 bp, Artificial sequence
  SiRNA target sequence
ttgtttgttgtaaaatctg

SEQ ID NO: 210451 - DNA, 19 bp, Artificial sequence
  SiRNA target sequence
tgtttgttgtaaaatctgt

SEQ ID NO: 210452 - DNA, 19 bp, Artificial sequence
  SiRNA target sequence
gtttgttgtaaaatctgtt

SEQ ID NO: 210453 - DNA, 19 bp, Artificial sequence
  SiRNA target sequence
tttgttgtaaaatctgtta

SEQ ID NO: 210454 - DNA, 19 bp, Artificial sequence
  SiRNA target sequence
ttgttgtaaaatctgttaa

SEQ ID NO: 210455 - DNA, 19 bp, Artificial sequence
  SiRNA target sequence
tgttgtaaaatctgttaaa

SEQ ID NO: 210456 - DNA, 19 bp, Artificial sequence
  SiRNA target sequence
gttgtaaaatctgttaaaa

SEQ ID NO: 210457 - DNA, 19 bp, Artificial sequence
  SiRNA target sequence
ttgtaaaatctgttaaaaa

SEQ ID NO: 210458 - DNA, 19 bp, Artificial sequence
  SiRNA target sequence
tgtaaaatctgttaaaaag

SEQ ID NO: 210459 - DNA, 19 bp, Artificial sequence
  SiRNA target sequence
gtaaaatctgttaaaaaga

SEQ ID NO: 210460 - DNA, 19 bp, Artificial sequence
  SiRNA target sequence
taaaatctgttaaaaagaa

SEQ ID NO: 210461 - DNA, 19 bp, Artificial sequence
  SiRNA target sequence
aaaatctgttaaaaagaag

SEQ ID NO: 210462 - DNA, 19 bp, Artificial sequence
  SiRNA target sequence
aaatctgttaaaaagaagg

SEQ ID NO: 210463 - DNA, 19 bp, Artificial sequence
  SiRNA target sequence
aatctgttaaaaagaaggg

SEQ ID NO: 210464 - DNA, 19 bp, Artificial sequence
  SiRNA target sequence
atctgttaaaaagaaggga

SEQ ID NO: 210465 - DNA, 19 bp, Artificial sequence
  SiRNA target sequence
tctgttaaaaagaagggac

SEQ ID NO: 210466 - DNA, 19 bp, Artificial sequence
  SiRNA target sequence
ctgttaaaaagaagggacc

SEQ ID NO: 210467 - DNA, 19 bp, Artificial sequence
  SiRNA target sequence
tgttaaaaagaagggacca

SEQ ID NO: 210468 - DNA, 19 bp, Artificial sequence
  SiRNA target sequence
gttaaaaagaagggaccaa

SEQ ID NO: 210469 - DNA, 19 bp, Artificial sequence
  SiRNA target sequence
ttaaaaagaagggaccaaa

SEQ ID NO: 210470 - DNA, 19 bp, Artificial sequence
  SiRNA target sequence
taaaaagaagggaccaaaa

SEQ ID NO: 210471 - DNA, 19 bp, Artificial sequence
  SiRNA target sequence
aaaaagaagggaccaaaag

SEQ ID NO: 210472 - DNA, 19 bp, Artificial sequence
  SiRNA target sequence
aaaagaagggaccaaaagt

SEQ ID NO: 210473 - DNA, 19 bp, Artificial sequence
  SiRNA target sequence
aaagaagggaccaaaagtt

SEQ ID NO: 210474 - DNA, 19 bp, Artificial sequence
  SiRNA target sequence
aagaagggaccaaaagtta

SEQ ID NO: 210475 - DNA, 19 bp, Artificial sequence
  SiRNA target sequence
agaagggaccaaaagttaa

SEQ ID NO: 210476 - DNA, 19 bp, Artificial sequence
  SiRNA target sequence
gaagggaccaaaagttaaa

SEQ ID NO: 210477 - DNA, 19 bp, Artificial sequence
  SiRNA target sequence
aagggaccaaaagttaaag

SEQ ID NO: 210478 - DNA, 19 bp, Artificial sequence
  SiRNA target sequence
agggaccaaaagttaaagt

SEQ ID NO: 210479 - DNA, 19 bp, Artificial sequence
  SiRNA target sequence
gggaccaaaagttaaagta

SEQ ID NO: 210480 - DNA, 19 bp, Artificial sequence
  SiRNA target sequence
ggaccaaaagttaaagtag

SEQ ID NO: 210481 - DNA, 19 bp, Artificial sequence
  SiRNA target sequence
gaccaaaagttaaagtagg

SEQ ID NO: 210482 - DNA, 19 bp, Artificial sequence
  SiRNA target sequence
accaaaagttaaagtagga

SEQ ID NO: 210483 - DNA, 19 bp, Artificial sequence
  SiRNA target sequence
ccaaaagttaaagtaggat

SEQ ID NO: 210484 - DNA, 19 bp, Artificial sequence
  SiRNA target sequence
caaaagttaaagtaggatt

SEQ ID NO: 210485 - DNA, 19 bp, Artificial sequence
  SiRNA target sequence
aaaagttaaagtaggattt

SEQ ID NO: 210486 - DNA, 19 bp, Artificial sequence
  SiRNA target sequence
aaagttaaagtaggatttg

SEQ ID NO: 210487 - DNA, 19 bp, Artificial sequence
  SiRNA target sequence
aagttaaagtaggatttgc

SEQ ID NO: 210488 - DNA, 19 bp, Artificial sequence
  SiRNA target sequence
agttaaagtaggatttgcg

SEQ ID NO: 210489 - DNA, 19 bp, Artificial sequence
  SiRNA target sequence
gttaaagtaggatttgcgg

SEQ ID NO: 210490 - DNA, 19 bp, Artificial sequence
  SiRNA target sequence
ttaaagtaggatttgcgga

SEQ ID NO: 210491 - DNA, 19 bp, Artificial sequence
  SiRNA target sequence
taaagtaggatttgcggag

SEQ ID NO: 210492 - DNA, 19 bp, Artificial sequence
  SiRNA target sequence
aaagtaggatttgcggagg

SEQ ID NO: 210493 - DNA, 19 bp, Artificial sequence
  SiRNA target sequence
aagtaggatttgcggaggg

SEQ ID NO: 210494 - DNA, 19 bp, Artificial sequence
  SiRNA target sequence
agtaggatttgcggagggc

SEQ ID NO: 210495 - DNA, 19 bp, Artificial sequence
  SiRNA target sequence
gtaggatttgcggagggcc

SEQ ID NO: 210496 - DNA, 19 bp, Artificial sequence
  SiRNA target sequence
taggatttgcggagggcct

SEQ ID NO: 210497 - DNA, 19 bp, Artificial sequence
  SiRNA target sequence
aggatttgcggagggcctt

SEQ ID NO: 210498 - DNA, 19 bp, Artificial sequence
  SiRNA target sequence
ggatttgcggagggcctta

SEQ ID NO: 210499 - DNA, 19 bp, Artificial sequence
  SiRNA target sequence
gatttgcggagggccttaa

SEQ ID NO: 210500 - DNA, 19 bp, Artificial sequence
  SiRNA target sequence
atttgcggagggccttaaa

SEQ ID NO: 210501 - DNA, 19 bp, Artificial sequence
  SiRNA target sequence
tttgcggagggccttaaag

SEQ ID NO: 210502 - DNA, 19 bp, Artificial sequence
  SiRNA target sequence
ttgcggagggccttaaaga

SEQ ID NO: 210503 - DNA, 19 bp, Artificial sequence
  SiRNA target sequence
tgcggagggccttaaagaa

SEQ ID NO: 210504 - DNA, 19 bp, Artificial sequence
  SiRNA target sequence
gcggagggccttaaagaaa

SEQ ID NO: 210505 - DNA, 19 bp, Artificial sequence
  SiRNA target sequence
cggagggccttaaagaaat

SEQ ID NO: 210506 - DNA, 19 bp, Artificial sequence
  SiRNA target sequence
ggagggccttaaagaaatg

SEQ ID NO: 210507 - DNA, 19 bp, Artificial sequence
  SiRNA target sequence
gagggccttaaagaaatga

SEQ ID NO: 210508 - DNA, 19 bp, Artificial sequence
  SiRNA target sequence
agggccttaaagaaatgat

SEQ ID NO: 210509 - DNA, 19 bp, Artificial sequence
  SiRNA target sequence
gggccttaaagaaatgatg

SEQ ID NO: 210510 - DNA, 19 bp, Artificial sequence
  SiRNA target sequence
ggccttaaagaaatgatgg

SEQ ID NO: 210511 - DNA, 19 bp, Artificial sequence
  SiRNA target sequence
gccttaaagaaatgatggc

SEQ ID NO: 210512 - DNA, 19 bp, Artificial sequence
  SiRNA target sequence
ccttaaagaaatgatggca

SEQ ID NO: 210513 - DNA, 19 bp, Artificial sequence
  SiRNA target sequence
cttaaagaaatgatggcat

SEQ ID NO: 210514 - DNA, 19 bp, Artificial sequence
  SiRNA target sequence
ttaaagaaatgatggcatc

SEQ ID NO: 210515 - DNA, 19 bp, Artificial sequence
  SiRNA target sequence
taaagaaatgatggcatca

SEQ ID NO: 210516 - DNA, 19 bp, Artificial sequence
  SiRNA target sequence
aaagaaatgatggcatcaa

SEQ ID NO: 210517 - DNA, 19 bp, Artificial sequence
  SiRNA target sequence
aagaaatgatggcatcaaa

SEQ ID NO: 210518 - DNA, 19 bp, Artificial sequence
  SiRNA target sequence
agaaatgatggcatcaaag

SEQ ID NO: 210519 - DNA, 19 bp, Artificial sequence
  SiRNA target sequence
gaaatgatggcatcaaagt

SEQ ID NO: 210520 - DNA, 19 bp, Artificial sequence
  SiRNA target sequence
aaatgatggcatcaaagtt

SEQ ID NO: 210521 - DNA, 19 bp, Artificial sequence
  SiRNA target sequence
aatgatggcatcaaagtta

SEQ ID NO: 210522 - DNA, 19 bp, Artificial sequence
  SiRNA target sequence
atgatggcatcaaagttat

SEQ ID NO: 210523 - DNA, 19 bp, Artificial sequence
  SiRNA target sequence
tgatggcatcaaagttatt

SEQ ID NO: 210524 - DNA, 19 bp, Artificial sequence
  SiRNA target sequence
gatggcatcaaagttatta

SEQ ID NO: 210525 - DNA, 19 bp, Artificial sequence
  SiRNA target sequence
atggcatcaaagttattac

SEQ ID NO: 210526 - DNA, 19 bp, Artificial sequence
  SiRNA target sequence
tggcatcaaagttattact

SEQ ID NO: 210527 - DNA, 19 bp, Artificial sequence
  SiRNA target sequence
ggcatcaaagttattactt

SEQ ID NO: 210528 - DNA, 19 bp, Artificial sequence
  SiRNA target sequence
gcatcaaagttattactta

SEQ ID NO: 210529 - DNA, 19 bp, Artificial sequence
  SiRNA target sequence
catcaaagttattacttaa

SEQ ID NO: 210530 - DNA, 19 bp, Artificial sequence
  SiRNA target sequence
atcaaagttattacttaac

SEQ ID NO: 210531 - DNA, 19 bp, Artificial sequence
  SiRNA target sequence
tcaaagttattacttaaca

SEQ ID NO: 210532 - DNA, 19 bp, Artificial sequence
  SiRNA target sequence
caaagttattacttaacat

SEQ ID NO: 210533 - DNA, 19 bp, Artificial sequence
  SiRNA target sequence
aaagttattacttaacatt

SEQ ID NO: 210534 - DNA, 19 bp, Artificial sequence
  SiRNA target sequence
aagttattacttaacattt

SEQ ID NO: 210535 - DNA, 19 bp, Artificial sequence
  SiRNA target sequence
agttattacttaacatttc

SEQ ID NO: 210536 - DNA, 19 bp, Artificial sequence
  SiRNA target sequence
gttattacttaacatttca

SEQ ID NO: 210537 - DNA, 19 bp, Artificial sequence
  SiRNA target sequence
ttattacttaacatttcat

SEQ ID NO: 210538 - DNA, 19 bp, Artificial sequence
  SiRNA target sequence
tattacttaacatttcatt

SEQ ID NO: 210539 - DNA, 19 bp, Artificial sequence
  SiRNA target sequence
attacttaacatttcatta

SEQ ID NO: 210540 - DNA, 19 bp, Artificial sequence
  SiRNA target sequence
ttacttaacatttcattaa

SEQ ID NO: 210541 - DNA, 19 bp, Artificial sequence
  SiRNA target sequence
tacttaacatttcattaac

SEQ ID NO: 210542 - DNA, 19 bp, Artificial sequence
  SiRNA target sequence
acttaacatttcattaact

SEQ ID NO: 210543 - DNA, 19 bp, Artificial sequence
  SiRNA target sequence
cttaacatttcattaactg

SEQ ID NO: 210544 - DNA, 19 bp, Artificial sequence
  SiRNA target sequence
ttaacatttcattaactgt

SEQ ID NO: 210545 - DNA, 19 bp, Artificial sequence
  SiRNA target sequence
taacatttcattaactgtt

SEQ ID NO: 210546 - DNA, 19 bp, Artificial sequence
  SiRNA target sequence
aacatttcattaactgtta

SEQ ID NO: 210547 - DNA, 19 bp, Artificial sequence
  SiRNA target sequence
acatttcattaactgttat

SEQ ID NO: 210548 - DNA, 19 bp, Artificial sequence
  SiRNA target sequence
catttcattaactgttatg

SEQ ID NO: 210549 - DNA, 19 bp, Artificial sequence
  SiRNA target sequence
atttcattaactgttatgt

SEQ ID NO: 210550 - DNA, 19 bp, Artificial sequence
  SiRNA target sequence
tttcattaactgttatgtt

SEQ ID NO: 210551 - DNA, 19 bp, Artificial sequence
  SiRNA target sequence
ttcattaactgttatgttc

SEQ ID NO: 210552 - DNA, 19 bp, Artificial sequence
  SiRNA target sequence
tcattaactgttatgttct

SEQ ID NO: 210553 - DNA, 19 bp, Artificial sequence
  SiRNA target sequence
cattaactgttatgttcta

SEQ ID NO: 210554 - DNA, 19 bp, Artificial sequence
  SiRNA target sequence
attaactgttatgttctat

SEQ ID NO: 210555 - DNA, 19 bp, Artificial sequence
  SiRNA target sequence
ttaactgttatgttctatg

SEQ ID NO: 210556 - DNA, 19 bp, Artificial sequence
  SiRNA target sequence
taactgttatgttctatgg

SEQ ID NO: 210557 - DNA, 19 bp, Artificial sequence
  SiRNA target sequence
aactgttatgttctatggt

SEQ ID NO: 210558 - DNA, 19 bp, Artificial sequence
  SiRNA target sequence
actgttatgttctatggta

SEQ ID NO: 210559 - DNA, 19 bp, Artificial sequence
  SiRNA target sequence
ctgttatgttctatggtat

SEQ ID NO: 210560 - DNA, 19 bp, Artificial sequence
  SiRNA target sequence
tgttatgttctatggtata

SEQ ID NO: 210561 - DNA, 19 bp, Artificial sequence
  SiRNA target sequence
gttatgttctatggtatat

SEQ ID NO: 210562 - DNA, 19 bp, Artificial sequence
  SiRNA target sequence
ttatgttctatggtatatc

SEQ ID NO: 210563 - DNA, 19 bp, Artificial sequence
  SiRNA target sequence
tatgttctatggtatatca

SEQ ID NO: 210564 - DNA, 19 bp, Artificial sequence
  SiRNA target sequence
atgttctatggtatatcaa

SEQ ID NO: 210565 - DNA, 19 bp, Artificial sequence
  SiRNA target sequence
tgttctatggtatatcaac

SEQ ID NO: 210566 - DNA, 19 bp, Artificial sequence
  SiRNA target sequence
gttctatggtatatcaact

SEQ ID NO: 210567 - DNA, 19 bp, Artificial sequence
  SiRNA target sequence
ttctatggtatatcaacta

SEQ ID NO: 210568 - DNA, 19 bp, Artificial sequence
  SiRNA target sequence
tctatggtatatcaactaa

SEQ ID NO: 210569 - DNA, 19 bp, Artificial sequence
  SiRNA target sequence
ctatggtatatcaactaat

SEQ ID NO: 210570 - DNA, 19 bp, Artificial sequence
  SiRNA target sequence
tatggtatatcaactaatt

SEQ ID NO: 210571 - DNA, 19 bp, Artificial sequence
  SiRNA target sequence
atggtatatcaactaattt

SEQ ID NO: 210572 - DNA, 19 bp, Artificial sequence
  SiRNA target sequence
tggtatatcaactaattta

SEQ ID NO: 210573 - DNA, 19 bp, Artificial sequence
  SiRNA target sequence
ggtatatcaactaatttaa

SEQ ID NO: 210574 - DNA, 19 bp, Artificial sequence
  SiRNA target sequence
gtatatcaactaatttaat

SEQ ID NO: 210575 - DNA, 19 bp, Artificial sequence
  SiRNA target sequence
tatatcaactaatttaata

SEQ ID NO: 210576 - DNA, 19 bp, Artificial sequence
  SiRNA target sequence
atatcaactaatttaatag

SEQ ID NO: 210577 - DNA, 19 bp, Artificial sequence
  SiRNA target sequence
tatcaactaatttaataga

SEQ ID NO: 210578 - DNA, 19 bp, Artificial sequence
  SiRNA target sequence
atcaactaatttaatagaa

SEQ ID NO: 210579 - DNA, 19 bp, Artificial sequence
  SiRNA target sequence
tcaactaatttaatagaat

SEQ ID NO: 210580 - DNA, 19 bp, Artificial sequence
  SiRNA target sequence
caactaatttaatagaatc

SEQ ID NO: 210581 - DNA, 19 bp, Artificial sequence
  SiRNA target sequence
aactaatttaatagaatca

SEQ ID NO: 210582 - DNA, 19 bp, Artificial sequence
  SiRNA target sequence
actaatttaatagaatcaa

SEQ ID NO: 210583 - DNA, 19 bp, Artificial sequence
  SiRNA target sequence
ctaatttaatagaatcaac

SEQ ID NO: 210584 - DNA, 19 bp, Artificial sequence
  SiRNA target sequence
taatttaatagaatcaaca

SEQ ID NO: 210585 - DNA, 19 bp, Artificial sequence
  SiRNA target sequence
aatttaatagaatcaacat

SEQ ID NO: 210586 - DNA, 19 bp, Artificial sequence
  SiRNA target sequence
atttaatagaatcaacatt

SEQ ID NO: 210587 - DNA, 19 bp, Artificial sequence
  SiRNA target sequence
tttaatagaatcaacattt

SEQ ID NO: 210588 - DNA, 19 bp, Artificial sequence
  SiRNA target sequence
ttaatagaatcaacattta

SEQ ID NO: 210589 - DNA, 19 bp, Artificial sequence
  SiRNA target sequence
taatagaatcaacatttaa

SEQ ID NO: 210590 - DNA, 19 bp, Artificial sequence
  SiRNA target sequence
aatagaatcaacatttaaa

SEQ ID NO: 210591 - DNA, 19 bp, Artificial sequence
  SiRNA target sequence
atagaatcaacatttaaaa

SEQ ID NO: 210592 - DNA, 19 bp, Artificial sequence
  SiRNA target sequence
tagaatcaacatttaaaag

SEQ ID NO: 210593 - DNA, 19 bp, Artificial sequence
  SiRNA target sequence
agaatcaacatttaaaagt

SEQ ID NO: 210594 - DNA, 19 bp, Artificial sequence
  SiRNA target sequence
gaatcaacatttaaaagtg

SEQ ID NO: 210595 - DNA, 19 bp, Artificial sequence
  SiRNA target sequence
aatcaacatttaaaagtgg

SEQ ID NO: 210596 - DNA, 19 bp, Artificial sequence
  SiRNA target sequence
atcaacatttaaaagtgga

SEQ ID NO: 210597 - DNA, 19 bp, Artificial sequence
  SiRNA target sequence
tcaacatttaaaagtggac

SEQ ID NO: 210598 - DNA, 19 bp, Artificial sequence
  SiRNA target sequence
caacatttaaaagtggact

SEQ ID NO: 210599 - DNA, 19 bp, Artificial sequence
  SiRNA target sequence
aacatttaaaagtggactt

SEQ ID NO: 210600 - DNA, 19 bp, Artificial sequence
  SiRNA target sequence
acatttaaaagtggacttg

SEQ ID NO: 210601 - DNA, 19 bp, Artificial sequence
  SiRNA target sequence
catttaaaagtggacttgt

SEQ ID NO: 210602 - DNA, 19 bp, Artificial sequence
  SiRNA target sequence
atttaaaagtggacttgtg

SEQ ID NO: 210603 - DNA, 19 bp, Artificial sequence
  SiRNA target sequence
tttaaaagtggacttgtga

SEQ ID NO: 210604 - DNA, 19 bp, Artificial sequence
  SiRNA target sequence
ttaaaagtggacttgtgaa

SEQ ID NO: 210605 - DNA, 19 bp, Artificial sequence
  SiRNA target sequence
taaaagtggacttgtgaaa

SEQ ID NO: 210606 - DNA, 19 bp, Artificial sequence
  SiRNA target sequence
aaaagtggacttgtgaaag

SEQ ID NO: 210607 - DNA, 19 bp, Artificial sequence
  SiRNA target sequence
aaagtggacttgtgaaagg

SEQ ID NO: 210608 - DNA, 19 bp, Artificial sequence
  SiRNA target sequence
aagtggacttgtgaaaggt

SEQ ID NO: 210609 - DNA, 19 bp, Artificial sequence
  SiRNA target sequence
agtggacttgtgaaaggtg

SEQ ID NO: 210610 - DNA, 19 bp, Artificial sequence
  SiRNA target sequence
gtggacttgtgaaaggtgc

SEQ ID NO: 210611 - DNA, 19 bp, Artificial sequence
  SiRNA target sequence
tggacttgtgaaaggtgca

SEQ ID NO: 210612 - DNA, 19 bp, Artificial sequence
  SiRNA target sequence
ggacttgtgaaaggtgcag

SEQ ID NO: 210613 - DNA, 19 bp, Artificial sequence
  SiRNA target sequence
gacttgtgaaaggtgcaga

SEQ ID NO: 210614 - DNA, 19 bp, Artificial sequence
  SiRNA target sequence
acttgtgaaaggtgcagaa

SEQ ID NO: 210615 - DNA, 19 bp, Artificial sequence
  SiRNA target sequence
cttgtgaaaggtgcagaag

SEQ ID NO: 210616 - DNA, 19 bp, Artificial sequence
  SiRNA target sequence
ttgtgaaaggtgcagaaga

SEQ ID NO: 210617 - DNA, 19 bp, Artificial sequence
  SiRNA target sequence
tgtgaaaggtgcagaagaa

SEQ ID NO: 210618 - DNA, 19 bp, Artificial sequence
  SiRNA target sequence
gtgaaaggtgcagaagaat

SEQ ID NO: 210619 - DNA, 19 bp, Artificial sequence
  SiRNA target sequence
tgaaaggtgcagaagaatt

SEQ ID NO: 210620 - DNA, 19 bp, Artificial sequence
  SiRNA target sequence
gaaaggtgcagaagaatta

SEQ ID NO: 210621 - DNA, 19 bp, Artificial sequence
  SiRNA target sequence
aaaggtgcagaagaattaa

SEQ ID NO: 210622 - DNA, 19 bp, Artificial sequence
  SiRNA target sequence
aaggtgcagaagaattaaa

SEQ ID NO: 210623 - DNA, 19 bp, Artificial sequence
  SiRNA target sequence
aggtgcagaagaattaaac

SEQ ID NO: 210624 - DNA, 19 bp, Artificial sequence
  SiRNA target sequence
ggtgcagaagaattaaacg

SEQ ID NO: 210625 - DNA, 19 bp, Artificial sequence
  SiRNA target sequence
gtgcagaagaattaaacga

SEQ ID NO: 210626 - DNA, 19 bp, Artificial sequence
  SiRNA target sequence
tgcagaagaattaaacgag

SEQ ID NO: 210627 - DNA, 19 bp, Artificial sequence
  SiRNA target sequence
gcagaagaattaaacgaga

SEQ ID NO: 210628 - DNA, 19 bp, Artificial sequence
  SiRNA target sequence
cagaagaattaaacgagaa

SEQ ID NO: 210629 - DNA, 19 bp, Artificial sequence
  SiRNA target sequence
agaagaattaaacgagaat

SEQ ID NO: 210630 - DNA, 19 bp, Artificial sequence
  SiRNA target sequence
gaagaattaaacgagaata

SEQ ID NO: 210631 - DNA, 19 bp, Artificial sequence
  SiRNA target sequence
aagaattaaacgagaatac

SEQ ID NO: 210632 - DNA, 19 bp, Artificial sequence
  SiRNA target sequence
agaattaaacgagaatact

SEQ ID NO: 210633 - DNA, 19 bp, Artificial sequence
  SiRNA target sequence
gaattaaacgagaatacta

SEQ ID NO: 210634 - DNA, 19 bp, Artificial sequence
  SiRNA target sequence
aattaaacgagaatactaa

SEQ ID NO: 210635 - DNA, 19 bp, Artificial sequence
  SiRNA target sequence
attaaacgagaatactaaa

SEQ ID NO: 210636 - DNA, 19 bp, Artificial sequence
  SiRNA target sequence
ttaaacgagaatactaaaa

SEQ ID NO: 210637 - DNA, 19 bp, Artificial sequence
  SiRNA target sequence
taaacgagaatactaaaag

SEQ ID NO: 210638 - DNA, 19 bp, Artificial sequence
  SiRNA target sequence
aaacgagaatactaaaagt

SEQ ID NO: 210639 - DNA, 19 bp, Artificial sequence
  SiRNA target sequence
aacgagaatactaaaagtt

SEQ ID NO: 210640 - DNA, 19 bp, Artificial sequence
  SiRNA target sequence
acgagaatactaaaagtta

SEQ ID NO: 210641 - DNA, 19 bp, Artificial sequence
  SiRNA target sequence
cgagaatactaaaagttat

SEQ ID NO: 210642 - DNA, 19 bp, Artificial sequence
  SiRNA target sequence
gagaatactaaaagttatt

SEQ ID NO: 210643 - DNA, 19 bp, Artificial sequence
  SiRNA target sequence
agaatactaaaagttattc

SEQ ID NO: 210644 - DNA, 19 bp, Artificial sequence
  SiRNA target sequence
gaatactaaaagttattct

SEQ ID NO: 210645 - DNA, 19 bp, Artificial sequence
  SiRNA target sequence
aatactaaaagttattcta

SEQ ID NO: 210646 - DNA, 19 bp, Artificial sequence
  SiRNA target sequence
atactaaaagttattctat

SEQ ID NO: 210647 - DNA, 19 bp, Artificial sequence
  SiRNA target sequence
tactaaaagttattctatg

SEQ ID NO: 210648 - DNA, 19 bp, Artificial sequence
  SiRNA target sequence
actaaaagttattctatgg

SEQ ID NO: 210649 - DNA, 19 bp, Artificial sequence
  SiRNA target sequence
ctaaaagttattctatggg

SEQ ID NO: 210650 - DNA, 19 bp, Artificial sequence
  SiRNA target sequence
taaaagttattctatggga

SEQ ID NO: 210651 - DNA, 19 bp, Artificial sequence
  SiRNA target sequence
aaaagttattctatgggat

SEQ ID NO: 210652 - DNA, 19 bp, Artificial sequence
  SiRNA target sequence
aaagttattctatgggata

SEQ ID NO: 210653 - DNA, 19 bp, Artificial sequence
  SiRNA target sequence
aagttattctatgggatat

SEQ ID NO: 210654 - DNA, 19 bp, Artificial sequence
  SiRNA target sequence
agttattctatgggatata

SEQ ID NO: 210655 - DNA, 19 bp, Artificial sequence
  SiRNA target sequence
gttattctatgggatataa

SEQ ID NO: 210656 - DNA, 19 bp, Artificial sequence
  SiRNA target sequence
ttattctatgggatataat

SEQ ID NO: 210657 - DNA, 19 bp, Artificial sequence
  SiRNA target sequence
tattctatgggatataatt

SEQ ID NO: 210658 - DNA, 19 bp, Artificial sequence
  SiRNA target sequence
attctatgggatataattc

SEQ ID NO: 210659 - DNA, 19 bp, Artificial sequence
  SiRNA target sequence
ttctatgggatataattca

SEQ ID NO: 210660 - DNA, 19 bp, Artificial sequence
  SiRNA target sequence
tctatgggatataattcat

SEQ ID NO: 210661 - DNA, 19 bp, Artificial sequence
  SiRNA target sequence
ctatgggatataattcatt

SEQ ID NO: 210662 - DNA, 19 bp, Artificial sequence
  SiRNA target sequence
tatgggatataattcattt

SEQ ID NO: 210663 - DNA, 19 bp, Artificial sequence
  SiRNA target sequence
atgggatataattcatttg

SEQ ID NO: 210664 - DNA, 19 bp, Artificial sequence
  SiRNA target sequence
tgggatataattcatttga

SEQ ID NO: 210665 - DNA, 19 bp, Artificial sequence
  SiRNA target sequence
gggatataattcatttgaa

SEQ ID NO: 210666 - DNA, 19 bp, Artificial sequence
  SiRNA target sequence
ggatataattcatttgaac

SEQ ID NO: 210667 - DNA, 19 bp, Artificial sequence
  SiRNA target sequence
gatataattcatttgaaca

SEQ ID NO: 210668 - DNA, 19 bp, Artificial sequence
  SiRNA target sequence
atataattcatttgaacaa

SEQ ID NO: 210669 - DNA, 19 bp, Artificial sequence
  SiRNA target sequence
tataattcatttgaacaaa

SEQ ID NO: 210670 - DNA, 19 bp, Artificial sequence
  SiRNA target sequence
ataattcatttgaacaaaa

SEQ ID NO: 210671 - DNA, 19 bp, Artificial sequence
  SiRNA target sequence
taattcatttgaacaaaag

SEQ ID NO: 210672 - DNA, 19 bp, Artificial sequence
  SiRNA target sequence
aattcatttgaacaaaaga

SEQ ID NO: 210673 - DNA, 19 bp, Artificial sequence
  SiRNA target sequence
attcatttgaacaaaagat

SEQ ID NO: 210674 - DNA, 19 bp, Artificial sequence
  SiRNA target sequence
ttcatttgaacaaaagata

SEQ ID NO: 210675 - DNA, 19 bp, Artificial sequence
  SiRNA target sequence
tcatttgaacaaaagatag

SEQ ID NO: 210676 - DNA, 19 bp, Artificial sequence
  SiRNA target sequence
catttgaacaaaagatagc

SEQ ID NO: 210677 - DNA, 19 bp, Artificial sequence
  SiRNA target sequence
atttgaacaaaagatagca

SEQ ID NO: 210678 - DNA, 19 bp, Artificial sequence
  SiRNA target sequence
tttgaacaaaagatagcat

SEQ ID NO: 210679 - DNA, 19 bp, Artificial sequence
  SiRNA target sequence
ttgaacaaaagatagcatc

SEQ ID NO: 210680 - DNA, 19 bp, Artificial sequence
  SiRNA target sequence
tgaacaaaagatagcatca

SEQ ID NO: 210681 - DNA, 19 bp, Artificial sequence
  SiRNA target sequence
gaacaaaagatagcatcaa

SEQ ID NO: 210682 - DNA, 19 bp, Artificial sequence
  SiRNA target sequence
aacaaaagatagcatcaat

SEQ ID NO: 210683 - DNA, 19 bp, Artificial sequence
  SiRNA target sequence
acaaaagatagcatcaata

SEQ ID NO: 210684 - DNA, 19 bp, Artificial sequence
  SiRNA target sequence
caaaagatagcatcaataa

SEQ ID NO: 210685 - DNA, 19 bp, Artificial sequence
  SiRNA target sequence
aaaagatagcatcaataac

SEQ ID NO: 210686 - DNA, 19 bp, Artificial sequence
  SiRNA target sequence
aaagatagcatcaataact

SEQ ID NO: 210687 - DNA, 19 bp, Artificial sequence
  SiRNA target sequence
aagatagcatcaataactg

SEQ ID NO: 210688 - DNA, 19 bp, Artificial sequence
  SiRNA target sequence
agatagcatcaataactgt

SEQ ID NO: 210689 - DNA, 19 bp, Artificial sequence
  SiRNA target sequence
gatagcatcaataactgtt

SEQ ID NO: 210690 - DNA, 19 bp, Artificial sequence
  SiRNA target sequence
atagcatcaataactgtta

SEQ ID NO: 210691 - DNA, 19 bp, Artificial sequence
  SiRNA target sequence
tagcatcaataactgttat

SEQ ID NO: 210692 - DNA, 19 bp, Artificial sequence
  SiRNA target sequence
agcatcaataactgttatt

SEQ ID NO: 210693 - DNA, 19 bp, Artificial sequence
  SiRNA target sequence
gcatcaataactgttatta

SEQ ID NO: 210694 - DNA, 19 bp, Artificial sequence
  SiRNA target sequence
catcaataactgttattat

SEQ ID NO: 210695 - DNA, 19 bp, Artificial sequence
  SiRNA target sequence
atcaataactgttattatc

SEQ ID NO: 210696 - DNA, 19 bp, Artificial sequence
  SiRNA target sequence
tcaataactgttattatcc

SEQ ID NO: 210697 - DNA, 19 bp, Artificial sequence
  SiRNA target sequence
caataactgttattatcct

SEQ ID NO: 210698 - DNA, 19 bp, Artificial sequence
  SiRNA target sequence
aataactgttattatcctg

SEQ ID NO: 210699 - DNA, 19 bp, Artificial sequence
  SiRNA target sequence
ataactgttattatcctgc

SEQ ID NO: 210700 - DNA, 19 bp, Artificial sequence
  SiRNA target sequence
taactgttattatcctgct

SEQ ID NO: 210701 - DNA, 19 bp, Artificial sequence
  SiRNA target sequence
aactgttattatcctgctt

SEQ ID NO: 210702 - DNA, 19 bp, Artificial sequence
  SiRNA target sequence
actgttattatcctgcttt

SEQ ID NO: 210703 - DNA, 19 bp, Artificial sequence
  SiRNA target sequence
ctgttattatcctgctttt

SEQ ID NO: 210704 - DNA, 19 bp, Artificial sequence
  SiRNA target sequence
tgttattatcctgctttta

SEQ ID NO: 210705 - DNA, 19 bp, Artificial sequence
  SiRNA target sequence
gttattatcctgcttttat

SEQ ID NO: 210706 - DNA, 19 bp, Artificial sequence
  SiRNA target sequence
ttattatcctgcttttatc

SEQ ID NO: 210707 - DNA, 19 bp, Artificial sequence
  SiRNA target sequence
tattatcctgcttttatca

SEQ ID NO: 210708 - DNA, 19 bp, Artificial sequence
  SiRNA target sequence
attatcctgcttttatcac

SEQ ID NO: 210709 - DNA, 19 bp, Artificial sequence
  SiRNA target sequence
ttatcctgcttttatcacc

SEQ ID NO: 210710 - DNA, 19 bp, Artificial sequence
  SiRNA target sequence
tatcctgcttttatcacca

SEQ ID NO: 210711 - DNA, 19 bp, Artificial sequence
  SiRNA target sequence
atcctgcttttatcaccat

SEQ ID NO: 210712 - DNA, 19 bp, Artificial sequence
  SiRNA target sequence
tcctgcttttatcaccatt

SEQ ID NO: 210713 - DNA, 19 bp, Artificial sequence
  SiRNA target sequence
cctgcttttatcaccattt

SEQ ID NO: 210714 - DNA, 19 bp, Artificial sequence
  SiRNA target sequence
ctgcttttatcaccatttc

SEQ ID NO: 210715 - DNA, 19 bp, Artificial sequence
  SiRNA target sequence
tgcttttatcaccatttcc

SEQ ID NO: 210716 - DNA, 19 bp, Artificial sequence
  SiRNA target sequence
gcttttatcaccatttcca

SEQ ID NO: 210717 - DNA, 19 bp, Artificial sequence
  SiRNA target sequence
cttttatcaccatttccaa

SEQ ID NO: 210718 - DNA, 19 bp, Artificial sequence
  SiRNA target sequence
ttttatcaccatttccaaa

SEQ ID NO: 210719 - DNA, 19 bp, Artificial sequence
  SiRNA target sequence
tttatcaccatttccaaaa

SEQ ID NO: 210720 - DNA, 19 bp, Artificial sequence
  SiRNA target sequence
ttatcaccatttccaaaat

SEQ ID NO: 210721 - DNA, 19 bp, Artificial sequence
  SiRNA target sequence
tatcaccatttccaaaatt

SEQ ID NO: 210722 - DNA, 19 bp, Artificial sequence
  SiRNA target sequence
atcaccatttccaaaatta

SEQ ID NO: 210723 - DNA, 19 bp, Artificial sequence
  SiRNA target sequence
tcaccatttccaaaattaa

SEQ ID NO: 210724 - DNA, 19 bp, Artificial sequence
  SiRNA target sequence
caccatttccaaaattaat

SEQ ID NO: 210725 - DNA, 19 bp, Artificial sequence
  SiRNA target sequence
accatttccaaaattaata

SEQ ID NO: 210726 - DNA, 19 bp, Artificial sequence
  SiRNA target sequence
ccatttccaaaattaatac

SEQ ID NO: 210727 - DNA, 19 bp, Artificial sequence
  SiRNA target sequence
catttccaaaattaataca

SEQ ID NO: 210728 - DNA, 19 bp, Artificial sequence
  SiRNA target sequence
atttccaaaattaatacaa

SEQ ID NO: 210729 - DNA, 19 bp, Artificial sequence
  SiRNA target sequence
tttccaaaattaatacaaa

SEQ ID NO: 210730 - DNA, 19 bp, Artificial sequence
  SiRNA target sequence
ttccaaaattaatacaaac

SEQ ID NO: 210731 - DNA, 19 bp, Artificial sequence
  SiRNA target sequence
tccaaaattaatacaaacc

SEQ ID NO: 210732 - DNA, 19 bp, Artificial sequence
  SiRNA target sequence
ccaaaattaatacaaacca

SEQ ID NO: 210733 - DNA, 19 bp, Artificial sequence
  SiRNA target sequence
caaaattaatacaaaccaa

SEQ ID NO: 210734 - DNA, 19 bp, Artificial sequence
  SiRNA target sequence
aaaattaatacaaaccaaa

SEQ ID NO: 210735 - DNA, 19 bp, Artificial sequence
  SiRNA target sequence
aaattaatacaaaccaaag

SEQ ID NO: 210736 - DNA, 19 bp, Artificial sequence
  SiRNA target sequence
aattaatacaaaccaaagg

SEQ ID NO: 210737 - DNA, 19 bp, Artificial sequence
  SiRNA target sequence
attaatacaaaccaaagga

SEQ ID NO: 210738 - DNA, 19 bp, Artificial sequence
  SiRNA target sequence
ttaatacaaaccaaaggat

SEQ ID NO: 210739 - DNA, 19 bp, Artificial sequence
  SiRNA target sequence
taatacaaaccaaaggatg

SEQ ID NO: 210740 - DNA, 19 bp, Artificial sequence
  SiRNA target sequence
aatacaaaccaaaggatgg

SEQ ID NO: 210741 - DNA, 19 bp, Artificial sequence
  SiRNA target sequence
atacaaaccaaaggatgga

SEQ ID NO: 210742 - DNA, 19 bp, Artificial sequence
  SiRNA target sequence
tacaaaccaaaggatggat

SEQ ID NO: 210743 - DNA, 19 bp, Artificial sequence
  SiRNA target sequence
acaaaccaaaggatggata

SEQ ID NO: 210744 - DNA, 19 bp, Artificial sequence
  SiRNA target sequence
caaaccaaaggatggatat

SEQ ID NO: 210745 - DNA, 19 bp, Artificial sequence
  SiRNA target sequence
aaaccaaaggatggatatt

SEQ ID NO: 210746 - DNA, 19 bp, Artificial sequence
  SiRNA target sequence
aaccaaaggatggatattt

SEQ ID NO: 210747 - DNA, 19 bp, Artificial sequence
  SiRNA target sequence
accaaaggatggatatttg

SEQ ID NO: 210748 - DNA, 19 bp, Artificial sequence
  SiRNA target sequence
ccaaaggatggatatttgt

SEQ ID NO: 210749 - DNA, 19 bp, Artificial sequence
  SiRNA target sequence
caaaggatggatatttgtt

SEQ ID NO: 210750 - DNA, 19 bp, Artificial sequence
  SiRNA target sequence
aaaggatggatatttgttg

SEQ ID NO: 210751 - DNA, 19 bp, Artificial sequence
  SiRNA target sequence
aaggatggatatttgttgc

SEQ ID NO: 210752 - DNA, 19 bp, Artificial sequence
  SiRNA target sequence
aggatggatatttgttgcc

SEQ ID NO: 210753 - DNA, 19 bp, Artificial sequence
  SiRNA target sequence
ggatggatatttgttgcca

SEQ ID NO: 210754 - DNA, 19 bp, Artificial sequence
  SiRNA target sequence
gatggatatttgttgccat

SEQ ID NO: 210755 - DNA, 19 bp, Artificial sequence
  SiRNA target sequence
atggatatttgttgccata

SEQ ID NO: 210756 - DNA, 19 bp, Artificial sequence
  SiRNA target sequence
tggatatttgttgccatag

SEQ ID NO: 210757 - DNA, 19 bp, Artificial sequence
  SiRNA target sequence
ggatatttgttgccatagc

SEQ ID NO: 210758 - DNA, 19 bp, Artificial sequence
  SiRNA target sequence
gatatttgttgccatagcg

SEQ ID NO: 210759 - DNA, 19 bp, Artificial sequence
  SiRNA target sequence
atatttgttgccatagcgt

SEQ ID NO: 210760 - DNA, 19 bp, Artificial sequence
  SiRNA target sequence
tatttgttgccatagcgtg

SEQ ID NO: 210761 - DNA, 19 bp, Artificial sequence
  SiRNA target sequence
atttgttgccatagcgtgc

SEQ ID NO: 210762 - DNA, 19 bp, Artificial sequence
  SiRNA target sequence
tttgttgccatagcgtgcc

SEQ ID NO: 210763 - DNA, 19 bp, Artificial sequence
  SiRNA target sequence
ttgttgccatagcgtgccc

SEQ ID NO: 210764 - DNA, 19 bp, Artificial sequence
  SiRNA target sequence
tgttgccatagcgtgccca

SEQ ID NO: 210765 - DNA, 19 bp, Artificial sequence
  SiRNA target sequence
gttgccatagcgtgcccac

SEQ ID NO: 210766 - DNA, 19 bp, Artificial sequence
  SiRNA target sequence
ttgccatagcgtgcccact

SEQ ID NO: 210767 - DNA, 19 bp, Artificial sequence
  SiRNA target sequence
tgccatagcgtgcccactt

SEQ ID NO: 210768 - DNA, 19 bp, Artificial sequence
  SiRNA target sequence
gccatagcgtgcccactta

SEQ ID NO: 210769 - DNA, 19 bp, Artificial sequence
  SiRNA target sequence
ccatagcgtgcccacttat

SEQ ID NO: 210770 - DNA, 19 bp, Artificial sequence
  SiRNA target sequence
catagcgtgcccacttatt

SEQ ID NO: 210771 - DNA, 19 bp, Artificial sequence
  SiRNA target sequence
atagcgtgcccacttatta

SEQ ID NO: 210772 - DNA, 19 bp, Artificial sequence
  SiRNA target sequence
tagcgtgcccacttattac

SEQ ID NO: 210773 - DNA, 19 bp, Artificial sequence
  SiRNA target sequence
agcgtgcccacttattacc

SEQ ID NO: 210774 - DNA, 19 bp, Artificial sequence
  SiRNA target sequence
gcgtgcccacttattaccc

SEQ ID NO: 210775 - DNA, 19 bp, Artificial sequence
  SiRNA target sequence
cgtgcccacttattaccct

SEQ ID NO: 210776 - DNA, 19 bp, Artificial sequence
  SiRNA target sequence
gtgcccacttattaccctt

SEQ ID NO: 210777 - DNA, 19 bp, Artificial sequence
  SiRNA target sequence
tgcccacttattacccttt

SEQ ID NO: 210778 - DNA, 19 bp, Artificial sequence
  SiRNA target sequence
gcccacttattaccctttt

SEQ ID NO: 210779 - DNA, 19 bp, Artificial sequence
  SiRNA target sequence
cccacttattacccttttt

SEQ ID NO: 210780 - DNA, 19 bp, Artificial sequence
  SiRNA target sequence
ccacttattaccctttttg

SEQ ID NO: 210781 - DNA, 19 bp, Artificial sequence
  SiRNA target sequence
cacttattaccctttttgc

SEQ ID NO: 210782 - DNA, 19 bp, Artificial sequence
  SiRNA target sequence
acttattaccctttttgct

SEQ ID NO: 210783 - DNA, 19 bp, Artificial sequence
  SiRNA target sequence
cttattaccctttttgctg

SEQ ID NO: 210784 - DNA, 19 bp, Artificial sequence
  SiRNA target sequence
ttattaccctttttgctgt

SEQ ID NO: 210785 - DNA, 19 bp, Artificial sequence
  SiRNA target sequence
tattaccctttttgctgta

SEQ ID NO: 210786 - DNA, 19 bp, Artificial sequence
  SiRNA target sequence
attaccctttttgctgtag

SEQ ID NO: 210787 - DNA, 19 bp, Artificial sequence
  SiRNA target sequence
ttaccctttttgctgtagt

SEQ ID NO: 210788 - DNA, 19 bp, Artificial sequence
  SiRNA target sequence
taccctttttgctgtagtt

SEQ ID NO: 210789 - DNA, 19 bp, Artificial sequence
  SiRNA target sequence
accctttttgctgtagttt

SEQ ID NO: 210790 - DNA, 19 bp, Artificial sequence
  SiRNA target sequence
ccctttttgctgtagtttc

SEQ ID NO: 210791 - DNA, 19 bp, Artificial sequence
  SiRNA target sequence
cctttttgctgtagtttct

SEQ ID NO: 210792 - DNA, 19 bp, Artificial sequence
  SiRNA target sequence
ctttttgctgtagtttctg

SEQ ID NO: 210793 - DNA, 19 bp, Artificial sequence
  SiRNA target sequence
tttttgctgtagtttctgt

SEQ ID NO: 210794 - DNA, 19 bp, Artificial sequence
  SiRNA target sequence
ttttgctgtagtttctgtg

SEQ ID NO: 210795 - DNA, 19 bp, Artificial sequence
  SiRNA target sequence
tttgctgtagtttctgtgt

SEQ ID NO: 210796 - DNA, 19 bp, Artificial sequence
  SiRNA target sequence
ttgctgtagtttctgtgtg

SEQ ID NO: 210797 - DNA, 19 bp, Artificial sequence
  SiRNA target sequence
tgctgtagtttctgtgtgt

SEQ ID NO: 210798 - DNA, 19 bp, Artificial sequence
  SiRNA target sequence
gctgtagtttctgtgtgtg

SEQ ID NO: 210799 - DNA, 19 bp, Artificial sequence
  SiRNA target sequence
ctgtagtttctgtgtgtgg

SEQ ID NO: 210800 - DNA, 19 bp, Artificial sequence
  SiRNA target sequence
tgtagtttctgtgtgtggt

SEQ ID NO: 210801 - DNA, 19 bp, Artificial sequence
  SiRNA target sequence
gtagtttctgtgtgtggtc

SEQ ID NO: 210802 - DNA, 19 bp, Artificial sequence
  SiRNA target sequence
tagtttctgtgtgtggtct

SEQ ID NO: 210803 - DNA, 19 bp, Artificial sequence
  SiRNA target sequence
agtttctgtgtgtggtctt

SEQ ID NO: 210804 - DNA, 19 bp, Artificial sequence
  SiRNA target sequence
gtttctgtgtgtggtcttg

SEQ ID NO: 210805 - DNA, 19 bp, Artificial sequence
  SiRNA target sequence
tttctgtgtgtggtcttgc

SEQ ID NO: 210806 - DNA, 19 bp, Artificial sequence
  SiRNA target sequence
ttctgtgtgtggtcttgct

SEQ ID NO: 210807 - DNA, 19 bp, Artificial sequence
  SiRNA target sequence
tctgtgtgtggtcttgctt

SEQ ID NO: 210808 - DNA, 19 bp, Artificial sequence
  SiRNA target sequence
ctgtgtgtggtcttgcttt

SEQ ID NO: 210809 - DNA, 19 bp, Artificial sequence
  SiRNA target sequence
tgtgtgtggtcttgctttt

SEQ ID NO: 210810 - DNA, 19 bp, Artificial sequence
  SiRNA target sequence
gtgtgtggtcttgcttttt

SEQ ID NO: 210811 - DNA, 19 bp, Artificial sequence
  SiRNA target sequence
tgtgtggtcttgcttttta

SEQ ID NO: 210812 - DNA, 19 bp, Artificial sequence
  SiRNA target sequence
gtgtggtcttgctttttac

SEQ ID NO: 210813 - DNA, 19 bp, Artificial sequence
  SiRNA target sequence
tgtggtcttgctttttaca

SEQ ID NO: 210814 - DNA, 19 bp, Artificial sequence
  SiRNA target sequence
gtggtcttgctttttacaa

SEQ ID NO: 210815 - DNA, 19 bp, Artificial sequence
  SiRNA target sequence
tggtcttgctttttacaat

SEQ ID NO: 210816 - DNA, 19 bp, Artificial sequence
  SiRNA target sequence
ggtcttgctttttacaatt

SEQ ID NO: 210817 - DNA, 19 bp, Artificial sequence
  SiRNA target sequence
gtcttgctttttacaatta

SEQ ID NO: 210818 - DNA, 19 bp, Artificial sequence
  SiRNA target sequence
tcttgctttttacaattat

SEQ ID NO: 210819 - DNA, 19 bp, Artificial sequence
  SiRNA target sequence
cttgctttttacaattatc

SEQ ID NO: 210820 - DNA, 19 bp, Artificial sequence
  SiRNA target sequence
ttgctttttacaattatcc

SEQ ID NO: 210821 - DNA, 19 bp, Artificial sequence
  SiRNA target sequence
tgctttttacaattatccg

SEQ ID NO: 210822 - DNA, 19 bp, Artificial sequence
  SiRNA target sequence
gctttttacaattatccgg

SEQ ID NO: 210823 - DNA, 19 bp, Artificial sequence
  SiRNA target sequence
ctttttacaattatccggc

SEQ ID NO: 210824 - DNA, 19 bp, Artificial sequence
  SiRNA target sequence
tttttacaattatccggca

SEQ ID NO: 210825 - DNA, 19 bp, Artificial sequence
  SiRNA target sequence
ttttacaattatccggcaa

SEQ ID NO: 210826 - DNA, 19 bp, Artificial sequence
  SiRNA target sequence
tttacaattatccggcaac

SEQ ID NO: 210827 - DNA, 19 bp, Artificial sequence
  SiRNA target sequence
ttacaattatccggcaaca

SEQ ID NO: 210828 - DNA, 19 bp, Artificial sequence
  SiRNA target sequence
tacaattatccggcaacaa

SEQ ID NO: 210829 - DNA, 19 bp, Artificial sequence
  SiRNA target sequence
acaattatccggcaacaaa

SEQ ID NO: 210830 - DNA, 19 bp, Artificial sequence
  SiRNA target sequence
caattatccggcaacaaat

SEQ ID NO: 210831 - DNA, 19 bp, Artificial sequence
  SiRNA target sequence
aattatccggcaacaaata

SEQ ID NO: 210832 - DNA, 19 bp, Artificial sequence
  SiRNA target sequence
attatccggcaacaaataa

SEQ ID NO: 210833 - DNA, 19 bp, Artificial sequence
  SiRNA target sequence
ttatccggcaacaaataat

SEQ ID NO: 210834 - DNA, 19 bp, Artificial sequence
  SiRNA target sequence
tatccggcaacaaataatg

SEQ ID NO: 210835 - DNA, 19 bp, Artificial sequence
  SiRNA target sequence
atccggcaacaaataatga

SEQ ID NO: 210836 - DNA, 19 bp, Artificial sequence
  SiRNA target sequence
tccggcaacaaataatgac

SEQ ID NO: 210837 - DNA, 19 bp, Artificial sequence
  SiRNA target sequence
ccggcaacaaataatgaca

SEQ ID NO: 210838 - DNA, 19 bp, Artificial sequence
  SiRNA target sequence
cggcaacaaataatgacac

SEQ ID NO: 210839 - DNA, 19 bp, Artificial sequence
  SiRNA target sequence
ggcaacaaataatgacaca

SEQ ID NO: 210840 - DNA, 19 bp, Artificial sequence
  SiRNA target sequence
gcaacaaataatgacacaa

SEQ ID NO: 210841 - DNA, 19 bp, Artificial sequence
  SiRNA target sequence
caacaaataatgacacaaa

SEQ ID NO: 210842 - DNA, 19 bp, Artificial sequence
  SiRNA target sequence
aacaaataatgacacaaat

SEQ ID NO: 210843 - DNA, 19 bp, Artificial sequence
  SiRNA target sequence
acaaataatgacacaaatt

SEQ ID NO: 210844 - DNA, 19 bp, Artificial sequence
  SiRNA target sequence
caaataatgacacaaattt

SEQ ID NO: 210845 - DNA, 19 bp, Artificial sequence
  SiRNA target sequence
aaataatgacacaaatttt

SEQ ID NO: 210846 - DNA, 19 bp, Artificial sequence
  SiRNA target sequence
aataatgacacaaattttt

SEQ ID NO: 210847 - DNA, 19 bp, Artificial sequence
  SiRNA target sequence
ataatgacacaaatttttt

SEQ ID NO: 210848 - DNA, 19 bp, Artificial sequence
  SiRNA target sequence
taatgacacaaattttttt

SEQ ID NO: 210849 - DNA, 19 bp, Artificial sequence
  SiRNA target sequence
aatgacacaaatttttttc

SEQ ID NO: 210850 - DNA, 19 bp, Artificial sequence
  SiRNA target sequence
atgacacaaatttttttct

SEQ ID NO: 210851 - DNA, 19 bp, Artificial sequence
  SiRNA target sequence
tgacacaaatttttttcta

SEQ ID NO: 210852 - DNA, 19 bp, Artificial sequence
  SiRNA target sequence
gacacaaatttttttctaa

SEQ ID NO: 210853 - DNA, 19 bp, Artificial sequence
  SiRNA target sequence
acacaaatttttttctaaa

SEQ ID NO: 210854 - DNA, 19 bp, Artificial sequence
  SiRNA target sequence
cacaaatttttttctaaat

SEQ ID NO: 210855 - DNA, 19 bp, Artificial sequence
  SiRNA target sequence
acaaatttttttctaaatt

SEQ ID NO: 210856 - DNA, 19 bp, Artificial sequence
  SiRNA target sequence
caaatttttttctaaattc

SEQ ID NO: 210857 - DNA, 19 bp, Artificial sequence
  SiRNA target sequence
aaatttttttctaaattca

SEQ ID NO: 210858 - DNA, 19 bp, Artificial sequence
  SiRNA target sequence
aatttttttctaaattcat

SEQ ID NO: 210859 - DNA, 19 bp, Artificial sequence
  SiRNA target sequence
atttttttctaaattcatt

SEQ ID NO: 210860 - DNA, 19 bp, Artificial sequence
  SiRNA target sequence
tttttttctaaattcatta

SEQ ID NO: 210861 - DNA, 19 bp, Artificial sequence
  SiRNA target sequence
ttttttctaaattcattat

SEQ ID NO: 210862 - DNA, 19 bp, Artificial sequence
  SiRNA target sequence
tttttctaaattcattatg

SEQ ID NO: 210863 - DNA, 19 bp, Artificial sequence
  SiRNA target sequence
ttttctaaattcattatgt

SEQ ID NO: 210864 - DNA, 19 bp, Artificial sequence
  SiRNA target sequence
tttctaaattcattatgtg

SEQ ID NO: 210865 - DNA, 19 bp, Artificial sequence
  SiRNA target sequence
ttctaaattcattatgtgc

SEQ ID NO: 210866 - DNA, 19 bp, Artificial sequence
  SiRNA target sequence
tctaaattcattatgtgct

SEQ ID NO: 210867 - DNA, 19 bp, Artificial sequence
  SiRNA target sequence
ctaaattcattatgtgcta

SEQ ID NO: 210868 - DNA, 19 bp, Artificial sequence
  SiRNA target sequence
taaattcattatgtgctac

SEQ ID NO: 210869 - DNA, 19 bp, Artificial sequence
  SiRNA target sequence
aaattcattatgtgctacg

SEQ ID NO: 210870 - DNA, 19 bp, Artificial sequence
  SiRNA target sequence
aattcattatgtgctacgc

SEQ ID NO: 210871 - DNA, 19 bp, Artificial sequence
  SiRNA target sequence
attcattatgtgctacgcc

SEQ ID NO: 210872 - DNA, 19 bp, Artificial sequence
  SiRNA target sequence
ttcattatgtgctacgccc

SEQ ID NO: 210873 - DNA, 19 bp, Artificial sequence
  SiRNA target sequence
tcattatgtgctacgcccg

SEQ ID NO: 210874 - DNA, 19 bp, Artificial sequence
  SiRNA target sequence
cattatgtgctacgcccgg

SEQ ID NO: 210875 - DNA, 19 bp, Artificial sequence
  SiRNA target sequence
attatgtgctacgcccggt

SEQ ID NO: 210876 - DNA, 19 bp, Artificial sequence
  SiRNA target sequence
ttatgtgctacgcccggta

SEQ ID NO: 210877 - DNA, 19 bp, Artificial sequence
  SiRNA target sequence
tatgtgctacgcccggtaa

SEQ ID NO: 210878 - DNA, 19 bp, Artificial sequence
  SiRNA target sequence
atgtgctacgcccggtaaa

SEQ ID NO: 210879 - DNA, 19 bp, Artificial sequence
  SiRNA target sequence
tgtgctacgcccggtaaat

SEQ ID NO: 210880 - DNA, 19 bp, Artificial sequence
  SiRNA target sequence
gtgctacgcccggtaaatc

SEQ ID NO: 210881 - DNA, 19 bp, Artificial sequence
  SiRNA target sequence
tgctacgcccggtaaatcg

SEQ ID NO: 210882 - DNA, 19 bp, Artificial sequence
  SiRNA target sequence
gctacgcccggtaaatcgt

SEQ ID NO: 210883 - DNA, 19 bp, Artificial sequence
  SiRNA target sequence
ctacgcccggtaaatcgtt

SEQ ID NO: 210884 - DNA, 19 bp, Artificial sequence
  SiRNA target sequence
tacgcccggtaaatcgttt

SEQ ID NO: 210885 - DNA, 19 bp, Artificial sequence
  SiRNA target sequence
acgcccggtaaatcgttta

SEQ ID NO: 210886 - DNA, 19 bp, Artificial sequence
  SiRNA target sequence
cgcccggtaaatcgtttat

SEQ ID NO: 210887 - DNA, 19 bp, Artificial sequence
  SiRNA target sequence
gcccggtaaatcgtttata

SEQ ID NO: 210888 - DNA, 19 bp, Artificial sequence
  SiRNA target sequence
cccggtaaatcgtttataa

SEQ ID NO: 210889 - DNA, 19 bp, Artificial sequence
  SiRNA target sequence
ccggtaaatcgtttataaa

SEQ ID NO: 210890 - DNA, 19 bp, Artificial sequence
  SiRNA target sequence
cggtaaatcgtttataaaa

SEQ ID NO: 210891 - DNA, 19 bp, Artificial sequence
  SiRNA target sequence
ggtaaatcgtttataaaat

SEQ ID NO: 210892 - DNA, 19 bp, Artificial sequence
  SiRNA target sequence
gtaaatcgtttataaaatt

SEQ ID NO: 210893 - DNA, 19 bp, Artificial sequence
  SiRNA target sequence
taaatcgtttataaaatta

SEQ ID NO: 210894 - DNA, 19 bp, Artificial sequence
  SiRNA target sequence
aaatcgtttataaaattag

SEQ ID NO: 210895 - DNA, 19 bp, Artificial sequence
  SiRNA target sequence
aatcgtttataaaattaga

SEQ ID NO: 210896 - DNA, 19 bp, Artificial sequence
  SiRNA target sequence
atcgtttataaaattagaa

SEQ ID NO: 210897 - DNA, 19 bp, Artificial sequence
  SiRNA target sequence
tcgtttataaaattagaaa

SEQ ID NO: 210898 - DNA, 19 bp, Artificial sequence
  SiRNA target sequence
cgtttataaaattagaaaa

SEQ ID NO: 210899 - DNA, 19 bp, Artificial sequence
  SiRNA target sequence
gtttataaaattagaaaat

SEQ ID NO: 210900 - DNA, 19 bp, Artificial sequence
  SiRNA target sequence
tttataaaattagaaaatg

SEQ ID NO: 210901 - DNA, 19 bp, Artificial sequence
  SiRNA target sequence
ttataaaattagaaaatgt

SEQ ID NO: 210902 - DNA, 19 bp, Artificial sequence
  SiRNA target sequence
tataaaattagaaaatgtt

SEQ ID NO: 210903 - DNA, 19 bp, Artificial sequence
  SiRNA target sequence
ataaaattagaaaatgttt

SEQ ID NO: 210904 - DNA, 19 bp, Artificial sequence
  SiRNA target sequence
taaaattagaaaatgtttt

SEQ ID NO: 210905 - DNA, 19 bp, Artificial sequence
  SiRNA target sequence
aaaattagaaaatgtttta

SEQ ID NO: 210906 - DNA, 19 bp, Artificial sequence
  SiRNA target sequence
aaattagaaaatgttttag

SEQ ID NO: 210907 - DNA, 19 bp, Artificial sequence
  SiRNA target sequence
aattagaaaatgttttagg

SEQ ID NO: 210908 - DNA, 19 bp, Artificial sequence
  SiRNA target sequence
attagaaaatgttttagga

SEQ ID NO: 210909 - DNA, 19 bp, Artificial sequence
  SiRNA target sequence
ttagaaaatgttttaggat

SEQ ID NO: 210910 - DNA, 19 bp, Artificial sequence
  SiRNA target sequence
tagaaaatgttttaggatg

SEQ ID NO: 210911 - DNA, 19 bp, Artificial sequence
  SiRNA target sequence
agaaaatgttttaggatgt

SEQ ID NO: 210912 - DNA, 19 bp, Artificial sequence
  SiRNA target sequence
gaaaatgttttaggatgtg

SEQ ID NO: 210913 - DNA, 19 bp, Artificial sequence
  SiRNA target sequence
aaaatgttttaggatgtgt

SEQ ID NO: 210914 - DNA, 19 bp, Artificial sequence
  SiRNA target sequence
aaatgttttaggatgtgta

SEQ ID NO: 210915 - DNA, 19 bp, Artificial sequence
  SiRNA target sequence
aatgttttaggatgtgtag

SEQ ID NO: 210916 - DNA, 19 bp, Artificial sequence
  SiRNA target sequence
atgttttaggatgtgtagc

SEQ ID NO: 210917 - DNA, 19 bp, Artificial sequence
  SiRNA target sequence
tgttttaggatgtgtagct

SEQ ID NO: 210918 - DNA, 19 bp, Artificial sequence
  SiRNA target sequence
gttttaggatgtgtagctg

SEQ ID NO: 210919 - DNA, 19 bp, Artificial sequence
  SiRNA target sequence
ttttaggatgtgtagctgt

SEQ ID NO: 210920 - DNA, 19 bp, Artificial sequence
  SiRNA target sequence
tttaggatgtgtagctgta

SEQ ID NO: 210921 - DNA, 19 bp, Artificial sequence
  SiRNA target sequence
ttaggatgtgtagctgtag

SEQ ID NO: 210922 - DNA, 19 bp, Artificial sequence
  SiRNA target sequence
taggatgtgtagctgtagc

SEQ ID NO: 210923 - DNA, 19 bp, Artificial sequence
  SiRNA target sequence
aggatgtgtagctgtagct

SEQ ID NO: 210924 - DNA, 19 bp, Artificial sequence
  SiRNA target sequence
ggatgtgtagctgtagctc

SEQ ID NO: 210925 - DNA, 19 bp, Artificial sequence
  SiRNA target sequence
gatgtgtagctgtagctct

SEQ ID NO: 210926 - DNA, 19 bp, Artificial sequence
  SiRNA target sequence
atgtgtagctgtagctctt

SEQ ID NO: 210927 - DNA, 19 bp, Artificial sequence
  SiRNA target sequence
tgtgtagctgtagctctta

SEQ ID NO: 210928 - DNA, 19 bp, Artificial sequence
  SiRNA target sequence
gtgtagctgtagctcttat

SEQ ID NO: 210929 - DNA, 19 bp, Artificial sequence
  SiRNA target sequence
tgtagctgtagctcttatg

SEQ ID NO: 210930 - DNA, 19 bp, Artificial sequence
  SiRNA target sequence
gtagctgtagctcttatga

SEQ ID NO: 210931 - DNA, 19 bp, Artificial sequence
  SiRNA target sequence
tagctgtagctcttatgaa

SEQ ID NO: 210932 - DNA, 19 bp, Artificial sequence
  SiRNA target sequence
agctgtagctcttatgaaa

SEQ ID NO: 210933 - DNA, 19 bp, Artificial sequence
  SiRNA target sequence
gctgtagctcttatgaaag

SEQ ID NO: 210934 - DNA, 19 bp, Artificial sequence
  SiRNA target sequence
ctgtagctcttatgaaagt

SEQ ID NO: 210935 - DNA, 19 bp, Artificial sequence
  SiRNA target sequence
tgtagctcttatgaaagta

SEQ ID NO: 210936 - DNA, 19 bp, Artificial sequence
  SiRNA target sequence
gtagctcttatgaaagtag

SEQ ID NO: 210937 - DNA, 19 bp, Artificial sequence
  SiRNA target sequence
tagctcttatgaaagtagc

SEQ ID NO: 210938 - DNA, 19 bp, Artificial sequence
  SiRNA target sequence
agctcttatgaaagtagca

SEQ ID NO: 210939 - DNA, 19 bp, Artificial sequence
  SiRNA target sequence
gctcttatgaaagtagcaa

SEQ ID NO: 210940 - DNA, 19 bp, Artificial sequence
  SiRNA target sequence
ctcttatgaaagtagcaaa

SEQ ID NO: 210941 - DNA, 19 bp, Artificial sequence
  SiRNA target sequence
tcttatgaaagtagcaaaa

SEQ ID NO: 210942 - DNA, 19 bp, Artificial sequence
  SiRNA target sequence
cttatgaaagtagcaaaat

SEQ ID NO: 210943 - DNA, 19 bp, Artificial sequence
  SiRNA target sequence
ttatgaaagtagcaaaata

SEQ ID NO: 210944 - DNA, 19 bp, Artificial sequence
  SiRNA target sequence
tatgaaagtagcaaaatat

SEQ ID NO: 210945 - DNA, 19 bp, Artificial sequence
  SiRNA target sequence
atgaaagtagcaaaatatg

SEQ ID NO: 210946 - DNA, 19 bp, Artificial sequence
  SiRNA target sequence
tgaaagtagcaaaatatgg

SEQ ID NO: 210947 - DNA, 19 bp, Artificial sequence
  SiRNA target sequence
gaaagtagcaaaatatggc

SEQ ID NO: 210948 - DNA, 19 bp, Artificial sequence
  SiRNA target sequence
aaagtagcaaaatatggct

SEQ ID NO: 210949 - DNA, 19 bp, Artificial sequence
  SiRNA target sequence
aagtagcaaaatatggctc

SEQ ID NO: 210950 - DNA, 19 bp, Artificial sequence
  SiRNA target sequence
agtagcaaaatatggctct

SEQ ID NO: 210951 - DNA, 19 bp, Artificial sequence
  SiRNA target sequence
gtagcaaaatatggctctt

SEQ ID NO: 210952 - DNA, 19 bp, Artificial sequence
  SiRNA target sequence
tagcaaaatatggctcttt

SEQ ID NO: 210953 - DNA, 19 bp, Artificial sequence
  SiRNA target sequence
agcaaaatatggctctttt

SEQ ID NO: 210954 - DNA, 19 bp, Artificial sequence
  SiRNA target sequence
gcaaaatatggctcttttg

SEQ ID NO: 210955 - DNA, 19 bp, Artificial sequence
  SiRNA target sequence
caaaatatggctcttttga

SEQ ID NO: 210956 - DNA, 19 bp, Artificial sequence
  SiRNA target sequence
aaaatatggctcttttgat

SEQ ID NO: 210957 - DNA, 19 bp, Artificial sequence
  SiRNA target sequence
aaatatggctcttttgata

SEQ ID NO: 210958 - DNA, 19 bp, Artificial sequence
  SiRNA target sequence
aatatggctcttttgatat

SEQ ID NO: 210959 - DNA, 19 bp, Artificial sequence
  SiRNA target sequence
atatggctcttttgatatt

SEQ ID NO: 210960 - DNA, 19 bp, Artificial sequence
  SiRNA target sequence
tatggctcttttgatattt

SEQ ID NO: 210961 - DNA, 19 bp, Artificial sequence
  SiRNA target sequence
atggctcttttgatatttc

SEQ ID NO: 210962 - DNA, 19 bp, Artificial sequence
  SiRNA target sequence
tggctcttttgatatttcc

SEQ ID NO: 210963 - DNA, 19 bp, Artificial sequence
  SiRNA target sequence
ggctcttttgatatttcca

SEQ ID NO: 210964 - DNA, 19 bp, Artificial sequence
  SiRNA target sequence
gctcttttgatatttccaa

SEQ ID NO: 210965 - DNA, 19 bp, Artificial sequence
  SiRNA target sequence
ctcttttgatatttccaaa

SEQ ID NO: 210966 - DNA, 19 bp, Artificial sequence
  SiRNA target sequence
tcttttgatatttccaaag

SEQ ID NO: 210967 - DNA, 19 bp, Artificial sequence
  SiRNA target sequence
cttttgatatttccaaaga

SEQ ID NO: 210968 - DNA, 19 bp, Artificial sequence
  SiRNA target sequence
ttttgatatttccaaagaa

SEQ ID NO: 210969 - DNA, 19 bp, Artificial sequence
  SiRNA target sequence
tttgatatttccaaagaag

SEQ ID NO: 210970 - DNA, 19 bp, Artificial sequence
  SiRNA target sequence
ttgatatttccaaagaagc

SEQ ID NO: 210971 - DNA, 19 bp, Artificial sequence
  SiRNA target sequence
tgatatttccaaagaagcc

SEQ ID NO: 210972 - DNA, 19 bp, Artificial sequence
  SiRNA target sequence
gatatttccaaagaagcca

SEQ ID NO: 210973 - DNA, 19 bp, Artificial sequence
  SiRNA target sequence
atatttccaaagaagccat

SEQ ID NO: 210974 - DNA, 19 bp, Artificial sequence
  SiRNA target sequence
tatttccaaagaagccatt

SEQ ID NO: 210975 - DNA, 19 bp, Artificial sequence
  SiRNA target sequence
atttccaaagaagccattt

SEQ ID NO: 210976 - DNA, 19 bp, Artificial sequence
  SiRNA target sequence
tttccaaagaagccatttc

SEQ ID NO: 210977 - DNA, 19 bp, Artificial sequence
  SiRNA target sequence
ttccaaagaagccatttca

SEQ ID NO: 210978 - DNA, 19 bp, Artificial sequence
  SiRNA target sequence
tccaaagaagccatttcaa

SEQ ID NO: 210979 - DNA, 19 bp, Artificial sequence
  SiRNA target sequence
ccaaagaagccatttcaat

SEQ ID NO: 210980 - DNA, 19 bp, Artificial sequence
  SiRNA target sequence
caaagaagccatttcaatg

SEQ ID NO: 210981 - DNA, 19 bp, Artificial sequence
  SiRNA target sequence
aaagaagccatttcaatgc

SEQ ID NO: 210982 - DNA, 19 bp, Artificial sequence
  SiRNA target sequence
aagaagccatttcaatgca

SEQ ID NO: 210983 - DNA, 19 bp, Artificial sequence
  SiRNA target sequence
agaagccatttcaatgcag

SEQ ID NO: 210984 - DNA, 19 bp, Artificial sequence
  SiRNA target sequence
gaagccatttcaatgcaga

SEQ ID NO: 210985 - DNA, 19 bp, Artificial sequence
  SiRNA target sequence
aagccatttcaatgcagat

SEQ ID NO: 210986 - DNA, 19 bp, Artificial sequence
  SiRNA target sequence
agccatttcaatgcagatt

SEQ ID NO: 210987 - DNA, 19 bp, Artificial sequence
  SiRNA target sequence
gccatttcaatgcagattg

SEQ ID NO: 210988 - DNA, 19 bp, Artificial sequence
  SiRNA target sequence
ccatttcaatgcagattga

SEQ ID NO: 210989 - DNA, 19 bp, Artificial sequence
  SiRNA target sequence
catttcaatgcagattgat

SEQ ID NO: 210990 - DNA, 19 bp, Artificial sequence
  SiRNA target sequence
atttcaatgcagattgatt

SEQ ID NO: 210991 - DNA, 19 bp, Artificial sequence
  SiRNA target sequence
tttcaatgcagattgattc

SEQ ID NO: 210992 - DNA, 19 bp, Artificial sequence
  SiRNA target sequence
ttcaatgcagattgattcg

SEQ ID NO: 210993 - DNA, 19 bp, Artificial sequence
  SiRNA target sequence
tcaatgcagattgattcgt

SEQ ID NO: 210994 - DNA, 19 bp, Artificial sequence
  SiRNA target sequence
caatgcagattgattcgtc

SEQ ID NO: 210995 - DNA, 19 bp, Artificial sequence
  SiRNA target sequence
aatgcagattgattcgtca

SEQ ID NO: 210996 - DNA, 19 bp, Artificial sequence
  SiRNA target sequence
atgcagattgattcgtcat

SEQ ID NO: 210997 - DNA, 19 bp, Artificial sequence
  SiRNA target sequence
tgcagattgattcgtcatt

SEQ ID NO: 210998 - DNA, 19 bp, Artificial sequence
  SiRNA target sequence
gcagattgattcgtcattg

SEQ ID NO: 210999 - DNA, 19 bp, Artificial sequence
  SiRNA target sequence
cagattgattcgtcattgc

SEQ ID NO: 211000 - DNA, 19 bp, Artificial sequence
  SiRNA target sequence
agattgattcgtcattgcg

SEQ ID NO: 211001 - DNA, 19 bp, Artificial sequence
  SiRNA target sequence
gattgattcgtcattgcgt

SEQ ID NO: 211002 - DNA, 19 bp, Artificial sequence
  SiRNA target sequence
attgattcgtcattgcgtg

SEQ ID NO: 211003 - DNA, 19 bp, Artificial sequence
  SiRNA target sequence
ttgattcgtcattgcgtgc

SEQ ID NO: 211004 - DNA, 19 bp, Artificial sequence
  SiRNA target sequence
tgattcgtcattgcgtgca

SEQ ID NO: 211005 - DNA, 19 bp, Artificial sequence
  SiRNA target sequence
gattcgtcattgcgtgcac

SEQ ID NO: 211006 - DNA, 19 bp, Artificial sequence
  SiRNA target sequence
attcgtcattgcgtgcacg

SEQ ID NO: 211007 - DNA, 19 bp, Artificial sequence
  SiRNA target sequence
ttcgtcattgcgtgcacgt

SEQ ID NO: 211008 - DNA, 19 bp, Artificial sequence
  SiRNA target sequence
tcgtcattgcgtgcacgtt

SEQ ID NO: 211009 - DNA, 19 bp, Artificial sequence
  SiRNA target sequence
cgtcattgcgtgcacgtta

SEQ ID NO: 211010 - DNA, 19 bp, Artificial sequence
  SiRNA target sequence
gtcattgcgtgcacgttat

SEQ ID NO: 211011 - DNA, 19 bp, Artificial sequence
  SiRNA target sequence
tcattgcgtgcacgttata

SEQ ID NO: 211012 - DNA, 19 bp, Artificial sequence
  SiRNA target sequence
cattgcgtgcacgttataa

SEQ ID NO: 211013 - DNA, 19 bp, Artificial sequence
  SiRNA target sequence
attgcgtgcacgttataaa

SEQ ID NO: 211014 - DNA, 19 bp, Artificial sequence
  SiRNA target sequence
ttgcgtgcacgttataaag

SEQ ID NO: 211015 - DNA, 19 bp, Artificial sequence
  SiRNA target sequence
tgcgtgcacgttataaagg

SEQ ID NO: 211016 - DNA, 19 bp, Artificial sequence
  SiRNA target sequence
gcgtgcacgttataaagga

SEQ ID NO: 211017 - DNA, 19 bp, Artificial sequence
  SiRNA target sequence
cgtgcacgttataaaggaa

SEQ ID NO: 211018 - DNA, 19 bp, Artificial sequence
  SiRNA target sequence
gtgcacgttataaaggaat

SEQ ID NO: 211019 - DNA, 19 bp, Artificial sequence
  SiRNA target sequence
tgcacgttataaaggaatt

SEQ ID NO: 211020 - DNA, 19 bp, Artificial sequence
  SiRNA target sequence
gcacgttataaaggaattt

SEQ ID NO: 211021 - DNA, 19 bp, Artificial sequence
  SiRNA target sequence
cacgttataaaggaatttt

SEQ ID NO: 211022 - DNA, 19 bp, Artificial sequence
  SiRNA target sequence
acgttataaaggaattttt

SEQ ID NO: 211023 - DNA, 19 bp, Artificial sequence
  SiRNA target sequence
cgttataaaggaatttttg

SEQ ID NO: 211024 - DNA, 19 bp, Artificial sequence
  SiRNA target sequence
gttataaaggaatttttga

SEQ ID NO: 211025 - DNA, 19 bp, Artificial sequence
  SiRNA target sequence
ttataaaggaatttttgac

SEQ ID NO: 211026 - DNA, 19 bp, Artificial sequence
  SiRNA target sequence
tataaaggaatttttgacg

SEQ ID NO: 211027 - DNA, 19 bp, Artificial sequence
  SiRNA target sequence
ataaaggaatttttgacgg

SEQ ID NO: 211028 - DNA, 19 bp, Artificial sequence
  SiRNA target sequence
taaaggaatttttgacggt

SEQ ID NO: 211029 - DNA, 19 bp, Artificial sequence
  SiRNA target sequence
aaaggaatttttgacggtg

SEQ ID NO: 211030 - DNA, 19 bp, Artificial sequence
  SiRNA target sequence
aaggaatttttgacggtgt

SEQ ID NO: 211031 - DNA, 19 bp, Artificial sequence
  SiRNA target sequence
aggaatttttgacggtgtt

SEQ ID NO: 211032 - DNA, 19 bp, Artificial sequence
  SiRNA target sequence
ggaatttttgacggtgttt

SEQ ID NO: 211033 - DNA, 19 bp, Artificial sequence
  SiRNA target sequence
gaatttttgacggtgtttt

SEQ ID NO: 211034 - DNA, 19 bp, Artificial sequence
  SiRNA target sequence
aatttttgacggtgttttt

SEQ ID NO: 211035 - DNA, 19 bp, Artificial sequence
  SiRNA target sequence
atttttgacggtgtttttg

SEQ ID NO: 211036 - DNA, 19 bp, Artificial sequence
  SiRNA target sequence
tttttgacggtgtttttgg

SEQ ID NO: 211037 - DNA, 19 bp, Artificial sequence
  SiRNA target sequence
ttttgacggtgtttttggt

SEQ ID NO: 211038 - DNA, 19 bp, Artificial sequence
  SiRNA target sequence
tttgacggtgtttttggta

SEQ ID NO: 211039 - DNA, 19 bp, Artificial sequence
  SiRNA target sequence
ttgacggtgtttttggtaa

SEQ ID NO: 211040 - DNA, 19 bp, Artificial sequence
  SiRNA target sequence
tgacggtgtttttggtaag

SEQ ID NO: 211041 - DNA, 19 bp, Artificial sequence
  SiRNA target sequence
gacggtgtttttggtaagt

SEQ ID NO: 211042 - DNA, 19 bp, Artificial sequence
  SiRNA target sequence
acggtgtttttggtaagtt

SEQ ID NO: 211043 - DNA, 19 bp, Artificial sequence
  SiRNA target sequence
cggtgtttttggtaagtta

SEQ ID NO: 211044 - DNA, 19 bp, Artificial sequence
  SiRNA target sequence
ggtgtttttggtaagttag

SEQ ID NO: 211045 - DNA, 19 bp, Artificial sequence
  SiRNA target sequence
gtgtttttggtaagttagg

SEQ ID NO: 211046 - DNA, 19 bp, Artificial sequence
  SiRNA target sequence
tgtttttggtaagttagga

SEQ ID NO: 211047 - DNA, 19 bp, Artificial sequence
  SiRNA target sequence
gtttttggtaagttaggaa

SEQ ID NO: 211048 - DNA, 19 bp, Artificial sequence
  SiRNA target sequence
tttttggtaagttaggaaa

SEQ ID NO: 211049 - DNA, 19 bp, Artificial sequence
  SiRNA target sequence
ttttggtaagttaggaaaa

SEQ ID NO: 211050 - DNA, 19 bp, Artificial sequence
  SiRNA target sequence
tttggtaagttaggaaaat

SEQ ID NO: 211051 - DNA, 19 bp, Artificial sequence
  SiRNA target sequence
ttggtaagttaggaaaatc

SEQ ID NO: 211052 - DNA, 19 bp, Artificial sequence
  SiRNA target sequence
tggtaagttaggaaaatct

SEQ ID NO: 211053 - DNA, 19 bp, Artificial sequence
  SiRNA target sequence
ggtaagttaggaaaatctc

SEQ ID NO: 211054 - DNA, 19 bp, Artificial sequence
  SiRNA target sequence
gtaagttaggaaaatctct

SEQ ID NO: 211055 - DNA, 19 bp, Artificial sequence
  SiRNA target sequence
taagttaggaaaatctctt

SEQ ID NO: 211056 - DNA, 19 bp, Artificial sequence
  SiRNA target sequence
aagttaggaaaatctcttg

SEQ ID NO: 211057 - DNA, 19 bp, Artificial sequence
  SiRNA target sequence
agttaggaaaatctcttgg

SEQ ID NO: 211058 - DNA, 19 bp, Artificial sequence
  SiRNA target sequence
gttaggaaaatctcttgga

SEQ ID NO: 211059 - DNA, 19 bp, Artificial sequence
  SiRNA target sequence
ttaggaaaatctcttggat

SEQ ID NO: 211060 - DNA, 19 bp, Artificial sequence
  SiRNA target sequence
taggaaaatctcttggatc

SEQ ID NO: 211061 - DNA, 19 bp, Artificial sequence
  SiRNA target sequence
aggaaaatctcttggatcg

SEQ ID NO: 211062 - DNA, 19 bp, Artificial sequence
  SiRNA target sequence
ggaaaatctcttggatcgt

SEQ ID NO: 211063 - DNA, 19 bp, Artificial sequence
  SiRNA target sequence
gaaaatctcttggatcgtt

SEQ ID NO: 211064 - DNA, 19 bp, Artificial sequence
  SiRNA target sequence
aaaatctcttggatcgtta

SEQ ID NO: 211065 - DNA, 19 bp, Artificial sequence
  SiRNA target sequence
aaatctcttggatcgttat

SEQ ID NO: 211066 - DNA, 19 bp, Artificial sequence
  SiRNA target sequence
aatctcttggatcgttatt

SEQ ID NO: 211067 - DNA, 19 bp, Artificial sequence
  SiRNA target sequence
atctcttggatcgttattt

SEQ ID NO: 211068 - DNA, 19 bp, Artificial sequence
  SiRNA target sequence
tctcttggatcgttatttg

SEQ ID NO: 211069 - DNA, 19 bp, Artificial sequence
  SiRNA target sequence
ctcttggatcgttatttgt

SEQ ID NO: 211070 - DNA, 19 bp, Artificial sequence
  SiRNA target sequence
tcttggatcgttatttgtg

SEQ ID NO: 211071 - DNA, 19 bp, Artificial sequence
  SiRNA target sequence
cttggatcgttatttgtgt

SEQ ID NO: 211072 - DNA, 19 bp, Artificial sequence
  SiRNA target sequence
ttggatcgttatttgtgtg

SEQ ID NO: 211073 - DNA, 19 bp, Artificial sequence
  SiRNA target sequence
tggatcgttatttgtgtgg

SEQ ID NO: 211074 - DNA, 19 bp, Artificial sequence
  SiRNA target sequence
ggatcgttatttgtgtgga

SEQ ID NO: 211075 - DNA, 19 bp, Artificial sequence
  SiRNA target sequence
gatcgttatttgtgtggat

SEQ ID NO: 211076 - DNA, 19 bp, Artificial sequence
  SiRNA target sequence
atcgttatttgtgtggatt

SEQ ID NO: 211077 - DNA, 19 bp, Artificial sequence
  SiRNA target sequence
tcgttatttgtgtggatta

SEQ ID NO: 211078 - DNA, 19 bp, Artificial sequence
  SiRNA target sequence
cgttatttgtgtggattat

SEQ ID NO: 211079 - DNA, 19 bp, Artificial sequence
  SiRNA target sequence
gttatttgtgtggattatg

SEQ ID NO: 211080 - DNA, 19 bp, Artificial sequence
  SiRNA target sequence
ttatttgtgtggattatgg

SEQ ID NO: 211081 - DNA, 19 bp, Artificial sequence
  SiRNA target sequence
tatttgtgtggattatggg

SEQ ID NO: 211082 - DNA, 19 bp, Artificial sequence
  SiRNA target sequence
atttgtgtggattatggga

SEQ ID NO: 211083 - DNA, 19 bp, Artificial sequence
  SiRNA target sequence
tttgtgtggattatgggat

SEQ ID NO: 211084 - DNA, 19 bp, Artificial sequence
  SiRNA target sequence
ttgtgtggattatgggata

SEQ ID NO: 211085 - DNA, 19 bp, Artificial sequence
  SiRNA target sequence
tgtgtggattatgggatat

SEQ ID NO: 211086 - DNA, 19 bp, Artificial sequence
  SiRNA target sequence
gtgtggattatgggatatg

SEQ ID NO: 211087 - DNA, 19 bp, Artificial sequence
  SiRNA target sequence
tgtggattatgggatatgc

SEQ ID NO: 211088 - DNA, 19 bp, Artificial sequence
  SiRNA target sequence
gtggattatgggatatgca

SEQ ID NO: 211089 - DNA, 19 bp, Artificial sequence
  SiRNA target sequence
tggattatgggatatgcat

SEQ ID NO: 211090 - DNA, 19 bp, Artificial sequence
  SiRNA target sequence
ggattatgggatatgcatt

SEQ ID NO: 211091 - DNA, 19 bp, Artificial sequence
  SiRNA target sequence
gattatgggatatgcattt

SEQ ID NO: 211092 - DNA, 19 bp, Artificial sequence
  SiRNA target sequence
attatgggatatgcatttc

SEQ ID NO: 211093 - DNA, 19 bp, Artificial sequence
  SiRNA target sequence
ttatgggatatgcatttca

SEQ ID NO: 211094 - DNA, 19 bp, Artificial sequence
  SiRNA target sequence
tatgggatatgcatttcaa

SEQ ID NO: 211095 - DNA, 19 bp, Artificial sequence
  SiRNA target sequence
atgggatatgcatttcaaa

SEQ ID NO: 211096 - DNA, 19 bp, Artificial sequence
  SiRNA target sequence
tgggatatgcatttcaaac

SEQ ID NO: 211097 - DNA, 19 bp, Artificial sequence
  SiRNA target sequence
gggatatgcatttcaaaca

SEQ ID NO: 211098 - DNA, 19 bp, Artificial sequence
  SiRNA target sequence
ggatatgcatttcaaacaa

SEQ ID NO: 211099 - DNA, 19 bp, Artificial sequence
  SiRNA target sequence
gatatgcatttcaaacaag

SEQ ID NO: 211100 - DNA, 19 bp, Artificial sequence
  SiRNA target sequence
atatgcatttcaaacaaga

SEQ ID NO: 211101 - DNA, 19 bp, Artificial sequence
  SiRNA target sequence
tatgcatttcaaacaagag

SEQ ID NO: 211102 - DNA, 19 bp, Artificial sequence
  SiRNA target sequence
atgcatttcaaacaagaga

SEQ ID NO: 211103 - DNA, 19 bp, Artificial sequence
  SiRNA target sequence
tgcatttcaaacaagagat

SEQ ID NO: 211104 - DNA, 19 bp, Artificial sequence
  SiRNA target sequence
gcatttcaaacaagagatt

SEQ ID NO: 211105 - DNA, 19 bp, Artificial sequence
  SiRNA target sequence
catttcaaacaagagattt

SEQ ID NO: 211106 - DNA, 19 bp, Artificial sequence
  SiRNA target sequence
atttcaaacaagagatttt

SEQ ID NO: 211107 - DNA, 19 bp, Artificial sequence
  SiRNA target sequence
tttcaaacaagagatttta

SEQ ID NO: 211108 - DNA, 19 bp, Artificial sequence
  SiRNA target sequence
ttcaaacaagagattttag

SEQ ID NO: 211109 - DNA, 19 bp, Artificial sequence
  SiRNA target sequence
tcaaacaagagattttaga

SEQ ID NO: 211110 - DNA, 19 bp, Artificial sequence
  SiRNA target sequence
caaacaagagattttagaa

SEQ ID NO: 211111 - DNA, 19 bp, Artificial sequence
  SiRNA target sequence
aaacaagagattttagaaa

SEQ ID NO: 211112 - DNA, 19 bp, Artificial sequence
  SiRNA target sequence
aacaagagattttagaaaa

SEQ ID NO: 211113 - DNA, 19 bp, Artificial sequence
  SiRNA target sequence
acaagagattttagaaaat

SEQ ID NO: 211114 - DNA, 19 bp, Artificial sequence
  SiRNA target sequence
caagagattttagaaaatt

SEQ ID NO: 211115 - DNA, 19 bp, Artificial sequence
  SiRNA target sequence
aagagattttagaaaatta

SEQ ID NO: 211116 - DNA, 19 bp, Artificial sequence
  SiRNA target sequence
agagattttagaaaattag

SEQ ID NO: 211117 - DNA, 19 bp, Artificial sequence
  SiRNA target sequence
gagattttagaaaattagc

SEQ ID NO: 211118 - DNA, 19 bp, Artificial sequence
  SiRNA target sequence
agattttagaaaattagct

SEQ ID NO: 211119 - DNA, 19 bp, Artificial sequence
  SiRNA target sequence
gattttagaaaattagctc

SEQ ID NO: 211120 - DNA, 19 bp, Artificial sequence
  SiRNA target sequence
attttagaaaattagctcc

SEQ ID NO: 211121 - DNA, 19 bp, Artificial sequence
  SiRNA target sequence
ttttagaaaattagctccc

SEQ ID NO: 211122 - DNA, 19 bp, Artificial sequence
  SiRNA target sequence
tttagaaaattagctccct

SEQ ID NO: 211123 - DNA, 19 bp, Artificial sequence
  SiRNA target sequence
ttagaaaattagctccctt

SEQ ID NO: 211124 - DNA, 19 bp, Artificial sequence
  SiRNA target sequence
tagaaaattagctccctta

SEQ ID NO: 211125 - DNA, 19 bp, Artificial sequence
  SiRNA target sequence
agaaaattagctcccttat

SEQ ID NO: 211126 - DNA, 19 bp, Artificial sequence
  SiRNA target sequence
gaaaattagctcccttatg

SEQ ID NO: 211127 - DNA, 19 bp, Artificial sequence
  SiRNA target sequence
aaaattagctcccttatgt

SEQ ID NO: 211128 - DNA, 19 bp, Artificial sequence
  SiRNA target sequence
aaattagctcccttatgta

SEQ ID NO: 211129 - DNA, 19 bp, Artificial sequence
  SiRNA target sequence
aattagctcccttatgtat

SEQ ID NO: 211130 - DNA, 19 bp, Artificial sequence
  SiRNA target sequence
attagctcccttatgtatc

SEQ ID NO: 211131 - DNA, 19 bp, Artificial sequence
  SiRNA target sequence
ttagctcccttatgtatca

SEQ ID NO: 211132 - DNA, 19 bp, Artificial sequence
  SiRNA target sequence
tagctcccttatgtatcag

SEQ ID NO: 211133 - DNA, 19 bp, Artificial sequence
  SiRNA target sequence
agctcccttatgtatcagc

SEQ ID NO: 211134 - DNA, 19 bp, Artificial sequence
  SiRNA target sequence
gctcccttatgtatcagcg

SEQ ID NO: 211135 - DNA, 19 bp, Artificial sequence
  SiRNA target sequence
ctcccttatgtatcagcgt

SEQ ID NO: 211136 - DNA, 19 bp, Artificial sequence
  SiRNA target sequence
tcccttatgtatcagcgta

SEQ ID NO: 211137 - DNA, 19 bp, Artificial sequence
  SiRNA target sequence
cccttatgtatcagcgtaa

SEQ ID NO: 211138 - DNA, 19 bp, Artificial sequence
  SiRNA target sequence
ccttatgtatcagcgtaat

SEQ ID NO: 211139 - DNA, 19 bp, Artificial sequence
  SiRNA target sequence
cttatgtatcagcgtaatt

SEQ ID NO: 211140 - DNA, 19 bp, Artificial sequence
  SiRNA target sequence
ttatgtatcagcgtaattg

SEQ ID NO: 211141 - DNA, 19 bp, Artificial sequence
  SiRNA target sequence
tatgtatcagcgtaattgt

SEQ ID NO: 211142 - DNA, 19 bp, Artificial sequence
  SiRNA target sequence
atgtatcagcgtaattgtc

SEQ ID NO: 211143 - DNA, 19 bp, Artificial sequence
  SiRNA target sequence
tgtatcagcgtaattgtct

SEQ ID NO: 211144 - DNA, 19 bp, Artificial sequence
  SiRNA target sequence
gtatcagcgtaattgtctt

SEQ ID NO: 211145 - DNA, 19 bp, Artificial sequence
  SiRNA target sequence
tatcagcgtaattgtcttt

SEQ ID NO: 211146 - DNA, 19 bp, Artificial sequence
  SiRNA target sequence
atcagcgtaattgtctttt

SEQ ID NO: 211147 - DNA, 19 bp, Artificial sequence
  SiRNA target sequence
tcagcgtaattgtcttttt

SEQ ID NO: 211148 - DNA, 19 bp, Artificial sequence
  SiRNA target sequence
cagcgtaattgtctttttt

SEQ ID NO: 211149 - DNA, 19 bp, Artificial sequence
  SiRNA target sequence
agcgtaattgtcttttttg

SEQ ID NO: 211150 - DNA, 19 bp, Artificial sequence
  SiRNA target sequence
gcgtaattgtcttttttgt

SEQ ID NO: 211151 - DNA, 19 bp, Artificial sequence
  SiRNA target sequence
cgtaattgtcttttttgtt

SEQ ID NO: 211152 - DNA, 19 bp, Artificial sequence
  SiRNA target sequence
gtaattgtcttttttgtta

SEQ ID NO: 211153 - DNA, 19 bp, Artificial sequence
  SiRNA target sequence
taattgtcttttttgttat

SEQ ID NO: 211154 - DNA, 19 bp, Artificial sequence
  SiRNA target sequence
aattgtcttttttgttatt

SEQ ID NO: 211155 - DNA, 19 bp, Artificial sequence
  SiRNA target sequence
attgtcttttttgttatta

SEQ ID NO: 211156 - DNA, 19 bp, Artificial sequence
  SiRNA target sequence
ttgtcttttttgttattat

SEQ ID NO: 211157 - DNA, 19 bp, Artificial sequence
  SiRNA target sequence
tgtcttttttgttattatt

SEQ ID NO: 211158 - DNA, 19 bp, Artificial sequence
  SiRNA target sequence
gtcttttttgttattattt

SEQ ID NO: 211159 - DNA, 19 bp, Artificial sequence
  SiRNA target sequence
tcttttttgttattatttg

SEQ ID NO: 211160 - DNA, 19 bp, Artificial sequence
  SiRNA target sequence
cttttttgttattatttgg

SEQ ID NO: 211161 - DNA, 19 bp, Artificial sequence
  SiRNA target sequence
ttttttgttattatttgga

SEQ ID NO: 211162 - DNA, 19 bp, Artificial sequence
  SiRNA target sequence
tttttgttattatttggat

SEQ ID NO: 211163 - DNA, 19 bp, Artificial sequence
  SiRNA target sequence
ttttgttattatttggatt

SEQ ID NO: 211164 - DNA, 19 bp, Artificial sequence
  SiRNA target sequence
tttgttattatttggattt

SEQ ID NO: 211165 - DNA, 19 bp, Artificial sequence
  SiRNA target sequence
ttgttattatttggattta

SEQ ID NO: 211166 - DNA, 19 bp, Artificial sequence
  SiRNA target sequence
tgttattatttggatttat

SEQ ID NO: 211167 - DNA, 19 bp, Artificial sequence
  SiRNA target sequence
gttattatttggatttatt

SEQ ID NO: 211168 - DNA, 19 bp, Artificial sequence
  SiRNA target sequence
ttattatttggatttattc

SEQ ID NO: 211169 - DNA, 19 bp, Artificial sequence
  SiRNA target sequence
tattatttggatttattca

SEQ ID NO: 211170 - DNA, 19 bp, Artificial sequence
  SiRNA target sequence
attatttggatttattcag

SEQ ID NO: 211171 - DNA, 19 bp, Artificial sequence
  SiRNA target sequence
ttatttggatttattcagt

SEQ ID NO: 211172 - DNA, 19 bp, Artificial sequence
  SiRNA target sequence
tatttggatttattcagtt

SEQ ID NO: 211173 - DNA, 19 bp, Artificial sequence
  SiRNA target sequence
atttggatttattcagtta

SEQ ID NO: 211174 - DNA, 19 bp, Artificial sequence
  SiRNA target sequence
tttggatttattcagttat

SEQ ID NO: 211175 - DNA, 19 bp, Artificial sequence
  SiRNA target sequence
ttggatttattcagttatt

SEQ ID NO: 211176 - DNA, 19 bp, Artificial sequence
  SiRNA target sequence
tggatttattcagttattt

SEQ ID NO: 211177 - DNA, 19 bp, Artificial sequence
  SiRNA target sequence
ggatttattcagttattta

SEQ ID NO: 211178 - DNA, 19 bp, Artificial sequence
  SiRNA target sequence
gatttattcagttatttat

SEQ ID NO: 211179 - DNA, 19 bp, Artificial sequence
  SiRNA target sequence
atttattcagttatttatt

SEQ ID NO: 211180 - DNA, 19 bp, Artificial sequence
  SiRNA target sequence
tttattcagttatttattt

SEQ ID NO: 211181 - DNA, 19 bp, Artificial sequence
  SiRNA target sequence
ttattcagttatttattta

SEQ ID NO: 211182 - DNA, 19 bp, Artificial sequence
  SiRNA target sequence
tattcagttatttatttaa

SEQ ID NO: 211183 - DNA, 19 bp, Artificial sequence
  SiRNA target sequence
attcagttatttatttaaa

SEQ ID NO: 211184 - DNA, 19 bp, Artificial sequence
  SiRNA target sequence
ttcagttatttatttaaat

SEQ ID NO: 211185 - DNA, 19 bp, Artificial sequence
  SiRNA target sequence
tcagttatttatttaaata

SEQ ID NO: 211186 - DNA, 19 bp, Artificial sequence
  SiRNA target sequence
cagttatttatttaaataa

SEQ ID NO: 211187 - DNA, 19 bp, Artificial sequence
  SiRNA target sequence
agttatttatttaaataag

SEQ ID NO: 211188 - DNA, 19 bp, Artificial sequence
  SiRNA target sequence
gttatttatttaaataaga

SEQ ID NO: 211189 - DNA, 19 bp, Artificial sequence
  SiRNA target sequence
ttatttatttaaataagaa

SEQ ID NO: 211190 - DNA, 19 bp, Artificial sequence
  SiRNA target sequence
tatttatttaaataagaaa

SEQ ID NO: 211191 - DNA, 19 bp, Artificial sequence
  SiRNA target sequence
atttatttaaataagaaat

SEQ ID NO: 211192 - DNA, 19 bp, Artificial sequence
  SiRNA target sequence
tttatttaaataagaaata

SEQ ID NO: 211193 - DNA, 19 bp, Artificial sequence
  SiRNA target sequence
ttatttaaataagaaatac

SEQ ID NO: 211194 - DNA, 19 bp, Artificial sequence
  SiRNA target sequence
tatttaaataagaaataca

SEQ ID NO: 211195 - DNA, 19 bp, Artificial sequence
  SiRNA target sequence
atttaaataagaaatacaa

SEQ ID NO: 211196 - DNA, 19 bp, Artificial sequence
  SiRNA target sequence
tttaaataagaaatacaaa

SEQ ID NO: 211197 - DNA, 19 bp, Artificial sequence
  SiRNA target sequence
ttaaataagaaatacaaag

SEQ ID NO: 211198 - DNA, 19 bp, Artificial sequence
  SiRNA target sequence
taaataagaaatacaaaga

SEQ ID NO: 211199 - DNA, 19 bp, Artificial sequence
  SiRNA target sequence
aaataagaaatacaaagaa

SEQ ID NO: 211200 - DNA, 19 bp, Artificial sequence
  SiRNA target sequence
aataagaaatacaaagaat

SEQ ID NO: 211201 - DNA, 19 bp, Artificial sequence
  SiRNA target sequence
ataagaaatacaaagaatc

SEQ ID NO: 211202 - DNA, 19 bp, Artificial sequence
  SiRNA target sequence
taagaaatacaaagaatca

SEQ ID NO: 211203 - DNA, 19 bp, Artificial sequence
  SiRNA target sequence
aagaaatacaaagaatcag

SEQ ID NO: 211204 - DNA, 19 bp, Artificial sequence
  SiRNA target sequence
agaaatacaaagaatcagt

SEQ ID NO: 211205 - DNA, 19 bp, Artificial sequence
  SiRNA target sequence
gaaatacaaagaatcagtt

SEQ ID NO: 211206 - DNA, 19 bp, Artificial sequence
  SiRNA target sequence
aaatacaaagaatcagttg

SEQ ID NO: 211207 - DNA, 19 bp, Artificial sequence
  SiRNA target sequence
aatacaaagaatcagttgt

SEQ ID NO: 211208 - DNA, 19 bp, Artificial sequence
  SiRNA target sequence
atacaaagaatcagttgtt

SEQ ID NO: 211209 - DNA, 19 bp, Artificial sequence
  SiRNA target sequence
tacaaagaatcagttgtta

SEQ ID NO: 211210 - DNA, 19 bp, Artificial sequence
  SiRNA target sequence
acaaagaatcagttgttag

SEQ ID NO: 211211 - DNA, 19 bp, Artificial sequence
  SiRNA target sequence
caaagaatcagttgttagt

SEQ ID NO: 211212 - DNA, 19 bp, Artificial sequence
  SiRNA target sequence
aaagaatcagttgttagta

SEQ ID NO: 211213 - DNA, 19 bp, Artificial sequence
  SiRNA target sequence
aagaatcagttgttagtaa

SEQ ID NO: 211214 - DNA, 19 bp, Artificial sequence
  SiRNA target sequence
agaatcagttgttagtaat

SEQ ID NO: 211215 - DNA, 19 bp, Artificial sequence
  SiRNA target sequence
gaatcagttgttagtaatt

SEQ ID NO: 211216 - DNA, 19 bp, Artificial sequence
  SiRNA target sequence
aatcagttgttagtaattt

SEQ ID NO: 211217 - DNA, 19 bp, Artificial sequence
  SiRNA target sequence
atcagttgttagtaattta

SEQ ID NO: 211218 - DNA, 19 bp, Artificial sequence
  SiRNA target sequence
tcagttgttagtaatttac

SEQ ID NO: 211219 - DNA, 19 bp, Artificial sequence
  SiRNA target sequence
cagttgttagtaatttacc

SEQ ID NO: 211220 - DNA, 19 bp, Artificial sequence
  SiRNA target sequence
agttgttagtaatttaccc

SEQ ID NO: 211221 - DNA, 19 bp, Artificial sequence
  SiRNA target sequence
gttgttagtaatttaccca

SEQ ID NO: 211222 - DNA, 19 bp, Artificial sequence
  SiRNA target sequence
ttgttagtaatttacccat

SEQ ID NO: 211223 - DNA, 19 bp, Artificial sequence
  SiRNA target sequence
tgttagtaatttacccatc

SEQ ID NO: 211224 - DNA, 19 bp, Artificial sequence
  SiRNA target sequence
gttagtaatttacccatcg

SEQ ID NO: 211225 - DNA, 19 bp, Artificial sequence
  SiRNA target sequence
ttagtaatttacccatcga

SEQ ID NO: 211226 - DNA, 19 bp, Artificial sequence
  SiRNA target sequence
tagtaatttacccatcgat

SEQ ID NO: 211227 - DNA, 19 bp, Artificial sequence
  SiRNA target sequence
agtaatttacccatcgatg

SEQ ID NO: 211228 - DNA, 19 bp, Artificial sequence
  SiRNA target sequence
gtaatttacccatcgatgt

SEQ ID NO: 211229 - DNA, 19 bp, Artificial sequence
  SiRNA target sequence
taatttacccatcgatgtt

SEQ ID NO: 211230 - DNA, 19 bp, Artificial sequence
  SiRNA target sequence
aatttacccatcgatgttg

SEQ ID NO: 211231 - DNA, 19 bp, Artificial sequence
  SiRNA target sequence
atttacccatcgatgttga

SEQ ID NO: 211232 - DNA, 19 bp, Artificial sequence
  SiRNA target sequence
tttacccatcgatgttgat

SEQ ID NO: 211233 - DNA, 19 bp, Artificial sequence
  SiRNA target sequence
ttacccatcgatgttgatt

SEQ ID NO: 211234 - DNA, 19 bp, Artificial sequence
  SiRNA target sequence
tacccatcgatgttgattt

SEQ ID NO: 211235 - DNA, 19 bp, Artificial sequence
  SiRNA target sequence
acccatcgatgttgatttg

SEQ ID NO: 211236 - DNA, 19 bp, Artificial sequence
  SiRNA target sequence
cccatcgatgttgatttgt

SEQ ID NO: 211237 - DNA, 19 bp, Artificial sequence
  SiRNA target sequence
ccatcgatgttgatttgtt

SEQ ID NO: 211238 - DNA, 19 bp, Artificial sequence
  SiRNA target sequence
catcgatgttgatttgttt

SEQ ID NO: 211239 - DNA, 19 bp, Artificial sequence
  SiRNA target sequence
atcgatgttgatttgtttg

SEQ ID NO: 211240 - DNA, 19 bp, Artificial sequence
  SiRNA target sequence
tcgatgttgatttgtttgc

SEQ ID NO: 211241 - DNA, 19 bp, Artificial sequence
  SiRNA target sequence
cgatgttgatttgtttgca

SEQ ID NO: 211242 - DNA, 19 bp, Artificial sequence
  SiRNA target sequence
gatgttgatttgtttgcat

SEQ ID NO: 211243 - DNA, 19 bp, Artificial sequence
  SiRNA target sequence
atgttgatttgtttgcatc

SEQ ID NO: 211244 - DNA, 19 bp, Artificial sequence
  SiRNA target sequence
tgttgatttgtttgcatca

SEQ ID NO: 211245 - DNA, 19 bp, Artificial sequence
  SiRNA target sequence
gttgatttgtttgcatcaa

SEQ ID NO: 211246 - DNA, 19 bp, Artificial sequence
  SiRNA target sequence
ttgatttgtttgcatcaaa

SEQ ID NO: 211247 - DNA, 19 bp, Artificial sequence
  SiRNA target sequence
tgatttgtttgcatcaaag

SEQ ID NO: 211248 - DNA, 19 bp, Artificial sequence
  SiRNA target sequence
gatttgtttgcatcaaagt

SEQ ID NO: 211249 - DNA, 19 bp, Artificial sequence
  SiRNA target sequence
atttgtttgcatcaaagtt

SEQ ID NO: 211250 - DNA, 19 bp, Artificial sequence
  SiRNA target sequence
tttgtttgcatcaaagttg

SEQ ID NO: 211251 - DNA, 19 bp, Artificial sequence
  SiRNA target sequence
ttgtttgcatcaaagttgt

SEQ ID NO: 211252 - DNA, 19 bp, Artificial sequence
  SiRNA target sequence
tgtttgcatcaaagttgtt

SEQ ID NO: 211253 - DNA, 19 bp, Artificial sequence
  SiRNA target sequence
gtttgcatcaaagttgtta

SEQ ID NO: 211254 - DNA, 19 bp, Artificial sequence
  SiRNA target sequence
tttgcatcaaagttgttag

SEQ ID NO: 211255 - DNA, 19 bp, Artificial sequence
  SiRNA target sequence
ttgcatcaaagttgttaga

SEQ ID NO: 211256 - DNA, 19 bp, Artificial sequence
  SiRNA target sequence
tgcatcaaagttgttagat

SEQ ID NO: 211257 - DNA, 19 bp, Artificial sequence
  SiRNA target sequence
gcatcaaagttgttagata

SEQ ID NO: 211258 - DNA, 19 bp, Artificial sequence
  SiRNA target sequence
catcaaagttgttagataa

SEQ ID NO: 211259 - DNA, 19 bp, Artificial sequence
  SiRNA target sequence
atcaaagttgttagataat

SEQ ID NO: 211260 - DNA, 19 bp, Artificial sequence
  SiRNA target sequence
tcaaagttgttagataata

SEQ ID NO: 211261 - DNA, 19 bp, Artificial sequence
  SiRNA target sequence
caaagttgttagataataa

SEQ ID NO: 211262 - DNA, 19 bp, Artificial sequence
  SiRNA target sequence
aaagttgttagataataaa

SEQ ID NO: 211263 - DNA, 19 bp, Artificial sequence
  SiRNA target sequence
aagttgttagataataaaa

SEQ ID NO: 211264 - DNA, 19 bp, Artificial sequence
  SiRNA target sequence
agttgttagataataaaaa

SEQ ID NO: 211265 - DNA, 19 bp, Artificial sequence
  SiRNA target sequence
gttgttagataataaaaaa

SEQ ID NO: 211266 - DNA, 19 bp, Artificial sequence
  SiRNA target sequence
ttgttagataataaaaaag

SEQ ID NO: 211267 - DNA, 19 bp, Artificial sequence
  SiRNA target sequence
tgttagataataaaaaaga

SEQ ID NO: 211268 - DNA, 19 bp, Artificial sequence
  SiRNA target sequence
gttagataataaaaaagaa

SEQ ID NO: 211269 - DNA, 19 bp, Artificial sequence
  SiRNA target sequence
ttagataataaaaaagaag

SEQ ID NO: 211270 - DNA, 19 bp, Artificial sequence
  SiRNA target sequence
tagataataaaaaagaaga

SEQ ID NO: 211271 - DNA, 19 bp, Artificial sequence
  SiRNA target sequence
agataataaaaaagaagag

SEQ ID NO: 211272 - DNA, 19 bp, Artificial sequence
  SiRNA target sequence
gataataaaaaagaagagg

SEQ ID NO: 211273 - DNA, 19 bp, Artificial sequence
  SiRNA target sequence
ataataaaaaagaagagga

SEQ ID NO: 211274 - DNA, 19 bp, Artificial sequence
  SiRNA target sequence
taataaaaaagaagaggaa

SEQ ID NO: 211275 - DNA, 19 bp, Artificial sequence
  SiRNA target sequence
aataaaaaagaagaggaaa

SEQ ID NO: 211276 - DNA, 19 bp, Artificial sequence
  SiRNA target sequence
ataaaaaagaagaggaaat

SEQ ID NO: 211277 - DNA, 19 bp, Artificial sequence
  SiRNA target sequence
taaaaaagaagaggaaatt

SEQ ID NO: 211278 - DNA, 19 bp, Artificial sequence
  SiRNA target sequence
aaaaaagaagaggaaattg

SEQ ID NO: 211279 - DNA, 19 bp, Artificial sequence
  SiRNA target sequence
aaaaagaagaggaaattga

SEQ ID NO: 211280 - DNA, 19 bp, Artificial sequence
  SiRNA target sequence
aaaagaagaggaaattgat

SEQ ID NO: 211281 - DNA, 19 bp, Artificial sequence
  SiRNA target sequence
aaagaagaggaaattgatg

SEQ ID NO: 211282 - DNA, 19 bp, Artificial sequence
  SiRNA target sequence
aagaagaggaaattgatgt

SEQ ID NO: 211283 - DNA, 19 bp, Artificial sequence
  SiRNA target sequence
agaagaggaaattgatgtg

SEQ ID NO: 211284 - DNA, 19 bp, Artificial sequence
  SiRNA target sequence
gaagaggaaattgatgtgt

SEQ ID NO: 211285 - DNA, 19 bp, Artificial sequence
  SiRNA target sequence
aagaggaaattgatgtgtc

SEQ ID NO: 211286 - DNA, 19 bp, Artificial sequence
  SiRNA target sequence
agaggaaattgatgtgtca

SEQ ID NO: 211287 - DNA, 19 bp, Artificial sequence
  SiRNA target sequence
gaggaaattgatgtgtcag

SEQ ID NO: 211288 - DNA, 19 bp, Artificial sequence
  SiRNA target sequence
aggaaattgatgtgtcagt

SEQ ID NO: 211289 - DNA, 19 bp, Artificial sequence
  SiRNA target sequence
ggaaattgatgtgtcagtg

SEQ ID NO: 211290 - DNA, 19 bp, Artificial sequence
  SiRNA target sequence
gaaattgatgtgtcagtgc

SEQ ID NO: 211291 - DNA, 19 bp, Artificial sequence
  SiRNA target sequence
aaattgatgtgtcagtgct

SEQ ID NO: 211292 - DNA, 19 bp, Artificial sequence
  SiRNA target sequence
aattgatgtgtcagtgctc

SEQ ID NO: 211293 - DNA, 19 bp, Artificial sequence
  SiRNA target sequence
attgatgtgtcagtgctcg

SEQ ID NO: 211294 - DNA, 19 bp, Artificial sequence
  SiRNA target sequence
ttgatgtgtcagtgctcgt

SEQ ID NO: 211295 - DNA, 19 bp, Artificial sequence
  SiRNA target sequence
tgatgtgtcagtgctcgtt

SEQ ID NO: 211296 - DNA, 19 bp, Artificial sequence
  SiRNA target sequence
gatgtgtcagtgctcgtta

SEQ ID NO: 211297 - DNA, 19 bp, Artificial sequence
  SiRNA target sequence
atgtgtcagtgctcgttaa

SEQ ID NO: 211298 - DNA, 19 bp, Artificial sequence
  SiRNA target sequence
tgtgtcagtgctcgttaat

SEQ ID NO: 211299 - DNA, 19 bp, Artificial sequence
  SiRNA target sequence
gtgtcagtgctcgttaatt

SEQ ID NO: 211300 - DNA, 19 bp, Artificial sequence
  SiRNA target sequence
tgtcagtgctcgttaatta

SEQ ID NO: 211301 - DNA, 19 bp, Artificial sequence
  SiRNA target sequence
gtcagtgctcgttaattaa

SEQ ID NO: 211302 - DNA, 20 bp, Artificial sequence
  SiRNA target sequence
atgattgagaggggtattat

SEQ ID NO: 211303 - DNA, 20 bp, Artificial sequence
  SiRNA target sequence
tgattgagaggggtattatg

SEQ ID NO: 211304 - DNA, 20 bp, Artificial sequence
  SiRNA target sequence
gattgagaggggtattatgg

SEQ ID NO: 211305 - DNA, 20 bp, Artificial sequence
  SiRNA target sequence
attgagaggggtattatgga

SEQ ID NO: 211306 - DNA, 20 bp, Artificial sequence
  SiRNA target sequence
ttgagaggggtattatggaa

SEQ ID NO: 211307 - DNA, 20 bp, Artificial sequence
  SiRNA target sequence
tgagaggggtattatggaaa

SEQ ID NO: 211308 - DNA, 20 bp, Artificial sequence
  SiRNA target sequence
gagaggggtattatggaaaa

SEQ ID NO: 211309 - DNA, 20 bp, Artificial sequence
  SiRNA target sequence
agaggggtattatggaaaaa

SEQ ID NO: 211310 - DNA, 20 bp, Artificial sequence
  SiRNA target sequence
gaggggtattatggaaaaaa

SEQ ID NO: 211311 - DNA, 20 bp, Artificial sequence
  SiRNA target sequence
aggggtattatggaaaaaat

SEQ ID NO: 211312 - DNA, 20 bp, Artificial sequence
  SiRNA target sequence
ggggtattatggaaaaaata

SEQ ID NO: 211313 - DNA, 20 bp, Artificial sequence
  SiRNA target sequence
gggtattatggaaaaaataa

SEQ ID NO: 211314 - DNA, 20 bp, Artificial sequence
  SiRNA target sequence
ggtattatggaaaaaataaa

SEQ ID NO: 211315 - DNA, 20 bp, Artificial sequence
  SiRNA target sequence
gtattatggaaaaaataaaa

SEQ ID NO: 211316 - DNA, 20 bp, Artificial sequence
  SiRNA target sequence
tattatggaaaaaataaaaa

SEQ ID NO: 211317 - DNA, 20 bp, Artificial sequence
  SiRNA target sequence
attatggaaaaaataaaaaa

SEQ ID NO: 211318 - DNA, 20 bp, Artificial sequence
  SiRNA target sequence
ttatggaaaaaataaaaaat

SEQ ID NO: 211319 - DNA, 20 bp, Artificial sequence
  SiRNA target sequence
tatggaaaaaataaaaaatt

SEQ ID NO: 211320 - DNA, 20 bp, Artificial sequence
  SiRNA target sequence
atggaaaaaataaaaaattt

SEQ ID NO: 211321 - DNA, 20 bp, Artificial sequence
  SiRNA target sequence
tggaaaaaataaaaaattta

SEQ ID NO: 211322 - DNA, 20 bp, Artificial sequence
  SiRNA target sequence
ggaaaaaataaaaaatttat

SEQ ID NO: 211323 - DNA, 20 bp, Artificial sequence
  SiRNA target sequence
gaaaaaataaaaaatttatt

SEQ ID NO: 211324 - DNA, 20 bp, Artificial sequence
  SiRNA target sequence
aaaaaataaaaaatttatta

SEQ ID NO: 211325 - DNA, 20 bp, Artificial sequence
  SiRNA target sequence
aaaaataaaaaatttattaa

SEQ ID NO: 211326 - DNA, 20 bp, Artificial sequence
  SiRNA target sequence
aaaataaaaaatttattaac

SEQ ID NO: 211327 - DNA, 20 bp, Artificial sequence
  SiRNA target sequence
aaataaaaaatttattaaca

SEQ ID NO: 211328 - DNA, 20 bp, Artificial sequence
  SiRNA target sequence
aataaaaaatttattaacag

SEQ ID NO: 211329 - DNA, 20 bp, Artificial sequence
  SiRNA target sequence
ataaaaaatttattaacaga

SEQ ID NO: 211330 - DNA, 20 bp, Artificial sequence
  SiRNA target sequence
taaaaaatttattaacagag

SEQ ID NO: 211331 - DNA, 20 bp, Artificial sequence
  SiRNA target sequence
aaaaaatttattaacagagg

SEQ ID NO: 211332 - DNA, 20 bp, Artificial sequence
  SiRNA target sequence
aaaaatttattaacagagga

SEQ ID NO: 211333 - DNA, 20 bp, Artificial sequence
  SiRNA target sequence
aaaatttattaacagaggat

SEQ ID NO: 211334 - DNA, 20 bp, Artificial sequence
  SiRNA target sequence
aaatttattaacagaggatg

SEQ ID NO: 211335 - DNA, 20 bp, Artificial sequence
  SiRNA target sequence
aatttattaacagaggatga

SEQ ID NO: 211336 - DNA, 20 bp, Artificial sequence
  SiRNA target sequence
atttattaacagaggatgaa

SEQ ID NO: 211337 - DNA, 20 bp, Artificial sequence
  SiRNA target sequence
tttattaacagaggatgaag

SEQ ID NO: 211338 - DNA, 20 bp, Artificial sequence
  SiRNA target sequence
ttattaacagaggatgaagt

SEQ ID NO: 211339 - DNA, 20 bp, Artificial sequence
  SiRNA target sequence
tattaacagaggatgaagta

SEQ ID NO: 211340 - DNA, 20 bp, Artificial sequence
  SiRNA target sequence
attaacagaggatgaagtag

SEQ ID NO: 211341 - DNA, 20 bp, Artificial sequence
  SiRNA target sequence
ttaacagaggatgaagtaga

SEQ ID NO: 211342 - DNA, 20 bp, Artificial sequence
  SiRNA target sequence
taacagaggatgaagtagaa

SEQ ID NO: 211343 - DNA, 20 bp, Artificial sequence
  SiRNA target sequence
aacagaggatgaagtagaag

SEQ ID NO: 211344 - DNA, 20 bp, Artificial sequence
  SiRNA target sequence
acagaggatgaagtagaagc

SEQ ID NO: 211345 - DNA, 20 bp, Artificial sequence
  SiRNA target sequence
cagaggatgaagtagaagca

SEQ ID NO: 211346 - DNA, 20 bp, Artificial sequence
  SiRNA target sequence
agaggatgaagtagaagcag

SEQ ID NO: 211347 - DNA, 20 bp, Artificial sequence
  SiRNA target sequence
gaggatgaagtagaagcaga

SEQ ID NO: 211348 - DNA, 20 bp, Artificial sequence
  SiRNA target sequence
aggatgaagtagaagcagaa

SEQ ID NO: 211349 - DNA, 20 bp, Artificial sequence
  SiRNA target sequence
ggatgaagtagaagcagaag

SEQ ID NO: 211350 - DNA, 20 bp, Artificial sequence
  SiRNA target sequence
gatgaagtagaagcagaagc

SEQ ID NO: 211351 - DNA, 20 bp, Artificial sequence
  SiRNA target sequence
atgaagtagaagcagaagca

SEQ ID NO: 211352 - DNA, 20 bp, Artificial sequence
  SiRNA target sequence
tgaagtagaagcagaagcaa

SEQ ID NO: 211353 - DNA, 20 bp, Artificial sequence
  SiRNA target sequence
gaagtagaagcagaagcaaa

SEQ ID NO: 211354 - DNA, 20 bp, Artificial sequence
  SiRNA target sequence
aagtagaagcagaagcaaat

SEQ ID NO: 211355 - DNA, 20 bp, Artificial sequence
  SiRNA target sequence
agtagaagcagaagcaaatt

SEQ ID NO: 211356 - DNA, 20 bp, Artificial sequence
  SiRNA target sequence
gtagaagcagaagcaaattc

SEQ ID NO: 211357 - DNA, 20 bp, Artificial sequence
  SiRNA target sequence
tagaagcagaagcaaattct

SEQ ID NO: 211358 - DNA, 20 bp, Artificial sequence
  SiRNA target sequence
agaagcagaagcaaattctg

SEQ ID NO: 211359 - DNA, 20 bp, Artificial sequence
  SiRNA target sequence
gaagcagaagcaaattctgg

SEQ ID NO: 211360 - DNA, 20 bp, Artificial sequence
  SiRNA target sequence
aagcagaagcaaattctgga

SEQ ID NO: 211361 - DNA, 20 bp, Artificial sequence
  SiRNA target sequence
agcagaagcaaattctggaa

SEQ ID NO: 211362 - DNA, 20 bp, Artificial sequence
  SiRNA target sequence
gcagaagcaaattctggaag

SEQ ID NO: 211363 - DNA, 20 bp, Artificial sequence
  SiRNA target sequence
cagaagcaaattctggaagg

SEQ ID NO: 211364 - DNA, 20 bp, Artificial sequence
  SiRNA target sequence
agaagcaaattctggaaggg

SEQ ID NO: 211365 - DNA, 20 bp, Artificial sequence
  SiRNA target sequence
gaagcaaattctggaagggg

SEQ ID NO: 211366 - DNA, 20 bp, Artificial sequence
  SiRNA target sequence
aagcaaattctggaaggggc

SEQ ID NO: 211367 - DNA, 20 bp, Artificial sequence
  SiRNA target sequence
agcaaattctggaaggggca

SEQ ID NO: 211368 - DNA, 20 bp, Artificial sequence
  SiRNA target sequence
gcaaattctggaaggggcat

SEQ ID NO: 211369 - DNA, 20 bp, Artificial sequence
  SiRNA target sequence
caaattctggaaggggcatt

SEQ ID NO: 211370 - DNA, 20 bp, Artificial sequence
  SiRNA target sequence
aaattctggaaggggcattt

SEQ ID NO: 211371 - DNA, 20 bp, Artificial sequence
  SiRNA target sequence
aattctggaaggggcatttt

SEQ ID NO: 211372 - DNA, 20 bp, Artificial sequence
  SiRNA target sequence
attctggaaggggcatttta

SEQ ID NO: 211373 - DNA, 20 bp, Artificial sequence
  SiRNA target sequence
ttctggaaggggcattttat

SEQ ID NO: 211374 - DNA, 20 bp, Artificial sequence
  SiRNA target sequence
tctggaaggggcattttatc

SEQ ID NO: 211375 - DNA, 20 bp, Artificial sequence
  SiRNA target sequence
ctggaaggggcattttatca

SEQ ID NO: 211376 - DNA, 20 bp, Artificial sequence
  SiRNA target sequence
tggaaggggcattttatcaa

SEQ ID NO: 211377 - DNA, 20 bp, Artificial sequence
  SiRNA target sequence
ggaaggggcattttatcaat

SEQ ID NO: 211378 - DNA, 20 bp, Artificial sequence
  SiRNA target sequence
gaaggggcattttatcaata

SEQ ID NO: 211379 - DNA, 20 bp, Artificial sequence
  SiRNA target sequence
aaggggcattttatcaatat

SEQ ID NO: 211380 - DNA, 20 bp, Artificial sequence
  SiRNA target sequence
aggggcattttatcaatatt

SEQ ID NO: 211381 - DNA, 20 bp, Artificial sequence
  SiRNA target sequence
ggggcattttatcaatattt

SEQ ID NO: 211382 - DNA, 20 bp, Artificial sequence
  SiRNA target sequence
gggcattttatcaatattta

SEQ ID NO: 211383 - DNA, 20 bp, Artificial sequence
  SiRNA target sequence
ggcattttatcaatatttag

SEQ ID NO: 211384 - DNA, 20 bp, Artificial sequence
  SiRNA target sequence
gcattttatcaatatttaga

SEQ ID NO: 211385 - DNA, 20 bp, Artificial sequence
  SiRNA target sequence
cattttatcaatatttagaa

SEQ ID NO: 211386 - DNA, 20 bp, Artificial sequence
  SiRNA target sequence
attttatcaatatttagaat

SEQ ID NO: 211387 - DNA, 20 bp, Artificial sequence
  SiRNA target sequence
ttttatcaatatttagaatt

SEQ ID NO: 211388 - DNA, 20 bp, Artificial sequence
  SiRNA target sequence
tttatcaatatttagaattg

SEQ ID NO: 211389 - DNA, 20 bp, Artificial sequence
  SiRNA target sequence
ttatcaatatttagaattgc

SEQ ID NO: 211390 - DNA, 20 bp, Artificial sequence
  SiRNA target sequence
tatcaatatttagaattgct

SEQ ID NO: 211391 - DNA, 20 bp, Artificial sequence
  SiRNA target sequence
atcaatatttagaattgcta

SEQ ID NO: 211392 - DNA, 20 bp, Artificial sequence
  SiRNA target sequence
tcaatatttagaattgctaa

SEQ ID NO: 211393 - DNA, 20 bp, Artificial sequence
  SiRNA target sequence
caatatttagaattgctaag

SEQ ID NO: 211394 - DNA, 20 bp, Artificial sequence
  SiRNA target sequence
aatatttagaattgctaagg

SEQ ID NO: 211395 - DNA, 20 bp, Artificial sequence
  SiRNA target sequence
atatttagaattgctaaggt

SEQ ID NO: 211396 - DNA, 20 bp, Artificial sequence
  SiRNA target sequence
tatttagaattgctaaggta

SEQ ID NO: 211397 - DNA, 20 bp, Artificial sequence
  SiRNA target sequence
atttagaattgctaaggtag

SEQ ID NO: 211398 - DNA, 20 bp, Artificial sequence
  SiRNA target sequence
tttagaattgctaaggtaga

SEQ ID NO: 211399 - DNA, 20 bp, Artificial sequence
  SiRNA target sequence
ttagaattgctaaggtagaa

SEQ ID NO: 211400 - DNA, 20 bp, Artificial sequence
  SiRNA target sequence
tagaattgctaaggtagaaa

SEQ ID NO: 211401 - DNA, 20 bp, Artificial sequence
  SiRNA target sequence
agaattgctaaggtagaaag

SEQ ID NO: 211402 - DNA, 20 bp, Artificial sequence
  SiRNA target sequence
gaattgctaaggtagaaaga

SEQ ID NO: 211403 - DNA, 20 bp, Artificial sequence
  SiRNA target sequence
aattgctaaggtagaaagaa

SEQ ID NO: 211404 - DNA, 20 bp, Artificial sequence
  SiRNA target sequence
attgctaaggtagaaagaag

SEQ ID NO: 211405 - DNA, 20 bp, Artificial sequence
  SiRNA target sequence
ttgctaaggtagaaagaaga

SEQ ID NO: 211406 - DNA, 20 bp, Artificial sequence
  SiRNA target sequence
tgctaaggtagaaagaagaa

SEQ ID NO: 211407 - DNA, 20 bp, Artificial sequence
  SiRNA target sequence
gctaaggtagaaagaagaat

SEQ ID NO: 211408 - DNA, 20 bp, Artificial sequence
  SiRNA target sequence
ctaaggtagaaagaagaatg

SEQ ID NO: 211409 - DNA, 20 bp, Artificial sequence
  SiRNA target sequence
taaggtagaaagaagaatgt

SEQ ID NO: 211410 - DNA, 20 bp, Artificial sequence
  SiRNA target sequence
aaggtagaaagaagaatgtt

SEQ ID NO: 211411 - DNA, 20 bp, Artificial sequence
  SiRNA target sequence
aggtagaaagaagaatgttt

SEQ ID NO: 211412 - DNA, 20 bp, Artificial sequence
  SiRNA target sequence
ggtagaaagaagaatgtttt

SEQ ID NO: 211413 - DNA, 20 bp, Artificial sequence
  SiRNA target sequence
gtagaaagaagaatgttttg

SEQ ID NO: 211414 - DNA, 20 bp, Artificial sequence
  SiRNA target sequence
tagaaagaagaatgttttgg

SEQ ID NO: 211415 - DNA, 20 bp, Artificial sequence
  SiRNA target sequence
agaaagaagaatgttttggc

SEQ ID NO: 211416 - DNA, 20 bp, Artificial sequence
  SiRNA target sequence
gaaagaagaatgttttggct

SEQ ID NO: 211417 - DNA, 20 bp, Artificial sequence
  SiRNA target sequence
aaagaagaatgttttggctt

SEQ ID NO: 211418 - DNA, 20 bp, Artificial sequence
  SiRNA target sequence
aagaagaatgttttggctta

SEQ ID NO: 211419 - DNA, 20 bp, Artificial sequence
  SiRNA target sequence
agaagaatgttttggcttat

SEQ ID NO: 211420 - DNA, 20 bp, Artificial sequence
  SiRNA target sequence
gaagaatgttttggcttatg

SEQ ID NO: 211421 - DNA, 20 bp, Artificial sequence
  SiRNA target sequence
aagaatgttttggcttatga

SEQ ID NO: 211422 - DNA, 20 bp, Artificial sequence
  SiRNA target sequence
agaatgttttggcttatgac

SEQ ID NO: 211423 - DNA, 20 bp, Artificial sequence
  SiRNA target sequence
gaatgttttggcttatgacg

SEQ ID NO: 211424 - DNA, 20 bp, Artificial sequence
  SiRNA target sequence
aatgttttggcttatgacgc

SEQ ID NO: 211425 - DNA, 20 bp, Artificial sequence
  SiRNA target sequence
atgttttggcttatgacgct

SEQ ID NO: 211426 - DNA, 20 bp, Artificial sequence
  SiRNA target sequence
tgttttggcttatgacgctt

SEQ ID NO: 211427 - DNA, 20 bp, Artificial sequence
  SiRNA target sequence
gttttggcttatgacgctta

SEQ ID NO: 211428 - DNA, 20 bp, Artificial sequence
  SiRNA target sequence
ttttggcttatgacgcttat

SEQ ID NO: 211429 - DNA, 20 bp, Artificial sequence
  SiRNA target sequence
tttggcttatgacgcttatg

SEQ ID NO: 211430 - DNA, 20 bp, Artificial sequence
  SiRNA target sequence
ttggcttatgacgcttatgt

SEQ ID NO: 211431 - DNA, 20 bp, Artificial sequence
  SiRNA target sequence
tggcttatgacgcttatgtt

SEQ ID NO: 211432 - DNA, 20 bp, Artificial sequence
  SiRNA target sequence
ggcttatgacgcttatgttt

SEQ ID NO: 211433 - DNA, 20 bp, Artificial sequence
  SiRNA target sequence
gcttatgacgcttatgtttt

SEQ ID NO: 211434 - DNA, 20 bp, Artificial sequence
  SiRNA target sequence
cttatgacgcttatgttttc

SEQ ID NO: 211435 - DNA, 20 bp, Artificial sequence
  SiRNA target sequence
ttatgacgcttatgttttcg

SEQ ID NO: 211436 - DNA, 20 bp, Artificial sequence
  SiRNA target sequence
tatgacgcttatgttttcgc

SEQ ID NO: 211437 - DNA, 20 bp, Artificial sequence
  SiRNA target sequence
atgacgcttatgttttcgct

SEQ ID NO: 211438 - DNA, 20 bp, Artificial sequence
  SiRNA target sequence
tgacgcttatgttttcgctt

SEQ ID NO: 211439 - DNA, 20 bp, Artificial sequence
  SiRNA target sequence
gacgcttatgttttcgctta

SEQ ID NO: 211440 - DNA, 20 bp, Artificial sequence
  SiRNA target sequence
acgcttatgttttcgcttat

SEQ ID NO: 211441 - DNA, 20 bp, Artificial sequence
  SiRNA target sequence
cgcttatgttttcgcttatt

SEQ ID NO: 211442 - DNA, 20 bp, Artificial sequence
  SiRNA target sequence
gcttatgttttcgcttattt

SEQ ID NO: 211443 - DNA, 20 bp, Artificial sequence
  SiRNA target sequence
cttatgttttcgcttatttc

SEQ ID NO: 211444 - DNA, 20 bp, Artificial sequence
  SiRNA target sequence
ttatgttttcgcttatttcc

SEQ ID NO: 211445 - DNA, 20 bp, Artificial sequence
  SiRNA target sequence
tatgttttcgcttatttcct

SEQ ID NO: 211446 - DNA, 20 bp, Artificial sequence
  SiRNA target sequence
atgttttcgcttatttcctt

SEQ ID NO: 211447 - DNA, 20 bp, Artificial sequence
  SiRNA target sequence
tgttttcgcttatttccttt

SEQ ID NO: 211448 - DNA, 20 bp, Artificial sequence
  SiRNA target sequence
gttttcgcttatttccttta

SEQ ID NO: 211449 - DNA, 20 bp, Artificial sequence
  SiRNA target sequence
ttttcgcttatttcctttat

SEQ ID NO: 211450 - DNA, 20 bp, Artificial sequence
  SiRNA target sequence
tttcgcttatttcctttatt

SEQ ID NO: 211451 - DNA, 20 bp, Artificial sequence
  SiRNA target sequence
ttcgcttatttcctttattt

SEQ ID NO: 211452 - DNA, 20 bp, Artificial sequence
  SiRNA target sequence
tcgcttatttcctttattta

SEQ ID NO: 211453 - DNA, 20 bp, Artificial sequence
  SiRNA target sequence
cgcttatttcctttatttac

SEQ ID NO: 211454 - DNA, 20 bp, Artificial sequence
  SiRNA target sequence
gcttatttcctttatttact

SEQ ID NO: 211455 - DNA, 20 bp, Artificial sequence
  SiRNA target sequence
cttatttcctttatttactc

SEQ ID NO: 211456 - DNA, 20 bp, Artificial sequence
  SiRNA target sequence
ttatttcctttatttactca

SEQ ID NO: 211457 - DNA, 20 bp, Artificial sequence
  SiRNA target sequence
tatttcctttatttactcag

SEQ ID NO: 211458 - DNA, 20 bp, Artificial sequence
  SiRNA target sequence
atttcctttatttactcagt

SEQ ID NO: 211459 - DNA, 20 bp, Artificial sequence
  SiRNA target sequence
tttcctttatttactcagta

SEQ ID NO: 211460 - DNA, 20 bp, Artificial sequence
  SiRNA target sequence
ttcctttatttactcagtag

SEQ ID NO: 211461 - DNA, 20 bp, Artificial sequence
  SiRNA target sequence
tcctttatttactcagtagg

SEQ ID NO: 211462 - DNA, 20 bp, Artificial sequence
  SiRNA target sequence
cctttatttactcagtagga

SEQ ID NO: 211463 - DNA, 20 bp, Artificial sequence
  SiRNA target sequence
ctttatttactcagtaggac

SEQ ID NO: 211464 - DNA, 20 bp, Artificial sequence
  SiRNA target sequence
tttatttactcagtaggacg

SEQ ID NO: 211465 - DNA, 20 bp, Artificial sequence
  SiRNA target sequence
ttatttactcagtaggacga

SEQ ID NO: 211466 - DNA, 20 bp, Artificial sequence
  SiRNA target sequence
tatttactcagtaggacgag

SEQ ID NO: 211467 - DNA, 20 bp, Artificial sequence
  SiRNA target sequence
atttactcagtaggacgagt

SEQ ID NO: 211468 - DNA, 20 bp, Artificial sequence
  SiRNA target sequence
tttactcagtaggacgagtg

SEQ ID NO: 211469 - DNA, 20 bp, Artificial sequence
  SiRNA target sequence
ttactcagtaggacgagtgt

SEQ ID NO: 211470 - DNA, 20 bp, Artificial sequence
  SiRNA target sequence
tactcagtaggacgagtgtt

SEQ ID NO: 211471 - DNA, 20 bp, Artificial sequence
  SiRNA target sequence
actcagtaggacgagtgtta

SEQ ID NO: 211472 - DNA, 20 bp, Artificial sequence
  SiRNA target sequence
ctcagtaggacgagtgttaa

SEQ ID NO: 211473 - DNA, 20 bp, Artificial sequence
  SiRNA target sequence
tcagtaggacgagtgttaaa

SEQ ID NO: 211474 - DNA, 20 bp, Artificial sequence
  SiRNA target sequence
cagtaggacgagtgttaaaa

SEQ ID NO: 211475 - DNA, 20 bp, Artificial sequence
  SiRNA target sequence
agtaggacgagtgttaaaag

SEQ ID NO: 211476 - DNA, 20 bp, Artificial sequence
  SiRNA target sequence
gtaggacgagtgttaaaaga

SEQ ID NO: 211477 - DNA, 20 bp, Artificial sequence
  SiRNA target sequence
taggacgagtgttaaaagat

SEQ ID NO: 211478 - DNA, 20 bp, Artificial sequence
  SiRNA target sequence
aggacgagtgttaaaagatg

SEQ ID NO: 211479 - DNA, 20 bp, Artificial sequence
  SiRNA target sequence
ggacgagtgttaaaagatgc

SEQ ID NO: 211480 - DNA, 20 bp, Artificial sequence
  SiRNA target sequence
gacgagtgttaaaagatgca

SEQ ID NO: 211481 - DNA, 20 bp, Artificial sequence
  SiRNA target sequence
acgagtgttaaaagatgcag

SEQ ID NO: 211482 - DNA, 20 bp, Artificial sequence
  SiRNA target sequence
cgagtgttaaaagatgcagc

SEQ ID NO: 211483 - DNA, 20 bp, Artificial sequence
  SiRNA target sequence
gagtgttaaaagatgcagca

SEQ ID NO: 211484 - DNA, 20 bp, Artificial sequence
  SiRNA target sequence
agtgttaaaagatgcagcag

SEQ ID NO: 211485 - DNA, 20 bp, Artificial sequence
  SiRNA target sequence
gtgttaaaagatgcagcagt

SEQ ID NO: 211486 - DNA, 20 bp, Artificial sequence
  SiRNA target sequence
tgttaaaagatgcagcagtt

SEQ ID NO: 211487 - DNA, 20 bp, Artificial sequence
  SiRNA target sequence
gttaaaagatgcagcagttc

SEQ ID NO: 211488 - DNA, 20 bp, Artificial sequence
  SiRNA target sequence
ttaaaagatgcagcagttct

SEQ ID NO: 211489 - DNA, 20 bp, Artificial sequence
  SiRNA target sequence
taaaagatgcagcagttctt

SEQ ID NO: 211490 - DNA, 20 bp, Artificial sequence
  SiRNA target sequence
aaaagatgcagcagttctta

SEQ ID NO: 211491 - DNA, 20 bp, Artificial sequence
  SiRNA target sequence
aaagatgcagcagttcttag

SEQ ID NO: 211492 - DNA, 20 bp, Artificial sequence
  SiRNA target sequence
aagatgcagcagttcttagt

SEQ ID NO: 211493 - DNA, 20 bp, Artificial sequence
  SiRNA target sequence
agatgcagcagttcttagta

SEQ ID NO: 211494 - DNA, 20 bp, Artificial sequence
  SiRNA target sequence
gatgcagcagttcttagtag

SEQ ID NO: 211495 - DNA, 20 bp, Artificial sequence
  SiRNA target sequence
atgcagcagttcttagtaga

SEQ ID NO: 211496 - DNA, 20 bp, Artificial sequence
  SiRNA target sequence
tgcagcagttcttagtagac

SEQ ID NO: 211497 - DNA, 20 bp, Artificial sequence
  SiRNA target sequence
gcagcagttcttagtagaca

SEQ ID NO: 211498 - DNA, 20 bp, Artificial sequence
  SiRNA target sequence
cagcagttcttagtagacag

SEQ ID NO: 211499 - DNA, 20 bp, Artificial sequence
  SiRNA target sequence
agcagttcttagtagacaga

SEQ ID NO: 211500 - DNA, 20 bp, Artificial sequence
  SiRNA target sequence
gcagttcttagtagacagat

SEQ ID NO: 211501 - DNA, 20 bp, Artificial sequence
  SiRNA target sequence
cagttcttagtagacagatg

SEQ ID NO: 211502 - DNA, 20 bp, Artificial sequence
  SiRNA target sequence
agttcttagtagacagatgc

SEQ ID NO: 211503 - DNA, 20 bp, Artificial sequence
  SiRNA target sequence
gttcttagtagacagatgcc

SEQ ID NO: 211504 - DNA, 20 bp, Artificial sequence
  SiRNA target sequence
ttcttagtagacagatgcca

SEQ ID NO: 211505 - DNA, 20 bp, Artificial sequence
  SiRNA target sequence
tcttagtagacagatgccac

SEQ ID NO: 211506 - DNA, 20 bp, Artificial sequence
  SiRNA target sequence
cttagtagacagatgccact

SEQ ID NO: 211507 - DNA, 20 bp, Artificial sequence
  SiRNA target sequence
ttagtagacagatgccacta

SEQ ID NO: 211508 - DNA, 20 bp, Artificial sequence
  SiRNA target sequence
tagtagacagatgccactat

SEQ ID NO: 211509 - DNA, 20 bp, Artificial sequence
  SiRNA target sequence
agtagacagatgccactatc

SEQ ID NO: 211510 - DNA, 20 bp, Artificial sequence
  SiRNA target sequence
gtagacagatgccactatcc

SEQ ID NO: 211511 - DNA, 20 bp, Artificial sequence
  SiRNA target sequence
tagacagatgccactatcca

SEQ ID NO: 211512 - DNA, 20 bp, Artificial sequence
  SiRNA target sequence
agacagatgccactatccat

SEQ ID NO: 211513 - DNA, 20 bp, Artificial sequence
  SiRNA target sequence
gacagatgccactatccatt

SEQ ID NO: 211514 - DNA, 20 bp, Artificial sequence
  SiRNA target sequence
acagatgccactatccatta

SEQ ID NO: 211515 - DNA, 20 bp, Artificial sequence
  SiRNA target sequence
cagatgccactatccattaa

SEQ ID NO: 211516 - DNA, 20 bp, Artificial sequence
  SiRNA target sequence
agatgccactatccattaat

SEQ ID NO: 211517 - DNA, 20 bp, Artificial sequence
  SiRNA target sequence
gatgccactatccattaatt

SEQ ID NO: 211518 - DNA, 20 bp, Artificial sequence
  SiRNA target sequence
atgccactatccattaattg

SEQ ID NO: 211519 - DNA, 20 bp, Artificial sequence
  SiRNA target sequence
tgccactatccattaattgt

SEQ ID NO: 211520 - DNA, 20 bp, Artificial sequence
  SiRNA target sequence
gccactatccattaattgtc

SEQ ID NO: 211521 - DNA, 20 bp, Artificial sequence
  SiRNA target sequence
ccactatccattaattgtct

SEQ ID NO: 211522 - DNA, 20 bp, Artificial sequence
  SiRNA target sequence
cactatccattaattgtctt

SEQ ID NO: 211523 - DNA, 20 bp, Artificial sequence
  SiRNA target sequence
actatccattaattgtctta

SEQ ID NO: 211524 - DNA, 20 bp, Artificial sequence
  SiRNA target sequence
ctatccattaattgtcttaa

SEQ ID NO: 211525 - DNA, 20 bp, Artificial sequence
  SiRNA target sequence
tatccattaattgtcttaaa

SEQ ID NO: 211526 - DNA, 20 bp, Artificial sequence
  SiRNA target sequence
atccattaattgtcttaaaa

SEQ ID NO: 211527 - DNA, 20 bp, Artificial sequence
  SiRNA target sequence
tccattaattgtcttaaaag

SEQ ID NO: 211528 - DNA, 20 bp, Artificial sequence
  SiRNA target sequence
ccattaattgtcttaaaagc

SEQ ID NO: 211529 - DNA, 20 bp, Artificial sequence
  SiRNA target sequence
cattaattgtcttaaaagct

SEQ ID NO: 211530 - DNA, 20 bp, Artificial sequence
  SiRNA target sequence
attaattgtcttaaaagctt

SEQ ID NO: 211531 - DNA, 20 bp, Artificial sequence
  SiRNA target sequence
ttaattgtcttaaaagcttt

SEQ ID NO: 211532 - DNA, 20 bp, Artificial sequence
  SiRNA target sequence
taattgtcttaaaagctttg

SEQ ID NO: 211533 - DNA, 20 bp, Artificial sequence
  SiRNA target sequence
aattgtcttaaaagctttgt

SEQ ID NO: 211534 - DNA, 20 bp, Artificial sequence
  SiRNA target sequence
attgtcttaaaagctttgta

SEQ ID NO: 211535 - DNA, 20 bp, Artificial sequence
  SiRNA target sequence
ttgtcttaaaagctttgtaa

SEQ ID NO: 211536 - DNA, 20 bp, Artificial sequence
  SiRNA target sequence
tgtcttaaaagctttgtaat

SEQ ID NO: 211537 - DNA, 20 bp, Artificial sequence
  SiRNA target sequence
gtcttaaaagctttgtaatt

SEQ ID NO: 211538 - DNA, 20 bp, Artificial sequence
  SiRNA target sequence
tcttaaaagctttgtaattt

SEQ ID NO: 211539 - DNA, 20 bp, Artificial sequence
  SiRNA target sequence
cttaaaagctttgtaatttt

SEQ ID NO: 211540 - DNA, 20 bp, Artificial sequence
  SiRNA target sequence
ttaaaagctttgtaatttta

SEQ ID NO: 211541 - DNA, 20 bp, Artificial sequence
  SiRNA target sequence
taaaagctttgtaattttac

SEQ ID NO: 211542 - DNA, 20 bp, Artificial sequence
  SiRNA target sequence
aaaagctttgtaattttacc

SEQ ID NO: 211543 - DNA, 20 bp, Artificial sequence
  SiRNA target sequence
aaagctttgtaattttacca

SEQ ID NO: 211544 - DNA, 20 bp, Artificial sequence
  SiRNA target sequence
aagctttgtaattttaccag

SEQ ID NO: 211545 - DNA, 20 bp, Artificial sequence
  SiRNA target sequence
agctttgtaattttaccagt

SEQ ID NO: 211546 - DNA, 20 bp, Artificial sequence
  SiRNA target sequence
gctttgtaattttaccagtt

SEQ ID NO: 211547 - DNA, 20 bp, Artificial sequence
  SiRNA target sequence
ctttgtaattttaccagtta

SEQ ID NO: 211548 - DNA, 20 bp, Artificial sequence
  SiRNA target sequence
tttgtaattttaccagttac

SEQ ID NO: 211549 - DNA, 20 bp, Artificial sequence
  SiRNA target sequence
ttgtaattttaccagttact

SEQ ID NO: 211550 - DNA, 20 bp, Artificial sequence
  SiRNA target sequence
tgtaattttaccagttactc

SEQ ID NO: 211551 - DNA, 20 bp, Artificial sequence
  SiRNA target sequence
gtaattttaccagttactct

SEQ ID NO: 211552 - DNA, 20 bp, Artificial sequence
  SiRNA target sequence
taattttaccagttactctt

SEQ ID NO: 211553 - DNA, 20 bp, Artificial sequence
  SiRNA target sequence
aattttaccagttactcttg

SEQ ID NO: 211554 - DNA, 20 bp, Artificial sequence
  SiRNA target sequence
attttaccagttactcttgt

SEQ ID NO: 211555 - DNA, 20 bp, Artificial sequence
  SiRNA target sequence
ttttaccagttactcttgtt

SEQ ID NO: 211556 - DNA, 20 bp, Artificial sequence
  SiRNA target sequence
tttaccagttactcttgttt

SEQ ID NO: 211557 - DNA, 20 bp, Artificial sequence
  SiRNA target sequence
ttaccagttactcttgtttg

SEQ ID NO: 211558 - DNA, 20 bp, Artificial sequence
  SiRNA target sequence
taccagttactcttgtttgt

SEQ ID NO: 211559 - DNA, 20 bp, Artificial sequence
  SiRNA target sequence
accagttactcttgtttgtg

SEQ ID NO: 211560 - DNA, 20 bp, Artificial sequence
  SiRNA target sequence
ccagttactcttgtttgtgt

SEQ ID NO: 211561 - DNA, 20 bp, Artificial sequence
  SiRNA target sequence
cagttactcttgtttgtgta

SEQ ID NO: 211562 - DNA, 20 bp, Artificial sequence
  SiRNA target sequence
agttactcttgtttgtgtag

SEQ ID NO: 211563 - DNA, 20 bp, Artificial sequence
  SiRNA target sequence
gttactcttgtttgtgtagg

SEQ ID NO: 211564 - DNA, 20 bp, Artificial sequence
  SiRNA target sequence
ttactcttgtttgtgtagga

SEQ ID NO: 211565 - DNA, 20 bp, Artificial sequence
  SiRNA target sequence
tactcttgtttgtgtaggat

SEQ ID NO: 211566 - DNA, 20 bp, Artificial sequence
  SiRNA target sequence
actcttgtttgtgtaggatt

SEQ ID NO: 211567 - DNA, 20 bp, Artificial sequence
  SiRNA target sequence
ctcttgtttgtgtaggatta

SEQ ID NO: 211568 - DNA, 20 bp, Artificial sequence
  SiRNA target sequence
tcttgtttgtgtaggattaa

SEQ ID NO: 211569 - DNA, 20 bp, Artificial sequence
  SiRNA target sequence
cttgtttgtgtaggattaat

SEQ ID NO: 211570 - DNA, 20 bp, Artificial sequence
  SiRNA target sequence
ttgtttgtgtaggattaatt

SEQ ID NO: 211571 - DNA, 20 bp, Artificial sequence
  SiRNA target sequence
tgtttgtgtaggattaattc

SEQ ID NO: 211572 - DNA, 20 bp, Artificial sequence
  SiRNA target sequence
gtttgtgtaggattaattca

SEQ ID NO: 211573 - DNA, 20 bp, Artificial sequence
  SiRNA target sequence
tttgtgtaggattaattcag

SEQ ID NO: 211574 - DNA, 20 bp, Artificial sequence
  SiRNA target sequence
ttgtgtaggattaattcaga

SEQ ID NO: 211575 - DNA, 20 bp, Artificial sequence
  SiRNA target sequence
tgtgtaggattaattcagaa

SEQ ID NO: 211576 - DNA, 20 bp, Artificial sequence
  SiRNA target sequence
gtgtaggattaattcagaag

SEQ ID NO: 211577 - DNA, 20 bp, Artificial sequence
  SiRNA target sequence
tgtaggattaattcagaagt

SEQ ID NO: 211578 - DNA, 20 bp, Artificial sequence
  SiRNA target sequence
gtaggattaattcagaagtc

SEQ ID NO: 211579 - DNA, 20 bp, Artificial sequence
  SiRNA target sequence
taggattaattcagaagtct

SEQ ID NO: 211580 - DNA, 20 bp, Artificial sequence
  SiRNA target sequence
aggattaattcagaagtcta

SEQ ID NO: 211581 - DNA, 20 bp, Artificial sequence
  SiRNA target sequence
ggattaattcagaagtctac

SEQ ID NO: 211582 - DNA, 20 bp, Artificial sequence
  SiRNA target sequence
gattaattcagaagtctaca

SEQ ID NO: 211583 - DNA, 20 bp, Artificial sequence
  SiRNA target sequence
attaattcagaagtctacac

SEQ ID NO: 211584 - DNA, 20 bp, Artificial sequence
  SiRNA target sequence
ttaattcagaagtctacact

SEQ ID NO: 211585 - DNA, 20 bp, Artificial sequence
  SiRNA target sequence
taattcagaagtctacactc

SEQ ID NO: 211586 - DNA, 20 bp, Artificial sequence
  SiRNA target sequence
aattcagaagtctacactct

SEQ ID NO: 211587 - DNA, 20 bp, Artificial sequence
  SiRNA target sequence
attcagaagtctacactctc

SEQ ID NO: 211588 - DNA, 20 bp, Artificial sequence
  SiRNA target sequence
ttcagaagtctacactctct

SEQ ID NO: 211589 - DNA, 20 bp, Artificial sequence
  SiRNA target sequence
tcagaagtctacactctctt

SEQ ID NO: 211590 - DNA, 20 bp, Artificial sequence
  SiRNA target sequence
cagaagtctacactctctta

SEQ ID NO: 211591 - DNA, 20 bp, Artificial sequence
  SiRNA target sequence
agaagtctacactctcttat

SEQ ID NO: 211592 - DNA, 20 bp, Artificial sequence
  SiRNA target sequence
gaagtctacactctcttatt

SEQ ID NO: 211593 - DNA, 20 bp, Artificial sequence
  SiRNA target sequence
aagtctacactctcttattc

SEQ ID NO: 211594 - DNA, 20 bp, Artificial sequence
  SiRNA target sequence
agtctacactctcttattct

SEQ ID NO: 211595 - DNA, 20 bp, Artificial sequence
  SiRNA target sequence
gtctacactctcttattctt

SEQ ID NO: 211596 - DNA, 20 bp, Artificial sequence
  SiRNA target sequence
tctacactctcttattcttt

SEQ ID NO: 211597 - DNA, 20 bp, Artificial sequence
  SiRNA target sequence
ctacactctcttattctttt

SEQ ID NO: 211598 - DNA, 20 bp, Artificial sequence
  SiRNA target sequence
tacactctcttattctttta

SEQ ID NO: 211599 - DNA, 20 bp, Artificial sequence
  SiRNA target sequence
acactctcttattcttttac

SEQ ID NO: 211600 - DNA, 20 bp, Artificial sequence
  SiRNA target sequence
cactctcttattcttttaca

SEQ ID NO: 211601 - DNA, 20 bp, Artificial sequence
  SiRNA target sequence
actctcttattcttttacaa

SEQ ID NO: 211602 - DNA, 20 bp, Artificial sequence
  SiRNA target sequence
ctctcttattcttttacaaa

SEQ ID NO: 211603 - DNA, 20 bp, Artificial sequence
  SiRNA target sequence
tctcttattcttttacaaaa

SEQ ID NO: 211604 - DNA, 20 bp, Artificial sequence
  SiRNA target sequence
ctcttattcttttacaaaaa

SEQ ID NO: 211605 - DNA, 20 bp, Artificial sequence
  SiRNA target sequence
tcttattcttttacaaaaat

SEQ ID NO: 211606 - DNA, 20 bp, Artificial sequence
  SiRNA target sequence
cttattcttttacaaaaata

SEQ ID NO: 211607 - DNA, 20 bp, Artificial sequence
  SiRNA target sequence
ttattcttttacaaaaatat

SEQ ID NO: 211608 - DNA, 20 bp, Artificial sequence
  SiRNA target sequence
tattcttttacaaaaatatt

SEQ ID NO: 211609 - DNA, 20 bp, Artificial sequence
  SiRNA target sequence
attcttttacaaaaatattt

SEQ ID NO: 211610 - DNA, 20 bp, Artificial sequence
  SiRNA target sequence
ttcttttacaaaaatatttg

SEQ ID NO: 211611 - DNA, 20 bp, Artificial sequence
  SiRNA target sequence
tcttttacaaaaatatttga

SEQ ID NO: 211612 - DNA, 20 bp, Artificial sequence
  SiRNA target sequence
cttttacaaaaatatttgat

SEQ ID NO: 211613 - DNA, 20 bp, Artificial sequence
  SiRNA target sequence
ttttacaaaaatatttgatg

SEQ ID NO: 211614 - DNA, 20 bp, Artificial sequence
  SiRNA target sequence
tttacaaaaatatttgatgg

SEQ ID NO: 211615 - DNA, 20 bp, Artificial sequence
  SiRNA target sequence
ttacaaaaatatttgatggt

SEQ ID NO: 211616 - DNA, 20 bp, Artificial sequence
  SiRNA target sequence
tacaaaaatatttgatggtg

SEQ ID NO: 211617 - DNA, 20 bp, Artificial sequence
  SiRNA target sequence
acaaaaatatttgatggtgc

SEQ ID NO: 211618 - DNA, 20 bp, Artificial sequence
  SiRNA target sequence
caaaaatatttgatggtgca

SEQ ID NO: 211619 - DNA, 20 bp, Artificial sequence
  SiRNA target sequence
aaaaatatttgatggtgcat

SEQ ID NO: 211620 - DNA, 20 bp, Artificial sequence
  SiRNA target sequence
aaaatatttgatggtgcatt

SEQ ID NO: 211621 - DNA, 20 bp, Artificial sequence
  SiRNA target sequence
aaatatttgatggtgcattg

SEQ ID NO: 211622 - DNA, 20 bp, Artificial sequence
  SiRNA target sequence
aatatttgatggtgcattgt

SEQ ID NO: 211623 - DNA, 20 bp, Artificial sequence
  SiRNA target sequence
atatttgatggtgcattgtt

SEQ ID NO: 211624 - DNA, 20 bp, Artificial sequence
  SiRNA target sequence
tatttgatggtgcattgtta

SEQ ID NO: 211625 - DNA, 20 bp, Artificial sequence
  SiRNA target sequence
atttgatggtgcattgttaa

SEQ ID NO: 211626 - DNA, 20 bp, Artificial sequence
  SiRNA target sequence
tttgatggtgcattgttaat

SEQ ID NO: 211627 - DNA, 20 bp, Artificial sequence
  SiRNA target sequence
ttgatggtgcattgttaata

SEQ ID NO: 211628 - DNA, 20 bp, Artificial sequence
  SiRNA target sequence
tgatggtgcattgttaatat

SEQ ID NO: 211629 - DNA, 20 bp, Artificial sequence
  SiRNA target sequence
gatggtgcattgttaatatt

SEQ ID NO: 211630 - DNA, 20 bp, Artificial sequence
  SiRNA target sequence
atggtgcattgttaatattt

SEQ ID NO: 211631 - DNA, 20 bp, Artificial sequence
  SiRNA target sequence
tggtgcattgttaatatttg

SEQ ID NO: 211632 - DNA, 20 bp, Artificial sequence
  SiRNA target sequence
ggtgcattgttaatatttgc

SEQ ID NO: 211633 - DNA, 20 bp, Artificial sequence
  SiRNA target sequence
gtgcattgttaatatttgct

SEQ ID NO: 211634 - DNA, 20 bp, Artificial sequence
  SiRNA target sequence
tgcattgttaatatttgctt

SEQ ID NO: 211635 - DNA, 20 bp, Artificial sequence
  SiRNA target sequence
gcattgttaatatttgcttt

SEQ ID NO: 211636 - DNA, 20 bp, Artificial sequence
  SiRNA target sequence
cattgttaatatttgctttt

SEQ ID NO: 211637 - DNA, 20 bp, Artificial sequence
  SiRNA target sequence
attgttaatatttgcttttc

SEQ ID NO: 211638 - DNA, 20 bp, Artificial sequence
  SiRNA target sequence
ttgttaatatttgcttttct

SEQ ID NO: 211639 - DNA, 20 bp, Artificial sequence
  SiRNA target sequence
tgttaatatttgcttttctt

SEQ ID NO: 211640 - DNA, 20 bp, Artificial sequence
  SiRNA target sequence
gttaatatttgcttttcttt

SEQ ID NO: 211641 - DNA, 20 bp, Artificial sequence
  SiRNA target sequence
ttaatatttgcttttcttta

SEQ ID NO: 211642 - DNA, 20 bp, Artificial sequence
  SiRNA target sequence
taatatttgcttttctttat

SEQ ID NO: 211643 - DNA, 20 bp, Artificial sequence
  SiRNA target sequence
aatatttgcttttctttata

SEQ ID NO: 211644 - DNA, 20 bp, Artificial sequence
  SiRNA target sequence
atatttgcttttctttatat

SEQ ID NO: 211645 - DNA, 20 bp, Artificial sequence
  SiRNA target sequence
tatttgcttttctttatatc

SEQ ID NO: 211646 - DNA, 20 bp, Artificial sequence
  SiRNA target sequence
atttgcttttctttatatca

SEQ ID NO: 211647 - DNA, 20 bp, Artificial sequence
  SiRNA target sequence
tttgcttttctttatatcat

SEQ ID NO: 211648 - DNA, 20 bp, Artificial sequence
  SiRNA target sequence
ttgcttttctttatatcatt

SEQ ID NO: 211649 - DNA, 20 bp, Artificial sequence
  SiRNA target sequence
tgcttttctttatatcattc

SEQ ID NO: 211650 - DNA, 20 bp, Artificial sequence
  SiRNA target sequence
gcttttctttatatcattct

SEQ ID NO: 211651 - DNA, 20 bp, Artificial sequence
  SiRNA target sequence
cttttctttatatcattctt

SEQ ID NO: 211652 - DNA, 20 bp, Artificial sequence
  SiRNA target sequence
ttttctttatatcattcttg

SEQ ID NO: 211653 - DNA, 20 bp, Artificial sequence
  SiRNA target sequence
tttctttatatcattcttgg

SEQ ID NO: 211654 - DNA, 20 bp, Artificial sequence
  SiRNA target sequence
ttctttatatcattcttggt

SEQ ID NO: 211655 - DNA, 20 bp, Artificial sequence
  SiRNA target sequence
tctttatatcattcttggtc

SEQ ID NO: 211656 - DNA, 20 bp, Artificial sequence
  SiRNA target sequence
ctttatatcattcttggtct

SEQ ID NO: 211657 - DNA, 20 bp, Artificial sequence
  SiRNA target sequence
tttatatcattcttggtcta

SEQ ID NO: 211658 - DNA, 20 bp, Artificial sequence
  SiRNA target sequence
ttatatcattcttggtctag

SEQ ID NO: 211659 - DNA, 20 bp, Artificial sequence
  SiRNA target sequence
tatatcattcttggtctagt

SEQ ID NO: 211660 - DNA, 20 bp, Artificial sequence
  SiRNA target sequence
atatcattcttggtctagtt

SEQ ID NO: 211661 - DNA, 20 bp, Artificial sequence
  SiRNA target sequence
tatcattcttggtctagttc

SEQ ID NO: 211662 - DNA, 20 bp, Artificial sequence
  SiRNA target sequence
atcattcttggtctagttct

SEQ ID NO: 211663 - DNA, 20 bp, Artificial sequence
  SiRNA target sequence
tcattcttggtctagttctt

SEQ ID NO: 211664 - DNA, 20 bp, Artificial sequence
  SiRNA target sequence
cattcttggtctagttcttc

SEQ ID NO: 211665 - DNA, 20 bp, Artificial sequence
  SiRNA target sequence
attcttggtctagttcttct

SEQ ID NO: 211666 - DNA, 20 bp, Artificial sequence
  SiRNA target sequence
ttcttggtctagttcttctt

SEQ ID NO: 211667 - DNA, 20 bp, Artificial sequence
  SiRNA target sequence
tcttggtctagttcttcttc

SEQ ID NO: 211668 - DNA, 20 bp, Artificial sequence
  SiRNA target sequence
cttggtctagttcttcttcc

SEQ ID NO: 211669 - DNA, 20 bp, Artificial sequence
  SiRNA target sequence
ttggtctagttcttcttcca

SEQ ID NO: 211670 - DNA, 20 bp, Artificial sequence
  SiRNA target sequence
tggtctagttcttcttccat

SEQ ID NO: 211671 - DNA, 20 bp, Artificial sequence
  SiRNA target sequence
ggtctagttcttcttccata

SEQ ID NO: 211672 - DNA, 20 bp, Artificial sequence
  SiRNA target sequence
gtctagttcttcttccatat

SEQ ID NO: 211673 - DNA, 20 bp, Artificial sequence
  SiRNA target sequence
tctagttcttcttccatatt

SEQ ID NO: 211674 - DNA, 20 bp, Artificial sequence
  SiRNA target sequence
ctagttcttcttccatattc

SEQ ID NO: 211675 - DNA, 20 bp, Artificial sequence
  SiRNA target sequence
tagttcttcttccatattct

SEQ ID NO: 211676 - DNA, 20 bp, Artificial sequence
  SiRNA target sequence
agttcttcttccatattctc

SEQ ID NO: 211677 - DNA, 20 bp, Artificial sequence
  SiRNA target sequence
gttcttcttccatattctca

SEQ ID NO: 211678 - DNA, 20 bp, Artificial sequence
  SiRNA target sequence
ttcttcttccatattctcat

SEQ ID NO: 211679 - DNA, 20 bp, Artificial sequence
  SiRNA target sequence
tcttcttccatattctcatc

SEQ ID NO: 211680 - DNA, 20 bp, Artificial sequence
  SiRNA target sequence
cttcttccatattctcatct

SEQ ID NO: 211681 - DNA, 20 bp, Artificial sequence
  SiRNA target sequence
ttcttccatattctcatctt

SEQ ID NO: 211682 - DNA, 20 bp, Artificial sequence
  SiRNA target sequence
tcttccatattctcatcttt

SEQ ID NO: 211683 - DNA, 20 bp, Artificial sequence
  SiRNA target sequence
cttccatattctcatctttt

SEQ ID NO: 211684 - DNA, 20 bp, Artificial sequence
  SiRNA target sequence
ttccatattctcatcttttc

SEQ ID NO: 211685 - DNA, 20 bp, Artificial sequence
  SiRNA target sequence
tccatattctcatcttttcc

SEQ ID NO: 211686 - DNA, 20 bp, Artificial sequence
  SiRNA target sequence
ccatattctcatcttttcca

SEQ ID NO: 211687 - DNA, 20 bp, Artificial sequence
  SiRNA target sequence
catattctcatcttttccag

SEQ ID NO: 211688 - DNA, 20 bp, Artificial sequence
  SiRNA target sequence
atattctcatcttttccagc

SEQ ID NO: 211689 - DNA, 20 bp, Artificial sequence
  SiRNA target sequence
tattctcatcttttccagct

SEQ ID NO: 211690 - DNA, 20 bp, Artificial sequence
  SiRNA target sequence
attctcatcttttccagctt

SEQ ID NO: 211691 - DNA, 20 bp, Artificial sequence
  SiRNA target sequence
ttctcatcttttccagcttg

SEQ ID NO: 211692 - DNA, 20 bp, Artificial sequence
  SiRNA target sequence
tctcatcttttccagcttga

SEQ ID NO: 211693 - DNA, 20 bp, Artificial sequence
  SiRNA target sequence
ctcatcttttccagcttgat

SEQ ID NO: 211694 - DNA, 20 bp, Artificial sequence
  SiRNA target sequence
tcatcttttccagcttgata

SEQ ID NO: 211695 - DNA, 20 bp, Artificial sequence
  SiRNA target sequence
catcttttccagcttgatag

SEQ ID NO: 211696 - DNA, 20 bp, Artificial sequence
  SiRNA target sequence
atcttttccagcttgatagt

SEQ ID NO: 211697 - DNA, 20 bp, Artificial sequence
  SiRNA target sequence
tcttttccagcttgatagtt

SEQ ID NO: 211698 - DNA, 20 bp, Artificial sequence
  SiRNA target sequence
cttttccagcttgatagtta

SEQ ID NO: 211699 - DNA, 20 bp, Artificial sequence
  SiRNA target sequence
ttttccagcttgatagttat

SEQ ID NO: 211700 - DNA, 20 bp, Artificial sequence
  SiRNA target sequence
tttccagcttgatagttatt

SEQ ID NO: 211701 - DNA, 20 bp, Artificial sequence
  SiRNA target sequence
ttccagcttgatagttattt

SEQ ID NO: 211702 - DNA, 20 bp, Artificial sequence
  SiRNA target sequence
tccagcttgatagttatttt

SEQ ID NO: 211703 - DNA, 20 bp, Artificial sequence
  SiRNA target sequence
ccagcttgatagttattttt

SEQ ID NO: 211704 - DNA, 20 bp, Artificial sequence
  SiRNA target sequence
cagcttgatagttatttttt

SEQ ID NO: 211705 - DNA, 20 bp, Artificial sequence
  SiRNA target sequence
agcttgatagttattttttt

SEQ ID NO: 211706 - DNA, 20 bp, Artificial sequence
  SiRNA target sequence
gcttgatagttattttttta

SEQ ID NO: 211707 - DNA, 20 bp, Artificial sequence
  SiRNA target sequence
cttgatagttatttttttag

SEQ ID NO: 211708 - DNA, 20 bp, Artificial sequence
  SiRNA target sequence
ttgatagttatttttttaga

SEQ ID NO: 211709 - DNA, 20 bp, Artificial sequence
  SiRNA target sequence
tgatagttatttttttagag

SEQ ID NO: 211710 - DNA, 20 bp, Artificial sequence
  SiRNA target sequence
gatagttatttttttagaga

SEQ ID NO: 211711 - DNA, 20 bp, Artificial sequence
  SiRNA target sequence
atagttatttttttagagac

SEQ ID NO: 211712 - DNA, 20 bp, Artificial sequence
  SiRNA target sequence
tagttatttttttagagacc

SEQ ID NO: 211713 - DNA, 20 bp, Artificial sequence
  SiRNA target sequence
agttatttttttagagacct

SEQ ID NO: 211714 - DNA, 20 bp, Artificial sequence
  SiRNA target sequence
gttatttttttagagacctt

SEQ ID NO: 211715 - DNA, 20 bp, Artificial sequence
  SiRNA target sequence
ttatttttttagagaccttt

SEQ ID NO: 211716 - DNA, 20 bp, Artificial sequence
  SiRNA target sequence
tatttttttagagacctttt

SEQ ID NO: 211717 - DNA, 20 bp, Artificial sequence
  SiRNA target sequence
atttttttagagaccttttt

SEQ ID NO: 211718 - DNA, 20 bp, Artificial sequence
  SiRNA target sequence
tttttttagagaccttttta

SEQ ID NO: 211719 - DNA, 20 bp, Artificial sequence
  SiRNA target sequence
ttttttagagacctttttag

SEQ ID NO: 211720 - DNA, 20 bp, Artificial sequence
  SiRNA target sequence
tttttagagacctttttagt

SEQ ID NO: 211721 - DNA, 20 bp, Artificial sequence
  SiRNA target sequence
ttttagagacctttttagtg

SEQ ID NO: 211722 - DNA, 20 bp, Artificial sequence
  SiRNA target sequence
tttagagacctttttagtga

SEQ ID NO: 211723 - DNA, 20 bp, Artificial sequence
  SiRNA target sequence
ttagagacctttttagtgat

SEQ ID NO: 211724 - DNA, 20 bp, Artificial sequence
  SiRNA target sequence
tagagacctttttagtgatg

SEQ ID NO: 211725 - DNA, 20 bp, Artificial sequence
  SiRNA target sequence
agagacctttttagtgatgg

SEQ ID NO: 211726 - DNA, 20 bp, Artificial sequence
  SiRNA target sequence
gagacctttttagtgatggg

SEQ ID NO: 211727 - DNA, 20 bp, Artificial sequence
  SiRNA target sequence
agacctttttagtgatggga

SEQ ID NO: 211728 - DNA, 20 bp, Artificial sequence
  SiRNA target sequence
gacctttttagtgatgggaa

SEQ ID NO: 211729 - DNA, 20 bp, Artificial sequence
  SiRNA target sequence
acctttttagtgatgggaaa

SEQ ID NO: 211730 - DNA, 20 bp, Artificial sequence
  SiRNA target sequence
cctttttagtgatgggaaat

SEQ ID NO: 211731 - DNA, 20 bp, Artificial sequence
  SiRNA target sequence
ctttttagtgatgggaaatg

SEQ ID NO: 211732 - DNA, 20 bp, Artificial sequence
  SiRNA target sequence
tttttagtgatgggaaatgt

SEQ ID NO: 211733 - DNA, 20 bp, Artificial sequence
  SiRNA target sequence
ttttagtgatgggaaatgtg

SEQ ID NO: 211734 - DNA, 20 bp, Artificial sequence
  SiRNA target sequence
tttagtgatgggaaatgtgt

SEQ ID NO: 211735 - DNA, 20 bp, Artificial sequence
  SiRNA target sequence
ttagtgatgggaaatgtgtt

SEQ ID NO: 211736 - DNA, 20 bp, Artificial sequence
  SiRNA target sequence
tagtgatgggaaatgtgttg

SEQ ID NO: 211737 - DNA, 20 bp, Artificial sequence
  SiRNA target sequence
agtgatgggaaatgtgttgt

SEQ ID NO: 211738 - DNA, 20 bp, Artificial sequence
  SiRNA target sequence
gtgatgggaaatgtgttgta

SEQ ID NO: 211739 - DNA, 20 bp, Artificial sequence
  SiRNA target sequence
tgatgggaaatgtgttgtaa

SEQ ID NO: 211740 - DNA, 20 bp, Artificial sequence
  SiRNA target sequence
gatgggaaatgtgttgtaag

SEQ ID NO: 211741 - DNA, 20 bp, Artificial sequence
  SiRNA target sequence
atgggaaatgtgttgtaaga

SEQ ID NO: 211742 - DNA, 20 bp, Artificial sequence
  SiRNA target sequence
tgggaaatgtgttgtaagag

SEQ ID NO: 211743 - DNA, 20 bp, Artificial sequence
  SiRNA target sequence
gggaaatgtgttgtaagagg

SEQ ID NO: 211744 - DNA, 20 bp, Artificial sequence
  SiRNA target sequence
ggaaatgtgttgtaagaggc

SEQ ID NO: 211745 - DNA, 20 bp, Artificial sequence
  SiRNA target sequence
gaaatgtgttgtaagaggct

SEQ ID NO: 211746 - DNA, 20 bp, Artificial sequence
  SiRNA target sequence
aaatgtgttgtaagaggcta

SEQ ID NO: 211747 - DNA, 20 bp, Artificial sequence
  SiRNA target sequence
aatgtgttgtaagaggctat

SEQ ID NO: 211748 - DNA, 20 bp, Artificial sequence
  SiRNA target sequence
atgtgttgtaagaggctatg

SEQ ID NO: 211749 - DNA, 20 bp, Artificial sequence
  SiRNA target sequence
tgtgttgtaagaggctatga

SEQ ID NO: 211750 - DNA, 20 bp, Artificial sequence
  SiRNA target sequence
gtgttgtaagaggctatgat

SEQ ID NO: 211751 - DNA, 20 bp, Artificial sequence
  SiRNA target sequence
tgttgtaagaggctatgatg

SEQ ID NO: 211752 - DNA, 20 bp, Artificial sequence
  SiRNA target sequence
gttgtaagaggctatgatgc

SEQ ID NO: 211753 - DNA, 20 bp, Artificial sequence
  SiRNA target sequence
ttgtaagaggctatgatgct

SEQ ID NO: 211754 - DNA, 20 bp, Artificial sequence
  SiRNA target sequence
tgtaagaggctatgatgctt

SEQ ID NO: 211755 - DNA, 20 bp, Artificial sequence
  SiRNA target sequence
gtaagaggctatgatgcttt

SEQ ID NO: 211756 - DNA, 20 bp, Artificial sequence
  SiRNA target sequence
taagaggctatgatgcttta

SEQ ID NO: 211757 - DNA, 20 bp, Artificial sequence
  SiRNA target sequence
aagaggctatgatgctttat

SEQ ID NO: 211758 - DNA, 20 bp, Artificial sequence
  SiRNA target sequence
agaggctatgatgctttatt

SEQ ID NO: 211759 - DNA, 20 bp, Artificial sequence
  SiRNA target sequence
gaggctatgatgctttatta

SEQ ID NO: 211760 - DNA, 20 bp, Artificial sequence
  SiRNA target sequence
aggctatgatgctttattat

SEQ ID NO: 211761 - DNA, 20 bp, Artificial sequence
  SiRNA target sequence
ggctatgatgctttattatc

SEQ ID NO: 211762 - DNA, 20 bp, Artificial sequence
  SiRNA target sequence
gctatgatgctttattatct

SEQ ID NO: 211763 - DNA, 20 bp, Artificial sequence
  SiRNA target sequence
ctatgatgctttattatctt

SEQ ID NO: 211764 - DNA, 20 bp, Artificial sequence
  SiRNA target sequence
tatgatgctttattatcttt

SEQ ID NO: 211765 - DNA, 20 bp, Artificial sequence
  SiRNA target sequence
atgatgctttattatctttg

SEQ ID NO: 211766 - DNA, 20 bp, Artificial sequence
  SiRNA target sequence
tgatgctttattatctttgg

SEQ ID NO: 211767 - DNA, 20 bp, Artificial sequence
  SiRNA target sequence
gatgctttattatctttggc

SEQ ID NO: 211768 - DNA, 20 bp, Artificial sequence
  SiRNA target sequence
atgctttattatctttggca

SEQ ID NO: 211769 - DNA, 20 bp, Artificial sequence
  SiRNA target sequence
tgctttattatctttggcac

SEQ ID NO: 211770 - DNA, 20 bp, Artificial sequence
  SiRNA target sequence
gctttattatctttggcact

SEQ ID NO: 211771 - DNA, 20 bp, Artificial sequence
  SiRNA target sequence
ctttattatctttggcactg

SEQ ID NO: 211772 - DNA, 20 bp, Artificial sequence
  SiRNA target sequence
tttattatctttggcactgg

SEQ ID NO: 211773 - DNA, 20 bp, Artificial sequence
  SiRNA target sequence
ttattatctttggcactggt

SEQ ID NO: 211774 - DNA, 20 bp, Artificial sequence
  SiRNA target sequence
tattatctttggcactggtc

SEQ ID NO: 211775 - DNA, 20 bp, Artificial sequence
  SiRNA target sequence
attatctttggcactggtct

SEQ ID NO: 211776 - DNA, 20 bp, Artificial sequence
  SiRNA target sequence
ttatctttggcactggtctt

SEQ ID NO: 211777 - DNA, 20 bp, Artificial sequence
  SiRNA target sequence
tatctttggcactggtcttt

SEQ ID NO: 211778 - DNA, 20 bp, Artificial sequence
  SiRNA target sequence
atctttggcactggtcttta

SEQ ID NO: 211779 - DNA, 20 bp, Artificial sequence
  SiRNA target sequence
tctttggcactggtctttaa

SEQ ID NO: 211780 - DNA, 20 bp, Artificial sequence
  SiRNA target sequence
ctttggcactggtctttaac

SEQ ID NO: 211781 - DNA, 20 bp, Artificial sequence
  SiRNA target sequence
tttggcactggtctttaacg

SEQ ID NO: 211782 - DNA, 20 bp, Artificial sequence
  SiRNA target sequence
ttggcactggtctttaacga

SEQ ID NO: 211783 - DNA, 20 bp, Artificial sequence
  SiRNA target sequence
tggcactggtctttaacgaa

SEQ ID NO: 211784 - DNA, 20 bp, Artificial sequence
  SiRNA target sequence
ggcactggtctttaacgaat

SEQ ID NO: 211785 - DNA, 20 bp, Artificial sequence
  SiRNA target sequence
gcactggtctttaacgaatg

SEQ ID NO: 211786 - DNA, 20 bp, Artificial sequence
  SiRNA target sequence
cactggtctttaacgaatgg

SEQ ID NO: 211787 - DNA, 20 bp, Artificial sequence
  SiRNA target sequence
actggtctttaacgaatgga

SEQ ID NO: 211788 - DNA, 20 bp, Artificial sequence
  SiRNA target sequence
ctggtctttaacgaatggac

SEQ ID NO: 211789 - DNA, 20 bp, Artificial sequence
  SiRNA target sequence
tggtctttaacgaatggaca

SEQ ID NO: 211790 - DNA, 20 bp, Artificial sequence
  SiRNA target sequence
ggtctttaacgaatggacat

SEQ ID NO: 211791 - DNA, 20 bp, Artificial sequence
  SiRNA target sequence
gtctttaacgaatggacatc

SEQ ID NO: 211792 - DNA, 20 bp, Artificial sequence
  SiRNA target sequence
tctttaacgaatggacatcc

SEQ ID NO: 211793 - DNA, 20 bp, Artificial sequence
  SiRNA target sequence
ctttaacgaatggacatcct

SEQ ID NO: 211794 - DNA, 20 bp, Artificial sequence
  SiRNA target sequence
tttaacgaatggacatcctc

SEQ ID NO: 211795 - DNA, 20 bp, Artificial sequence
  SiRNA target sequence
ttaacgaatggacatcctct

SEQ ID NO: 211796 - DNA, 20 bp, Artificial sequence
  SiRNA target sequence
taacgaatggacatcctctc

SEQ ID NO: 211797 - DNA, 20 bp, Artificial sequence
  SiRNA target sequence
aacgaatggacatcctctct

SEQ ID NO: 211798 - DNA, 20 bp, Artificial sequence
  SiRNA target sequence
acgaatggacatcctctcta

SEQ ID NO: 211799 - DNA, 20 bp, Artificial sequence
  SiRNA target sequence
cgaatggacatcctctctag

SEQ ID NO: 211800 - DNA, 20 bp, Artificial sequence
  SiRNA target sequence
gaatggacatcctctctagt

SEQ ID NO: 211801 - DNA, 20 bp, Artificial sequence
  SiRNA target sequence
aatggacatcctctctagtt

SEQ ID NO: 211802 - DNA, 20 bp, Artificial sequence
  SiRNA target sequence
atggacatcctctctagttt

SEQ ID NO: 211803 - DNA, 20 bp, Artificial sequence
  SiRNA target sequence
tggacatcctctctagttta

SEQ ID NO: 211804 - DNA, 20 bp, Artificial sequence
  SiRNA target sequence
ggacatcctctctagtttac

SEQ ID NO: 211805 - DNA, 20 bp, Artificial sequence
  SiRNA target sequence
gacatcctctctagtttaca

SEQ ID NO: 211806 - DNA, 20 bp, Artificial sequence
  SiRNA target sequence
acatcctctctagtttacat

SEQ ID NO: 211807 - DNA, 20 bp, Artificial sequence
  SiRNA target sequence
catcctctctagtttacatt

SEQ ID NO: 211808 - DNA, 20 bp, Artificial sequence
  SiRNA target sequence
atcctctctagtttacattg

SEQ ID NO: 211809 - DNA, 20 bp, Artificial sequence
  SiRNA target sequence
tcctctctagtttacattgt

SEQ ID NO: 211810 - DNA, 20 bp, Artificial sequence
  SiRNA target sequence
cctctctagtttacattgtt

SEQ ID NO: 211811 - DNA, 20 bp, Artificial sequence
  SiRNA target sequence
ctctctagtttacattgttt

SEQ ID NO: 211812 - DNA, 20 bp, Artificial sequence
  SiRNA target sequence
tctctagtttacattgtttc

SEQ ID NO: 211813 - DNA, 20 bp, Artificial sequence
  SiRNA target sequence
ctctagtttacattgtttca

SEQ ID NO: 211814 - DNA, 20 bp, Artificial sequence
  SiRNA target sequence
tctagtttacattgtttcag

SEQ ID NO: 211815 - DNA, 20 bp, Artificial sequence
  SiRNA target sequence
ctagtttacattgtttcaga

SEQ ID NO: 211816 - DNA, 20 bp, Artificial sequence
  SiRNA target sequence
tagtttacattgtttcagaa

SEQ ID NO: 211817 - DNA, 20 bp, Artificial sequence
  SiRNA target sequence
agtttacattgtttcagaaa

SEQ ID NO: 211818 - DNA, 20 bp, Artificial sequence
  SiRNA target sequence
gtttacattgtttcagaaat

SEQ ID NO: 211819 - DNA, 20 bp, Artificial sequence
  SiRNA target sequence
tttacattgtttcagaaatg

SEQ ID NO: 211820 - DNA, 20 bp, Artificial sequence
  SiRNA target sequence
ttacattgtttcagaaatgt

SEQ ID NO: 211821 - DNA, 20 bp, Artificial sequence
  SiRNA target sequence
tacattgtttcagaaatgtt

SEQ ID NO: 211822 - DNA, 20 bp, Artificial sequence
  SiRNA target sequence
acattgtttcagaaatgttt

SEQ ID NO: 211823 - DNA, 20 bp, Artificial sequence
  SiRNA target sequence
cattgtttcagaaatgtttg

SEQ ID NO: 211824 - DNA, 20 bp, Artificial sequence
  SiRNA target sequence
attgtttcagaaatgtttgg

SEQ ID NO: 211825 - DNA, 20 bp, Artificial sequence
  SiRNA target sequence
ttgtttcagaaatgtttggt

SEQ ID NO: 211826 - DNA, 20 bp, Artificial sequence
  SiRNA target sequence
tgtttcagaaatgtttggta

SEQ ID NO: 211827 - DNA, 20 bp, Artificial sequence
  SiRNA target sequence
gtttcagaaatgtttggtaa

SEQ ID NO: 211828 - DNA, 20 bp, Artificial sequence
  SiRNA target sequence
tttcagaaatgtttggtaat

SEQ ID NO: 211829 - DNA, 20 bp, Artificial sequence
  SiRNA target sequence
ttcagaaatgtttggtaatt

SEQ ID NO: 211830 - DNA, 20 bp, Artificial sequence
  SiRNA target sequence
tcagaaatgtttggtaattt

SEQ ID NO: 211831 - DNA, 20 bp, Artificial sequence
  SiRNA target sequence
cagaaatgtttggtaattta

SEQ ID NO: 211832 - DNA, 20 bp, Artificial sequence
  SiRNA target sequence
agaaatgtttggtaatttag

SEQ ID NO: 211833 - DNA, 20 bp, Artificial sequence
  SiRNA target sequence
gaaatgtttggtaatttagt

SEQ ID NO: 211834 - DNA, 20 bp, Artificial sequence
  SiRNA target sequence
aaatgtttggtaatttagta

SEQ ID NO: 211835 - DNA, 20 bp, Artificial sequence
  SiRNA target sequence
aatgtttggtaatttagtat

SEQ ID NO: 211836 - DNA, 20 bp, Artificial sequence
  SiRNA target sequence
atgtttggtaatttagtatt

SEQ ID NO: 211837 - DNA, 20 bp, Artificial sequence
  SiRNA target sequence
tgtttggtaatttagtattg

SEQ ID NO: 211838 - DNA, 20 bp, Artificial sequence
  SiRNA target sequence
gtttggtaatttagtattgt

SEQ ID NO: 211839 - DNA, 20 bp, Artificial sequence
  SiRNA target sequence
tttggtaatttagtattgtc

SEQ ID NO: 211840 - DNA, 20 bp, Artificial sequence
  SiRNA target sequence
ttggtaatttagtattgtct

SEQ ID NO: 211841 - DNA, 20 bp, Artificial sequence
  SiRNA target sequence
tggtaatttagtattgtctt

SEQ ID NO: 211842 - DNA, 20 bp, Artificial sequence
  SiRNA target sequence
ggtaatttagtattgtctta

SEQ ID NO: 211843 - DNA, 20 bp, Artificial sequence
  SiRNA target sequence
gtaatttagtattgtcttat

SEQ ID NO: 211844 - DNA, 20 bp, Artificial sequence
  SiRNA target sequence
taatttagtattgtcttatt

SEQ ID NO: 211845 - DNA, 20 bp, Artificial sequence
  SiRNA target sequence
aatttagtattgtcttattt

SEQ ID NO: 211846 - DNA, 20 bp, Artificial sequence
  SiRNA target sequence
atttagtattgtcttatttc

SEQ ID NO: 211847 - DNA, 20 bp, Artificial sequence
  SiRNA target sequence
tttagtattgtcttatttct

SEQ ID NO: 211848 - DNA, 20 bp, Artificial sequence
  SiRNA target sequence
ttagtattgtcttatttctt

SEQ ID NO: 211849 - DNA, 20 bp, Artificial sequence
  SiRNA target sequence
tagtattgtcttatttcttc

SEQ ID NO: 211850 - DNA, 20 bp, Artificial sequence
  SiRNA target sequence
agtattgtcttatttcttct

SEQ ID NO: 211851 - DNA, 20 bp, Artificial sequence
  SiRNA target sequence
gtattgtcttatttcttctt

SEQ ID NO: 211852 - DNA, 20 bp, Artificial sequence
  SiRNA target sequence
tattgtcttatttcttcttg

SEQ ID NO: 211853 - DNA, 20 bp, Artificial sequence
  SiRNA target sequence
attgtcttatttcttcttga

SEQ ID NO: 211854 - DNA, 20 bp, Artificial sequence
  SiRNA target sequence
ttgtcttatttcttcttgac

SEQ ID NO: 211855 - DNA, 20 bp, Artificial sequence
  SiRNA target sequence
tgtcttatttcttcttgacg

SEQ ID NO: 211856 - DNA, 20 bp, Artificial sequence
  SiRNA target sequence
gtcttatttcttcttgacgt

SEQ ID NO: 211857 - DNA, 20 bp, Artificial sequence
  SiRNA target sequence
tcttatttcttcttgacgtt

SEQ ID NO: 211858 - DNA, 20 bp, Artificial sequence
  SiRNA target sequence
cttatttcttcttgacgttt

SEQ ID NO: 211859 - DNA, 20 bp, Artificial sequence
  SiRNA target sequence
ttatttcttcttgacgtttg

SEQ ID NO: 211860 - DNA, 20 bp, Artificial sequence
  SiRNA target sequence
tatttcttcttgacgtttgc

SEQ ID NO: 211861 - DNA, 20 bp, Artificial sequence
  SiRNA target sequence
atttcttcttgacgtttgct

SEQ ID NO: 211862 - DNA, 20 bp, Artificial sequence
  SiRNA target sequence
tttcttcttgacgtttgcta

SEQ ID NO: 211863 - DNA, 20 bp, Artificial sequence
  SiRNA target sequence
ttcttcttgacgtttgctaa

SEQ ID NO: 211864 - DNA, 20 bp, Artificial sequence
  SiRNA target sequence
tcttcttgacgtttgctaat

SEQ ID NO: 211865 - DNA, 20 bp, Artificial sequence
  SiRNA target sequence
cttcttgacgtttgctaatt

SEQ ID NO: 211866 - DNA, 20 bp, Artificial sequence
  SiRNA target sequence
ttcttgacgtttgctaattc

SEQ ID NO: 211867 - DNA, 20 bp, Artificial sequence
  SiRNA target sequence
tcttgacgtttgctaattct

SEQ ID NO: 211868 - DNA, 20 bp, Artificial sequence
  SiRNA target sequence
cttgacgtttgctaattctt

SEQ ID NO: 211869 - DNA, 20 bp, Artificial sequence
  SiRNA target sequence
ttgacgtttgctaattcttt

SEQ ID NO: 211870 - DNA, 20 bp, Artificial sequence
  SiRNA target sequence
tgacgtttgctaattcttta

SEQ ID NO: 211871 - DNA, 20 bp, Artificial sequence
  SiRNA target sequence
gacgtttgctaattctttaa

SEQ ID NO: 211872 - DNA, 20 bp, Artificial sequence
  SiRNA target sequence
acgtttgctaattctttaac

SEQ ID NO: 211873 - DNA, 20 bp, Artificial sequence
  SiRNA target sequence
cgtttgctaattctttaaca

SEQ ID NO: 211874 - DNA, 20 bp, Artificial sequence
  SiRNA target sequence
gtttgctaattctttaacaa

SEQ ID NO: 211875 - DNA, 20 bp, Artificial sequence
  SiRNA target sequence
tttgctaattctttaacaac

SEQ ID NO: 211876 - DNA, 20 bp, Artificial sequence
  SiRNA target sequence
ttgctaattctttaacaact

SEQ ID NO: 211877 - DNA, 20 bp, Artificial sequence
  SiRNA target sequence
tgctaattctttaacaactc

SEQ ID NO: 211878 - DNA, 20 bp, Artificial sequence
  SiRNA target sequence
gctaattctttaacaactcc

SEQ ID NO: 211879 - DNA, 20 bp, Artificial sequence
  SiRNA target sequence
ctaattctttaacaactcca

SEQ ID NO: 211880 - DNA, 20 bp, Artificial sequence
  SiRNA target sequence
taattctttaacaactccag

SEQ ID NO: 211881 - DNA, 20 bp, Artificial sequence
  SiRNA target sequence
aattctttaacaactccagg

SEQ ID NO: 211882 - DNA, 20 bp, Artificial sequence
  SiRNA target sequence
attctttaacaactccagga

SEQ ID NO: 211883 - DNA, 20 bp, Artificial sequence
  SiRNA target sequence
ttctttaacaactccaggac

SEQ ID NO: 211884 - DNA, 20 bp, Artificial sequence
  SiRNA target sequence
tctttaacaactccaggaca

SEQ ID NO: 211885 - DNA, 20 bp, Artificial sequence
  SiRNA target sequence
ctttaacaactccaggacaa

SEQ ID NO: 211886 - DNA, 20 bp, Artificial sequence
  SiRNA target sequence
tttaacaactccaggacaaa

SEQ ID NO: 211887 - DNA, 20 bp, Artificial sequence
  SiRNA target sequence
ttaacaactccaggacaaag

SEQ ID NO: 211888 - DNA, 20 bp, Artificial sequence
  SiRNA target sequence
taacaactccaggacaaagt

SEQ ID NO: 211889 - DNA, 20 bp, Artificial sequence
  SiRNA target sequence
aacaactccaggacaaagtg

SEQ ID NO: 211890 - DNA, 20 bp, Artificial sequence
  SiRNA target sequence
acaactccaggacaaagtgc

SEQ ID NO: 211891 - DNA, 20 bp, Artificial sequence
  SiRNA target sequence
caactccaggacaaagtgca

SEQ ID NO: 211892 - DNA, 20 bp, Artificial sequence
  SiRNA target sequence
aactccaggacaaagtgcaa

SEQ ID NO: 211893 - DNA, 20 bp, Artificial sequence
  SiRNA target sequence
actccaggacaaagtgcaag

SEQ ID NO: 211894 - DNA, 20 bp, Artificial sequence
  SiRNA target sequence
ctccaggacaaagtgcaaga

SEQ ID NO: 211895 - DNA, 20 bp, Artificial sequence
  SiRNA target sequence
tccaggacaaagtgcaagat

SEQ ID NO: 211896 - DNA, 20 bp, Artificial sequence
  SiRNA target sequence
ccaggacaaagtgcaagatt

SEQ ID NO: 211897 - DNA, 20 bp, Artificial sequence
  SiRNA target sequence
caggacaaagtgcaagattc

SEQ ID NO: 211898 - DNA, 20 bp, Artificial sequence
  SiRNA target sequence
aggacaaagtgcaagattca

SEQ ID NO: 211899 - DNA, 20 bp, Artificial sequence
  SiRNA target sequence
ggacaaagtgcaagattcat

SEQ ID NO: 211900 - DNA, 20 bp, Artificial sequence
  SiRNA target sequence
gacaaagtgcaagattcata

SEQ ID NO: 211901 - DNA, 20 bp, Artificial sequence
  SiRNA target sequence
acaaagtgcaagattcatac

SEQ ID NO: 211902 - DNA, 20 bp, Artificial sequence
  SiRNA target sequence
caaagtgcaagattcatacc

SEQ ID NO: 211903 - DNA, 20 bp, Artificial sequence
  SiRNA target sequence
aaagtgcaagattcatacct

SEQ ID NO: 211904 - DNA, 20 bp, Artificial sequence
  SiRNA target sequence
aagtgcaagattcatacctt

SEQ ID NO: 211905 - DNA, 20 bp, Artificial sequence
  SiRNA target sequence
agtgcaagattcataccttt

SEQ ID NO: 211906 - DNA, 20 bp, Artificial sequence
  SiRNA target sequence
gtgcaagattcataccttta

SEQ ID NO: 211907 - DNA, 20 bp, Artificial sequence
  SiRNA target sequence
tgcaagattcatacctttat

SEQ ID NO: 211908 - DNA, 20 bp, Artificial sequence
  SiRNA target sequence
gcaagattcatacctttatt

SEQ ID NO: 211909 - DNA, 20 bp, Artificial sequence
  SiRNA target sequence
caagattcatacctttattt

SEQ ID NO: 211910 - DNA, 20 bp, Artificial sequence
  SiRNA target sequence
aagattcatacctttatttt

SEQ ID NO: 211911 - DNA, 20 bp, Artificial sequence
  SiRNA target sequence
agattcatacctttatttta

SEQ ID NO: 211912 - DNA, 20 bp, Artificial sequence
  SiRNA target sequence
gattcatacctttattttat

SEQ ID NO: 211913 - DNA, 20 bp, Artificial sequence
  SiRNA target sequence
attcatacctttattttatg

SEQ ID NO: 211914 - DNA, 20 bp, Artificial sequence
  SiRNA target sequence
ttcatacctttattttatgt

SEQ ID NO: 211915 - DNA, 20 bp, Artificial sequence
  SiRNA target sequence
tcatacctttattttatgtt

SEQ ID NO: 211916 - DNA, 20 bp, Artificial sequence
  SiRNA target sequence
catacctttattttatgttt

SEQ ID NO: 211917 - DNA, 20 bp, Artificial sequence
  SiRNA target sequence
atacctttattttatgtttt

SEQ ID NO: 211918 - DNA, 20 bp, Artificial sequence
  SiRNA target sequence
tacctttattttatgttttc

SEQ ID NO: 211919 - DNA, 20 bp, Artificial sequence
  SiRNA target sequence
acctttattttatgttttct

SEQ ID NO: 211920 - DNA, 20 bp, Artificial sequence
  SiRNA target sequence
cctttattttatgttttctc

SEQ ID NO: 211921 - DNA, 20 bp, Artificial sequence
  SiRNA target sequence
ctttattttatgttttctcg

SEQ ID NO: 211922 - DNA, 20 bp, Artificial sequence
  SiRNA target sequence
tttattttatgttttctcga

SEQ ID NO: 211923 - DNA, 20 bp, Artificial sequence
  SiRNA target sequence
ttattttatgttttctcgaa

SEQ ID NO: 211924 - DNA, 20 bp, Artificial sequence
  SiRNA target sequence
tattttatgttttctcgaat

SEQ ID NO: 211925 - DNA, 20 bp, Artificial sequence
  SiRNA target sequence
attttatgttttctcgaata

SEQ ID NO: 211926 - DNA, 20 bp, Artificial sequence
  SiRNA target sequence
ttttatgttttctcgaatat

SEQ ID NO: 211927 - DNA, 20 bp, Artificial sequence
  SiRNA target sequence
tttatgttttctcgaatatt

SEQ ID NO: 211928 - DNA, 20 bp, Artificial sequence
  SiRNA target sequence
ttatgttttctcgaatattt

SEQ ID NO: 211929 - DNA, 20 bp, Artificial sequence
  SiRNA target sequence
tatgttttctcgaatatttc

SEQ ID NO: 211930 - DNA, 20 bp, Artificial sequence
  SiRNA target sequence
atgttttctcgaatatttct

SEQ ID NO: 211931 - DNA, 20 bp, Artificial sequence
  SiRNA target sequence
tgttttctcgaatatttctc

SEQ ID NO: 211932 - DNA, 20 bp, Artificial sequence
  SiRNA target sequence
gttttctcgaatatttctct

SEQ ID NO: 211933 - DNA, 20 bp, Artificial sequence
  SiRNA target sequence
ttttctcgaatatttctctt

SEQ ID NO: 211934 - DNA, 20 bp, Artificial sequence
  SiRNA target sequence
tttctcgaatatttctcttt

SEQ ID NO: 211935 - DNA, 20 bp, Artificial sequence
  SiRNA target sequence
ttctcgaatatttctctttt

SEQ ID NO: 211936 - DNA, 20 bp, Artificial sequence
  SiRNA target sequence
tctcgaatatttctcttttc

SEQ ID NO: 211937 - DNA, 20 bp, Artificial sequence
  SiRNA target sequence
ctcgaatatttctcttttct

SEQ ID NO: 211938 - DNA, 20 bp, Artificial sequence
  SiRNA target sequence
tcgaatatttctcttttctt

SEQ ID NO: 211939 - DNA, 20 bp, Artificial sequence
  SiRNA target sequence
cgaatatttctcttttctta

SEQ ID NO: 211940 - DNA, 20 bp, Artificial sequence
  SiRNA target sequence
gaatatttctcttttcttat

SEQ ID NO: 211941 - DNA, 20 bp, Artificial sequence
  SiRNA target sequence
aatatttctcttttcttatc

SEQ ID NO: 211942 - DNA, 20 bp, Artificial sequence
  SiRNA target sequence
atatttctcttttcttatct

SEQ ID NO: 211943 - DNA, 20 bp, Artificial sequence
  SiRNA target sequence
tatttctcttttcttatctt

SEQ ID NO: 211944 - DNA, 20 bp, Artificial sequence
  SiRNA target sequence
atttctcttttcttatcttc

SEQ ID NO: 211945 - DNA, 20 bp, Artificial sequence
  SiRNA target sequence
tttctcttttcttatcttct

SEQ ID NO: 211946 - DNA, 20 bp, Artificial sequence
  SiRNA target sequence
ttctcttttcttatcttctc

SEQ ID NO: 211947 - DNA, 20 bp, Artificial sequence
  SiRNA target sequence
tctcttttcttatcttctca

SEQ ID NO: 211948 - DNA, 20 bp, Artificial sequence
  SiRNA target sequence
ctcttttcttatcttctcaa

SEQ ID NO: 211949 - DNA, 20 bp, Artificial sequence
  SiRNA target sequence
tcttttcttatcttctcaag

SEQ ID NO: 211950 - DNA, 20 bp, Artificial sequence
  SiRNA target sequence
cttttcttatcttctcaagt

SEQ ID NO: 211951 - DNA, 20 bp, Artificial sequence
  SiRNA target sequence
ttttcttatcttctcaagtg

SEQ ID NO: 211952 - DNA, 20 bp, Artificial sequence
  SiRNA target sequence
tttcttatcttctcaagtga

SEQ ID NO: 211953 - DNA, 20 bp, Artificial sequence
  SiRNA target sequence
ttcttatcttctcaagtgac

SEQ ID NO: 211954 - DNA, 20 bp, Artificial sequence
  SiRNA target sequence
tcttatcttctcaagtgaca

SEQ ID NO: 211955 - DNA, 20 bp, Artificial sequence
  SiRNA target sequence
cttatcttctcaagtgacag

SEQ ID NO: 211956 - DNA, 20 bp, Artificial sequence
  SiRNA target sequence
ttatcttctcaagtgacaga

SEQ ID NO: 211957 - DNA, 20 bp, Artificial sequence
  SiRNA target sequence
tatcttctcaagtgacagaa

SEQ ID NO: 211958 - DNA, 20 bp, Artificial sequence
  SiRNA target sequence
atcttctcaagtgacagaac

SEQ ID NO: 211959 - DNA, 20 bp, Artificial sequence
  SiRNA target sequence
tcttctcaagtgacagaact

SEQ ID NO: 211960 - DNA, 20 bp, Artificial sequence
  SiRNA target sequence
cttctcaagtgacagaactt

SEQ ID NO: 211961 - DNA, 20 bp, Artificial sequence
  SiRNA target sequence
ttctcaagtgacagaacttt

SEQ ID NO: 211962 - DNA, 20 bp, Artificial sequence
  SiRNA target sequence
tctcaagtgacagaactttt

SEQ ID NO: 211963 - DNA, 20 bp, Artificial sequence
  SiRNA target sequence
ctcaagtgacagaacttttt

SEQ ID NO: 211964 - DNA, 20 bp, Artificial sequence
  SiRNA target sequence
tcaagtgacagaacttttta

SEQ ID NO: 211965 - DNA, 20 bp, Artificial sequence
  SiRNA target sequence
caagtgacagaactttttac

SEQ ID NO: 211966 - DNA, 20 bp, Artificial sequence
  SiRNA target sequence
aagtgacagaactttttaca

SEQ ID NO: 211967 - DNA, 20 bp, Artificial sequence
  SiRNA target sequence
agtgacagaactttttacaa

SEQ ID NO: 211968 - DNA, 20 bp, Artificial sequence
  SiRNA target sequence
gtgacagaactttttacaag

SEQ ID NO: 211969 - DNA, 20 bp, Artificial sequence
  SiRNA target sequence
tgacagaactttttacaaga

SEQ ID NO: 211970 - DNA, 20 bp, Artificial sequence
  SiRNA target sequence
gacagaactttttacaagat

SEQ ID NO: 211971 - DNA, 20 bp, Artificial sequence
  SiRNA target sequence
acagaactttttacaagata

SEQ ID NO: 211972 - DNA, 20 bp, Artificial sequence
  SiRNA target sequence
cagaactttttacaagatat

SEQ ID NO: 211973 - DNA, 20 bp, Artificial sequence
  SiRNA target sequence
agaactttttacaagatata

SEQ ID NO: 211974 - DNA, 20 bp, Artificial sequence
  SiRNA target sequence
gaactttttacaagatatag

SEQ ID NO: 211975 - DNA, 20 bp, Artificial sequence
  SiRNA target sequence
aactttttacaagatataga

SEQ ID NO: 211976 - DNA, 20 bp, Artificial sequence
  SiRNA target sequence
actttttacaagatatagat

SEQ ID NO: 211977 - DNA, 20 bp, Artificial sequence
  SiRNA target sequence
ctttttacaagatatagatc

SEQ ID NO: 211978 - DNA, 20 bp, Artificial sequence
  SiRNA target sequence
tttttacaagatatagatca

SEQ ID NO: 211979 - DNA, 20 bp, Artificial sequence
  SiRNA target sequence
ttttacaagatatagatcaa

SEQ ID NO: 211980 - DNA, 20 bp, Artificial sequence
  SiRNA target sequence
tttacaagatatagatcaaa

SEQ ID NO: 211981 - DNA, 20 bp, Artificial sequence
  SiRNA target sequence
ttacaagatatagatcaaag

SEQ ID NO: 211982 - DNA, 20 bp, Artificial sequence
  SiRNA target sequence
tacaagatatagatcaaagc

SEQ ID NO: 211983 - DNA, 20 bp, Artificial sequence
  SiRNA target sequence
acaagatatagatcaaagct

SEQ ID NO: 211984 - DNA, 20 bp, Artificial sequence
  SiRNA target sequence
caagatatagatcaaagctc

SEQ ID NO: 211985 - DNA, 20 bp, Artificial sequence
  SiRNA target sequence
aagatatagatcaaagctca

SEQ ID NO: 211986 - DNA, 20 bp, Artificial sequence
  SiRNA target sequence
agatatagatcaaagctcac

SEQ ID NO: 211987 - DNA, 20 bp, Artificial sequence
  SiRNA target sequence
gatatagatcaaagctcact

SEQ ID NO: 211988 - DNA, 20 bp, Artificial sequence
  SiRNA target sequence
atatagatcaaagctcactt

SEQ ID NO: 211989 - DNA, 20 bp, Artificial sequence
  SiRNA target sequence
tatagatcaaagctcacttt

SEQ ID NO: 211990 - DNA, 20 bp, Artificial sequence
  SiRNA target sequence
atagatcaaagctcactttc

SEQ ID NO: 211991 - DNA, 20 bp, Artificial sequence
  SiRNA target sequence
tagatcaaagctcactttct

SEQ ID NO: 211992 - DNA, 20 bp, Artificial sequence
  SiRNA target sequence
agatcaaagctcactttctc

SEQ ID NO: 211993 - DNA, 20 bp, Artificial sequence
  SiRNA target sequence
gatcaaagctcactttctca

SEQ ID NO: 211994 - DNA, 20 bp, Artificial sequence
  SiRNA target sequence
atcaaagctcactttctcag

SEQ ID NO: 211995 - DNA, 20 bp, Artificial sequence
  SiRNA target sequence
tcaaagctcactttctcaga

SEQ ID NO: 211996 - DNA, 20 bp, Artificial sequence
  SiRNA target sequence
caaagctcactttctcagag

SEQ ID NO: 211997 - DNA, 20 bp, Artificial sequence
  SiRNA target sequence
aaagctcactttctcagagg

SEQ ID NO: 211998 - DNA, 20 bp, Artificial sequence
  SiRNA target sequence
aagctcactttctcagaggc

SEQ ID NO: 211999 - DNA, 20 bp, Artificial sequence
  SiRNA target sequence
agctcactttctcagaggcg

SEQ ID NO: 212000 - DNA, 20 bp, Artificial sequence
  SiRNA target sequence
gctcactttctcagaggcgg

SEQ ID NO: 212001 - DNA, 20 bp, Artificial sequence
  SiRNA target sequence
ctcactttctcagaggcgga

SEQ ID NO: 212002 - DNA, 20 bp, Artificial sequence
  SiRNA target sequence
tcactttctcagaggcggaa

SEQ ID NO: 212003 - DNA, 20 bp, Artificial sequence
  SiRNA target sequence
cactttctcagaggcggaat

SEQ ID NO: 212004 - DNA, 20 bp, Artificial sequence
  SiRNA target sequence
actttctcagaggcggaatt

SEQ ID NO: 212005 - DNA, 20 bp, Artificial sequence
  SiRNA target sequence
ctttctcagaggcggaattt

SEQ ID NO: 212006 - DNA, 20 bp, Artificial sequence
  SiRNA target sequence
tttctcagaggcggaatttt

SEQ ID NO: 212007 - DNA, 20 bp, Artificial sequence
  SiRNA target sequence
ttctcagaggcggaattttt

SEQ ID NO: 212008 - DNA, 20 bp, Artificial sequence
  SiRNA target sequence
tctcagaggcggaattttta

SEQ ID NO: 212009 - DNA, 20 bp, Artificial sequence
  SiRNA target sequence
ctcagaggcggaatttttat

SEQ ID NO: 212010 - DNA, 20 bp, Artificial sequence
  SiRNA target sequence
tcagaggcggaatttttata

SEQ ID NO: 212011 - DNA, 20 bp, Artificial sequence
  SiRNA target sequence
cagaggcggaatttttatat

SEQ ID NO: 212012 - DNA, 20 bp, Artificial sequence
  SiRNA target sequence
agaggcggaatttttatata

SEQ ID NO: 212013 - DNA, 20 bp, Artificial sequence
  SiRNA target sequence
gaggcggaatttttatataa

SEQ ID NO: 212014 - DNA, 20 bp, Artificial sequence
  SiRNA target sequence
aggcggaatttttatataat

SEQ ID NO: 212015 - DNA, 20 bp, Artificial sequence
  SiRNA target sequence
ggcggaatttttatataatg

SEQ ID NO: 212016 - DNA, 20 bp, Artificial sequence
  SiRNA target sequence
gcggaatttttatataatgg

SEQ ID NO: 212017 - DNA, 20 bp, Artificial sequence
  SiRNA target sequence
cggaatttttatataatggc

SEQ ID NO: 212018 - DNA, 20 bp, Artificial sequence
  SiRNA target sequence
ggaatttttatataatggct

SEQ ID NO: 212019 - DNA, 20 bp, Artificial sequence
  SiRNA target sequence
gaatttttatataatggctt

SEQ ID NO: 212020 - DNA, 20 bp, Artificial sequence
  SiRNA target sequence
aatttttatataatggcttt

SEQ ID NO: 212021 - DNA, 20 bp, Artificial sequence
  SiRNA target sequence
atttttatataatggctttt

SEQ ID NO: 212022 - DNA, 20 bp, Artificial sequence
  SiRNA target sequence
tttttatataatggcttttt

SEQ ID NO: 212023 - DNA, 20 bp, Artificial sequence
  SiRNA target sequence
ttttatataatggctttttt

SEQ ID NO: 212024 - DNA, 20 bp, Artificial sequence
  SiRNA target sequence
tttatataatggcttttttg

SEQ ID NO: 212025 - DNA, 20 bp, Artificial sequence
  SiRNA target sequence
ttatataatggcttttttgt

SEQ ID NO: 212026 - DNA, 20 bp, Artificial sequence
  SiRNA target sequence
tatataatggcttttttgta

SEQ ID NO: 212027 - DNA, 20 bp, Artificial sequence
  SiRNA target sequence
atataatggcttttttgtat

SEQ ID NO: 212028 - DNA, 20 bp, Artificial sequence
  SiRNA target sequence
tataatggcttttttgtatt

SEQ ID NO: 212029 - DNA, 20 bp, Artificial sequence
  SiRNA target sequence
ataatggcttttttgtattt

SEQ ID NO: 212030 - DNA, 20 bp, Artificial sequence
  SiRNA target sequence
taatggcttttttgtatttt

SEQ ID NO: 212031 - DNA, 20 bp, Artificial sequence
  SiRNA target sequence
aatggcttttttgtattttc

SEQ ID NO: 212032 - DNA, 20 bp, Artificial sequence
  SiRNA target sequence
atggcttttttgtattttct

SEQ ID NO: 212033 - DNA, 20 bp, Artificial sequence
  SiRNA target sequence
tggcttttttgtattttctg

SEQ ID NO: 212034 - DNA, 20 bp, Artificial sequence
  SiRNA target sequence
ggcttttttgtattttctgg

SEQ ID NO: 212035 - DNA, 20 bp, Artificial sequence
  SiRNA target sequence
gcttttttgtattttctgga

SEQ ID NO: 212036 - DNA, 20 bp, Artificial sequence
  SiRNA target sequence
cttttttgtattttctggag

SEQ ID NO: 212037 - DNA, 20 bp, Artificial sequence
  SiRNA target sequence
ttttttgtattttctggagt

SEQ ID NO: 212038 - DNA, 20 bp, Artificial sequence
  SiRNA target sequence
tttttgtattttctggagtt

SEQ ID NO: 212039 - DNA, 20 bp, Artificial sequence
  SiRNA target sequence
ttttgtattttctggagttc

SEQ ID NO: 212040 - DNA, 20 bp, Artificial sequence
  SiRNA target sequence
tttgtattttctggagttct

SEQ ID NO: 212041 - DNA, 20 bp, Artificial sequence
  SiRNA target sequence
ttgtattttctggagttcta

SEQ ID NO: 212042 - DNA, 20 bp, Artificial sequence
  SiRNA target sequence
tgtattttctggagttctag

SEQ ID NO: 212043 - DNA, 20 bp, Artificial sequence
  SiRNA target sequence
gtattttctggagttctagt

SEQ ID NO: 212044 - DNA, 20 bp, Artificial sequence
  SiRNA target sequence
tattttctggagttctagta

SEQ ID NO: 212045 - DNA, 20 bp, Artificial sequence
  SiRNA target sequence
attttctggagttctagtaa

SEQ ID NO: 212046 - DNA, 20 bp, Artificial sequence
  SiRNA target sequence
ttttctggagttctagtaat

SEQ ID NO: 212047 - DNA, 20 bp, Artificial sequence
  SiRNA target sequence
tttctggagttctagtaata

SEQ ID NO: 212048 - DNA, 20 bp, Artificial sequence
  SiRNA target sequence
ttctggagttctagtaatag

SEQ ID NO: 212049 - DNA, 20 bp, Artificial sequence
  SiRNA target sequence
tctggagttctagtaatagt

SEQ ID NO: 212050 - DNA, 20 bp, Artificial sequence
  SiRNA target sequence
ctggagttctagtaatagtt

SEQ ID NO: 212051 - DNA, 20 bp, Artificial sequence
  SiRNA target sequence
tggagttctagtaatagtta

SEQ ID NO: 212052 - DNA, 20 bp, Artificial sequence
  SiRNA target sequence
ggagttctagtaatagttat

SEQ ID NO: 212053 - DNA, 20 bp, Artificial sequence
  SiRNA target sequence
gagttctagtaatagttata

SEQ ID NO: 212054 - DNA, 20 bp, Artificial sequence
  SiRNA target sequence
agttctagtaatagttatat

SEQ ID NO: 212055 - DNA, 20 bp, Artificial sequence
  SiRNA target sequence
gttctagtaatagttatatt

SEQ ID NO: 212056 - DNA, 20 bp, Artificial sequence
  SiRNA target sequence
ttctagtaatagttatattt

SEQ ID NO: 212057 - DNA, 20 bp, Artificial sequence
  SiRNA target sequence
tctagtaatagttatatttt

SEQ ID NO: 212058 - DNA, 20 bp, Artificial sequence
  SiRNA target sequence
ctagtaatagttatattttt

SEQ ID NO: 212059 - DNA, 20 bp, Artificial sequence
  SiRNA target sequence
tagtaatagttatattttta

SEQ ID NO: 212060 - DNA, 20 bp, Artificial sequence
  SiRNA target sequence
agtaatagttatatttttaa

SEQ ID NO: 212061 - DNA, 20 bp, Artificial sequence
  SiRNA target sequence
gtaatagttatatttttaat

SEQ ID NO: 212062 - DNA, 20 bp, Artificial sequence
  SiRNA target sequence
taatagttatatttttaatt

SEQ ID NO: 212063 - DNA, 20 bp, Artificial sequence
  SiRNA target sequence
aatagttatatttttaatta

SEQ ID NO: 212064 - DNA, 20 bp, Artificial sequence
  SiRNA target sequence
atagttatatttttaattaa

SEQ ID NO: 212065 - DNA, 20 bp, Artificial sequence
  SiRNA target sequence
tagttatatttttaattaaa

SEQ ID NO: 212066 - DNA, 20 bp, Artificial sequence
  SiRNA target sequence
agttatatttttaattaaaa

SEQ ID NO: 212067 - DNA, 20 bp, Artificial sequence
  SiRNA target sequence
gttatatttttaattaaaaa

SEQ ID NO: 212068 - DNA, 20 bp, Artificial sequence
  SiRNA target sequence
ttatatttttaattaaaaaa

SEQ ID NO: 212069 - DNA, 20 bp, Artificial sequence
  SiRNA target sequence
tatatttttaattaaaaaat

SEQ ID NO: 212070 - DNA, 20 bp, Artificial sequence
  SiRNA target sequence
atatttttaattaaaaaata

SEQ ID NO: 212071 - DNA, 20 bp, Artificial sequence
  SiRNA target sequence
tatttttaattaaaaaatat

SEQ ID NO: 212072 - DNA, 20 bp, Artificial sequence
  SiRNA target sequence
atttttaattaaaaaatatt

SEQ ID NO: 212073 - DNA, 20 bp, Artificial sequence
  SiRNA target sequence
tttttaattaaaaaatattt

SEQ ID NO: 212074 - DNA, 20 bp, Artificial sequence
  SiRNA target sequence
ttttaattaaaaaatatttg

SEQ ID NO: 212075 - DNA, 20 bp, Artificial sequence
  SiRNA target sequence
tttaattaaaaaatatttgg

SEQ ID NO: 212076 - DNA, 20 bp, Artificial sequence
  SiRNA target sequence
ttaattaaaaaatatttgga

SEQ ID NO: 212077 - DNA, 20 bp, Artificial sequence
  SiRNA target sequence
taattaaaaaatatttggag

SEQ ID NO: 212078 - DNA, 20 bp, Artificial sequence
  SiRNA target sequence
aattaaaaaatatttggaga

SEQ ID NO: 212079 - DNA, 20 bp, Artificial sequence
  SiRNA target sequence
attaaaaaatatttggagag

SEQ ID NO: 212080 - DNA, 20 bp, Artificial sequence
  SiRNA target sequence
ttaaaaaatatttggagagg

SEQ ID NO: 212081 - DNA, 20 bp, Artificial sequence
  SiRNA target sequence
taaaaaatatttggagagga

SEQ ID NO: 212082 - DNA, 20 bp, Artificial sequence
  SiRNA target sequence
aaaaaatatttggagaggaa

SEQ ID NO: 212083 - DNA, 20 bp, Artificial sequence
  SiRNA target sequence
aaaaatatttggagaggaat

SEQ ID NO: 212084 - DNA, 20 bp, Artificial sequence
  SiRNA target sequence
aaaatatttggagaggaatg

SEQ ID NO: 212085 - DNA, 20 bp, Artificial sequence
  SiRNA target sequence
aaatatttggagaggaatgt

SEQ ID NO: 212086 - DNA, 20 bp, Artificial sequence
  SiRNA target sequence
aatatttggagaggaatgtg

SEQ ID NO: 212087 - DNA, 20 bp, Artificial sequence
  SiRNA target sequence
atatttggagaggaatgtga

SEQ ID NO: 212088 - DNA, 20 bp, Artificial sequence
  SiRNA target sequence
tatttggagaggaatgtgac

SEQ ID NO: 212089 - DNA, 20 bp, Artificial sequence
  SiRNA target sequence
atttggagaggaatgtgact

SEQ ID NO: 212090 - DNA, 20 bp, Artificial sequence
  SiRNA target sequence
tttggagaggaatgtgacta

SEQ ID NO: 212091 - DNA, 20 bp, Artificial sequence
  SiRNA target sequence
ttggagaggaatgtgactaa

SEQ ID NO: 212092 - DNA, 20 bp, Artificial sequence
  SiRNA target sequence
tggagaggaatgtgactaac

SEQ ID NO: 212093 - DNA, 20 bp, Artificial sequence
  SiRNA target sequence
ggagaggaatgtgactaaca

SEQ ID NO: 212094 - DNA, 20 bp, Artificial sequence
  SiRNA target sequence
gagaggaatgtgactaacaa

SEQ ID NO: 212095 - DNA, 20 bp, Artificial sequence
  SiRNA target sequence
agaggaatgtgactaacaaa

SEQ ID NO: 212096 - DNA, 20 bp, Artificial sequence
  SiRNA target sequence
gaggaatgtgactaacaaac

SEQ ID NO: 212097 - DNA, 20 bp, Artificial sequence
  SiRNA target sequence
aggaatgtgactaacaaacc

SEQ ID NO: 212098 - DNA, 20 bp, Artificial sequence
  SiRNA target sequence
ggaatgtgactaacaaacct

SEQ ID NO: 212099 - DNA, 20 bp, Artificial sequence
  SiRNA target sequence
gaatgtgactaacaaacctt

SEQ ID NO: 212100 - DNA, 20 bp, Artificial sequence
  SiRNA target sequence
aatgtgactaacaaaccttt

SEQ ID NO: 212101 - DNA, 20 bp, Artificial sequence
  SiRNA target sequence
atgtgactaacaaacctttg

SEQ ID NO: 212102 - DNA, 20 bp, Artificial sequence
  SiRNA target sequence
tgtgactaacaaacctttgt

SEQ ID NO: 212103 - DNA, 20 bp, Artificial sequence
  SiRNA target sequence
gtgactaacaaacctttgtt

SEQ ID NO: 212104 - DNA, 20 bp, Artificial sequence
  SiRNA target sequence
tgactaacaaacctttgttt

SEQ ID NO: 212105 - DNA, 20 bp, Artificial sequence
  SiRNA target sequence
gactaacaaacctttgtttg

SEQ ID NO: 212106 - DNA, 20 bp, Artificial sequence
  SiRNA target sequence
actaacaaacctttgtttgt

SEQ ID NO: 212107 - DNA, 20 bp, Artificial sequence
  SiRNA target sequence
ctaacaaacctttgtttgtt

SEQ ID NO: 212108 - DNA, 20 bp, Artificial sequence
  SiRNA target sequence
taacaaacctttgtttgttg

SEQ ID NO: 212109 - DNA, 20 bp, Artificial sequence
  SiRNA target sequence
aacaaacctttgtttgttgt

SEQ ID NO: 212110 - DNA, 20 bp, Artificial sequence
  SiRNA target sequence
acaaacctttgtttgttgta

SEQ ID NO: 212111 - DNA, 20 bp, Artificial sequence
  SiRNA target sequence
caaacctttgtttgttgtaa

SEQ ID NO: 212112 - DNA, 20 bp, Artificial sequence
  SiRNA target sequence
aaacctttgtttgttgtaaa

SEQ ID NO: 212113 - DNA, 20 bp, Artificial sequence
  SiRNA target sequence
aacctttgtttgttgtaaaa

SEQ ID NO: 212114 - DNA, 20 bp, Artificial sequence
  SiRNA target sequence
acctttgtttgttgtaaaat

SEQ ID NO: 212115 - DNA, 20 bp, Artificial sequence
  SiRNA target sequence
cctttgtttgttgtaaaatc

SEQ ID NO: 212116 - DNA, 20 bp, Artificial sequence
  SiRNA target sequence
ctttgtttgttgtaaaatct

SEQ ID NO: 212117 - DNA, 20 bp, Artificial sequence
  SiRNA target sequence
tttgtttgttgtaaaatctg

SEQ ID NO: 212118 - DNA, 20 bp, Artificial sequence
  SiRNA target sequence
ttgtttgttgtaaaatctgt

SEQ ID NO: 212119 - DNA, 20 bp, Artificial sequence
  SiRNA target sequence
tgtttgttgtaaaatctgtt

SEQ ID NO: 212120 - DNA, 20 bp, Artificial sequence
  SiRNA target sequence
gtttgttgtaaaatctgtta

SEQ ID NO: 212121 - DNA, 20 bp, Artificial sequence
  SiRNA target sequence
tttgttgtaaaatctgttaa

SEQ ID NO: 212122 - DNA, 20 bp, Artificial sequence
  SiRNA target sequence
ttgttgtaaaatctgttaaa

SEQ ID NO: 212123 - DNA, 20 bp, Artificial sequence
  SiRNA target sequence
tgttgtaaaatctgttaaaa

SEQ ID NO: 212124 - DNA, 20 bp, Artificial sequence
  SiRNA target sequence
gttgtaaaatctgttaaaaa

SEQ ID NO: 212125 - DNA, 20 bp, Artificial sequence
  SiRNA target sequence
ttgtaaaatctgttaaaaag

SEQ ID NO: 212126 - DNA, 20 bp, Artificial sequence
  SiRNA target sequence
tgtaaaatctgttaaaaaga

SEQ ID NO: 212127 - DNA, 20 bp, Artificial sequence
  SiRNA target sequence
gtaaaatctgttaaaaagaa

SEQ ID NO: 212128 - DNA, 20 bp, Artificial sequence
  SiRNA target sequence
taaaatctgttaaaaagaag

SEQ ID NO: 212129 - DNA, 20 bp, Artificial sequence
  SiRNA target sequence
aaaatctgttaaaaagaagg

SEQ ID NO: 212130 - DNA, 20 bp, Artificial sequence
  SiRNA target sequence
aaatctgttaaaaagaaggg

SEQ ID NO: 212131 - DNA, 20 bp, Artificial sequence
  SiRNA target sequence
aatctgttaaaaagaaggga

SEQ ID NO: 212132 - DNA, 20 bp, Artificial sequence
  SiRNA target sequence
atctgttaaaaagaagggac

SEQ ID NO: 212133 - DNA, 20 bp, Artificial sequence
  SiRNA target sequence
tctgttaaaaagaagggacc

SEQ ID NO: 212134 - DNA, 20 bp, Artificial sequence
  SiRNA target sequence
ctgttaaaaagaagggacca

SEQ ID NO: 212135 - DNA, 20 bp, Artificial sequence
  SiRNA target sequence
tgttaaaaagaagggaccaa

SEQ ID NO: 212136 - DNA, 20 bp, Artificial sequence
  SiRNA target sequence
gttaaaaagaagggaccaaa

SEQ ID NO: 212137 - DNA, 20 bp, Artificial sequence
  SiRNA target sequence
ttaaaaagaagggaccaaaa

SEQ ID NO: 212138 - DNA, 20 bp, Artificial sequence
  SiRNA target sequence
taaaaagaagggaccaaaag

SEQ ID NO: 212139 - DNA, 20 bp, Artificial sequence
  SiRNA target sequence
aaaaagaagggaccaaaagt

SEQ ID NO: 212140 - DNA, 20 bp, Artificial sequence
  SiRNA target sequence
aaaagaagggaccaaaagtt

SEQ ID NO: 212141 - DNA, 20 bp, Artificial sequence
  SiRNA target sequence
aaagaagggaccaaaagtta

SEQ ID NO: 212142 - DNA, 20 bp, Artificial sequence
  SiRNA target sequence
aagaagggaccaaaagttaa

SEQ ID NO: 212143 - DNA, 20 bp, Artificial sequence
  SiRNA target sequence
agaagggaccaaaagttaaa

SEQ ID NO: 212144 - DNA, 20 bp, Artificial sequence
  SiRNA target sequence
gaagggaccaaaagttaaag

SEQ ID NO: 212145 - DNA, 20 bp, Artificial sequence
  SiRNA target sequence
aagggaccaaaagttaaagt

SEQ ID NO: 212146 - DNA, 20 bp, Artificial sequence
  SiRNA target sequence
agggaccaaaagttaaagta

SEQ ID NO: 212147 - DNA, 20 bp, Artificial sequence
  SiRNA target sequence
gggaccaaaagttaaagtag

SEQ ID NO: 212148 - DNA, 20 bp, Artificial sequence
  SiRNA target sequence
ggaccaaaagttaaagtagg

SEQ ID NO: 212149 - DNA, 20 bp, Artificial sequence
  SiRNA target sequence
gaccaaaagttaaagtagga

SEQ ID NO: 212150 - DNA, 20 bp, Artificial sequence
  SiRNA target sequence
accaaaagttaaagtaggat

SEQ ID NO: 212151 - DNA, 20 bp, Artificial sequence
  SiRNA target sequence
ccaaaagttaaagtaggatt

SEQ ID NO: 212152 - DNA, 20 bp, Artificial sequence
  SiRNA target sequence
caaaagttaaagtaggattt

SEQ ID NO: 212153 - DNA, 20 bp, Artificial sequence
  SiRNA target sequence
aaaagttaaagtaggatttg

SEQ ID NO: 212154 - DNA, 20 bp, Artificial sequence
  SiRNA target sequence
aaagttaaagtaggatttgc

SEQ ID NO: 212155 - DNA, 20 bp, Artificial sequence
  SiRNA target sequence
aagttaaagtaggatttgcg

SEQ ID NO: 212156 - DNA, 20 bp, Artificial sequence
  SiRNA target sequence
agttaaagtaggatttgcgg

SEQ ID NO: 212157 - DNA, 20 bp, Artificial sequence
  SiRNA target sequence
gttaaagtaggatttgcgga

SEQ ID NO: 212158 - DNA, 20 bp, Artificial sequence
  SiRNA target sequence
ttaaagtaggatttgcggag

SEQ ID NO: 212159 - DNA, 20 bp, Artificial sequence
  SiRNA target sequence
taaagtaggatttgcggagg

SEQ ID NO: 212160 - DNA, 20 bp, Artificial sequence
  SiRNA target sequence
aaagtaggatttgcggaggg

SEQ ID NO: 212161 - DNA, 20 bp, Artificial sequence
  SiRNA target sequence
aagtaggatttgcggagggc

SEQ ID NO: 212162 - DNA, 20 bp, Artificial sequence
  SiRNA target sequence
agtaggatttgcggagggcc

SEQ ID NO: 212163 - DNA, 20 bp, Artificial sequence
  SiRNA target sequence
gtaggatttgcggagggcct

SEQ ID NO: 212164 - DNA, 20 bp, Artificial sequence
  SiRNA target sequence
taggatttgcggagggcctt

SEQ ID NO: 212165 - DNA, 20 bp, Artificial sequence
  SiRNA target sequence
aggatttgcggagggcctta

SEQ ID NO: 212166 - DNA, 20 bp, Artificial sequence
  SiRNA target sequence
ggatttgcggagggccttaa

SEQ ID NO: 212167 - DNA, 20 bp, Artificial sequence
  SiRNA target sequence
gatttgcggagggccttaaa

SEQ ID NO: 212168 - DNA, 20 bp, Artificial sequence
  SiRNA target sequence
atttgcggagggccttaaag

SEQ ID NO: 212169 - DNA, 20 bp, Artificial sequence
  SiRNA target sequence
tttgcggagggccttaaaga

SEQ ID NO: 212170 - DNA, 20 bp, Artificial sequence
  SiRNA target sequence
ttgcggagggccttaaagaa

SEQ ID NO: 212171 - DNA, 20 bp, Artificial sequence
  SiRNA target sequence
tgcggagggccttaaagaaa

SEQ ID NO: 212172 - DNA, 20 bp, Artificial sequence
  SiRNA target sequence
gcggagggccttaaagaaat

SEQ ID NO: 212173 - DNA, 20 bp, Artificial sequence
  SiRNA target sequence
cggagggccttaaagaaatg

SEQ ID NO: 212174 - DNA, 20 bp, Artificial sequence
  SiRNA target sequence
ggagggccttaaagaaatga

SEQ ID NO: 212175 - DNA, 20 bp, Artificial sequence
  SiRNA target sequence
gagggccttaaagaaatgat

SEQ ID NO: 212176 - DNA, 20 bp, Artificial sequence
  SiRNA target sequence
agggccttaaagaaatgatg

SEQ ID NO: 212177 - DNA, 20 bp, Artificial sequence
  SiRNA target sequence
gggccttaaagaaatgatgg

SEQ ID NO: 212178 - DNA, 20 bp, Artificial sequence
  SiRNA target sequence
ggccttaaagaaatgatggc

SEQ ID NO: 212179 - DNA, 20 bp, Artificial sequence
  SiRNA target sequence
gccttaaagaaatgatggca

SEQ ID NO: 212180 - DNA, 20 bp, Artificial sequence
  SiRNA target sequence
ccttaaagaaatgatggcat

SEQ ID NO: 212181 - DNA, 20 bp, Artificial sequence
  SiRNA target sequence
cttaaagaaatgatggcatc

SEQ ID NO: 212182 - DNA, 20 bp, Artificial sequence
  SiRNA target sequence
ttaaagaaatgatggcatca

SEQ ID NO: 212183 - DNA, 20 bp, Artificial sequence
  SiRNA target sequence
taaagaaatgatggcatcaa

SEQ ID NO: 212184 - DNA, 20 bp, Artificial sequence
  SiRNA target sequence
aaagaaatgatggcatcaaa

SEQ ID NO: 212185 - DNA, 20 bp, Artificial sequence
  SiRNA target sequence
aagaaatgatggcatcaaag

SEQ ID NO: 212186 - DNA, 20 bp, Artificial sequence
  SiRNA target sequence
agaaatgatggcatcaaagt

SEQ ID NO: 212187 - DNA, 20 bp, Artificial sequence
  SiRNA target sequence
gaaatgatggcatcaaagtt

SEQ ID NO: 212188 - DNA, 20 bp, Artificial sequence
  SiRNA target sequence
aaatgatggcatcaaagtta

SEQ ID NO: 212189 - DNA, 20 bp, Artificial sequence
  SiRNA target sequence
aatgatggcatcaaagttat

SEQ ID NO: 212190 - DNA, 20 bp, Artificial sequence
  SiRNA target sequence
atgatggcatcaaagttatt

SEQ ID NO: 212191 - DNA, 20 bp, Artificial sequence
  SiRNA target sequence
tgatggcatcaaagttatta

SEQ ID NO: 212192 - DNA, 20 bp, Artificial sequence
  SiRNA target sequence
gatggcatcaaagttattac

SEQ ID NO: 212193 - DNA, 20 bp, Artificial sequence
  SiRNA target sequence
atggcatcaaagttattact

SEQ ID NO: 212194 - DNA, 20 bp, Artificial sequence
  SiRNA target sequence
tggcatcaaagttattactt

SEQ ID NO: 212195 - DNA, 20 bp, Artificial sequence
  SiRNA target sequence
ggcatcaaagttattactta

SEQ ID NO: 212196 - DNA, 20 bp, Artificial sequence
  SiRNA target sequence
gcatcaaagttattacttaa

SEQ ID NO: 212197 - DNA, 20 bp, Artificial sequence
  SiRNA target sequence
catcaaagttattacttaac

SEQ ID NO: 212198 - DNA, 20 bp, Artificial sequence
  SiRNA target sequence
atcaaagttattacttaaca

SEQ ID NO: 212199 - DNA, 20 bp, Artificial sequence
  SiRNA target sequence
tcaaagttattacttaacat

SEQ ID NO: 212200 - DNA, 20 bp, Artificial sequence
  SiRNA target sequence
caaagttattacttaacatt

SEQ ID NO: 212201 - DNA, 20 bp, Artificial sequence
  SiRNA target sequence
aaagttattacttaacattt

SEQ ID NO: 212202 - DNA, 20 bp, Artificial sequence
  SiRNA target sequence
aagttattacttaacatttc

SEQ ID NO: 212203 - DNA, 20 bp, Artificial sequence
  SiRNA target sequence
agttattacttaacatttca

SEQ ID NO: 212204 - DNA, 20 bp, Artificial sequence
  SiRNA target sequence
gttattacttaacatttcat

SEQ ID NO: 212205 - DNA, 20 bp, Artificial sequence
  SiRNA target sequence
ttattacttaacatttcatt

SEQ ID NO: 212206 - DNA, 20 bp, Artificial sequence
  SiRNA target sequence
tattacttaacatttcatta

SEQ ID NO: 212207 - DNA, 20 bp, Artificial sequence
  SiRNA target sequence
attacttaacatttcattaa

SEQ ID NO: 212208 - DNA, 20 bp, Artificial sequence
  SiRNA target sequence
ttacttaacatttcattaac

SEQ ID NO: 212209 - DNA, 20 bp, Artificial sequence
  SiRNA target sequence
tacttaacatttcattaact

SEQ ID NO: 212210 - DNA, 20 bp, Artificial sequence
  SiRNA target sequence
acttaacatttcattaactg

SEQ ID NO: 212211 - DNA, 20 bp, Artificial sequence
  SiRNA target sequence
cttaacatttcattaactgt

SEQ ID NO: 212212 - DNA, 20 bp, Artificial sequence
  SiRNA target sequence
ttaacatttcattaactgtt

SEQ ID NO: 212213 - DNA, 20 bp, Artificial sequence
  SiRNA target sequence
taacatttcattaactgtta

SEQ ID NO: 212214 - DNA, 20 bp, Artificial sequence
  SiRNA target sequence
aacatttcattaactgttat

SEQ ID NO: 212215 - DNA, 20 bp, Artificial sequence
  SiRNA target sequence
acatttcattaactgttatg

SEQ ID NO: 212216 - DNA, 20 bp, Artificial sequence
  SiRNA target sequence
catttcattaactgttatgt

SEQ ID NO: 212217 - DNA, 20 bp, Artificial sequence
  SiRNA target sequence
atttcattaactgttatgtt

SEQ ID NO: 212218 - DNA, 20 bp, Artificial sequence
  SiRNA target sequence
tttcattaactgttatgttc

SEQ ID NO: 212219 - DNA, 20 bp, Artificial sequence
  SiRNA target sequence
ttcattaactgttatgttct

SEQ ID NO: 212220 - DNA, 20 bp, Artificial sequence
  SiRNA target sequence
tcattaactgttatgttcta

SEQ ID NO: 212221 - DNA, 20 bp, Artificial sequence
  SiRNA target sequence
cattaactgttatgttctat

SEQ ID NO: 212222 - DNA, 20 bp, Artificial sequence
  SiRNA target sequence
attaactgttatgttctatg

SEQ ID NO: 212223 - DNA, 20 bp, Artificial sequence
  SiRNA target sequence
ttaactgttatgttctatgg

SEQ ID NO: 212224 - DNA, 20 bp, Artificial sequence
  SiRNA target sequence
taactgttatgttctatggt

SEQ ID NO: 212225 - DNA, 20 bp, Artificial sequence
  SiRNA target sequence
aactgttatgttctatggta

SEQ ID NO: 212226 - DNA, 20 bp, Artificial sequence
  SiRNA target sequence
actgttatgttctatggtat

SEQ ID NO: 212227 - DNA, 20 bp, Artificial sequence
  SiRNA target sequence
ctgttatgttctatggtata

SEQ ID NO: 212228 - DNA, 20 bp, Artificial sequence
  SiRNA target sequence
tgttatgttctatggtatat

SEQ ID NO: 212229 - DNA, 20 bp, Artificial sequence
  SiRNA target sequence
gttatgttctatggtatatc

SEQ ID NO: 212230 - DNA, 20 bp, Artificial sequence
  SiRNA target sequence
ttatgttctatggtatatca

SEQ ID NO: 212231 - DNA, 20 bp, Artificial sequence
  SiRNA target sequence
tatgttctatggtatatcaa

SEQ ID NO: 212232 - DNA, 20 bp, Artificial sequence
  SiRNA target sequence
atgttctatggtatatcaac

SEQ ID NO: 212233 - DNA, 20 bp, Artificial sequence
  SiRNA target sequence
tgttctatggtatatcaact

SEQ ID NO: 212234 - DNA, 20 bp, Artificial sequence
  SiRNA target sequence
gttctatggtatatcaacta

SEQ ID NO: 212235 - DNA, 20 bp, Artificial sequence
  SiRNA target sequence
ttctatggtatatcaactaa

SEQ ID NO: 212236 - DNA, 20 bp, Artificial sequence
  SiRNA target sequence
tctatggtatatcaactaat

SEQ ID NO: 212237 - DNA, 20 bp, Artificial sequence
  SiRNA target sequence
ctatggtatatcaactaatt

SEQ ID NO: 212238 - DNA, 20 bp, Artificial sequence
  SiRNA target sequence
tatggtatatcaactaattt

SEQ ID NO: 212239 - DNA, 20 bp, Artificial sequence
  SiRNA target sequence
atggtatatcaactaattta

SEQ ID NO: 212240 - DNA, 20 bp, Artificial sequence
  SiRNA target sequence
tggtatatcaactaatttaa

SEQ ID NO: 212241 - DNA, 20 bp, Artificial sequence
  SiRNA target sequence
ggtatatcaactaatttaat

SEQ ID NO: 212242 - DNA, 20 bp, Artificial sequence
  SiRNA target sequence
gtatatcaactaatttaata

SEQ ID NO: 212243 - DNA, 20 bp, Artificial sequence
  SiRNA target sequence
tatatcaactaatttaatag

SEQ ID NO: 212244 - DNA, 20 bp, Artificial sequence
  SiRNA target sequence
atatcaactaatttaataga

SEQ ID NO: 212245 - DNA, 20 bp, Artificial sequence
  SiRNA target sequence
tatcaactaatttaatagaa

SEQ ID NO: 212246 - DNA, 20 bp, Artificial sequence
  SiRNA target sequence
atcaactaatttaatagaat

SEQ ID NO: 212247 - DNA, 20 bp, Artificial sequence
  SiRNA target sequence
tcaactaatttaatagaatc

SEQ ID NO: 212248 - DNA, 20 bp, Artificial sequence
  SiRNA target sequence
caactaatttaatagaatca

SEQ ID NO: 212249 - DNA, 20 bp, Artificial sequence
  SiRNA target sequence
aactaatttaatagaatcaa

SEQ ID NO: 212250 - DNA, 20 bp, Artificial sequence
  SiRNA target sequence
actaatttaatagaatcaac

SEQ ID NO: 212251 - DNA, 20 bp, Artificial sequence
  SiRNA target sequence
ctaatttaatagaatcaaca

SEQ ID NO: 212252 - DNA, 20 bp, Artificial sequence
  SiRNA target sequence
taatttaatagaatcaacat

SEQ ID NO: 212253 - DNA, 20 bp, Artificial sequence
  SiRNA target sequence
aatttaatagaatcaacatt

SEQ ID NO: 212254 - DNA, 20 bp, Artificial sequence
  SiRNA target sequence
atttaatagaatcaacattt

SEQ ID NO: 212255 - DNA, 20 bp, Artificial sequence
  SiRNA target sequence
tttaatagaatcaacattta

SEQ ID NO: 212256 - DNA, 20 bp, Artificial sequence
  SiRNA target sequence
ttaatagaatcaacatttaa

SEQ ID NO: 212257 - DNA, 20 bp, Artificial sequence
  SiRNA target sequence
taatagaatcaacatttaaa

SEQ ID NO: 212258 - DNA, 20 bp, Artificial sequence
  SiRNA target sequence
aatagaatcaacatttaaaa

SEQ ID NO: 212259 - DNA, 20 bp, Artificial sequence
  SiRNA target sequence
atagaatcaacatttaaaag

SEQ ID NO: 212260 - DNA, 20 bp, Artificial sequence
  SiRNA target sequence
tagaatcaacatttaaaagt

SEQ ID NO: 212261 - DNA, 20 bp, Artificial sequence
  SiRNA target sequence
agaatcaacatttaaaagtg

SEQ ID NO: 212262 - DNA, 20 bp, Artificial sequence
  SiRNA target sequence
gaatcaacatttaaaagtgg

SEQ ID NO: 212263 - DNA, 20 bp, Artificial sequence
  SiRNA target sequence
aatcaacatttaaaagtgga

SEQ ID NO: 212264 - DNA, 20 bp, Artificial sequence
  SiRNA target sequence
atcaacatttaaaagtggac

SEQ ID NO: 212265 - DNA, 20 bp, Artificial sequence
  SiRNA target sequence
tcaacatttaaaagtggact

SEQ ID NO: 212266 - DNA, 20 bp, Artificial sequence
  SiRNA target sequence
caacatttaaaagtggactt

SEQ ID NO: 212267 - DNA, 20 bp, Artificial sequence
  SiRNA target sequence
aacatttaaaagtggacttg

SEQ ID NO: 212268 - DNA, 20 bp, Artificial sequence
  SiRNA target sequence
acatttaaaagtggacttgt

SEQ ID NO: 212269 - DNA, 20 bp, Artificial sequence
  SiRNA target sequence
catttaaaagtggacttgtg

SEQ ID NO: 212270 - DNA, 20 bp, Artificial sequence
  SiRNA target sequence
atttaaaagtggacttgtga

SEQ ID NO: 212271 - DNA, 20 bp, Artificial sequence
  SiRNA target sequence
tttaaaagtggacttgtgaa

SEQ ID NO: 212272 - DNA, 20 bp, Artificial sequence
  SiRNA target sequence
ttaaaagtggacttgtgaaa

SEQ ID NO: 212273 - DNA, 20 bp, Artificial sequence
  SiRNA target sequence
taaaagtggacttgtgaaag

SEQ ID NO: 212274 - DNA, 20 bp, Artificial sequence
  SiRNA target sequence
aaaagtggacttgtgaaagg

SEQ ID NO: 212275 - DNA, 20 bp, Artificial sequence
  SiRNA target sequence
aaagtggacttgtgaaaggt

SEQ ID NO: 212276 - DNA, 20 bp, Artificial sequence
  SiRNA target sequence
aagtggacttgtgaaaggtg

SEQ ID NO: 212277 - DNA, 20 bp, Artificial sequence
  SiRNA target sequence
agtggacttgtgaaaggtgc

SEQ ID NO: 212278 - DNA, 20 bp, Artificial sequence
  SiRNA target sequence
gtggacttgtgaaaggtgca

SEQ ID NO: 212279 - DNA, 20 bp, Artificial sequence
  SiRNA target sequence
tggacttgtgaaaggtgcag

SEQ ID NO: 212280 - DNA, 20 bp, Artificial sequence
  SiRNA target sequence
ggacttgtgaaaggtgcaga

SEQ ID NO: 212281 - DNA, 20 bp, Artificial sequence
  SiRNA target sequence
gacttgtgaaaggtgcagaa

SEQ ID NO: 212282 - DNA, 20 bp, Artificial sequence
  SiRNA target sequence
acttgtgaaaggtgcagaag

SEQ ID NO: 212283 - DNA, 20 bp, Artificial sequence
  SiRNA target sequence
cttgtgaaaggtgcagaaga

SEQ ID NO: 212284 - DNA, 20 bp, Artificial sequence
  SiRNA target sequence
ttgtgaaaggtgcagaagaa

SEQ ID NO: 212285 - DNA, 20 bp, Artificial sequence
  SiRNA target sequence
tgtgaaaggtgcagaagaat

SEQ ID NO: 212286 - DNA, 20 bp, Artificial sequence
  SiRNA target sequence
gtgaaaggtgcagaagaatt

SEQ ID NO: 212287 - DNA, 20 bp, Artificial sequence
  SiRNA target sequence
tgaaaggtgcagaagaatta

SEQ ID NO: 212288 - DNA, 20 bp, Artificial sequence
  SiRNA target sequence
gaaaggtgcagaagaattaa

SEQ ID NO: 212289 - DNA, 20 bp, Artificial sequence
  SiRNA target sequence
aaaggtgcagaagaattaaa

SEQ ID NO: 212290 - DNA, 20 bp, Artificial sequence
  SiRNA target sequence
aaggtgcagaagaattaaac

SEQ ID NO: 212291 - DNA, 20 bp, Artificial sequence
  SiRNA target sequence
aggtgcagaagaattaaacg

SEQ ID NO: 212292 - DNA, 20 bp, Artificial sequence
  SiRNA target sequence
ggtgcagaagaattaaacga

SEQ ID NO: 212293 - DNA, 20 bp, Artificial sequence
  SiRNA target sequence
gtgcagaagaattaaacgag

SEQ ID NO: 212294 - DNA, 20 bp, Artificial sequence
  SiRNA target sequence
tgcagaagaattaaacgaga

SEQ ID NO: 212295 - DNA, 20 bp, Artificial sequence
  SiRNA target sequence
gcagaagaattaaacgagaa

SEQ ID NO: 212296 - DNA, 20 bp, Artificial sequence
  SiRNA target sequence
cagaagaattaaacgagaat

SEQ ID NO: 212297 - DNA, 20 bp, Artificial sequence
  SiRNA target sequence
agaagaattaaacgagaata

SEQ ID NO: 212298 - DNA, 20 bp, Artificial sequence
  SiRNA target sequence
gaagaattaaacgagaatac

SEQ ID NO: 212299 - DNA, 20 bp, Artificial sequence
  SiRNA target sequence
aagaattaaacgagaatact

SEQ ID NO: 212300 - DNA, 20 bp, Artificial sequence
  SiRNA target sequence
agaattaaacgagaatacta

SEQ ID NO: 212301 - DNA, 20 bp, Artificial sequence
  SiRNA target sequence
gaattaaacgagaatactaa

SEQ ID NO: 212302 - DNA, 20 bp, Artificial sequence
  SiRNA target sequence
aattaaacgagaatactaaa

SEQ ID NO: 212303 - DNA, 20 bp, Artificial sequence
  SiRNA target sequence
attaaacgagaatactaaaa

SEQ ID NO: 212304 - DNA, 20 bp, Artificial sequence
  SiRNA target sequence
ttaaacgagaatactaaaag

SEQ ID NO: 212305 - DNA, 20 bp, Artificial sequence
  SiRNA target sequence
taaacgagaatactaaaagt

SEQ ID NO: 212306 - DNA, 20 bp, Artificial sequence
  SiRNA target sequence
aaacgagaatactaaaagtt

SEQ ID NO: 212307 - DNA, 20 bp, Artificial sequence
  SiRNA target sequence
aacgagaatactaaaagtta

SEQ ID NO: 212308 - DNA, 20 bp, Artificial sequence
  SiRNA target sequence
acgagaatactaaaagttat

SEQ ID NO: 212309 - DNA, 20 bp, Artificial sequence
  SiRNA target sequence
cgagaatactaaaagttatt

SEQ ID NO: 212310 - DNA, 20 bp, Artificial sequence
  SiRNA target sequence
gagaatactaaaagttattc

SEQ ID NO: 212311 - DNA, 20 bp, Artificial sequence
  SiRNA target sequence
agaatactaaaagttattct

SEQ ID NO: 212312 - DNA, 20 bp, Artificial sequence
  SiRNA target sequence
gaatactaaaagttattcta

SEQ ID NO: 212313 - DNA, 20 bp, Artificial sequence
  SiRNA target sequence
aatactaaaagttattctat

SEQ ID NO: 212314 - DNA, 20 bp, Artificial sequence
  SiRNA target sequence
atactaaaagttattctatg

SEQ ID NO: 212315 - DNA, 20 bp, Artificial sequence
  SiRNA target sequence
tactaaaagttattctatgg

SEQ ID NO: 212316 - DNA, 20 bp, Artificial sequence
  SiRNA target sequence
actaaaagttattctatggg

SEQ ID NO: 212317 - DNA, 20 bp, Artificial sequence
  SiRNA target sequence
ctaaaagttattctatggga

SEQ ID NO: 212318 - DNA, 20 bp, Artificial sequence
  SiRNA target sequence
taaaagttattctatgggat

SEQ ID NO: 212319 - DNA, 20 bp, Artificial sequence
  SiRNA target sequence
aaaagttattctatgggata

SEQ ID NO: 212320 - DNA, 20 bp, Artificial sequence
  SiRNA target sequence
aaagttattctatgggatat

SEQ ID NO: 212321 - DNA, 20 bp, Artificial sequence
  SiRNA target sequence
aagttattctatgggatata

SEQ ID NO: 212322 - DNA, 20 bp, Artificial sequence
  SiRNA target sequence
agttattctatgggatataa

SEQ ID NO: 212323 - DNA, 20 bp, Artificial sequence
  SiRNA target sequence
gttattctatgggatataat

SEQ ID NO: 212324 - DNA, 20 bp, Artificial sequence
  SiRNA target sequence
ttattctatgggatataatt

SEQ ID NO: 212325 - DNA, 20 bp, Artificial sequence
  SiRNA target sequence
tattctatgggatataattc

SEQ ID NO: 212326 - DNA, 20 bp, Artificial sequence
  SiRNA target sequence
attctatgggatataattca

SEQ ID NO: 212327 - DNA, 20 bp, Artificial sequence
  SiRNA target sequence
ttctatgggatataattcat

SEQ ID NO: 212328 - DNA, 20 bp, Artificial sequence
  SiRNA target sequence
tctatgggatataattcatt

SEQ ID NO: 212329 - DNA, 20 bp, Artificial sequence
  SiRNA target sequence
ctatgggatataattcattt

SEQ ID NO: 212330 - DNA, 20 bp, Artificial sequence
  SiRNA target sequence
tatgggatataattcatttg

SEQ ID NO: 212331 - DNA, 20 bp, Artificial sequence
  SiRNA target sequence
atgggatataattcatttga

SEQ ID NO: 212332 - DNA, 20 bp, Artificial sequence
  SiRNA target sequence
tgggatataattcatttgaa

SEQ ID NO: 212333 - DNA, 20 bp, Artificial sequence
  SiRNA target sequence
gggatataattcatttgaac

SEQ ID NO: 212334 - DNA, 20 bp, Artificial sequence
  SiRNA target sequence
ggatataattcatttgaaca

SEQ ID NO: 212335 - DNA, 20 bp, Artificial sequence
  SiRNA target sequence
gatataattcatttgaacaa

SEQ ID NO: 212336 - DNA, 20 bp, Artificial sequence
  SiRNA target sequence
atataattcatttgaacaaa

SEQ ID NO: 212337 - DNA, 20 bp, Artificial sequence
  SiRNA target sequence
tataattcatttgaacaaaa

SEQ ID NO: 212338 - DNA, 20 bp, Artificial sequence
  SiRNA target sequence
ataattcatttgaacaaaag

SEQ ID NO: 212339 - DNA, 20 bp, Artificial sequence
  SiRNA target sequence
taattcatttgaacaaaaga

SEQ ID NO: 212340 - DNA, 20 bp, Artificial sequence
  SiRNA target sequence
aattcatttgaacaaaagat

SEQ ID NO: 212341 - DNA, 20 bp, Artificial sequence
  SiRNA target sequence
attcatttgaacaaaagata

SEQ ID NO: 212342 - DNA, 20 bp, Artificial sequence
  SiRNA target sequence
ttcatttgaacaaaagatag

SEQ ID NO: 212343 - DNA, 20 bp, Artificial sequence
  SiRNA target sequence
tcatttgaacaaaagatagc

SEQ ID NO: 212344 - DNA, 20 bp, Artificial sequence
  SiRNA target sequence
catttgaacaaaagatagca

SEQ ID NO: 212345 - DNA, 20 bp, Artificial sequence
  SiRNA target sequence
atttgaacaaaagatagcat

SEQ ID NO: 212346 - DNA, 20 bp, Artificial sequence
  SiRNA target sequence
tttgaacaaaagatagcatc

SEQ ID NO: 212347 - DNA, 20 bp, Artificial sequence
  SiRNA target sequence
ttgaacaaaagatagcatca

SEQ ID NO: 212348 - DNA, 20 bp, Artificial sequence
  SiRNA target sequence
tgaacaaaagatagcatcaa

SEQ ID NO: 212349 - DNA, 20 bp, Artificial sequence
  SiRNA target sequence
gaacaaaagatagcatcaat

SEQ ID NO: 212350 - DNA, 20 bp, Artificial sequence
  SiRNA target sequence
aacaaaagatagcatcaata

SEQ ID NO: 212351 - DNA, 20 bp, Artificial sequence
  SiRNA target sequence
acaaaagatagcatcaataa

SEQ ID NO: 212352 - DNA, 20 bp, Artificial sequence
  SiRNA target sequence
caaaagatagcatcaataac

SEQ ID NO: 212353 - DNA, 20 bp, Artificial sequence
  SiRNA target sequence
aaaagatagcatcaataact

SEQ ID NO: 212354 - DNA, 20 bp, Artificial sequence
  SiRNA target sequence
aaagatagcatcaataactg

SEQ ID NO: 212355 - DNA, 20 bp, Artificial sequence
  SiRNA target sequence
aagatagcatcaataactgt

SEQ ID NO: 212356 - DNA, 20 bp, Artificial sequence
  SiRNA target sequence
agatagcatcaataactgtt

SEQ ID NO: 212357 - DNA, 20 bp, Artificial sequence
  SiRNA target sequence
gatagcatcaataactgtta

SEQ ID NO: 212358 - DNA, 20 bp, Artificial sequence
  SiRNA target sequence
atagcatcaataactgttat

SEQ ID NO: 212359 - DNA, 20 bp, Artificial sequence
  SiRNA target sequence
tagcatcaataactgttatt

SEQ ID NO: 212360 - DNA, 20 bp, Artificial sequence
  SiRNA target sequence
agcatcaataactgttatta

SEQ ID NO: 212361 - DNA, 20 bp, Artificial sequence
  SiRNA target sequence
gcatcaataactgttattat

SEQ ID NO: 212362 - DNA, 20 bp, Artificial sequence
  SiRNA target sequence
catcaataactgttattatc

SEQ ID NO: 212363 - DNA, 20 bp, Artificial sequence
  SiRNA target sequence
atcaataactgttattatcc

SEQ ID NO: 212364 - DNA, 20 bp, Artificial sequence
  SiRNA target sequence
tcaataactgttattatcct

SEQ ID NO: 212365 - DNA, 20 bp, Artificial sequence
  SiRNA target sequence
caataactgttattatcctg

SEQ ID NO: 212366 - DNA, 20 bp, Artificial sequence
  SiRNA target sequence
aataactgttattatcctgc

SEQ ID NO: 212367 - DNA, 20 bp, Artificial sequence
  SiRNA target sequence
ataactgttattatcctgct

SEQ ID NO: 212368 - DNA, 20 bp, Artificial sequence
  SiRNA target sequence
taactgttattatcctgctt

SEQ ID NO: 212369 - DNA, 20 bp, Artificial sequence
  SiRNA target sequence
aactgttattatcctgcttt

SEQ ID NO: 212370 - DNA, 20 bp, Artificial sequence
  SiRNA target sequence
actgttattatcctgctttt

SEQ ID NO: 212371 - DNA, 20 bp, Artificial sequence
  SiRNA target sequence
ctgttattatcctgctttta

SEQ ID NO: 212372 - DNA, 20 bp, Artificial sequence
  SiRNA target sequence
tgttattatcctgcttttat

SEQ ID NO: 212373 - DNA, 20 bp, Artificial sequence
  SiRNA target sequence
gttattatcctgcttttatc

SEQ ID NO: 212374 - DNA, 20 bp, Artificial sequence
  SiRNA target sequence
ttattatcctgcttttatca

SEQ ID NO: 212375 - DNA, 20 bp, Artificial sequence
  SiRNA target sequence
tattatcctgcttttatcac

SEQ ID NO: 212376 - DNA, 20 bp, Artificial sequence
  SiRNA target sequence
attatcctgcttttatcacc

SEQ ID NO: 212377 - DNA, 20 bp, Artificial sequence
  SiRNA target sequence
ttatcctgcttttatcacca

SEQ ID NO: 212378 - DNA, 20 bp, Artificial sequence
  SiRNA target sequence
tatcctgcttttatcaccat

SEQ ID NO: 212379 - DNA, 20 bp, Artificial sequence
  SiRNA target sequence
atcctgcttttatcaccatt

SEQ ID NO: 212380 - DNA, 20 bp, Artificial sequence
  SiRNA target sequence
tcctgcttttatcaccattt

SEQ ID NO: 212381 - DNA, 20 bp, Artificial sequence
  SiRNA target sequence
cctgcttttatcaccatttc

SEQ ID NO: 212382 - DNA, 20 bp, Artificial sequence
  SiRNA target sequence
ctgcttttatcaccatttcc

SEQ ID NO: 212383 - DNA, 20 bp, Artificial sequence
  SiRNA target sequence
tgcttttatcaccatttcca

SEQ ID NO: 212384 - DNA, 20 bp, Artificial sequence
  SiRNA target sequence
gcttttatcaccatttccaa

SEQ ID NO: 212385 - DNA, 20 bp, Artificial sequence
  SiRNA target sequence
cttttatcaccatttccaaa

SEQ ID NO: 212386 - DNA, 20 bp, Artificial sequence
  SiRNA target sequence
ttttatcaccatttccaaaa

SEQ ID NO: 212387 - DNA, 20 bp, Artificial sequence
  SiRNA target sequence
tttatcaccatttccaaaat

SEQ ID NO: 212388 - DNA, 20 bp, Artificial sequence
  SiRNA target sequence
ttatcaccatttccaaaatt

SEQ ID NO: 212389 - DNA, 20 bp, Artificial sequence
  SiRNA target sequence
tatcaccatttccaaaatta

SEQ ID NO: 212390 - DNA, 20 bp, Artificial sequence
  SiRNA target sequence
atcaccatttccaaaattaa

SEQ ID NO: 212391 - DNA, 20 bp, Artificial sequence
  SiRNA target sequence
tcaccatttccaaaattaat

SEQ ID NO: 212392 - DNA, 20 bp, Artificial sequence
  SiRNA target sequence
caccatttccaaaattaata

SEQ ID NO: 212393 - DNA, 20 bp, Artificial sequence
  SiRNA target sequence
accatttccaaaattaatac

SEQ ID NO: 212394 - DNA, 20 bp, Artificial sequence
  SiRNA target sequence
ccatttccaaaattaataca

SEQ ID NO: 212395 - DNA, 20 bp, Artificial sequence
  SiRNA target sequence
catttccaaaattaatacaa

SEQ ID NO: 212396 - DNA, 20 bp, Artificial sequence
  SiRNA target sequence
atttccaaaattaatacaaa

SEQ ID NO: 212397 - DNA, 20 bp, Artificial sequence
  SiRNA target sequence
tttccaaaattaatacaaac

SEQ ID NO: 212398 - DNA, 20 bp, Artificial sequence
  SiRNA target sequence
ttccaaaattaatacaaacc

SEQ ID NO: 212399 - DNA, 20 bp, Artificial sequence
  SiRNA target sequence
tccaaaattaatacaaacca

SEQ ID NO: 212400 - DNA, 20 bp, Artificial sequence
  SiRNA target sequence
ccaaaattaatacaaaccaa

SEQ ID NO: 212401 - DNA, 20 bp, Artificial sequence
  SiRNA target sequence
caaaattaatacaaaccaaa

SEQ ID NO: 212402 - DNA, 20 bp, Artificial sequence
  SiRNA target sequence
aaaattaatacaaaccaaag

SEQ ID NO: 212403 - DNA, 20 bp, Artificial sequence
  SiRNA target sequence
aaattaatacaaaccaaagg

SEQ ID NO: 212404 - DNA, 20 bp, Artificial sequence
  SiRNA target sequence
aattaatacaaaccaaagga

SEQ ID NO: 212405 - DNA, 20 bp, Artificial sequence
  SiRNA target sequence
attaatacaaaccaaaggat

SEQ ID NO: 212406 - DNA, 20 bp, Artificial sequence
  SiRNA target sequence
ttaatacaaaccaaaggatg

SEQ ID NO: 212407 - DNA, 20 bp, Artificial sequence
  SiRNA target sequence
taatacaaaccaaaggatgg

SEQ ID NO: 212408 - DNA, 20 bp, Artificial sequence
  SiRNA target sequence
aatacaaaccaaaggatgga

SEQ ID NO: 212409 - DNA, 20 bp, Artificial sequence
  SiRNA target sequence
atacaaaccaaaggatggat

SEQ ID NO: 212410 - DNA, 20 bp, Artificial sequence
  SiRNA target sequence
tacaaaccaaaggatggata

SEQ ID NO: 212411 - DNA, 20 bp, Artificial sequence
  SiRNA target sequence
acaaaccaaaggatggatat

SEQ ID NO: 212412 - DNA, 20 bp, Artificial sequence
  SiRNA target sequence
caaaccaaaggatggatatt

SEQ ID NO: 212413 - DNA, 20 bp, Artificial sequence
  SiRNA target sequence
aaaccaaaggatggatattt

SEQ ID NO: 212414 - DNA, 20 bp, Artificial sequence
  SiRNA target sequence
aaccaaaggatggatatttg

SEQ ID NO: 212415 - DNA, 20 bp, Artificial sequence
  SiRNA target sequence
accaaaggatggatatttgt

SEQ ID NO: 212416 - DNA, 20 bp, Artificial sequence
  SiRNA target sequence
ccaaaggatggatatttgtt

SEQ ID NO: 212417 - DNA, 20 bp, Artificial sequence
  SiRNA target sequence
caaaggatggatatttgttg

SEQ ID NO: 212418 - DNA, 20 bp, Artificial sequence
  SiRNA target sequence
aaaggatggatatttgttgc

SEQ ID NO: 212419 - DNA, 20 bp, Artificial sequence
  SiRNA target sequence
aaggatggatatttgttgcc

SEQ ID NO: 212420 - DNA, 20 bp, Artificial sequence
  SiRNA target sequence
aggatggatatttgttgcca

SEQ ID NO: 212421 - DNA, 20 bp, Artificial sequence
  SiRNA target sequence
ggatggatatttgttgccat

SEQ ID NO: 212422 - DNA, 20 bp, Artificial sequence
  SiRNA target sequence
gatggatatttgttgccata

SEQ ID NO: 212423 - DNA, 20 bp, Artificial sequence
  SiRNA target sequence
atggatatttgttgccatag

SEQ ID NO: 212424 - DNA, 20 bp, Artificial sequence
  SiRNA target sequence
tggatatttgttgccatagc

SEQ ID NO: 212425 - DNA, 20 bp, Artificial sequence
  SiRNA target sequence
ggatatttgttgccatagcg

SEQ ID NO: 212426 - DNA, 20 bp, Artificial sequence
  SiRNA target sequence
gatatttgttgccatagcgt

SEQ ID NO: 212427 - DNA, 20 bp, Artificial sequence
  SiRNA target sequence
atatttgttgccatagcgtg

SEQ ID NO: 212428 - DNA, 20 bp, Artificial sequence
  SiRNA target sequence
tatttgttgccatagcgtgc

SEQ ID NO: 212429 - DNA, 20 bp, Artificial sequence
  SiRNA target sequence
atttgttgccatagcgtgcc

SEQ ID NO: 212430 - DNA, 20 bp, Artificial sequence
  SiRNA target sequence
tttgttgccatagcgtgccc

SEQ ID NO: 212431 - DNA, 20 bp, Artificial sequence
  SiRNA target sequence
ttgttgccatagcgtgccca

SEQ ID NO: 212432 - DNA, 20 bp, Artificial sequence
  SiRNA target sequence
tgttgccatagcgtgcccac

SEQ ID NO: 212433 - DNA, 20 bp, Artificial sequence
  SiRNA target sequence
gttgccatagcgtgcccact

SEQ ID NO: 212434 - DNA, 20 bp, Artificial sequence
  SiRNA target sequence
ttgccatagcgtgcccactt

SEQ ID NO: 212435 - DNA, 20 bp, Artificial sequence
  SiRNA target sequence
tgccatagcgtgcccactta

SEQ ID NO: 212436 - DNA, 20 bp, Artificial sequence
  SiRNA target sequence
gccatagcgtgcccacttat

SEQ ID NO: 212437 - DNA, 20 bp, Artificial sequence
  SiRNA target sequence
ccatagcgtgcccacttatt

SEQ ID NO: 212438 - DNA, 20 bp, Artificial sequence
  SiRNA target sequence
catagcgtgcccacttatta

SEQ ID NO: 212439 - DNA, 20 bp, Artificial sequence
  SiRNA target sequence
atagcgtgcccacttattac

SEQ ID NO: 212440 - DNA, 20 bp, Artificial sequence
  SiRNA target sequence
tagcgtgcccacttattacc

SEQ ID NO: 212441 - DNA, 20 bp, Artificial sequence
  SiRNA target sequence
agcgtgcccacttattaccc

SEQ ID NO: 212442 - DNA, 20 bp, Artificial sequence
  SiRNA target sequence
gcgtgcccacttattaccct

SEQ ID NO: 212443 - DNA, 20 bp, Artificial sequence
  SiRNA target sequence
cgtgcccacttattaccctt

SEQ ID NO: 212444 - DNA, 20 bp, Artificial sequence
  SiRNA target sequence
gtgcccacttattacccttt

SEQ ID NO: 212445 - DNA, 20 bp, Artificial sequence
  SiRNA target sequence
tgcccacttattaccctttt

SEQ ID NO: 212446 - DNA, 20 bp, Artificial sequence
  SiRNA target sequence
gcccacttattacccttttt

SEQ ID NO: 212447 - DNA, 20 bp, Artificial sequence
  SiRNA target sequence
cccacttattaccctttttg

SEQ ID NO: 212448 - DNA, 20 bp, Artificial sequence
  SiRNA target sequence
ccacttattaccctttttgc

SEQ ID NO: 212449 - DNA, 20 bp, Artificial sequence
  SiRNA target sequence
cacttattaccctttttgct

SEQ ID NO: 212450 - DNA, 20 bp, Artificial sequence
  SiRNA target sequence
acttattaccctttttgctg

SEQ ID NO: 212451 - DNA, 20 bp, Artificial sequence
  SiRNA target sequence
cttattaccctttttgctgt

SEQ ID NO: 212452 - DNA, 20 bp, Artificial sequence
  SiRNA target sequence
ttattaccctttttgctgta

SEQ ID NO: 212453 - DNA, 20 bp, Artificial sequence
  SiRNA target sequence
tattaccctttttgctgtag

SEQ ID NO: 212454 - DNA, 20 bp, Artificial sequence
  SiRNA target sequence
attaccctttttgctgtagt

SEQ ID NO: 212455 - DNA, 20 bp, Artificial sequence
  SiRNA target sequence
ttaccctttttgctgtagtt

SEQ ID NO: 212456 - DNA, 20 bp, Artificial sequence
  SiRNA target sequence
taccctttttgctgtagttt

SEQ ID NO: 212457 - DNA, 20 bp, Artificial sequence
  SiRNA target sequence
accctttttgctgtagtttc

SEQ ID NO: 212458 - DNA, 20 bp, Artificial sequence
  SiRNA target sequence
ccctttttgctgtagtttct

SEQ ID NO: 212459 - DNA, 20 bp, Artificial sequence
  SiRNA target sequence
cctttttgctgtagtttctg

SEQ ID NO: 212460 - DNA, 20 bp, Artificial sequence
  SiRNA target sequence
ctttttgctgtagtttctgt

SEQ ID NO: 212461 - DNA, 20 bp, Artificial sequence
  SiRNA target sequence
tttttgctgtagtttctgtg

SEQ ID NO: 212462 - DNA, 20 bp, Artificial sequence
  SiRNA target sequence
ttttgctgtagtttctgtgt

SEQ ID NO: 212463 - DNA, 20 bp, Artificial sequence
  SiRNA target sequence
tttgctgtagtttctgtgtg

SEQ ID NO: 212464 - DNA, 20 bp, Artificial sequence
  SiRNA target sequence
ttgctgtagtttctgtgtgt

SEQ ID NO: 212465 - DNA, 20 bp, Artificial sequence
  SiRNA target sequence
tgctgtagtttctgtgtgtg

SEQ ID NO: 212466 - DNA, 20 bp, Artificial sequence
  SiRNA target sequence
gctgtagtttctgtgtgtgg

SEQ ID NO: 212467 - DNA, 20 bp, Artificial sequence
  SiRNA target sequence
ctgtagtttctgtgtgtggt

SEQ ID NO: 212468 - DNA, 20 bp, Artificial sequence
  SiRNA target sequence
tgtagtttctgtgtgtggtc

SEQ ID NO: 212469 - DNA, 20 bp, Artificial sequence
  SiRNA target sequence
gtagtttctgtgtgtggtct

SEQ ID NO: 212470 - DNA, 20 bp, Artificial sequence
  SiRNA target sequence
tagtttctgtgtgtggtctt

SEQ ID NO: 212471 - DNA, 20 bp, Artificial sequence
  SiRNA target sequence
agtttctgtgtgtggtcttg

SEQ ID NO: 212472 - DNA, 20 bp, Artificial sequence
  SiRNA target sequence
gtttctgtgtgtggtcttgc

SEQ ID NO: 212473 - DNA, 20 bp, Artificial sequence
  SiRNA target sequence
tttctgtgtgtggtcttgct

SEQ ID NO: 212474 - DNA, 20 bp, Artificial sequence
  SiRNA target sequence
ttctgtgtgtggtcttgctt

SEQ ID NO: 212475 - DNA, 20 bp, Artificial sequence
  SiRNA target sequence
tctgtgtgtggtcttgcttt

SEQ ID NO: 212476 - DNA, 20 bp, Artificial sequence
  SiRNA target sequence
ctgtgtgtggtcttgctttt

SEQ ID NO: 212477 - DNA, 20 bp, Artificial sequence
  SiRNA target sequence
tgtgtgtggtcttgcttttt

SEQ ID NO: 212478 - DNA, 20 bp, Artificial sequence
  SiRNA target sequence
gtgtgtggtcttgcttttta

SEQ ID NO: 212479 - DNA, 20 bp, Artificial sequence
  SiRNA target sequence
tgtgtggtcttgctttttac

SEQ ID NO: 212480 - DNA, 20 bp, Artificial sequence
  SiRNA target sequence
gtgtggtcttgctttttaca

SEQ ID NO: 212481 - DNA, 20 bp, Artificial sequence
  SiRNA target sequence
tgtggtcttgctttttacaa

SEQ ID NO: 212482 - DNA, 20 bp, Artificial sequence
  SiRNA target sequence
gtggtcttgctttttacaat

SEQ ID NO: 212483 - DNA, 20 bp, Artificial sequence
  SiRNA target sequence
tggtcttgctttttacaatt

SEQ ID NO: 212484 - DNA, 20 bp, Artificial sequence
  SiRNA target sequence
ggtcttgctttttacaatta

SEQ ID NO: 212485 - DNA, 20 bp, Artificial sequence
  SiRNA target sequence
gtcttgctttttacaattat

SEQ ID NO: 212486 - DNA, 20 bp, Artificial sequence
  SiRNA target sequence
tcttgctttttacaattatc

SEQ ID NO: 212487 - DNA, 20 bp, Artificial sequence
  SiRNA target sequence
cttgctttttacaattatcc

SEQ ID NO: 212488 - DNA, 20 bp, Artificial sequence
  SiRNA target sequence
ttgctttttacaattatccg

SEQ ID NO: 212489 - DNA, 20 bp, Artificial sequence
  SiRNA target sequence
tgctttttacaattatccgg

SEQ ID NO: 212490 - DNA, 20 bp, Artificial sequence
  SiRNA target sequence
gctttttacaattatccggc

SEQ ID NO: 212491 - DNA, 20 bp, Artificial sequence
  SiRNA target sequence
ctttttacaattatccggca

SEQ ID NO: 212492 - DNA, 20 bp, Artificial sequence
  SiRNA target sequence
tttttacaattatccggcaa

SEQ ID NO: 212493 - DNA, 20 bp, Artificial sequence
  SiRNA target sequence
ttttacaattatccggcaac

SEQ ID NO: 212494 - DNA, 20 bp, Artificial sequence
  SiRNA target sequence
tttacaattatccggcaaca

SEQ ID NO: 212495 - DNA, 20 bp, Artificial sequence
  SiRNA target sequence
ttacaattatccggcaacaa

SEQ ID NO: 212496 - DNA, 20 bp, Artificial sequence
  SiRNA target sequence
tacaattatccggcaacaaa

SEQ ID NO: 212497 - DNA, 20 bp, Artificial sequence
  SiRNA target sequence
acaattatccggcaacaaat

SEQ ID NO: 212498 - DNA, 20 bp, Artificial sequence
  SiRNA target sequence
caattatccggcaacaaata

SEQ ID NO: 212499 - DNA, 20 bp, Artificial sequence
  SiRNA target sequence
aattatccggcaacaaataa

SEQ ID NO: 212500 - DNA, 20 bp, Artificial sequence
  SiRNA target sequence
attatccggcaacaaataat

SEQ ID NO: 212501 - DNA, 20 bp, Artificial sequence
  SiRNA target sequence
ttatccggcaacaaataatg

SEQ ID NO: 212502 - DNA, 20 bp, Artificial sequence
  SiRNA target sequence
tatccggcaacaaataatga

SEQ ID NO: 212503 - DNA, 20 bp, Artificial sequence
  SiRNA target sequence
atccggcaacaaataatgac

SEQ ID NO: 212504 - DNA, 20 bp, Artificial sequence
  SiRNA target sequence
tccggcaacaaataatgaca

SEQ ID NO: 212505 - DNA, 20 bp, Artificial sequence
  SiRNA target sequence
ccggcaacaaataatgacac

SEQ ID NO: 212506 - DNA, 20 bp, Artificial sequence
  SiRNA target sequence
cggcaacaaataatgacaca

SEQ ID NO: 212507 - DNA, 20 bp, Artificial sequence
  SiRNA target sequence
ggcaacaaataatgacacaa

SEQ ID NO: 212508 - DNA, 20 bp, Artificial sequence
  SiRNA target sequence
gcaacaaataatgacacaaa

SEQ ID NO: 212509 - DNA, 20 bp, Artificial sequence
  SiRNA target sequence
caacaaataatgacacaaat

SEQ ID NO: 212510 - DNA, 20 bp, Artificial sequence
  SiRNA target sequence
aacaaataatgacacaaatt

SEQ ID NO: 212511 - DNA, 20 bp, Artificial sequence
  SiRNA target sequence
acaaataatgacacaaattt

SEQ ID NO: 212512 - DNA, 20 bp, Artificial sequence
  SiRNA target sequence
caaataatgacacaaatttt

SEQ ID NO: 212513 - DNA, 20 bp, Artificial sequence
  SiRNA target sequence
aaataatgacacaaattttt

SEQ ID NO: 212514 - DNA, 20 bp, Artificial sequence
  SiRNA target sequence
aataatgacacaaatttttt

SEQ ID NO: 212515 - DNA, 20 bp, Artificial sequence
  SiRNA target sequence
ataatgacacaaattttttt

SEQ ID NO: 212516 - DNA, 20 bp, Artificial sequence
  SiRNA target sequence
taatgacacaaatttttttc

SEQ ID NO: 212517 - DNA, 20 bp, Artificial sequence
  SiRNA target sequence
aatgacacaaatttttttct

SEQ ID NO: 212518 - DNA, 20 bp, Artificial sequence
  SiRNA target sequence
atgacacaaatttttttcta

SEQ ID NO: 212519 - DNA, 20 bp, Artificial sequence
  SiRNA target sequence
tgacacaaatttttttctaa

SEQ ID NO: 212520 - DNA, 20 bp, Artificial sequence
  SiRNA target sequence
gacacaaatttttttctaaa

SEQ ID NO: 212521 - DNA, 20 bp, Artificial sequence
  SiRNA target sequence
acacaaatttttttctaaat

SEQ ID NO: 212522 - DNA, 20 bp, Artificial sequence
  SiRNA target sequence
cacaaatttttttctaaatt

SEQ ID NO: 212523 - DNA, 20 bp, Artificial sequence
  SiRNA target sequence
acaaatttttttctaaattc

SEQ ID NO: 212524 - DNA, 20 bp, Artificial sequence
  SiRNA target sequence
caaatttttttctaaattca

SEQ ID NO: 212525 - DNA, 20 bp, Artificial sequence
  SiRNA target sequence
aaatttttttctaaattcat

SEQ ID NO: 212526 - DNA, 20 bp, Artificial sequence
  SiRNA target sequence
aatttttttctaaattcatt

SEQ ID NO: 212527 - DNA, 20 bp, Artificial sequence
  SiRNA target sequence
atttttttctaaattcatta

SEQ ID NO: 212528 - DNA, 20 bp, Artificial sequence
  SiRNA target sequence
tttttttctaaattcattat

SEQ ID NO: 212529 - DNA, 20 bp, Artificial sequence
  SiRNA target sequence
ttttttctaaattcattatg

SEQ ID NO: 212530 - DNA, 20 bp, Artificial sequence
  SiRNA target sequence
tttttctaaattcattatgt

SEQ ID NO: 212531 - DNA, 20 bp, Artificial sequence
  SiRNA target sequence
ttttctaaattcattatgtg

SEQ ID NO: 212532 - DNA, 20 bp, Artificial sequence
  SiRNA target sequence
tttctaaattcattatgtgc

SEQ ID NO: 212533 - DNA, 20 bp, Artificial sequence
  SiRNA target sequence
ttctaaattcattatgtgct

SEQ ID NO: 212534 - DNA, 20 bp, Artificial sequence
  SiRNA target sequence
tctaaattcattatgtgcta

SEQ ID NO: 212535 - DNA, 20 bp, Artificial sequence
  SiRNA target sequence
ctaaattcattatgtgctac

SEQ ID NO: 212536 - DNA, 20 bp, Artificial sequence
  SiRNA target sequence
taaattcattatgtgctacg

SEQ ID NO: 212537 - DNA, 20 bp, Artificial sequence
  SiRNA target sequence
aaattcattatgtgctacgc

SEQ ID NO: 212538 - DNA, 20 bp, Artificial sequence
  SiRNA target sequence
aattcattatgtgctacgcc

SEQ ID NO: 212539 - DNA, 20 bp, Artificial sequence
  SiRNA target sequence
attcattatgtgctacgccc

SEQ ID NO: 212540 - DNA, 20 bp, Artificial sequence
  SiRNA target sequence
ttcattatgtgctacgcccg

SEQ ID NO: 212541 - DNA, 20 bp, Artificial sequence
  SiRNA target sequence
tcattatgtgctacgcccgg

SEQ ID NO: 212542 - DNA, 20 bp, Artificial sequence
  SiRNA target sequence
cattatgtgctacgcccggt

SEQ ID NO: 212543 - DNA, 20 bp, Artificial sequence
  SiRNA target sequence
attatgtgctacgcccggta

SEQ ID NO: 212544 - DNA, 20 bp, Artificial sequence
  SiRNA target sequence
ttatgtgctacgcccggtaa

SEQ ID NO: 212545 - DNA, 20 bp, Artificial sequence
  SiRNA target sequence
tatgtgctacgcccggtaaa

SEQ ID NO: 212546 - DNA, 20 bp, Artificial sequence
  SiRNA target sequence
atgtgctacgcccggtaaat

SEQ ID NO: 212547 - DNA, 20 bp, Artificial sequence
  SiRNA target sequence
tgtgctacgcccggtaaatc

SEQ ID NO: 212548 - DNA, 20 bp, Artificial sequence
  SiRNA target sequence
gtgctacgcccggtaaatcg

SEQ ID NO: 212549 - DNA, 20 bp, Artificial sequence
  SiRNA target sequence
tgctacgcccggtaaatcgt

SEQ ID NO: 212550 - DNA, 20 bp, Artificial sequence
  SiRNA target sequence
gctacgcccggtaaatcgtt

SEQ ID NO: 212551 - DNA, 20 bp, Artificial sequence
  SiRNA target sequence
ctacgcccggtaaatcgttt

SEQ ID NO: 212552 - DNA, 20 bp, Artificial sequence
  SiRNA target sequence
tacgcccggtaaatcgttta

SEQ ID NO: 212553 - DNA, 20 bp, Artificial sequence
  SiRNA target sequence
acgcccggtaaatcgtttat

SEQ ID NO: 212554 - DNA, 20 bp, Artificial sequence
  SiRNA target sequence
cgcccggtaaatcgtttata

SEQ ID NO: 212555 - DNA, 20 bp, Artificial sequence
  SiRNA target sequence
gcccggtaaatcgtttataa

SEQ ID NO: 212556 - DNA, 20 bp, Artificial sequence
  SiRNA target sequence
cccggtaaatcgtttataaa

SEQ ID NO: 212557 - DNA, 20 bp, Artificial sequence
  SiRNA target sequence
ccggtaaatcgtttataaaa

SEQ ID NO: 212558 - DNA, 20 bp, Artificial sequence
  SiRNA target sequence
cggtaaatcgtttataaaat

SEQ ID NO: 212559 - DNA, 20 bp, Artificial sequence
  SiRNA target sequence
ggtaaatcgtttataaaatt

SEQ ID NO: 212560 - DNA, 20 bp, Artificial sequence
  SiRNA target sequence
gtaaatcgtttataaaatta

SEQ ID NO: 212561 - DNA, 20 bp, Artificial sequence
  SiRNA target sequence
taaatcgtttataaaattag

SEQ ID NO: 212562 - DNA, 20 bp, Artificial sequence
  SiRNA target sequence
aaatcgtttataaaattaga

SEQ ID NO: 212563 - DNA, 20 bp, Artificial sequence
  SiRNA target sequence
aatcgtttataaaattagaa

SEQ ID NO: 212564 - DNA, 20 bp, Artificial sequence
  SiRNA target sequence
atcgtttataaaattagaaa

SEQ ID NO: 212565 - DNA, 20 bp, Artificial sequence
  SiRNA target sequence
tcgtttataaaattagaaaa

SEQ ID NO: 212566 - DNA, 20 bp, Artificial sequence
  SiRNA target sequence
cgtttataaaattagaaaat

SEQ ID NO: 212567 - DNA, 20 bp, Artificial sequence
  SiRNA target sequence
gtttataaaattagaaaatg

SEQ ID NO: 212568 - DNA, 20 bp, Artificial sequence
  SiRNA target sequence
tttataaaattagaaaatgt

SEQ ID NO: 212569 - DNA, 20 bp, Artificial sequence
  SiRNA target sequence
ttataaaattagaaaatgtt

SEQ ID NO: 212570 - DNA, 20 bp, Artificial sequence
  SiRNA target sequence
tataaaattagaaaatgttt

SEQ ID NO: 212571 - DNA, 20 bp, Artificial sequence
  SiRNA target sequence
ataaaattagaaaatgtttt

SEQ ID NO: 212572 - DNA, 20 bp, Artificial sequence
  SiRNA target sequence
taaaattagaaaatgtttta

SEQ ID NO: 212573 - DNA, 20 bp, Artificial sequence
  SiRNA target sequence
aaaattagaaaatgttttag

SEQ ID NO: 212574 - DNA, 20 bp, Artificial sequence
  SiRNA target sequence
aaattagaaaatgttttagg

SEQ ID NO: 212575 - DNA, 20 bp, Artificial sequence
  SiRNA target sequence
aattagaaaatgttttagga

SEQ ID NO: 212576 - DNA, 20 bp, Artificial sequence
  SiRNA target sequence
attagaaaatgttttaggat

SEQ ID NO: 212577 - DNA, 20 bp, Artificial sequence
  SiRNA target sequence
ttagaaaatgttttaggatg

SEQ ID NO: 212578 - DNA, 20 bp, Artificial sequence
  SiRNA target sequence
tagaaaatgttttaggatgt

SEQ ID NO: 212579 - DNA, 20 bp, Artificial sequence
  SiRNA target sequence
agaaaatgttttaggatgtg

SEQ ID NO: 212580 - DNA, 20 bp, Artificial sequence
  SiRNA target sequence
gaaaatgttttaggatgtgt

SEQ ID NO: 212581 - DNA, 20 bp, Artificial sequence
  SiRNA target sequence
aaaatgttttaggatgtgta

SEQ ID NO: 212582 - DNA, 20 bp, Artificial sequence
  SiRNA target sequence
aaatgttttaggatgtgtag

SEQ ID NO: 212583 - DNA, 20 bp, Artificial sequence
  SiRNA target sequence
aatgttttaggatgtgtagc

SEQ ID NO: 212584 - DNA, 20 bp, Artificial sequence
  SiRNA target sequence
atgttttaggatgtgtagct

SEQ ID NO: 212585 - DNA, 20 bp, Artificial sequence
  SiRNA target sequence
tgttttaggatgtgtagctg

SEQ ID NO: 212586 - DNA, 20 bp, Artificial sequence
  SiRNA target sequence
gttttaggatgtgtagctgt

SEQ ID NO: 212587 - DNA, 20 bp, Artificial sequence
  SiRNA target sequence
ttttaggatgtgtagctgta

SEQ ID NO: 212588 - DNA, 20 bp, Artificial sequence
  SiRNA target sequence
tttaggatgtgtagctgtag

SEQ ID NO: 212589 - DNA, 20 bp, Artificial sequence
  SiRNA target sequence
ttaggatgtgtagctgtagc

SEQ ID NO: 212590 - DNA, 20 bp, Artificial sequence
  SiRNA target sequence
taggatgtgtagctgtagct

SEQ ID NO: 212591 - DNA, 20 bp, Artificial sequence
  SiRNA target sequence
aggatgtgtagctgtagctc

SEQ ID NO: 212592 - DNA, 20 bp, Artificial sequence
  SiRNA target sequence
ggatgtgtagctgtagctct

SEQ ID NO: 212593 - DNA, 20 bp, Artificial sequence
  SiRNA target sequence
gatgtgtagctgtagctctt

SEQ ID NO: 212594 - DNA, 20 bp, Artificial sequence
  SiRNA target sequence
atgtgtagctgtagctctta

SEQ ID NO: 212595 - DNA, 20 bp, Artificial sequence
  SiRNA target sequence
tgtgtagctgtagctcttat

SEQ ID NO: 212596 - DNA, 20 bp, Artificial sequence
  SiRNA target sequence
gtgtagctgtagctcttatg

SEQ ID NO: 212597 - DNA, 20 bp, Artificial sequence
  SiRNA target sequence
tgtagctgtagctcttatga

SEQ ID NO: 212598 - DNA, 20 bp, Artificial sequence
  SiRNA target sequence
gtagctgtagctcttatgaa

SEQ ID NO: 212599 - DNA, 20 bp, Artificial sequence
  SiRNA target sequence
tagctgtagctcttatgaaa

SEQ ID NO: 212600 - DNA, 20 bp, Artificial sequence
  SiRNA target sequence
agctgtagctcttatgaaag

SEQ ID NO: 212601 - DNA, 20 bp, Artificial sequence
  SiRNA target sequence
gctgtagctcttatgaaagt

SEQ ID NO: 212602 - DNA, 20 bp, Artificial sequence
  SiRNA target sequence
ctgtagctcttatgaaagta

SEQ ID NO: 212603 - DNA, 20 bp, Artificial sequence
  SiRNA target sequence
tgtagctcttatgaaagtag

SEQ ID NO: 212604 - DNA, 20 bp, Artificial sequence
  SiRNA target sequence
gtagctcttatgaaagtagc

SEQ ID NO: 212605 - DNA, 20 bp, Artificial sequence
  SiRNA target sequence
tagctcttatgaaagtagca

SEQ ID NO: 212606 - DNA, 20 bp, Artificial sequence
  SiRNA target sequence
agctcttatgaaagtagcaa

SEQ ID NO: 212607 - DNA, 20 bp, Artificial sequence
  SiRNA target sequence
gctcttatgaaagtagcaaa

SEQ ID NO: 212608 - DNA, 20 bp, Artificial sequence
  SiRNA target sequence
ctcttatgaaagtagcaaaa

SEQ ID NO: 212609 - DNA, 20 bp, Artificial sequence
  SiRNA target sequence
tcttatgaaagtagcaaaat

SEQ ID NO: 212610 - DNA, 20 bp, Artificial sequence
  SiRNA target sequence
cttatgaaagtagcaaaata

SEQ ID NO: 212611 - DNA, 20 bp, Artificial sequence
  SiRNA target sequence
ttatgaaagtagcaaaatat

SEQ ID NO: 212612 - DNA, 20 bp, Artificial sequence
  SiRNA target sequence
tatgaaagtagcaaaatatg

SEQ ID NO: 212613 - DNA, 20 bp, Artificial sequence
  SiRNA target sequence
atgaaagtagcaaaatatgg

SEQ ID NO: 212614 - DNA, 20 bp, Artificial sequence
  SiRNA target sequence
tgaaagtagcaaaatatggc

SEQ ID NO: 212615 - DNA, 20 bp, Artificial sequence
  SiRNA target sequence
gaaagtagcaaaatatggct

SEQ ID NO: 212616 - DNA, 20 bp, Artificial sequence
  SiRNA target sequence
aaagtagcaaaatatggctc

SEQ ID NO: 212617 - DNA, 20 bp, Artificial sequence
  SiRNA target sequence
aagtagcaaaatatggctct

SEQ ID NO: 212618 - DNA, 20 bp, Artificial sequence
  SiRNA target sequence
agtagcaaaatatggctctt

SEQ ID NO: 212619 - DNA, 20 bp, Artificial sequence
  SiRNA target sequence
gtagcaaaatatggctcttt

SEQ ID NO: 212620 - DNA, 20 bp, Artificial sequence
  SiRNA target sequence
tagcaaaatatggctctttt

SEQ ID NO: 212621 - DNA, 20 bp, Artificial sequence
  SiRNA target sequence
agcaaaatatggctcttttg

SEQ ID NO: 212622 - DNA, 20 bp, Artificial sequence
  SiRNA target sequence
gcaaaatatggctcttttga

SEQ ID NO: 212623 - DNA, 20 bp, Artificial sequence
  SiRNA target sequence
caaaatatggctcttttgat

SEQ ID NO: 212624 - DNA, 20 bp, Artificial sequence
  SiRNA target sequence
aaaatatggctcttttgata

SEQ ID NO: 212625 - DNA, 20 bp, Artificial sequence
  SiRNA target sequence
aaatatggctcttttgatat

SEQ ID NO: 212626 - DNA, 20 bp, Artificial sequence
  SiRNA target sequence
aatatggctcttttgatatt

SEQ ID NO: 212627 - DNA, 20 bp, Artificial sequence
  SiRNA target sequence
atatggctcttttgatattt

SEQ ID NO: 212628 - DNA, 20 bp, Artificial sequence
  SiRNA target sequence
tatggctcttttgatatttc

SEQ ID NO: 212629 - DNA, 20 bp, Artificial sequence
  SiRNA target sequence
atggctcttttgatatttcc

SEQ ID NO: 212630 - DNA, 20 bp, Artificial sequence
  SiRNA target sequence
tggctcttttgatatttcca

SEQ ID NO: 212631 - DNA, 20 bp, Artificial sequence
  SiRNA target sequence
ggctcttttgatatttccaa

SEQ ID NO: 212632 - DNA, 20 bp, Artificial sequence
  SiRNA target sequence
gctcttttgatatttccaaa

SEQ ID NO: 212633 - DNA, 20 bp, Artificial sequence
  SiRNA target sequence
ctcttttgatatttccaaag

SEQ ID NO: 212634 - DNA, 20 bp, Artificial sequence
  SiRNA target sequence
tcttttgatatttccaaaga

SEQ ID NO: 212635 - DNA, 20 bp, Artificial sequence
  SiRNA target sequence
cttttgatatttccaaagaa

SEQ ID NO: 212636 - DNA, 20 bp, Artificial sequence
  SiRNA target sequence
ttttgatatttccaaagaag

SEQ ID NO: 212637 - DNA, 20 bp, Artificial sequence
  SiRNA target sequence
tttgatatttccaaagaagc

SEQ ID NO: 212638 - DNA, 20 bp, Artificial sequence
  SiRNA target sequence
ttgatatttccaaagaagcc

SEQ ID NO: 212639 - DNA, 20 bp, Artificial sequence
  SiRNA target sequence
tgatatttccaaagaagcca

SEQ ID NO: 212640 - DNA, 20 bp, Artificial sequence
  SiRNA target sequence
gatatttccaaagaagccat

SEQ ID NO: 212641 - DNA, 20 bp, Artificial sequence
  SiRNA target sequence
atatttccaaagaagccatt

SEQ ID NO: 212642 - DNA, 20 bp, Artificial sequence
  SiRNA target sequence
tatttccaaagaagccattt

SEQ ID NO: 212643 - DNA, 20 bp, Artificial sequence
  SiRNA target sequence
atttccaaagaagccatttc

SEQ ID NO: 212644 - DNA, 20 bp, Artificial sequence
  SiRNA target sequence
tttccaaagaagccatttca

SEQ ID NO: 212645 - DNA, 20 bp, Artificial sequence
  SiRNA target sequence
ttccaaagaagccatttcaa

SEQ ID NO: 212646 - DNA, 20 bp, Artificial sequence
  SiRNA target sequence
tccaaagaagccatttcaat

SEQ ID NO: 212647 - DNA, 20 bp, Artificial sequence
  SiRNA target sequence
ccaaagaagccatttcaatg

SEQ ID NO: 212648 - DNA, 20 bp, Artificial sequence
  SiRNA target sequence
caaagaagccatttcaatgc

SEQ ID NO: 212649 - DNA, 20 bp, Artificial sequence
  SiRNA target sequence
aaagaagccatttcaatgca

SEQ ID NO: 212650 - DNA, 20 bp, Artificial sequence
  SiRNA target sequence
aagaagccatttcaatgcag

SEQ ID NO: 212651 - DNA, 20 bp, Artificial sequence
  SiRNA target sequence
agaagccatttcaatgcaga

SEQ ID NO: 212652 - DNA, 20 bp, Artificial sequence
  SiRNA target sequence
gaagccatttcaatgcagat

SEQ ID NO: 212653 - DNA, 20 bp, Artificial sequence
  SiRNA target sequence
aagccatttcaatgcagatt

SEQ ID NO: 212654 - DNA, 20 bp, Artificial sequence
  SiRNA target sequence
agccatttcaatgcagattg

SEQ ID NO: 212655 - DNA, 20 bp, Artificial sequence
  SiRNA target sequence
gccatttcaatgcagattga

SEQ ID NO: 212656 - DNA, 20 bp, Artificial sequence
  SiRNA target sequence
ccatttcaatgcagattgat

SEQ ID NO: 212657 - DNA, 20 bp, Artificial sequence
  SiRNA target sequence
catttcaatgcagattgatt

SEQ ID NO: 212658 - DNA, 20 bp, Artificial sequence
  SiRNA target sequence
atttcaatgcagattgattc

SEQ ID NO: 212659 - DNA, 20 bp, Artificial sequence
  SiRNA target sequence
tttcaatgcagattgattcg

SEQ ID NO: 212660 - DNA, 20 bp, Artificial sequence
  SiRNA target sequence
ttcaatgcagattgattcgt

SEQ ID NO: 212661 - DNA, 20 bp, Artificial sequence
  SiRNA target sequence
tcaatgcagattgattcgtc

SEQ ID NO: 212662 - DNA, 20 bp, Artificial sequence
  SiRNA target sequence
caatgcagattgattcgtca

SEQ ID NO: 212663 - DNA, 20 bp, Artificial sequence
  SiRNA target sequence
aatgcagattgattcgtcat

SEQ ID NO: 212664 - DNA, 20 bp, Artificial sequence
  SiRNA target sequence
atgcagattgattcgtcatt

SEQ ID NO: 212665 - DNA, 20 bp, Artificial sequence
  SiRNA target sequence
tgcagattgattcgtcattg

SEQ ID NO: 212666 - DNA, 20 bp, Artificial sequence
  SiRNA target sequence
gcagattgattcgtcattgc

SEQ ID NO: 212667 - DNA, 20 bp, Artificial sequence
  SiRNA target sequence
cagattgattcgtcattgcg

SEQ ID NO: 212668 - DNA, 20 bp, Artificial sequence
  SiRNA target sequence
agattgattcgtcattgcgt

SEQ ID NO: 212669 - DNA, 20 bp, Artificial sequence
  SiRNA target sequence
gattgattcgtcattgcgtg

SEQ ID NO: 212670 - DNA, 20 bp, Artificial sequence
  SiRNA target sequence
attgattcgtcattgcgtgc

SEQ ID NO: 212671 - DNA, 20 bp, Artificial sequence
  SiRNA target sequence
ttgattcgtcattgcgtgca

SEQ ID NO: 212672 - DNA, 20 bp, Artificial sequence
  SiRNA target sequence
tgattcgtcattgcgtgcac

SEQ ID NO: 212673 - DNA, 20 bp, Artificial sequence
  SiRNA target sequence
gattcgtcattgcgtgcacg

SEQ ID NO: 212674 - DNA, 20 bp, Artificial sequence
  SiRNA target sequence
attcgtcattgcgtgcacgt

SEQ ID NO: 212675 - DNA, 20 bp, Artificial sequence
  SiRNA target sequence
ttcgtcattgcgtgcacgtt

SEQ ID NO: 212676 - DNA, 20 bp, Artificial sequence
  SiRNA target sequence
tcgtcattgcgtgcacgtta

SEQ ID NO: 212677 - DNA, 20 bp, Artificial sequence
  SiRNA target sequence
cgtcattgcgtgcacgttat

SEQ ID NO: 212678 - DNA, 20 bp, Artificial sequence
  SiRNA target sequence
gtcattgcgtgcacgttata

SEQ ID NO: 212679 - DNA, 20 bp, Artificial sequence
  SiRNA target sequence
tcattgcgtgcacgttataa

SEQ ID NO: 212680 - DNA, 20 bp, Artificial sequence
  SiRNA target sequence
cattgcgtgcacgttataaa

SEQ ID NO: 212681 - DNA, 20 bp, Artificial sequence
  SiRNA target sequence
attgcgtgcacgttataaag

SEQ ID NO: 212682 - DNA, 20 bp, Artificial sequence
  SiRNA target sequence
ttgcgtgcacgttataaagg

SEQ ID NO: 212683 - DNA, 20 bp, Artificial sequence
  SiRNA target sequence
tgcgtgcacgttataaagga

SEQ ID NO: 212684 - DNA, 20 bp, Artificial sequence
  SiRNA target sequence
gcgtgcacgttataaaggaa

SEQ ID NO: 212685 - DNA, 20 bp, Artificial sequence
  SiRNA target sequence
cgtgcacgttataaaggaat

SEQ ID NO: 212686 - DNA, 20 bp, Artificial sequence
  SiRNA target sequence
gtgcacgttataaaggaatt

SEQ ID NO: 212687 - DNA, 20 bp, Artificial sequence
  SiRNA target sequence
tgcacgttataaaggaattt

SEQ ID NO: 212688 - DNA, 20 bp, Artificial sequence
  SiRNA target sequence
gcacgttataaaggaatttt

SEQ ID NO: 212689 - DNA, 20 bp, Artificial sequence
  SiRNA target sequence
cacgttataaaggaattttt

SEQ ID NO: 212690 - DNA, 20 bp, Artificial sequence
  SiRNA target sequence
acgttataaaggaatttttg

SEQ ID NO: 212691 - DNA, 20 bp, Artificial sequence
  SiRNA target sequence
cgttataaaggaatttttga

SEQ ID NO: 212692 - DNA, 20 bp, Artificial sequence
  SiRNA target sequence
gttataaaggaatttttgac

SEQ ID NO: 212693 - DNA, 20 bp, Artificial sequence
  SiRNA target sequence
ttataaaggaatttttgacg

SEQ ID NO: 212694 - DNA, 20 bp, Artificial sequence
  SiRNA target sequence
tataaaggaatttttgacgg

SEQ ID NO: 212695 - DNA, 20 bp, Artificial sequence
  SiRNA target sequence
ataaaggaatttttgacggt

SEQ ID NO: 212696 - DNA, 20 bp, Artificial sequence
  SiRNA target sequence
taaaggaatttttgacggtg

SEQ ID NO: 212697 - DNA, 20 bp, Artificial sequence
  SiRNA target sequence
aaaggaatttttgacggtgt

SEQ ID NO: 212698 - DNA, 20 bp, Artificial sequence
  SiRNA target sequence
aaggaatttttgacggtgtt

SEQ ID NO: 212699 - DNA, 20 bp, Artificial sequence
  SiRNA target sequence
aggaatttttgacggtgttt

SEQ ID NO: 212700 - DNA, 20 bp, Artificial sequence
  SiRNA target sequence
ggaatttttgacggtgtttt

SEQ ID NO: 212701 - DNA, 20 bp, Artificial sequence
  SiRNA target sequence
gaatttttgacggtgttttt

SEQ ID NO: 212702 - DNA, 20 bp, Artificial sequence
  SiRNA target sequence
aatttttgacggtgtttttg

SEQ ID NO: 212703 - DNA, 20 bp, Artificial sequence
  SiRNA target sequence
atttttgacggtgtttttgg

SEQ ID NO: 212704 - DNA, 20 bp, Artificial sequence
  SiRNA target sequence
tttttgacggtgtttttggt

SEQ ID NO: 212705 - DNA, 20 bp, Artificial sequence
  SiRNA target sequence
ttttgacggtgtttttggta

SEQ ID NO: 212706 - DNA, 20 bp, Artificial sequence
  SiRNA target sequence
tttgacggtgtttttggtaa

SEQ ID NO: 212707 - DNA, 20 bp, Artificial sequence
  SiRNA target sequence
ttgacggtgtttttggtaag

SEQ ID NO: 212708 - DNA, 20 bp, Artificial sequence
  SiRNA target sequence
tgacggtgtttttggtaagt

SEQ ID NO: 212709 - DNA, 20 bp, Artificial sequence
  SiRNA target sequence
gacggtgtttttggtaagtt

SEQ ID NO: 212710 - DNA, 20 bp, Artificial sequence
  SiRNA target sequence
acggtgtttttggtaagtta

SEQ ID NO: 212711 - DNA, 20 bp, Artificial sequence
  SiRNA target sequence
cggtgtttttggtaagttag

SEQ ID NO: 212712 - DNA, 20 bp, Artificial sequence
  SiRNA target sequence
ggtgtttttggtaagttagg

SEQ ID NO: 212713 - DNA, 20 bp, Artificial sequence
  SiRNA target sequence
gtgtttttggtaagttagga

SEQ ID NO: 212714 - DNA, 20 bp, Artificial sequence
  SiRNA target sequence
tgtttttggtaagttaggaa

SEQ ID NO: 212715 - DNA, 20 bp, Artificial sequence
  SiRNA target sequence
gtttttggtaagttaggaaa

SEQ ID NO: 212716 - DNA, 20 bp, Artificial sequence
  SiRNA target sequence
tttttggtaagttaggaaaa

SEQ ID NO: 212717 - DNA, 20 bp, Artificial sequence
  SiRNA target sequence
ttttggtaagttaggaaaat

SEQ ID NO: 212718 - DNA, 20 bp, Artificial sequence
  SiRNA target sequence
tttggtaagttaggaaaatc

SEQ ID NO: 212719 - DNA, 20 bp, Artificial sequence
  SiRNA target sequence
ttggtaagttaggaaaatct

SEQ ID NO: 212720 - DNA, 20 bp, Artificial sequence
  SiRNA target sequence
tggtaagttaggaaaatctc

SEQ ID NO: 212721 - DNA, 20 bp, Artificial sequence
  SiRNA target sequence
ggtaagttaggaaaatctct

SEQ ID NO: 212722 - DNA, 20 bp, Artificial sequence
  SiRNA target sequence
gtaagttaggaaaatctctt

SEQ ID NO: 212723 - DNA, 20 bp, Artificial sequence
  SiRNA target sequence
taagttaggaaaatctcttg

SEQ ID NO: 212724 - DNA, 20 bp, Artificial sequence
  SiRNA target sequence
aagttaggaaaatctcttgg

SEQ ID NO: 212725 - DNA, 20 bp, Artificial sequence
  SiRNA target sequence
agttaggaaaatctcttgga

SEQ ID NO: 212726 - DNA, 20 bp, Artificial sequence
  SiRNA target sequence
gttaggaaaatctcttggat

SEQ ID NO: 212727 - DNA, 20 bp, Artificial sequence
  SiRNA target sequence
ttaggaaaatctcttggatc

SEQ ID NO: 212728 - DNA, 20 bp, Artificial sequence
  SiRNA target sequence
taggaaaatctcttggatcg

SEQ ID NO: 212729 - DNA, 20 bp, Artificial sequence
  SiRNA target sequence
aggaaaatctcttggatcgt

SEQ ID NO: 212730 - DNA, 20 bp, Artificial sequence
  SiRNA target sequence
ggaaaatctcttggatcgtt

SEQ ID NO: 212731 - DNA, 20 bp, Artificial sequence
  SiRNA target sequence
gaaaatctcttggatcgtta

SEQ ID NO: 212732 - DNA, 20 bp, Artificial sequence
  SiRNA target sequence
aaaatctcttggatcgttat

SEQ ID NO: 212733 - DNA, 20 bp, Artificial sequence
  SiRNA target sequence
aaatctcttggatcgttatt

SEQ ID NO: 212734 - DNA, 20 bp, Artificial sequence
  SiRNA target sequence
aatctcttggatcgttattt

SEQ ID NO: 212735 - DNA, 20 bp, Artificial sequence
  SiRNA target sequence
atctcttggatcgttatttg

SEQ ID NO: 212736 - DNA, 20 bp, Artificial sequence
  SiRNA target sequence
tctcttggatcgttatttgt

SEQ ID NO: 212737 - DNA, 20 bp, Artificial sequence
  SiRNA target sequence
ctcttggatcgttatttgtg

SEQ ID NO: 212738 - DNA, 20 bp, Artificial sequence
  SiRNA target sequence
tcttggatcgttatttgtgt

SEQ ID NO: 212739 - DNA, 20 bp, Artificial sequence
  SiRNA target sequence
cttggatcgttatttgtgtg

SEQ ID NO: 212740 - DNA, 20 bp, Artificial sequence
  SiRNA target sequence
ttggatcgttatttgtgtgg

SEQ ID NO: 212741 - DNA, 20 bp, Artificial sequence
  SiRNA target sequence
tggatcgttatttgtgtgga

SEQ ID NO: 212742 - DNA, 20 bp, Artificial sequence
  SiRNA target sequence
ggatcgttatttgtgtggat

SEQ ID NO: 212743 - DNA, 20 bp, Artificial sequence
  SiRNA target sequence
gatcgttatttgtgtggatt

SEQ ID NO: 212744 - DNA, 20 bp, Artificial sequence
  SiRNA target sequence
atcgttatttgtgtggatta

SEQ ID NO: 212745 - DNA, 20 bp, Artificial sequence
  SiRNA target sequence
tcgttatttgtgtggattat

SEQ ID NO: 212746 - DNA, 20 bp, Artificial sequence
  SiRNA target sequence
cgttatttgtgtggattatg

SEQ ID NO: 212747 - DNA, 20 bp, Artificial sequence
  SiRNA target sequence
gttatttgtgtggattatgg

SEQ ID NO: 212748 - DNA, 20 bp, Artificial sequence
  SiRNA target sequence
ttatttgtgtggattatggg

SEQ ID NO: 212749 - DNA, 20 bp, Artificial sequence
  SiRNA target sequence
tatttgtgtggattatggga

SEQ ID NO: 212750 - DNA, 20 bp, Artificial sequence
  SiRNA target sequence
atttgtgtggattatgggat

SEQ ID NO: 212751 - DNA, 20 bp, Artificial sequence
  SiRNA target sequence
tttgtgtggattatgggata

SEQ ID NO: 212752 - DNA, 20 bp, Artificial sequence
  SiRNA target sequence
ttgtgtggattatgggatat

SEQ ID NO: 212753 - DNA, 20 bp, Artificial sequence
  SiRNA target sequence
tgtgtggattatgggatatg

SEQ ID NO: 212754 - DNA, 20 bp, Artificial sequence
  SiRNA target sequence
gtgtggattatgggatatgc

SEQ ID NO: 212755 - DNA, 20 bp, Artificial sequence
  SiRNA target sequence
tgtggattatgggatatgca

SEQ ID NO: 212756 - DNA, 20 bp, Artificial sequence
  SiRNA target sequence
gtggattatgggatatgcat

SEQ ID NO: 212757 - DNA, 20 bp, Artificial sequence
  SiRNA target sequence
tggattatgggatatgcatt

SEQ ID NO: 212758 - DNA, 20 bp, Artificial sequence
  SiRNA target sequence
ggattatgggatatgcattt

SEQ ID NO: 212759 - DNA, 20 bp, Artificial sequence
  SiRNA target sequence
gattatgggatatgcatttc

SEQ ID NO: 212760 - DNA, 20 bp, Artificial sequence
  SiRNA target sequence
attatgggatatgcatttca

SEQ ID NO: 212761 - DNA, 20 bp, Artificial sequence
  SiRNA target sequence
ttatgggatatgcatttcaa

SEQ ID NO: 212762 - DNA, 20 bp, Artificial sequence
  SiRNA target sequence
tatgggatatgcatttcaaa

SEQ ID NO: 212763 - DNA, 20 bp, Artificial sequence
  SiRNA target sequence
atgggatatgcatttcaaac

SEQ ID NO: 212764 - DNA, 20 bp, Artificial sequence
  SiRNA target sequence
tgggatatgcatttcaaaca

SEQ ID NO: 212765 - DNA, 20 bp, Artificial sequence
  SiRNA target sequence
gggatatgcatttcaaacaa

SEQ ID NO: 212766 - DNA, 20 bp, Artificial sequence
  SiRNA target sequence
ggatatgcatttcaaacaag

SEQ ID NO: 212767 - DNA, 20 bp, Artificial sequence
  SiRNA target sequence
gatatgcatttcaaacaaga

SEQ ID NO: 212768 - DNA, 20 bp, Artificial sequence
  SiRNA target sequence
atatgcatttcaaacaagag

SEQ ID NO: 212769 - DNA, 20 bp, Artificial sequence
  SiRNA target sequence
tatgcatttcaaacaagaga

SEQ ID NO: 212770 - DNA, 20 bp, Artificial sequence
  SiRNA target sequence
atgcatttcaaacaagagat

SEQ ID NO: 212771 - DNA, 20 bp, Artificial sequence
  SiRNA target sequence
tgcatttcaaacaagagatt

SEQ ID NO: 212772 - DNA, 20 bp, Artificial sequence
  SiRNA target sequence
gcatttcaaacaagagattt

SEQ ID NO: 212773 - DNA, 20 bp, Artificial sequence
  SiRNA target sequence
catttcaaacaagagatttt

SEQ ID NO: 212774 - DNA, 20 bp, Artificial sequence
  SiRNA target sequence
atttcaaacaagagatttta

SEQ ID NO: 212775 - DNA, 20 bp, Artificial sequence
  SiRNA target sequence
tttcaaacaagagattttag

SEQ ID NO: 212776 - DNA, 20 bp, Artificial sequence
  SiRNA target sequence
ttcaaacaagagattttaga

SEQ ID NO: 212777 - DNA, 20 bp, Artificial sequence
  SiRNA target sequence
tcaaacaagagattttagaa

SEQ ID NO: 212778 - DNA, 20 bp, Artificial sequence
  SiRNA target sequence
caaacaagagattttagaaa

SEQ ID NO: 212779 - DNA, 20 bp, Artificial sequence
  SiRNA target sequence
aaacaagagattttagaaaa

SEQ ID NO: 212780 - DNA, 20 bp, Artificial sequence
  SiRNA target sequence
aacaagagattttagaaaat

SEQ ID NO: 212781 - DNA, 20 bp, Artificial sequence
  SiRNA target sequence
acaagagattttagaaaatt

SEQ ID NO: 212782 - DNA, 20 bp, Artificial sequence
  SiRNA target sequence
caagagattttagaaaatta

SEQ ID NO: 212783 - DNA, 20 bp, Artificial sequence
  SiRNA target sequence
aagagattttagaaaattag

SEQ ID NO: 212784 - DNA, 20 bp, Artificial sequence
  SiRNA target sequence
agagattttagaaaattagc

SEQ ID NO: 212785 - DNA, 20 bp, Artificial sequence
  SiRNA target sequence
gagattttagaaaattagct

SEQ ID NO: 212786 - DNA, 20 bp, Artificial sequence
  SiRNA target sequence
agattttagaaaattagctc

SEQ ID NO: 212787 - DNA, 20 bp, Artificial sequence
  SiRNA target sequence
gattttagaaaattagctcc

SEQ ID NO: 212788 - DNA, 20 bp, Artificial sequence
  SiRNA target sequence
attttagaaaattagctccc

SEQ ID NO: 212789 - DNA, 20 bp, Artificial sequence
  SiRNA target sequence
ttttagaaaattagctccct

SEQ ID NO: 212790 - DNA, 20 bp, Artificial sequence
  SiRNA target sequence
tttagaaaattagctccctt

SEQ ID NO: 212791 - DNA, 20 bp, Artificial sequence
  SiRNA target sequence
ttagaaaattagctccctta

SEQ ID NO: 212792 - DNA, 20 bp, Artificial sequence
  SiRNA target sequence
tagaaaattagctcccttat

SEQ ID NO: 212793 - DNA, 20 bp, Artificial sequence
  SiRNA target sequence
agaaaattagctcccttatg

SEQ ID NO: 212794 - DNA, 20 bp, Artificial sequence
  SiRNA target sequence
gaaaattagctcccttatgt

SEQ ID NO: 212795 - DNA, 20 bp, Artificial sequence
  SiRNA target sequence
aaaattagctcccttatgta

SEQ ID NO: 212796 - DNA, 20 bp, Artificial sequence
  SiRNA target sequence
aaattagctcccttatgtat

SEQ ID NO: 212797 - DNA, 20 bp, Artificial sequence
  SiRNA target sequence
aattagctcccttatgtatc

SEQ ID NO: 212798 - DNA, 20 bp, Artificial sequence
  SiRNA target sequence
attagctcccttatgtatca

SEQ ID NO: 212799 - DNA, 20 bp, Artificial sequence
  SiRNA target sequence
ttagctcccttatgtatcag

SEQ ID NO: 212800 - DNA, 20 bp, Artificial sequence
  SiRNA target sequence
tagctcccttatgtatcagc

SEQ ID NO: 212801 - DNA, 20 bp, Artificial sequence
  SiRNA target sequence
agctcccttatgtatcagcg

SEQ ID NO: 212802 - DNA, 20 bp, Artificial sequence
  SiRNA target sequence
gctcccttatgtatcagcgt

SEQ ID NO: 212803 - DNA, 20 bp, Artificial sequence
  SiRNA target sequence
ctcccttatgtatcagcgta

SEQ ID NO: 212804 - DNA, 20 bp, Artificial sequence
  SiRNA target sequence
tcccttatgtatcagcgtaa

SEQ ID NO: 212805 - DNA, 20 bp, Artificial sequence
  SiRNA target sequence
cccttatgtatcagcgtaat

SEQ ID NO: 212806 - DNA, 20 bp, Artificial sequence
  SiRNA target sequence
ccttatgtatcagcgtaatt

SEQ ID NO: 212807 - DNA, 20 bp, Artificial sequence
  SiRNA target sequence
cttatgtatcagcgtaattg

SEQ ID NO: 212808 - DNA, 20 bp, Artificial sequence
  SiRNA target sequence
ttatgtatcagcgtaattgt

SEQ ID NO: 212809 - DNA, 20 bp, Artificial sequence
  SiRNA target sequence
tatgtatcagcgtaattgtc

SEQ ID NO: 212810 - DNA, 20 bp, Artificial sequence
  SiRNA target sequence
atgtatcagcgtaattgtct

SEQ ID NO: 212811 - DNA, 20 bp, Artificial sequence
  SiRNA target sequence
tgtatcagcgtaattgtctt

SEQ ID NO: 212812 - DNA, 20 bp, Artificial sequence
  SiRNA target sequence
gtatcagcgtaattgtcttt

SEQ ID NO: 212813 - DNA, 20 bp, Artificial sequence
  SiRNA target sequence
tatcagcgtaattgtctttt

SEQ ID NO: 212814 - DNA, 20 bp, Artificial sequence
  SiRNA target sequence
atcagcgtaattgtcttttt

SEQ ID NO: 212815 - DNA, 20 bp, Artificial sequence
  SiRNA target sequence
tcagcgtaattgtctttttt

SEQ ID NO: 212816 - DNA, 20 bp, Artificial sequence
  SiRNA target sequence
cagcgtaattgtcttttttg

SEQ ID NO: 212817 - DNA, 20 bp, Artificial sequence
  SiRNA target sequence
agcgtaattgtcttttttgt

SEQ ID NO: 212818 - DNA, 20 bp, Artificial sequence
  SiRNA target sequence
gcgtaattgtcttttttgtt

SEQ ID NO: 212819 - DNA, 20 bp, Artificial sequence
  SiRNA target sequence
cgtaattgtcttttttgtta

SEQ ID NO: 212820 - DNA, 20 bp, Artificial sequence
  SiRNA target sequence
gtaattgtcttttttgttat

SEQ ID NO: 212821 - DNA, 20 bp, Artificial sequence
  SiRNA target sequence
taattgtcttttttgttatt

SEQ ID NO: 212822 - DNA, 20 bp, Artificial sequence
  SiRNA target sequence
aattgtcttttttgttatta

SEQ ID NO: 212823 - DNA, 20 bp, Artificial sequence
  SiRNA target sequence
attgtcttttttgttattat

SEQ ID NO: 212824 - DNA, 20 bp, Artificial sequence
  SiRNA target sequence
ttgtcttttttgttattatt

SEQ ID NO: 212825 - DNA, 20 bp, Artificial sequence
  SiRNA target sequence
tgtcttttttgttattattt

SEQ ID NO: 212826 - DNA, 20 bp, Artificial sequence
  SiRNA target sequence
gtcttttttgttattatttg

SEQ ID NO: 212827 - DNA, 20 bp, Artificial sequence
  SiRNA target sequence
tcttttttgttattatttgg

SEQ ID NO: 212828 - DNA, 20 bp, Artificial sequence
  SiRNA target sequence
cttttttgttattatttgga

SEQ ID NO: 212829 - DNA, 20 bp, Artificial sequence
  SiRNA target sequence
ttttttgttattatttggat

SEQ ID NO: 212830 - DNA, 20 bp, Artificial sequence
  SiRNA target sequence
tttttgttattatttggatt

SEQ ID NO: 212831 - DNA, 20 bp, Artificial sequence
  SiRNA target sequence
ttttgttattatttggattt

SEQ ID NO: 212832 - DNA, 20 bp, Artificial sequence
  SiRNA target sequence
tttgttattatttggattta

SEQ ID NO: 212833 - DNA, 20 bp, Artificial sequence
  SiRNA target sequence
ttgttattatttggatttat

SEQ ID NO: 212834 - DNA, 20 bp, Artificial sequence
  SiRNA target sequence
tgttattatttggatttatt

SEQ ID NO: 212835 - DNA, 20 bp, Artificial sequence
  SiRNA target sequence
gttattatttggatttattc

SEQ ID NO: 212836 - DNA, 20 bp, Artificial sequence
  SiRNA target sequence
ttattatttggatttattca

SEQ ID NO: 212837 - DNA, 20 bp, Artificial sequence
  SiRNA target sequence
tattatttggatttattcag

SEQ ID NO: 212838 - DNA, 20 bp, Artificial sequence
  SiRNA target sequence
attatttggatttattcagt

SEQ ID NO: 212839 - DNA, 20 bp, Artificial sequence
  SiRNA target sequence
ttatttggatttattcagtt

SEQ ID NO: 212840 - DNA, 20 bp, Artificial sequence
  SiRNA target sequence
tatttggatttattcagtta

SEQ ID NO: 212841 - DNA, 20 bp, Artificial sequence
  SiRNA target sequence
atttggatttattcagttat

SEQ ID NO: 212842 - DNA, 20 bp, Artificial sequence
  SiRNA target sequence
tttggatttattcagttatt

SEQ ID NO: 212843 - DNA, 20 bp, Artificial sequence
  SiRNA target sequence
ttggatttattcagttattt

SEQ ID NO: 212844 - DNA, 20 bp, Artificial sequence
  SiRNA target sequence
tggatttattcagttattta

SEQ ID NO: 212845 - DNA, 20 bp, Artificial sequence
  SiRNA target sequence
ggatttattcagttatttat

SEQ ID NO: 212846 - DNA, 20 bp, Artificial sequence
  SiRNA target sequence
gatttattcagttatttatt

SEQ ID NO: 212847 - DNA, 20 bp, Artificial sequence
  SiRNA target sequence
atttattcagttatttattt

SEQ ID NO: 212848 - DNA, 20 bp, Artificial sequence
  SiRNA target sequence
tttattcagttatttattta

SEQ ID NO: 212849 - DNA, 20 bp, Artificial sequence
  SiRNA target sequence
ttattcagttatttatttaa

SEQ ID NO: 212850 - DNA, 20 bp, Artificial sequence
  SiRNA target sequence
tattcagttatttatttaaa

SEQ ID NO: 212851 - DNA, 20 bp, Artificial sequence
  SiRNA target sequence
attcagttatttatttaaat

SEQ ID NO: 212852 - DNA, 20 bp, Artificial sequence
  SiRNA target sequence
ttcagttatttatttaaata

SEQ ID NO: 212853 - DNA, 20 bp, Artificial sequence
  SiRNA target sequence
tcagttatttatttaaataa

SEQ ID NO: 212854 - DNA, 20 bp, Artificial sequence
  SiRNA target sequence
cagttatttatttaaataag

SEQ ID NO: 212855 - DNA, 20 bp, Artificial sequence
  SiRNA target sequence
agttatttatttaaataaga

SEQ ID NO: 212856 - DNA, 20 bp, Artificial sequence
  SiRNA target sequence
gttatttatttaaataagaa

SEQ ID NO: 212857 - DNA, 20 bp, Artificial sequence
  SiRNA target sequence
ttatttatttaaataagaaa

SEQ ID NO: 212858 - DNA, 20 bp, Artificial sequence
  SiRNA target sequence
tatttatttaaataagaaat

SEQ ID NO: 212859 - DNA, 20 bp, Artificial sequence
  SiRNA target sequence
atttatttaaataagaaata

SEQ ID NO: 212860 - DNA, 20 bp, Artificial sequence
  SiRNA target sequence
tttatttaaataagaaatac

SEQ ID NO: 212861 - DNA, 20 bp, Artificial sequence
  SiRNA target sequence
ttatttaaataagaaataca

SEQ ID NO: 212862 - DNA, 20 bp, Artificial sequence
  SiRNA target sequence
tatttaaataagaaatacaa

SEQ ID NO: 212863 - DNA, 20 bp, Artificial sequence
  SiRNA target sequence
atttaaataagaaatacaaa

SEQ ID NO: 212864 - DNA, 20 bp, Artificial sequence
  SiRNA target sequence
tttaaataagaaatacaaag

SEQ ID NO: 212865 - DNA, 20 bp, Artificial sequence
  SiRNA target sequence
ttaaataagaaatacaaaga

SEQ ID NO: 212866 - DNA, 20 bp, Artificial sequence
  SiRNA target sequence
taaataagaaatacaaagaa

SEQ ID NO: 212867 - DNA, 20 bp, Artificial sequence
  SiRNA target sequence
aaataagaaatacaaagaat

SEQ ID NO: 212868 - DNA, 20 bp, Artificial sequence
  SiRNA target sequence
aataagaaatacaaagaatc

SEQ ID NO: 212869 - DNA, 20 bp, Artificial sequence
  SiRNA target sequence
ataagaaatacaaagaatca

SEQ ID NO: 212870 - DNA, 20 bp, Artificial sequence
  SiRNA target sequence
taagaaatacaaagaatcag

SEQ ID NO: 212871 - DNA, 20 bp, Artificial sequence
  SiRNA target sequence
aagaaatacaaagaatcagt

SEQ ID NO: 212872 - DNA, 20 bp, Artificial sequence
  SiRNA target sequence
agaaatacaaagaatcagtt

SEQ ID NO: 212873 - DNA, 20 bp, Artificial sequence
  SiRNA target sequence
gaaatacaaagaatcagttg

SEQ ID NO: 212874 - DNA, 20 bp, Artificial sequence
  SiRNA target sequence
aaatacaaagaatcagttgt

SEQ ID NO: 212875 - DNA, 20 bp, Artificial sequence
  SiRNA target sequence
aatacaaagaatcagttgtt

SEQ ID NO: 212876 - DNA, 20 bp, Artificial sequence
  SiRNA target sequence
atacaaagaatcagttgtta

SEQ ID NO: 212877 - DNA, 20 bp, Artificial sequence
  SiRNA target sequence
tacaaagaatcagttgttag

SEQ ID NO: 212878 - DNA, 20 bp, Artificial sequence
  SiRNA target sequence
acaaagaatcagttgttagt

SEQ ID NO: 212879 - DNA, 20 bp, Artificial sequence
  SiRNA target sequence
caaagaatcagttgttagta

SEQ ID NO: 212880 - DNA, 20 bp, Artificial sequence
  SiRNA target sequence
aaagaatcagttgttagtaa

SEQ ID NO: 212881 - DNA, 20 bp, Artificial sequence
  SiRNA target sequence
aagaatcagttgttagtaat

SEQ ID NO: 212882 - DNA, 20 bp, Artificial sequence
  SiRNA target sequence
agaatcagttgttagtaatt

SEQ ID NO: 212883 - DNA, 20 bp, Artificial sequence
  SiRNA target sequence
gaatcagttgttagtaattt

SEQ ID NO: 212884 - DNA, 20 bp, Artificial sequence
  SiRNA target sequence
aatcagttgttagtaattta

SEQ ID NO: 212885 - DNA, 20 bp, Artificial sequence
  SiRNA target sequence
atcagttgttagtaatttac

SEQ ID NO: 212886 - DNA, 20 bp, Artificial sequence
  SiRNA target sequence
tcagttgttagtaatttacc

SEQ ID NO: 212887 - DNA, 20 bp, Artificial sequence
  SiRNA target sequence
cagttgttagtaatttaccc

SEQ ID NO: 212888 - DNA, 20 bp, Artificial sequence
  SiRNA target sequence
agttgttagtaatttaccca

SEQ ID NO: 212889 - DNA, 20 bp, Artificial sequence
  SiRNA target sequence
gttgttagtaatttacccat

SEQ ID NO: 212890 - DNA, 20 bp, Artificial sequence
  SiRNA target sequence
ttgttagtaatttacccatc

SEQ ID NO: 212891 - DNA, 20 bp, Artificial sequence
  SiRNA target sequence
tgttagtaatttacccatcg

SEQ ID NO: 212892 - DNA, 20 bp, Artificial sequence
  SiRNA target sequence
gttagtaatttacccatcga

SEQ ID NO: 212893 - DNA, 20 bp, Artificial sequence
  SiRNA target sequence
ttagtaatttacccatcgat

SEQ ID NO: 212894 - DNA, 20 bp, Artificial sequence
  SiRNA target sequence
tagtaatttacccatcgatg

SEQ ID NO: 212895 - DNA, 20 bp, Artificial sequence
  SiRNA target sequence
agtaatttacccatcgatgt

SEQ ID NO: 212896 - DNA, 20 bp, Artificial sequence
  SiRNA target sequence
gtaatttacccatcgatgtt

SEQ ID NO: 212897 - DNA, 20 bp, Artificial sequence
  SiRNA target sequence
taatttacccatcgatgttg

SEQ ID NO: 212898 - DNA, 20 bp, Artificial sequence
  SiRNA target sequence
aatttacccatcgatgttga

SEQ ID NO: 212899 - DNA, 20 bp, Artificial sequence
  SiRNA target sequence
atttacccatcgatgttgat

SEQ ID NO: 212900 - DNA, 20 bp, Artificial sequence
  SiRNA target sequence
tttacccatcgatgttgatt

SEQ ID NO: 212901 - DNA, 20 bp, Artificial sequence
  SiRNA target sequence
ttacccatcgatgttgattt

SEQ ID NO: 212902 - DNA, 20 bp, Artificial sequence
  SiRNA target sequence
tacccatcgatgttgatttg

SEQ ID NO: 212903 - DNA, 20 bp, Artificial sequence
  SiRNA target sequence
acccatcgatgttgatttgt

SEQ ID NO: 212904 - DNA, 20 bp, Artificial sequence
  SiRNA target sequence
cccatcgatgttgatttgtt

SEQ ID NO: 212905 - DNA, 20 bp, Artificial sequence
  SiRNA target sequence
ccatcgatgttgatttgttt

SEQ ID NO: 212906 - DNA, 20 bp, Artificial sequence
  SiRNA target sequence
catcgatgttgatttgtttg

SEQ ID NO: 212907 - DNA, 20 bp, Artificial sequence
  SiRNA target sequence
atcgatgttgatttgtttgc

SEQ ID NO: 212908 - DNA, 20 bp, Artificial sequence
  SiRNA target sequence
tcgatgttgatttgtttgca

SEQ ID NO: 212909 - DNA, 20 bp, Artificial sequence
  SiRNA target sequence
cgatgttgatttgtttgcat

SEQ ID NO: 212910 - DNA, 20 bp, Artificial sequence
  SiRNA target sequence
gatgttgatttgtttgcatc

SEQ ID NO: 212911 - DNA, 20 bp, Artificial sequence
  SiRNA target sequence
atgttgatttgtttgcatca

SEQ ID NO: 212912 - DNA, 20 bp, Artificial sequence
  SiRNA target sequence
tgttgatttgtttgcatcaa

SEQ ID NO: 212913 - DNA, 20 bp, Artificial sequence
  SiRNA target sequence
gttgatttgtttgcatcaaa

SEQ ID NO: 212914 - DNA, 20 bp, Artificial sequence
  SiRNA target sequence
ttgatttgtttgcatcaaag

SEQ ID NO: 212915 - DNA, 20 bp, Artificial sequence
  SiRNA target sequence
tgatttgtttgcatcaaagt

SEQ ID NO: 212916 - DNA, 20 bp, Artificial sequence
  SiRNA target sequence
gatttgtttgcatcaaagtt

SEQ ID NO: 212917 - DNA, 20 bp, Artificial sequence
  SiRNA target sequence
atttgtttgcatcaaagttg

SEQ ID NO: 212918 - DNA, 20 bp, Artificial sequence
  SiRNA target sequence
tttgtttgcatcaaagttgt

SEQ ID NO: 212919 - DNA, 20 bp, Artificial sequence
  SiRNA target sequence
ttgtttgcatcaaagttgtt

SEQ ID NO: 212920 - DNA, 20 bp, Artificial sequence
  SiRNA target sequence
tgtttgcatcaaagttgtta

SEQ ID NO: 212921 - DNA, 20 bp, Artificial sequence
  SiRNA target sequence
gtttgcatcaaagttgttag

SEQ ID NO: 212922 - DNA, 20 bp, Artificial sequence
  SiRNA target sequence
tttgcatcaaagttgttaga

SEQ ID NO: 212923 - DNA, 20 bp, Artificial sequence
  SiRNA target sequence
ttgcatcaaagttgttagat

SEQ ID NO: 212924 - DNA, 20 bp, Artificial sequence
  SiRNA target sequence
tgcatcaaagttgttagata

SEQ ID NO: 212925 - DNA, 20 bp, Artificial sequence
  SiRNA target sequence
gcatcaaagttgttagataa

SEQ ID NO: 212926 - DNA, 20 bp, Artificial sequence
  SiRNA target sequence
catcaaagttgttagataat

SEQ ID NO: 212927 - DNA, 20 bp, Artificial sequence
  SiRNA target sequence
atcaaagttgttagataata

SEQ ID NO: 212928 - DNA, 20 bp, Artificial sequence
  SiRNA target sequence
tcaaagttgttagataataa

SEQ ID NO: 212929 - DNA, 20 bp, Artificial sequence
  SiRNA target sequence
caaagttgttagataataaa

SEQ ID NO: 212930 - DNA, 20 bp, Artificial sequence
  SiRNA target sequence
aaagttgttagataataaaa

SEQ ID NO: 212931 - DNA, 20 bp, Artificial sequence
  SiRNA target sequence
aagttgttagataataaaaa

SEQ ID NO: 212932 - DNA, 20 bp, Artificial sequence
  SiRNA target sequence
agttgttagataataaaaaa

SEQ ID NO: 212933 - DNA, 20 bp, Artificial sequence
  SiRNA target sequence
gttgttagataataaaaaag

SEQ ID NO: 212934 - DNA, 20 bp, Artificial sequence
  SiRNA target sequence
ttgttagataataaaaaaga

SEQ ID NO: 212935 - DNA, 20 bp, Artificial sequence
  SiRNA target sequence
tgttagataataaaaaagaa

SEQ ID NO: 212936 - DNA, 20 bp, Artificial sequence
  SiRNA target sequence
gttagataataaaaaagaag

SEQ ID NO: 212937 - DNA, 20 bp, Artificial sequence
  SiRNA target sequence
ttagataataaaaaagaaga

SEQ ID NO: 212938 - DNA, 20 bp, Artificial sequence
  SiRNA target sequence
tagataataaaaaagaagag

SEQ ID NO: 212939 - DNA, 20 bp, Artificial sequence
  SiRNA target sequence
agataataaaaaagaagagg

SEQ ID NO: 212940 - DNA, 20 bp, Artificial sequence
  SiRNA target sequence
gataataaaaaagaagagga

SEQ ID NO: 212941 - DNA, 20 bp, Artificial sequence
  SiRNA target sequence
ataataaaaaagaagaggaa

SEQ ID NO: 212942 - DNA, 20 bp, Artificial sequence
  SiRNA target sequence
taataaaaaagaagaggaaa

SEQ ID NO: 212943 - DNA, 20 bp, Artificial sequence
  SiRNA target sequence
aataaaaaagaagaggaaat

SEQ ID NO: 212944 - DNA, 20 bp, Artificial sequence
  SiRNA target sequence
ataaaaaagaagaggaaatt

SEQ ID NO: 212945 - DNA, 20 bp, Artificial sequence
  SiRNA target sequence
taaaaaagaagaggaaattg

SEQ ID NO: 212946 - DNA, 20 bp, Artificial sequence
  SiRNA target sequence
aaaaaagaagaggaaattga

SEQ ID NO: 212947 - DNA, 20 bp, Artificial sequence
  SiRNA target sequence
aaaaagaagaggaaattgat

SEQ ID NO: 212948 - DNA, 20 bp, Artificial sequence
  SiRNA target sequence
aaaagaagaggaaattgatg

SEQ ID NO: 212949 - DNA, 20 bp, Artificial sequence
  SiRNA target sequence
aaagaagaggaaattgatgt

SEQ ID NO: 212950 - DNA, 20 bp, Artificial sequence
  SiRNA target sequence
aagaagaggaaattgatgtg

SEQ ID NO: 212951 - DNA, 20 bp, Artificial sequence
  SiRNA target sequence
agaagaggaaattgatgtgt

SEQ ID NO: 212952 - DNA, 20 bp, Artificial sequence
  SiRNA target sequence
gaagaggaaattgatgtgtc

SEQ ID NO: 212953 - DNA, 20 bp, Artificial sequence
  SiRNA target sequence
aagaggaaattgatgtgtca

SEQ ID NO: 212954 - DNA, 20 bp, Artificial sequence
  SiRNA target sequence
agaggaaattgatgtgtcag

SEQ ID NO: 212955 - DNA, 20 bp, Artificial sequence
  SiRNA target sequence
gaggaaattgatgtgtcagt

SEQ ID NO: 212956 - DNA, 20 bp, Artificial sequence
  SiRNA target sequence
aggaaattgatgtgtcagtg

SEQ ID NO: 212957 - DNA, 20 bp, Artificial sequence
  SiRNA target sequence
ggaaattgatgtgtcagtgc

SEQ ID NO: 212958 - DNA, 20 bp, Artificial sequence
  SiRNA target sequence
gaaattgatgtgtcagtgct

SEQ ID NO: 212959 - DNA, 20 bp, Artificial sequence
  SiRNA target sequence
aaattgatgtgtcagtgctc

SEQ ID NO: 212960 - DNA, 20 bp, Artificial sequence
  SiRNA target sequence
aattgatgtgtcagtgctcg

SEQ ID NO: 212961 - DNA, 20 bp, Artificial sequence
  SiRNA target sequence
attgatgtgtcagtgctcgt

SEQ ID NO: 212962 - DNA, 20 bp, Artificial sequence
  SiRNA target sequence
ttgatgtgtcagtgctcgtt

SEQ ID NO: 212963 - DNA, 20 bp, Artificial sequence
  SiRNA target sequence
tgatgtgtcagtgctcgtta

SEQ ID NO: 212964 - DNA, 20 bp, Artificial sequence
  SiRNA target sequence
gatgtgtcagtgctcgttaa

SEQ ID NO: 212965 - DNA, 20 bp, Artificial sequence
  SiRNA target sequence
atgtgtcagtgctcgttaat

SEQ ID NO: 212966 - DNA, 20 bp, Artificial sequence
  SiRNA target sequence
tgtgtcagtgctcgttaatt

SEQ ID NO: 212967 - DNA, 20 bp, Artificial sequence
  SiRNA target sequence
gtgtcagtgctcgttaatta

SEQ ID NO: 212968 - DNA, 20 bp, Artificial sequence
  SiRNA target sequence
tgtcagtgctcgttaattaa

SEQ ID NO: 212969 - DNA, 21 bp, Artificial sequence
  SiRNA target sequence
atgattgagaggggtattatg

SEQ ID NO: 212970 - DNA, 21 bp, Artificial sequence
  SiRNA target sequence
tgattgagaggggtattatgg

SEQ ID NO: 212971 - DNA, 21 bp, Artificial sequence
  SiRNA target sequence
gattgagaggggtattatgga

SEQ ID NO: 212972 - DNA, 21 bp, Artificial sequence
  SiRNA target sequence
attgagaggggtattatggaa

SEQ ID NO: 212973 - DNA, 21 bp, Artificial sequence
  SiRNA target sequence
ttgagaggggtattatggaaa

SEQ ID NO: 212974 - DNA, 21 bp, Artificial sequence
  SiRNA target sequence
tgagaggggtattatggaaaa

SEQ ID NO: 212975 - DNA, 21 bp, Artificial sequence
  SiRNA target sequence
gagaggggtattatggaaaaa

SEQ ID NO: 212976 - DNA, 21 bp, Artificial sequence
  SiRNA target sequence
agaggggtattatggaaaaaa

SEQ ID NO: 212977 - DNA, 21 bp, Artificial sequence
  SiRNA target sequence
gaggggtattatggaaaaaat

SEQ ID NO: 212978 - DNA, 21 bp, Artificial sequence
  SiRNA target sequence
aggggtattatggaaaaaata

SEQ ID NO: 212979 - DNA, 21 bp, Artificial sequence
  SiRNA target sequence
ggggtattatggaaaaaataa

SEQ ID NO: 212980 - DNA, 21 bp, Artificial sequence
  SiRNA target sequence
gggtattatggaaaaaataaa

SEQ ID NO: 212981 - DNA, 21 bp, Artificial sequence
  SiRNA target sequence
ggtattatggaaaaaataaaa

SEQ ID NO: 212982 - DNA, 21 bp, Artificial sequence
  SiRNA target sequence
gtattatggaaaaaataaaaa

SEQ ID NO: 212983 - DNA, 21 bp, Artificial sequence
  SiRNA target sequence
tattatggaaaaaataaaaaa

SEQ ID NO: 212984 - DNA, 21 bp, Artificial sequence
  SiRNA target sequence
attatggaaaaaataaaaaat

SEQ ID NO: 212985 - DNA, 21 bp, Artificial sequence
  SiRNA target sequence
ttatggaaaaaataaaaaatt

SEQ ID NO: 212986 - DNA, 21 bp, Artificial sequence
  SiRNA target sequence
tatggaaaaaataaaaaattt

SEQ ID NO: 212987 - DNA, 21 bp, Artificial sequence
  SiRNA target sequence
atggaaaaaataaaaaattta

SEQ ID NO: 212988 - DNA, 21 bp, Artificial sequence
  SiRNA target sequence
tggaaaaaataaaaaatttat

SEQ ID NO: 212989 - DNA, 21 bp, Artificial sequence
  SiRNA target sequence
ggaaaaaataaaaaatttatt

SEQ ID NO: 212990 - DNA, 21 bp, Artificial sequence
  SiRNA target sequence
gaaaaaataaaaaatttatta

SEQ ID NO: 212991 - DNA, 21 bp, Artificial sequence
  SiRNA target sequence
aaaaaataaaaaatttattaa

SEQ ID NO: 212992 - DNA, 21 bp, Artificial sequence
  SiRNA target sequence
aaaaataaaaaatttattaac

SEQ ID NO: 212993 - DNA, 21 bp, Artificial sequence
  SiRNA target sequence
aaaataaaaaatttattaaca

SEQ ID NO: 212994 - DNA, 21 bp, Artificial sequence
  SiRNA target sequence
aaataaaaaatttattaacag

SEQ ID NO: 212995 - DNA, 21 bp, Artificial sequence
  SiRNA target sequence
aataaaaaatttattaacaga

SEQ ID NO: 212996 - DNA, 21 bp, Artificial sequence
  SiRNA target sequence
ataaaaaatttattaacagag

SEQ ID NO: 212997 - DNA, 21 bp, Artificial sequence
  SiRNA target sequence
taaaaaatttattaacagagg

SEQ ID NO: 212998 - DNA, 21 bp, Artificial sequence
  SiRNA target sequence
aaaaaatttattaacagagga

SEQ ID NO: 212999 - DNA, 21 bp, Artificial sequence
  SiRNA target sequence
aaaaatttattaacagaggat

SEQ ID NO: 213000 - DNA, 21 bp, Artificial sequence
  SiRNA target sequence
aaaatttattaacagaggatg

SEQ ID NO: 213001 - DNA, 21 bp, Artificial sequence
  SiRNA target sequence
aaatttattaacagaggatga

SEQ ID NO: 213002 - DNA, 21 bp, Artificial sequence
  SiRNA target sequence
aatttattaacagaggatgaa

SEQ ID NO: 213003 - DNA, 21 bp, Artificial sequence
  SiRNA target sequence
atttattaacagaggatgaag

SEQ ID NO: 213004 - DNA, 21 bp, Artificial sequence
  SiRNA target sequence
tttattaacagaggatgaagt

SEQ ID NO: 213005 - DNA, 21 bp, Artificial sequence
  SiRNA target sequence
ttattaacagaggatgaagta

SEQ ID NO: 213006 - DNA, 21 bp, Artificial sequence
  SiRNA target sequence
tattaacagaggatgaagtag

SEQ ID NO: 213007 - DNA, 21 bp, Artificial sequence
  SiRNA target sequence
attaacagaggatgaagtaga

SEQ ID NO: 213008 - DNA, 21 bp, Artificial sequence
  SiRNA target sequence
ttaacagaggatgaagtagaa

SEQ ID NO: 213009 - DNA, 21 bp, Artificial sequence
  SiRNA target sequence
taacagaggatgaagtagaag

SEQ ID NO: 213010 - DNA, 21 bp, Artificial sequence
  SiRNA target sequence
aacagaggatgaagtagaagc

SEQ ID NO: 213011 - DNA, 21 bp, Artificial sequence
  SiRNA target sequence
acagaggatgaagtagaagca

SEQ ID NO: 213012 - DNA, 21 bp, Artificial sequence
  SiRNA target sequence
cagaggatgaagtagaagcag

SEQ ID NO: 213013 - DNA, 21 bp, Artificial sequence
  SiRNA target sequence
agaggatgaagtagaagcaga

SEQ ID NO: 213014 - DNA, 21 bp, Artificial sequence
  SiRNA target sequence
gaggatgaagtagaagcagaa

SEQ ID NO: 213015 - DNA, 21 bp, Artificial sequence
  SiRNA target sequence
aggatgaagtagaagcagaag

SEQ ID NO: 213016 - DNA, 21 bp, Artificial sequence
  SiRNA target sequence
ggatgaagtagaagcagaagc

SEQ ID NO: 213017 - DNA, 21 bp, Artificial sequence
  SiRNA target sequence
gatgaagtagaagcagaagca

SEQ ID NO: 213018 - DNA, 21 bp, Artificial sequence
  SiRNA target sequence
atgaagtagaagcagaagcaa

SEQ ID NO: 213019 - DNA, 21 bp, Artificial sequence
  SiRNA target sequence
tgaagtagaagcagaagcaaa

SEQ ID NO: 213020 - DNA, 21 bp, Artificial sequence
  SiRNA target sequence
gaagtagaagcagaagcaaat

SEQ ID NO: 213021 - DNA, 21 bp, Artificial sequence
  SiRNA target sequence
aagtagaagcagaagcaaatt

SEQ ID NO: 213022 - DNA, 21 bp, Artificial sequence
  SiRNA target sequence
agtagaagcagaagcaaattc

SEQ ID NO: 213023 - DNA, 21 bp, Artificial sequence
  SiRNA target sequence
gtagaagcagaagcaaattct

SEQ ID NO: 213024 - DNA, 21 bp, Artificial sequence
  SiRNA target sequence
tagaagcagaagcaaattctg

SEQ ID NO: 213025 - DNA, 21 bp, Artificial sequence
  SiRNA target sequence
agaagcagaagcaaattctgg

SEQ ID NO: 213026 - DNA, 21 bp, Artificial sequence
  SiRNA target sequence
gaagcagaagcaaattctgga

SEQ ID NO: 213027 - DNA, 21 bp, Artificial sequence
  SiRNA target sequence
aagcagaagcaaattctggaa

SEQ ID NO: 213028 - DNA, 21 bp, Artificial sequence
  SiRNA target sequence
agcagaagcaaattctggaag

SEQ ID NO: 213029 - DNA, 21 bp, Artificial sequence
  SiRNA target sequence
gcagaagcaaattctggaagg

SEQ ID NO: 213030 - DNA, 21 bp, Artificial sequence
  SiRNA target sequence
cagaagcaaattctggaaggg

SEQ ID NO: 213031 - DNA, 21 bp, Artificial sequence
  SiRNA target sequence
agaagcaaattctggaagggg

SEQ ID NO: 213032 - DNA, 21 bp, Artificial sequence
  SiRNA target sequence
gaagcaaattctggaaggggc

SEQ ID NO: 213033 - DNA, 21 bp, Artificial sequence
  SiRNA target sequence
aagcaaattctggaaggggca

SEQ ID NO: 213034 - DNA, 21 bp, Artificial sequence
  SiRNA target sequence
agcaaattctggaaggggcat

SEQ ID NO: 213035 - DNA, 21 bp, Artificial sequence
  SiRNA target sequence
gcaaattctggaaggggcatt

SEQ ID NO: 213036 - DNA, 21 bp, Artificial sequence
  SiRNA target sequence
caaattctggaaggggcattt

SEQ ID NO: 213037 - DNA, 21 bp, Artificial sequence
  SiRNA target sequence
aaattctggaaggggcatttt

SEQ ID NO: 213038 - DNA, 21 bp, Artificial sequence
  SiRNA target sequence
aattctggaaggggcatttta

SEQ ID NO: 213039 - DNA, 21 bp, Artificial sequence
  SiRNA target sequence
attctggaaggggcattttat

SEQ ID NO: 213040 - DNA, 21 bp, Artificial sequence
  SiRNA target sequence
ttctggaaggggcattttatc

SEQ ID NO: 213041 - DNA, 21 bp, Artificial sequence
  SiRNA target sequence
tctggaaggggcattttatca

SEQ ID NO: 213042 - DNA, 21 bp, Artificial sequence
  SiRNA target sequence
ctggaaggggcattttatcaa

SEQ ID NO: 213043 - DNA, 21 bp, Artificial sequence
  SiRNA target sequence
tggaaggggcattttatcaat

SEQ ID NO: 213044 - DNA, 21 bp, Artificial sequence
  SiRNA target sequence
ggaaggggcattttatcaata

SEQ ID NO: 213045 - DNA, 21 bp, Artificial sequence
  SiRNA target sequence
gaaggggcattttatcaatat

SEQ ID NO: 213046 - DNA, 21 bp, Artificial sequence
  SiRNA target sequence
aaggggcattttatcaatatt

SEQ ID NO: 213047 - DNA, 21 bp, Artificial sequence
  SiRNA target sequence
aggggcattttatcaatattt

SEQ ID NO: 213048 - DNA, 21 bp, Artificial sequence
  SiRNA target sequence
ggggcattttatcaatattta

SEQ ID NO: 213049 - DNA, 21 bp, Artificial sequence
  SiRNA target sequence
gggcattttatcaatatttag

SEQ ID NO: 213050 - DNA, 21 bp, Artificial sequence
  SiRNA target sequence
ggcattttatcaatatttaga

SEQ ID NO: 213051 - DNA, 21 bp, Artificial sequence
  SiRNA target sequence
gcattttatcaatatttagaa

SEQ ID NO: 213052 - DNA, 21 bp, Artificial sequence
  SiRNA target sequence
cattttatcaatatttagaat

SEQ ID NO: 213053 - DNA, 21 bp, Artificial sequence
  SiRNA target sequence
attttatcaatatttagaatt

SEQ ID NO: 213054 - DNA, 21 bp, Artificial sequence
  SiRNA target sequence
ttttatcaatatttagaattg

SEQ ID NO: 213055 - DNA, 21 bp, Artificial sequence
  SiRNA target sequence
tttatcaatatttagaattgc

SEQ ID NO: 213056 - DNA, 21 bp, Artificial sequence
  SiRNA target sequence
ttatcaatatttagaattgct

SEQ ID NO: 213057 - DNA, 21 bp, Artificial sequence
  SiRNA target sequence
tatcaatatttagaattgcta

SEQ ID NO: 213058 - DNA, 21 bp, Artificial sequence
  SiRNA target sequence
atcaatatttagaattgctaa

SEQ ID NO: 213059 - DNA, 21 bp, Artificial sequence
  SiRNA target sequence
tcaatatttagaattgctaag

SEQ ID NO: 213060 - DNA, 21 bp, Artificial sequence
  SiRNA target sequence
caatatttagaattgctaagg

SEQ ID NO: 213061 - DNA, 21 bp, Artificial sequence
  SiRNA target sequence
aatatttagaattgctaaggt

SEQ ID NO: 213062 - DNA, 21 bp, Artificial sequence
  SiRNA target sequence
atatttagaattgctaaggta

SEQ ID NO: 213063 - DNA, 21 bp, Artificial sequence
  SiRNA target sequence
tatttagaattgctaaggtag

SEQ ID NO: 213064 - DNA, 21 bp, Artificial sequence
  SiRNA target sequence
atttagaattgctaaggtaga

SEQ ID NO: 213065 - DNA, 21 bp, Artificial sequence
  SiRNA target sequence
tttagaattgctaaggtagaa

SEQ ID NO: 213066 - DNA, 21 bp, Artificial sequence
  SiRNA target sequence
ttagaattgctaaggtagaaa

SEQ ID NO: 213067 - DNA, 21 bp, Artificial sequence
  SiRNA target sequence
tagaattgctaaggtagaaag

SEQ ID NO: 213068 - DNA, 21 bp, Artificial sequence
  SiRNA target sequence
agaattgctaaggtagaaaga

SEQ ID NO: 213069 - DNA, 21 bp, Artificial sequence
  SiRNA target sequence
gaattgctaaggtagaaagaa

SEQ ID NO: 213070 - DNA, 21 bp, Artificial sequence
  SiRNA target sequence
aattgctaaggtagaaagaag

SEQ ID NO: 213071 - DNA, 21 bp, Artificial sequence
  SiRNA target sequence
attgctaaggtagaaagaaga

SEQ ID NO: 213072 - DNA, 21 bp, Artificial sequence
  SiRNA target sequence
ttgctaaggtagaaagaagaa

SEQ ID NO: 213073 - DNA, 21 bp, Artificial sequence
  SiRNA target sequence
tgctaaggtagaaagaagaat

SEQ ID NO: 213074 - DNA, 21 bp, Artificial sequence
  SiRNA target sequence
gctaaggtagaaagaagaatg

SEQ ID NO: 213075 - DNA, 21 bp, Artificial sequence
  SiRNA target sequence
ctaaggtagaaagaagaatgt

SEQ ID NO: 213076 - DNA, 21 bp, Artificial sequence
  SiRNA target sequence
taaggtagaaagaagaatgtt

SEQ ID NO: 213077 - DNA, 21 bp, Artificial sequence
  SiRNA target sequence
aaggtagaaagaagaatgttt

SEQ ID NO: 213078 - DNA, 21 bp, Artificial sequence
  SiRNA target sequence
aggtagaaagaagaatgtttt

SEQ ID NO: 213079 - DNA, 21 bp, Artificial sequence
  SiRNA target sequence
ggtagaaagaagaatgttttg

SEQ ID NO: 213080 - DNA, 21 bp, Artificial sequence
  SiRNA target sequence
gtagaaagaagaatgttttgg

SEQ ID NO: 213081 - DNA, 21 bp, Artificial sequence
  SiRNA target sequence
tagaaagaagaatgttttggc

SEQ ID NO: 213082 - DNA, 21 bp, Artificial sequence
  SiRNA target sequence
agaaagaagaatgttttggct

SEQ ID NO: 213083 - DNA, 21 bp, Artificial sequence
  SiRNA target sequence
gaaagaagaatgttttggctt

SEQ ID NO: 213084 - DNA, 21 bp, Artificial sequence
  SiRNA target sequence
aaagaagaatgttttggctta

SEQ ID NO: 213085 - DNA, 21 bp, Artificial sequence
  SiRNA target sequence
aagaagaatgttttggcttat

SEQ ID NO: 213086 - DNA, 21 bp, Artificial sequence
  SiRNA target sequence
agaagaatgttttggcttatg

SEQ ID NO: 213087 - DNA, 21 bp, Artificial sequence
  SiRNA target sequence
gaagaatgttttggcttatga

SEQ ID NO: 213088 - DNA, 21 bp, Artificial sequence
  SiRNA target sequence
aagaatgttttggcttatgac

SEQ ID NO: 213089 - DNA, 21 bp, Artificial sequence
  SiRNA target sequence
agaatgttttggcttatgacg

SEQ ID NO: 213090 - DNA, 21 bp, Artificial sequence
  SiRNA target sequence
gaatgttttggcttatgacgc

SEQ ID NO: 213091 - DNA, 21 bp, Artificial sequence
  SiRNA target sequence
aatgttttggcttatgacgct

SEQ ID NO: 213092 - DNA, 21 bp, Artificial sequence
  SiRNA target sequence
atgttttggcttatgacgctt

SEQ ID NO: 213093 - DNA, 21 bp, Artificial sequence
  SiRNA target sequence
tgttttggcttatgacgctta

SEQ ID NO: 213094 - DNA, 21 bp, Artificial sequence
  SiRNA target sequence
gttttggcttatgacgcttat

SEQ ID NO: 213095 - DNA, 21 bp, Artificial sequence
  SiRNA target sequence
ttttggcttatgacgcttatg

SEQ ID NO: 213096 - DNA, 21 bp, Artificial sequence
  SiRNA target sequence
tttggcttatgacgcttatgt

SEQ ID NO: 213097 - DNA, 21 bp, Artificial sequence
  SiRNA target sequence
ttggcttatgacgcttatgtt

SEQ ID NO: 213098 - DNA, 21 bp, Artificial sequence
  SiRNA target sequence
tggcttatgacgcttatgttt

SEQ ID NO: 213099 - DNA, 21 bp, Artificial sequence
  SiRNA target sequence
ggcttatgacgcttatgtttt

SEQ ID NO: 213100 - DNA, 21 bp, Artificial sequence
  SiRNA target sequence
gcttatgacgcttatgttttc

SEQ ID NO: 213101 - DNA, 21 bp, Artificial sequence
  SiRNA target sequence
cttatgacgcttatgttttcg

SEQ ID NO: 213102 - DNA, 21 bp, Artificial sequence
  SiRNA target sequence
ttatgacgcttatgttttcgc

SEQ ID NO: 213103 - DNA, 21 bp, Artificial sequence
  SiRNA target sequence
tatgacgcttatgttttcgct

SEQ ID NO: 213104 - DNA, 21 bp, Artificial sequence
  SiRNA target sequence
atgacgcttatgttttcgctt

SEQ ID NO: 213105 - DNA, 21 bp, Artificial sequence
  SiRNA target sequence
tgacgcttatgttttcgctta

SEQ ID NO: 213106 - DNA, 21 bp, Artificial sequence
  SiRNA target sequence
gacgcttatgttttcgcttat

SEQ ID NO: 213107 - DNA, 21 bp, Artificial sequence
  SiRNA target sequence
acgcttatgttttcgcttatt

SEQ ID NO: 213108 - DNA, 21 bp, Artificial sequence
  SiRNA target sequence
cgcttatgttttcgcttattt

SEQ ID NO: 213109 - DNA, 21 bp, Artificial sequence
  SiRNA target sequence
gcttatgttttcgcttatttc

SEQ ID NO: 213110 - DNA, 21 bp, Artificial sequence
  SiRNA target sequence
cttatgttttcgcttatttcc

SEQ ID NO: 213111 - DNA, 21 bp, Artificial sequence
  SiRNA target sequence
ttatgttttcgcttatttcct

SEQ ID NO: 213112 - DNA, 21 bp, Artificial sequence
  SiRNA target sequence
tatgttttcgcttatttcctt

SEQ ID NO: 213113 - DNA, 21 bp, Artificial sequence
  SiRNA target sequence
atgttttcgcttatttccttt

SEQ ID NO: 213114 - DNA, 21 bp, Artificial sequence
  SiRNA target sequence
tgttttcgcttatttccttta

SEQ ID NO: 213115 - DNA, 21 bp, Artificial sequence
  SiRNA target sequence
gttttcgcttatttcctttat

SEQ ID NO: 213116 - DNA, 21 bp, Artificial sequence
  SiRNA target sequence
ttttcgcttatttcctttatt

SEQ ID NO: 213117 - DNA, 21 bp, Artificial sequence
  SiRNA target sequence
tttcgcttatttcctttattt

SEQ ID NO: 213118 - DNA, 21 bp, Artificial sequence
  SiRNA target sequence
ttcgcttatttcctttattta

SEQ ID NO: 213119 - DNA, 21 bp, Artificial sequence
  SiRNA target sequence
tcgcttatttcctttatttac

SEQ ID NO: 213120 - DNA, 21 bp, Artificial sequence
  SiRNA target sequence
cgcttatttcctttatttact

SEQ ID NO: 213121 - DNA, 21 bp, Artificial sequence
  SiRNA target sequence
gcttatttcctttatttactc

SEQ ID NO: 213122 - DNA, 21 bp, Artificial sequence
  SiRNA target sequence
cttatttcctttatttactca

SEQ ID NO: 213123 - DNA, 21 bp, Artificial sequence
  SiRNA target sequence
ttatttcctttatttactcag

SEQ ID NO: 213124 - DNA, 21 bp, Artificial sequence
  SiRNA target sequence
tatttcctttatttactcagt

SEQ ID NO: 213125 - DNA, 21 bp, Artificial sequence
  SiRNA target sequence
atttcctttatttactcagta

SEQ ID NO: 213126 - DNA, 21 bp, Artificial sequence
  SiRNA target sequence
tttcctttatttactcagtag

SEQ ID NO: 213127 - DNA, 21 bp, Artificial sequence
  SiRNA target sequence
ttcctttatttactcagtagg

SEQ ID NO: 213128 - DNA, 21 bp, Artificial sequence
  SiRNA target sequence
tcctttatttactcagtagga

SEQ ID NO: 213129 - DNA, 21 bp, Artificial sequence
  SiRNA target sequence
cctttatttactcagtaggac

SEQ ID NO: 213130 - DNA, 21 bp, Artificial sequence
  SiRNA target sequence
ctttatttactcagtaggacg

SEQ ID NO: 213131 - DNA, 21 bp, Artificial sequence
  SiRNA target sequence
tttatttactcagtaggacga

SEQ ID NO: 213132 - DNA, 21 bp, Artificial sequence
  SiRNA target sequence
ttatttactcagtaggacgag

SEQ ID NO: 213133 - DNA, 21 bp, Artificial sequence
  SiRNA target sequence
tatttactcagtaggacgagt

SEQ ID NO: 213134 - DNA, 21 bp, Artificial sequence
  SiRNA target sequence
atttactcagtaggacgagtg

SEQ ID NO: 213135 - DNA, 21 bp, Artificial sequence
  SiRNA target sequence
tttactcagtaggacgagtgt

SEQ ID NO: 213136 - DNA, 21 bp, Artificial sequence
  SiRNA target sequence
ttactcagtaggacgagtgtt

SEQ ID NO: 213137 - DNA, 21 bp, Artificial sequence
  SiRNA target sequence
tactcagtaggacgagtgtta

SEQ ID NO: 213138 - DNA, 21 bp, Artificial sequence
  SiRNA target sequence
actcagtaggacgagtgttaa

SEQ ID NO: 213139 - DNA, 21 bp, Artificial sequence
  SiRNA target sequence
ctcagtaggacgagtgttaaa

SEQ ID NO: 213140 - DNA, 21 bp, Artificial sequence
  SiRNA target sequence
tcagtaggacgagtgttaaaa

SEQ ID NO: 213141 - DNA, 21 bp, Artificial sequence
  SiRNA target sequence
cagtaggacgagtgttaaaag

SEQ ID NO: 213142 - DNA, 21 bp, Artificial sequence
  SiRNA target sequence
agtaggacgagtgttaaaaga

SEQ ID NO: 213143 - DNA, 21 bp, Artificial sequence
  SiRNA target sequence
gtaggacgagtgttaaaagat

SEQ ID NO: 213144 - DNA, 21 bp, Artificial sequence
  SiRNA target sequence
taggacgagtgttaaaagatg

SEQ ID NO: 213145 - DNA, 21 bp, Artificial sequence
  SiRNA target sequence
aggacgagtgttaaaagatgc

SEQ ID NO: 213146 - DNA, 21 bp, Artificial sequence
  SiRNA target sequence
ggacgagtgttaaaagatgca

SEQ ID NO: 213147 - DNA, 21 bp, Artificial sequence
  SiRNA target sequence
gacgagtgttaaaagatgcag

SEQ ID NO: 213148 - DNA, 21 bp, Artificial sequence
  SiRNA target sequence
acgagtgttaaaagatgcagc

SEQ ID NO: 213149 - DNA, 21 bp, Artificial sequence
  SiRNA target sequence
cgagtgttaaaagatgcagca

SEQ ID NO: 213150 - DNA, 21 bp, Artificial sequence
  SiRNA target sequence
gagtgttaaaagatgcagcag

SEQ ID NO: 213151 - DNA, 21 bp, Artificial sequence
  SiRNA target sequence
agtgttaaaagatgcagcagt

SEQ ID NO: 213152 - DNA, 21 bp, Artificial sequence
  SiRNA target sequence
gtgttaaaagatgcagcagtt

SEQ ID NO: 213153 - DNA, 21 bp, Artificial sequence
  SiRNA target sequence
tgttaaaagatgcagcagttc

SEQ ID NO: 213154 - DNA, 21 bp, Artificial sequence
  SiRNA target sequence
gttaaaagatgcagcagttct

SEQ ID NO: 213155 - DNA, 21 bp, Artificial sequence
  SiRNA target sequence
ttaaaagatgcagcagttctt

SEQ ID NO: 213156 - DNA, 21 bp, Artificial sequence
  SiRNA target sequence
taaaagatgcagcagttctta

SEQ ID NO: 213157 - DNA, 21 bp, Artificial sequence
  SiRNA target sequence
aaaagatgcagcagttcttag

SEQ ID NO: 213158 - DNA, 21 bp, Artificial sequence
  SiRNA target sequence
aaagatgcagcagttcttagt

SEQ ID NO: 213159 - DNA, 21 bp, Artificial sequence
  SiRNA target sequence
aagatgcagcagttcttagta

SEQ ID NO: 213160 - DNA, 21 bp, Artificial sequence
  SiRNA target sequence
agatgcagcagttcttagtag

SEQ ID NO: 213161 - DNA, 21 bp, Artificial sequence
  SiRNA target sequence
gatgcagcagttcttagtaga

SEQ ID NO: 213162 - DNA, 21 bp, Artificial sequence
  SiRNA target sequence
atgcagcagttcttagtagac

SEQ ID NO: 213163 - DNA, 21 bp, Artificial sequence
  SiRNA target sequence
tgcagcagttcttagtagaca

SEQ ID NO: 213164 - DNA, 21 bp, Artificial sequence
  SiRNA target sequence
gcagcagttcttagtagacag

SEQ ID NO: 213165 - DNA, 21 bp, Artificial sequence
  SiRNA target sequence
cagcagttcttagtagacaga

SEQ ID NO: 213166 - DNA, 21 bp, Artificial sequence
  SiRNA target sequence
agcagttcttagtagacagat

SEQ ID NO: 213167 - DNA, 21 bp, Artificial sequence
  SiRNA target sequence
gcagttcttagtagacagatg

SEQ ID NO: 213168 - DNA, 21 bp, Artificial sequence
  SiRNA target sequence
cagttcttagtagacagatgc

SEQ ID NO: 213169 - DNA, 21 bp, Artificial sequence
  SiRNA target sequence
agttcttagtagacagatgcc

SEQ ID NO: 213170 - DNA, 21 bp, Artificial sequence
  SiRNA target sequence
gttcttagtagacagatgcca

SEQ ID NO: 213171 - DNA, 21 bp, Artificial sequence
  SiRNA target sequence
ttcttagtagacagatgccac

SEQ ID NO: 213172 - DNA, 21 bp, Artificial sequence
  SiRNA target sequence
tcttagtagacagatgccact

SEQ ID NO: 213173 - DNA, 21 bp, Artificial sequence
  SiRNA target sequence
cttagtagacagatgccacta

SEQ ID NO: 213174 - DNA, 21 bp, Artificial sequence
  SiRNA target sequence
ttagtagacagatgccactat

SEQ ID NO: 213175 - DNA, 21 bp, Artificial sequence
  SiRNA target sequence
tagtagacagatgccactatc

SEQ ID NO: 213176 - DNA, 21 bp, Artificial sequence
  SiRNA target sequence
agtagacagatgccactatcc

SEQ ID NO: 213177 - DNA, 21 bp, Artificial sequence
  SiRNA target sequence
gtagacagatgccactatcca

SEQ ID NO: 213178 - DNA, 21 bp, Artificial sequence
  SiRNA target sequence
tagacagatgccactatccat

SEQ ID NO: 213179 - DNA, 21 bp, Artificial sequence
  SiRNA target sequence
agacagatgccactatccatt

SEQ ID NO: 213180 - DNA, 21 bp, Artificial sequence
  SiRNA target sequence
gacagatgccactatccatta

SEQ ID NO: 213181 - DNA, 21 bp, Artificial sequence
  SiRNA target sequence
acagatgccactatccattaa

SEQ ID NO: 213182 - DNA, 21 bp, Artificial sequence
  SiRNA target sequence
cagatgccactatccattaat

SEQ ID NO: 213183 - DNA, 21 bp, Artificial sequence
  SiRNA target sequence
agatgccactatccattaatt

SEQ ID NO: 213184 - DNA, 21 bp, Artificial sequence
  SiRNA target sequence
gatgccactatccattaattg

SEQ ID NO: 213185 - DNA, 21 bp, Artificial sequence
  SiRNA target sequence
atgccactatccattaattgt

SEQ ID NO: 213186 - DNA, 21 bp, Artificial sequence
  SiRNA target sequence
tgccactatccattaattgtc

SEQ ID NO: 213187 - DNA, 21 bp, Artificial sequence
  SiRNA target sequence
gccactatccattaattgtct

SEQ ID NO: 213188 - DNA, 21 bp, Artificial sequence
  SiRNA target sequence
ccactatccattaattgtctt

SEQ ID NO: 213189 - DNA, 21 bp, Artificial sequence
  SiRNA target sequence
cactatccattaattgtctta

SEQ ID NO: 213190 - DNA, 21 bp, Artificial sequence
  SiRNA target sequence
actatccattaattgtcttaa

SEQ ID NO: 213191 - DNA, 21 bp, Artificial sequence
  SiRNA target sequence
ctatccattaattgtcttaaa

SEQ ID NO: 213192 - DNA, 21 bp, Artificial sequence
  SiRNA target sequence
tatccattaattgtcttaaaa

SEQ ID NO: 213193 - DNA, 21 bp, Artificial sequence
  SiRNA target sequence
atccattaattgtcttaaaag

SEQ ID NO: 213194 - DNA, 21 bp, Artificial sequence
  SiRNA target sequence
tccattaattgtcttaaaagc

SEQ ID NO: 213195 - DNA, 21 bp, Artificial sequence
  SiRNA target sequence
ccattaattgtcttaaaagct

SEQ ID NO: 213196 - DNA, 21 bp, Artificial sequence
  SiRNA target sequence
cattaattgtcttaaaagctt

SEQ ID NO: 213197 - DNA, 21 bp, Artificial sequence
  SiRNA target sequence
attaattgtcttaaaagcttt

SEQ ID NO: 213198 - DNA, 21 bp, Artificial sequence
  SiRNA target sequence
ttaattgtcttaaaagctttg

SEQ ID NO: 213199 - DNA, 21 bp, Artificial sequence
  SiRNA target sequence
taattgtcttaaaagctttgt

SEQ ID NO: 213200 - DNA, 21 bp, Artificial sequence
  SiRNA target sequence
aattgtcttaaaagctttgta

SEQ ID NO: 213201 - DNA, 21 bp, Artificial sequence
  SiRNA target sequence
attgtcttaaaagctttgtaa

SEQ ID NO: 213202 - DNA, 21 bp, Artificial sequence
  SiRNA target sequence
ttgtcttaaaagctttgtaat

SEQ ID NO: 213203 - DNA, 21 bp, Artificial sequence
  SiRNA target sequence
tgtcttaaaagctttgtaatt

SEQ ID NO: 213204 - DNA, 21 bp, Artificial sequence
  SiRNA target sequence
gtcttaaaagctttgtaattt

SEQ ID NO: 213205 - DNA, 21 bp, Artificial sequence
  SiRNA target sequence
tcttaaaagctttgtaatttt

SEQ ID NO: 213206 - DNA, 21 bp, Artificial sequence
  SiRNA target sequence
cttaaaagctttgtaatttta

SEQ ID NO: 213207 - DNA, 21 bp, Artificial sequence
  SiRNA target sequence
ttaaaagctttgtaattttac

SEQ ID NO: 213208 - DNA, 21 bp, Artificial sequence
  SiRNA target sequence
taaaagctttgtaattttacc

SEQ ID NO: 213209 - DNA, 21 bp, Artificial sequence
  SiRNA target sequence
aaaagctttgtaattttacca

SEQ ID NO: 213210 - DNA, 21 bp, Artificial sequence
  SiRNA target sequence
aaagctttgtaattttaccag

SEQ ID NO: 213211 - DNA, 21 bp, Artificial sequence
  SiRNA target sequence
aagctttgtaattttaccagt

SEQ ID NO: 213212 - DNA, 21 bp, Artificial sequence
  SiRNA target sequence
agctttgtaattttaccagtt

SEQ ID NO: 213213 - DNA, 21 bp, Artificial sequence
  SiRNA target sequence
gctttgtaattttaccagtta

SEQ ID NO: 213214 - DNA, 21 bp, Artificial sequence
  SiRNA target sequence
ctttgtaattttaccagttac

SEQ ID NO: 213215 - DNA, 21 bp, Artificial sequence
  SiRNA target sequence
tttgtaattttaccagttact

SEQ ID NO: 213216 - DNA, 21 bp, Artificial sequence
  SiRNA target sequence
ttgtaattttaccagttactc

SEQ ID NO: 213217 - DNA, 21 bp, Artificial sequence
  SiRNA target sequence
tgtaattttaccagttactct

SEQ ID NO: 213218 - DNA, 21 bp, Artificial sequence
  SiRNA target sequence
gtaattttaccagttactctt

SEQ ID NO: 213219 - DNA, 21 bp, Artificial sequence
  SiRNA target sequence
taattttaccagttactcttg

SEQ ID NO: 213220 - DNA, 21 bp, Artificial sequence
  SiRNA target sequence
aattttaccagttactcttgt

SEQ ID NO: 213221 - DNA, 21 bp, Artificial sequence
  SiRNA target sequence
attttaccagttactcttgtt

SEQ ID NO: 213222 - DNA, 21 bp, Artificial sequence
  SiRNA target sequence
ttttaccagttactcttgttt

SEQ ID NO: 213223 - DNA, 21 bp, Artificial sequence
  SiRNA target sequence
tttaccagttactcttgtttg

SEQ ID NO: 213224 - DNA, 21 bp, Artificial sequence
  SiRNA target sequence
ttaccagttactcttgtttgt

SEQ ID NO: 213225 - DNA, 21 bp, Artificial sequence
  SiRNA target sequence
taccagttactcttgtttgtg

SEQ ID NO: 213226 - DNA, 21 bp, Artificial sequence
  SiRNA target sequence
accagttactcttgtttgtgt

SEQ ID NO: 213227 - DNA, 21 bp, Artificial sequence
  SiRNA target sequence
ccagttactcttgtttgtgta

SEQ ID NO: 213228 - DNA, 21 bp, Artificial sequence
  SiRNA target sequence
cagttactcttgtttgtgtag

SEQ ID NO: 213229 - DNA, 21 bp, Artificial sequence
  SiRNA target sequence
agttactcttgtttgtgtagg

SEQ ID NO: 213230 - DNA, 21 bp, Artificial sequence
  SiRNA target sequence
gttactcttgtttgtgtagga

SEQ ID NO: 213231 - DNA, 21 bp, Artificial sequence
  SiRNA target sequence
ttactcttgtttgtgtaggat

SEQ ID NO: 213232 - DNA, 21 bp, Artificial sequence
  SiRNA target sequence
tactcttgtttgtgtaggatt

SEQ ID NO: 213233 - DNA, 21 bp, Artificial sequence
  SiRNA target sequence
actcttgtttgtgtaggatta

SEQ ID NO: 213234 - DNA, 21 bp, Artificial sequence
  SiRNA target sequence
ctcttgtttgtgtaggattaa

SEQ ID NO: 213235 - DNA, 21 bp, Artificial sequence
  SiRNA target sequence
tcttgtttgtgtaggattaat

SEQ ID NO: 213236 - DNA, 21 bp, Artificial sequence
  SiRNA target sequence
cttgtttgtgtaggattaatt

SEQ ID NO: 213237 - DNA, 21 bp, Artificial sequence
  SiRNA target sequence
ttgtttgtgtaggattaattc

SEQ ID NO: 213238 - DNA, 21 bp, Artificial sequence
  SiRNA target sequence
tgtttgtgtaggattaattca

SEQ ID NO: 213239 - DNA, 21 bp, Artificial sequence
  SiRNA target sequence
gtttgtgtaggattaattcag

SEQ ID NO: 213240 - DNA, 21 bp, Artificial sequence
  SiRNA target sequence
tttgtgtaggattaattcaga

SEQ ID NO: 213241 - DNA, 21 bp, Artificial sequence
  SiRNA target sequence
ttgtgtaggattaattcagaa

SEQ ID NO: 213242 - DNA, 21 bp, Artificial sequence
  SiRNA target sequence
tgtgtaggattaattcagaag

SEQ ID NO: 213243 - DNA, 21 bp, Artificial sequence
  SiRNA target sequence
gtgtaggattaattcagaagt

SEQ ID NO: 213244 - DNA, 21 bp, Artificial sequence
  SiRNA target sequence
tgtaggattaattcagaagtc

SEQ ID NO: 213245 - DNA, 21 bp, Artificial sequence
  SiRNA target sequence
gtaggattaattcagaagtct

SEQ ID NO: 213246 - DNA, 21 bp, Artificial sequence
  SiRNA target sequence
taggattaattcagaagtcta

SEQ ID NO: 213247 - DNA, 21 bp, Artificial sequence
  SiRNA target sequence
aggattaattcagaagtctac

SEQ ID NO: 213248 - DNA, 21 bp, Artificial sequence
  SiRNA target sequence
ggattaattcagaagtctaca

SEQ ID NO: 213249 - DNA, 21 bp, Artificial sequence
  SiRNA target sequence
gattaattcagaagtctacac

SEQ ID NO: 213250 - DNA, 21 bp, Artificial sequence
  SiRNA target sequence
attaattcagaagtctacact

SEQ ID NO: 213251 - DNA, 21 bp, Artificial sequence
  SiRNA target sequence
ttaattcagaagtctacactc

SEQ ID NO: 213252 - DNA, 21 bp, Artificial sequence
  SiRNA target sequence
taattcagaagtctacactct

SEQ ID NO: 213253 - DNA, 21 bp, Artificial sequence
  SiRNA target sequence
aattcagaagtctacactctc

SEQ ID NO: 213254 - DNA, 21 bp, Artificial sequence
  SiRNA target sequence
attcagaagtctacactctct

SEQ ID NO: 213255 - DNA, 21 bp, Artificial sequence
  SiRNA target sequence
ttcagaagtctacactctctt

SEQ ID NO: 213256 - DNA, 21 bp, Artificial sequence
  SiRNA target sequence
tcagaagtctacactctctta

SEQ ID NO: 213257 - DNA, 21 bp, Artificial sequence
  SiRNA target sequence
cagaagtctacactctcttat

SEQ ID NO: 213258 - DNA, 21 bp, Artificial sequence
  SiRNA target sequence
agaagtctacactctcttatt

SEQ ID NO: 213259 - DNA, 21 bp, Artificial sequence
  SiRNA target sequence
gaagtctacactctcttattc

SEQ ID NO: 213260 - DNA, 21 bp, Artificial sequence
  SiRNA target sequence
aagtctacactctcttattct

SEQ ID NO: 213261 - DNA, 21 bp, Artificial sequence
  SiRNA target sequence
agtctacactctcttattctt

SEQ ID NO: 213262 - DNA, 21 bp, Artificial sequence
  SiRNA target sequence
gtctacactctcttattcttt

SEQ ID NO: 213263 - DNA, 21 bp, Artificial sequence
  SiRNA target sequence
tctacactctcttattctttt

SEQ ID NO: 213264 - DNA, 21 bp, Artificial sequence
  SiRNA target sequence
ctacactctcttattctttta

SEQ ID NO: 213265 - DNA, 21 bp, Artificial sequence
  SiRNA target sequence
tacactctcttattcttttac

SEQ ID NO: 213266 - DNA, 21 bp, Artificial sequence
  SiRNA target sequence
acactctcttattcttttaca

SEQ ID NO: 213267 - DNA, 21 bp, Artificial sequence
  SiRNA target sequence
cactctcttattcttttacaa

SEQ ID NO: 213268 - DNA, 21 bp, Artificial sequence
  SiRNA target sequence
actctcttattcttttacaaa

SEQ ID NO: 213269 - DNA, 21 bp, Artificial sequence
  SiRNA target sequence
ctctcttattcttttacaaaa

SEQ ID NO: 213270 - DNA, 21 bp, Artificial sequence
  SiRNA target sequence
tctcttattcttttacaaaaa

SEQ ID NO: 213271 - DNA, 21 bp, Artificial sequence
  SiRNA target sequence
ctcttattcttttacaaaaat

SEQ ID NO: 213272 - DNA, 21 bp, Artificial sequence
  SiRNA target sequence
tcttattcttttacaaaaata

SEQ ID NO: 213273 - DNA, 21 bp, Artificial sequence
  SiRNA target sequence
cttattcttttacaaaaatat

SEQ ID NO: 213274 - DNA, 21 bp, Artificial sequence
  SiRNA target sequence
ttattcttttacaaaaatatt

SEQ ID NO: 213275 - DNA, 21 bp, Artificial sequence
  SiRNA target sequence
tattcttttacaaaaatattt

SEQ ID NO: 213276 - DNA, 21 bp, Artificial sequence
  SiRNA target sequence
attcttttacaaaaatatttg

SEQ ID NO: 213277 - DNA, 21 bp, Artificial sequence
  SiRNA target sequence
ttcttttacaaaaatatttga

SEQ ID NO: 213278 - DNA, 21 bp, Artificial sequence
  SiRNA target sequence
tcttttacaaaaatatttgat

SEQ ID NO: 213279 - DNA, 21 bp, Artificial sequence
  SiRNA target sequence
cttttacaaaaatatttgatg

SEQ ID NO: 213280 - DNA, 21 bp, Artificial sequence
  SiRNA target sequence
ttttacaaaaatatttgatgg

SEQ ID NO: 213281 - DNA, 21 bp, Artificial sequence
  SiRNA target sequence
tttacaaaaatatttgatggt

SEQ ID NO: 213282 - DNA, 21 bp, Artificial sequence
  SiRNA target sequence
ttacaaaaatatttgatggtg

SEQ ID NO: 213283 - DNA, 21 bp, Artificial sequence
  SiRNA target sequence
tacaaaaatatttgatggtgc

SEQ ID NO: 213284 - DNA, 21 bp, Artificial sequence
  SiRNA target sequence
acaaaaatatttgatggtgca

SEQ ID NO: 213285 - DNA, 21 bp, Artificial sequence
  SiRNA target sequence
caaaaatatttgatggtgcat

SEQ ID NO: 213286 - DNA, 21 bp, Artificial sequence
  SiRNA target sequence
aaaaatatttgatggtgcatt

SEQ ID NO: 213287 - DNA, 21 bp, Artificial sequence
  SiRNA target sequence
aaaatatttgatggtgcattg

SEQ ID NO: 213288 - DNA, 21 bp, Artificial sequence
  SiRNA target sequence
aaatatttgatggtgcattgt

SEQ ID NO: 213289 - DNA, 21 bp, Artificial sequence
  SiRNA target sequence
aatatttgatggtgcattgtt

SEQ ID NO: 213290 - DNA, 21 bp, Artificial sequence
  SiRNA target sequence
atatttgatggtgcattgtta

SEQ ID NO: 213291 - DNA, 21 bp, Artificial sequence
  SiRNA target sequence
tatttgatggtgcattgttaa

SEQ ID NO: 213292 - DNA, 21 bp, Artificial sequence
  SiRNA target sequence
atttgatggtgcattgttaat

SEQ ID NO: 213293 - DNA, 21 bp, Artificial sequence
  SiRNA target sequence
tttgatggtgcattgttaata

SEQ ID NO: 213294 - DNA, 21 bp, Artificial sequence
  SiRNA target sequence
ttgatggtgcattgttaatat

SEQ ID NO: 213295 - DNA, 21 bp, Artificial sequence
  SiRNA target sequence
tgatggtgcattgttaatatt

SEQ ID NO: 213296 - DNA, 21 bp, Artificial sequence
  SiRNA target sequence
gatggtgcattgttaatattt

SEQ ID NO: 213297 - DNA, 21 bp, Artificial sequence
  SiRNA target sequence
atggtgcattgttaatatttg

SEQ ID NO: 213298 - DNA, 21 bp, Artificial sequence
  SiRNA target sequence
tggtgcattgttaatatttgc

SEQ ID NO: 213299 - DNA, 21 bp, Artificial sequence
  SiRNA target sequence
ggtgcattgttaatatttgct

SEQ ID NO: 213300 - DNA, 21 bp, Artificial sequence
  SiRNA target sequence
gtgcattgttaatatttgctt

SEQ ID NO: 213301 - DNA, 21 bp, Artificial sequence
  SiRNA target sequence
tgcattgttaatatttgcttt

SEQ ID NO: 213302 - DNA, 21 bp, Artificial sequence
  SiRNA target sequence
gcattgttaatatttgctttt

SEQ ID NO: 213303 - DNA, 21 bp, Artificial sequence
  SiRNA target sequence
cattgttaatatttgcttttc

SEQ ID NO: 213304 - DNA, 21 bp, Artificial sequence
  SiRNA target sequence
attgttaatatttgcttttct

SEQ ID NO: 213305 - DNA, 21 bp, Artificial sequence
  SiRNA target sequence
ttgttaatatttgcttttctt

SEQ ID NO: 213306 - DNA, 21 bp, Artificial sequence
  SiRNA target sequence
tgttaatatttgcttttcttt

SEQ ID NO: 213307 - DNA, 21 bp, Artificial sequence
  SiRNA target sequence
gttaatatttgcttttcttta

SEQ ID NO: 213308 - DNA, 21 bp, Artificial sequence
  SiRNA target sequence
ttaatatttgcttttctttat

SEQ ID NO: 213309 - DNA, 21 bp, Artificial sequence
  SiRNA target sequence
taatatttgcttttctttata

SEQ ID NO: 213310 - DNA, 21 bp, Artificial sequence
  SiRNA target sequence
aatatttgcttttctttatat

SEQ ID NO: 213311 - DNA, 21 bp, Artificial sequence
  SiRNA target sequence
atatttgcttttctttatatc

SEQ ID NO: 213312 - DNA, 21 bp, Artificial sequence
  SiRNA target sequence
tatttgcttttctttatatca

SEQ ID NO: 213313 - DNA, 21 bp, Artificial sequence
  SiRNA target sequence
atttgcttttctttatatcat

SEQ ID NO: 213314 - DNA, 21 bp, Artificial sequence
  SiRNA target sequence
tttgcttttctttatatcatt

SEQ ID NO: 213315 - DNA, 21 bp, Artificial sequence
  SiRNA target sequence
ttgcttttctttatatcattc

SEQ ID NO: 213316 - DNA, 21 bp, Artificial sequence
  SiRNA target sequence
tgcttttctttatatcattct

SEQ ID NO: 213317 - DNA, 21 bp, Artificial sequence
  SiRNA target sequence
gcttttctttatatcattctt

SEQ ID NO: 213318 - DNA, 21 bp, Artificial sequence
  SiRNA target sequence
cttttctttatatcattcttg

SEQ ID NO: 213319 - DNA, 21 bp, Artificial sequence
  SiRNA target sequence
ttttctttatatcattcttgg

SEQ ID NO: 213320 - DNA, 21 bp, Artificial sequence
  SiRNA target sequence
tttctttatatcattcttggt

SEQ ID NO: 213321 - DNA, 21 bp, Artificial sequence
  SiRNA target sequence
ttctttatatcattcttggtc

SEQ ID NO: 213322 - DNA, 21 bp, Artificial sequence
  SiRNA target sequence
tctttatatcattcttggtct

SEQ ID NO: 213323 - DNA, 21 bp, Artificial sequence
  SiRNA target sequence
ctttatatcattcttggtcta

SEQ ID NO: 213324 - DNA, 21 bp, Artificial sequence
  SiRNA target sequence
tttatatcattcttggtctag

SEQ ID NO: 213325 - DNA, 21 bp, Artificial sequence
  SiRNA target sequence
ttatatcattcttggtctagt

SEQ ID NO: 213326 - DNA, 21 bp, Artificial sequence
  SiRNA target sequence
tatatcattcttggtctagtt

SEQ ID NO: 213327 - DNA, 21 bp, Artificial sequence
  SiRNA target sequence
atatcattcttggtctagttc

SEQ ID NO: 213328 - DNA, 21 bp, Artificial sequence
  SiRNA target sequence
tatcattcttggtctagttct

SEQ ID NO: 213329 - DNA, 21 bp, Artificial sequence
  SiRNA target sequence
atcattcttggtctagttctt

SEQ ID NO: 213330 - DNA, 21 bp, Artificial sequence
  SiRNA target sequence
tcattcttggtctagttcttc

SEQ ID NO: 213331 - DNA, 21 bp, Artificial sequence
  SiRNA target sequence
cattcttggtctagttcttct

SEQ ID NO: 213332 - DNA, 21 bp, Artificial sequence
  SiRNA target sequence
attcttggtctagttcttctt

SEQ ID NO: 213333 - DNA, 21 bp, Artificial sequence
  SiRNA target sequence
ttcttggtctagttcttcttc

SEQ ID NO: 213334 - DNA, 21 bp, Artificial sequence
  SiRNA target sequence
tcttggtctagttcttcttcc

SEQ ID NO: 213335 - DNA, 21 bp, Artificial sequence
  SiRNA target sequence
cttggtctagttcttcttcca

SEQ ID NO: 213336 - DNA, 21 bp, Artificial sequence
  SiRNA target sequence
ttggtctagttcttcttccat

SEQ ID NO: 213337 - DNA, 21 bp, Artificial sequence
  SiRNA target sequence
tggtctagttcttcttccata

SEQ ID NO: 213338 - DNA, 21 bp, Artificial sequence
  SiRNA target sequence
ggtctagttcttcttccatat

SEQ ID NO: 213339 - DNA, 21 bp, Artificial sequence
  SiRNA target sequence
gtctagttcttcttccatatt

SEQ ID NO: 213340 - DNA, 21 bp, Artificial sequence
  SiRNA target sequence
tctagttcttcttccatattc

SEQ ID NO: 213341 - DNA, 21 bp, Artificial sequence
  SiRNA target sequence
ctagttcttcttccatattct

SEQ ID NO: 213342 - DNA, 21 bp, Artificial sequence
  SiRNA target sequence
tagttcttcttccatattctc

SEQ ID NO: 213343 - DNA, 21 bp, Artificial sequence
  SiRNA target sequence
agttcttcttccatattctca

SEQ ID NO: 213344 - DNA, 21 bp, Artificial sequence
  SiRNA target sequence
gttcttcttccatattctcat

SEQ ID NO: 213345 - DNA, 21 bp, Artificial sequence
  SiRNA target sequence
ttcttcttccatattctcatc

SEQ ID NO: 213346 - DNA, 21 bp, Artificial sequence
  SiRNA target sequence
tcttcttccatattctcatct

SEQ ID NO: 213347 - DNA, 21 bp, Artificial sequence
  SiRNA target sequence
cttcttccatattctcatctt

SEQ ID NO: 213348 - DNA, 21 bp, Artificial sequence
  SiRNA target sequence
ttcttccatattctcatcttt

SEQ ID NO: 213349 - DNA, 21 bp, Artificial sequence
  SiRNA target sequence
tcttccatattctcatctttt

SEQ ID NO: 213350 - DNA, 21 bp, Artificial sequence
  SiRNA target sequence
cttccatattctcatcttttc

SEQ ID NO: 213351 - DNA, 21 bp, Artificial sequence
  SiRNA target sequence
ttccatattctcatcttttcc

SEQ ID NO: 213352 - DNA, 21 bp, Artificial sequence
  SiRNA target sequence
tccatattctcatcttttcca

SEQ ID NO: 213353 - DNA, 21 bp, Artificial sequence
  SiRNA target sequence
ccatattctcatcttttccag

SEQ ID NO: 213354 - DNA, 21 bp, Artificial sequence
  SiRNA target sequence
catattctcatcttttccagc

SEQ ID NO: 213355 - DNA, 21 bp, Artificial sequence
  SiRNA target sequence
atattctcatcttttccagct

SEQ ID NO: 213356 - DNA, 21 bp, Artificial sequence
  SiRNA target sequence
tattctcatcttttccagctt

SEQ ID NO: 213357 - DNA, 21 bp, Artificial sequence
  SiRNA target sequence
attctcatcttttccagcttg

SEQ ID NO: 213358 - DNA, 21 bp, Artificial sequence
  SiRNA target sequence
ttctcatcttttccagcttga

SEQ ID NO: 213359 - DNA, 21 bp, Artificial sequence
  SiRNA target sequence
tctcatcttttccagcttgat

SEQ ID NO: 213360 - DNA, 21 bp, Artificial sequence
  SiRNA target sequence
ctcatcttttccagcttgata

SEQ ID NO: 213361 - DNA, 21 bp, Artificial sequence
  SiRNA target sequence
tcatcttttccagcttgatag

SEQ ID NO: 213362 - DNA, 21 bp, Artificial sequence
  SiRNA target sequence
catcttttccagcttgatagt

SEQ ID NO: 213363 - DNA, 21 bp, Artificial sequence
  SiRNA target sequence
atcttttccagcttgatagtt

SEQ ID NO: 213364 - DNA, 21 bp, Artificial sequence
  SiRNA target sequence
tcttttccagcttgatagtta

SEQ ID NO: 213365 - DNA, 21 bp, Artificial sequence
  SiRNA target sequence
cttttccagcttgatagttat

SEQ ID NO: 213366 - DNA, 21 bp, Artificial sequence
  SiRNA target sequence
ttttccagcttgatagttatt

SEQ ID NO: 213367 - DNA, 21 bp, Artificial sequence
  SiRNA target sequence
tttccagcttgatagttattt

SEQ ID NO: 213368 - DNA, 21 bp, Artificial sequence
  SiRNA target sequence
ttccagcttgatagttatttt

SEQ ID NO: 213369 - DNA, 21 bp, Artificial sequence
  SiRNA target sequence
tccagcttgatagttattttt

SEQ ID NO: 213370 - DNA, 21 bp, Artificial sequence
  SiRNA target sequence
ccagcttgatagttatttttt

SEQ ID NO: 213371 - DNA, 21 bp, Artificial sequence
  SiRNA target sequence
cagcttgatagttattttttt

SEQ ID NO: 213372 - DNA, 21 bp, Artificial sequence
  SiRNA target sequence
agcttgatagttattttttta

SEQ ID NO: 213373 - DNA, 21 bp, Artificial sequence
  SiRNA target sequence
gcttgatagttatttttttag

SEQ ID NO: 213374 - DNA, 21 bp, Artificial sequence
  SiRNA target sequence
cttgatagttatttttttaga

SEQ ID NO: 213375 - DNA, 21 bp, Artificial sequence
  SiRNA target sequence
ttgatagttatttttttagag

SEQ ID NO: 213376 - DNA, 21 bp, Artificial sequence
  SiRNA target sequence
tgatagttatttttttagaga

SEQ ID NO: 213377 - DNA, 21 bp, Artificial sequence
  SiRNA target sequence
gatagttatttttttagagac

SEQ ID NO: 213378 - DNA, 21 bp, Artificial sequence
  SiRNA target sequence
atagttatttttttagagacc

SEQ ID NO: 213379 - DNA, 21 bp, Artificial sequence
  SiRNA target sequence
tagttatttttttagagacct

SEQ ID NO: 213380 - DNA, 21 bp, Artificial sequence
  SiRNA target sequence
agttatttttttagagacctt

SEQ ID NO: 213381 - DNA, 21 bp, Artificial sequence
  SiRNA target sequence
gttatttttttagagaccttt

SEQ ID NO: 213382 - DNA, 21 bp, Artificial sequence
  SiRNA target sequence
ttatttttttagagacctttt

SEQ ID NO: 213383 - DNA, 21 bp, Artificial sequence
  SiRNA target sequence
tatttttttagagaccttttt

SEQ ID NO: 213384 - DNA, 21 bp, Artificial sequence
  SiRNA target sequence
atttttttagagaccttttta

SEQ ID NO: 213385 - DNA, 21 bp, Artificial sequence
  SiRNA target sequence
tttttttagagacctttttag

SEQ ID NO: 213386 - DNA, 21 bp, Artificial sequence
  SiRNA target sequence
ttttttagagacctttttagt

SEQ ID NO: 213387 - DNA, 21 bp, Artificial sequence
  SiRNA target sequence
tttttagagacctttttagtg

SEQ ID NO: 213388 - DNA, 21 bp, Artificial sequence
  SiRNA target sequence
ttttagagacctttttagtga

SEQ ID NO: 213389 - DNA, 21 bp, Artificial sequence
  SiRNA target sequence
tttagagacctttttagtgat

SEQ ID NO: 213390 - DNA, 21 bp, Artificial sequence
  SiRNA target sequence
ttagagacctttttagtgatg

SEQ ID NO: 213391 - DNA, 21 bp, Artificial sequence
  SiRNA target sequence
tagagacctttttagtgatgg

SEQ ID NO: 213392 - DNA, 21 bp, Artificial sequence
  SiRNA target sequence
agagacctttttagtgatggg

SEQ ID NO: 213393 - DNA, 21 bp, Artificial sequence
  SiRNA target sequence
gagacctttttagtgatggga

SEQ ID NO: 213394 - DNA, 21 bp, Artificial sequence
  SiRNA target sequence
agacctttttagtgatgggaa

SEQ ID NO: 213395 - DNA, 21 bp, Artificial sequence
  SiRNA target sequence
gacctttttagtgatgggaaa

SEQ ID NO: 213396 - DNA, 21 bp, Artificial sequence
  SiRNA target sequence
acctttttagtgatgggaaat

SEQ ID NO: 213397 - DNA, 21 bp, Artificial sequence
  SiRNA target sequence
cctttttagtgatgggaaatg

SEQ ID NO: 213398 - DNA, 21 bp, Artificial sequence
  SiRNA target sequence
ctttttagtgatgggaaatgt

SEQ ID NO: 213399 - DNA, 21 bp, Artificial sequence
  SiRNA target sequence
tttttagtgatgggaaatgtg

SEQ ID NO: 213400 - DNA, 21 bp, Artificial sequence
  SiRNA target sequence
ttttagtgatgggaaatgtgt

SEQ ID NO: 213401 - DNA, 21 bp, Artificial sequence
  SiRNA target sequence
tttagtgatgggaaatgtgtt

SEQ ID NO: 213402 - DNA, 21 bp, Artificial sequence
  SiRNA target sequence
ttagtgatgggaaatgtgttg

SEQ ID NO: 213403 - DNA, 21 bp, Artificial sequence
  SiRNA target sequence
tagtgatgggaaatgtgttgt

SEQ ID NO: 213404 - DNA, 21 bp, Artificial sequence
  SiRNA target sequence
agtgatgggaaatgtgttgta

SEQ ID NO: 213405 - DNA, 21 bp, Artificial sequence
  SiRNA target sequence
gtgatgggaaatgtgttgtaa

SEQ ID NO: 213406 - DNA, 21 bp, Artificial sequence
  SiRNA target sequence
tgatgggaaatgtgttgtaag

SEQ ID NO: 213407 - DNA, 21 bp, Artificial sequence
  SiRNA target sequence
gatgggaaatgtgttgtaaga

SEQ ID NO: 213408 - DNA, 21 bp, Artificial sequence
  SiRNA target sequence
atgggaaatgtgttgtaagag

SEQ ID NO: 213409 - DNA, 21 bp, Artificial sequence
  SiRNA target sequence
tgggaaatgtgttgtaagagg

SEQ ID NO: 213410 - DNA, 21 bp, Artificial sequence
  SiRNA target sequence
gggaaatgtgttgtaagaggc

SEQ ID NO: 213411 - DNA, 21 bp, Artificial sequence
  SiRNA target sequence
ggaaatgtgttgtaagaggct

SEQ ID NO: 213412 - DNA, 21 bp, Artificial sequence
  SiRNA target sequence
gaaatgtgttgtaagaggcta

SEQ ID NO: 213413 - DNA, 21 bp, Artificial sequence
  SiRNA target sequence
aaatgtgttgtaagaggctat

SEQ ID NO: 213414 - DNA, 21 bp, Artificial sequence
  SiRNA target sequence
aatgtgttgtaagaggctatg

SEQ ID NO: 213415 - DNA, 21 bp, Artificial sequence
  SiRNA target sequence
atgtgttgtaagaggctatga

SEQ ID NO: 213416 - DNA, 21 bp, Artificial sequence
  SiRNA target sequence
tgtgttgtaagaggctatgat

SEQ ID NO: 213417 - DNA, 21 bp, Artificial sequence
  SiRNA target sequence
gtgttgtaagaggctatgatg

SEQ ID NO: 213418 - DNA, 21 bp, Artificial sequence
  SiRNA target sequence
tgttgtaagaggctatgatgc

SEQ ID NO: 213419 - DNA, 21 bp, Artificial sequence
  SiRNA target sequence
gttgtaagaggctatgatgct

SEQ ID NO: 213420 - DNA, 21 bp, Artificial sequence
  SiRNA target sequence
ttgtaagaggctatgatgctt

SEQ ID NO: 213421 - DNA, 21 bp, Artificial sequence
  SiRNA target sequence
tgtaagaggctatgatgcttt

SEQ ID NO: 213422 - DNA, 21 bp, Artificial sequence
  SiRNA target sequence
gtaagaggctatgatgcttta

SEQ ID NO: 213423 - DNA, 21 bp, Artificial sequence
  SiRNA target sequence
taagaggctatgatgctttat

SEQ ID NO: 213424 - DNA, 21 bp, Artificial sequence
  SiRNA target sequence
aagaggctatgatgctttatt

SEQ ID NO: 213425 - DNA, 21 bp, Artificial sequence
  SiRNA target sequence
agaggctatgatgctttatta

SEQ ID NO: 213426 - DNA, 21 bp, Artificial sequence
  SiRNA target sequence
gaggctatgatgctttattat

SEQ ID NO: 213427 - DNA, 21 bp, Artificial sequence
  SiRNA target sequence
aggctatgatgctttattatc

SEQ ID NO: 213428 - DNA, 21 bp, Artificial sequence
  SiRNA target sequence
ggctatgatgctttattatct

SEQ ID NO: 213429 - DNA, 21 bp, Artificial sequence
  SiRNA target sequence
gctatgatgctttattatctt

SEQ ID NO: 213430 - DNA, 21 bp, Artificial sequence
  SiRNA target sequence
ctatgatgctttattatcttt

SEQ ID NO: 213431 - DNA, 21 bp, Artificial sequence
  SiRNA target sequence
tatgatgctttattatctttg

SEQ ID NO: 213432 - DNA, 21 bp, Artificial sequence
  SiRNA target sequence
atgatgctttattatctttgg

SEQ ID NO: 213433 - DNA, 21 bp, Artificial sequence
  SiRNA target sequence
tgatgctttattatctttggc

SEQ ID NO: 213434 - DNA, 21 bp, Artificial sequence
  SiRNA target sequence
gatgctttattatctttggca

SEQ ID NO: 213435 - DNA, 21 bp, Artificial sequence
  SiRNA target sequence
atgctttattatctttggcac

SEQ ID NO: 213436 - DNA, 21 bp, Artificial sequence
  SiRNA target sequence
tgctttattatctttggcact

SEQ ID NO: 213437 - DNA, 21 bp, Artificial sequence
  SiRNA target sequence
gctttattatctttggcactg

SEQ ID NO: 213438 - DNA, 21 bp, Artificial sequence
  SiRNA target sequence
ctttattatctttggcactgg

SEQ ID NO: 213439 - DNA, 21 bp, Artificial sequence
  SiRNA target sequence
tttattatctttggcactggt

SEQ ID NO: 213440 - DNA, 21 bp, Artificial sequence
  SiRNA target sequence
ttattatctttggcactggtc

SEQ ID NO: 213441 - DNA, 21 bp, Artificial sequence
  SiRNA target sequence
tattatctttggcactggtct

SEQ ID NO: 213442 - DNA, 21 bp, Artificial sequence
  SiRNA target sequence
attatctttggcactggtctt

SEQ ID NO: 213443 - DNA, 21 bp, Artificial sequence
  SiRNA target sequence
ttatctttggcactggtcttt

SEQ ID NO: 213444 - DNA, 21 bp, Artificial sequence
  SiRNA target sequence
tatctttggcactggtcttta

SEQ ID NO: 213445 - DNA, 21 bp, Artificial sequence
  SiRNA target sequence
atctttggcactggtctttaa

SEQ ID NO: 213446 - DNA, 21 bp, Artificial sequence
  SiRNA target sequence
tctttggcactggtctttaac

SEQ ID NO: 213447 - DNA, 21 bp, Artificial sequence
  SiRNA target sequence
ctttggcactggtctttaacg

SEQ ID NO: 213448 - DNA, 21 bp, Artificial sequence
  SiRNA target sequence
tttggcactggtctttaacga

SEQ ID NO: 213449 - DNA, 21 bp, Artificial sequence
  SiRNA target sequence
ttggcactggtctttaacgaa

SEQ ID NO: 213450 - DNA, 21 bp, Artificial sequence
  SiRNA target sequence
tggcactggtctttaacgaat

SEQ ID NO: 213451 - DNA, 21 bp, Artificial sequence
  SiRNA target sequence
ggcactggtctttaacgaatg

SEQ ID NO: 213452 - DNA, 21 bp, Artificial sequence
  SiRNA target sequence
gcactggtctttaacgaatgg

SEQ ID NO: 213453 - DNA, 21 bp, Artificial sequence
  SiRNA target sequence
cactggtctttaacgaatgga

SEQ ID NO: 213454 - DNA, 21 bp, Artificial sequence
  SiRNA target sequence
actggtctttaacgaatggac

SEQ ID NO: 213455 - DNA, 21 bp, Artificial sequence
  SiRNA target sequence
ctggtctttaacgaatggaca

SEQ ID NO: 213456 - DNA, 21 bp, Artificial sequence
  SiRNA target sequence
tggtctttaacgaatggacat

SEQ ID NO: 213457 - DNA, 21 bp, Artificial sequence
  SiRNA target sequence
ggtctttaacgaatggacatc

SEQ ID NO: 213458 - DNA, 21 bp, Artificial sequence
  SiRNA target sequence
gtctttaacgaatggacatcc

SEQ ID NO: 213459 - DNA, 21 bp, Artificial sequence
  SiRNA target sequence
tctttaacgaatggacatcct

SEQ ID NO: 213460 - DNA, 21 bp, Artificial sequence
  SiRNA target sequence
ctttaacgaatggacatcctc

SEQ ID NO: 213461 - DNA, 21 bp, Artificial sequence
  SiRNA target sequence
tttaacgaatggacatcctct

SEQ ID NO: 213462 - DNA, 21 bp, Artificial sequence
  SiRNA target sequence
ttaacgaatggacatcctctc

SEQ ID NO: 213463 - DNA, 21 bp, Artificial sequence
  SiRNA target sequence
taacgaatggacatcctctct

SEQ ID NO: 213464 - DNA, 21 bp, Artificial sequence
  SiRNA target sequence
aacgaatggacatcctctcta

SEQ ID NO: 213465 - DNA, 21 bp, Artificial sequence
  SiRNA target sequence
acgaatggacatcctctctag

SEQ ID NO: 213466 - DNA, 21 bp, Artificial sequence
  SiRNA target sequence
cgaatggacatcctctctagt

SEQ ID NO: 213467 - DNA, 21 bp, Artificial sequence
  SiRNA target sequence
gaatggacatcctctctagtt

SEQ ID NO: 213468 - DNA, 21 bp, Artificial sequence
  SiRNA target sequence
aatggacatcctctctagttt

SEQ ID NO: 213469 - DNA, 21 bp, Artificial sequence
  SiRNA target sequence
atggacatcctctctagttta

SEQ ID NO: 213470 - DNA, 21 bp, Artificial sequence
  SiRNA target sequence
tggacatcctctctagtttac

SEQ ID NO: 213471 - DNA, 21 bp, Artificial sequence
  SiRNA target sequence
ggacatcctctctagtttaca

SEQ ID NO: 213472 - DNA, 21 bp, Artificial sequence
  SiRNA target sequence
gacatcctctctagtttacat

SEQ ID NO: 213473 - DNA, 21 bp, Artificial sequence
  SiRNA target sequence
acatcctctctagtttacatt

SEQ ID NO: 213474 - DNA, 21 bp, Artificial sequence
  SiRNA target sequence
catcctctctagtttacattg

SEQ ID NO: 213475 - DNA, 21 bp, Artificial sequence
  SiRNA target sequence
atcctctctagtttacattgt

SEQ ID NO: 213476 - DNA, 21 bp, Artificial sequence
  SiRNA target sequence
tcctctctagtttacattgtt

SEQ ID NO: 213477 - DNA, 21 bp, Artificial sequence
  SiRNA target sequence
cctctctagtttacattgttt

SEQ ID NO: 213478 - DNA, 21 bp, Artificial sequence
  SiRNA target sequence
ctctctagtttacattgtttc

SEQ ID NO: 213479 - DNA, 21 bp, Artificial sequence
  SiRNA target sequence
tctctagtttacattgtttca

SEQ ID NO: 213480 - DNA, 21 bp, Artificial sequence
  SiRNA target sequence
ctctagtttacattgtttcag

SEQ ID NO: 213481 - DNA, 21 bp, Artificial sequence
  SiRNA target sequence
tctagtttacattgtttcaga

SEQ ID NO: 213482 - DNA, 21 bp, Artificial sequence
  SiRNA target sequence
ctagtttacattgtttcagaa

SEQ ID NO: 213483 - DNA, 21 bp, Artificial sequence
  SiRNA target sequence
tagtttacattgtttcagaaa

SEQ ID NO: 213484 - DNA, 21 bp, Artificial sequence
  SiRNA target sequence
agtttacattgtttcagaaat

SEQ ID NO: 213485 - DNA, 21 bp, Artificial sequence
  SiRNA target sequence
gtttacattgtttcagaaatg

SEQ ID NO: 213486 - DNA, 21 bp, Artificial sequence
  SiRNA target sequence
tttacattgtttcagaaatgt

SEQ ID NO: 213487 - DNA, 21 bp, Artificial sequence
  SiRNA target sequence
ttacattgtttcagaaatgtt

SEQ ID NO: 213488 - DNA, 21 bp, Artificial sequence
  SiRNA target sequence
tacattgtttcagaaatgttt

SEQ ID NO: 213489 - DNA, 21 bp, Artificial sequence
  SiRNA target sequence
acattgtttcagaaatgtttg

SEQ ID NO: 213490 - DNA, 21 bp, Artificial sequence
  SiRNA target sequence
cattgtttcagaaatgtttgg

SEQ ID NO: 213491 - DNA, 21 bp, Artificial sequence
  SiRNA target sequence
attgtttcagaaatgtttggt

SEQ ID NO: 213492 - DNA, 21 bp, Artificial sequence
  SiRNA target sequence
ttgtttcagaaatgtttggta

SEQ ID NO: 213493 - DNA, 21 bp, Artificial sequence
  SiRNA target sequence
tgtttcagaaatgtttggtaa

SEQ ID NO: 213494 - DNA, 21 bp, Artificial sequence
  SiRNA target sequence
gtttcagaaatgtttggtaat

SEQ ID NO: 213495 - DNA, 21 bp, Artificial sequence
  SiRNA target sequence
tttcagaaatgtttggtaatt

SEQ ID NO: 213496 - DNA, 21 bp, Artificial sequence
  SiRNA target sequence
ttcagaaatgtttggtaattt

SEQ ID NO: 213497 - DNA, 21 bp, Artificial sequence
  SiRNA target sequence
tcagaaatgtttggtaattta

SEQ ID NO: 213498 - DNA, 21 bp, Artificial sequence
  SiRNA target sequence
cagaaatgtttggtaatttag

SEQ ID NO: 213499 - DNA, 21 bp, Artificial sequence
  SiRNA target sequence
agaaatgtttggtaatttagt

SEQ ID NO: 213500 - DNA, 21 bp, Artificial sequence
  SiRNA target sequence
gaaatgtttggtaatttagta

SEQ ID NO: 213501 - DNA, 21 bp, Artificial sequence
  SiRNA target sequence
aaatgtttggtaatttagtat

SEQ ID NO: 213502 - DNA, 21 bp, Artificial sequence
  SiRNA target sequence
aatgtttggtaatttagtatt

SEQ ID NO: 213503 - DNA, 21 bp, Artificial sequence
  SiRNA target sequence
atgtttggtaatttagtattg

SEQ ID NO: 213504 - DNA, 21 bp, Artificial sequence
  SiRNA target sequence
tgtttggtaatttagtattgt

SEQ ID NO: 213505 - DNA, 21 bp, Artificial sequence
  SiRNA target sequence
gtttggtaatttagtattgtc

SEQ ID NO: 213506 - DNA, 21 bp, Artificial sequence
  SiRNA target sequence
tttggtaatttagtattgtct

SEQ ID NO: 213507 - DNA, 21 bp, Artificial sequence
  SiRNA target sequence
ttggtaatttagtattgtctt

SEQ ID NO: 213508 - DNA, 21 bp, Artificial sequence
  SiRNA target sequence
tggtaatttagtattgtctta

SEQ ID NO: 213509 - DNA, 21 bp, Artificial sequence
  SiRNA target sequence
ggtaatttagtattgtcttat

SEQ ID NO: 213510 - DNA, 21 bp, Artificial sequence
  SiRNA target sequence
gtaatttagtattgtcttatt

SEQ ID NO: 213511 - DNA, 21 bp, Artificial sequence
  SiRNA target sequence
taatttagtattgtcttattt

SEQ ID NO: 213512 - DNA, 21 bp, Artificial sequence
  SiRNA target sequence
aatttagtattgtcttatttc

SEQ ID NO: 213513 - DNA, 21 bp, Artificial sequence
  SiRNA target sequence
atttagtattgtcttatttct

SEQ ID NO: 213514 - DNA, 21 bp, Artificial sequence
  SiRNA target sequence
tttagtattgtcttatttctt

SEQ ID NO: 213515 - DNA, 21 bp, Artificial sequence
  SiRNA target sequence
ttagtattgtcttatttcttc

SEQ ID NO: 213516 - DNA, 21 bp, Artificial sequence
  SiRNA target sequence
tagtattgtcttatttcttct

SEQ ID NO: 213517 - DNA, 21 bp, Artificial sequence
  SiRNA target sequence
agtattgtcttatttcttctt

SEQ ID NO: 213518 - DNA, 21 bp, Artificial sequence
  SiRNA target sequence
gtattgtcttatttcttcttg

SEQ ID NO: 213519 - DNA, 21 bp, Artificial sequence
  SiRNA target sequence
tattgtcttatttcttcttga

SEQ ID NO: 213520 - DNA, 21 bp, Artificial sequence
  SiRNA target sequence
attgtcttatttcttcttgac

SEQ ID NO: 213521 - DNA, 21 bp, Artificial sequence
  SiRNA target sequence
ttgtcttatttcttcttgacg

SEQ ID NO: 213522 - DNA, 21 bp, Artificial sequence
  SiRNA target sequence
tgtcttatttcttcttgacgt

SEQ ID NO: 213523 - DNA, 21 bp, Artificial sequence
  SiRNA target sequence
gtcttatttcttcttgacgtt

SEQ ID NO: 213524 - DNA, 21 bp, Artificial sequence
  SiRNA target sequence
tcttatttcttcttgacgttt

SEQ ID NO: 213525 - DNA, 21 bp, Artificial sequence
  SiRNA target sequence
cttatttcttcttgacgtttg

SEQ ID NO: 213526 - DNA, 21 bp, Artificial sequence
  SiRNA target sequence
ttatttcttcttgacgtttgc

SEQ ID NO: 213527 - DNA, 21 bp, Artificial sequence
  SiRNA target sequence
tatttcttcttgacgtttgct

SEQ ID NO: 213528 - DNA, 21 bp, Artificial sequence
  SiRNA target sequence
atttcttcttgacgtttgcta

SEQ ID NO: 213529 - DNA, 21 bp, Artificial sequence
  SiRNA target sequence
tttcttcttgacgtttgctaa

SEQ ID NO: 213530 - DNA, 21 bp, Artificial sequence
  SiRNA target sequence
ttcttcttgacgtttgctaat

SEQ ID NO: 213531 - DNA, 21 bp, Artificial sequence
  SiRNA target sequence
tcttcttgacgtttgctaatt

SEQ ID NO: 213532 - DNA, 21 bp, Artificial sequence
  SiRNA target sequence
cttcttgacgtttgctaattc

SEQ ID NO: 213533 - DNA, 21 bp, Artificial sequence
  SiRNA target sequence
ttcttgacgtttgctaattct

SEQ ID NO: 213534 - DNA, 21 bp, Artificial sequence
  SiRNA target sequence
tcttgacgtttgctaattctt

SEQ ID NO: 213535 - DNA, 21 bp, Artificial sequence
  SiRNA target sequence
cttgacgtttgctaattcttt

SEQ ID NO: 213536 - DNA, 21 bp, Artificial sequence
  SiRNA target sequence
ttgacgtttgctaattcttta

SEQ ID NO: 213537 - DNA, 21 bp, Artificial sequence
  SiRNA target sequence
tgacgtttgctaattctttaa

SEQ ID NO: 213538 - DNA, 21 bp, Artificial sequence
  SiRNA target sequence
gacgtttgctaattctttaac

SEQ ID NO: 213539 - DNA, 21 bp, Artificial sequence
  SiRNA target sequence
acgtttgctaattctttaaca

SEQ ID NO: 213540 - DNA, 21 bp, Artificial sequence
  SiRNA target sequence
cgtttgctaattctttaacaa

SEQ ID NO: 213541 - DNA, 21 bp, Artificial sequence
  SiRNA target sequence
gtttgctaattctttaacaac

SEQ ID NO: 213542 - DNA, 21 bp, Artificial sequence
  SiRNA target sequence
tttgctaattctttaacaact

SEQ ID NO: 213543 - DNA, 21 bp, Artificial sequence
  SiRNA target sequence
ttgctaattctttaacaactc

SEQ ID NO: 213544 - DNA, 21 bp, Artificial sequence
  SiRNA target sequence
tgctaattctttaacaactcc

SEQ ID NO: 213545 - DNA, 21 bp, Artificial sequence
  SiRNA target sequence
gctaattctttaacaactcca

SEQ ID NO: 213546 - DNA, 21 bp, Artificial sequence
  SiRNA target sequence
ctaattctttaacaactccag

SEQ ID NO: 213547 - DNA, 21 bp, Artificial sequence
  SiRNA target sequence
taattctttaacaactccagg

SEQ ID NO: 213548 - DNA, 21 bp, Artificial sequence
  SiRNA target sequence
aattctttaacaactccagga

SEQ ID NO: 213549 - DNA, 21 bp, Artificial sequence
  SiRNA target sequence
attctttaacaactccaggac

SEQ ID NO: 213550 - DNA, 21 bp, Artificial sequence
  SiRNA target sequence
ttctttaacaactccaggaca

SEQ ID NO: 213551 - DNA, 21 bp, Artificial sequence
  SiRNA target sequence
tctttaacaactccaggacaa

SEQ ID NO: 213552 - DNA, 21 bp, Artificial sequence
  SiRNA target sequence
ctttaacaactccaggacaaa

SEQ ID NO: 213553 - DNA, 21 bp, Artificial sequence
  SiRNA target sequence
tttaacaactccaggacaaag

SEQ ID NO: 213554 - DNA, 21 bp, Artificial sequence
  SiRNA target sequence
ttaacaactccaggacaaagt

SEQ ID NO: 213555 - DNA, 21 bp, Artificial sequence
  SiRNA target sequence
taacaactccaggacaaagtg

SEQ ID NO: 213556 - DNA, 21 bp, Artificial sequence
  SiRNA target sequence
aacaactccaggacaaagtgc

SEQ ID NO: 213557 - DNA, 21 bp, Artificial sequence
  SiRNA target sequence
acaactccaggacaaagtgca

SEQ ID NO: 213558 - DNA, 21 bp, Artificial sequence
  SiRNA target sequence
caactccaggacaaagtgcaa

SEQ ID NO: 213559 - DNA, 21 bp, Artificial sequence
  SiRNA target sequence
aactccaggacaaagtgcaag

SEQ ID NO: 213560 - DNA, 21 bp, Artificial sequence
  SiRNA target sequence
actccaggacaaagtgcaaga

SEQ ID NO: 213561 - DNA, 21 bp, Artificial sequence
  SiRNA target sequence
ctccaggacaaagtgcaagat

SEQ ID NO: 213562 - DNA, 21 bp, Artificial sequence
  SiRNA target sequence
tccaggacaaagtgcaagatt

SEQ ID NO: 213563 - DNA, 21 bp, Artificial sequence
  SiRNA target sequence
ccaggacaaagtgcaagattc

SEQ ID NO: 213564 - DNA, 21 bp, Artificial sequence
  SiRNA target sequence
caggacaaagtgcaagattca

SEQ ID NO: 213565 - DNA, 21 bp, Artificial sequence
  SiRNA target sequence
aggacaaagtgcaagattcat

SEQ ID NO: 213566 - DNA, 21 bp, Artificial sequence
  SiRNA target sequence
ggacaaagtgcaagattcata

SEQ ID NO: 213567 - DNA, 21 bp, Artificial sequence
  SiRNA target sequence
gacaaagtgcaagattcatac

SEQ ID NO: 213568 - DNA, 21 bp, Artificial sequence
  SiRNA target sequence
acaaagtgcaagattcatacc

SEQ ID NO: 213569 - DNA, 21 bp, Artificial sequence
  SiRNA target sequence
caaagtgcaagattcatacct

SEQ ID NO: 213570 - DNA, 21 bp, Artificial sequence
  SiRNA target sequence
aaagtgcaagattcatacctt

SEQ ID NO: 213571 - DNA, 21 bp, Artificial sequence
  SiRNA target sequence
aagtgcaagattcataccttt

SEQ ID NO: 213572 - DNA, 21 bp, Artificial sequence
  SiRNA target sequence
agtgcaagattcataccttta

SEQ ID NO: 213573 - DNA, 21 bp, Artificial sequence
  SiRNA target sequence
gtgcaagattcatacctttat

SEQ ID NO: 213574 - DNA, 21 bp, Artificial sequence
  SiRNA target sequence
tgcaagattcatacctttatt

SEQ ID NO: 213575 - DNA, 21 bp, Artificial sequence
  SiRNA target sequence
gcaagattcatacctttattt

SEQ ID NO: 213576 - DNA, 21 bp, Artificial sequence
  SiRNA target sequence
caagattcatacctttatttt

SEQ ID NO: 213577 - DNA, 21 bp, Artificial sequence
  SiRNA target sequence
aagattcatacctttatttta

SEQ ID NO: 213578 - DNA, 21 bp, Artificial sequence
  SiRNA target sequence
agattcatacctttattttat

SEQ ID NO: 213579 - DNA, 21 bp, Artificial sequence
  SiRNA target sequence
gattcatacctttattttatg

SEQ ID NO: 213580 - DNA, 21 bp, Artificial sequence
  SiRNA target sequence
attcatacctttattttatgt

SEQ ID NO: 213581 - DNA, 21 bp, Artificial sequence
  SiRNA target sequence
ttcatacctttattttatgtt

SEQ ID NO: 213582 - DNA, 21 bp, Artificial sequence
  SiRNA target sequence
tcatacctttattttatgttt

SEQ ID NO: 213583 - DNA, 21 bp, Artificial sequence
  SiRNA target sequence
catacctttattttatgtttt

SEQ ID NO: 213584 - DNA, 21 bp, Artificial sequence
  SiRNA target sequence
atacctttattttatgttttc

SEQ ID NO: 213585 - DNA, 21 bp, Artificial sequence
  SiRNA target sequence
tacctttattttatgttttct

SEQ ID NO: 213586 - DNA, 21 bp, Artificial sequence
  SiRNA target sequence
acctttattttatgttttctc

SEQ ID NO: 213587 - DNA, 21 bp, Artificial sequence
  SiRNA target sequence
cctttattttatgttttctcg

SEQ ID NO: 213588 - DNA, 21 bp, Artificial sequence
  SiRNA target sequence
ctttattttatgttttctcga

SEQ ID NO: 213589 - DNA, 21 bp, Artificial sequence
  SiRNA target sequence
tttattttatgttttctcgaa

SEQ ID NO: 213590 - DNA, 21 bp, Artificial sequence
  SiRNA target sequence
ttattttatgttttctcgaat

SEQ ID NO: 213591 - DNA, 21 bp, Artificial sequence
  SiRNA target sequence
tattttatgttttctcgaata

SEQ ID NO: 213592 - DNA, 21 bp, Artificial sequence
  SiRNA target sequence
attttatgttttctcgaatat

SEQ ID NO: 213593 - DNA, 21 bp, Artificial sequence
  SiRNA target sequence
ttttatgttttctcgaatatt

SEQ ID NO: 213594 - DNA, 21 bp, Artificial sequence
  SiRNA target sequence
tttatgttttctcgaatattt

SEQ ID NO: 213595 - DNA, 21 bp, Artificial sequence
  SiRNA target sequence
ttatgttttctcgaatatttc

SEQ ID NO: 213596 - DNA, 21 bp, Artificial sequence
  SiRNA target sequence
tatgttttctcgaatatttct

SEQ ID NO: 213597 - DNA, 21 bp, Artificial sequence
  SiRNA target sequence
atgttttctcgaatatttctc

SEQ ID NO: 213598 - DNA, 21 bp, Artificial sequence
  SiRNA target sequence
tgttttctcgaatatttctct

SEQ ID NO: 213599 - DNA, 21 bp, Artificial sequence
  SiRNA target sequence
gttttctcgaatatttctctt

SEQ ID NO: 213600 - DNA, 21 bp, Artificial sequence
  SiRNA target sequence
ttttctcgaatatttctcttt

SEQ ID NO: 213601 - DNA, 21 bp, Artificial sequence
  SiRNA target sequence
tttctcgaatatttctctttt

SEQ ID NO: 213602 - DNA, 21 bp, Artificial sequence
  SiRNA target sequence
ttctcgaatatttctcttttc

SEQ ID NO: 213603 - DNA, 21 bp, Artificial sequence
  SiRNA target sequence
tctcgaatatttctcttttct

SEQ ID NO: 213604 - DNA, 21 bp, Artificial sequence
  SiRNA target sequence
ctcgaatatttctcttttctt

SEQ ID NO: 213605 - DNA, 21 bp, Artificial sequence
  SiRNA target sequence
tcgaatatttctcttttctta

SEQ ID NO: 213606 - DNA, 21 bp, Artificial sequence
  SiRNA target sequence
cgaatatttctcttttcttat

SEQ ID NO: 213607 - DNA, 21 bp, Artificial sequence
  SiRNA target sequence
gaatatttctcttttcttatc

SEQ ID NO: 213608 - DNA, 21 bp, Artificial sequence
  SiRNA target sequence
aatatttctcttttcttatct

SEQ ID NO: 213609 - DNA, 21 bp, Artificial sequence
  SiRNA target sequence
atatttctcttttcttatctt

SEQ ID NO: 213610 - DNA, 21 bp, Artificial sequence
  SiRNA target sequence
tatttctcttttcttatcttc

SEQ ID NO: 213611 - DNA, 21 bp, Artificial sequence
  SiRNA target sequence
atttctcttttcttatcttct

SEQ ID NO: 213612 - DNA, 21 bp, Artificial sequence
  SiRNA target sequence
tttctcttttcttatcttctc

SEQ ID NO: 213613 - DNA, 21 bp, Artificial sequence
  SiRNA target sequence
ttctcttttcttatcttctca

SEQ ID NO: 213614 - DNA, 21 bp, Artificial sequence
  SiRNA target sequence
tctcttttcttatcttctcaa

SEQ ID NO: 213615 - DNA, 21 bp, Artificial sequence
  SiRNA target sequence
ctcttttcttatcttctcaag

SEQ ID NO: 213616 - DNA, 21 bp, Artificial sequence
  SiRNA target sequence
tcttttcttatcttctcaagt

SEQ ID NO: 213617 - DNA, 21 bp, Artificial sequence
  SiRNA target sequence
cttttcttatcttctcaagtg

SEQ ID NO: 213618 - DNA, 21 bp, Artificial sequence
  SiRNA target sequence
ttttcttatcttctcaagtga

SEQ ID NO: 213619 - DNA, 21 bp, Artificial sequence
  SiRNA target sequence
tttcttatcttctcaagtgac

SEQ ID NO: 213620 - DNA, 21 bp, Artificial sequence
  SiRNA target sequence
ttcttatcttctcaagtgaca

SEQ ID NO: 213621 - DNA, 21 bp, Artificial sequence
  SiRNA target sequence
tcttatcttctcaagtgacag

SEQ ID NO: 213622 - DNA, 21 bp, Artificial sequence
  SiRNA target sequence
cttatcttctcaagtgacaga

SEQ ID NO: 213623 - DNA, 21 bp, Artificial sequence
  SiRNA target sequence
ttatcttctcaagtgacagaa

SEQ ID NO: 213624 - DNA, 21 bp, Artificial sequence
  SiRNA target sequence
tatcttctcaagtgacagaac

SEQ ID NO: 213625 - DNA, 21 bp, Artificial sequence
  SiRNA target sequence
atcttctcaagtgacagaact

SEQ ID NO: 213626 - DNA, 21 bp, Artificial sequence
  SiRNA target sequence
tcttctcaagtgacagaactt

SEQ ID NO: 213627 - DNA, 21 bp, Artificial sequence
  SiRNA target sequence
cttctcaagtgacagaacttt

SEQ ID NO: 213628 - DNA, 21 bp, Artificial sequence
  SiRNA target sequence
ttctcaagtgacagaactttt

SEQ ID NO: 213629 - DNA, 21 bp, Artificial sequence
  SiRNA target sequence
tctcaagtgacagaacttttt

SEQ ID NO: 213630 - DNA, 21 bp, Artificial sequence
  SiRNA target sequence
ctcaagtgacagaacttttta

SEQ ID NO: 213631 - DNA, 21 bp, Artificial sequence
  SiRNA target sequence
tcaagtgacagaactttttac

SEQ ID NO: 213632 - DNA, 21 bp, Artificial sequence
  SiRNA target sequence
caagtgacagaactttttaca

SEQ ID NO: 213633 - DNA, 21 bp, Artificial sequence
  SiRNA target sequence
aagtgacagaactttttacaa

SEQ ID NO: 213634 - DNA, 21 bp, Artificial sequence
  SiRNA target sequence
agtgacagaactttttacaag

SEQ ID NO: 213635 - DNA, 21 bp, Artificial sequence
  SiRNA target sequence
gtgacagaactttttacaaga

SEQ ID NO: 213636 - DNA, 21 bp, Artificial sequence
  SiRNA target sequence
tgacagaactttttacaagat

SEQ ID NO: 213637 - DNA, 21 bp, Artificial sequence
  SiRNA target sequence
gacagaactttttacaagata

SEQ ID NO: 213638 - DNA, 21 bp, Artificial sequence
  SiRNA target sequence
acagaactttttacaagatat

SEQ ID NO: 213639 - DNA, 21 bp, Artificial sequence
  SiRNA target sequence
cagaactttttacaagatata

SEQ ID NO: 213640 - DNA, 21 bp, Artificial sequence
  SiRNA target sequence
agaactttttacaagatatag

SEQ ID NO: 213641 - DNA, 21 bp, Artificial sequence
  SiRNA target sequence
gaactttttacaagatataga

SEQ ID NO: 213642 - DNA, 21 bp, Artificial sequence
  SiRNA target sequence
aactttttacaagatatagat

SEQ ID NO: 213643 - DNA, 21 bp, Artificial sequence
  SiRNA target sequence
actttttacaagatatagatc

SEQ ID NO: 213644 - DNA, 21 bp, Artificial sequence
  SiRNA target sequence
ctttttacaagatatagatca

SEQ ID NO: 213645 - DNA, 21 bp, Artificial sequence
  SiRNA target sequence
tttttacaagatatagatcaa

SEQ ID NO: 213646 - DNA, 21 bp, Artificial sequence
  SiRNA target sequence
ttttacaagatatagatcaaa

SEQ ID NO: 213647 - DNA, 21 bp, Artificial sequence
  SiRNA target sequence
tttacaagatatagatcaaag

SEQ ID NO: 213648 - DNA, 21 bp, Artificial sequence
  SiRNA target sequence
ttacaagatatagatcaaagc

SEQ ID NO: 213649 - DNA, 21 bp, Artificial sequence
  SiRNA target sequence
tacaagatatagatcaaagct

SEQ ID NO: 213650 - DNA, 21 bp, Artificial sequence
  SiRNA target sequence
acaagatatagatcaaagctc

SEQ ID NO: 213651 - DNA, 21 bp, Artificial sequence
  SiRNA target sequence
caagatatagatcaaagctca

SEQ ID NO: 213652 - DNA, 21 bp, Artificial sequence
  SiRNA target sequence
aagatatagatcaaagctcac

SEQ ID NO: 213653 - DNA, 21 bp, Artificial sequence
  SiRNA target sequence
agatatagatcaaagctcact

SEQ ID NO: 213654 - DNA, 21 bp, Artificial sequence
  SiRNA target sequence
gatatagatcaaagctcactt

SEQ ID NO: 213655 - DNA, 21 bp, Artificial sequence
  SiRNA target sequence
atatagatcaaagctcacttt

SEQ ID NO: 213656 - DNA, 21 bp, Artificial sequence
  SiRNA target sequence
tatagatcaaagctcactttc

SEQ ID NO: 213657 - DNA, 21 bp, Artificial sequence
  SiRNA target sequence
atagatcaaagctcactttct

SEQ ID NO: 213658 - DNA, 21 bp, Artificial sequence
  SiRNA target sequence
tagatcaaagctcactttctc

SEQ ID NO: 213659 - DNA, 21 bp, Artificial sequence
  SiRNA target sequence
agatcaaagctcactttctca

SEQ ID NO: 213660 - DNA, 21 bp, Artificial sequence
  SiRNA target sequence
gatcaaagctcactttctcag

SEQ ID NO: 213661 - DNA, 21 bp, Artificial sequence
  SiRNA target sequence
atcaaagctcactttctcaga

SEQ ID NO: 213662 - DNA, 21 bp, Artificial sequence
  SiRNA target sequence
tcaaagctcactttctcagag

SEQ ID NO: 213663 - DNA, 21 bp, Artificial sequence
  SiRNA target sequence
caaagctcactttctcagagg

SEQ ID NO: 213664 - DNA, 21 bp, Artificial sequence
  SiRNA target sequence
aaagctcactttctcagaggc

SEQ ID NO: 213665 - DNA, 21 bp, Artificial sequence
  SiRNA target sequence
aagctcactttctcagaggcg

SEQ ID NO: 213666 - DNA, 21 bp, Artificial sequence
  SiRNA target sequence
agctcactttctcagaggcgg

SEQ ID NO: 213667 - DNA, 21 bp, Artificial sequence
  SiRNA target sequence
gctcactttctcagaggcgga

SEQ ID NO: 213668 - DNA, 21 bp, Artificial sequence
  SiRNA target sequence
ctcactttctcagaggcggaa

SEQ ID NO: 213669 - DNA, 21 bp, Artificial sequence
  SiRNA target sequence
tcactttctcagaggcggaat

SEQ ID NO: 213670 - DNA, 21 bp, Artificial sequence
  SiRNA target sequence
cactttctcagaggcggaatt

SEQ ID NO: 213671 - DNA, 21 bp, Artificial sequence
  SiRNA target sequence
actttctcagaggcggaattt

SEQ ID NO: 213672 - DNA, 21 bp, Artificial sequence
  SiRNA target sequence
ctttctcagaggcggaatttt

SEQ ID NO: 213673 - DNA, 21 bp, Artificial sequence
  SiRNA target sequence
tttctcagaggcggaattttt

SEQ ID NO: 213674 - DNA, 21 bp, Artificial sequence
  SiRNA target sequence
ttctcagaggcggaattttta

SEQ ID NO: 213675 - DNA, 21 bp, Artificial sequence
  SiRNA target sequence
tctcagaggcggaatttttat

SEQ ID NO: 213676 - DNA, 21 bp, Artificial sequence
  SiRNA target sequence
ctcagaggcggaatttttata

SEQ ID NO: 213677 - DNA, 21 bp, Artificial sequence
  SiRNA target sequence
tcagaggcggaatttttatat

SEQ ID NO: 213678 - DNA, 21 bp, Artificial sequence
  SiRNA target sequence
cagaggcggaatttttatata

SEQ ID NO: 213679 - DNA, 21 bp, Artificial sequence
  SiRNA target sequence
agaggcggaatttttatataa

SEQ ID NO: 213680 - DNA, 21 bp, Artificial sequence
  SiRNA target sequence
gaggcggaatttttatataat

SEQ ID NO: 213681 - DNA, 21 bp, Artificial sequence
  SiRNA target sequence
aggcggaatttttatataatg

SEQ ID NO: 213682 - DNA, 21 bp, Artificial sequence
  SiRNA target sequence
ggcggaatttttatataatgg

SEQ ID NO: 213683 - DNA, 21 bp, Artificial sequence
  SiRNA target sequence
gcggaatttttatataatggc

SEQ ID NO: 213684 - DNA, 21 bp, Artificial sequence
  SiRNA target sequence
cggaatttttatataatggct

SEQ ID NO: 213685 - DNA, 21 bp, Artificial sequence
  SiRNA target sequence
ggaatttttatataatggctt

SEQ ID NO: 213686 - DNA, 21 bp, Artificial sequence
  SiRNA target sequence
gaatttttatataatggcttt

SEQ ID NO: 213687 - DNA, 21 bp, Artificial sequence
  SiRNA target sequence
aatttttatataatggctttt

SEQ ID NO: 213688 - DNA, 21 bp, Artificial sequence
  SiRNA target sequence
atttttatataatggcttttt

SEQ ID NO: 213689 - DNA, 21 bp, Artificial sequence
  SiRNA target sequence
tttttatataatggctttttt

SEQ ID NO: 213690 - DNA, 21 bp, Artificial sequence
  SiRNA target sequence
ttttatataatggcttttttg

SEQ ID NO: 213691 - DNA, 21 bp, Artificial sequence
  SiRNA target sequence
tttatataatggcttttttgt

SEQ ID NO: 213692 - DNA, 21 bp, Artificial sequence
  SiRNA target sequence
ttatataatggcttttttgta

SEQ ID NO: 213693 - DNA, 21 bp, Artificial sequence
  SiRNA target sequence
tatataatggcttttttgtat

SEQ ID NO: 213694 - DNA, 21 bp, Artificial sequence
  SiRNA target sequence
atataatggcttttttgtatt

SEQ ID NO: 213695 - DNA, 21 bp, Artificial sequence
  SiRNA target sequence
tataatggcttttttgtattt

SEQ ID NO: 213696 - DNA, 21 bp, Artificial sequence
  SiRNA target sequence
ataatggcttttttgtatttt

SEQ ID NO: 213697 - DNA, 21 bp, Artificial sequence
  SiRNA target sequence
taatggcttttttgtattttc

SEQ ID NO: 213698 - DNA, 21 bp, Artificial sequence
  SiRNA target sequence
aatggcttttttgtattttct

SEQ ID NO: 213699 - DNA, 21 bp, Artificial sequence
  SiRNA target sequence
atggcttttttgtattttctg

SEQ ID NO: 213700 - DNA, 21 bp, Artificial sequence
  SiRNA target sequence
tggcttttttgtattttctgg

SEQ ID NO: 213701 - DNA, 21 bp, Artificial sequence
  SiRNA target sequence
ggcttttttgtattttctgga

SEQ ID NO: 213702 - DNA, 21 bp, Artificial sequence
  SiRNA target sequence
gcttttttgtattttctggag

SEQ ID NO: 213703 - DNA, 21 bp, Artificial sequence
  SiRNA target sequence
cttttttgtattttctggagt

SEQ ID NO: 213704 - DNA, 21 bp, Artificial sequence
  SiRNA target sequence
ttttttgtattttctggagtt

SEQ ID NO: 213705 - DNA, 21 bp, Artificial sequence
  SiRNA target sequence
tttttgtattttctggagttc

SEQ ID NO: 213706 - DNA, 21 bp, Artificial sequence
  SiRNA target sequence
ttttgtattttctggagttct

SEQ ID NO: 213707 - DNA, 21 bp, Artificial sequence
  SiRNA target sequence
tttgtattttctggagttcta

SEQ ID NO: 213708 - DNA, 21 bp, Artificial sequence
  SiRNA target sequence
ttgtattttctggagttctag

SEQ ID NO: 213709 - DNA, 21 bp, Artificial sequence
  SiRNA target sequence
tgtattttctggagttctagt

SEQ ID NO: 213710 - DNA, 21 bp, Artificial sequence
  SiRNA target sequence
gtattttctggagttctagta

SEQ ID NO: 213711 - DNA, 21 bp, Artificial sequence
  SiRNA target sequence
tattttctggagttctagtaa

SEQ ID NO: 213712 - DNA, 21 bp, Artificial sequence
  SiRNA target sequence
attttctggagttctagtaat

SEQ ID NO: 213713 - DNA, 21 bp, Artificial sequence
  SiRNA target sequence
ttttctggagttctagtaata

SEQ ID NO: 213714 - DNA, 21 bp, Artificial sequence
  SiRNA target sequence
tttctggagttctagtaatag

SEQ ID NO: 213715 - DNA, 21 bp, Artificial sequence
  SiRNA target sequence
ttctggagttctagtaatagt

SEQ ID NO: 213716 - DNA, 21 bp, Artificial sequence
  SiRNA target sequence
tctggagttctagtaatagtt

SEQ ID NO: 213717 - DNA, 21 bp, Artificial sequence
  SiRNA target sequence
ctggagttctagtaatagtta

SEQ ID NO: 213718 - DNA, 21 bp, Artificial sequence
  SiRNA target sequence
tggagttctagtaatagttat

SEQ ID NO: 213719 - DNA, 21 bp, Artificial sequence
  SiRNA target sequence
ggagttctagtaatagttata

SEQ ID NO: 213720 - DNA, 21 bp, Artificial sequence
  SiRNA target sequence
gagttctagtaatagttatat

SEQ ID NO: 213721 - DNA, 21 bp, Artificial sequence
  SiRNA target sequence
agttctagtaatagttatatt

SEQ ID NO: 213722 - DNA, 21 bp, Artificial sequence
  SiRNA target sequence
gttctagtaatagttatattt

SEQ ID NO: 213723 - DNA, 21 bp, Artificial sequence
  SiRNA target sequence
ttctagtaatagttatatttt

SEQ ID NO: 213724 - DNA, 21 bp, Artificial sequence
  SiRNA target sequence
tctagtaatagttatattttt

SEQ ID NO: 213725 - DNA, 21 bp, Artificial sequence
  SiRNA target sequence
ctagtaatagttatattttta

SEQ ID NO: 213726 - DNA, 21 bp, Artificial sequence
  SiRNA target sequence
tagtaatagttatatttttaa

SEQ ID NO: 213727 - DNA, 21 bp, Artificial sequence
  SiRNA target sequence
agtaatagttatatttttaat

SEQ ID NO: 213728 - DNA, 21 bp, Artificial sequence
  SiRNA target sequence
gtaatagttatatttttaatt

SEQ ID NO: 213729 - DNA, 21 bp, Artificial sequence
  SiRNA target sequence
taatagttatatttttaatta

SEQ ID NO: 213730 - DNA, 21 bp, Artificial sequence
  SiRNA target sequence
aatagttatatttttaattaa

SEQ ID NO: 213731 - DNA, 21 bp, Artificial sequence
  SiRNA target sequence
atagttatatttttaattaaa

SEQ ID NO: 213732 - DNA, 21 bp, Artificial sequence
  SiRNA target sequence
tagttatatttttaattaaaa

SEQ ID NO: 213733 - DNA, 21 bp, Artificial sequence
  SiRNA target sequence
agttatatttttaattaaaaa

SEQ ID NO: 213734 - DNA, 21 bp, Artificial sequence
  SiRNA target sequence
gttatatttttaattaaaaaa

SEQ ID NO: 213735 - DNA, 21 bp, Artificial sequence
  SiRNA target sequence
ttatatttttaattaaaaaat

SEQ ID NO: 213736 - DNA, 21 bp, Artificial sequence
  SiRNA target sequence
tatatttttaattaaaaaata

SEQ ID NO: 213737 - DNA, 21 bp, Artificial sequence
  SiRNA target sequence
atatttttaattaaaaaatat

SEQ ID NO: 213738 - DNA, 21 bp, Artificial sequence
  SiRNA target sequence
tatttttaattaaaaaatatt

SEQ ID NO: 213739 - DNA, 21 bp, Artificial sequence
  SiRNA target sequence
atttttaattaaaaaatattt

SEQ ID NO: 213740 - DNA, 21 bp, Artificial sequence
  SiRNA target sequence
tttttaattaaaaaatatttg

SEQ ID NO: 213741 - DNA, 21 bp, Artificial sequence
  SiRNA target sequence
ttttaattaaaaaatatttgg

SEQ ID NO: 213742 - DNA, 21 bp, Artificial sequence
  SiRNA target sequence
tttaattaaaaaatatttgga

SEQ ID NO: 213743 - DNA, 21 bp, Artificial sequence
  SiRNA target sequence
ttaattaaaaaatatttggag

SEQ ID NO: 213744 - DNA, 21 bp, Artificial sequence
  SiRNA target sequence
taattaaaaaatatttggaga

SEQ ID NO: 213745 - DNA, 21 bp, Artificial sequence
  SiRNA target sequence
aattaaaaaatatttggagag

SEQ ID NO: 213746 - DNA, 21 bp, Artificial sequence
  SiRNA target sequence
attaaaaaatatttggagagg

SEQ ID NO: 213747 - DNA, 21 bp, Artificial sequence
  SiRNA target sequence
ttaaaaaatatttggagagga

SEQ ID NO: 213748 - DNA, 21 bp, Artificial sequence
  SiRNA target sequence
taaaaaatatttggagaggaa

SEQ ID NO: 213749 - DNA, 21 bp, Artificial sequence
  SiRNA target sequence
aaaaaatatttggagaggaat

SEQ ID NO: 213750 - DNA, 21 bp, Artificial sequence
  SiRNA target sequence
aaaaatatttggagaggaatg

SEQ ID NO: 213751 - DNA, 21 bp, Artificial sequence
  SiRNA target sequence
aaaatatttggagaggaatgt

SEQ ID NO: 213752 - DNA, 21 bp, Artificial sequence
  SiRNA target sequence
aaatatttggagaggaatgtg

SEQ ID NO: 213753 - DNA, 21 bp, Artificial sequence
  SiRNA target sequence
aatatttggagaggaatgtga

SEQ ID NO: 213754 - DNA, 21 bp, Artificial sequence
  SiRNA target sequence
atatttggagaggaatgtgac

SEQ ID NO: 213755 - DNA, 21 bp, Artificial sequence
  SiRNA target sequence
tatttggagaggaatgtgact

SEQ ID NO: 213756 - DNA, 21 bp, Artificial sequence
  SiRNA target sequence
atttggagaggaatgtgacta

SEQ ID NO: 213757 - DNA, 21 bp, Artificial sequence
  SiRNA target sequence
tttggagaggaatgtgactaa

SEQ ID NO: 213758 - DNA, 21 bp, Artificial sequence
  SiRNA target sequence
ttggagaggaatgtgactaac

SEQ ID NO: 213759 - DNA, 21 bp, Artificial sequence
  SiRNA target sequence
tggagaggaatgtgactaaca

SEQ ID NO: 213760 - DNA, 21 bp, Artificial sequence
  SiRNA target sequence
ggagaggaatgtgactaacaa

SEQ ID NO: 213761 - DNA, 21 bp, Artificial sequence
  SiRNA target sequence
gagaggaatgtgactaacaaa

SEQ ID NO: 213762 - DNA, 21 bp, Artificial sequence
  SiRNA target sequence
agaggaatgtgactaacaaac

SEQ ID NO: 213763 - DNA, 21 bp, Artificial sequence
  SiRNA target sequence
gaggaatgtgactaacaaacc

SEQ ID NO: 213764 - DNA, 21 bp, Artificial sequence
  SiRNA target sequence
aggaatgtgactaacaaacct

SEQ ID NO: 213765 - DNA, 21 bp, Artificial sequence
  SiRNA target sequence
ggaatgtgactaacaaacctt

SEQ ID NO: 213766 - DNA, 21 bp, Artificial sequence
  SiRNA target sequence
gaatgtgactaacaaaccttt

SEQ ID NO: 213767 - DNA, 21 bp, Artificial sequence
  SiRNA target sequence
aatgtgactaacaaacctttg

SEQ ID NO: 213768 - DNA, 21 bp, Artificial sequence
  SiRNA target sequence
atgtgactaacaaacctttgt

SEQ ID NO: 213769 - DNA, 21 bp, Artificial sequence
  SiRNA target sequence
tgtgactaacaaacctttgtt

SEQ ID NO: 213770 - DNA, 21 bp, Artificial sequence
  SiRNA target sequence
gtgactaacaaacctttgttt

SEQ ID NO: 213771 - DNA, 21 bp, Artificial sequence
  SiRNA target sequence
tgactaacaaacctttgtttg

SEQ ID NO: 213772 - DNA, 21 bp, Artificial sequence
  SiRNA target sequence
gactaacaaacctttgtttgt

SEQ ID NO: 213773 - DNA, 21 bp, Artificial sequence
  SiRNA target sequence
actaacaaacctttgtttgtt

SEQ ID NO: 213774 - DNA, 21 bp, Artificial sequence
  SiRNA target sequence
ctaacaaacctttgtttgttg

SEQ ID NO: 213775 - DNA, 21 bp, Artificial sequence
  SiRNA target sequence
taacaaacctttgtttgttgt

SEQ ID NO: 213776 - DNA, 21 bp, Artificial sequence
  SiRNA target sequence
aacaaacctttgtttgttgta

SEQ ID NO: 213777 - DNA, 21 bp, Artificial sequence
  SiRNA target sequence
acaaacctttgtttgttgtaa

SEQ ID NO: 213778 - DNA, 21 bp, Artificial sequence
  SiRNA target sequence
caaacctttgtttgttgtaaa

SEQ ID NO: 213779 - DNA, 21 bp, Artificial sequence
  SiRNA target sequence
aaacctttgtttgttgtaaaa

SEQ ID NO: 213780 - DNA, 21 bp, Artificial sequence
  SiRNA target sequence
aacctttgtttgttgtaaaat

SEQ ID NO: 213781 - DNA, 21 bp, Artificial sequence
  SiRNA target sequence
acctttgtttgttgtaaaatc

SEQ ID NO: 213782 - DNA, 21 bp, Artificial sequence
  SiRNA target sequence
cctttgtttgttgtaaaatct

SEQ ID NO: 213783 - DNA, 21 bp, Artificial sequence
  SiRNA target sequence
ctttgtttgttgtaaaatctg

SEQ ID NO: 213784 - DNA, 21 bp, Artificial sequence
  SiRNA target sequence
tttgtttgttgtaaaatctgt

SEQ ID NO: 213785 - DNA, 21 bp, Artificial sequence
  SiRNA target sequence
ttgtttgttgtaaaatctgtt

SEQ ID NO: 213786 - DNA, 21 bp, Artificial sequence
  SiRNA target sequence
tgtttgttgtaaaatctgtta

SEQ ID NO: 213787 - DNA, 21 bp, Artificial sequence
  SiRNA target sequence
gtttgttgtaaaatctgttaa

SEQ ID NO: 213788 - DNA, 21 bp, Artificial sequence
  SiRNA target sequence
tttgttgtaaaatctgttaaa

SEQ ID NO: 213789 - DNA, 21 bp, Artificial sequence
  SiRNA target sequence
ttgttgtaaaatctgttaaaa

SEQ ID NO: 213790 - DNA, 21 bp, Artificial sequence
  SiRNA target sequence
tgttgtaaaatctgttaaaaa

SEQ ID NO: 213791 - DNA, 21 bp, Artificial sequence
  SiRNA target sequence
gttgtaaaatctgttaaaaag

SEQ ID NO: 213792 - DNA, 21 bp, Artificial sequence
  SiRNA target sequence
ttgtaaaatctgttaaaaaga

SEQ ID NO: 213793 - DNA, 21 bp, Artificial sequence
  SiRNA target sequence
tgtaaaatctgttaaaaagaa

SEQ ID NO: 213794 - DNA, 21 bp, Artificial sequence
  SiRNA target sequence
gtaaaatctgttaaaaagaag

SEQ ID NO: 213795 - DNA, 21 bp, Artificial sequence
  SiRNA target sequence
taaaatctgttaaaaagaagg

SEQ ID NO: 213796 - DNA, 21 bp, Artificial sequence
  SiRNA target sequence
aaaatctgttaaaaagaaggg

SEQ ID NO: 213797 - DNA, 21 bp, Artificial sequence
  SiRNA target sequence
aaatctgttaaaaagaaggga

SEQ ID NO: 213798 - DNA, 21 bp, Artificial sequence
  SiRNA target sequence
aatctgttaaaaagaagggac

SEQ ID NO: 213799 - DNA, 21 bp, Artificial sequence
  SiRNA target sequence
atctgttaaaaagaagggacc

SEQ ID NO: 213800 - DNA, 21 bp, Artificial sequence
  SiRNA target sequence
tctgttaaaaagaagggacca

SEQ ID NO: 213801 - DNA, 21 bp, Artificial sequence
  SiRNA target sequence
ctgttaaaaagaagggaccaa

SEQ ID NO: 213802 - DNA, 21 bp, Artificial sequence
  SiRNA target sequence
tgttaaaaagaagggaccaaa

SEQ ID NO: 213803 - DNA, 21 bp, Artificial sequence
  SiRNA target sequence
gttaaaaagaagggaccaaaa

SEQ ID NO: 213804 - DNA, 21 bp, Artificial sequence
  SiRNA target sequence
ttaaaaagaagggaccaaaag

SEQ ID NO: 213805 - DNA, 21 bp, Artificial sequence
  SiRNA target sequence
taaaaagaagggaccaaaagt

SEQ ID NO: 213806 - DNA, 21 bp, Artificial sequence
  SiRNA target sequence
aaaaagaagggaccaaaagtt

SEQ ID NO: 213807 - DNA, 21 bp, Artificial sequence
  SiRNA target sequence
aaaagaagggaccaaaagtta

SEQ ID NO: 213808 - DNA, 21 bp, Artificial sequence
  SiRNA target sequence
aaagaagggaccaaaagttaa

SEQ ID NO: 213809 - DNA, 21 bp, Artificial sequence
  SiRNA target sequence
aagaagggaccaaaagttaaa

SEQ ID NO: 213810 - DNA, 21 bp, Artificial sequence
  SiRNA target sequence
agaagggaccaaaagttaaag

SEQ ID NO: 213811 - DNA, 21 bp, Artificial sequence
  SiRNA target sequence
gaagggaccaaaagttaaagt

SEQ ID NO: 213812 - DNA, 21 bp, Artificial sequence
  SiRNA target sequence
aagggaccaaaagttaaagta

SEQ ID NO: 213813 - DNA, 21 bp, Artificial sequence
  SiRNA target sequence
agggaccaaaagttaaagtag

SEQ ID NO: 213814 - DNA, 21 bp, Artificial sequence
  SiRNA target sequence
gggaccaaaagttaaagtagg

SEQ ID NO: 213815 - DNA, 21 bp, Artificial sequence
  SiRNA target sequence
ggaccaaaagttaaagtagga

SEQ ID NO: 213816 - DNA, 21 bp, Artificial sequence
  SiRNA target sequence
gaccaaaagttaaagtaggat

SEQ ID NO: 213817 - DNA, 21 bp, Artificial sequence
  SiRNA target sequence
accaaaagttaaagtaggatt

SEQ ID NO: 213818 - DNA, 21 bp, Artificial sequence
  SiRNA target sequence
ccaaaagttaaagtaggattt

SEQ ID NO: 213819 - DNA, 21 bp, Artificial sequence
  SiRNA target sequence
caaaagttaaagtaggatttg

SEQ ID NO: 213820 - DNA, 21 bp, Artificial sequence
  SiRNA target sequence
aaaagttaaagtaggatttgc

SEQ ID NO: 213821 - DNA, 21 bp, Artificial sequence
  SiRNA target sequence
aaagttaaagtaggatttgcg

SEQ ID NO: 213822 - DNA, 21 bp, Artificial sequence
  SiRNA target sequence
aagttaaagtaggatttgcgg

SEQ ID NO: 213823 - DNA, 21 bp, Artificial sequence
  SiRNA target sequence
agttaaagtaggatttgcgga

SEQ ID NO: 213824 - DNA, 21 bp, Artificial sequence
  SiRNA target sequence
gttaaagtaggatttgcggag

SEQ ID NO: 213825 - DNA, 21 bp, Artificial sequence
  SiRNA target sequence
ttaaagtaggatttgcggagg

SEQ ID NO: 213826 - DNA, 21 bp, Artificial sequence
  SiRNA target sequence
taaagtaggatttgcggaggg

SEQ ID NO: 213827 - DNA, 21 bp, Artificial sequence
  SiRNA target sequence
aaagtaggatttgcggagggc

SEQ ID NO: 213828 - DNA, 21 bp, Artificial sequence
  SiRNA target sequence
aagtaggatttgcggagggcc

SEQ ID NO: 213829 - DNA, 21 bp, Artificial sequence
  SiRNA target sequence
agtaggatttgcggagggcct

SEQ ID NO: 213830 - DNA, 21 bp, Artificial sequence
  SiRNA target sequence
gtaggatttgcggagggcctt

SEQ ID NO: 213831 - DNA, 21 bp, Artificial sequence
  SiRNA target sequence
taggatttgcggagggcctta

SEQ ID NO: 213832 - DNA, 21 bp, Artificial sequence
  SiRNA target sequence
aggatttgcggagggccttaa

SEQ ID NO: 213833 - DNA, 21 bp, Artificial sequence
  SiRNA target sequence
ggatttgcggagggccttaaa

SEQ ID NO: 213834 - DNA, 21 bp, Artificial sequence
  SiRNA target sequence
gatttgcggagggccttaaag

SEQ ID NO: 213835 - DNA, 21 bp, Artificial sequence
  SiRNA target sequence
atttgcggagggccttaaaga

SEQ ID NO: 213836 - DNA, 21 bp, Artificial sequence
  SiRNA target sequence
tttgcggagggccttaaagaa

SEQ ID NO: 213837 - DNA, 21 bp, Artificial sequence
  SiRNA target sequence
ttgcggagggccttaaagaaa

SEQ ID NO: 213838 - DNA, 21 bp, Artificial sequence
  SiRNA target sequence
tgcggagggccttaaagaaat

SEQ ID NO: 213839 - DNA, 21 bp, Artificial sequence
  SiRNA target sequence
gcggagggccttaaagaaatg

SEQ ID NO: 213840 - DNA, 21 bp, Artificial sequence
  SiRNA target sequence
cggagggccttaaagaaatga

SEQ ID NO: 213841 - DNA, 21 bp, Artificial sequence
  SiRNA target sequence
ggagggccttaaagaaatgat

SEQ ID NO: 213842 - DNA, 21 bp, Artificial sequence
  SiRNA target sequence
gagggccttaaagaaatgatg

SEQ ID NO: 213843 - DNA, 21 bp, Artificial sequence
  SiRNA target sequence
agggccttaaagaaatgatgg

SEQ ID NO: 213844 - DNA, 21 bp, Artificial sequence
  SiRNA target sequence
gggccttaaagaaatgatggc

SEQ ID NO: 213845 - DNA, 21 bp, Artificial sequence
  SiRNA target sequence
ggccttaaagaaatgatggca

SEQ ID NO: 213846 - DNA, 21 bp, Artificial sequence
  SiRNA target sequence
gccttaaagaaatgatggcat

SEQ ID NO: 213847 - DNA, 21 bp, Artificial sequence
  SiRNA target sequence
ccttaaagaaatgatggcatc

SEQ ID NO: 213848 - DNA, 21 bp, Artificial sequence
  SiRNA target sequence
cttaaagaaatgatggcatca

SEQ ID NO: 213849 - DNA, 21 bp, Artificial sequence
  SiRNA target sequence
ttaaagaaatgatggcatcaa

SEQ ID NO: 213850 - DNA, 21 bp, Artificial sequence
  SiRNA target sequence
taaagaaatgatggcatcaaa

SEQ ID NO: 213851 - DNA, 21 bp, Artificial sequence
  SiRNA target sequence
aaagaaatgatggcatcaaag

SEQ ID NO: 213852 - DNA, 21 bp, Artificial sequence
  SiRNA target sequence
aagaaatgatggcatcaaagt

SEQ ID NO: 213853 - DNA, 21 bp, Artificial sequence
  SiRNA target sequence
agaaatgatggcatcaaagtt

SEQ ID NO: 213854 - DNA, 21 bp, Artificial sequence
  SiRNA target sequence
gaaatgatggcatcaaagtta

SEQ ID NO: 213855 - DNA, 21 bp, Artificial sequence
  SiRNA target sequence
aaatgatggcatcaaagttat

SEQ ID NO: 213856 - DNA, 21 bp, Artificial sequence
  SiRNA target sequence
aatgatggcatcaaagttatt

SEQ ID NO: 213857 - DNA, 21 bp, Artificial sequence
  SiRNA target sequence
atgatggcatcaaagttatta

SEQ ID NO: 213858 - DNA, 21 bp, Artificial sequence
  SiRNA target sequence
tgatggcatcaaagttattac

SEQ ID NO: 213859 - DNA, 21 bp, Artificial sequence
  SiRNA target sequence
gatggcatcaaagttattact

SEQ ID NO: 213860 - DNA, 21 bp, Artificial sequence
  SiRNA target sequence
atggcatcaaagttattactt

SEQ ID NO: 213861 - DNA, 21 bp, Artificial sequence
  SiRNA target sequence
tggcatcaaagttattactta

SEQ ID NO: 213862 - DNA, 21 bp, Artificial sequence
  SiRNA target sequence
ggcatcaaagttattacttaa

SEQ ID NO: 213863 - DNA, 21 bp, Artificial sequence
  SiRNA target sequence
gcatcaaagttattacttaac

SEQ ID NO: 213864 - DNA, 21 bp, Artificial sequence
  SiRNA target sequence
catcaaagttattacttaaca

SEQ ID NO: 213865 - DNA, 21 bp, Artificial sequence
  SiRNA target sequence
atcaaagttattacttaacat

SEQ ID NO: 213866 - DNA, 21 bp, Artificial sequence
  SiRNA target sequence
tcaaagttattacttaacatt

SEQ ID NO: 213867 - DNA, 21 bp, Artificial sequence
  SiRNA target sequence
caaagttattacttaacattt

SEQ ID NO: 213868 - DNA, 21 bp, Artificial sequence
  SiRNA target sequence
aaagttattacttaacatttc

SEQ ID NO: 213869 - DNA, 21 bp, Artificial sequence
  SiRNA target sequence
aagttattacttaacatttca

SEQ ID NO: 213870 - DNA, 21 bp, Artificial sequence
  SiRNA target sequence
agttattacttaacatttcat

SEQ ID NO: 213871 - DNA, 21 bp, Artificial sequence
  SiRNA target sequence
gttattacttaacatttcatt

SEQ ID NO: 213872 - DNA, 21 bp, Artificial sequence
  SiRNA target sequence
ttattacttaacatttcatta

SEQ ID NO: 213873 - DNA, 21 bp, Artificial sequence
  SiRNA target sequence
tattacttaacatttcattaa

SEQ ID NO: 213874 - DNA, 21 bp, Artificial sequence
  SiRNA target sequence
attacttaacatttcattaac

SEQ ID NO: 213875 - DNA, 21 bp, Artificial sequence
  SiRNA target sequence
ttacttaacatttcattaact

SEQ ID NO: 213876 - DNA, 21 bp, Artificial sequence
  SiRNA target sequence
tacttaacatttcattaactg

SEQ ID NO: 213877 - DNA, 21 bp, Artificial sequence
  SiRNA target sequence
acttaacatttcattaactgt

SEQ ID NO: 213878 - DNA, 21 bp, Artificial sequence
  SiRNA target sequence
cttaacatttcattaactgtt

SEQ ID NO: 213879 - DNA, 21 bp, Artificial sequence
  SiRNA target sequence
ttaacatttcattaactgtta

SEQ ID NO: 213880 - DNA, 21 bp, Artificial sequence
  SiRNA target sequence
taacatttcattaactgttat

SEQ ID NO: 213881 - DNA, 21 bp, Artificial sequence
  SiRNA target sequence
aacatttcattaactgttatg

SEQ ID NO: 213882 - DNA, 21 bp, Artificial sequence
  SiRNA target sequence
acatttcattaactgttatgt

SEQ ID NO: 213883 - DNA, 21 bp, Artificial sequence
  SiRNA target sequence
catttcattaactgttatgtt

SEQ ID NO: 213884 - DNA, 21 bp, Artificial sequence
  SiRNA target sequence
atttcattaactgttatgttc

SEQ ID NO: 213885 - DNA, 21 bp, Artificial sequence
  SiRNA target sequence
tttcattaactgttatgttct

SEQ ID NO: 213886 - DNA, 21 bp, Artificial sequence
  SiRNA target sequence
ttcattaactgttatgttcta

SEQ ID NO: 213887 - DNA, 21 bp, Artificial sequence
  SiRNA target sequence
tcattaactgttatgttctat

SEQ ID NO: 213888 - DNA, 21 bp, Artificial sequence
  SiRNA target sequence
cattaactgttatgttctatg

SEQ ID NO: 213889 - DNA, 21 bp, Artificial sequence
  SiRNA target sequence
attaactgttatgttctatgg

SEQ ID NO: 213890 - DNA, 21 bp, Artificial sequence
  SiRNA target sequence
ttaactgttatgttctatggt

SEQ ID NO: 213891 - DNA, 21 bp, Artificial sequence
  SiRNA target sequence
taactgttatgttctatggta

SEQ ID NO: 213892 - DNA, 21 bp, Artificial sequence
  SiRNA target sequence
aactgttatgttctatggtat

SEQ ID NO: 213893 - DNA, 21 bp, Artificial sequence
  SiRNA target sequence
actgttatgttctatggtata

SEQ ID NO: 213894 - DNA, 21 bp, Artificial sequence
  SiRNA target sequence
ctgttatgttctatggtatat

SEQ ID NO: 213895 - DNA, 21 bp, Artificial sequence
  SiRNA target sequence
tgttatgttctatggtatatc

SEQ ID NO: 213896 - DNA, 21 bp, Artificial sequence
  SiRNA target sequence
gttatgttctatggtatatca

SEQ ID NO: 213897 - DNA, 21 bp, Artificial sequence
  SiRNA target sequence
ttatgttctatggtatatcaa

SEQ ID NO: 213898 - DNA, 21 bp, Artificial sequence
  SiRNA target sequence
tatgttctatggtatatcaac

SEQ ID NO: 213899 - DNA, 21 bp, Artificial sequence
  SiRNA target sequence
atgttctatggtatatcaact

SEQ ID NO: 213900 - DNA, 21 bp, Artificial sequence
  SiRNA target sequence
tgttctatggtatatcaacta

SEQ ID NO: 213901 - DNA, 21 bp, Artificial sequence
  SiRNA target sequence
gttctatggtatatcaactaa

SEQ ID NO: 213902 - DNA, 21 bp, Artificial sequence
  SiRNA target sequence
ttctatggtatatcaactaat

SEQ ID NO: 213903 - DNA, 21 bp, Artificial sequence
  SiRNA target sequence
tctatggtatatcaactaatt

SEQ ID NO: 213904 - DNA, 21 bp, Artificial sequence
  SiRNA target sequence
ctatggtatatcaactaattt

SEQ ID NO: 213905 - DNA, 21 bp, Artificial sequence
  SiRNA target sequence
tatggtatatcaactaattta

SEQ ID NO: 213906 - DNA, 21 bp, Artificial sequence
  SiRNA target sequence
atggtatatcaactaatttaa

SEQ ID NO: 213907 - DNA, 21 bp, Artificial sequence
  SiRNA target sequence
tggtatatcaactaatttaat

SEQ ID NO: 213908 - DNA, 21 bp, Artificial sequence
  SiRNA target sequence
ggtatatcaactaatttaata

SEQ ID NO: 213909 - DNA, 21 bp, Artificial sequence
  SiRNA target sequence
gtatatcaactaatttaatag

SEQ ID NO: 213910 - DNA, 21 bp, Artificial sequence
  SiRNA target sequence
tatatcaactaatttaataga

SEQ ID NO: 213911 - DNA, 21 bp, Artificial sequence
  SiRNA target sequence
atatcaactaatttaatagaa

SEQ ID NO: 213912 - DNA, 21 bp, Artificial sequence
  SiRNA target sequence
tatcaactaatttaatagaat

SEQ ID NO: 213913 - DNA, 21 bp, Artificial sequence
  SiRNA target sequence
atcaactaatttaatagaatc

SEQ ID NO: 213914 - DNA, 21 bp, Artificial sequence
  SiRNA target sequence
tcaactaatttaatagaatca

SEQ ID NO: 213915 - DNA, 21 bp, Artificial sequence
  SiRNA target sequence
caactaatttaatagaatcaa

SEQ ID NO: 213916 - DNA, 21 bp, Artificial sequence
  SiRNA target sequence
aactaatttaatagaatcaac

SEQ ID NO: 213917 - DNA, 21 bp, Artificial sequence
  SiRNA target sequence
actaatttaatagaatcaaca

SEQ ID NO: 213918 - DNA, 21 bp, Artificial sequence
  SiRNA target sequence
ctaatttaatagaatcaacat

SEQ ID NO: 213919 - DNA, 21 bp, Artificial sequence
  SiRNA target sequence
taatttaatagaatcaacatt

SEQ ID NO: 213920 - DNA, 21 bp, Artificial sequence
  SiRNA target sequence
aatttaatagaatcaacattt

SEQ ID NO: 213921 - DNA, 21 bp, Artificial sequence
  SiRNA target sequence
atttaatagaatcaacattta

SEQ ID NO: 213922 - DNA, 21 bp, Artificial sequence
  SiRNA target sequence
tttaatagaatcaacatttaa

SEQ ID NO: 213923 - DNA, 21 bp, Artificial sequence
  SiRNA target sequence
ttaatagaatcaacatttaaa

SEQ ID NO: 213924 - DNA, 21 bp, Artificial sequence
  SiRNA target sequence
taatagaatcaacatttaaaa

SEQ ID NO: 213925 - DNA, 21 bp, Artificial sequence
  SiRNA target sequence
aatagaatcaacatttaaaag

SEQ ID NO: 213926 - DNA, 21 bp, Artificial sequence
  SiRNA target sequence
atagaatcaacatttaaaagt

SEQ ID NO: 213927 - DNA, 21 bp, Artificial sequence
  SiRNA target sequence
tagaatcaacatttaaaagtg

SEQ ID NO: 213928 - DNA, 21 bp, Artificial sequence
  SiRNA target sequence
agaatcaacatttaaaagtgg

SEQ ID NO: 213929 - DNA, 21 bp, Artificial sequence
  SiRNA target sequence
gaatcaacatttaaaagtgga

SEQ ID NO: 213930 - DNA, 21 bp, Artificial sequence
  SiRNA target sequence
aatcaacatttaaaagtggac

SEQ ID NO: 213931 - DNA, 21 bp, Artificial sequence
  SiRNA target sequence
atcaacatttaaaagtggact

SEQ ID NO: 213932 - DNA, 21 bp, Artificial sequence
  SiRNA target sequence
tcaacatttaaaagtggactt

SEQ ID NO: 213933 - DNA, 21 bp, Artificial sequence
  SiRNA target sequence
caacatttaaaagtggacttg

SEQ ID NO: 213934 - DNA, 21 bp, Artificial sequence
  SiRNA target sequence
aacatttaaaagtggacttgt

SEQ ID NO: 213935 - DNA, 21 bp, Artificial sequence
  SiRNA target sequence
acatttaaaagtggacttgtg

SEQ ID NO: 213936 - DNA, 21 bp, Artificial sequence
  SiRNA target sequence
catttaaaagtggacttgtga

SEQ ID NO: 213937 - DNA, 21 bp, Artificial sequence
  SiRNA target sequence
atttaaaagtggacttgtgaa

SEQ ID NO: 213938 - DNA, 21 bp, Artificial sequence
  SiRNA target sequence
tttaaaagtggacttgtgaaa

SEQ ID NO: 213939 - DNA, 21 bp, Artificial sequence
  SiRNA target sequence
ttaaaagtggacttgtgaaag

SEQ ID NO: 213940 - DNA, 21 bp, Artificial sequence
  SiRNA target sequence
taaaagtggacttgtgaaagg

SEQ ID NO: 213941 - DNA, 21 bp, Artificial sequence
  SiRNA target sequence
aaaagtggacttgtgaaaggt

SEQ ID NO: 213942 - DNA, 21 bp, Artificial sequence
  SiRNA target sequence
aaagtggacttgtgaaaggtg

SEQ ID NO: 213943 - DNA, 21 bp, Artificial sequence
  SiRNA target sequence
aagtggacttgtgaaaggtgc

SEQ ID NO: 213944 - DNA, 21 bp, Artificial sequence
  SiRNA target sequence
agtggacttgtgaaaggtgca

SEQ ID NO: 213945 - DNA, 21 bp, Artificial sequence
  SiRNA target sequence
gtggacttgtgaaaggtgcag

SEQ ID NO: 213946 - DNA, 21 bp, Artificial sequence
  SiRNA target sequence
tggacttgtgaaaggtgcaga

SEQ ID NO: 213947 - DNA, 21 bp, Artificial sequence
  SiRNA target sequence
ggacttgtgaaaggtgcagaa

SEQ ID NO: 213948 - DNA, 21 bp, Artificial sequence
  SiRNA target sequence
gacttgtgaaaggtgcagaag

SEQ ID NO: 213949 - DNA, 21 bp, Artificial sequence
  SiRNA target sequence
acttgtgaaaggtgcagaaga

SEQ ID NO: 213950 - DNA, 21 bp, Artificial sequence
  SiRNA target sequence
cttgtgaaaggtgcagaagaa

SEQ ID NO: 213951 - DNA, 21 bp, Artificial sequence
  SiRNA target sequence
ttgtgaaaggtgcagaagaat

SEQ ID NO: 213952 - DNA, 21 bp, Artificial sequence
  SiRNA target sequence
tgtgaaaggtgcagaagaatt

SEQ ID NO: 213953 - DNA, 21 bp, Artificial sequence
  SiRNA target sequence
gtgaaaggtgcagaagaatta

SEQ ID NO: 213954 - DNA, 21 bp, Artificial sequence
  SiRNA target sequence
tgaaaggtgcagaagaattaa

SEQ ID NO: 213955 - DNA, 21 bp, Artificial sequence
  SiRNA target sequence
gaaaggtgcagaagaattaaa

SEQ ID NO: 213956 - DNA, 21 bp, Artificial sequence
  SiRNA target sequence
aaaggtgcagaagaattaaac

SEQ ID NO: 213957 - DNA, 21 bp, Artificial sequence
  SiRNA target sequence
aaggtgcagaagaattaaacg

SEQ ID NO: 213958 - DNA, 21 bp, Artificial sequence
  SiRNA target sequence
aggtgcagaagaattaaacga

SEQ ID NO: 213959 - DNA, 21 bp, Artificial sequence
  SiRNA target sequence
ggtgcagaagaattaaacgag

SEQ ID NO: 213960 - DNA, 21 bp, Artificial sequence
  SiRNA target sequence
gtgcagaagaattaaacgaga

SEQ ID NO: 213961 - DNA, 21 bp, Artificial sequence
  SiRNA target sequence
tgcagaagaattaaacgagaa

SEQ ID NO: 213962 - DNA, 21 bp, Artificial sequence
  SiRNA target sequence
gcagaagaattaaacgagaat

SEQ ID NO: 213963 - DNA, 21 bp, Artificial sequence
  SiRNA target sequence
cagaagaattaaacgagaata

SEQ ID NO: 213964 - DNA, 21 bp, Artificial sequence
  SiRNA target sequence
agaagaattaaacgagaatac

SEQ ID NO: 213965 - DNA, 21 bp, Artificial sequence
  SiRNA target sequence
gaagaattaaacgagaatact

SEQ ID NO: 213966 - DNA, 21 bp, Artificial sequence
  SiRNA target sequence
aagaattaaacgagaatacta

SEQ ID NO: 213967 - DNA, 21 bp, Artificial sequence
  SiRNA target sequence
agaattaaacgagaatactaa

SEQ ID NO: 213968 - DNA, 21 bp, Artificial sequence
  SiRNA target sequence
gaattaaacgagaatactaaa

SEQ ID NO: 213969 - DNA, 21 bp, Artificial sequence
  SiRNA target sequence
aattaaacgagaatactaaaa

SEQ ID NO: 213970 - DNA, 21 bp, Artificial sequence
  SiRNA target sequence
attaaacgagaatactaaaag

SEQ ID NO: 213971 - DNA, 21 bp, Artificial sequence
  SiRNA target sequence
ttaaacgagaatactaaaagt

SEQ ID NO: 213972 - DNA, 21 bp, Artificial sequence
  SiRNA target sequence
taaacgagaatactaaaagtt

SEQ ID NO: 213973 - DNA, 21 bp, Artificial sequence
  SiRNA target sequence
aaacgagaatactaaaagtta

SEQ ID NO: 213974 - DNA, 21 bp, Artificial sequence
  SiRNA target sequence
aacgagaatactaaaagttat

SEQ ID NO: 213975 - DNA, 21 bp, Artificial sequence
  SiRNA target sequence
acgagaatactaaaagttatt

SEQ ID NO: 213976 - DNA, 21 bp, Artificial sequence
  SiRNA target sequence
cgagaatactaaaagttattc

SEQ ID NO: 213977 - DNA, 21 bp, Artificial sequence
  SiRNA target sequence
gagaatactaaaagttattct

SEQ ID NO: 213978 - DNA, 21 bp, Artificial sequence
  SiRNA target sequence
agaatactaaaagttattcta

SEQ ID NO: 213979 - DNA, 21 bp, Artificial sequence
  SiRNA target sequence
gaatactaaaagttattctat

SEQ ID NO: 213980 - DNA, 21 bp, Artificial sequence
  SiRNA target sequence
aatactaaaagttattctatg

SEQ ID NO: 213981 - DNA, 21 bp, Artificial sequence
  SiRNA target sequence
atactaaaagttattctatgg

SEQ ID NO: 213982 - DNA, 21 bp, Artificial sequence
  SiRNA target sequence
tactaaaagttattctatggg

SEQ ID NO: 213983 - DNA, 21 bp, Artificial sequence
  SiRNA target sequence
actaaaagttattctatggga

SEQ ID NO: 213984 - DNA, 21 bp, Artificial sequence
  SiRNA target sequence
ctaaaagttattctatgggat

SEQ ID NO: 213985 - DNA, 21 bp, Artificial sequence
  SiRNA target sequence
taaaagttattctatgggata

SEQ ID NO: 213986 - DNA, 21 bp, Artificial sequence
  SiRNA target sequence
aaaagttattctatgggatat

SEQ ID NO: 213987 - DNA, 21 bp, Artificial sequence
  SiRNA target sequence
aaagttattctatgggatata

SEQ ID NO: 213988 - DNA, 21 bp, Artificial sequence
  SiRNA target sequence
aagttattctatgggatataa

SEQ ID NO: 213989 - DNA, 21 bp, Artificial sequence
  SiRNA target sequence
agttattctatgggatataat

SEQ ID NO: 213990 - DNA, 21 bp, Artificial sequence
  SiRNA target sequence
gttattctatgggatataatt

SEQ ID NO: 213991 - DNA, 21 bp, Artificial sequence
  SiRNA target sequence
ttattctatgggatataattc

SEQ ID NO: 213992 - DNA, 21 bp, Artificial sequence
  SiRNA target sequence
tattctatgggatataattca

SEQ ID NO: 213993 - DNA, 21 bp, Artificial sequence
  SiRNA target sequence
attctatgggatataattcat

SEQ ID NO: 213994 - DNA, 21 bp, Artificial sequence
  SiRNA target sequence
ttctatgggatataattcatt

SEQ ID NO: 213995 - DNA, 21 bp, Artificial sequence
  SiRNA target sequence
tctatgggatataattcattt

SEQ ID NO: 213996 - DNA, 21 bp, Artificial sequence
  SiRNA target sequence
ctatgggatataattcatttg

SEQ ID NO: 213997 - DNA, 21 bp, Artificial sequence
  SiRNA target sequence
tatgggatataattcatttga

SEQ ID NO: 213998 - DNA, 21 bp, Artificial sequence
  SiRNA target sequence
atgggatataattcatttgaa

SEQ ID NO: 213999 - DNA, 21 bp, Artificial sequence
  SiRNA target sequence
tgggatataattcatttgaac

SEQ ID NO: 214000 - DNA, 21 bp, Artificial sequence
  SiRNA target sequence
gggatataattcatttgaaca

SEQ ID NO: 214001 - DNA, 21 bp, Artificial sequence
  SiRNA target sequence
ggatataattcatttgaacaa

SEQ ID NO: 214002 - DNA, 21 bp, Artificial sequence
  SiRNA target sequence
gatataattcatttgaacaaa

SEQ ID NO: 214003 - DNA, 21 bp, Artificial sequence
  SiRNA target sequence
atataattcatttgaacaaaa

SEQ ID NO: 214004 - DNA, 21 bp, Artificial sequence
  SiRNA target sequence
tataattcatttgaacaaaag

SEQ ID NO: 214005 - DNA, 21 bp, Artificial sequence
  SiRNA target sequence
ataattcatttgaacaaaaga

SEQ ID NO: 214006 - DNA, 21 bp, Artificial sequence
  SiRNA target sequence
taattcatttgaacaaaagat

SEQ ID NO: 214007 - DNA, 21 bp, Artificial sequence
  SiRNA target sequence
aattcatttgaacaaaagata

SEQ ID NO: 214008 - DNA, 21 bp, Artificial sequence
  SiRNA target sequence
attcatttgaacaaaagatag

SEQ ID NO: 214009 - DNA, 21 bp, Artificial sequence
  SiRNA target sequence
ttcatttgaacaaaagatagc

SEQ ID NO: 214010 - DNA, 21 bp, Artificial sequence
  SiRNA target sequence
tcatttgaacaaaagatagca

SEQ ID NO: 214011 - DNA, 21 bp, Artificial sequence
  SiRNA target sequence
catttgaacaaaagatagcat

SEQ ID NO: 214012 - DNA, 21 bp, Artificial sequence
  SiRNA target sequence
atttgaacaaaagatagcatc

SEQ ID NO: 214013 - DNA, 21 bp, Artificial sequence
  SiRNA target sequence
tttgaacaaaagatagcatca

SEQ ID NO: 214014 - DNA, 21 bp, Artificial sequence
  SiRNA target sequence
ttgaacaaaagatagcatcaa

SEQ ID NO: 214015 - DNA, 21 bp, Artificial sequence
  SiRNA target sequence
tgaacaaaagatagcatcaat

SEQ ID NO: 214016 - DNA, 21 bp, Artificial sequence
  SiRNA target sequence
gaacaaaagatagcatcaata

SEQ ID NO: 214017 - DNA, 21 bp, Artificial sequence
  SiRNA target sequence
aacaaaagatagcatcaataa

SEQ ID NO: 214018 - DNA, 21 bp, Artificial sequence
  SiRNA target sequence
acaaaagatagcatcaataac

SEQ ID NO: 214019 - DNA, 21 bp, Artificial sequence
  SiRNA target sequence
caaaagatagcatcaataact

SEQ ID NO: 214020 - DNA, 21 bp, Artificial sequence
  SiRNA target sequence
aaaagatagcatcaataactg

SEQ ID NO: 214021 - DNA, 21 bp, Artificial sequence
  SiRNA target sequence
aaagatagcatcaataactgt

SEQ ID NO: 214022 - DNA, 21 bp, Artificial sequence
  SiRNA target sequence
aagatagcatcaataactgtt

SEQ ID NO: 214023 - DNA, 21 bp, Artificial sequence
  SiRNA target sequence
agatagcatcaataactgtta

SEQ ID NO: 214024 - DNA, 21 bp, Artificial sequence
  SiRNA target sequence
gatagcatcaataactgttat

SEQ ID NO: 214025 - DNA, 21 bp, Artificial sequence
  SiRNA target sequence
atagcatcaataactgttatt

SEQ ID NO: 214026 - DNA, 21 bp, Artificial sequence
  SiRNA target sequence
tagcatcaataactgttatta

SEQ ID NO: 214027 - DNA, 21 bp, Artificial sequence
  SiRNA target sequence
agcatcaataactgttattat

SEQ ID NO: 214028 - DNA, 21 bp, Artificial sequence
  SiRNA target sequence
gcatcaataactgttattatc

SEQ ID NO: 214029 - DNA, 21 bp, Artificial sequence
  SiRNA target sequence
catcaataactgttattatcc

SEQ ID NO: 214030 - DNA, 21 bp, Artificial sequence
  SiRNA target sequence
atcaataactgttattatcct

SEQ ID NO: 214031 - DNA, 21 bp, Artificial sequence
  SiRNA target sequence
tcaataactgttattatcctg

SEQ ID NO: 214032 - DNA, 21 bp, Artificial sequence
  SiRNA target sequence
caataactgttattatcctgc

SEQ ID NO: 214033 - DNA, 21 bp, Artificial sequence
  SiRNA target sequence
aataactgttattatcctgct

SEQ ID NO: 214034 - DNA, 21 bp, Artificial sequence
  SiRNA target sequence
ataactgttattatcctgctt

SEQ ID NO: 214035 - DNA, 21 bp, Artificial sequence
  SiRNA target sequence
taactgttattatcctgcttt

SEQ ID NO: 214036 - DNA, 21 bp, Artificial sequence
  SiRNA target sequence
aactgttattatcctgctttt

SEQ ID NO: 214037 - DNA, 21 bp, Artificial sequence
  SiRNA target sequence
actgttattatcctgctttta

SEQ ID NO: 214038 - DNA, 21 bp, Artificial sequence
  SiRNA target sequence
ctgttattatcctgcttttat

SEQ ID NO: 214039 - DNA, 21 bp, Artificial sequence
  SiRNA target sequence
tgttattatcctgcttttatc

SEQ ID NO: 214040 - DNA, 21 bp, Artificial sequence
  SiRNA target sequence
gttattatcctgcttttatca

SEQ ID NO: 214041 - DNA, 21 bp, Artificial sequence
  SiRNA target sequence
ttattatcctgcttttatcac

SEQ ID NO: 214042 - DNA, 21 bp, Artificial sequence
  SiRNA target sequence
tattatcctgcttttatcacc

SEQ ID NO: 214043 - DNA, 21 bp, Artificial sequence
  SiRNA target sequence
attatcctgcttttatcacca

SEQ ID NO: 214044 - DNA, 21 bp, Artificial sequence
  SiRNA target sequence
ttatcctgcttttatcaccat

SEQ ID NO: 214045 - DNA, 21 bp, Artificial sequence
  SiRNA target sequence
tatcctgcttttatcaccatt

SEQ ID NO: 214046 - DNA, 21 bp, Artificial sequence
  SiRNA target sequence
atcctgcttttatcaccattt

SEQ ID NO: 214047 - DNA, 21 bp, Artificial sequence
  SiRNA target sequence
tcctgcttttatcaccatttc

SEQ ID NO: 214048 - DNA, 21 bp, Artificial sequence
  SiRNA target sequence
cctgcttttatcaccatttcc

SEQ ID NO: 214049 - DNA, 21 bp, Artificial sequence
  SiRNA target sequence
ctgcttttatcaccatttcca

SEQ ID NO: 214050 - DNA, 21 bp, Artificial sequence
  SiRNA target sequence
tgcttttatcaccatttccaa

SEQ ID NO: 214051 - DNA, 21 bp, Artificial sequence
  SiRNA target sequence
gcttttatcaccatttccaaa

SEQ ID NO: 214052 - DNA, 21 bp, Artificial sequence
  SiRNA target sequence
cttttatcaccatttccaaaa

SEQ ID NO: 214053 - DNA, 21 bp, Artificial sequence
  SiRNA target sequence
ttttatcaccatttccaaaat

SEQ ID NO: 214054 - DNA, 21 bp, Artificial sequence
  SiRNA target sequence
tttatcaccatttccaaaatt

SEQ ID NO: 214055 - DNA, 21 bp, Artificial sequence
  SiRNA target sequence
ttatcaccatttccaaaatta

SEQ ID NO: 214056 - DNA, 21 bp, Artificial sequence
  SiRNA target sequence
tatcaccatttccaaaattaa

SEQ ID NO: 214057 - DNA, 21 bp, Artificial sequence
  SiRNA target sequence
atcaccatttccaaaattaat

SEQ ID NO: 214058 - DNA, 21 bp, Artificial sequence
  SiRNA target sequence
tcaccatttccaaaattaata

SEQ ID NO: 214059 - DNA, 21 bp, Artificial sequence
  SiRNA target sequence
caccatttccaaaattaatac

SEQ ID NO: 214060 - DNA, 21 bp, Artificial sequence
  SiRNA target sequence
accatttccaaaattaataca

SEQ ID NO: 214061 - DNA, 21 bp, Artificial sequence
  SiRNA target sequence
ccatttccaaaattaatacaa

SEQ ID NO: 214062 - DNA, 21 bp, Artificial sequence
  SiRNA target sequence
catttccaaaattaatacaaa

SEQ ID NO: 214063 - DNA, 21 bp, Artificial sequence
  SiRNA target sequence
atttccaaaattaatacaaac

SEQ ID NO: 214064 - DNA, 21 bp, Artificial sequence
  SiRNA target sequence
tttccaaaattaatacaaacc

SEQ ID NO: 214065 - DNA, 21 bp, Artificial sequence
  SiRNA target sequence
ttccaaaattaatacaaacca

SEQ ID NO: 214066 - DNA, 21 bp, Artificial sequence
  SiRNA target sequence
tccaaaattaatacaaaccaa

SEQ ID NO: 214067 - DNA, 21 bp, Artificial sequence
  SiRNA target sequence
ccaaaattaatacaaaccaaa

SEQ ID NO: 214068 - DNA, 21 bp, Artificial sequence
  SiRNA target sequence
caaaattaatacaaaccaaag

SEQ ID NO: 214069 - DNA, 21 bp, Artificial sequence
  SiRNA target sequence
aaaattaatacaaaccaaagg

SEQ ID NO: 214070 - DNA, 21 bp, Artificial sequence
  SiRNA target sequence
aaattaatacaaaccaaagga

SEQ ID NO: 214071 - DNA, 21 bp, Artificial sequence
  SiRNA target sequence
aattaatacaaaccaaaggat

SEQ ID NO: 214072 - DNA, 21 bp, Artificial sequence
  SiRNA target sequence
attaatacaaaccaaaggatg

SEQ ID NO: 214073 - DNA, 21 bp, Artificial sequence
  SiRNA target sequence
ttaatacaaaccaaaggatgg

SEQ ID NO: 214074 - DNA, 21 bp, Artificial sequence
  SiRNA target sequence
taatacaaaccaaaggatgga

SEQ ID NO: 214075 - DNA, 21 bp, Artificial sequence
  SiRNA target sequence
aatacaaaccaaaggatggat

SEQ ID NO: 214076 - DNA, 21 bp, Artificial sequence
  SiRNA target sequence
atacaaaccaaaggatggata

SEQ ID NO: 214077 - DNA, 21 bp, Artificial sequence
  SiRNA target sequence
tacaaaccaaaggatggatat

SEQ ID NO: 214078 - DNA, 21 bp, Artificial sequence
  SiRNA target sequence
acaaaccaaaggatggatatt

SEQ ID NO: 214079 - DNA, 21 bp, Artificial sequence
  SiRNA target sequence
caaaccaaaggatggatattt

SEQ ID NO: 214080 - DNA, 21 bp, Artificial sequence
  SiRNA target sequence
aaaccaaaggatggatatttg

SEQ ID NO: 214081 - DNA, 21 bp, Artificial sequence
  SiRNA target sequence
aaccaaaggatggatatttgt

SEQ ID NO: 214082 - DNA, 21 bp, Artificial sequence
  SiRNA target sequence
accaaaggatggatatttgtt

SEQ ID NO: 214083 - DNA, 21 bp, Artificial sequence
  SiRNA target sequence
ccaaaggatggatatttgttg

SEQ ID NO: 214084 - DNA, 21 bp, Artificial sequence
  SiRNA target sequence
caaaggatggatatttgttgc

SEQ ID NO: 214085 - DNA, 21 bp, Artificial sequence
  SiRNA target sequence
aaaggatggatatttgttgcc

SEQ ID NO: 214086 - DNA, 21 bp, Artificial sequence
  SiRNA target sequence
aaggatggatatttgttgcca

SEQ ID NO: 214087 - DNA, 21 bp, Artificial sequence
  SiRNA target sequence
aggatggatatttgttgccat

SEQ ID NO: 214088 - DNA, 21 bp, Artificial sequence
  SiRNA target sequence
ggatggatatttgttgccata

SEQ ID NO: 214089 - DNA, 21 bp, Artificial sequence
  SiRNA target sequence
gatggatatttgttgccatag

SEQ ID NO: 214090 - DNA, 21 bp, Artificial sequence
  SiRNA target sequence
atggatatttgttgccatagc

SEQ ID NO: 214091 - DNA, 21 bp, Artificial sequence
  SiRNA target sequence
tggatatttgttgccatagcg

SEQ ID NO: 214092 - DNA, 21 bp, Artificial sequence
  SiRNA target sequence
ggatatttgttgccatagcgt

SEQ ID NO: 214093 - DNA, 21 bp, Artificial sequence
  SiRNA target sequence
gatatttgttgccatagcgtg

SEQ ID NO: 214094 - DNA, 21 bp, Artificial sequence
  SiRNA target sequence
atatttgttgccatagcgtgc

SEQ ID NO: 214095 - DNA, 21 bp, Artificial sequence
  SiRNA target sequence
tatttgttgccatagcgtgcc

SEQ ID NO: 214096 - DNA, 21 bp, Artificial sequence
  SiRNA target sequence
atttgttgccatagcgtgccc

SEQ ID NO: 214097 - DNA, 21 bp, Artificial sequence
  SiRNA target sequence
tttgttgccatagcgtgccca

SEQ ID NO: 214098 - DNA, 21 bp, Artificial sequence
  SiRNA target sequence
ttgttgccatagcgtgcccac

SEQ ID NO: 214099 - DNA, 21 bp, Artificial sequence
  SiRNA target sequence
tgttgccatagcgtgcccact

SEQ ID NO: 214100 - DNA, 21 bp, Artificial sequence
  SiRNA target sequence
gttgccatagcgtgcccactt

SEQ ID NO: 214101 - DNA, 21 bp, Artificial sequence
  SiRNA target sequence
ttgccatagcgtgcccactta

SEQ ID NO: 214102 - DNA, 21 bp, Artificial sequence
  SiRNA target sequence
tgccatagcgtgcccacttat

SEQ ID NO: 214103 - DNA, 21 bp, Artificial sequence
  SiRNA target sequence
gccatagcgtgcccacttatt

SEQ ID NO: 214104 - DNA, 21 bp, Artificial sequence
  SiRNA target sequence
ccatagcgtgcccacttatta

SEQ ID NO: 214105 - DNA, 21 bp, Artificial sequence
  SiRNA target sequence
catagcgtgcccacttattac

SEQ ID NO: 214106 - DNA, 21 bp, Artificial sequence
  SiRNA target sequence
atagcgtgcccacttattacc

SEQ ID NO: 214107 - DNA, 21 bp, Artificial sequence
  SiRNA target sequence
tagcgtgcccacttattaccc

SEQ ID NO: 214108 - DNA, 21 bp, Artificial sequence
  SiRNA target sequence
agcgtgcccacttattaccct

SEQ ID NO: 214109 - DNA, 21 bp, Artificial sequence
  SiRNA target sequence
gcgtgcccacttattaccctt

SEQ ID NO: 214110 - DNA, 21 bp, Artificial sequence
  SiRNA target sequence
cgtgcccacttattacccttt

SEQ ID NO: 214111 - DNA, 21 bp, Artificial sequence
  SiRNA target sequence
gtgcccacttattaccctttt

SEQ ID NO: 214112 - DNA, 21 bp, Artificial sequence
  SiRNA target sequence
tgcccacttattacccttttt

SEQ ID NO: 214113 - DNA, 21 bp, Artificial sequence
  SiRNA target sequence
gcccacttattaccctttttg

SEQ ID NO: 214114 - DNA, 21 bp, Artificial sequence
  SiRNA target sequence
cccacttattaccctttttgc

SEQ ID NO: 214115 - DNA, 21 bp, Artificial sequence
  SiRNA target sequence
ccacttattaccctttttgct

SEQ ID NO: 214116 - DNA, 21 bp, Artificial sequence
  SiRNA target sequence
cacttattaccctttttgctg

SEQ ID NO: 214117 - DNA, 21 bp, Artificial sequence
  SiRNA target sequence
acttattaccctttttgctgt

SEQ ID NO: 214118 - DNA, 21 bp, Artificial sequence
  SiRNA target sequence
cttattaccctttttgctgta

SEQ ID NO: 214119 - DNA, 21 bp, Artificial sequence
  SiRNA target sequence
ttattaccctttttgctgtag

SEQ ID NO: 214120 - DNA, 21 bp, Artificial sequence
  SiRNA target sequence
tattaccctttttgctgtagt

SEQ ID NO: 214121 - DNA, 21 bp, Artificial sequence
  SiRNA target sequence
attaccctttttgctgtagtt

SEQ ID NO: 214122 - DNA, 21 bp, Artificial sequence
  SiRNA target sequence
ttaccctttttgctgtagttt

SEQ ID NO: 214123 - DNA, 21 bp, Artificial sequence
  SiRNA target sequence
taccctttttgctgtagtttc

SEQ ID NO: 214124 - DNA, 21 bp, Artificial sequence
  SiRNA target sequence
accctttttgctgtagtttct

SEQ ID NO: 214125 - DNA, 21 bp, Artificial sequence
  SiRNA target sequence
ccctttttgctgtagtttctg

SEQ ID NO: 214126 - DNA, 21 bp, Artificial sequence
  SiRNA target sequence
cctttttgctgtagtttctgt

SEQ ID NO: 214127 - DNA, 21 bp, Artificial sequence
  SiRNA target sequence
ctttttgctgtagtttctgtg

SEQ ID NO: 214128 - DNA, 21 bp, Artificial sequence
  SiRNA target sequence
tttttgctgtagtttctgtgt

SEQ ID NO: 214129 - DNA, 21 bp, Artificial sequence
  SiRNA target sequence
ttttgctgtagtttctgtgtg

SEQ ID NO: 214130 - DNA, 21 bp, Artificial sequence
  SiRNA target sequence
tttgctgtagtttctgtgtgt

SEQ ID NO: 214131 - DNA, 21 bp, Artificial sequence
  SiRNA target sequence
ttgctgtagtttctgtgtgtg

SEQ ID NO: 214132 - DNA, 21 bp, Artificial sequence
  SiRNA target sequence
tgctgtagtttctgtgtgtgg

SEQ ID NO: 214133 - DNA, 21 bp, Artificial sequence
  SiRNA target sequence
gctgtagtttctgtgtgtggt

SEQ ID NO: 214134 - DNA, 21 bp, Artificial sequence
  SiRNA target sequence
ctgtagtttctgtgtgtggtc

SEQ ID NO: 214135 - DNA, 21 bp, Artificial sequence
  SiRNA target sequence
tgtagtttctgtgtgtggtct

SEQ ID NO: 214136 - DNA, 21 bp, Artificial sequence
  SiRNA target sequence
gtagtttctgtgtgtggtctt

SEQ ID NO: 214137 - DNA, 21 bp, Artificial sequence
  SiRNA target sequence
tagtttctgtgtgtggtcttg

SEQ ID NO: 214138 - DNA, 21 bp, Artificial sequence
  SiRNA target sequence
agtttctgtgtgtggtcttgc

SEQ ID NO: 214139 - DNA, 21 bp, Artificial sequence
  SiRNA target sequence
gtttctgtgtgtggtcttgct

SEQ ID NO: 214140 - DNA, 21 bp, Artificial sequence
  SiRNA target sequence
tttctgtgtgtggtcttgctt

SEQ ID NO: 214141 - DNA, 21 bp, Artificial sequence
  SiRNA target sequence
ttctgtgtgtggtcttgcttt

SEQ ID NO: 214142 - DNA, 21 bp, Artificial sequence
  SiRNA target sequence
tctgtgtgtggtcttgctttt

SEQ ID NO: 214143 - DNA, 21 bp, Artificial sequence
  SiRNA target sequence
ctgtgtgtggtcttgcttttt

SEQ ID NO: 214144 - DNA, 21 bp, Artificial sequence
  SiRNA target sequence
tgtgtgtggtcttgcttttta

SEQ ID NO: 214145 - DNA, 21 bp, Artificial sequence
  SiRNA target sequence
gtgtgtggtcttgctttttac

SEQ ID NO: 214146 - DNA, 21 bp, Artificial sequence
  SiRNA target sequence
tgtgtggtcttgctttttaca

SEQ ID NO: 214147 - DNA, 21 bp, Artificial sequence
  SiRNA target sequence
gtgtggtcttgctttttacaa

SEQ ID NO: 214148 - DNA, 21 bp, Artificial sequence
  SiRNA target sequence
tgtggtcttgctttttacaat

SEQ ID NO: 214149 - DNA, 21 bp, Artificial sequence
  SiRNA target sequence
gtggtcttgctttttacaatt

SEQ ID NO: 214150 - DNA, 21 bp, Artificial sequence
  SiRNA target sequence
tggtcttgctttttacaatta

SEQ ID NO: 214151 - DNA, 21 bp, Artificial sequence
  SiRNA target sequence
ggtcttgctttttacaattat

SEQ ID NO: 214152 - DNA, 21 bp, Artificial sequence
  SiRNA target sequence
gtcttgctttttacaattatc

SEQ ID NO: 214153 - DNA, 21 bp, Artificial sequence
  SiRNA target sequence
tcttgctttttacaattatcc

SEQ ID NO: 214154 - DNA, 21 bp, Artificial sequence
  SiRNA target sequence
cttgctttttacaattatccg

SEQ ID NO: 214155 - DNA, 21 bp, Artificial sequence
  SiRNA target sequence
ttgctttttacaattatccgg

SEQ ID NO: 214156 - DNA, 21 bp, Artificial sequence
  SiRNA target sequence
tgctttttacaattatccggc

SEQ ID NO: 214157 - DNA, 21 bp, Artificial sequence
  SiRNA target sequence
gctttttacaattatccggca

SEQ ID NO: 214158 - DNA, 21 bp, Artificial sequence
  SiRNA target sequence
ctttttacaattatccggcaa

SEQ ID NO: 214159 - DNA, 21 bp, Artificial sequence
  SiRNA target sequence
tttttacaattatccggcaac

SEQ ID NO: 214160 - DNA, 21 bp, Artificial sequence
  SiRNA target sequence
ttttacaattatccggcaaca

SEQ ID NO: 214161 - DNA, 21 bp, Artificial sequence
  SiRNA target sequence
tttacaattatccggcaacaa

SEQ ID NO: 214162 - DNA, 21 bp, Artificial sequence
  SiRNA target sequence
ttacaattatccggcaacaaa

SEQ ID NO: 214163 - DNA, 21 bp, Artificial sequence
  SiRNA target sequence
tacaattatccggcaacaaat

SEQ ID NO: 214164 - DNA, 21 bp, Artificial sequence
  SiRNA target sequence
acaattatccggcaacaaata

SEQ ID NO: 214165 - DNA, 21 bp, Artificial sequence
  SiRNA target sequence
caattatccggcaacaaataa

SEQ ID NO: 214166 - DNA, 21 bp, Artificial sequence
  SiRNA target sequence
aattatccggcaacaaataat

SEQ ID NO: 214167 - DNA, 21 bp, Artificial sequence
  SiRNA target sequence
attatccggcaacaaataatg

SEQ ID NO: 214168 - DNA, 21 bp, Artificial sequence
  SiRNA target sequence
ttatccggcaacaaataatga

SEQ ID NO: 214169 - DNA, 21 bp, Artificial sequence
  SiRNA target sequence
tatccggcaacaaataatgac

SEQ ID NO: 214170 - DNA, 21 bp, Artificial sequence
  SiRNA target sequence
atccggcaacaaataatgaca

SEQ ID NO: 214171 - DNA, 21 bp, Artificial sequence
  SiRNA target sequence
tccggcaacaaataatgacac

SEQ ID NO: 214172 - DNA, 21 bp, Artificial sequence
  SiRNA target sequence
ccggcaacaaataatgacaca

SEQ ID NO: 214173 - DNA, 21 bp, Artificial sequence
  SiRNA target sequence
cggcaacaaataatgacacaa

SEQ ID NO: 214174 - DNA, 21 bp, Artificial sequence
  SiRNA target sequence
ggcaacaaataatgacacaaa

SEQ ID NO: 214175 - DNA, 21 bp, Artificial sequence
  SiRNA target sequence
gcaacaaataatgacacaaat

SEQ ID NO: 214176 - DNA, 21 bp, Artificial sequence
  SiRNA target sequence
caacaaataatgacacaaatt

SEQ ID NO: 214177 - DNA, 21 bp, Artificial sequence
  SiRNA target sequence
aacaaataatgacacaaattt

SEQ ID NO: 214178 - DNA, 21 bp, Artificial sequence
  SiRNA target sequence
acaaataatgacacaaatttt

SEQ ID NO: 214179 - DNA, 21 bp, Artificial sequence
  SiRNA target sequence
caaataatgacacaaattttt

SEQ ID NO: 214180 - DNA, 21 bp, Artificial sequence
  SiRNA target sequence
aaataatgacacaaatttttt

SEQ ID NO: 214181 - DNA, 21 bp, Artificial sequence
  SiRNA target sequence
aataatgacacaaattttttt

SEQ ID NO: 214182 - DNA, 21 bp, Artificial sequence
  SiRNA target sequence
ataatgacacaaatttttttc

SEQ ID NO: 214183 - DNA, 21 bp, Artificial sequence
  SiRNA target sequence
taatgacacaaatttttttct

SEQ ID NO: 214184 - DNA, 21 bp, Artificial sequence
  SiRNA target sequence
aatgacacaaatttttttcta

SEQ ID NO: 214185 - DNA, 21 bp, Artificial sequence
  SiRNA target sequence
atgacacaaatttttttctaa

SEQ ID NO: 214186 - DNA, 21 bp, Artificial sequence
  SiRNA target sequence
tgacacaaatttttttctaaa

SEQ ID NO: 214187 - DNA, 21 bp, Artificial sequence
  SiRNA target sequence
gacacaaatttttttctaaat

SEQ ID NO: 214188 - DNA, 21 bp, Artificial sequence
  SiRNA target sequence
acacaaatttttttctaaatt

SEQ ID NO: 214189 - DNA, 21 bp, Artificial sequence
  SiRNA target sequence
cacaaatttttttctaaattc

SEQ ID NO: 214190 - DNA, 21 bp, Artificial sequence
  SiRNA target sequence
acaaatttttttctaaattca

SEQ ID NO: 214191 - DNA, 21 bp, Artificial sequence
  SiRNA target sequence
caaatttttttctaaattcat

SEQ ID NO: 214192 - DNA, 21 bp, Artificial sequence
  SiRNA target sequence
aaatttttttctaaattcatt

SEQ ID NO: 214193 - DNA, 21 bp, Artificial sequence
  SiRNA target sequence
aatttttttctaaattcatta

SEQ ID NO: 214194 - DNA, 21 bp, Artificial sequence
  SiRNA target sequence
atttttttctaaattcattat

SEQ ID NO: 214195 - DNA, 21 bp, Artificial sequence
  SiRNA target sequence
tttttttctaaattcattatg

SEQ ID NO: 214196 - DNA, 21 bp, Artificial sequence
  SiRNA target sequence
ttttttctaaattcattatgt

SEQ ID NO: 214197 - DNA, 21 bp, Artificial sequence
  SiRNA target sequence
tttttctaaattcattatgtg

SEQ ID NO: 214198 - DNA, 21 bp, Artificial sequence
  SiRNA target sequence
ttttctaaattcattatgtgc

SEQ ID NO: 214199 - DNA, 21 bp, Artificial sequence
  SiRNA target sequence
tttctaaattcattatgtgct

SEQ ID NO: 214200 - DNA, 21 bp, Artificial sequence
  SiRNA target sequence
ttctaaattcattatgtgcta

SEQ ID NO: 214201 - DNA, 21 bp, Artificial sequence
  SiRNA target sequence
tctaaattcattatgtgctac

SEQ ID NO: 214202 - DNA, 21 bp, Artificial sequence
  SiRNA target sequence
ctaaattcattatgtgctacg

SEQ ID NO: 214203 - DNA, 21 bp, Artificial sequence
  SiRNA target sequence
taaattcattatgtgctacgc

SEQ ID NO: 214204 - DNA, 21 bp, Artificial sequence
  SiRNA target sequence
aaattcattatgtgctacgcc

SEQ ID NO: 214205 - DNA, 21 bp, Artificial sequence
  SiRNA target sequence
aattcattatgtgctacgccc

SEQ ID NO: 214206 - DNA, 21 bp, Artificial sequence
  SiRNA target sequence
attcattatgtgctacgcccg

SEQ ID NO: 214207 - DNA, 21 bp, Artificial sequence
  SiRNA target sequence
ttcattatgtgctacgcccgg

SEQ ID NO: 214208 - DNA, 21 bp, Artificial sequence
  SiRNA target sequence
tcattatgtgctacgcccggt

SEQ ID NO: 214209 - DNA, 21 bp, Artificial sequence
  SiRNA target sequence
cattatgtgctacgcccggta

SEQ ID NO: 214210 - DNA, 21 bp, Artificial sequence
  SiRNA target sequence
attatgtgctacgcccggtaa

SEQ ID NO: 214211 - DNA, 21 bp, Artificial sequence
  SiRNA target sequence
ttatgtgctacgcccggtaaa

SEQ ID NO: 214212 - DNA, 21 bp, Artificial sequence
  SiRNA target sequence
tatgtgctacgcccggtaaat

SEQ ID NO: 214213 - DNA, 21 bp, Artificial sequence
  SiRNA target sequence
atgtgctacgcccggtaaatc

SEQ ID NO: 214214 - DNA, 21 bp, Artificial sequence
  SiRNA target sequence
tgtgctacgcccggtaaatcg

SEQ ID NO: 214215 - DNA, 21 bp, Artificial sequence
  SiRNA target sequence
gtgctacgcccggtaaatcgt

SEQ ID NO: 214216 - DNA, 21 bp, Artificial sequence
  SiRNA target sequence
tgctacgcccggtaaatcgtt

SEQ ID NO: 214217 - DNA, 21 bp, Artificial sequence
  SiRNA target sequence
gctacgcccggtaaatcgttt

SEQ ID NO: 214218 - DNA, 21 bp, Artificial sequence
  SiRNA target sequence
ctacgcccggtaaatcgttta

SEQ ID NO: 214219 - DNA, 21 bp, Artificial sequence
  SiRNA target sequence
tacgcccggtaaatcgtttat

SEQ ID NO: 214220 - DNA, 21 bp, Artificial sequence
  SiRNA target sequence
acgcccggtaaatcgtttata

SEQ ID NO: 214221 - DNA, 21 bp, Artificial sequence
  SiRNA target sequence
cgcccggtaaatcgtttataa

SEQ ID NO: 214222 - DNA, 21 bp, Artificial sequence
  SiRNA target sequence
gcccggtaaatcgtttataaa

SEQ ID NO: 214223 - DNA, 21 bp, Artificial sequence
  SiRNA target sequence
cccggtaaatcgtttataaaa

SEQ ID NO: 214224 - DNA, 21 bp, Artificial sequence
  SiRNA target sequence
ccggtaaatcgtttataaaat

SEQ ID NO: 214225 - DNA, 21 bp, Artificial sequence
  SiRNA target sequence
cggtaaatcgtttataaaatt

SEQ ID NO: 214226 - DNA, 21 bp, Artificial sequence
  SiRNA target sequence
ggtaaatcgtttataaaatta

SEQ ID NO: 214227 - DNA, 21 bp, Artificial sequence
  SiRNA target sequence
gtaaatcgtttataaaattag

SEQ ID NO: 214228 - DNA, 21 bp, Artificial sequence
  SiRNA target sequence
taaatcgtttataaaattaga

SEQ ID NO: 214229 - DNA, 21 bp, Artificial sequence
  SiRNA target sequence
aaatcgtttataaaattagaa

SEQ ID NO: 214230 - DNA, 21 bp, Artificial sequence
  SiRNA target sequence
aatcgtttataaaattagaaa

SEQ ID NO: 214231 - DNA, 21 bp, Artificial sequence
  SiRNA target sequence
atcgtttataaaattagaaaa

SEQ ID NO: 214232 - DNA, 21 bp, Artificial sequence
  SiRNA target sequence
tcgtttataaaattagaaaat

SEQ ID NO: 214233 - DNA, 21 bp, Artificial sequence
  SiRNA target sequence
cgtttataaaattagaaaatg

SEQ ID NO: 214234 - DNA, 21 bp, Artificial sequence
  SiRNA target sequence
gtttataaaattagaaaatgt

SEQ ID NO: 214235 - DNA, 21 bp, Artificial sequence
  SiRNA target sequence
tttataaaattagaaaatgtt

SEQ ID NO: 214236 - DNA, 21 bp, Artificial sequence
  SiRNA target sequence
ttataaaattagaaaatgttt

SEQ ID NO: 214237 - DNA, 21 bp, Artificial sequence
  SiRNA target sequence
tataaaattagaaaatgtttt

SEQ ID NO: 214238 - DNA, 21 bp, Artificial sequence
  SiRNA target sequence
ataaaattagaaaatgtttta

SEQ ID NO: 214239 - DNA, 21 bp, Artificial sequence
  SiRNA target sequence
taaaattagaaaatgttttag

SEQ ID NO: 214240 - DNA, 21 bp, Artificial sequence
  SiRNA target sequence
aaaattagaaaatgttttagg

SEQ ID NO: 214241 - DNA, 21 bp, Artificial sequence
  SiRNA target sequence
aaattagaaaatgttttagga

SEQ ID NO: 214242 - DNA, 21 bp, Artificial sequence
  SiRNA target sequence
aattagaaaatgttttaggat

SEQ ID NO: 214243 - DNA, 21 bp, Artificial sequence
  SiRNA target sequence
attagaaaatgttttaggatg

SEQ ID NO: 214244 - DNA, 21 bp, Artificial sequence
  SiRNA target sequence
ttagaaaatgttttaggatgt

SEQ ID NO: 214245 - DNA, 21 bp, Artificial sequence
  SiRNA target sequence
tagaaaatgttttaggatgtg

SEQ ID NO: 214246 - DNA, 21 bp, Artificial sequence
  SiRNA target sequence
agaaaatgttttaggatgtgt

SEQ ID NO: 214247 - DNA, 21 bp, Artificial sequence
  SiRNA target sequence
gaaaatgttttaggatgtgta

SEQ ID NO: 214248 - DNA, 21 bp, Artificial sequence
  SiRNA target sequence
aaaatgttttaggatgtgtag

SEQ ID NO: 214249 - DNA, 21 bp, Artificial sequence
  SiRNA target sequence
aaatgttttaggatgtgtagc

SEQ ID NO: 214250 - DNA, 21 bp, Artificial sequence
  SiRNA target sequence
aatgttttaggatgtgtagct

SEQ ID NO: 214251 - DNA, 21 bp, Artificial sequence
  SiRNA target sequence
atgttttaggatgtgtagctg

SEQ ID NO: 214252 - DNA, 21 bp, Artificial sequence
  SiRNA target sequence
tgttttaggatgtgtagctgt

SEQ ID NO: 214253 - DNA, 21 bp, Artificial sequence
  SiRNA target sequence
gttttaggatgtgtagctgta

SEQ ID NO: 214254 - DNA, 21 bp, Artificial sequence
  SiRNA target sequence
ttttaggatgtgtagctgtag

SEQ ID NO: 214255 - DNA, 21 bp, Artificial sequence
  SiRNA target sequence
tttaggatgtgtagctgtagc

SEQ ID NO: 214256 - DNA, 21 bp, Artificial sequence
  SiRNA target sequence
ttaggatgtgtagctgtagct

SEQ ID NO: 214257 - DNA, 21 bp, Artificial sequence
  SiRNA target sequence
taggatgtgtagctgtagctc

SEQ ID NO: 214258 - DNA, 21 bp, Artificial sequence
  SiRNA target sequence
aggatgtgtagctgtagctct

SEQ ID NO: 214259 - DNA, 21 bp, Artificial sequence
  SiRNA target sequence
ggatgtgtagctgtagctctt

SEQ ID NO: 214260 - DNA, 21 bp, Artificial sequence
  SiRNA target sequence
gatgtgtagctgtagctctta

SEQ ID NO: 214261 - DNA, 21 bp, Artificial sequence
  SiRNA target sequence
atgtgtagctgtagctcttat

SEQ ID NO: 214262 - DNA, 21 bp, Artificial sequence
  SiRNA target sequence
tgtgtagctgtagctcttatg

SEQ ID NO: 214263 - DNA, 21 bp, Artificial sequence
  SiRNA target sequence
gtgtagctgtagctcttatga

SEQ ID NO: 214264 - DNA, 21 bp, Artificial sequence
  SiRNA target sequence
tgtagctgtagctcttatgaa

SEQ ID NO: 214265 - DNA, 21 bp, Artificial sequence
  SiRNA target sequence
gtagctgtagctcttatgaaa

SEQ ID NO: 214266 - DNA, 21 bp, Artificial sequence
  SiRNA target sequence
tagctgtagctcttatgaaag

SEQ ID NO: 214267 - DNA, 21 bp, Artificial sequence
  SiRNA target sequence
agctgtagctcttatgaaagt

SEQ ID NO: 214268 - DNA, 21 bp, Artificial sequence
  SiRNA target sequence
gctgtagctcttatgaaagta

SEQ ID NO: 214269 - DNA, 21 bp, Artificial sequence
  SiRNA target sequence
ctgtagctcttatgaaagtag

SEQ ID NO: 214270 - DNA, 21 bp, Artificial sequence
  SiRNA target sequence
tgtagctcttatgaaagtagc

SEQ ID NO: 214271 - DNA, 21 bp, Artificial sequence
  SiRNA target sequence
gtagctcttatgaaagtagca

SEQ ID NO: 214272 - DNA, 21 bp, Artificial sequence
  SiRNA target sequence
tagctcttatgaaagtagcaa

SEQ ID NO: 214273 - DNA, 21 bp, Artificial sequence
  SiRNA target sequence
agctcttatgaaagtagcaaa

SEQ ID NO: 214274 - DNA, 21 bp, Artificial sequence
  SiRNA target sequence
gctcttatgaaagtagcaaaa

SEQ ID NO: 214275 - DNA, 21 bp, Artificial sequence
  SiRNA target sequence
ctcttatgaaagtagcaaaat

SEQ ID NO: 214276 - DNA, 21 bp, Artificial sequence
  SiRNA target sequence
tcttatgaaagtagcaaaata

SEQ ID NO: 214277 - DNA, 21 bp, Artificial sequence
  SiRNA target sequence
cttatgaaagtagcaaaatat

SEQ ID NO: 214278 - DNA, 21 bp, Artificial sequence
  SiRNA target sequence
ttatgaaagtagcaaaatatg

SEQ ID NO: 214279 - DNA, 21 bp, Artificial sequence
  SiRNA target sequence
tatgaaagtagcaaaatatgg

SEQ ID NO: 214280 - DNA, 21 bp, Artificial sequence
  SiRNA target sequence
atgaaagtagcaaaatatggc

SEQ ID NO: 214281 - DNA, 21 bp, Artificial sequence
  SiRNA target sequence
tgaaagtagcaaaatatggct

SEQ ID NO: 214282 - DNA, 21 bp, Artificial sequence
  SiRNA target sequence
gaaagtagcaaaatatggctc

SEQ ID NO: 214283 - DNA, 21 bp, Artificial sequence
  SiRNA target sequence
aaagtagcaaaatatggctct

SEQ ID NO: 214284 - DNA, 21 bp, Artificial sequence
  SiRNA target sequence
aagtagcaaaatatggctctt

SEQ ID NO: 214285 - DNA, 21 bp, Artificial sequence
  SiRNA target sequence
agtagcaaaatatggctcttt

SEQ ID NO: 214286 - DNA, 21 bp, Artificial sequence
  SiRNA target sequence
gtagcaaaatatggctctttt

SEQ ID NO: 214287 - DNA, 21 bp, Artificial sequence
  SiRNA target sequence
tagcaaaatatggctcttttg

SEQ ID NO: 214288 - DNA, 21 bp, Artificial sequence
  SiRNA target sequence
agcaaaatatggctcttttga

SEQ ID NO: 214289 - DNA, 21 bp, Artificial sequence
  SiRNA target sequence
gcaaaatatggctcttttgat

SEQ ID NO: 214290 - DNA, 21 bp, Artificial sequence
  SiRNA target sequence
caaaatatggctcttttgata

SEQ ID NO: 214291 - DNA, 21 bp, Artificial sequence
  SiRNA target sequence
aaaatatggctcttttgatat

SEQ ID NO: 214292 - DNA, 21 bp, Artificial sequence
  SiRNA target sequence
aaatatggctcttttgatatt

SEQ ID NO: 214293 - DNA, 21 bp, Artificial sequence
  SiRNA target sequence
aatatggctcttttgatattt

SEQ ID NO: 214294 - DNA, 21 bp, Artificial sequence
  SiRNA target sequence
atatggctcttttgatatttc

SEQ ID NO: 214295 - DNA, 21 bp, Artificial sequence
  SiRNA target sequence
tatggctcttttgatatttcc

SEQ ID NO: 214296 - DNA, 21 bp, Artificial sequence
  SiRNA target sequence
atggctcttttgatatttcca

SEQ ID NO: 214297 - DNA, 21 bp, Artificial sequence
  SiRNA target sequence
tggctcttttgatatttccaa

SEQ ID NO: 214298 - DNA, 21 bp, Artificial sequence
  SiRNA target sequence
ggctcttttgatatttccaaa

SEQ ID NO: 214299 - DNA, 21 bp, Artificial sequence
  SiRNA target sequence
gctcttttgatatttccaaag

SEQ ID NO: 214300 - DNA, 21 bp, Artificial sequence
  SiRNA target sequence
ctcttttgatatttccaaaga

SEQ ID NO: 214301 - DNA, 21 bp, Artificial sequence
  SiRNA target sequence
tcttttgatatttccaaagaa

SEQ ID NO: 214302 - DNA, 21 bp, Artificial sequence
  SiRNA target sequence
cttttgatatttccaaagaag

SEQ ID NO: 214303 - DNA, 21 bp, Artificial sequence
  SiRNA target sequence
ttttgatatttccaaagaagc

SEQ ID NO: 214304 - DNA, 21 bp, Artificial sequence
  SiRNA target sequence
tttgatatttccaaagaagcc

SEQ ID NO: 214305 - DNA, 21 bp, Artificial sequence
  SiRNA target sequence
ttgatatttccaaagaagcca

SEQ ID NO: 214306 - DNA, 21 bp, Artificial sequence
  SiRNA target sequence
tgatatttccaaagaagccat

SEQ ID NO: 214307 - DNA, 21 bp, Artificial sequence
  SiRNA target sequence
gatatttccaaagaagccatt

SEQ ID NO: 214308 - DNA, 21 bp, Artificial sequence
  SiRNA target sequence
atatttccaaagaagccattt

SEQ ID NO: 214309 - DNA, 21 bp, Artificial sequence
  SiRNA target sequence
tatttccaaagaagccatttc

SEQ ID NO: 214310 - DNA, 21 bp, Artificial sequence
  SiRNA target sequence
atttccaaagaagccatttca

SEQ ID NO: 214311 - DNA, 21 bp, Artificial sequence
  SiRNA target sequence
tttccaaagaagccatttcaa

SEQ ID NO: 214312 - DNA, 21 bp, Artificial sequence
  SiRNA target sequence
ttccaaagaagccatttcaat

SEQ ID NO: 214313 - DNA, 21 bp, Artificial sequence
  SiRNA target sequence
tccaaagaagccatttcaatg

SEQ ID NO: 214314 - DNA, 21 bp, Artificial sequence
  SiRNA target sequence
ccaaagaagccatttcaatgc

SEQ ID NO: 214315 - DNA, 21 bp, Artificial sequence
  SiRNA target sequence
caaagaagccatttcaatgca

SEQ ID NO: 214316 - DNA, 21 bp, Artificial sequence
  SiRNA target sequence
aaagaagccatttcaatgcag

SEQ ID NO: 214317 - DNA, 21 bp, Artificial sequence
  SiRNA target sequence
aagaagccatttcaatgcaga

SEQ ID NO: 214318 - DNA, 21 bp, Artificial sequence
  SiRNA target sequence
agaagccatttcaatgcagat

SEQ ID NO: 214319 - DNA, 21 bp, Artificial sequence
  SiRNA target sequence
gaagccatttcaatgcagatt

SEQ ID NO: 214320 - DNA, 21 bp, Artificial sequence
  SiRNA target sequence
aagccatttcaatgcagattg

SEQ ID NO: 214321 - DNA, 21 bp, Artificial sequence
  SiRNA target sequence
agccatttcaatgcagattga

SEQ ID NO: 214322 - DNA, 21 bp, Artificial sequence
  SiRNA target sequence
gccatttcaatgcagattgat

SEQ ID NO: 214323 - DNA, 21 bp, Artificial sequence
  SiRNA target sequence
ccatttcaatgcagattgatt

SEQ ID NO: 214324 - DNA, 21 bp, Artificial sequence
  SiRNA target sequence
catttcaatgcagattgattc

SEQ ID NO: 214325 - DNA, 21 bp, Artificial sequence
  SiRNA target sequence
atttcaatgcagattgattcg

SEQ ID NO: 214326 - DNA, 21 bp, Artificial sequence
  SiRNA target sequence
tttcaatgcagattgattcgt

SEQ ID NO: 214327 - DNA, 21 bp, Artificial sequence
  SiRNA target sequence
ttcaatgcagattgattcgtc

SEQ ID NO: 214328 - DNA, 21 bp, Artificial sequence
  SiRNA target sequence
tcaatgcagattgattcgtca

SEQ ID NO: 214329 - DNA, 21 bp, Artificial sequence
  SiRNA target sequence
caatgcagattgattcgtcat

SEQ ID NO: 214330 - DNA, 21 bp, Artificial sequence
  SiRNA target sequence
aatgcagattgattcgtcatt

SEQ ID NO: 214331 - DNA, 21 bp, Artificial sequence
  SiRNA target sequence
atgcagattgattcgtcattg

SEQ ID NO: 214332 - DNA, 21 bp, Artificial sequence
  SiRNA target sequence
tgcagattgattcgtcattgc

SEQ ID NO: 214333 - DNA, 21 bp, Artificial sequence
  SiRNA target sequence
gcagattgattcgtcattgcg

SEQ ID NO: 214334 - DNA, 21 bp, Artificial sequence
  SiRNA target sequence
cagattgattcgtcattgcgt

SEQ ID NO: 214335 - DNA, 21 bp, Artificial sequence
  SiRNA target sequence
agattgattcgtcattgcgtg

SEQ ID NO: 214336 - DNA, 21 bp, Artificial sequence
  SiRNA target sequence
gattgattcgtcattgcgtgc

SEQ ID NO: 214337 - DNA, 21 bp, Artificial sequence
  SiRNA target sequence
attgattcgtcattgcgtgca

SEQ ID NO: 214338 - DNA, 21 bp, Artificial sequence
  SiRNA target sequence
ttgattcgtcattgcgtgcac

SEQ ID NO: 214339 - DNA, 21 bp, Artificial sequence
  SiRNA target sequence
tgattcgtcattgcgtgcacg

SEQ ID NO: 214340 - DNA, 21 bp, Artificial sequence
  SiRNA target sequence
gattcgtcattgcgtgcacgt

SEQ ID NO: 214341 - DNA, 21 bp, Artificial sequence
  SiRNA target sequence
attcgtcattgcgtgcacgtt

SEQ ID NO: 214342 - DNA, 21 bp, Artificial sequence
  SiRNA target sequence
ttcgtcattgcgtgcacgtta

SEQ ID NO: 214343 - DNA, 21 bp, Artificial sequence
  SiRNA target sequence
tcgtcattgcgtgcacgttat

SEQ ID NO: 214344 - DNA, 21 bp, Artificial sequence
  SiRNA target sequence
cgtcattgcgtgcacgttata

SEQ ID NO: 214345 - DNA, 21 bp, Artificial sequence
  SiRNA target sequence
gtcattgcgtgcacgttataa

SEQ ID NO: 214346 - DNA, 21 bp, Artificial sequence
  SiRNA target sequence
tcattgcgtgcacgttataaa

SEQ ID NO: 214347 - DNA, 21 bp, Artificial sequence
  SiRNA target sequence
cattgcgtgcacgttataaag

SEQ ID NO: 214348 - DNA, 21 bp, Artificial sequence
  SiRNA target sequence
attgcgtgcacgttataaagg

SEQ ID NO: 214349 - DNA, 21 bp, Artificial sequence
  SiRNA target sequence
ttgcgtgcacgttataaagga

SEQ ID NO: 214350 - DNA, 21 bp, Artificial sequence
  SiRNA target sequence
tgcgtgcacgttataaaggaa

SEQ ID NO: 214351 - DNA, 21 bp, Artificial sequence
  SiRNA target sequence
gcgtgcacgttataaaggaat

SEQ ID NO: 214352 - DNA, 21 bp, Artificial sequence
  SiRNA target sequence
cgtgcacgttataaaggaatt

SEQ ID NO: 214353 - DNA, 21 bp, Artificial sequence
  SiRNA target sequence
gtgcacgttataaaggaattt

SEQ ID NO: 214354 - DNA, 21 bp, Artificial sequence
  SiRNA target sequence
tgcacgttataaaggaatttt

SEQ ID NO: 214355 - DNA, 21 bp, Artificial sequence
  SiRNA target sequence
gcacgttataaaggaattttt

SEQ ID NO: 214356 - DNA, 21 bp, Artificial sequence
  SiRNA target sequence
cacgttataaaggaatttttg

SEQ ID NO: 214357 - DNA, 21 bp, Artificial sequence
  SiRNA target sequence
acgttataaaggaatttttga

SEQ ID NO: 214358 - DNA, 21 bp, Artificial sequence
  SiRNA target sequence
cgttataaaggaatttttgac

SEQ ID NO: 214359 - DNA, 21 bp, Artificial sequence
  SiRNA target sequence
gttataaaggaatttttgacg

SEQ ID NO: 214360 - DNA, 21 bp, Artificial sequence
  SiRNA target sequence
ttataaaggaatttttgacgg

SEQ ID NO: 214361 - DNA, 21 bp, Artificial sequence
  SiRNA target sequence
tataaaggaatttttgacggt

SEQ ID NO: 214362 - DNA, 21 bp, Artificial sequence
  SiRNA target sequence
ataaaggaatttttgacggtg

SEQ ID NO: 214363 - DNA, 21 bp, Artificial sequence
  SiRNA target sequence
taaaggaatttttgacggtgt

SEQ ID NO: 214364 - DNA, 21 bp, Artificial sequence
  SiRNA target sequence
aaaggaatttttgacggtgtt

SEQ ID NO: 214365 - DNA, 21 bp, Artificial sequence
  SiRNA target sequence
aaggaatttttgacggtgttt

SEQ ID NO: 214366 - DNA, 21 bp, Artificial sequence
  SiRNA target sequence
aggaatttttgacggtgtttt

SEQ ID NO: 214367 - DNA, 21 bp, Artificial sequence
  SiRNA target sequence
ggaatttttgacggtgttttt

SEQ ID NO: 214368 - DNA, 21 bp, Artificial sequence
  SiRNA target sequence
gaatttttgacggtgtttttg

SEQ ID NO: 214369 - DNA, 21 bp, Artificial sequence
  SiRNA target sequence
aatttttgacggtgtttttgg

SEQ ID NO: 214370 - DNA, 21 bp, Artificial sequence
  SiRNA target sequence
atttttgacggtgtttttggt

SEQ ID NO: 214371 - DNA, 21 bp, Artificial sequence
  SiRNA target sequence
tttttgacggtgtttttggta

SEQ ID NO: 214372 - DNA, 21 bp, Artificial sequence
  SiRNA target sequence
ttttgacggtgtttttggtaa

SEQ ID NO: 214373 - DNA, 21 bp, Artificial sequence
  SiRNA target sequence
tttgacggtgtttttggtaag

SEQ ID NO: 214374 - DNA, 21 bp, Artificial sequence
  SiRNA target sequence
ttgacggtgtttttggtaagt

SEQ ID NO: 214375 - DNA, 21 bp, Artificial sequence
  SiRNA target sequence
tgacggtgtttttggtaagtt

SEQ ID NO: 214376 - DNA, 21 bp, Artificial sequence
  SiRNA target sequence
gacggtgtttttggtaagtta

SEQ ID NO: 214377 - DNA, 21 bp, Artificial sequence
  SiRNA target sequence
acggtgtttttggtaagttag

SEQ ID NO: 214378 - DNA, 21 bp, Artificial sequence
  SiRNA target sequence
cggtgtttttggtaagttagg

SEQ ID NO: 214379 - DNA, 21 bp, Artificial sequence
  SiRNA target sequence
ggtgtttttggtaagttagga

SEQ ID NO: 214380 - DNA, 21 bp, Artificial sequence
  SiRNA target sequence
gtgtttttggtaagttaggaa

SEQ ID NO: 214381 - DNA, 21 bp, Artificial sequence
  SiRNA target sequence
tgtttttggtaagttaggaaa

SEQ ID NO: 214382 - DNA, 21 bp, Artificial sequence
  SiRNA target sequence
gtttttggtaagttaggaaaa

SEQ ID NO: 214383 - DNA, 21 bp, Artificial sequence
  SiRNA target sequence
tttttggtaagttaggaaaat

SEQ ID NO: 214384 - DNA, 21 bp, Artificial sequence
  SiRNA target sequence
ttttggtaagttaggaaaatc

SEQ ID NO: 214385 - DNA, 21 bp, Artificial sequence
  SiRNA target sequence
tttggtaagttaggaaaatct

SEQ ID NO: 214386 - DNA, 21 bp, Artificial sequence
  SiRNA target sequence
ttggtaagttaggaaaatctc

SEQ ID NO: 214387 - DNA, 21 bp, Artificial sequence
  SiRNA target sequence
tggtaagttaggaaaatctct

SEQ ID NO: 214388 - DNA, 21 bp, Artificial sequence
  SiRNA target sequence
ggtaagttaggaaaatctctt

SEQ ID NO: 214389 - DNA, 21 bp, Artificial sequence
  SiRNA target sequence
gtaagttaggaaaatctcttg

SEQ ID NO: 214390 - DNA, 21 bp, Artificial sequence
  SiRNA target sequence
taagttaggaaaatctcttgg

SEQ ID NO: 214391 - DNA, 21 bp, Artificial sequence
  SiRNA target sequence
aagttaggaaaatctcttgga

SEQ ID NO: 214392 - DNA, 21 bp, Artificial sequence
  SiRNA target sequence
agttaggaaaatctcttggat

SEQ ID NO: 214393 - DNA, 21 bp, Artificial sequence
  SiRNA target sequence
gttaggaaaatctcttggatc

SEQ ID NO: 214394 - DNA, 21 bp, Artificial sequence
  SiRNA target sequence
ttaggaaaatctcttggatcg

SEQ ID NO: 214395 - DNA, 21 bp, Artificial sequence
  SiRNA target sequence
taggaaaatctcttggatcgt

SEQ ID NO: 214396 - DNA, 21 bp, Artificial sequence
  SiRNA target sequence
aggaaaatctcttggatcgtt

SEQ ID NO: 214397 - DNA, 21 bp, Artificial sequence
  SiRNA target sequence
ggaaaatctcttggatcgtta

SEQ ID NO: 214398 - DNA, 21 bp, Artificial sequence
  SiRNA target sequence
gaaaatctcttggatcgttat

SEQ ID NO: 214399 - DNA, 21 bp, Artificial sequence
  SiRNA target sequence
aaaatctcttggatcgttatt

SEQ ID NO: 214400 - DNA, 21 bp, Artificial sequence
  SiRNA target sequence
aaatctcttggatcgttattt

SEQ ID NO: 214401 - DNA, 21 bp, Artificial sequence
  SiRNA target sequence
aatctcttggatcgttatttg

SEQ ID NO: 214402 - DNA, 21 bp, Artificial sequence
  SiRNA target sequence
atctcttggatcgttatttgt

SEQ ID NO: 214403 - DNA, 21 bp, Artificial sequence
  SiRNA target sequence
tctcttggatcgttatttgtg

SEQ ID NO: 214404 - DNA, 21 bp, Artificial sequence
  SiRNA target sequence
ctcttggatcgttatttgtgt

SEQ ID NO: 214405 - DNA, 21 bp, Artificial sequence
  SiRNA target sequence
tcttggatcgttatttgtgtg

SEQ ID NO: 214406 - DNA, 21 bp, Artificial sequence
  SiRNA target sequence
cttggatcgttatttgtgtgg

SEQ ID NO: 214407 - DNA, 21 bp, Artificial sequence
  SiRNA target sequence
ttggatcgttatttgtgtgga

SEQ ID NO: 214408 - DNA, 21 bp, Artificial sequence
  SiRNA target sequence
tggatcgttatttgtgtggat

SEQ ID NO: 214409 - DNA, 21 bp, Artificial sequence
  SiRNA target sequence
ggatcgttatttgtgtggatt

SEQ ID NO: 214410 - DNA, 21 bp, Artificial sequence
  SiRNA target sequence
gatcgttatttgtgtggatta

SEQ ID NO: 214411 - DNA, 21 bp, Artificial sequence
  SiRNA target sequence
atcgttatttgtgtggattat

SEQ ID NO: 214412 - DNA, 21 bp, Artificial sequence
  SiRNA target sequence
tcgttatttgtgtggattatg

SEQ ID NO: 214413 - DNA, 21 bp, Artificial sequence
  SiRNA target sequence
cgttatttgtgtggattatgg

SEQ ID NO: 214414 - DNA, 21 bp, Artificial sequence
  SiRNA target sequence
gttatttgtgtggattatggg

SEQ ID NO: 214415 - DNA, 21 bp, Artificial sequence
  SiRNA target sequence
ttatttgtgtggattatggga

SEQ ID NO: 214416 - DNA, 21 bp, Artificial sequence
  SiRNA target sequence
tatttgtgtggattatgggat

SEQ ID NO: 214417 - DNA, 21 bp, Artificial sequence
  SiRNA target sequence
atttgtgtggattatgggata

SEQ ID NO: 214418 - DNA, 21 bp, Artificial sequence
  SiRNA target sequence
tttgtgtggattatgggatat

SEQ ID NO: 214419 - DNA, 21 bp, Artificial sequence
  SiRNA target sequence
ttgtgtggattatgggatatg

SEQ ID NO: 214420 - DNA, 21 bp, Artificial sequence
  SiRNA target sequence
tgtgtggattatgggatatgc

SEQ ID NO: 214421 - DNA, 21 bp, Artificial sequence
  SiRNA target sequence
gtgtggattatgggatatgca

SEQ ID NO: 214422 - DNA, 21 bp, Artificial sequence
  SiRNA target sequence
tgtggattatgggatatgcat

SEQ ID NO: 214423 - DNA, 21 bp, Artificial sequence
  SiRNA target sequence
gtggattatgggatatgcatt

SEQ ID NO: 214424 - DNA, 21 bp, Artificial sequence
  SiRNA target sequence
tggattatgggatatgcattt

SEQ ID NO: 214425 - DNA, 21 bp, Artificial sequence
  SiRNA target sequence
ggattatgggatatgcatttc

SEQ ID NO: 214426 - DNA, 21 bp, Artificial sequence
  SiRNA target sequence
gattatgggatatgcatttca

SEQ ID NO: 214427 - DNA, 21 bp, Artificial sequence
  SiRNA target sequence
attatgggatatgcatttcaa

SEQ ID NO: 214428 - DNA, 21 bp, Artificial sequence
  SiRNA target sequence
ttatgggatatgcatttcaaa

SEQ ID NO: 214429 - DNA, 21 bp, Artificial sequence
  SiRNA target sequence
tatgggatatgcatttcaaac

SEQ ID NO: 214430 - DNA, 21 bp, Artificial sequence
  SiRNA target sequence
atgggatatgcatttcaaaca

SEQ ID NO: 214431 - DNA, 21 bp, Artificial sequence
  SiRNA target sequence
tgggatatgcatttcaaacaa

SEQ ID NO: 214432 - DNA, 21 bp, Artificial sequence
  SiRNA target sequence
gggatatgcatttcaaacaag

SEQ ID NO: 214433 - DNA, 21 bp, Artificial sequence
  SiRNA target sequence
ggatatgcatttcaaacaaga

SEQ ID NO: 214434 - DNA, 21 bp, Artificial sequence
  SiRNA target sequence
gatatgcatttcaaacaagag

SEQ ID NO: 214435 - DNA, 21 bp, Artificial sequence
  SiRNA target sequence
atatgcatttcaaacaagaga

SEQ ID NO: 214436 - DNA, 21 bp, Artificial sequence
  SiRNA target sequence
tatgcatttcaaacaagagat

SEQ ID NO: 214437 - DNA, 21 bp, Artificial sequence
  SiRNA target sequence
atgcatttcaaacaagagatt

SEQ ID NO: 214438 - DNA, 21 bp, Artificial sequence
  SiRNA target sequence
tgcatttcaaacaagagattt

SEQ ID NO: 214439 - DNA, 21 bp, Artificial sequence
  SiRNA target sequence
gcatttcaaacaagagatttt

SEQ ID NO: 214440 - DNA, 21 bp, Artificial sequence
  SiRNA target sequence
catttcaaacaagagatttta

SEQ ID NO: 214441 - DNA, 21 bp, Artificial sequence
  SiRNA target sequence
atttcaaacaagagattttag

SEQ ID NO: 214442 - DNA, 21 bp, Artificial sequence
  SiRNA target sequence
tttcaaacaagagattttaga

SEQ ID NO: 214443 - DNA, 21 bp, Artificial sequence
  SiRNA target sequence
ttcaaacaagagattttagaa

SEQ ID NO: 214444 - DNA, 21 bp, Artificial sequence
  SiRNA target sequence
tcaaacaagagattttagaaa

SEQ ID NO: 214445 - DNA, 21 bp, Artificial sequence
  SiRNA target sequence
caaacaagagattttagaaaa

SEQ ID NO: 214446 - DNA, 21 bp, Artificial sequence
  SiRNA target sequence
aaacaagagattttagaaaat

SEQ ID NO: 214447 - DNA, 21 bp, Artificial sequence
  SiRNA target sequence
aacaagagattttagaaaatt

SEQ ID NO: 214448 - DNA, 21 bp, Artificial sequence
  SiRNA target sequence
acaagagattttagaaaatta

SEQ ID NO: 214449 - DNA, 21 bp, Artificial sequence
  SiRNA target sequence
caagagattttagaaaattag

SEQ ID NO: 214450 - DNA, 21 bp, Artificial sequence
  SiRNA target sequence
aagagattttagaaaattagc

SEQ ID NO: 214451 - DNA, 21 bp, Artificial sequence
  SiRNA target sequence
agagattttagaaaattagct

SEQ ID NO: 214452 - DNA, 21 bp, Artificial sequence
  SiRNA target sequence
gagattttagaaaattagctc

SEQ ID NO: 214453 - DNA, 21 bp, Artificial sequence
  SiRNA target sequence
agattttagaaaattagctcc

SEQ ID NO: 214454 - DNA, 21 bp, Artificial sequence
  SiRNA target sequence
gattttagaaaattagctccc

SEQ ID NO: 214455 - DNA, 21 bp, Artificial sequence
  SiRNA target sequence
attttagaaaattagctccct

SEQ ID NO: 214456 - DNA, 21 bp, Artificial sequence
  SiRNA target sequence
ttttagaaaattagctccctt

SEQ ID NO: 214457 - DNA, 21 bp, Artificial sequence
  SiRNA target sequence
tttagaaaattagctccctta

SEQ ID NO: 214458 - DNA, 21 bp, Artificial sequence
  SiRNA target sequence
ttagaaaattagctcccttat

SEQ ID NO: 214459 - DNA, 21 bp, Artificial sequence
  SiRNA target sequence
tagaaaattagctcccttatg

SEQ ID NO: 214460 - DNA, 21 bp, Artificial sequence
  SiRNA target sequence
agaaaattagctcccttatgt

SEQ ID NO: 214461 - DNA, 21 bp, Artificial sequence
  SiRNA target sequence
gaaaattagctcccttatgta

SEQ ID NO: 214462 - DNA, 21 bp, Artificial sequence
  SiRNA target sequence
aaaattagctcccttatgtat

SEQ ID NO: 214463 - DNA, 21 bp, Artificial sequence
  SiRNA target sequence
aaattagctcccttatgtatc

SEQ ID NO: 214464 - DNA, 21 bp, Artificial sequence
  SiRNA target sequence
aattagctcccttatgtatca

SEQ ID NO: 214465 - DNA, 21 bp, Artificial sequence
  SiRNA target sequence
attagctcccttatgtatcag

SEQ ID NO: 214466 - DNA, 21 bp, Artificial sequence
  SiRNA target sequence
ttagctcccttatgtatcagc

SEQ ID NO: 214467 - DNA, 21 bp, Artificial sequence
  SiRNA target sequence
tagctcccttatgtatcagcg

SEQ ID NO: 214468 - DNA, 21 bp, Artificial sequence
  SiRNA target sequence
agctcccttatgtatcagcgt

SEQ ID NO: 214469 - DNA, 21 bp, Artificial sequence
  SiRNA target sequence
gctcccttatgtatcagcgta

SEQ ID NO: 214470 - DNA, 21 bp, Artificial sequence
  SiRNA target sequence
ctcccttatgtatcagcgtaa

SEQ ID NO: 214471 - DNA, 21 bp, Artificial sequence
  SiRNA target sequence
tcccttatgtatcagcgtaat

SEQ ID NO: 214472 - DNA, 21 bp, Artificial sequence
  SiRNA target sequence
cccttatgtatcagcgtaatt

SEQ ID NO: 214473 - DNA, 21 bp, Artificial sequence
  SiRNA target sequence
ccttatgtatcagcgtaattg

SEQ ID NO: 214474 - DNA, 21 bp, Artificial sequence
  SiRNA target sequence
cttatgtatcagcgtaattgt

SEQ ID NO: 214475 - DNA, 21 bp, Artificial sequence
  SiRNA target sequence
ttatgtatcagcgtaattgtc

SEQ ID NO: 214476 - DNA, 21 bp, Artificial sequence
  SiRNA target sequence
tatgtatcagcgtaattgtct

SEQ ID NO: 214477 - DNA, 21 bp, Artificial sequence
  SiRNA target sequence
atgtatcagcgtaattgtctt

SEQ ID NO: 214478 - DNA, 21 bp, Artificial sequence
  SiRNA target sequence
tgtatcagcgtaattgtcttt

SEQ ID NO: 214479 - DNA, 21 bp, Artificial sequence
  SiRNA target sequence
gtatcagcgtaattgtctttt

SEQ ID NO: 214480 - DNA, 21 bp, Artificial sequence
  SiRNA target sequence
tatcagcgtaattgtcttttt

SEQ ID NO: 214481 - DNA, 21 bp, Artificial sequence
  SiRNA target sequence
atcagcgtaattgtctttttt

SEQ ID NO: 214482 - DNA, 21 bp, Artificial sequence
  SiRNA target sequence
tcagcgtaattgtcttttttg

SEQ ID NO: 214483 - DNA, 21 bp, Artificial sequence
  SiRNA target sequence
cagcgtaattgtcttttttgt

SEQ ID NO: 214484 - DNA, 21 bp, Artificial sequence
  SiRNA target sequence
agcgtaattgtcttttttgtt

SEQ ID NO: 214485 - DNA, 21 bp, Artificial sequence
  SiRNA target sequence
gcgtaattgtcttttttgtta

SEQ ID NO: 214486 - DNA, 21 bp, Artificial sequence
  SiRNA target sequence
cgtaattgtcttttttgttat

SEQ ID NO: 214487 - DNA, 21 bp, Artificial sequence
  SiRNA target sequence
gtaattgtcttttttgttatt

SEQ ID NO: 214488 - DNA, 21 bp, Artificial sequence
  SiRNA target sequence
taattgtcttttttgttatta

SEQ ID NO: 214489 - DNA, 21 bp, Artificial sequence
  SiRNA target sequence
aattgtcttttttgttattat

SEQ ID NO: 214490 - DNA, 21 bp, Artificial sequence
  SiRNA target sequence
attgtcttttttgttattatt

SEQ ID NO: 214491 - DNA, 21 bp, Artificial sequence
  SiRNA target sequence
ttgtcttttttgttattattt

SEQ ID NO: 214492 - DNA, 21 bp, Artificial sequence
  SiRNA target sequence
tgtcttttttgttattatttg

SEQ ID NO: 214493 - DNA, 21 bp, Artificial sequence
  SiRNA target sequence
gtcttttttgttattatttgg

SEQ ID NO: 214494 - DNA, 21 bp, Artificial sequence
  SiRNA target sequence
tcttttttgttattatttgga

SEQ ID NO: 214495 - DNA, 21 bp, Artificial sequence
  SiRNA target sequence
cttttttgttattatttggat

SEQ ID NO: 214496 - DNA, 21 bp, Artificial sequence
  SiRNA target sequence
ttttttgttattatttggatt

SEQ ID NO: 214497 - DNA, 21 bp, Artificial sequence
  SiRNA target sequence
tttttgttattatttggattt

SEQ ID NO: 214498 - DNA, 21 bp, Artificial sequence
  SiRNA target sequence
ttttgttattatttggattta

SEQ ID NO: 214499 - DNA, 21 bp, Artificial sequence
  SiRNA target sequence
tttgttattatttggatttat

SEQ ID NO: 214500 - DNA, 21 bp, Artificial sequence
  SiRNA target sequence
ttgttattatttggatttatt

SEQ ID NO: 214501 - DNA, 21 bp, Artificial sequence
  SiRNA target sequence
tgttattatttggatttattc

SEQ ID NO: 214502 - DNA, 21 bp, Artificial sequence
  SiRNA target sequence
gttattatttggatttattca

SEQ ID NO: 214503 - DNA, 21 bp, Artificial sequence
  SiRNA target sequence
ttattatttggatttattcag

SEQ ID NO: 214504 - DNA, 21 bp, Artificial sequence
  SiRNA target sequence
tattatttggatttattcagt

SEQ ID NO: 214505 - DNA, 21 bp, Artificial sequence
  SiRNA target sequence
attatttggatttattcagtt

SEQ ID NO: 214506 - DNA, 21 bp, Artificial sequence
  SiRNA target sequence
ttatttggatttattcagtta

SEQ ID NO: 214507 - DNA, 21 bp, Artificial sequence
  SiRNA target sequence
tatttggatttattcagttat

SEQ ID NO: 214508 - DNA, 21 bp, Artificial sequence
  SiRNA target sequence
atttggatttattcagttatt

SEQ ID NO: 214509 - DNA, 21 bp, Artificial sequence
  SiRNA target sequence
tttggatttattcagttattt

SEQ ID NO: 214510 - DNA, 21 bp, Artificial sequence
  SiRNA target sequence
ttggatttattcagttattta

SEQ ID NO: 214511 - DNA, 21 bp, Artificial sequence
  SiRNA target sequence
tggatttattcagttatttat

SEQ ID NO: 214512 - DNA, 21 bp, Artificial sequence
  SiRNA target sequence
ggatttattcagttatttatt

SEQ ID NO: 214513 - DNA, 21 bp, Artificial sequence
  SiRNA target sequence
gatttattcagttatttattt

SEQ ID NO: 214514 - DNA, 21 bp, Artificial sequence
  SiRNA target sequence
atttattcagttatttattta

SEQ ID NO: 214515 - DNA, 21 bp, Artificial sequence
  SiRNA target sequence
tttattcagttatttatttaa

SEQ ID NO: 214516 - DNA, 21 bp, Artificial sequence
  SiRNA target sequence
ttattcagttatttatttaaa

SEQ ID NO: 214517 - DNA, 21 bp, Artificial sequence
  SiRNA target sequence
tattcagttatttatttaaat

SEQ ID NO: 214518 - DNA, 21 bp, Artificial sequence
  SiRNA target sequence
attcagttatttatttaaata

SEQ ID NO: 214519 - DNA, 21 bp, Artificial sequence
  SiRNA target sequence
ttcagttatttatttaaataa

SEQ ID NO: 214520 - DNA, 21 bp, Artificial sequence
  SiRNA target sequence
tcagttatttatttaaataag

SEQ ID NO: 214521 - DNA, 21 bp, Artificial sequence
  SiRNA target sequence
cagttatttatttaaataaga

SEQ ID NO: 214522 - DNA, 21 bp, Artificial sequence
  SiRNA target sequence
agttatttatttaaataagaa

SEQ ID NO: 214523 - DNA, 21 bp, Artificial sequence
  SiRNA target sequence
gttatttatttaaataagaaa

SEQ ID NO: 214524 - DNA, 21 bp, Artificial sequence
  SiRNA target sequence
ttatttatttaaataagaaat

SEQ ID NO: 214525 - DNA, 21 bp, Artificial sequence
  SiRNA target sequence
tatttatttaaataagaaata

SEQ ID NO: 214526 - DNA, 21 bp, Artificial sequence
  SiRNA target sequence
atttatttaaataagaaatac

SEQ ID NO: 214527 - DNA, 21 bp, Artificial sequence
  SiRNA target sequence
tttatttaaataagaaataca

SEQ ID NO: 214528 - DNA, 21 bp, Artificial sequence
  SiRNA target sequence
ttatttaaataagaaatacaa

SEQ ID NO: 214529 - DNA, 21 bp, Artificial sequence
  SiRNA target sequence
tatttaaataagaaatacaaa

SEQ ID NO: 214530 - DNA, 21 bp, Artificial sequence
  SiRNA target sequence
atttaaataagaaatacaaag

SEQ ID NO: 214531 - DNA, 21 bp, Artificial sequence
  SiRNA target sequence
tttaaataagaaatacaaaga

SEQ ID NO: 214532 - DNA, 21 bp, Artificial sequence
  SiRNA target sequence
ttaaataagaaatacaaagaa

SEQ ID NO: 214533 - DNA, 21 bp, Artificial sequence
  SiRNA target sequence
taaataagaaatacaaagaat

SEQ ID NO: 214534 - DNA, 21 bp, Artificial sequence
  SiRNA target sequence
aaataagaaatacaaagaatc

SEQ ID NO: 214535 - DNA, 21 bp, Artificial sequence
  SiRNA target sequence
aataagaaatacaaagaatca

SEQ ID NO: 214536 - DNA, 21 bp, Artificial sequence
  SiRNA target sequence
ataagaaatacaaagaatcag

SEQ ID NO: 214537 - DNA, 21 bp, Artificial sequence
  SiRNA target sequence
taagaaatacaaagaatcagt

SEQ ID NO: 214538 - DNA, 21 bp, Artificial sequence
  SiRNA target sequence
aagaaatacaaagaatcagtt

SEQ ID NO: 214539 - DNA, 21 bp, Artificial sequence
  SiRNA target sequence
agaaatacaaagaatcagttg

SEQ ID NO: 214540 - DNA, 21 bp, Artificial sequence
  SiRNA target sequence
gaaatacaaagaatcagttgt

SEQ ID NO: 214541 - DNA, 21 bp, Artificial sequence
  SiRNA target sequence
aaatacaaagaatcagttgtt

SEQ ID NO: 214542 - DNA, 21 bp, Artificial sequence
  SiRNA target sequence
aatacaaagaatcagttgtta

SEQ ID NO: 214543 - DNA, 21 bp, Artificial sequence
  SiRNA target sequence
atacaaagaatcagttgttag

SEQ ID NO: 214544 - DNA, 21 bp, Artificial sequence
  SiRNA target sequence
tacaaagaatcagttgttagt

SEQ ID NO: 214545 - DNA, 21 bp, Artificial sequence
  SiRNA target sequence
acaaagaatcagttgttagta

SEQ ID NO: 214546 - DNA, 21 bp, Artificial sequence
  SiRNA target sequence
caaagaatcagttgttagtaa

SEQ ID NO: 214547 - DNA, 21 bp, Artificial sequence
  SiRNA target sequence
aaagaatcagttgttagtaat

SEQ ID NO: 214548 - DNA, 21 bp, Artificial sequence
  SiRNA target sequence
aagaatcagttgttagtaatt

SEQ ID NO: 214549 - DNA, 21 bp, Artificial sequence
  SiRNA target sequence
agaatcagttgttagtaattt

SEQ ID NO: 214550 - DNA, 21 bp, Artificial sequence
  SiRNA target sequence
gaatcagttgttagtaattta

SEQ ID NO: 214551 - DNA, 21 bp, Artificial sequence
  SiRNA target sequence
aatcagttgttagtaatttac

SEQ ID NO: 214552 - DNA, 21 bp, Artificial sequence
  SiRNA target sequence
atcagttgttagtaatttacc

SEQ ID NO: 214553 - DNA, 21 bp, Artificial sequence
  SiRNA target sequence
tcagttgttagtaatttaccc

SEQ ID NO: 214554 - DNA, 21 bp, Artificial sequence
  SiRNA target sequence
cagttgttagtaatttaccca

SEQ ID NO: 214555 - DNA, 21 bp, Artificial sequence
  SiRNA target sequence
agttgttagtaatttacccat

SEQ ID NO: 214556 - DNA, 21 bp, Artificial sequence
  SiRNA target sequence
gttgttagtaatttacccatc

SEQ ID NO: 214557 - DNA, 21 bp, Artificial sequence
  SiRNA target sequence
ttgttagtaatttacccatcg

SEQ ID NO: 214558 - DNA, 21 bp, Artificial sequence
  SiRNA target sequence
tgttagtaatttacccatcga

SEQ ID NO: 214559 - DNA, 21 bp, Artificial sequence
  SiRNA target sequence
gttagtaatttacccatcgat

SEQ ID NO: 214560 - DNA, 21 bp, Artificial sequence
  SiRNA target sequence
ttagtaatttacccatcgatg

SEQ ID NO: 214561 - DNA, 21 bp, Artificial sequence
  SiRNA target sequence
tagtaatttacccatcgatgt

SEQ ID NO: 214562 - DNA, 21 bp, Artificial sequence
  SiRNA target sequence
agtaatttacccatcgatgtt

SEQ ID NO: 214563 - DNA, 21 bp, Artificial sequence
  SiRNA target sequence
gtaatttacccatcgatgttg

SEQ ID NO: 214564 - DNA, 21 bp, Artificial sequence
  SiRNA target sequence
taatttacccatcgatgttga

SEQ ID NO: 214565 - DNA, 21 bp, Artificial sequence
  SiRNA target sequence
aatttacccatcgatgttgat

SEQ ID NO: 214566 - DNA, 21 bp, Artificial sequence
  SiRNA target sequence
atttacccatcgatgttgatt

SEQ ID NO: 214567 - DNA, 21 bp, Artificial sequence
  SiRNA target sequence
tttacccatcgatgttgattt

SEQ ID NO: 214568 - DNA, 21 bp, Artificial sequence
  SiRNA target sequence
ttacccatcgatgttgatttg

SEQ ID NO: 214569 - DNA, 21 bp, Artificial sequence
  SiRNA target sequence
tacccatcgatgttgatttgt

SEQ ID NO: 214570 - DNA, 21 bp, Artificial sequence
  SiRNA target sequence
acccatcgatgttgatttgtt

SEQ ID NO: 214571 - DNA, 21 bp, Artificial sequence
  SiRNA target sequence
cccatcgatgttgatttgttt

SEQ ID NO: 214572 - DNA, 21 bp, Artificial sequence
  SiRNA target sequence
ccatcgatgttgatttgtttg

SEQ ID NO: 214573 - DNA, 21 bp, Artificial sequence
  SiRNA target sequence
catcgatgttgatttgtttgc

SEQ ID NO: 214574 - DNA, 21 bp, Artificial sequence
  SiRNA target sequence
atcgatgttgatttgtttgca

SEQ ID NO: 214575 - DNA, 21 bp, Artificial sequence
  SiRNA target sequence
tcgatgttgatttgtttgcat

SEQ ID NO: 214576 - DNA, 21 bp, Artificial sequence
  SiRNA target sequence
cgatgttgatttgtttgcatc

SEQ ID NO: 214577 - DNA, 21 bp, Artificial sequence
  SiRNA target sequence
gatgttgatttgtttgcatca

SEQ ID NO: 214578 - DNA, 21 bp, Artificial sequence
  SiRNA target sequence
atgttgatttgtttgcatcaa

SEQ ID NO: 214579 - DNA, 21 bp, Artificial sequence
  SiRNA target sequence
tgttgatttgtttgcatcaaa

SEQ ID NO: 214580 - DNA, 21 bp, Artificial sequence
  SiRNA target sequence
gttgatttgtttgcatcaaag

SEQ ID NO: 214581 - DNA, 21 bp, Artificial sequence
  SiRNA target sequence
ttgatttgtttgcatcaaagt

SEQ ID NO: 214582 - DNA, 21 bp, Artificial sequence
  SiRNA target sequence
tgatttgtttgcatcaaagtt

SEQ ID NO: 214583 - DNA, 21 bp, Artificial sequence
  SiRNA target sequence
gatttgtttgcatcaaagttg

SEQ ID NO: 214584 - DNA, 21 bp, Artificial sequence
  SiRNA target sequence
atttgtttgcatcaaagttgt

SEQ ID NO: 214585 - DNA, 21 bp, Artificial sequence
  SiRNA target sequence
tttgtttgcatcaaagttgtt

SEQ ID NO: 214586 - DNA, 21 bp, Artificial sequence
  SiRNA target sequence
ttgtttgcatcaaagttgtta

SEQ ID NO: 214587 - DNA, 21 bp, Artificial sequence
  SiRNA target sequence
tgtttgcatcaaagttgttag

SEQ ID NO: 214588 - DNA, 21 bp, Artificial sequence
  SiRNA target sequence
gtttgcatcaaagttgttaga

SEQ ID NO: 214589 - DNA, 21 bp, Artificial sequence
  SiRNA target sequence
tttgcatcaaagttgttagat

SEQ ID NO: 214590 - DNA, 21 bp, Artificial sequence
  SiRNA target sequence
ttgcatcaaagttgttagata

SEQ ID NO: 214591 - DNA, 21 bp, Artificial sequence
  SiRNA target sequence
tgcatcaaagttgttagataa

SEQ ID NO: 214592 - DNA, 21 bp, Artificial sequence
  SiRNA target sequence
gcatcaaagttgttagataat

SEQ ID NO: 214593 - DNA, 21 bp, Artificial sequence
  SiRNA target sequence
catcaaagttgttagataata

SEQ ID NO: 214594 - DNA, 21 bp, Artificial sequence
  SiRNA target sequence
atcaaagttgttagataataa

SEQ ID NO: 214595 - DNA, 21 bp, Artificial sequence
  SiRNA target sequence
tcaaagttgttagataataaa

SEQ ID NO: 214596 - DNA, 21 bp, Artificial sequence
  SiRNA target sequence
caaagttgttagataataaaa

SEQ ID NO: 214597 - DNA, 21 bp, Artificial sequence
  SiRNA target sequence
aaagttgttagataataaaaa

SEQ ID NO: 214598 - DNA, 21 bp, Artificial sequence
  SiRNA target sequence
aagttgttagataataaaaaa

SEQ ID NO: 214599 - DNA, 21 bp, Artificial sequence
  SiRNA target sequence
agttgttagataataaaaaag

SEQ ID NO: 214600 - DNA, 21 bp, Artificial sequence
  SiRNA target sequence
gttgttagataataaaaaaga

SEQ ID NO: 214601 - DNA, 21 bp, Artificial sequence
  SiRNA target sequence
ttgttagataataaaaaagaa

SEQ ID NO: 214602 - DNA, 21 bp, Artificial sequence
  SiRNA target sequence
tgttagataataaaaaagaag

SEQ ID NO: 214603 - DNA, 21 bp, Artificial sequence
  SiRNA target sequence
gttagataataaaaaagaaga

SEQ ID NO: 214604 - DNA, 21 bp, Artificial sequence
  SiRNA target sequence
ttagataataaaaaagaagag

SEQ ID NO: 214605 - DNA, 21 bp, Artificial sequence
  SiRNA target sequence
tagataataaaaaagaagagg

SEQ ID NO: 214606 - DNA, 21 bp, Artificial sequence
  SiRNA target sequence
agataataaaaaagaagagga

SEQ ID NO: 214607 - DNA, 21 bp, Artificial sequence
  SiRNA target sequence
gataataaaaaagaagaggaa

SEQ ID NO: 214608 - DNA, 21 bp, Artificial sequence
  SiRNA target sequence
ataataaaaaagaagaggaaa

SEQ ID NO: 214609 - DNA, 21 bp, Artificial sequence
  SiRNA target sequence
taataaaaaagaagaggaaat

SEQ ID NO: 214610 - DNA, 21 bp, Artificial sequence
  SiRNA target sequence
aataaaaaagaagaggaaatt

SEQ ID NO: 214611 - DNA, 21 bp, Artificial sequence
  SiRNA target sequence
ataaaaaagaagaggaaattg

SEQ ID NO: 214612 - DNA, 21 bp, Artificial sequence
  SiRNA target sequence
taaaaaagaagaggaaattga

SEQ ID NO: 214613 - DNA, 21 bp, Artificial sequence
  SiRNA target sequence
aaaaaagaagaggaaattgat

SEQ ID NO: 214614 - DNA, 21 bp, Artificial sequence
  SiRNA target sequence
aaaaagaagaggaaattgatg

SEQ ID NO: 214615 - DNA, 21 bp, Artificial sequence
  SiRNA target sequence
aaaagaagaggaaattgatgt

SEQ ID NO: 214616 - DNA, 21 bp, Artificial sequence
  SiRNA target sequence
aaagaagaggaaattgatgtg

SEQ ID NO: 214617 - DNA, 21 bp, Artificial sequence
  SiRNA target sequence
aagaagaggaaattgatgtgt

SEQ ID NO: 214618 - DNA, 21 bp, Artificial sequence
  SiRNA target sequence
agaagaggaaattgatgtgtc

SEQ ID NO: 214619 - DNA, 21 bp, Artificial sequence
  SiRNA target sequence
gaagaggaaattgatgtgtca

SEQ ID NO: 214620 - DNA, 21 bp, Artificial sequence
  SiRNA target sequence
aagaggaaattgatgtgtcag

SEQ ID NO: 214621 - DNA, 21 bp, Artificial sequence
  SiRNA target sequence
agaggaaattgatgtgtcagt

SEQ ID NO: 214622 - DNA, 21 bp, Artificial sequence
  SiRNA target sequence
gaggaaattgatgtgtcagtg

SEQ ID NO: 214623 - DNA, 21 bp, Artificial sequence
  SiRNA target sequence
aggaaattgatgtgtcagtgc

SEQ ID NO: 214624 - DNA, 21 bp, Artificial sequence
  SiRNA target sequence
ggaaattgatgtgtcagtgct

SEQ ID NO: 214625 - DNA, 21 bp, Artificial sequence
  SiRNA target sequence
gaaattgatgtgtcagtgctc

SEQ ID NO: 214626 - DNA, 21 bp, Artificial sequence
  SiRNA target sequence
aaattgatgtgtcagtgctcg

SEQ ID NO: 214627 - DNA, 21 bp, Artificial sequence
  SiRNA target sequence
aattgatgtgtcagtgctcgt

SEQ ID NO: 214628 - DNA, 21 bp, Artificial sequence
  SiRNA target sequence
attgatgtgtcagtgctcgtt

SEQ ID NO: 214629 - DNA, 21 bp, Artificial sequence
  SiRNA target sequence
ttgatgtgtcagtgctcgtta

SEQ ID NO: 214630 - DNA, 21 bp, Artificial sequence
  SiRNA target sequence
tgatgtgtcagtgctcgttaa

SEQ ID NO: 214631 - DNA, 21 bp, Artificial sequence
  SiRNA target sequence
gatgtgtcagtgctcgttaat

SEQ ID NO: 214632 - DNA, 21 bp, Artificial sequence
  SiRNA target sequence
atgtgtcagtgctcgttaatt

SEQ ID NO: 214633 - DNA, 21 bp, Artificial sequence
  SiRNA target sequence
tgtgtcagtgctcgttaatta

SEQ ID NO: 214634 - DNA, 21 bp, Artificial sequence
  SiRNA target sequence
gtgtcagtgctcgttaattaa

SEQ ID NO: 214635 - DNA, 22 bp, Artificial sequence
  SiRNA target sequence
atgattgagaggggtattatgg

SEQ ID NO: 214636 - DNA, 22 bp, Artificial sequence
  SiRNA target sequence
tgattgagaggggtattatgga

SEQ ID NO: 214637 - DNA, 22 bp, Artificial sequence
  SiRNA target sequence
gattgagaggggtattatggaa

SEQ ID NO: 214638 - DNA, 22 bp, Artificial sequence
  SiRNA target sequence
attgagaggggtattatggaaa

SEQ ID NO: 214639 - DNA, 22 bp, Artificial sequence
  SiRNA target sequence
ttgagaggggtattatggaaaa

SEQ ID NO: 214640 - DNA, 22 bp, Artificial sequence
  SiRNA target sequence
tgagaggggtattatggaaaaa

SEQ ID NO: 214641 - DNA, 22 bp, Artificial sequence
  SiRNA target sequence
gagaggggtattatggaaaaaa

SEQ ID NO: 214642 - DNA, 22 bp, Artificial sequence
  SiRNA target sequence
agaggggtattatggaaaaaat

SEQ ID NO: 214643 - DNA, 22 bp, Artificial sequence
  SiRNA target sequence
gaggggtattatggaaaaaata

SEQ ID NO: 214644 - DNA, 22 bp, Artificial sequence
  SiRNA target sequence
aggggtattatggaaaaaataa

SEQ ID NO: 214645 - DNA, 22 bp, Artificial sequence
  SiRNA target sequence
ggggtattatggaaaaaataaa

SEQ ID NO: 214646 - DNA, 22 bp, Artificial sequence
  SiRNA target sequence
gggtattatggaaaaaataaaa

SEQ ID NO: 214647 - DNA, 22 bp, Artificial sequence
  SiRNA target sequence
ggtattatggaaaaaataaaaa

SEQ ID NO: 214648 - DNA, 22 bp, Artificial sequence
  SiRNA target sequence
gtattatggaaaaaataaaaaa

SEQ ID NO: 214649 - DNA, 22 bp, Artificial sequence
  SiRNA target sequence
tattatggaaaaaataaaaaat

SEQ ID NO: 214650 - DNA, 22 bp, Artificial sequence
  SiRNA target sequence
attatggaaaaaataaaaaatt

SEQ ID NO: 214651 - DNA, 22 bp, Artificial sequence
  SiRNA target sequence
ttatggaaaaaataaaaaattt

SEQ ID NO: 214652 - DNA, 22 bp, Artificial sequence
  SiRNA target sequence
tatggaaaaaataaaaaattta

SEQ ID NO: 214653 - DNA, 22 bp, Artificial sequence
  SiRNA target sequence
atggaaaaaataaaaaatttat

SEQ ID NO: 214654 - DNA, 22 bp, Artificial sequence
  SiRNA target sequence
tggaaaaaataaaaaatttatt

SEQ ID NO: 214655 - DNA, 22 bp, Artificial sequence
  SiRNA target sequence
ggaaaaaataaaaaatttatta

SEQ ID NO: 214656 - DNA, 22 bp, Artificial sequence
  SiRNA target sequence
gaaaaaataaaaaatttattaa

SEQ ID NO: 214657 - DNA, 22 bp, Artificial sequence
  SiRNA target sequence
aaaaaataaaaaatttattaac

SEQ ID NO: 214658 - DNA, 22 bp, Artificial sequence
  SiRNA target sequence
aaaaataaaaaatttattaaca

SEQ ID NO: 214659 - DNA, 22 bp, Artificial sequence
  SiRNA target sequence
aaaataaaaaatttattaacag

SEQ ID NO: 214660 - DNA, 22 bp, Artificial sequence
  SiRNA target sequence
aaataaaaaatttattaacaga

SEQ ID NO: 214661 - DNA, 22 bp, Artificial sequence
  SiRNA target sequence
aataaaaaatttattaacagag

SEQ ID NO: 214662 - DNA, 22 bp, Artificial sequence
  SiRNA target sequence
ataaaaaatttattaacagagg

SEQ ID NO: 214663 - DNA, 22 bp, Artificial sequence
  SiRNA target sequence
taaaaaatttattaacagagga

SEQ ID NO: 214664 - DNA, 22 bp, Artificial sequence
  SiRNA target sequence
aaaaaatttattaacagaggat

SEQ ID NO: 214665 - DNA, 22 bp, Artificial sequence
  SiRNA target sequence
aaaaatttattaacagaggatg

SEQ ID NO: 214666 - DNA, 22 bp, Artificial sequence
  SiRNA target sequence
aaaatttattaacagaggatga

SEQ ID NO: 214667 - DNA, 22 bp, Artificial sequence
  SiRNA target sequence
aaatttattaacagaggatgaa

SEQ ID NO: 214668 - DNA, 22 bp, Artificial sequence
  SiRNA target sequence
aatttattaacagaggatgaag

SEQ ID NO: 214669 - DNA, 22 bp, Artificial sequence
  SiRNA target sequence
atttattaacagaggatgaagt

SEQ ID NO: 214670 - DNA, 22 bp, Artificial sequence
  SiRNA target sequence
tttattaacagaggatgaagta

SEQ ID NO: 214671 - DNA, 22 bp, Artificial sequence
  SiRNA target sequence
ttattaacagaggatgaagtag

SEQ ID NO: 214672 - DNA, 22 bp, Artificial sequence
  SiRNA target sequence
tattaacagaggatgaagtaga

SEQ ID NO: 214673 - DNA, 22 bp, Artificial sequence
  SiRNA target sequence
attaacagaggatgaagtagaa

SEQ ID NO: 214674 - DNA, 22 bp, Artificial sequence
  SiRNA target sequence
ttaacagaggatgaagtagaag

SEQ ID NO: 214675 - DNA, 22 bp, Artificial sequence
  SiRNA target sequence
taacagaggatgaagtagaagc

SEQ ID NO: 214676 - DNA, 22 bp, Artificial sequence
  SiRNA target sequence
aacagaggatgaagtagaagca

SEQ ID NO: 214677 - DNA, 22 bp, Artificial sequence
  SiRNA target sequence
acagaggatgaagtagaagcag

SEQ ID NO: 214678 - DNA, 22 bp, Artificial sequence
  SiRNA target sequence
cagaggatgaagtagaagcaga

SEQ ID NO: 214679 - DNA, 22 bp, Artificial sequence
  SiRNA target sequence
agaggatgaagtagaagcagaa

SEQ ID NO: 214680 - DNA, 22 bp, Artificial sequence
  SiRNA target sequence
gaggatgaagtagaagcagaag

SEQ ID NO: 214681 - DNA, 22 bp, Artificial sequence
  SiRNA target sequence
aggatgaagtagaagcagaagc

SEQ ID NO: 214682 - DNA, 22 bp, Artificial sequence
  SiRNA target sequence
ggatgaagtagaagcagaagca

SEQ ID NO: 214683 - DNA, 22 bp, Artificial sequence
  SiRNA target sequence
gatgaagtagaagcagaagcaa

SEQ ID NO: 214684 - DNA, 22 bp, Artificial sequence
  SiRNA target sequence
atgaagtagaagcagaagcaaa

SEQ ID NO: 214685 - DNA, 22 bp, Artificial sequence
  SiRNA target sequence
tgaagtagaagcagaagcaaat

SEQ ID NO: 214686 - DNA, 22 bp, Artificial sequence
  SiRNA target sequence
gaagtagaagcagaagcaaatt

SEQ ID NO: 214687 - DNA, 22 bp, Artificial sequence
  SiRNA target sequence
aagtagaagcagaagcaaattc

SEQ ID NO: 214688 - DNA, 22 bp, Artificial sequence
  SiRNA target sequence
agtagaagcagaagcaaattct

SEQ ID NO: 214689 - DNA, 22 bp, Artificial sequence
  SiRNA target sequence
gtagaagcagaagcaaattctg

SEQ ID NO: 214690 - DNA, 22 bp, Artificial sequence
  SiRNA target sequence
tagaagcagaagcaaattctgg

SEQ ID NO: 214691 - DNA, 22 bp, Artificial sequence
  SiRNA target sequence
agaagcagaagcaaattctgga

SEQ ID NO: 214692 - DNA, 22 bp, Artificial sequence
  SiRNA target sequence
gaagcagaagcaaattctggaa

SEQ ID NO: 214693 - DNA, 22 bp, Artificial sequence
  SiRNA target sequence
aagcagaagcaaattctggaag

SEQ ID NO: 214694 - DNA, 22 bp, Artificial sequence
  SiRNA target sequence
agcagaagcaaattctggaagg

SEQ ID NO: 214695 - DNA, 22 bp, Artificial sequence
  SiRNA target sequence
gcagaagcaaattctggaaggg

SEQ ID NO: 214696 - DNA, 22 bp, Artificial sequence
  SiRNA target sequence
cagaagcaaattctggaagggg

SEQ ID NO: 214697 - DNA, 22 bp, Artificial sequence
  SiRNA target sequence
agaagcaaattctggaaggggc

SEQ ID NO: 214698 - DNA, 22 bp, Artificial sequence
  SiRNA target sequence
gaagcaaattctggaaggggca

SEQ ID NO: 214699 - DNA, 22 bp, Artificial sequence
  SiRNA target sequence
aagcaaattctggaaggggcat

SEQ ID NO: 214700 - DNA, 22 bp, Artificial sequence
  SiRNA target sequence
agcaaattctggaaggggcatt

SEQ ID NO: 214701 - DNA, 22 bp, Artificial sequence
  SiRNA target sequence
gcaaattctggaaggggcattt

SEQ ID NO: 214702 - DNA, 22 bp, Artificial sequence
  SiRNA target sequence
caaattctggaaggggcatttt

SEQ ID NO: 214703 - DNA, 22 bp, Artificial sequence
  SiRNA target sequence
aaattctggaaggggcatttta

SEQ ID NO: 214704 - DNA, 22 bp, Artificial sequence
  SiRNA target sequence
aattctggaaggggcattttat

SEQ ID NO: 214705 - DNA, 22 bp, Artificial sequence
  SiRNA target sequence
attctggaaggggcattttatc

SEQ ID NO: 214706 - DNA, 22 bp, Artificial sequence
  SiRNA target sequence
ttctggaaggggcattttatca

SEQ ID NO: 214707 - DNA, 22 bp, Artificial sequence
  SiRNA target sequence
tctggaaggggcattttatcaa

SEQ ID NO: 214708 - DNA, 22 bp, Artificial sequence
  SiRNA target sequence
ctggaaggggcattttatcaat

SEQ ID NO: 214709 - DNA, 22 bp, Artificial sequence
  SiRNA target sequence
tggaaggggcattttatcaata

SEQ ID NO: 214710 - DNA, 22 bp, Artificial sequence
  SiRNA target sequence
ggaaggggcattttatcaatat

SEQ ID NO: 214711 - DNA, 22 bp, Artificial sequence
  SiRNA target sequence
gaaggggcattttatcaatatt

SEQ ID NO: 214712 - DNA, 22 bp, Artificial sequence
  SiRNA target sequence
aaggggcattttatcaatattt

SEQ ID NO: 214713 - DNA, 22 bp, Artificial sequence
  SiRNA target sequence
aggggcattttatcaatattta

SEQ ID NO: 214714 - DNA, 22 bp, Artificial sequence
  SiRNA target sequence
ggggcattttatcaatatttag

SEQ ID NO: 214715 - DNA, 22 bp, Artificial sequence
  SiRNA target sequence
gggcattttatcaatatttaga

SEQ ID NO: 214716 - DNA, 22 bp, Artificial sequence
  SiRNA target sequence
ggcattttatcaatatttagaa

SEQ ID NO: 214717 - DNA, 22 bp, Artificial sequence
  SiRNA target sequence
gcattttatcaatatttagaat

SEQ ID NO: 214718 - DNA, 22 bp, Artificial sequence
  SiRNA target sequence
cattttatcaatatttagaatt

SEQ ID NO: 214719 - DNA, 22 bp, Artificial sequence
  SiRNA target sequence
attttatcaatatttagaattg

SEQ ID NO: 214720 - DNA, 22 bp, Artificial sequence
  SiRNA target sequence
ttttatcaatatttagaattgc

SEQ ID NO: 214721 - DNA, 22 bp, Artificial sequence
  SiRNA target sequence
tttatcaatatttagaattgct

SEQ ID NO: 214722 - DNA, 22 bp, Artificial sequence
  SiRNA target sequence
ttatcaatatttagaattgcta

SEQ ID NO: 214723 - DNA, 22 bp, Artificial sequence
  SiRNA target sequence
tatcaatatttagaattgctaa

SEQ ID NO: 214724 - DNA, 22 bp, Artificial sequence
  SiRNA target sequence
atcaatatttagaattgctaag

SEQ ID NO: 214725 - DNA, 22 bp, Artificial sequence
  SiRNA target sequence
tcaatatttagaattgctaagg

SEQ ID NO: 214726 - DNA, 22 bp, Artificial sequence
  SiRNA target sequence
caatatttagaattgctaaggt

SEQ ID NO: 214727 - DNA, 22 bp, Artificial sequence
  SiRNA target sequence
aatatttagaattgctaaggta

SEQ ID NO: 214728 - DNA, 22 bp, Artificial sequence
  SiRNA target sequence
atatttagaattgctaaggtag

SEQ ID NO: 214729 - DNA, 22 bp, Artificial sequence
  SiRNA target sequence
tatttagaattgctaaggtaga

SEQ ID NO: 214730 - DNA, 22 bp, Artificial sequence
  SiRNA target sequence
atttagaattgctaaggtagaa

SEQ ID NO: 214731 - DNA, 22 bp, Artificial sequence
  SiRNA target sequence
tttagaattgctaaggtagaaa

SEQ ID NO: 214732 - DNA, 22 bp, Artificial sequence
  SiRNA target sequence
ttagaattgctaaggtagaaag

SEQ ID NO: 214733 - DNA, 22 bp, Artificial sequence
  SiRNA target sequence
tagaattgctaaggtagaaaga

SEQ ID NO: 214734 - DNA, 22 bp, Artificial sequence
  SiRNA target sequence
agaattgctaaggtagaaagaa

SEQ ID NO: 214735 - DNA, 22 bp, Artificial sequence
  SiRNA target sequence
gaattgctaaggtagaaagaag

SEQ ID NO: 214736 - DNA, 22 bp, Artificial sequence
  SiRNA target sequence
aattgctaaggtagaaagaaga

SEQ ID NO: 214737 - DNA, 22 bp, Artificial sequence
  SiRNA target sequence
attgctaaggtagaaagaagaa

SEQ ID NO: 214738 - DNA, 22 bp, Artificial sequence
  SiRNA target sequence
ttgctaaggtagaaagaagaat

SEQ ID NO: 214739 - DNA, 22 bp, Artificial sequence
  SiRNA target sequence
tgctaaggtagaaagaagaatg

SEQ ID NO: 214740 - DNA, 22 bp, Artificial sequence
  SiRNA target sequence
gctaaggtagaaagaagaatgt

SEQ ID NO: 214741 - DNA, 22 bp, Artificial sequence
  SiRNA target sequence
ctaaggtagaaagaagaatgtt

SEQ ID NO: 214742 - DNA, 22 bp, Artificial sequence
  SiRNA target sequence
taaggtagaaagaagaatgttt

SEQ ID NO: 214743 - DNA, 22 bp, Artificial sequence
  SiRNA target sequence
aaggtagaaagaagaatgtttt

SEQ ID NO: 214744 - DNA, 22 bp, Artificial sequence
  SiRNA target sequence
aggtagaaagaagaatgttttg

SEQ ID NO: 214745 - DNA, 22 bp, Artificial sequence
  SiRNA target sequence
ggtagaaagaagaatgttttgg

SEQ ID NO: 214746 - DNA, 22 bp, Artificial sequence
  SiRNA target sequence
gtagaaagaagaatgttttggc

SEQ ID NO: 214747 - DNA, 22 bp, Artificial sequence
  SiRNA target sequence
tagaaagaagaatgttttggct

SEQ ID NO: 214748 - DNA, 22 bp, Artificial sequence
  SiRNA target sequence
agaaagaagaatgttttggctt

SEQ ID NO: 214749 - DNA, 22 bp, Artificial sequence
  SiRNA target sequence
gaaagaagaatgttttggctta

SEQ ID NO: 214750 - DNA, 22 bp, Artificial sequence
  SiRNA target sequence
aaagaagaatgttttggcttat

SEQ ID NO: 214751 - DNA, 22 bp, Artificial sequence
  SiRNA target sequence
aagaagaatgttttggcttatg

SEQ ID NO: 214752 - DNA, 22 bp, Artificial sequence
  SiRNA target sequence
agaagaatgttttggcttatga

SEQ ID NO: 214753 - DNA, 22 bp, Artificial sequence
  SiRNA target sequence
gaagaatgttttggcttatgac

SEQ ID NO: 214754 - DNA, 22 bp, Artificial sequence
  SiRNA target sequence
aagaatgttttggcttatgacg

SEQ ID NO: 214755 - DNA, 22 bp, Artificial sequence
  SiRNA target sequence
agaatgttttggcttatgacgc

SEQ ID NO: 214756 - DNA, 22 bp, Artificial sequence
  SiRNA target sequence
gaatgttttggcttatgacgct

SEQ ID NO: 214757 - DNA, 22 bp, Artificial sequence
  SiRNA target sequence
aatgttttggcttatgacgctt

SEQ ID NO: 214758 - DNA, 22 bp, Artificial sequence
  SiRNA target sequence
atgttttggcttatgacgctta

SEQ ID NO: 214759 - DNA, 22 bp, Artificial sequence
  SiRNA target sequence
tgttttggcttatgacgcttat

SEQ ID NO: 214760 - DNA, 22 bp, Artificial sequence
  SiRNA target sequence
gttttggcttatgacgcttatg

SEQ ID NO: 214761 - DNA, 22 bp, Artificial sequence
  SiRNA target sequence
ttttggcttatgacgcttatgt

SEQ ID NO: 214762 - DNA, 22 bp, Artificial sequence
  SiRNA target sequence
tttggcttatgacgcttatgtt

SEQ ID NO: 214763 - DNA, 22 bp, Artificial sequence
  SiRNA target sequence
ttggcttatgacgcttatgttt

SEQ ID NO: 214764 - DNA, 22 bp, Artificial sequence
  SiRNA target sequence
tggcttatgacgcttatgtttt

SEQ ID NO: 214765 - DNA, 22 bp, Artificial sequence
  SiRNA target sequence
ggcttatgacgcttatgttttc

SEQ ID NO: 214766 - DNA, 22 bp, Artificial sequence
  SiRNA target sequence
gcttatgacgcttatgttttcg

SEQ ID NO: 214767 - DNA, 22 bp, Artificial sequence
  SiRNA target sequence
cttatgacgcttatgttttcgc

SEQ ID NO: 214768 - DNA, 22 bp, Artificial sequence
  SiRNA target sequence
ttatgacgcttatgttttcgct

SEQ ID NO: 214769 - DNA, 22 bp, Artificial sequence
  SiRNA target sequence
tatgacgcttatgttttcgctt

SEQ ID NO: 214770 - DNA, 22 bp, Artificial sequence
  SiRNA target sequence
atgacgcttatgttttcgctta

SEQ ID NO: 214771 - DNA, 22 bp, Artificial sequence
  SiRNA target sequence
tgacgcttatgttttcgcttat

SEQ ID NO: 214772 - DNA, 22 bp, Artificial sequence
  SiRNA target sequence
gacgcttatgttttcgcttatt

SEQ ID NO: 214773 - DNA, 22 bp, Artificial sequence
  SiRNA target sequence
acgcttatgttttcgcttattt

SEQ ID NO: 214774 - DNA, 22 bp, Artificial sequence
  SiRNA target sequence
cgcttatgttttcgcttatttc

SEQ ID NO: 214775 - DNA, 22 bp, Artificial sequence
  SiRNA target sequence
gcttatgttttcgcttatttcc

SEQ ID NO: 214776 - DNA, 22 bp, Artificial sequence
  SiRNA target sequence
cttatgttttcgcttatttcct

SEQ ID NO: 214777 - DNA, 22 bp, Artificial sequence
  SiRNA target sequence
ttatgttttcgcttatttcctt

SEQ ID NO: 214778 - DNA, 22 bp, Artificial sequence
  SiRNA target sequence
tatgttttcgcttatttccttt

SEQ ID NO: 214779 - DNA, 22 bp, Artificial sequence
  SiRNA target sequence
atgttttcgcttatttccttta

SEQ ID NO: 214780 - DNA, 22 bp, Artificial sequence
  SiRNA target sequence
tgttttcgcttatttcctttat

SEQ ID NO: 214781 - DNA, 22 bp, Artificial sequence
  SiRNA target sequence
gttttcgcttatttcctttatt

SEQ ID NO: 214782 - DNA, 22 bp, Artificial sequence
  SiRNA target sequence
ttttcgcttatttcctttattt

SEQ ID NO: 214783 - DNA, 22 bp, Artificial sequence
  SiRNA target sequence
tttcgcttatttcctttattta

SEQ ID NO: 214784 - DNA, 22 bp, Artificial sequence
  SiRNA target sequence
ttcgcttatttcctttatttac

SEQ ID NO: 214785 - DNA, 22 bp, Artificial sequence
  SiRNA target sequence
tcgcttatttcctttatttact

SEQ ID NO: 214786 - DNA, 22 bp, Artificial sequence
  SiRNA target sequence
cgcttatttcctttatttactc

SEQ ID NO: 214787 - DNA, 22 bp, Artificial sequence
  SiRNA target sequence
gcttatttcctttatttactca

SEQ ID NO: 214788 - DNA, 22 bp, Artificial sequence
  SiRNA target sequence
cttatttcctttatttactcag

SEQ ID NO: 214789 - DNA, 22 bp, Artificial sequence
  SiRNA target sequence
ttatttcctttatttactcagt

SEQ ID NO: 214790 - DNA, 22 bp, Artificial sequence
  SiRNA target sequence
tatttcctttatttactcagta

SEQ ID NO: 214791 - DNA, 22 bp, Artificial sequence
  SiRNA target sequence
atttcctttatttactcagtag

SEQ ID NO: 214792 - DNA, 22 bp, Artificial sequence
  SiRNA target sequence
tttcctttatttactcagtagg

SEQ ID NO: 214793 - DNA, 22 bp, Artificial sequence
  SiRNA target sequence
ttcctttatttactcagtagga

SEQ ID NO: 214794 - DNA, 22 bp, Artificial sequence
  SiRNA target sequence
tcctttatttactcagtaggac

SEQ ID NO: 214795 - DNA, 22 bp, Artificial sequence
  SiRNA target sequence
cctttatttactcagtaggacg

SEQ ID NO: 214796 - DNA, 22 bp, Artificial sequence
  SiRNA target sequence
ctttatttactcagtaggacga

SEQ ID NO: 214797 - DNA, 22 bp, Artificial sequence
  SiRNA target sequence
tttatttactcagtaggacgag

SEQ ID NO: 214798 - DNA, 22 bp, Artificial sequence
  SiRNA target sequence
ttatttactcagtaggacgagt

SEQ ID NO: 214799 - DNA, 22 bp, Artificial sequence
  SiRNA target sequence
tatttactcagtaggacgagtg

SEQ ID NO: 214800 - DNA, 22 bp, Artificial sequence
  SiRNA target sequence
atttactcagtaggacgagtgt

SEQ ID NO: 214801 - DNA, 22 bp, Artificial sequence
  SiRNA target sequence
tttactcagtaggacgagtgtt

SEQ ID NO: 214802 - DNA, 22 bp, Artificial sequence
  SiRNA target sequence
ttactcagtaggacgagtgtta

SEQ ID NO: 214803 - DNA, 22 bp, Artificial sequence
  SiRNA target sequence
tactcagtaggacgagtgttaa

SEQ ID NO: 214804 - DNA, 22 bp, Artificial sequence
  SiRNA target sequence
actcagtaggacgagtgttaaa

SEQ ID NO: 214805 - DNA, 22 bp, Artificial sequence
  SiRNA target sequence
ctcagtaggacgagtgttaaaa

SEQ ID NO: 214806 - DNA, 22 bp, Artificial sequence
  SiRNA target sequence
tcagtaggacgagtgttaaaag

SEQ ID NO: 214807 - DNA, 22 bp, Artificial sequence
  SiRNA target sequence
cagtaggacgagtgttaaaaga

SEQ ID NO: 214808 - DNA, 22 bp, Artificial sequence
  SiRNA target sequence
agtaggacgagtgttaaaagat

SEQ ID NO: 214809 - DNA, 22 bp, Artificial sequence
  SiRNA target sequence
gtaggacgagtgttaaaagatg

SEQ ID NO: 214810 - DNA, 22 bp, Artificial sequence
  SiRNA target sequence
taggacgagtgttaaaagatgc

SEQ ID NO: 214811 - DNA, 22 bp, Artificial sequence
  SiRNA target sequence
aggacgagtgttaaaagatgca

SEQ ID NO: 214812 - DNA, 22 bp, Artificial sequence
  SiRNA target sequence
ggacgagtgttaaaagatgcag

SEQ ID NO: 214813 - DNA, 22 bp, Artificial sequence
  SiRNA target sequence
gacgagtgttaaaagatgcagc

SEQ ID NO: 214814 - DNA, 22 bp, Artificial sequence
  SiRNA target sequence
acgagtgttaaaagatgcagca

SEQ ID NO: 214815 - DNA, 22 bp, Artificial sequence
  SiRNA target sequence
cgagtgttaaaagatgcagcag

SEQ ID NO: 214816 - DNA, 22 bp, Artificial sequence
  SiRNA target sequence
gagtgttaaaagatgcagcagt

SEQ ID NO: 214817 - DNA, 22 bp, Artificial sequence
  SiRNA target sequence
agtgttaaaagatgcagcagtt

SEQ ID NO: 214818 - DNA, 22 bp, Artificial sequence
  SiRNA target sequence
gtgttaaaagatgcagcagttc

SEQ ID NO: 214819 - DNA, 22 bp, Artificial sequence
  SiRNA target sequence
tgttaaaagatgcagcagttct

SEQ ID NO: 214820 - DNA, 22 bp, Artificial sequence
  SiRNA target sequence
gttaaaagatgcagcagttctt

SEQ ID NO: 214821 - DNA, 22 bp, Artificial sequence
  SiRNA target sequence
ttaaaagatgcagcagttctta

SEQ ID NO: 214822 - DNA, 22 bp, Artificial sequence
  SiRNA target sequence
taaaagatgcagcagttcttag

SEQ ID NO: 214823 - DNA, 22 bp, Artificial sequence
  SiRNA target sequence
aaaagatgcagcagttcttagt

SEQ ID NO: 214824 - DNA, 22 bp, Artificial sequence
  SiRNA target sequence
aaagatgcagcagttcttagta

SEQ ID NO: 214825 - DNA, 22 bp, Artificial sequence
  SiRNA target sequence
aagatgcagcagttcttagtag

SEQ ID NO: 214826 - DNA, 22 bp, Artificial sequence
  SiRNA target sequence
agatgcagcagttcttagtaga

SEQ ID NO: 214827 - DNA, 22 bp, Artificial sequence
  SiRNA target sequence
gatgcagcagttcttagtagac

SEQ ID NO: 214828 - DNA, 22 bp, Artificial sequence
  SiRNA target sequence
atgcagcagttcttagtagaca

SEQ ID NO: 214829 - DNA, 22 bp, Artificial sequence
  SiRNA target sequence
tgcagcagttcttagtagacag

SEQ ID NO: 214830 - DNA, 22 bp, Artificial sequence
  SiRNA target sequence
gcagcagttcttagtagacaga

SEQ ID NO: 214831 - DNA, 22 bp, Artificial sequence
  SiRNA target sequence
cagcagttcttagtagacagat

SEQ ID NO: 214832 - DNA, 22 bp, Artificial sequence
  SiRNA target sequence
agcagttcttagtagacagatg

SEQ ID NO: 214833 - DNA, 22 bp, Artificial sequence
  SiRNA target sequence
gcagttcttagtagacagatgc

SEQ ID NO: 214834 - DNA, 22 bp, Artificial sequence
  SiRNA target sequence
cagttcttagtagacagatgcc

SEQ ID NO: 214835 - DNA, 22 bp, Artificial sequence
  SiRNA target sequence
agttcttagtagacagatgcca

SEQ ID NO: 214836 - DNA, 22 bp, Artificial sequence
  SiRNA target sequence
gttcttagtagacagatgccac

SEQ ID NO: 214837 - DNA, 22 bp, Artificial sequence
  SiRNA target sequence
ttcttagtagacagatgccact

SEQ ID NO: 214838 - DNA, 22 bp, Artificial sequence
  SiRNA target sequence
tcttagtagacagatgccacta

SEQ ID NO: 214839 - DNA, 22 bp, Artificial sequence
  SiRNA target sequence
cttagtagacagatgccactat

SEQ ID NO: 214840 - DNA, 22 bp, Artificial sequence
  SiRNA target sequence
ttagtagacagatgccactatc

SEQ ID NO: 214841 - DNA, 22 bp, Artificial sequence
  SiRNA target sequence
tagtagacagatgccactatcc

SEQ ID NO: 214842 - DNA, 22 bp, Artificial sequence
  SiRNA target sequence
agtagacagatgccactatcca

SEQ ID NO: 214843 - DNA, 22 bp, Artificial sequence
  SiRNA target sequence
gtagacagatgccactatccat

SEQ ID NO: 214844 - DNA, 22 bp, Artificial sequence
  SiRNA target sequence
tagacagatgccactatccatt

SEQ ID NO: 214845 - DNA, 22 bp, Artificial sequence
  SiRNA target sequence
agacagatgccactatccatta

SEQ ID NO: 214846 - DNA, 22 bp, Artificial sequence
  SiRNA target sequence
gacagatgccactatccattaa

SEQ ID NO: 214847 - DNA, 22 bp, Artificial sequence
  SiRNA target sequence
acagatgccactatccattaat

SEQ ID NO: 214848 - DNA, 22 bp, Artificial sequence
  SiRNA target sequence
cagatgccactatccattaatt

SEQ ID NO: 214849 - DNA, 22 bp, Artificial sequence
  SiRNA target sequence
agatgccactatccattaattg

SEQ ID NO: 214850 - DNA, 22 bp, Artificial sequence
  SiRNA target sequence
gatgccactatccattaattgt

SEQ ID NO: 214851 - DNA, 22 bp, Artificial sequence
  SiRNA target sequence
atgccactatccattaattgtc

SEQ ID NO: 214852 - DNA, 22 bp, Artificial sequence
  SiRNA target sequence
tgccactatccattaattgtct

SEQ ID NO: 214853 - DNA, 22 bp, Artificial sequence
  SiRNA target sequence
gccactatccattaattgtctt

SEQ ID NO: 214854 - DNA, 22 bp, Artificial sequence
  SiRNA target sequence
ccactatccattaattgtctta

SEQ ID NO: 214855 - DNA, 22 bp, Artificial sequence
  SiRNA target sequence
cactatccattaattgtcttaa

SEQ ID NO: 214856 - DNA, 22 bp, Artificial sequence
  SiRNA target sequence
actatccattaattgtcttaaa

SEQ ID NO: 214857 - DNA, 22 bp, Artificial sequence
  SiRNA target sequence
ctatccattaattgtcttaaaa

SEQ ID NO: 214858 - DNA, 22 bp, Artificial sequence
  SiRNA target sequence
tatccattaattgtcttaaaag

SEQ ID NO: 214859 - DNA, 22 bp, Artificial sequence
  SiRNA target sequence
atccattaattgtcttaaaagc

SEQ ID NO: 214860 - DNA, 22 bp, Artificial sequence
  SiRNA target sequence
tccattaattgtcttaaaagct

SEQ ID NO: 214861 - DNA, 22 bp, Artificial sequence
  SiRNA target sequence
ccattaattgtcttaaaagctt

SEQ ID NO: 214862 - DNA, 22 bp, Artificial sequence
  SiRNA target sequence
cattaattgtcttaaaagcttt

SEQ ID NO: 214863 - DNA, 22 bp, Artificial sequence
  SiRNA target sequence
attaattgtcttaaaagctttg

SEQ ID NO: 214864 - DNA, 22 bp, Artificial sequence
  SiRNA target sequence
ttaattgtcttaaaagctttgt

SEQ ID NO: 214865 - DNA, 22 bp, Artificial sequence
  SiRNA target sequence
taattgtcttaaaagctttgta

SEQ ID NO: 214866 - DNA, 22 bp, Artificial sequence
  SiRNA target sequence
aattgtcttaaaagctttgtaa

SEQ ID NO: 214867 - DNA, 22 bp, Artificial sequence
  SiRNA target sequence
attgtcttaaaagctttgtaat

SEQ ID NO: 214868 - DNA, 22 bp, Artificial sequence
  SiRNA target sequence
ttgtcttaaaagctttgtaatt

SEQ ID NO: 214869 - DNA, 22 bp, Artificial sequence
  SiRNA target sequence
tgtcttaaaagctttgtaattt

SEQ ID NO: 214870 - DNA, 22 bp, Artificial sequence
  SiRNA target sequence
gtcttaaaagctttgtaatttt

SEQ ID NO: 214871 - DNA, 22 bp, Artificial sequence
  SiRNA target sequence
tcttaaaagctttgtaatttta

SEQ ID NO: 214872 - DNA, 22 bp, Artificial sequence
  SiRNA target sequence
cttaaaagctttgtaattttac

SEQ ID NO: 214873 - DNA, 22 bp, Artificial sequence
  SiRNA target sequence
ttaaaagctttgtaattttacc

SEQ ID NO: 214874 - DNA, 22 bp, Artificial sequence
  SiRNA target sequence
taaaagctttgtaattttacca

SEQ ID NO: 214875 - DNA, 22 bp, Artificial sequence
  SiRNA target sequence
aaaagctttgtaattttaccag

SEQ ID NO: 214876 - DNA, 22 bp, Artificial sequence
  SiRNA target sequence
aaagctttgtaattttaccagt

SEQ ID NO: 214877 - DNA, 22 bp, Artificial sequence
  SiRNA target sequence
aagctttgtaattttaccagtt

SEQ ID NO: 214878 - DNA, 22 bp, Artificial sequence
  SiRNA target sequence
agctttgtaattttaccagtta

SEQ ID NO: 214879 - DNA, 22 bp, Artificial sequence
  SiRNA target sequence
gctttgtaattttaccagttac

SEQ ID NO: 214880 - DNA, 22 bp, Artificial sequence
  SiRNA target sequence
ctttgtaattttaccagttact

SEQ ID NO: 214881 - DNA, 22 bp, Artificial sequence
  SiRNA target sequence
tttgtaattttaccagttactc

SEQ ID NO: 214882 - DNA, 22 bp, Artificial sequence
  SiRNA target sequence
ttgtaattttaccagttactct

SEQ ID NO: 214883 - DNA, 22 bp, Artificial sequence
  SiRNA target sequence
tgtaattttaccagttactctt

SEQ ID NO: 214884 - DNA, 22 bp, Artificial sequence
  SiRNA target sequence
gtaattttaccagttactcttg

SEQ ID NO: 214885 - DNA, 22 bp, Artificial sequence
  SiRNA target sequence
taattttaccagttactcttgt

SEQ ID NO: 214886 - DNA, 22 bp, Artificial sequence
  SiRNA target sequence
aattttaccagttactcttgtt

SEQ ID NO: 214887 - DNA, 22 bp, Artificial sequence
  SiRNA target sequence
attttaccagttactcttgttt

SEQ ID NO: 214888 - DNA, 22 bp, Artificial sequence
  SiRNA target sequence
ttttaccagttactcttgtttg

SEQ ID NO: 214889 - DNA, 22 bp, Artificial sequence
  SiRNA target sequence
tttaccagttactcttgtttgt

SEQ ID NO: 214890 - DNA, 22 bp, Artificial sequence
  SiRNA target sequence
ttaccagttactcttgtttgtg

SEQ ID NO: 214891 - DNA, 22 bp, Artificial sequence
  SiRNA target sequence
taccagttactcttgtttgtgt

SEQ ID NO: 214892 - DNA, 22 bp, Artificial sequence
  SiRNA target sequence
accagttactcttgtttgtgta

SEQ ID NO: 214893 - DNA, 22 bp, Artificial sequence
  SiRNA target sequence
ccagttactcttgtttgtgtag

SEQ ID NO: 214894 - DNA, 22 bp, Artificial sequence
  SiRNA target sequence
cagttactcttgtttgtgtagg

SEQ ID NO: 214895 - DNA, 22 bp, Artificial sequence
  SiRNA target sequence
agttactcttgtttgtgtagga

SEQ ID NO: 214896 - DNA, 22 bp, Artificial sequence
  SiRNA target sequence
gttactcttgtttgtgtaggat

SEQ ID NO: 214897 - DNA, 22 bp, Artificial sequence
  SiRNA target sequence
ttactcttgtttgtgtaggatt

SEQ ID NO: 214898 - DNA, 22 bp, Artificial sequence
  SiRNA target sequence
tactcttgtttgtgtaggatta

SEQ ID NO: 214899 - DNA, 22 bp, Artificial sequence
  SiRNA target sequence
actcttgtttgtgtaggattaa

SEQ ID NO: 214900 - DNA, 22 bp, Artificial sequence
  SiRNA target sequence
ctcttgtttgtgtaggattaat

SEQ ID NO: 214901 - DNA, 22 bp, Artificial sequence
  SiRNA target sequence
tcttgtttgtgtaggattaatt

SEQ ID NO: 214902 - DNA, 22 bp, Artificial sequence
  SiRNA target sequence
cttgtttgtgtaggattaattc

SEQ ID NO: 214903 - DNA, 22 bp, Artificial sequence
  SiRNA target sequence
ttgtttgtgtaggattaattca

SEQ ID NO: 214904 - DNA, 22 bp, Artificial sequence
  SiRNA target sequence
tgtttgtgtaggattaattcag

SEQ ID NO: 214905 - DNA, 22 bp, Artificial sequence
  SiRNA target sequence
gtttgtgtaggattaattcaga

SEQ ID NO: 214906 - DNA, 22 bp, Artificial sequence
  SiRNA target sequence
tttgtgtaggattaattcagaa

SEQ ID NO: 214907 - DNA, 22 bp, Artificial sequence
  SiRNA target sequence
ttgtgtaggattaattcagaag

SEQ ID NO: 214908 - DNA, 22 bp, Artificial sequence
  SiRNA target sequence
tgtgtaggattaattcagaagt

SEQ ID NO: 214909 - DNA, 22 bp, Artificial sequence
  SiRNA target sequence
gtgtaggattaattcagaagtc

SEQ ID NO: 214910 - DNA, 22 bp, Artificial sequence
  SiRNA target sequence
tgtaggattaattcagaagtct

SEQ ID NO: 214911 - DNA, 22 bp, Artificial sequence
  SiRNA target sequence
gtaggattaattcagaagtcta

SEQ ID NO: 214912 - DNA, 22 bp, Artificial sequence
  SiRNA target sequence
taggattaattcagaagtctac

SEQ ID NO: 214913 - DNA, 22 bp, Artificial sequence
  SiRNA target sequence
aggattaattcagaagtctaca

SEQ ID NO: 214914 - DNA, 22 bp, Artificial sequence
  SiRNA target sequence
ggattaattcagaagtctacac

SEQ ID NO: 214915 - DNA, 22 bp, Artificial sequence
  SiRNA target sequence
gattaattcagaagtctacact

SEQ ID NO: 214916 - DNA, 22 bp, Artificial sequence
  SiRNA target sequence
attaattcagaagtctacactc

SEQ ID NO: 214917 - DNA, 22 bp, Artificial sequence
  SiRNA target sequence
ttaattcagaagtctacactct

SEQ ID NO: 214918 - DNA, 22 bp, Artificial sequence
  SiRNA target sequence
taattcagaagtctacactctc

SEQ ID NO: 214919 - DNA, 22 bp, Artificial sequence
  SiRNA target sequence
aattcagaagtctacactctct

SEQ ID NO: 214920 - DNA, 22 bp, Artificial sequence
  SiRNA target sequence
attcagaagtctacactctctt

SEQ ID NO: 214921 - DNA, 22 bp, Artificial sequence
  SiRNA target sequence
ttcagaagtctacactctctta

SEQ ID NO: 214922 - DNA, 22 bp, Artificial sequence
  SiRNA target sequence
tcagaagtctacactctcttat

SEQ ID NO: 214923 - DNA, 22 bp, Artificial sequence
  SiRNA target sequence
cagaagtctacactctcttatt

SEQ ID NO: 214924 - DNA, 22 bp, Artificial sequence
  SiRNA target sequence
agaagtctacactctcttattc

SEQ ID NO: 214925 - DNA, 22 bp, Artificial sequence
  SiRNA target sequence
gaagtctacactctcttattct

SEQ ID NO: 214926 - DNA, 22 bp, Artificial sequence
  SiRNA target sequence
aagtctacactctcttattctt

SEQ ID NO: 214927 - DNA, 22 bp, Artificial sequence
  SiRNA target sequence
agtctacactctcttattcttt

SEQ ID NO: 214928 - DNA, 22 bp, Artificial sequence
  SiRNA target sequence
gtctacactctcttattctttt

SEQ ID NO: 214929 - DNA, 22 bp, Artificial sequence
  SiRNA target sequence
tctacactctcttattctttta

SEQ ID NO: 214930 - DNA, 22 bp, Artificial sequence
  SiRNA target sequence
ctacactctcttattcttttac

SEQ ID NO: 214931 - DNA, 22 bp, Artificial sequence
  SiRNA target sequence
tacactctcttattcttttaca

SEQ ID NO: 214932 - DNA, 22 bp, Artificial sequence
  SiRNA target sequence
acactctcttattcttttacaa

SEQ ID NO: 214933 - DNA, 22 bp, Artificial sequence
  SiRNA target sequence
cactctcttattcttttacaaa

SEQ ID NO: 214934 - DNA, 22 bp, Artificial sequence
  SiRNA target sequence
actctcttattcttttacaaaa

SEQ ID NO: 214935 - DNA, 22 bp, Artificial sequence
  SiRNA target sequence
ctctcttattcttttacaaaaa

SEQ ID NO: 214936 - DNA, 22 bp, Artificial sequence
  SiRNA target sequence
tctcttattcttttacaaaaat

SEQ ID NO: 214937 - DNA, 22 bp, Artificial sequence
  SiRNA target sequence
ctcttattcttttacaaaaata

SEQ ID NO: 214938 - DNA, 22 bp, Artificial sequence
  SiRNA target sequence
tcttattcttttacaaaaatat

SEQ ID NO: 214939 - DNA, 22 bp, Artificial sequence
  SiRNA target sequence
cttattcttttacaaaaatatt

SEQ ID NO: 214940 - DNA, 22 bp, Artificial sequence
  SiRNA target sequence
ttattcttttacaaaaatattt

SEQ ID NO: 214941 - DNA, 22 bp, Artificial sequence
  SiRNA target sequence
tattcttttacaaaaatatttg

SEQ ID NO: 214942 - DNA, 22 bp, Artificial sequence
  SiRNA target sequence
attcttttacaaaaatatttga

SEQ ID NO: 214943 - DNA, 22 bp, Artificial sequence
  SiRNA target sequence
ttcttttacaaaaatatttgat

SEQ ID NO: 214944 - DNA, 22 bp, Artificial sequence
  SiRNA target sequence
tcttttacaaaaatatttgatg

SEQ ID NO: 214945 - DNA, 22 bp, Artificial sequence
  SiRNA target sequence
cttttacaaaaatatttgatgg

SEQ ID NO: 214946 - DNA, 22 bp, Artificial sequence
  SiRNA target sequence
ttttacaaaaatatttgatggt

SEQ ID NO: 214947 - DNA, 22 bp, Artificial sequence
  SiRNA target sequence
tttacaaaaatatttgatggtg

SEQ ID NO: 214948 - DNA, 22 bp, Artificial sequence
  SiRNA target sequence
ttacaaaaatatttgatggtgc

SEQ ID NO: 214949 - DNA, 22 bp, Artificial sequence
  SiRNA target sequence
tacaaaaatatttgatggtgca

SEQ ID NO: 214950 - DNA, 22 bp, Artificial sequence
  SiRNA target sequence
acaaaaatatttgatggtgcat

SEQ ID NO: 214951 - DNA, 22 bp, Artificial sequence
  SiRNA target sequence
caaaaatatttgatggtgcatt

SEQ ID NO: 214952 - DNA, 22 bp, Artificial sequence
  SiRNA target sequence
aaaaatatttgatggtgcattg

SEQ ID NO: 214953 - DNA, 22 bp, Artificial sequence
  SiRNA target sequence
aaaatatttgatggtgcattgt

SEQ ID NO: 214954 - DNA, 22 bp, Artificial sequence
  SiRNA target sequence
aaatatttgatggtgcattgtt

SEQ ID NO: 214955 - DNA, 22 bp, Artificial sequence
  SiRNA target sequence
aatatttgatggtgcattgtta

SEQ ID NO: 214956 - DNA, 22 bp, Artificial sequence
  SiRNA target sequence
atatttgatggtgcattgttaa

SEQ ID NO: 214957 - DNA, 22 bp, Artificial sequence
  SiRNA target sequence
tatttgatggtgcattgttaat

SEQ ID NO: 214958 - DNA, 22 bp, Artificial sequence
  SiRNA target sequence
atttgatggtgcattgttaata

SEQ ID NO: 214959 - DNA, 22 bp, Artificial sequence
  SiRNA target sequence
tttgatggtgcattgttaatat

SEQ ID NO: 214960 - DNA, 22 bp, Artificial sequence
  SiRNA target sequence
ttgatggtgcattgttaatatt

SEQ ID NO: 214961 - DNA, 22 bp, Artificial sequence
  SiRNA target sequence
tgatggtgcattgttaatattt

SEQ ID NO: 214962 - DNA, 22 bp, Artificial sequence
  SiRNA target sequence
gatggtgcattgttaatatttg

SEQ ID NO: 214963 - DNA, 22 bp, Artificial sequence
  SiRNA target sequence
atggtgcattgttaatatttgc

SEQ ID NO: 214964 - DNA, 22 bp, Artificial sequence
  SiRNA target sequence
tggtgcattgttaatatttgct

SEQ ID NO: 214965 - DNA, 22 bp, Artificial sequence
  SiRNA target sequence
ggtgcattgttaatatttgctt

SEQ ID NO: 214966 - DNA, 22 bp, Artificial sequence
  SiRNA target sequence
gtgcattgttaatatttgcttt

SEQ ID NO: 214967 - DNA, 22 bp, Artificial sequence
  SiRNA target sequence
tgcattgttaatatttgctttt

SEQ ID NO: 214968 - DNA, 22 bp, Artificial sequence
  SiRNA target sequence
gcattgttaatatttgcttttc

SEQ ID NO: 214969 - DNA, 22 bp, Artificial sequence
  SiRNA target sequence
cattgttaatatttgcttttct

SEQ ID NO: 214970 - DNA, 22 bp, Artificial sequence
  SiRNA target sequence
attgttaatatttgcttttctt

SEQ ID NO: 214971 - DNA, 22 bp, Artificial sequence
  SiRNA target sequence
ttgttaatatttgcttttcttt

SEQ ID NO: 214972 - DNA, 22 bp, Artificial sequence
  SiRNA target sequence
tgttaatatttgcttttcttta

SEQ ID NO: 214973 - DNA, 22 bp, Artificial sequence
  SiRNA target sequence
gttaatatttgcttttctttat

SEQ ID NO: 214974 - DNA, 22 bp, Artificial sequence
  SiRNA target sequence
ttaatatttgcttttctttata

SEQ ID NO: 214975 - DNA, 22 bp, Artificial sequence
  SiRNA target sequence
taatatttgcttttctttatat

SEQ ID NO: 214976 - DNA, 22 bp, Artificial sequence
  SiRNA target sequence
aatatttgcttttctttatatc

SEQ ID NO: 214977 - DNA, 22 bp, Artificial sequence
  SiRNA target sequence
atatttgcttttctttatatca

SEQ ID NO: 214978 - DNA, 22 bp, Artificial sequence
  SiRNA target sequence
tatttgcttttctttatatcat

SEQ ID NO: 214979 - DNA, 22 bp, Artificial sequence
  SiRNA target sequence
atttgcttttctttatatcatt

SEQ ID NO: 214980 - DNA, 22 bp, Artificial sequence
  SiRNA target sequence
tttgcttttctttatatcattc

SEQ ID NO: 214981 - DNA, 22 bp, Artificial sequence
  SiRNA target sequence
ttgcttttctttatatcattct

SEQ ID NO: 214982 - DNA, 22 bp, Artificial sequence
  SiRNA target sequence
tgcttttctttatatcattctt

SEQ ID NO: 214983 - DNA, 22 bp, Artificial sequence
  SiRNA target sequence
gcttttctttatatcattcttg

SEQ ID NO: 214984 - DNA, 22 bp, Artificial sequence
  SiRNA target sequence
cttttctttatatcattcttgg

SEQ ID NO: 214985 - DNA, 22 bp, Artificial sequence
  SiRNA target sequence
ttttctttatatcattcttggt

SEQ ID NO: 214986 - DNA, 22 bp, Artificial sequence
  SiRNA target sequence
tttctttatatcattcttggtc

SEQ ID NO: 214987 - DNA, 22 bp, Artificial sequence
  SiRNA target sequence
ttctttatatcattcttggtct

SEQ ID NO: 214988 - DNA, 22 bp, Artificial sequence
  SiRNA target sequence
tctttatatcattcttggtcta

SEQ ID NO: 214989 - DNA, 22 bp, Artificial sequence
  SiRNA target sequence
ctttatatcattcttggtctag

SEQ ID NO: 214990 - DNA, 22 bp, Artificial sequence
  SiRNA target sequence
tttatatcattcttggtctagt

SEQ ID NO: 214991 - DNA, 22 bp, Artificial sequence
  SiRNA target sequence
ttatatcattcttggtctagtt

SEQ ID NO: 214992 - DNA, 22 bp, Artificial sequence
  SiRNA target sequence
tatatcattcttggtctagttc

SEQ ID NO: 214993 - DNA, 22 bp, Artificial sequence
  SiRNA target sequence
atatcattcttggtctagttct

SEQ ID NO: 214994 - DNA, 22 bp, Artificial sequence
  SiRNA target sequence
tatcattcttggtctagttctt

SEQ ID NO: 214995 - DNA, 22 bp, Artificial sequence
  SiRNA target sequence
atcattcttggtctagttcttc

SEQ ID NO: 214996 - DNA, 22 bp, Artificial sequence
  SiRNA target sequence
tcattcttggtctagttcttct

SEQ ID NO: 214997 - DNA, 22 bp, Artificial sequence
  SiRNA target sequence
cattcttggtctagttcttctt

SEQ ID NO: 214998 - DNA, 22 bp, Artificial sequence
  SiRNA target sequence
attcttggtctagttcttcttc

SEQ ID NO: 214999 - DNA, 22 bp, Artificial sequence
  SiRNA target sequence
ttcttggtctagttcttcttcc

SEQ ID NO: 215000 - DNA, 22 bp, Artificial sequence
  SiRNA target sequence
tcttggtctagttcttcttcca

SEQ ID NO: 215001 - DNA, 22 bp, Artificial sequence
  SiRNA target sequence
cttggtctagttcttcttccat

SEQ ID NO: 215002 - DNA, 22 bp, Artificial sequence
  SiRNA target sequence
ttggtctagttcttcttccata

SEQ ID NO: 215003 - DNA, 22 bp, Artificial sequence
  SiRNA target sequence
tggtctagttcttcttccatat

SEQ ID NO: 215004 - DNA, 22 bp, Artificial sequence
  SiRNA target sequence
ggtctagttcttcttccatatt

SEQ ID NO: 215005 - DNA, 22 bp, Artificial sequence
  SiRNA target sequence
gtctagttcttcttccatattc

SEQ ID NO: 215006 - DNA, 22 bp, Artificial sequence
  SiRNA target sequence
tctagttcttcttccatattct

SEQ ID NO: 215007 - DNA, 22 bp, Artificial sequence
  SiRNA target sequence
ctagttcttcttccatattctc

SEQ ID NO: 215008 - DNA, 22 bp, Artificial sequence
  SiRNA target sequence
tagttcttcttccatattctca

SEQ ID NO: 215009 - DNA, 22 bp, Artificial sequence
  SiRNA target sequence
agttcttcttccatattctcat

SEQ ID NO: 215010 - DNA, 22 bp, Artificial sequence
  SiRNA target sequence
gttcttcttccatattctcatc

SEQ ID NO: 215011 - DNA, 22 bp, Artificial sequence
  SiRNA target sequence
ttcttcttccatattctcatct

SEQ ID NO: 215012 - DNA, 22 bp, Artificial sequence
  SiRNA target sequence
tcttcttccatattctcatctt

SEQ ID NO: 215013 - DNA, 22 bp, Artificial sequence
  SiRNA target sequence
cttcttccatattctcatcttt

SEQ ID NO: 215014 - DNA, 22 bp, Artificial sequence
  SiRNA target sequence
ttcttccatattctcatctttt

SEQ ID NO: 215015 - DNA, 22 bp, Artificial sequence
  SiRNA target sequence
tcttccatattctcatcttttc

SEQ ID NO: 215016 - DNA, 22 bp, Artificial sequence
  SiRNA target sequence
cttccatattctcatcttttcc

SEQ ID NO: 215017 - DNA, 22 bp, Artificial sequence
  SiRNA target sequence
ttccatattctcatcttttcca

SEQ ID NO: 215018 - DNA, 22 bp, Artificial sequence
  SiRNA target sequence
tccatattctcatcttttccag

SEQ ID NO: 215019 - DNA, 22 bp, Artificial sequence
  SiRNA target sequence
ccatattctcatcttttccagc

SEQ ID NO: 215020 - DNA, 22 bp, Artificial sequence
  SiRNA target sequence
catattctcatcttttccagct

SEQ ID NO: 215021 - DNA, 22 bp, Artificial sequence
  SiRNA target sequence
atattctcatcttttccagctt

SEQ ID NO: 215022 - DNA, 22 bp, Artificial sequence
  SiRNA target sequence
tattctcatcttttccagcttg

SEQ ID NO: 215023 - DNA, 22 bp, Artificial sequence
  SiRNA target sequence
attctcatcttttccagcttga

SEQ ID NO: 215024 - DNA, 22 bp, Artificial sequence
  SiRNA target sequence
ttctcatcttttccagcttgat

SEQ ID NO: 215025 - DNA, 22 bp, Artificial sequence
  SiRNA target sequence
tctcatcttttccagcttgata

SEQ ID NO: 215026 - DNA, 22 bp, Artificial sequence
  SiRNA target sequence
ctcatcttttccagcttgatag

SEQ ID NO: 215027 - DNA, 22 bp, Artificial sequence
  SiRNA target sequence
tcatcttttccagcttgatagt

SEQ ID NO: 215028 - DNA, 22 bp, Artificial sequence
  SiRNA target sequence
catcttttccagcttgatagtt

SEQ ID NO: 215029 - DNA, 22 bp, Artificial sequence
  SiRNA target sequence
atcttttccagcttgatagtta

SEQ ID NO: 215030 - DNA, 22 bp, Artificial sequence
  SiRNA target sequence
tcttttccagcttgatagttat

SEQ ID NO: 215031 - DNA, 22 bp, Artificial sequence
  SiRNA target sequence
cttttccagcttgatagttatt

SEQ ID NO: 215032 - DNA, 22 bp, Artificial sequence
  SiRNA target sequence
ttttccagcttgatagttattt

SEQ ID NO: 215033 - DNA, 22 bp, Artificial sequence
  SiRNA target sequence
tttccagcttgatagttatttt

SEQ ID NO: 215034 - DNA, 22 bp, Artificial sequence
  SiRNA target sequence
ttccagcttgatagttattttt

SEQ ID NO: 215035 - DNA, 22 bp, Artificial sequence
  SiRNA target sequence
tccagcttgatagttatttttt

SEQ ID NO: 215036 - DNA, 22 bp, Artificial sequence
  SiRNA target sequence
ccagcttgatagttattttttt

SEQ ID NO: 215037 - DNA, 22 bp, Artificial sequence
  SiRNA target sequence
cagcttgatagttattttttta

SEQ ID NO: 215038 - DNA, 22 bp, Artificial sequence
  SiRNA target sequence
agcttgatagttatttttttag

SEQ ID NO: 215039 - DNA, 22 bp, Artificial sequence
  SiRNA target sequence
gcttgatagttatttttttaga

SEQ ID NO: 215040 - DNA, 22 bp, Artificial sequence
  SiRNA target sequence
cttgatagttatttttttagag

SEQ ID NO: 215041 - DNA, 22 bp, Artificial sequence
  SiRNA target sequence
ttgatagttatttttttagaga

SEQ ID NO: 215042 - DNA, 22 bp, Artificial sequence
  SiRNA target sequence
tgatagttatttttttagagac

SEQ ID NO: 215043 - DNA, 22 bp, Artificial sequence
  SiRNA target sequence
gatagttatttttttagagacc

SEQ ID NO: 215044 - DNA, 22 bp, Artificial sequence
  SiRNA target sequence
atagttatttttttagagacct

SEQ ID NO: 215045 - DNA, 22 bp, Artificial sequence
  SiRNA target sequence
tagttatttttttagagacctt

SEQ ID NO: 215046 - DNA, 22 bp, Artificial sequence
  SiRNA target sequence
agttatttttttagagaccttt

SEQ ID NO: 215047 - DNA, 22 bp, Artificial sequence
  SiRNA target sequence
gttatttttttagagacctttt

SEQ ID NO: 215048 - DNA, 22 bp, Artificial sequence
  SiRNA target sequence
ttatttttttagagaccttttt

SEQ ID NO: 215049 - DNA, 22 bp, Artificial sequence
  SiRNA target sequence
tatttttttagagaccttttta

SEQ ID NO: 215050 - DNA, 22 bp, Artificial sequence
  SiRNA target sequence
atttttttagagacctttttag

SEQ ID NO: 215051 - DNA, 22 bp, Artificial sequence
  SiRNA target sequence
tttttttagagacctttttagt

SEQ ID NO: 215052 - DNA, 22 bp, Artificial sequence
  SiRNA target sequence
ttttttagagacctttttagtg

SEQ ID NO: 215053 - DNA, 22 bp, Artificial sequence
  SiRNA target sequence
tttttagagacctttttagtga

SEQ ID NO: 215054 - DNA, 22 bp, Artificial sequence
  SiRNA target sequence
ttttagagacctttttagtgat

SEQ ID NO: 215055 - DNA, 22 bp, Artificial sequence
  SiRNA target sequence
tttagagacctttttagtgatg

SEQ ID NO: 215056 - DNA, 22 bp, Artificial sequence
  SiRNA target sequence
ttagagacctttttagtgatgg

SEQ ID NO: 215057 - DNA, 22 bp, Artificial sequence
  SiRNA target sequence
tagagacctttttagtgatggg

SEQ ID NO: 215058 - DNA, 22 bp, Artificial sequence
  SiRNA target sequence
agagacctttttagtgatggga

SEQ ID NO: 215059 - DNA, 22 bp, Artificial sequence
  SiRNA target sequence
gagacctttttagtgatgggaa

SEQ ID NO: 215060 - DNA, 22 bp, Artificial sequence
  SiRNA target sequence
agacctttttagtgatgggaaa

SEQ ID NO: 215061 - DNA, 22 bp, Artificial sequence
  SiRNA target sequence
gacctttttagtgatgggaaat

SEQ ID NO: 215062 - DNA, 22 bp, Artificial sequence
  SiRNA target sequence
acctttttagtgatgggaaatg

SEQ ID NO: 215063 - DNA, 22 bp, Artificial sequence
  SiRNA target sequence
cctttttagtgatgggaaatgt

SEQ ID NO: 215064 - DNA, 22 bp, Artificial sequence
  SiRNA target sequence
ctttttagtgatgggaaatgtg

SEQ ID NO: 215065 - DNA, 22 bp, Artificial sequence
  SiRNA target sequence
tttttagtgatgggaaatgtgt

SEQ ID NO: 215066 - DNA, 22 bp, Artificial sequence
  SiRNA target sequence
ttttagtgatgggaaatgtgtt

SEQ ID NO: 215067 - DNA, 22 bp, Artificial sequence
  SiRNA target sequence
tttagtgatgggaaatgtgttg

SEQ ID NO: 215068 - DNA, 22 bp, Artificial sequence
  SiRNA target sequence
ttagtgatgggaaatgtgttgt

SEQ ID NO: 215069 - DNA, 22 bp, Artificial sequence
  SiRNA target sequence
tagtgatgggaaatgtgttgta

SEQ ID NO: 215070 - DNA, 22 bp, Artificial sequence
  SiRNA target sequence
agtgatgggaaatgtgttgtaa

SEQ ID NO: 215071 - DNA, 22 bp, Artificial sequence
  SiRNA target sequence
gtgatgggaaatgtgttgtaag

SEQ ID NO: 215072 - DNA, 22 bp, Artificial sequence
  SiRNA target sequence
tgatgggaaatgtgttgtaaga

SEQ ID NO: 215073 - DNA, 22 bp, Artificial sequence
  SiRNA target sequence
gatgggaaatgtgttgtaagag

SEQ ID NO: 215074 - DNA, 22 bp, Artificial sequence
  SiRNA target sequence
atgggaaatgtgttgtaagagg

SEQ ID NO: 215075 - DNA, 22 bp, Artificial sequence
  SiRNA target sequence
tgggaaatgtgttgtaagaggc

SEQ ID NO: 215076 - DNA, 22 bp, Artificial sequence
  SiRNA target sequence
gggaaatgtgttgtaagaggct

SEQ ID NO: 215077 - DNA, 22 bp, Artificial sequence
  SiRNA target sequence
ggaaatgtgttgtaagaggcta

SEQ ID NO: 215078 - DNA, 22 bp, Artificial sequence
  SiRNA target sequence
gaaatgtgttgtaagaggctat

SEQ ID NO: 215079 - DNA, 22 bp, Artificial sequence
  SiRNA target sequence
aaatgtgttgtaagaggctatg

SEQ ID NO: 215080 - DNA, 22 bp, Artificial sequence
  SiRNA target sequence
aatgtgttgtaagaggctatga

SEQ ID NO: 215081 - DNA, 22 bp, Artificial sequence
  SiRNA target sequence
atgtgttgtaagaggctatgat

SEQ ID NO: 215082 - DNA, 22 bp, Artificial sequence
  SiRNA target sequence
tgtgttgtaagaggctatgatg

SEQ ID NO: 215083 - DNA, 22 bp, Artificial sequence
  SiRNA target sequence
gtgttgtaagaggctatgatgc

SEQ ID NO: 215084 - DNA, 22 bp, Artificial sequence
  SiRNA target sequence
tgttgtaagaggctatgatgct

SEQ ID NO: 215085 - DNA, 22 bp, Artificial sequence
  SiRNA target sequence
gttgtaagaggctatgatgctt

SEQ ID NO: 215086 - DNA, 22 bp, Artificial sequence
  SiRNA target sequence
ttgtaagaggctatgatgcttt

SEQ ID NO: 215087 - DNA, 22 bp, Artificial sequence
  SiRNA target sequence
tgtaagaggctatgatgcttta

SEQ ID NO: 215088 - DNA, 22 bp, Artificial sequence
  SiRNA target sequence
gtaagaggctatgatgctttat

SEQ ID NO: 215089 - DNA, 22 bp, Artificial sequence
  SiRNA target sequence
taagaggctatgatgctttatt

SEQ ID NO: 215090 - DNA, 22 bp, Artificial sequence
  SiRNA target sequence
aagaggctatgatgctttatta

SEQ ID NO: 215091 - DNA, 22 bp, Artificial sequence
  SiRNA target sequence
agaggctatgatgctttattat

SEQ ID NO: 215092 - DNA, 22 bp, Artificial sequence
  SiRNA target sequence
gaggctatgatgctttattatc

SEQ ID NO: 215093 - DNA, 22 bp, Artificial sequence
  SiRNA target sequence
aggctatgatgctttattatct

SEQ ID NO: 215094 - DNA, 22 bp, Artificial sequence
  SiRNA target sequence
ggctatgatgctttattatctt

SEQ ID NO: 215095 - DNA, 22 bp, Artificial sequence
  SiRNA target sequence
gctatgatgctttattatcttt

SEQ ID NO: 215096 - DNA, 22 bp, Artificial sequence
  SiRNA target sequence
ctatgatgctttattatctttg

SEQ ID NO: 215097 - DNA, 22 bp, Artificial sequence
  SiRNA target sequence
tatgatgctttattatctttgg

SEQ ID NO: 215098 - DNA, 22 bp, Artificial sequence
  SiRNA target sequence
atgatgctttattatctttggc

SEQ ID NO: 215099 - DNA, 22 bp, Artificial sequence
  SiRNA target sequence
tgatgctttattatctttggca

SEQ ID NO: 215100 - DNA, 22 bp, Artificial sequence
  SiRNA target sequence
gatgctttattatctttggcac

SEQ ID NO: 215101 - DNA, 22 bp, Artificial sequence
  SiRNA target sequence
atgctttattatctttggcact

SEQ ID NO: 215102 - DNA, 22 bp, Artificial sequence
  SiRNA target sequence
tgctttattatctttggcactg

SEQ ID NO: 215103 - DNA, 22 bp, Artificial sequence
  SiRNA target sequence
gctttattatctttggcactgg

SEQ ID NO: 215104 - DNA, 22 bp, Artificial sequence
  SiRNA target sequence
ctttattatctttggcactggt

SEQ ID NO: 215105 - DNA, 22 bp, Artificial sequence
  SiRNA target sequence
tttattatctttggcactggtc

SEQ ID NO: 215106 - DNA, 22 bp, Artificial sequence
  SiRNA target sequence
ttattatctttggcactggtct

SEQ ID NO: 215107 - DNA, 22 bp, Artificial sequence
  SiRNA target sequence
tattatctttggcactggtctt

SEQ ID NO: 215108 - DNA, 22 bp, Artificial sequence
  SiRNA target sequence
attatctttggcactggtcttt

SEQ ID NO: 215109 - DNA, 22 bp, Artificial sequence
  SiRNA target sequence
ttatctttggcactggtcttta

SEQ ID NO: 215110 - DNA, 22 bp, Artificial sequence
  SiRNA target sequence
tatctttggcactggtctttaa

SEQ ID NO: 215111 - DNA, 22 bp, Artificial sequence
  SiRNA target sequence
atctttggcactggtctttaac

SEQ ID NO: 215112 - DNA, 22 bp, Artificial sequence
  SiRNA target sequence
tctttggcactggtctttaacg

SEQ ID NO: 215113 - DNA, 22 bp, Artificial sequence
  SiRNA target sequence
ctttggcactggtctttaacga

SEQ ID NO: 215114 - DNA, 22 bp, Artificial sequence
  SiRNA target sequence
tttggcactggtctttaacgaa

SEQ ID NO: 215115 - DNA, 22 bp, Artificial sequence
  SiRNA target sequence
ttggcactggtctttaacgaat

SEQ ID NO: 215116 - DNA, 22 bp, Artificial sequence
  SiRNA target sequence
tggcactggtctttaacgaatg

SEQ ID NO: 215117 - DNA, 22 bp, Artificial sequence
  SiRNA target sequence
ggcactggtctttaacgaatgg

SEQ ID NO: 215118 - DNA, 22 bp, Artificial sequence
  SiRNA target sequence
gcactggtctttaacgaatgga

SEQ ID NO: 215119 - DNA, 22 bp, Artificial sequence
  SiRNA target sequence
cactggtctttaacgaatggac

SEQ ID NO: 215120 - DNA, 22 bp, Artificial sequence
  SiRNA target sequence
actggtctttaacgaatggaca

SEQ ID NO: 215121 - DNA, 22 bp, Artificial sequence
  SiRNA target sequence
ctggtctttaacgaatggacat

SEQ ID NO: 215122 - DNA, 22 bp, Artificial sequence
  SiRNA target sequence
tggtctttaacgaatggacatc

SEQ ID NO: 215123 - DNA, 22 bp, Artificial sequence
  SiRNA target sequence
ggtctttaacgaatggacatcc

SEQ ID NO: 215124 - DNA, 22 bp, Artificial sequence
  SiRNA target sequence
gtctttaacgaatggacatcct

SEQ ID NO: 215125 - DNA, 22 bp, Artificial sequence
  SiRNA target sequence
tctttaacgaatggacatcctc

SEQ ID NO: 215126 - DNA, 22 bp, Artificial sequence
  SiRNA target sequence
ctttaacgaatggacatcctct

SEQ ID NO: 215127 - DNA, 22 bp, Artificial sequence
  SiRNA target sequence
tttaacgaatggacatcctctc

SEQ ID NO: 215128 - DNA, 22 bp, Artificial sequence
  SiRNA target sequence
ttaacgaatggacatcctctct

SEQ ID NO: 215129 - DNA, 22 bp, Artificial sequence
  SiRNA target sequence
taacgaatggacatcctctcta

SEQ ID NO: 215130 - DNA, 22 bp, Artificial sequence
  SiRNA target sequence
aacgaatggacatcctctctag

SEQ ID NO: 215131 - DNA, 22 bp, Artificial sequence
  SiRNA target sequence
acgaatggacatcctctctagt

SEQ ID NO: 215132 - DNA, 22 bp, Artificial sequence
  SiRNA target sequence
cgaatggacatcctctctagtt

SEQ ID NO: 215133 - DNA, 22 bp, Artificial sequence
  SiRNA target sequence
gaatggacatcctctctagttt

SEQ ID NO: 215134 - DNA, 22 bp, Artificial sequence
  SiRNA target sequence
aatggacatcctctctagttta

SEQ ID NO: 215135 - DNA, 22 bp, Artificial sequence
  SiRNA target sequence
atggacatcctctctagtttac

SEQ ID NO: 215136 - DNA, 22 bp, Artificial sequence
  SiRNA target sequence
tggacatcctctctagtttaca

SEQ ID NO: 215137 - DNA, 22 bp, Artificial sequence
  SiRNA target sequence
ggacatcctctctagtttacat

SEQ ID NO: 215138 - DNA, 22 bp, Artificial sequence
  SiRNA target sequence
gacatcctctctagtttacatt

SEQ ID NO: 215139 - DNA, 22 bp, Artificial sequence
  SiRNA target sequence
acatcctctctagtttacattg

SEQ ID NO: 215140 - DNA, 22 bp, Artificial sequence
  SiRNA target sequence
catcctctctagtttacattgt

SEQ ID NO: 215141 - DNA, 22 bp, Artificial sequence
  SiRNA target sequence
atcctctctagtttacattgtt

SEQ ID NO: 215142 - DNA, 22 bp, Artificial sequence
  SiRNA target sequence
tcctctctagtttacattgttt

SEQ ID NO: 215143 - DNA, 22 bp, Artificial sequence
  SiRNA target sequence
cctctctagtttacattgtttc

SEQ ID NO: 215144 - DNA, 22 bp, Artificial sequence
  SiRNA target sequence
ctctctagtttacattgtttca

SEQ ID NO: 215145 - DNA, 22 bp, Artificial sequence
  SiRNA target sequence
tctctagtttacattgtttcag

SEQ ID NO: 215146 - DNA, 22 bp, Artificial sequence
  SiRNA target sequence
ctctagtttacattgtttcaga

SEQ ID NO: 215147 - DNA, 22 bp, Artificial sequence
  SiRNA target sequence
tctagtttacattgtttcagaa

SEQ ID NO: 215148 - DNA, 22 bp, Artificial sequence
  SiRNA target sequence
ctagtttacattgtttcagaaa

SEQ ID NO: 215149 - DNA, 22 bp, Artificial sequence
  SiRNA target sequence
tagtttacattgtttcagaaat

SEQ ID NO: 215150 - DNA, 22 bp, Artificial sequence
  SiRNA target sequence
agtttacattgtttcagaaatg

SEQ ID NO: 215151 - DNA, 22 bp, Artificial sequence
  SiRNA target sequence
gtttacattgtttcagaaatgt

SEQ ID NO: 215152 - DNA, 22 bp, Artificial sequence
  SiRNA target sequence
tttacattgtttcagaaatgtt

SEQ ID NO: 215153 - DNA, 22 bp, Artificial sequence
  SiRNA target sequence
ttacattgtttcagaaatgttt

SEQ ID NO: 215154 - DNA, 22 bp, Artificial sequence
  SiRNA target sequence
tacattgtttcagaaatgtttg

SEQ ID NO: 215155 - DNA, 22 bp, Artificial sequence
  SiRNA target sequence
acattgtttcagaaatgtttgg

SEQ ID NO: 215156 - DNA, 22 bp, Artificial sequence
  SiRNA target sequence
cattgtttcagaaatgtttggt

SEQ ID NO: 215157 - DNA, 22 bp, Artificial sequence
  SiRNA target sequence
attgtttcagaaatgtttggta

SEQ ID NO: 215158 - DNA, 22 bp, Artificial sequence
  SiRNA target sequence
ttgtttcagaaatgtttggtaa

SEQ ID NO: 215159 - DNA, 22 bp, Artificial sequence
  SiRNA target sequence
tgtttcagaaatgtttggtaat

SEQ ID NO: 215160 - DNA, 22 bp, Artificial sequence
  SiRNA target sequence
gtttcagaaatgtttggtaatt

SEQ ID NO: 215161 - DNA, 22 bp, Artificial sequence
  SiRNA target sequence
tttcagaaatgtttggtaattt

SEQ ID NO: 215162 - DNA, 22 bp, Artificial sequence
  SiRNA target sequence
ttcagaaatgtttggtaattta

SEQ ID NO: 215163 - DNA, 22 bp, Artificial sequence
  SiRNA target sequence
tcagaaatgtttggtaatttag

SEQ ID NO: 215164 - DNA, 22 bp, Artificial sequence
  SiRNA target sequence
cagaaatgtttggtaatttagt

SEQ ID NO: 215165 - DNA, 22 bp, Artificial sequence
  SiRNA target sequence
agaaatgtttggtaatttagta

SEQ ID NO: 215166 - DNA, 22 bp, Artificial sequence
  SiRNA target sequence
gaaatgtttggtaatttagtat

SEQ ID NO: 215167 - DNA, 22 bp, Artificial sequence
  SiRNA target sequence
aaatgtttggtaatttagtatt

SEQ ID NO: 215168 - DNA, 22 bp, Artificial sequence
  SiRNA target sequence
aatgtttggtaatttagtattg

SEQ ID NO: 215169 - DNA, 22 bp, Artificial sequence
  SiRNA target sequence
atgtttggtaatttagtattgt

SEQ ID NO: 215170 - DNA, 22 bp, Artificial sequence
  SiRNA target sequence
tgtttggtaatttagtattgtc

SEQ ID NO: 215171 - DNA, 22 bp, Artificial sequence
  SiRNA target sequence
gtttggtaatttagtattgtct

SEQ ID NO: 215172 - DNA, 22 bp, Artificial sequence
  SiRNA target sequence
tttggtaatttagtattgtctt

SEQ ID NO: 215173 - DNA, 22 bp, Artificial sequence
  SiRNA target sequence
ttggtaatttagtattgtctta

SEQ ID NO: 215174 - DNA, 22 bp, Artificial sequence
  SiRNA target sequence
tggtaatttagtattgtcttat

SEQ ID NO: 215175 - DNA, 22 bp, Artificial sequence
  SiRNA target sequence
ggtaatttagtattgtcttatt

SEQ ID NO: 215176 - DNA, 22 bp, Artificial sequence
  SiRNA target sequence
gtaatttagtattgtcttattt

SEQ ID NO: 215177 - DNA, 22 bp, Artificial sequence
  SiRNA target sequence
taatttagtattgtcttatttc

SEQ ID NO: 215178 - DNA, 22 bp, Artificial sequence
  SiRNA target sequence
aatttagtattgtcttatttct

SEQ ID NO: 215179 - DNA, 22 bp, Artificial sequence
  SiRNA target sequence
atttagtattgtcttatttctt

SEQ ID NO: 215180 - DNA, 22 bp, Artificial sequence
  SiRNA target sequence
tttagtattgtcttatttcttc

SEQ ID NO: 215181 - DNA, 22 bp, Artificial sequence
  SiRNA target sequence
ttagtattgtcttatttcttct

SEQ ID NO: 215182 - DNA, 22 bp, Artificial sequence
  SiRNA target sequence
tagtattgtcttatttcttctt

SEQ ID NO: 215183 - DNA, 22 bp, Artificial sequence
  SiRNA target sequence
agtattgtcttatttcttcttg

SEQ ID NO: 215184 - DNA, 22 bp, Artificial sequence
  SiRNA target sequence
gtattgtcttatttcttcttga

SEQ ID NO: 215185 - DNA, 22 bp, Artificial sequence
  SiRNA target sequence
tattgtcttatttcttcttgac

SEQ ID NO: 215186 - DNA, 22 bp, Artificial sequence
  SiRNA target sequence
attgtcttatttcttcttgacg

SEQ ID NO: 215187 - DNA, 22 bp, Artificial sequence
  SiRNA target sequence
ttgtcttatttcttcttgacgt

SEQ ID NO: 215188 - DNA, 22 bp, Artificial sequence
  SiRNA target sequence
tgtcttatttcttcttgacgtt

SEQ ID NO: 215189 - DNA, 22 bp, Artificial sequence
  SiRNA target sequence
gtcttatttcttcttgacgttt

SEQ ID NO: 215190 - DNA, 22 bp, Artificial sequence
  SiRNA target sequence
tcttatttcttcttgacgtttg

SEQ ID NO: 215191 - DNA, 22 bp, Artificial sequence
  SiRNA target sequence
cttatttcttcttgacgtttgc

SEQ ID NO: 215192 - DNA, 22 bp, Artificial sequence
  SiRNA target sequence
ttatttcttcttgacgtttgct

SEQ ID NO: 215193 - DNA, 22 bp, Artificial sequence
  SiRNA target sequence
tatttcttcttgacgtttgcta

SEQ ID NO: 215194 - DNA, 22 bp, Artificial sequence
  SiRNA target sequence
atttcttcttgacgtttgctaa

SEQ ID NO: 215195 - DNA, 22 bp, Artificial sequence
  SiRNA target sequence
tttcttcttgacgtttgctaat

SEQ ID NO: 215196 - DNA, 22 bp, Artificial sequence
  SiRNA target sequence
ttcttcttgacgtttgctaatt

SEQ ID NO: 215197 - DNA, 22 bp, Artificial sequence
  SiRNA target sequence
tcttcttgacgtttgctaattc

SEQ ID NO: 215198 - DNA, 22 bp, Artificial sequence
  SiRNA target sequence
cttcttgacgtttgctaattct

SEQ ID NO: 215199 - DNA, 22 bp, Artificial sequence
  SiRNA target sequence
ttcttgacgtttgctaattctt

SEQ ID NO: 215200 - DNA, 22 bp, Artificial sequence
  SiRNA target sequence
tcttgacgtttgctaattcttt

SEQ ID NO: 215201 - DNA, 22 bp, Artificial sequence
  SiRNA target sequence
cttgacgtttgctaattcttta

SEQ ID NO: 215202 - DNA, 22 bp, Artificial sequence
  SiRNA target sequence
ttgacgtttgctaattctttaa

SEQ ID NO: 215203 - DNA, 22 bp, Artificial sequence
  SiRNA target sequence
tgacgtttgctaattctttaac

SEQ ID NO: 215204 - DNA, 22 bp, Artificial sequence
  SiRNA target sequence
gacgtttgctaattctttaaca

SEQ ID NO: 215205 - DNA, 22 bp, Artificial sequence
  SiRNA target sequence
acgtttgctaattctttaacaa

SEQ ID NO: 215206 - DNA, 22 bp, Artificial sequence
  SiRNA target sequence
cgtttgctaattctttaacaac

SEQ ID NO: 215207 - DNA, 22 bp, Artificial sequence
  SiRNA target sequence
gtttgctaattctttaacaact

SEQ ID NO: 215208 - DNA, 22 bp, Artificial sequence
  SiRNA target sequence
tttgctaattctttaacaactc

SEQ ID NO: 215209 - DNA, 22 bp, Artificial sequence
  SiRNA target sequence
ttgctaattctttaacaactcc

SEQ ID NO: 215210 - DNA, 22 bp, Artificial sequence
  SiRNA target sequence
tgctaattctttaacaactcca

SEQ ID NO: 215211 - DNA, 22 bp, Artificial sequence
  SiRNA target sequence
gctaattctttaacaactccag

SEQ ID NO: 215212 - DNA, 22 bp, Artificial sequence
  SiRNA target sequence
ctaattctttaacaactccagg

SEQ ID NO: 215213 - DNA, 22 bp, Artificial sequence
  SiRNA target sequence
taattctttaacaactccagga

SEQ ID NO: 215214 - DNA, 22 bp, Artificial sequence
  SiRNA target sequence
aattctttaacaactccaggac

SEQ ID NO: 215215 - DNA, 22 bp, Artificial sequence
  SiRNA target sequence
attctttaacaactccaggaca

SEQ ID NO: 215216 - DNA, 22 bp, Artificial sequence
  SiRNA target sequence
ttctttaacaactccaggacaa

SEQ ID NO: 215217 - DNA, 22 bp, Artificial sequence
  SiRNA target sequence
tctttaacaactccaggacaaa

SEQ ID NO: 215218 - DNA, 22 bp, Artificial sequence
  SiRNA target sequence
ctttaacaactccaggacaaag

SEQ ID NO: 215219 - DNA, 22 bp, Artificial sequence
  SiRNA target sequence
tttaacaactccaggacaaagt

SEQ ID NO: 215220 - DNA, 22 bp, Artificial sequence
  SiRNA target sequence
ttaacaactccaggacaaagtg

SEQ ID NO: 215221 - DNA, 22 bp, Artificial sequence
  SiRNA target sequence
taacaactccaggacaaagtgc

SEQ ID NO: 215222 - DNA, 22 bp, Artificial sequence
  SiRNA target sequence
aacaactccaggacaaagtgca

SEQ ID NO: 215223 - DNA, 22 bp, Artificial sequence
  SiRNA target sequence
acaactccaggacaaagtgcaa

SEQ ID NO: 215224 - DNA, 22 bp, Artificial sequence
  SiRNA target sequence
caactccaggacaaagtgcaag

SEQ ID NO: 215225 - DNA, 22 bp, Artificial sequence
  SiRNA target sequence
aactccaggacaaagtgcaaga

SEQ ID NO: 215226 - DNA, 22 bp, Artificial sequence
  SiRNA target sequence
actccaggacaaagtgcaagat

SEQ ID NO: 215227 - DNA, 22 bp, Artificial sequence
  SiRNA target sequence
ctccaggacaaagtgcaagatt

SEQ ID NO: 215228 - DNA, 22 bp, Artificial sequence
  SiRNA target sequence
tccaggacaaagtgcaagattc

SEQ ID NO: 215229 - DNA, 22 bp, Artificial sequence
  SiRNA target sequence
ccaggacaaagtgcaagattca

SEQ ID NO: 215230 - DNA, 22 bp, Artificial sequence
  SiRNA target sequence
caggacaaagtgcaagattcat

SEQ ID NO: 215231 - DNA, 22 bp, Artificial sequence
  SiRNA target sequence
aggacaaagtgcaagattcata

SEQ ID NO: 215232 - DNA, 22 bp, Artificial sequence
  SiRNA target sequence
ggacaaagtgcaagattcatac

SEQ ID NO: 215233 - DNA, 22 bp, Artificial sequence
  SiRNA target sequence
gacaaagtgcaagattcatacc

SEQ ID NO: 215234 - DNA, 22 bp, Artificial sequence
  SiRNA target sequence
acaaagtgcaagattcatacct

SEQ ID NO: 215235 - DNA, 22 bp, Artificial sequence
  SiRNA target sequence
caaagtgcaagattcatacctt

SEQ ID NO: 215236 - DNA, 22 bp, Artificial sequence
  SiRNA target sequence
aaagtgcaagattcataccttt

SEQ ID NO: 215237 - DNA, 22 bp, Artificial sequence
  SiRNA target sequence
aagtgcaagattcataccttta

SEQ ID NO: 215238 - DNA, 22 bp, Artificial sequence
  SiRNA target sequence
agtgcaagattcatacctttat

SEQ ID NO: 215239 - DNA, 22 bp, Artificial sequence
  SiRNA target sequence
gtgcaagattcatacctttatt

SEQ ID NO: 215240 - DNA, 22 bp, Artificial sequence
  SiRNA target sequence
tgcaagattcatacctttattt

SEQ ID NO: 215241 - DNA, 22 bp, Artificial sequence
  SiRNA target sequence
gcaagattcatacctttatttt

SEQ ID NO: 215242 - DNA, 22 bp, Artificial sequence
  SiRNA target sequence
caagattcatacctttatttta

SEQ ID NO: 215243 - DNA, 22 bp, Artificial sequence
  SiRNA target sequence
aagattcatacctttattttat

SEQ ID NO: 215244 - DNA, 22 bp, Artificial sequence
  SiRNA target sequence
agattcatacctttattttatg

SEQ ID NO: 215245 - DNA, 22 bp, Artificial sequence
  SiRNA target sequence
gattcatacctttattttatgt

SEQ ID NO: 215246 - DNA, 22 bp, Artificial sequence
  SiRNA target sequence
attcatacctttattttatgtt

SEQ ID NO: 215247 - DNA, 22 bp, Artificial sequence
  SiRNA target sequence
ttcatacctttattttatgttt

SEQ ID NO: 215248 - DNA, 22 bp, Artificial sequence
  SiRNA target sequence
tcatacctttattttatgtttt

SEQ ID NO: 215249 - DNA, 22 bp, Artificial sequence
  SiRNA target sequence
catacctttattttatgttttc

SEQ ID NO: 215250 - DNA, 22 bp, Artificial sequence
  SiRNA target sequence
atacctttattttatgttttct

SEQ ID NO: 215251 - DNA, 22 bp, Artificial sequence
  SiRNA target sequence
tacctttattttatgttttctc

SEQ ID NO: 215252 - DNA, 22 bp, Artificial sequence
  SiRNA target sequence
acctttattttatgttttctcg

SEQ ID NO: 215253 - DNA, 22 bp, Artificial sequence
  SiRNA target sequence
cctttattttatgttttctcga

SEQ ID NO: 215254 - DNA, 22 bp, Artificial sequence
  SiRNA target sequence
ctttattttatgttttctcgaa

SEQ ID NO: 215255 - DNA, 22 bp, Artificial sequence
  SiRNA target sequence
tttattttatgttttctcgaat

SEQ ID NO: 215256 - DNA, 22 bp, Artificial sequence
  SiRNA target sequence
ttattttatgttttctcgaata

SEQ ID NO: 215257 - DNA, 22 bp, Artificial sequence
  SiRNA target sequence
tattttatgttttctcgaatat

SEQ ID NO: 215258 - DNA, 22 bp, Artificial sequence
  SiRNA target sequence
attttatgttttctcgaatatt

SEQ ID NO: 215259 - DNA, 22 bp, Artificial sequence
  SiRNA target sequence
ttttatgttttctcgaatattt

SEQ ID NO: 215260 - DNA, 22 bp, Artificial sequence
  SiRNA target sequence
tttatgttttctcgaatatttc

SEQ ID NO: 215261 - DNA, 22 bp, Artificial sequence
  SiRNA target sequence
ttatgttttctcgaatatttct

SEQ ID NO: 215262 - DNA, 22 bp, Artificial sequence
  SiRNA target sequence
tatgttttctcgaatatttctc

SEQ ID NO: 215263 - DNA, 22 bp, Artificial sequence
  SiRNA target sequence
atgttttctcgaatatttctct

SEQ ID NO: 215264 - DNA, 22 bp, Artificial sequence
  SiRNA target sequence
tgttttctcgaatatttctctt

SEQ ID NO: 215265 - DNA, 22 bp, Artificial sequence
  SiRNA target sequence
gttttctcgaatatttctcttt

SEQ ID NO: 215266 - DNA, 22 bp, Artificial sequence
  SiRNA target sequence
ttttctcgaatatttctctttt

SEQ ID NO: 215267 - DNA, 22 bp, Artificial sequence
  SiRNA target sequence
tttctcgaatatttctcttttc

SEQ ID NO: 215268 - DNA, 22 bp, Artificial sequence
  SiRNA target sequence
ttctcgaatatttctcttttct

SEQ ID NO: 215269 - DNA, 22 bp, Artificial sequence
  SiRNA target sequence
tctcgaatatttctcttttctt

SEQ ID NO: 215270 - DNA, 22 bp, Artificial sequence
  SiRNA target sequence
ctcgaatatttctcttttctta

SEQ ID NO: 215271 - DNA, 22 bp, Artificial sequence
  SiRNA target sequence
tcgaatatttctcttttcttat

SEQ ID NO: 215272 - DNA, 22 bp, Artificial sequence
  SiRNA target sequence
cgaatatttctcttttcttatc

SEQ ID NO: 215273 - DNA, 22 bp, Artificial sequence
  SiRNA target sequence
gaatatttctcttttcttatct

SEQ ID NO: 215274 - DNA, 22 bp, Artificial sequence
  SiRNA target sequence
aatatttctcttttcttatctt

SEQ ID NO: 215275 - DNA, 22 bp, Artificial sequence
  SiRNA target sequence
atatttctcttttcttatcttc

SEQ ID NO: 215276 - DNA, 22 bp, Artificial sequence
  SiRNA target sequence
tatttctcttttcttatcttct

SEQ ID NO: 215277 - DNA, 22 bp, Artificial sequence
  SiRNA target sequence
atttctcttttcttatcttctc

SEQ ID NO: 215278 - DNA, 22 bp, Artificial sequence
  SiRNA target sequence
tttctcttttcttatcttctca

SEQ ID NO: 215279 - DNA, 22 bp, Artificial sequence
  SiRNA target sequence
ttctcttttcttatcttctcaa

SEQ ID NO: 215280 - DNA, 22 bp, Artificial sequence
  SiRNA target sequence
tctcttttcttatcttctcaag

SEQ ID NO: 215281 - DNA, 22 bp, Artificial sequence
  SiRNA target sequence
ctcttttcttatcttctcaagt

SEQ ID NO: 215282 - DNA, 22 bp, Artificial sequence
  SiRNA target sequence
tcttttcttatcttctcaagtg

SEQ ID NO: 215283 - DNA, 22 bp, Artificial sequence
  SiRNA target sequence
cttttcttatcttctcaagtga

SEQ ID NO: 215284 - DNA, 22 bp, Artificial sequence
  SiRNA target sequence
ttttcttatcttctcaagtgac

SEQ ID NO: 215285 - DNA, 22 bp, Artificial sequence
  SiRNA target sequence
tttcttatcttctcaagtgaca

SEQ ID NO: 215286 - DNA, 22 bp, Artificial sequence
  SiRNA target sequence
ttcttatcttctcaagtgacag

SEQ ID NO: 215287 - DNA, 22 bp, Artificial sequence
  SiRNA target sequence
tcttatcttctcaagtgacaga

SEQ ID NO: 215288 - DNA, 22 bp, Artificial sequence
  SiRNA target sequence
cttatcttctcaagtgacagaa

SEQ ID NO: 215289 - DNA, 22 bp, Artificial sequence
  SiRNA target sequence
ttatcttctcaagtgacagaac

SEQ ID NO: 215290 - DNA, 22 bp, Artificial sequence
  SiRNA target sequence
tatcttctcaagtgacagaact

SEQ ID NO: 215291 - DNA, 22 bp, Artificial sequence
  SiRNA target sequence
atcttctcaagtgacagaactt

SEQ ID NO: 215292 - DNA, 22 bp, Artificial sequence
  SiRNA target sequence
tcttctcaagtgacagaacttt

SEQ ID NO: 215293 - DNA, 22 bp, Artificial sequence
  SiRNA target sequence
cttctcaagtgacagaactttt

SEQ ID NO: 215294 - DNA, 22 bp, Artificial sequence
  SiRNA target sequence
ttctcaagtgacagaacttttt

SEQ ID NO: 215295 - DNA, 22 bp, Artificial sequence
  SiRNA target sequence
tctcaagtgacagaacttttta

SEQ ID NO: 215296 - DNA, 22 bp, Artificial sequence
  SiRNA target sequence
ctcaagtgacagaactttttac

SEQ ID NO: 215297 - DNA, 22 bp, Artificial sequence
  SiRNA target sequence
tcaagtgacagaactttttaca

SEQ ID NO: 215298 - DNA, 22 bp, Artificial sequence
  SiRNA target sequence
caagtgacagaactttttacaa

SEQ ID NO: 215299 - DNA, 22 bp, Artificial sequence
  SiRNA target sequence
aagtgacagaactttttacaag

SEQ ID NO: 215300 - DNA, 22 bp, Artificial sequence
  SiRNA target sequence
agtgacagaactttttacaaga

SEQ ID NO: 215301 - DNA, 22 bp, Artificial sequence
  SiRNA target sequence
gtgacagaactttttacaagat

SEQ ID NO: 215302 - DNA, 22 bp, Artificial sequence
  SiRNA target sequence
tgacagaactttttacaagata

SEQ ID NO: 215303 - DNA, 22 bp, Artificial sequence
  SiRNA target sequence
gacagaactttttacaagatat

SEQ ID NO: 215304 - DNA, 22 bp, Artificial sequence
  SiRNA target sequence
acagaactttttacaagatata

SEQ ID NO: 215305 - DNA, 22 bp, Artificial sequence
  SiRNA target sequence
cagaactttttacaagatatag

SEQ ID NO: 215306 - DNA, 22 bp, Artificial sequence
  SiRNA target sequence
agaactttttacaagatataga

SEQ ID NO: 215307 - DNA, 22 bp, Artificial sequence
  SiRNA target sequence
gaactttttacaagatatagat

SEQ ID NO: 215308 - DNA, 22 bp, Artificial sequence
  SiRNA target sequence
aactttttacaagatatagatc

SEQ ID NO: 215309 - DNA, 22 bp, Artificial sequence
  SiRNA target sequence
actttttacaagatatagatca

SEQ ID NO: 215310 - DNA, 22 bp, Artificial sequence
  SiRNA target sequence
ctttttacaagatatagatcaa

SEQ ID NO: 215311 - DNA, 22 bp, Artificial sequence
  SiRNA target sequence
tttttacaagatatagatcaaa

SEQ ID NO: 215312 - DNA, 22 bp, Artificial sequence
  SiRNA target sequence
ttttacaagatatagatcaaag

SEQ ID NO: 215313 - DNA, 22 bp, Artificial sequence
  SiRNA target sequence
tttacaagatatagatcaaagc

SEQ ID NO: 215314 - DNA, 22 bp, Artificial sequence
  SiRNA target sequence
ttacaagatatagatcaaagct

SEQ ID NO: 215315 - DNA, 22 bp, Artificial sequence
  SiRNA target sequence
tacaagatatagatcaaagctc

SEQ ID NO: 215316 - DNA, 22 bp, Artificial sequence
  SiRNA target sequence
acaagatatagatcaaagctca

SEQ ID NO: 215317 - DNA, 22 bp, Artificial sequence
  SiRNA target sequence
caagatatagatcaaagctcac

SEQ ID NO: 215318 - DNA, 22 bp, Artificial sequence
  SiRNA target sequence
aagatatagatcaaagctcact

SEQ ID NO: 215319 - DNA, 22 bp, Artificial sequence
  SiRNA target sequence
agatatagatcaaagctcactt

SEQ ID NO: 215320 - DNA, 22 bp, Artificial sequence
  SiRNA target sequence
gatatagatcaaagctcacttt

SEQ ID NO: 215321 - DNA, 22 bp, Artificial sequence
  SiRNA target sequence
atatagatcaaagctcactttc

SEQ ID NO: 215322 - DNA, 22 bp, Artificial sequence
  SiRNA target sequence
tatagatcaaagctcactttct

SEQ ID NO: 215323 - DNA, 22 bp, Artificial sequence
  SiRNA target sequence
atagatcaaagctcactttctc

SEQ ID NO: 215324 - DNA, 22 bp, Artificial sequence
  SiRNA target sequence
tagatcaaagctcactttctca

SEQ ID NO: 215325 - DNA, 22 bp, Artificial sequence
  SiRNA target sequence
agatcaaagctcactttctcag

SEQ ID NO: 215326 - DNA, 22 bp, Artificial sequence
  SiRNA target sequence
gatcaaagctcactttctcaga

SEQ ID NO: 215327 - DNA, 22 bp, Artificial sequence
  SiRNA target sequence
atcaaagctcactttctcagag

SEQ ID NO: 215328 - DNA, 22 bp, Artificial sequence
  SiRNA target sequence
tcaaagctcactttctcagagg

SEQ ID NO: 215329 - DNA, 22 bp, Artificial sequence
  SiRNA target sequence
caaagctcactttctcagaggc

SEQ ID NO: 215330 - DNA, 22 bp, Artificial sequence
  SiRNA target sequence
aaagctcactttctcagaggcg

SEQ ID NO: 215331 - DNA, 22 bp, Artificial sequence
  SiRNA target sequence
aagctcactttctcagaggcgg

SEQ ID NO: 215332 - DNA, 22 bp, Artificial sequence
  SiRNA target sequence
agctcactttctcagaggcgga

SEQ ID NO: 215333 - DNA, 22 bp, Artificial sequence
  SiRNA target sequence
gctcactttctcagaggcggaa

SEQ ID NO: 215334 - DNA, 22 bp, Artificial sequence
  SiRNA target sequence
ctcactttctcagaggcggaat

SEQ ID NO: 215335 - DNA, 22 bp, Artificial sequence
  SiRNA target sequence
tcactttctcagaggcggaatt

SEQ ID NO: 215336 - DNA, 22 bp, Artificial sequence
  SiRNA target sequence
cactttctcagaggcggaattt

SEQ ID NO: 215337 - DNA, 22 bp, Artificial sequence
  SiRNA target sequence
actttctcagaggcggaatttt

SEQ ID NO: 215338 - DNA, 22 bp, Artificial sequence
  SiRNA target sequence
ctttctcagaggcggaattttt

SEQ ID NO: 215339 - DNA, 22 bp, Artificial sequence
  SiRNA target sequence
tttctcagaggcggaattttta

SEQ ID NO: 215340 - DNA, 22 bp, Artificial sequence
  SiRNA target sequence
ttctcagaggcggaatttttat

SEQ ID NO: 215341 - DNA, 22 bp, Artificial sequence
  SiRNA target sequence
tctcagaggcggaatttttata

SEQ ID NO: 215342 - DNA, 22 bp, Artificial sequence
  SiRNA target sequence
ctcagaggcggaatttttatat

SEQ ID NO: 215343 - DNA, 22 bp, Artificial sequence
  SiRNA target sequence
tcagaggcggaatttttatata

SEQ ID NO: 215344 - DNA, 22 bp, Artificial sequence
  SiRNA target sequence
cagaggcggaatttttatataa

SEQ ID NO: 215345 - DNA, 22 bp, Artificial sequence
  SiRNA target sequence
agaggcggaatttttatataat

SEQ ID NO: 215346 - DNA, 22 bp, Artificial sequence
  SiRNA target sequence
gaggcggaatttttatataatg

SEQ ID NO: 215347 - DNA, 22 bp, Artificial sequence
  SiRNA target sequence
aggcggaatttttatataatgg

SEQ ID NO: 215348 - DNA, 22 bp, Artificial sequence
  SiRNA target sequence
ggcggaatttttatataatggc

SEQ ID NO: 215349 - DNA, 22 bp, Artificial sequence
  SiRNA target sequence
gcggaatttttatataatggct

SEQ ID NO: 215350 - DNA, 22 bp, Artificial sequence
  SiRNA target sequence
cggaatttttatataatggctt

SEQ ID NO: 215351 - DNA, 22 bp, Artificial sequence
  SiRNA target sequence
ggaatttttatataatggcttt

SEQ ID NO: 215352 - DNA, 22 bp, Artificial sequence
  SiRNA target sequence
gaatttttatataatggctttt

SEQ ID NO: 215353 - DNA, 22 bp, Artificial sequence
  SiRNA target sequence
aatttttatataatggcttttt

SEQ ID NO: 215354 - DNA, 22 bp, Artificial sequence
  SiRNA target sequence
atttttatataatggctttttt

SEQ ID NO: 215355 - DNA, 22 bp, Artificial sequence
  SiRNA target sequence
tttttatataatggcttttttg

SEQ ID NO: 215356 - DNA, 22 bp, Artificial sequence
  SiRNA target sequence
ttttatataatggcttttttgt

SEQ ID NO: 215357 - DNA, 22 bp, Artificial sequence
  SiRNA target sequence
tttatataatggcttttttgta

SEQ ID NO: 215358 - DNA, 22 bp, Artificial sequence
  SiRNA target sequence
ttatataatggcttttttgtat

SEQ ID NO: 215359 - DNA, 22 bp, Artificial sequence
  SiRNA target sequence
tatataatggcttttttgtatt

SEQ ID NO: 215360 - DNA, 22 bp, Artificial sequence
  SiRNA target sequence
atataatggcttttttgtattt

SEQ ID NO: 215361 - DNA, 22 bp, Artificial sequence
  SiRNA target sequence
tataatggcttttttgtatttt

SEQ ID NO: 215362 - DNA, 22 bp, Artificial sequence
  SiRNA target sequence
ataatggcttttttgtattttc

SEQ ID NO: 215363 - DNA, 22 bp, Artificial sequence
  SiRNA target sequence
taatggcttttttgtattttct

SEQ ID NO: 215364 - DNA, 22 bp, Artificial sequence
  SiRNA target sequence
aatggcttttttgtattttctg

SEQ ID NO: 215365 - DNA, 22 bp, Artificial sequence
  SiRNA target sequence
atggcttttttgtattttctgg

SEQ ID NO: 215366 - DNA, 22 bp, Artificial sequence
  SiRNA target sequence
tggcttttttgtattttctgga

SEQ ID NO: 215367 - DNA, 22 bp, Artificial sequence
  SiRNA target sequence
ggcttttttgtattttctggag

SEQ ID NO: 215368 - DNA, 22 bp, Artificial sequence
  SiRNA target sequence
gcttttttgtattttctggagt

SEQ ID NO: 215369 - DNA, 22 bp, Artificial sequence
  SiRNA target sequence
cttttttgtattttctggagtt

SEQ ID NO: 215370 - DNA, 22 bp, Artificial sequence
  SiRNA target sequence
ttttttgtattttctggagttc

SEQ ID NO: 215371 - DNA, 22 bp, Artificial sequence
  SiRNA target sequence
tttttgtattttctggagttct

SEQ ID NO: 215372 - DNA, 22 bp, Artificial sequence
  SiRNA target sequence
ttttgtattttctggagttcta

SEQ ID NO: 215373 - DNA, 22 bp, Artificial sequence
  SiRNA target sequence
tttgtattttctggagttctag

SEQ ID NO: 215374 - DNA, 22 bp, Artificial sequence
  SiRNA target sequence
ttgtattttctggagttctagt

SEQ ID NO: 215375 - DNA, 22 bp, Artificial sequence
  SiRNA target sequence
tgtattttctggagttctagta

SEQ ID NO: 215376 - DNA, 22 bp, Artificial sequence
  SiRNA target sequence
gtattttctggagttctagtaa

SEQ ID NO: 215377 - DNA, 22 bp, Artificial sequence
  SiRNA target sequence
tattttctggagttctagtaat

SEQ ID NO: 215378 - DNA, 22 bp, Artificial sequence
  SiRNA target sequence
attttctggagttctagtaata

SEQ ID NO: 215379 - DNA, 22 bp, Artificial sequence
  SiRNA target sequence
ttttctggagttctagtaatag

SEQ ID NO: 215380 - DNA, 22 bp, Artificial sequence
  SiRNA target sequence
tttctggagttctagtaatagt

SEQ ID NO: 215381 - DNA, 22 bp, Artificial sequence
  SiRNA target sequence
ttctggagttctagtaatagtt

SEQ ID NO: 215382 - DNA, 22 bp, Artificial sequence
  SiRNA target sequence
tctggagttctagtaatagtta

SEQ ID NO: 215383 - DNA, 22 bp, Artificial sequence
  SiRNA target sequence
ctggagttctagtaatagttat

SEQ ID NO: 215384 - DNA, 22 bp, Artificial sequence
  SiRNA target sequence
tggagttctagtaatagttata

SEQ ID NO: 215385 - DNA, 22 bp, Artificial sequence
  SiRNA target sequence
ggagttctagtaatagttatat

SEQ ID NO: 215386 - DNA, 22 bp, Artificial sequence
  SiRNA target sequence
gagttctagtaatagttatatt

SEQ ID NO: 215387 - DNA, 22 bp, Artificial sequence
  SiRNA target sequence
agttctagtaatagttatattt

SEQ ID NO: 215388 - DNA, 22 bp, Artificial sequence
  SiRNA target sequence
gttctagtaatagttatatttt

SEQ ID NO: 215389 - DNA, 22 bp, Artificial sequence
  SiRNA target sequence
ttctagtaatagttatattttt

SEQ ID NO: 215390 - DNA, 22 bp, Artificial sequence
  SiRNA target sequence
tctagtaatagttatattttta

SEQ ID NO: 215391 - DNA, 22 bp, Artificial sequence
  SiRNA target sequence
ctagtaatagttatatttttaa

SEQ ID NO: 215392 - DNA, 22 bp, Artificial sequence
  SiRNA target sequence
tagtaatagttatatttttaat

SEQ ID NO: 215393 - DNA, 22 bp, Artificial sequence
  SiRNA target sequence
agtaatagttatatttttaatt

SEQ ID NO: 215394 - DNA, 22 bp, Artificial sequence
  SiRNA target sequence
gtaatagttatatttttaatta

SEQ ID NO: 215395 - DNA, 22 bp, Artificial sequence
  SiRNA target sequence
taatagttatatttttaattaa

SEQ ID NO: 215396 - DNA, 22 bp, Artificial sequence
  SiRNA target sequence
aatagttatatttttaattaaa

SEQ ID NO: 215397 - DNA, 22 bp, Artificial sequence
  SiRNA target sequence
atagttatatttttaattaaaa

SEQ ID NO: 215398 - DNA, 22 bp, Artificial sequence
  SiRNA target sequence
tagttatatttttaattaaaaa

SEQ ID NO: 215399 - DNA, 22 bp, Artificial sequence
  SiRNA target sequence
agttatatttttaattaaaaaa

SEQ ID NO: 215400 - DNA, 22 bp, Artificial sequence
  SiRNA target sequence
gttatatttttaattaaaaaat

SEQ ID NO: 215401 - DNA, 22 bp, Artificial sequence
  SiRNA target sequence
ttatatttttaattaaaaaata

SEQ ID NO: 215402 - DNA, 22 bp, Artificial sequence
  SiRNA target sequence
tatatttttaattaaaaaatat

SEQ ID NO: 215403 - DNA, 22 bp, Artificial sequence
  SiRNA target sequence
atatttttaattaaaaaatatt

SEQ ID NO: 215404 - DNA, 22 bp, Artificial sequence
  SiRNA target sequence
tatttttaattaaaaaatattt

SEQ ID NO: 215405 - DNA, 22 bp, Artificial sequence
  SiRNA target sequence
atttttaattaaaaaatatttg

SEQ ID NO: 215406 - DNA, 22 bp, Artificial sequence
  SiRNA target sequence
tttttaattaaaaaatatttgg

SEQ ID NO: 215407 - DNA, 22 bp, Artificial sequence
  SiRNA target sequence
ttttaattaaaaaatatttgga

SEQ ID NO: 215408 - DNA, 22 bp, Artificial sequence
  SiRNA target sequence
tttaattaaaaaatatttggag

SEQ ID NO: 215409 - DNA, 22 bp, Artificial sequence
  SiRNA target sequence
ttaattaaaaaatatttggaga

SEQ ID NO: 215410 - DNA, 22 bp, Artificial sequence
  SiRNA target sequence
taattaaaaaatatttggagag

SEQ ID NO: 215411 - DNA, 22 bp, Artificial sequence
  SiRNA target sequence
aattaaaaaatatttggagagg

SEQ ID NO: 215412 - DNA, 22 bp, Artificial sequence
  SiRNA target sequence
attaaaaaatatttggagagga

SEQ ID NO: 215413 - DNA, 22 bp, Artificial sequence
  SiRNA target sequence
ttaaaaaatatttggagaggaa

SEQ ID NO: 215414 - DNA, 22 bp, Artificial sequence
  SiRNA target sequence
taaaaaatatttggagaggaat

SEQ ID NO: 215415 - DNA, 22 bp, Artificial sequence
  SiRNA target sequence
aaaaaatatttggagaggaatg

SEQ ID NO: 215416 - DNA, 22 bp, Artificial sequence
  SiRNA target sequence
aaaaatatttggagaggaatgt

SEQ ID NO: 215417 - DNA, 22 bp, Artificial sequence
  SiRNA target sequence
aaaatatttggagaggaatgtg

SEQ ID NO: 215418 - DNA, 22 bp, Artificial sequence
  SiRNA target sequence
aaatatttggagaggaatgtga

SEQ ID NO: 215419 - DNA, 22 bp, Artificial sequence
  SiRNA target sequence
aatatttggagaggaatgtgac

SEQ ID NO: 215420 - DNA, 22 bp, Artificial sequence
  SiRNA target sequence
atatttggagaggaatgtgact

SEQ ID NO: 215421 - DNA, 22 bp, Artificial sequence
  SiRNA target sequence
tatttggagaggaatgtgacta

SEQ ID NO: 215422 - DNA, 22 bp, Artificial sequence
  SiRNA target sequence
atttggagaggaatgtgactaa

SEQ ID NO: 215423 - DNA, 22 bp, Artificial sequence
  SiRNA target sequence
tttggagaggaatgtgactaac

SEQ ID NO: 215424 - DNA, 22 bp, Artificial sequence
  SiRNA target sequence
ttggagaggaatgtgactaaca

SEQ ID NO: 215425 - DNA, 22 bp, Artificial sequence
  SiRNA target sequence
tggagaggaatgtgactaacaa

SEQ ID NO: 215426 - DNA, 22 bp, Artificial sequence
  SiRNA target sequence
ggagaggaatgtgactaacaaa

SEQ ID NO: 215427 - DNA, 22 bp, Artificial sequence
  SiRNA target sequence
gagaggaatgtgactaacaaac

SEQ ID NO: 215428 - DNA, 22 bp, Artificial sequence
  SiRNA target sequence
agaggaatgtgactaacaaacc

SEQ ID NO: 215429 - DNA, 22 bp, Artificial sequence
  SiRNA target sequence
gaggaatgtgactaacaaacct

SEQ ID NO: 215430 - DNA, 22 bp, Artificial sequence
  SiRNA target sequence
aggaatgtgactaacaaacctt

SEQ ID NO: 215431 - DNA, 22 bp, Artificial sequence
  SiRNA target sequence
ggaatgtgactaacaaaccttt

SEQ ID NO: 215432 - DNA, 22 bp, Artificial sequence
  SiRNA target sequence
gaatgtgactaacaaacctttg

SEQ ID NO: 215433 - DNA, 22 bp, Artificial sequence
  SiRNA target sequence
aatgtgactaacaaacctttgt

SEQ ID NO: 215434 - DNA, 22 bp, Artificial sequence
  SiRNA target sequence
atgtgactaacaaacctttgtt

SEQ ID NO: 215435 - DNA, 22 bp, Artificial sequence
  SiRNA target sequence
tgtgactaacaaacctttgttt

SEQ ID NO: 215436 - DNA, 22 bp, Artificial sequence
  SiRNA target sequence
gtgactaacaaacctttgtttg

SEQ ID NO: 215437 - DNA, 22 bp, Artificial sequence
  SiRNA target sequence
tgactaacaaacctttgtttgt

SEQ ID NO: 215438 - DNA, 22 bp, Artificial sequence
  SiRNA target sequence
gactaacaaacctttgtttgtt

SEQ ID NO: 215439 - DNA, 22 bp, Artificial sequence
  SiRNA target sequence
actaacaaacctttgtttgttg

SEQ ID NO: 215440 - DNA, 22 bp, Artificial sequence
  SiRNA target sequence
ctaacaaacctttgtttgttgt

SEQ ID NO: 215441 - DNA, 22 bp, Artificial sequence
  SiRNA target sequence
taacaaacctttgtttgttgta

SEQ ID NO: 215442 - DNA, 22 bp, Artificial sequence
  SiRNA target sequence
aacaaacctttgtttgttgtaa

SEQ ID NO: 215443 - DNA, 22 bp, Artificial sequence
  SiRNA target sequence
acaaacctttgtttgttgtaaa

SEQ ID NO: 215444 - DNA, 22 bp, Artificial sequence
  SiRNA target sequence
caaacctttgtttgttgtaaaa

SEQ ID NO: 215445 - DNA, 22 bp, Artificial sequence
  SiRNA target sequence
aaacctttgtttgttgtaaaat

SEQ ID NO: 215446 - DNA, 22 bp, Artificial sequence
  SiRNA target sequence
aacctttgtttgttgtaaaatc

SEQ ID NO: 215447 - DNA, 22 bp, Artificial sequence
  SiRNA target sequence
acctttgtttgttgtaaaatct

SEQ ID NO: 215448 - DNA, 22 bp, Artificial sequence
  SiRNA target sequence
cctttgtttgttgtaaaatctg

SEQ ID NO: 215449 - DNA, 22 bp, Artificial sequence
  SiRNA target sequence
ctttgtttgttgtaaaatctgt

SEQ ID NO: 215450 - DNA, 22 bp, Artificial sequence
  SiRNA target sequence
tttgtttgttgtaaaatctgtt

SEQ ID NO: 215451 - DNA, 22 bp, Artificial sequence
  SiRNA target sequence
ttgtttgttgtaaaatctgtta

SEQ ID NO: 215452 - DNA, 22 bp, Artificial sequence
  SiRNA target sequence
tgtttgttgtaaaatctgttaa

SEQ ID NO: 215453 - DNA, 22 bp, Artificial sequence
  SiRNA target sequence
gtttgttgtaaaatctgttaaa

SEQ ID NO: 215454 - DNA, 22 bp, Artificial sequence
  SiRNA target sequence
tttgttgtaaaatctgttaaaa

SEQ ID NO: 215455 - DNA, 22 bp, Artificial sequence
  SiRNA target sequence
ttgttgtaaaatctgttaaaaa

SEQ ID NO: 215456 - DNA, 22 bp, Artificial sequence
  SiRNA target sequence
tgttgtaaaatctgttaaaaag

SEQ ID NO: 215457 - DNA, 22 bp, Artificial sequence
  SiRNA target sequence
gttgtaaaatctgttaaaaaga

SEQ ID NO: 215458 - DNA, 22 bp, Artificial sequence
  SiRNA target sequence
ttgtaaaatctgttaaaaagaa

SEQ ID NO: 215459 - DNA, 22 bp, Artificial sequence
  SiRNA target sequence
tgtaaaatctgttaaaaagaag

SEQ ID NO: 215460 - DNA, 22 bp, Artificial sequence
  SiRNA target sequence
gtaaaatctgttaaaaagaagg

SEQ ID NO: 215461 - DNA, 22 bp, Artificial sequence
  SiRNA target sequence
taaaatctgttaaaaagaaggg

SEQ ID NO: 215462 - DNA, 22 bp, Artificial sequence
  SiRNA target sequence
aaaatctgttaaaaagaaggga

SEQ ID NO: 215463 - DNA, 22 bp, Artificial sequence
  SiRNA target sequence
aaatctgttaaaaagaagggac

SEQ ID NO: 215464 - DNA, 22 bp, Artificial sequence
  SiRNA target sequence
aatctgttaaaaagaagggacc

SEQ ID NO: 215465 - DNA, 22 bp, Artificial sequence
  SiRNA target sequence
atctgttaaaaagaagggacca

SEQ ID NO: 215466 - DNA, 22 bp, Artificial sequence
  SiRNA target sequence
tctgttaaaaagaagggaccaa

SEQ ID NO: 215467 - DNA, 22 bp, Artificial sequence
  SiRNA target sequence
ctgttaaaaagaagggaccaaa

SEQ ID NO: 215468 - DNA, 22 bp, Artificial sequence
  SiRNA target sequence
tgttaaaaagaagggaccaaaa

SEQ ID NO: 215469 - DNA, 22 bp, Artificial sequence
  SiRNA target sequence
gttaaaaagaagggaccaaaag

SEQ ID NO: 215470 - DNA, 22 bp, Artificial sequence
  SiRNA target sequence
ttaaaaagaagggaccaaaagt

SEQ ID NO: 215471 - DNA, 22 bp, Artificial sequence
  SiRNA target sequence
taaaaagaagggaccaaaagtt

SEQ ID NO: 215472 - DNA, 22 bp, Artificial sequence
  SiRNA target sequence
aaaaagaagggaccaaaagtta

SEQ ID NO: 215473 - DNA, 22 bp, Artificial sequence
  SiRNA target sequence
aaaagaagggaccaaaagttaa

SEQ ID NO: 215474 - DNA, 22 bp, Artificial sequence
  SiRNA target sequence
aaagaagggaccaaaagttaaa

SEQ ID NO: 215475 - DNA, 22 bp, Artificial sequence
  SiRNA target sequence
aagaagggaccaaaagttaaag

SEQ ID NO: 215476 - DNA, 22 bp, Artificial sequence
  SiRNA target sequence
agaagggaccaaaagttaaagt

SEQ ID NO: 215477 - DNA, 22 bp, Artificial sequence
  SiRNA target sequence
gaagggaccaaaagttaaagta

SEQ ID NO: 215478 - DNA, 22 bp, Artificial sequence
  SiRNA target sequence
aagggaccaaaagttaaagtag

SEQ ID NO: 215479 - DNA, 22 bp, Artificial sequence
  SiRNA target sequence
agggaccaaaagttaaagtagg

SEQ ID NO: 215480 - DNA, 22 bp, Artificial sequence
  SiRNA target sequence
gggaccaaaagttaaagtagga

SEQ ID NO: 215481 - DNA, 22 bp, Artificial sequence
  SiRNA target sequence
ggaccaaaagttaaagtaggat

SEQ ID NO: 215482 - DNA, 22 bp, Artificial sequence
  SiRNA target sequence
gaccaaaagttaaagtaggatt

SEQ ID NO: 215483 - DNA, 22 bp, Artificial sequence
  SiRNA target sequence
accaaaagttaaagtaggattt

SEQ ID NO: 215484 - DNA, 22 bp, Artificial sequence
  SiRNA target sequence
ccaaaagttaaagtaggatttg

SEQ ID NO: 215485 - DNA, 22 bp, Artificial sequence
  SiRNA target sequence
caaaagttaaagtaggatttgc

SEQ ID NO: 215486 - DNA, 22 bp, Artificial sequence
  SiRNA target sequence
aaaagttaaagtaggatttgcg

SEQ ID NO: 215487 - DNA, 22 bp, Artificial sequence
  SiRNA target sequence
aaagttaaagtaggatttgcgg

SEQ ID NO: 215488 - DNA, 22 bp, Artificial sequence
  SiRNA target sequence
aagttaaagtaggatttgcgga

SEQ ID NO: 215489 - DNA, 22 bp, Artificial sequence
  SiRNA target sequence
agttaaagtaggatttgcggag

SEQ ID NO: 215490 - DNA, 22 bp, Artificial sequence
  SiRNA target sequence
gttaaagtaggatttgcggagg

SEQ ID NO: 215491 - DNA, 22 bp, Artificial sequence
  SiRNA target sequence
ttaaagtaggatttgcggaggg

SEQ ID NO: 215492 - DNA, 22 bp, Artificial sequence
  SiRNA target sequence
taaagtaggatttgcggagggc

SEQ ID NO: 215493 - DNA, 22 bp, Artificial sequence
  SiRNA target sequence
aaagtaggatttgcggagggcc

SEQ ID NO: 215494 - DNA, 22 bp, Artificial sequence
  SiRNA target sequence
aagtaggatttgcggagggcct

SEQ ID NO: 215495 - DNA, 22 bp, Artificial sequence
  SiRNA target sequence
agtaggatttgcggagggcctt

SEQ ID NO: 215496 - DNA, 22 bp, Artificial sequence
  SiRNA target sequence
gtaggatttgcggagggcctta

SEQ ID NO: 215497 - DNA, 22 bp, Artificial sequence
  SiRNA target sequence
taggatttgcggagggccttaa

SEQ ID NO: 215498 - DNA, 22 bp, Artificial sequence
  SiRNA target sequence
aggatttgcggagggccttaaa

SEQ ID NO: 215499 - DNA, 22 bp, Artificial sequence
  SiRNA target sequence
ggatttgcggagggccttaaag

SEQ ID NO: 215500 - DNA, 22 bp, Artificial sequence
  SiRNA target sequence
gatttgcggagggccttaaaga

SEQ ID NO: 215501 - DNA, 22 bp, Artificial sequence
  SiRNA target sequence
atttgcggagggccttaaagaa

SEQ ID NO: 215502 - DNA, 22 bp, Artificial sequence
  SiRNA target sequence
tttgcggagggccttaaagaaa

SEQ ID NO: 215503 - DNA, 22 bp, Artificial sequence
  SiRNA target sequence
ttgcggagggccttaaagaaat

SEQ ID NO: 215504 - DNA, 22 bp, Artificial sequence
  SiRNA target sequence
tgcggagggccttaaagaaatg

SEQ ID NO: 215505 - DNA, 22 bp, Artificial sequence
  SiRNA target sequence
gcggagggccttaaagaaatga

SEQ ID NO: 215506 - DNA, 22 bp, Artificial sequence
  SiRNA target sequence
cggagggccttaaagaaatgat

SEQ ID NO: 215507 - DNA, 22 bp, Artificial sequence
  SiRNA target sequence
ggagggccttaaagaaatgatg

SEQ ID NO: 215508 - DNA, 22 bp, Artificial sequence
  SiRNA target sequence
gagggccttaaagaaatgatgg

SEQ ID NO: 215509 - DNA, 22 bp, Artificial sequence
  SiRNA target sequence
agggccttaaagaaatgatggc

SEQ ID NO: 215510 - DNA, 22 bp, Artificial sequence
  SiRNA target sequence
gggccttaaagaaatgatggca

SEQ ID NO: 215511 - DNA, 22 bp, Artificial sequence
  SiRNA target sequence
ggccttaaagaaatgatggcat

SEQ ID NO: 215512 - DNA, 22 bp, Artificial sequence
  SiRNA target sequence
gccttaaagaaatgatggcatc

SEQ ID NO: 215513 - DNA, 22 bp, Artificial sequence
  SiRNA target sequence
ccttaaagaaatgatggcatca

SEQ ID NO: 215514 - DNA, 22 bp, Artificial sequence
  SiRNA target sequence
cttaaagaaatgatggcatcaa

SEQ ID NO: 215515 - DNA, 22 bp, Artificial sequence
  SiRNA target sequence
ttaaagaaatgatggcatcaaa

SEQ ID NO: 215516 - DNA, 22 bp, Artificial sequence
  SiRNA target sequence
taaagaaatgatggcatcaaag

SEQ ID NO: 215517 - DNA, 22 bp, Artificial sequence
  SiRNA target sequence
aaagaaatgatggcatcaaagt

SEQ ID NO: 215518 - DNA, 22 bp, Artificial sequence
  SiRNA target sequence
aagaaatgatggcatcaaagtt

SEQ ID NO: 215519 - DNA, 22 bp, Artificial sequence
  SiRNA target sequence
agaaatgatggcatcaaagtta

SEQ ID NO: 215520 - DNA, 22 bp, Artificial sequence
  SiRNA target sequence
gaaatgatggcatcaaagttat

SEQ ID NO: 215521 - DNA, 22 bp, Artificial sequence
  SiRNA target sequence
aaatgatggcatcaaagttatt

SEQ ID NO: 215522 - DNA, 22 bp, Artificial sequence
  SiRNA target sequence
aatgatggcatcaaagttatta

SEQ ID NO: 215523 - DNA, 22 bp, Artificial sequence
  SiRNA target sequence
atgatggcatcaaagttattac

SEQ ID NO: 215524 - DNA, 22 bp, Artificial sequence
  SiRNA target sequence
tgatggcatcaaagttattact

SEQ ID NO: 215525 - DNA, 22 bp, Artificial sequence
  SiRNA target sequence
gatggcatcaaagttattactt

SEQ ID NO: 215526 - DNA, 22 bp, Artificial sequence
  SiRNA target sequence
atggcatcaaagttattactta

SEQ ID NO: 215527 - DNA, 22 bp, Artificial sequence
  SiRNA target sequence
tggcatcaaagttattacttaa

SEQ ID NO: 215528 - DNA, 22 bp, Artificial sequence
  SiRNA target sequence
ggcatcaaagttattacttaac

SEQ ID NO: 215529 - DNA, 22 bp, Artificial sequence
  SiRNA target sequence
gcatcaaagttattacttaaca

SEQ ID NO: 215530 - DNA, 22 bp, Artificial sequence
  SiRNA target sequence
catcaaagttattacttaacat

SEQ ID NO: 215531 - DNA, 22 bp, Artificial sequence
  SiRNA target sequence
atcaaagttattacttaacatt

SEQ ID NO: 215532 - DNA, 22 bp, Artificial sequence
  SiRNA target sequence
tcaaagttattacttaacattt

SEQ ID NO: 215533 - DNA, 22 bp, Artificial sequence
  SiRNA target sequence
caaagttattacttaacatttc

SEQ ID NO: 215534 - DNA, 22 bp, Artificial sequence
  SiRNA target sequence
aaagttattacttaacatttca

SEQ ID NO: 215535 - DNA, 22 bp, Artificial sequence
  SiRNA target sequence
aagttattacttaacatttcat

SEQ ID NO: 215536 - DNA, 22 bp, Artificial sequence
  SiRNA target sequence
agttattacttaacatttcatt

SEQ ID NO: 215537 - DNA, 22 bp, Artificial sequence
  SiRNA target sequence
gttattacttaacatttcatta

SEQ ID NO: 215538 - DNA, 22 bp, Artificial sequence
  SiRNA target sequence
ttattacttaacatttcattaa

SEQ ID NO: 215539 - DNA, 22 bp, Artificial sequence
  SiRNA target sequence
tattacttaacatttcattaac

SEQ ID NO: 215540 - DNA, 22 bp, Artificial sequence
  SiRNA target sequence
attacttaacatttcattaact

SEQ ID NO: 215541 - DNA, 22 bp, Artificial sequence
  SiRNA target sequence
ttacttaacatttcattaactg

SEQ ID NO: 215542 - DNA, 22 bp, Artificial sequence
  SiRNA target sequence
tacttaacatttcattaactgt

SEQ ID NO: 215543 - DNA, 22 bp, Artificial sequence
  SiRNA target sequence
acttaacatttcattaactgtt

SEQ ID NO: 215544 - DNA, 22 bp, Artificial sequence
  SiRNA target sequence
cttaacatttcattaactgtta

SEQ ID NO: 215545 - DNA, 22 bp, Artificial sequence
  SiRNA target sequence
ttaacatttcattaactgttat

SEQ ID NO: 215546 - DNA, 22 bp, Artificial sequence
  SiRNA target sequence
taacatttcattaactgttatg

SEQ ID NO: 215547 - DNA, 22 bp, Artificial sequence
  SiRNA target sequence
aacatttcattaactgttatgt

SEQ ID NO: 215548 - DNA, 22 bp, Artificial sequence
  SiRNA target sequence
acatttcattaactgttatgtt

SEQ ID NO: 215549 - DNA, 22 bp, Artificial sequence
  SiRNA target sequence
catttcattaactgttatgttc

SEQ ID NO: 215550 - DNA, 22 bp, Artificial sequence
  SiRNA target sequence
atttcattaactgttatgttct

SEQ ID NO: 215551 - DNA, 22 bp, Artificial sequence
  SiRNA target sequence
tttcattaactgttatgttcta

SEQ ID NO: 215552 - DNA, 22 bp, Artificial sequence
  SiRNA target sequence
ttcattaactgttatgttctat

SEQ ID NO: 215553 - DNA, 22 bp, Artificial sequence
  SiRNA target sequence
tcattaactgttatgttctatg

SEQ ID NO: 215554 - DNA, 22 bp, Artificial sequence
  SiRNA target sequence
cattaactgttatgttctatgg

SEQ ID NO: 215555 - DNA, 22 bp, Artificial sequence
  SiRNA target sequence
attaactgttatgttctatggt

SEQ ID NO: 215556 - DNA, 22 bp, Artificial sequence
  SiRNA target sequence
ttaactgttatgttctatggta

SEQ ID NO: 215557 - DNA, 22 bp, Artificial sequence
  SiRNA target sequence
taactgttatgttctatggtat

SEQ ID NO: 215558 - DNA, 22 bp, Artificial sequence
  SiRNA target sequence
aactgttatgttctatggtata

SEQ ID NO: 215559 - DNA, 22 bp, Artificial sequence
  SiRNA target sequence
actgttatgttctatggtatat

SEQ ID NO: 215560 - DNA, 22 bp, Artificial sequence
  SiRNA target sequence
ctgttatgttctatggtatatc

SEQ ID NO: 215561 - DNA, 22 bp, Artificial sequence
  SiRNA target sequence
tgttatgttctatggtatatca

SEQ ID NO: 215562 - DNA, 22 bp, Artificial sequence
  SiRNA target sequence
gttatgttctatggtatatcaa

SEQ ID NO: 215563 - DNA, 22 bp, Artificial sequence
  SiRNA target sequence
ttatgttctatggtatatcaac

SEQ ID NO: 215564 - DNA, 22 bp, Artificial sequence
  SiRNA target sequence
tatgttctatggtatatcaact

SEQ ID NO: 215565 - DNA, 22 bp, Artificial sequence
  SiRNA target sequence
atgttctatggtatatcaacta

SEQ ID NO: 215566 - DNA, 22 bp, Artificial sequence
  SiRNA target sequence
tgttctatggtatatcaactaa

SEQ ID NO: 215567 - DNA, 22 bp, Artificial sequence
  SiRNA target sequence
gttctatggtatatcaactaat

SEQ ID NO: 215568 - DNA, 22 bp, Artificial sequence
  SiRNA target sequence
ttctatggtatatcaactaatt

SEQ ID NO: 215569 - DNA, 22 bp, Artificial sequence
  SiRNA target sequence
tctatggtatatcaactaattt

SEQ ID NO: 215570 - DNA, 22 bp, Artificial sequence
  SiRNA target sequence
ctatggtatatcaactaattta

SEQ ID NO: 215571 - DNA, 22 bp, Artificial sequence
  SiRNA target sequence
tatggtatatcaactaatttaa

SEQ ID NO: 215572 - DNA, 22 bp, Artificial sequence
  SiRNA target sequence
atggtatatcaactaatttaat

SEQ ID NO: 215573 - DNA, 22 bp, Artificial sequence
  SiRNA target sequence
tggtatatcaactaatttaata

SEQ ID NO: 215574 - DNA, 22 bp, Artificial sequence
  SiRNA target sequence
ggtatatcaactaatttaatag

SEQ ID NO: 215575 - DNA, 22 bp, Artificial sequence
  SiRNA target sequence
gtatatcaactaatttaataga

SEQ ID NO: 215576 - DNA, 22 bp, Artificial sequence
  SiRNA target sequence
tatatcaactaatttaatagaa

SEQ ID NO: 215577 - DNA, 22 bp, Artificial sequence
  SiRNA target sequence
atatcaactaatttaatagaat

SEQ ID NO: 215578 - DNA, 22 bp, Artificial sequence
  SiRNA target sequence
tatcaactaatttaatagaatc

SEQ ID NO: 215579 - DNA, 22 bp, Artificial sequence
  SiRNA target sequence
atcaactaatttaatagaatca

SEQ ID NO: 215580 - DNA, 22 bp, Artificial sequence
  SiRNA target sequence
tcaactaatttaatagaatcaa

SEQ ID NO: 215581 - DNA, 22 bp, Artificial sequence
  SiRNA target sequence
caactaatttaatagaatcaac

SEQ ID NO: 215582 - DNA, 22 bp, Artificial sequence
  SiRNA target sequence
aactaatttaatagaatcaaca

SEQ ID NO: 215583 - DNA, 22 bp, Artificial sequence
  SiRNA target sequence
actaatttaatagaatcaacat

SEQ ID NO: 215584 - DNA, 22 bp, Artificial sequence
  SiRNA target sequence
ctaatttaatagaatcaacatt

SEQ ID NO: 215585 - DNA, 22 bp, Artificial sequence
  SiRNA target sequence
taatttaatagaatcaacattt

SEQ ID NO: 215586 - DNA, 22 bp, Artificial sequence
  SiRNA target sequence
aatttaatagaatcaacattta

SEQ ID NO: 215587 - DNA, 22 bp, Artificial sequence
  SiRNA target sequence
atttaatagaatcaacatttaa

SEQ ID NO: 215588 - DNA, 22 bp, Artificial sequence
  SiRNA target sequence
tttaatagaatcaacatttaaa

SEQ ID NO: 215589 - DNA, 22 bp, Artificial sequence
  SiRNA target sequence
ttaatagaatcaacatttaaaa

SEQ ID NO: 215590 - DNA, 22 bp, Artificial sequence
  SiRNA target sequence
taatagaatcaacatttaaaag

SEQ ID NO: 215591 - DNA, 22 bp, Artificial sequence
  SiRNA target sequence
aatagaatcaacatttaaaagt

SEQ ID NO: 215592 - DNA, 22 bp, Artificial sequence
  SiRNA target sequence
atagaatcaacatttaaaagtg

SEQ ID NO: 215593 - DNA, 22 bp, Artificial sequence
  SiRNA target sequence
tagaatcaacatttaaaagtgg

SEQ ID NO: 215594 - DNA, 22 bp, Artificial sequence
  SiRNA target sequence
agaatcaacatttaaaagtgga

SEQ ID NO: 215595 - DNA, 22 bp, Artificial sequence
  SiRNA target sequence
gaatcaacatttaaaagtggac

SEQ ID NO: 215596 - DNA, 22 bp, Artificial sequence
  SiRNA target sequence
aatcaacatttaaaagtggact

SEQ ID NO: 215597 - DNA, 22 bp, Artificial sequence
  SiRNA target sequence
atcaacatttaaaagtggactt

SEQ ID NO: 215598 - DNA, 22 bp, Artificial sequence
  SiRNA target sequence
tcaacatttaaaagtggacttg

SEQ ID NO: 215599 - DNA, 22 bp, Artificial sequence
  SiRNA target sequence
caacatttaaaagtggacttgt

SEQ ID NO: 215600 - DNA, 22 bp, Artificial sequence
  SiRNA target sequence
aacatttaaaagtggacttgtg

SEQ ID NO: 215601 - DNA, 22 bp, Artificial sequence
  SiRNA target sequence
acatttaaaagtggacttgtga

SEQ ID NO: 215602 - DNA, 22 bp, Artificial sequence
  SiRNA target sequence
catttaaaagtggacttgtgaa

SEQ ID NO: 215603 - DNA, 22 bp, Artificial sequence
  SiRNA target sequence
atttaaaagtggacttgtgaaa

SEQ ID NO: 215604 - DNA, 22 bp, Artificial sequence
  SiRNA target sequence
tttaaaagtggacttgtgaaag

SEQ ID NO: 215605 - DNA, 22 bp, Artificial sequence
  SiRNA target sequence
ttaaaagtggacttgtgaaagg

SEQ ID NO: 215606 - DNA, 22 bp, Artificial sequence
  SiRNA target sequence
taaaagtggacttgtgaaaggt

SEQ ID NO: 215607 - DNA, 22 bp, Artificial sequence
  SiRNA target sequence
aaaagtggacttgtgaaaggtg

SEQ ID NO: 215608 - DNA, 22 bp, Artificial sequence
  SiRNA target sequence
aaagtggacttgtgaaaggtgc

SEQ ID NO: 215609 - DNA, 22 bp, Artificial sequence
  SiRNA target sequence
aagtggacttgtgaaaggtgca

SEQ ID NO: 215610 - DNA, 22 bp, Artificial sequence
  SiRNA target sequence
agtggacttgtgaaaggtgcag

SEQ ID NO: 215611 - DNA, 22 bp, Artificial sequence
  SiRNA target sequence
gtggacttgtgaaaggtgcaga

SEQ ID NO: 215612 - DNA, 22 bp, Artificial sequence
  SiRNA target sequence
tggacttgtgaaaggtgcagaa

SEQ ID NO: 215613 - DNA, 22 bp, Artificial sequence
  SiRNA target sequence
ggacttgtgaaaggtgcagaag

SEQ ID NO: 215614 - DNA, 22 bp, Artificial sequence
  SiRNA target sequence
gacttgtgaaaggtgcagaaga

SEQ ID NO: 215615 - DNA, 22 bp, Artificial sequence
  SiRNA target sequence
acttgtgaaaggtgcagaagaa

SEQ ID NO: 215616 - DNA, 22 bp, Artificial sequence
  SiRNA target sequence
cttgtgaaaggtgcagaagaat

SEQ ID NO: 215617 - DNA, 22 bp, Artificial sequence
  SiRNA target sequence
ttgtgaaaggtgcagaagaatt

SEQ ID NO: 215618 - DNA, 22 bp, Artificial sequence
  SiRNA target sequence
tgtgaaaggtgcagaagaatta

SEQ ID NO: 215619 - DNA, 22 bp, Artificial sequence
  SiRNA target sequence
gtgaaaggtgcagaagaattaa

SEQ ID NO: 215620 - DNA, 22 bp, Artificial sequence
  SiRNA target sequence
tgaaaggtgcagaagaattaaa

SEQ ID NO: 215621 - DNA, 22 bp, Artificial sequence
  SiRNA target sequence
gaaaggtgcagaagaattaaac

SEQ ID NO: 215622 - DNA, 22 bp, Artificial sequence
  SiRNA target sequence
aaaggtgcagaagaattaaacg

SEQ ID NO: 215623 - DNA, 22 bp, Artificial sequence
  SiRNA target sequence
aaggtgcagaagaattaaacga

SEQ ID NO: 215624 - DNA, 22 bp, Artificial sequence
  SiRNA target sequence
aggtgcagaagaattaaacgag

SEQ ID NO: 215625 - DNA, 22 bp, Artificial sequence
  SiRNA target sequence
ggtgcagaagaattaaacgaga

SEQ ID NO: 215626 - DNA, 22 bp, Artificial sequence
  SiRNA target sequence
gtgcagaagaattaaacgagaa

SEQ ID NO: 215627 - DNA, 22 bp, Artificial sequence
  SiRNA target sequence
tgcagaagaattaaacgagaat

SEQ ID NO: 215628 - DNA, 22 bp, Artificial sequence
  SiRNA target sequence
gcagaagaattaaacgagaata

SEQ ID NO: 215629 - DNA, 22 bp, Artificial sequence
  SiRNA target sequence
cagaagaattaaacgagaatac

SEQ ID NO: 215630 - DNA, 22 bp, Artificial sequence
  SiRNA target sequence
agaagaattaaacgagaatact

SEQ ID NO: 215631 - DNA, 22 bp, Artificial sequence
  SiRNA target sequence
gaagaattaaacgagaatacta

SEQ ID NO: 215632 - DNA, 22 bp, Artificial sequence
  SiRNA target sequence
aagaattaaacgagaatactaa

SEQ ID NO: 215633 - DNA, 22 bp, Artificial sequence
  SiRNA target sequence
agaattaaacgagaatactaaa

SEQ ID NO: 215634 - DNA, 22 bp, Artificial sequence
  SiRNA target sequence
gaattaaacgagaatactaaaa

SEQ ID NO: 215635 - DNA, 22 bp, Artificial sequence
  SiRNA target sequence
aattaaacgagaatactaaaag

SEQ ID NO: 215636 - DNA, 22 bp, Artificial sequence
  SiRNA target sequence
attaaacgagaatactaaaagt

SEQ ID NO: 215637 - DNA, 22 bp, Artificial sequence
  SiRNA target sequence
ttaaacgagaatactaaaagtt

SEQ ID NO: 215638 - DNA, 22 bp, Artificial sequence
  SiRNA target sequence
taaacgagaatactaaaagtta

SEQ ID NO: 215639 - DNA, 22 bp, Artificial sequence
  SiRNA target sequence
aaacgagaatactaaaagttat

SEQ ID NO: 215640 - DNA, 22 bp, Artificial sequence
  SiRNA target sequence
aacgagaatactaaaagttatt

SEQ ID NO: 215641 - DNA, 22 bp, Artificial sequence
  SiRNA target sequence
acgagaatactaaaagttattc

SEQ ID NO: 215642 - DNA, 22 bp, Artificial sequence
  SiRNA target sequence
cgagaatactaaaagttattct

SEQ ID NO: 215643 - DNA, 22 bp, Artificial sequence
  SiRNA target sequence
gagaatactaaaagttattcta

SEQ ID NO: 215644 - DNA, 22 bp, Artificial sequence
  SiRNA target sequence
agaatactaaaagttattctat

SEQ ID NO: 215645 - DNA, 22 bp, Artificial sequence
  SiRNA target sequence
gaatactaaaagttattctatg

SEQ ID NO: 215646 - DNA, 22 bp, Artificial sequence
  SiRNA target sequence
aatactaaaagttattctatgg

SEQ ID NO: 215647 - DNA, 22 bp, Artificial sequence
  SiRNA target sequence
atactaaaagttattctatggg

SEQ ID NO: 215648 - DNA, 22 bp, Artificial sequence
  SiRNA target sequence
tactaaaagttattctatggga

SEQ ID NO: 215649 - DNA, 22 bp, Artificial sequence
  SiRNA target sequence
actaaaagttattctatgggat

SEQ ID NO: 215650 - DNA, 22 bp, Artificial sequence
  SiRNA target sequence
ctaaaagttattctatgggata

SEQ ID NO: 215651 - DNA, 22 bp, Artificial sequence
  SiRNA target sequence
taaaagttattctatgggatat

SEQ ID NO: 215652 - DNA, 22 bp, Artificial sequence
  SiRNA target sequence
aaaagttattctatgggatata

SEQ ID NO: 215653 - DNA, 22 bp, Artificial sequence
  SiRNA target sequence
aaagttattctatgggatataa

SEQ ID NO: 215654 - DNA, 22 bp, Artificial sequence
  SiRNA target sequence
aagttattctatgggatataat

SEQ ID NO: 215655 - DNA, 22 bp, Artificial sequence
  SiRNA target sequence
agttattctatgggatataatt

SEQ ID NO: 215656 - DNA, 22 bp, Artificial sequence
  SiRNA target sequence
gttattctatgggatataattc

SEQ ID NO: 215657 - DNA, 22 bp, Artificial sequence
  SiRNA target sequence
ttattctatgggatataattca

SEQ ID NO: 215658 - DNA, 22 bp, Artificial sequence
  SiRNA target sequence
tattctatgggatataattcat

SEQ ID NO: 215659 - DNA, 22 bp, Artificial sequence
  SiRNA target sequence
attctatgggatataattcatt

SEQ ID NO: 215660 - DNA, 22 bp, Artificial sequence
  SiRNA target sequence
ttctatgggatataattcattt

SEQ ID NO: 215661 - DNA, 22 bp, Artificial sequence
  SiRNA target sequence
tctatgggatataattcatttg

SEQ ID NO: 215662 - DNA, 22 bp, Artificial sequence
  SiRNA target sequence
ctatgggatataattcatttga

SEQ ID NO: 215663 - DNA, 22 bp, Artificial sequence
  SiRNA target sequence
tatgggatataattcatttgaa

SEQ ID NO: 215664 - DNA, 22 bp, Artificial sequence
  SiRNA target sequence
atgggatataattcatttgaac

SEQ ID NO: 215665 - DNA, 22 bp, Artificial sequence
  SiRNA target sequence
tgggatataattcatttgaaca

SEQ ID NO: 215666 - DNA, 22 bp, Artificial sequence
  SiRNA target sequence
gggatataattcatttgaacaa

SEQ ID NO: 215667 - DNA, 22 bp, Artificial sequence
  SiRNA target sequence
ggatataattcatttgaacaaa

SEQ ID NO: 215668 - DNA, 22 bp, Artificial sequence
  SiRNA target sequence
gatataattcatttgaacaaaa

SEQ ID NO: 215669 - DNA, 22 bp, Artificial sequence
  SiRNA target sequence
atataattcatttgaacaaaag

SEQ ID NO: 215670 - DNA, 22 bp, Artificial sequence
  SiRNA target sequence
tataattcatttgaacaaaaga

SEQ ID NO: 215671 - DNA, 22 bp, Artificial sequence
  SiRNA target sequence
ataattcatttgaacaaaagat

SEQ ID NO: 215672 - DNA, 22 bp, Artificial sequence
  SiRNA target sequence
taattcatttgaacaaaagata

SEQ ID NO: 215673 - DNA, 22 bp, Artificial sequence
  SiRNA target sequence
aattcatttgaacaaaagatag

SEQ ID NO: 215674 - DNA, 22 bp, Artificial sequence
  SiRNA target sequence
attcatttgaacaaaagatagc

SEQ ID NO: 215675 - DNA, 22 bp, Artificial sequence
  SiRNA target sequence
ttcatttgaacaaaagatagca

SEQ ID NO: 215676 - DNA, 22 bp, Artificial sequence
  SiRNA target sequence
tcatttgaacaaaagatagcat

SEQ ID NO: 215677 - DNA, 22 bp, Artificial sequence
  SiRNA target sequence
catttgaacaaaagatagcatc

SEQ ID NO: 215678 - DNA, 22 bp, Artificial sequence
  SiRNA target sequence
atttgaacaaaagatagcatca

SEQ ID NO: 215679 - DNA, 22 bp, Artificial sequence
  SiRNA target sequence
tttgaacaaaagatagcatcaa

SEQ ID NO: 215680 - DNA, 22 bp, Artificial sequence
  SiRNA target sequence
ttgaacaaaagatagcatcaat

SEQ ID NO: 215681 - DNA, 22 bp, Artificial sequence
  SiRNA target sequence
tgaacaaaagatagcatcaata

SEQ ID NO: 215682 - DNA, 22 bp, Artificial sequence
  SiRNA target sequence
gaacaaaagatagcatcaataa

SEQ ID NO: 215683 - DNA, 22 bp, Artificial sequence
  SiRNA target sequence
aacaaaagatagcatcaataac

SEQ ID NO: 215684 - DNA, 22 bp, Artificial sequence
  SiRNA target sequence
acaaaagatagcatcaataact

SEQ ID NO: 215685 - DNA, 22 bp, Artificial sequence
  SiRNA target sequence
caaaagatagcatcaataactg

SEQ ID NO: 215686 - DNA, 22 bp, Artificial sequence
  SiRNA target sequence
aaaagatagcatcaataactgt

SEQ ID NO: 215687 - DNA, 22 bp, Artificial sequence
  SiRNA target sequence
aaagatagcatcaataactgtt

SEQ ID NO: 215688 - DNA, 22 bp, Artificial sequence
  SiRNA target sequence
aagatagcatcaataactgtta

SEQ ID NO: 215689 - DNA, 22 bp, Artificial sequence
  SiRNA target sequence
agatagcatcaataactgttat

SEQ ID NO: 215690 - DNA, 22 bp, Artificial sequence
  SiRNA target sequence
gatagcatcaataactgttatt

SEQ ID NO: 215691 - DNA, 22 bp, Artificial sequence
  SiRNA target sequence
atagcatcaataactgttatta

SEQ ID NO: 215692 - DNA, 22 bp, Artificial sequence
  SiRNA target sequence
tagcatcaataactgttattat

SEQ ID NO: 215693 - DNA, 22 bp, Artificial sequence
  SiRNA target sequence
agcatcaataactgttattatc

SEQ ID NO: 215694 - DNA, 22 bp, Artificial sequence
  SiRNA target sequence
gcatcaataactgttattatcc

SEQ ID NO: 215695 - DNA, 22 bp, Artificial sequence
  SiRNA target sequence
catcaataactgttattatcct

SEQ ID NO: 215696 - DNA, 22 bp, Artificial sequence
  SiRNA target sequence
atcaataactgttattatcctg

SEQ ID NO: 215697 - DNA, 22 bp, Artificial sequence
  SiRNA target sequence
tcaataactgttattatcctgc

SEQ ID NO: 215698 - DNA, 22 bp, Artificial sequence
  SiRNA target sequence
caataactgttattatcctgct

SEQ ID NO: 215699 - DNA, 22 bp, Artificial sequence
  SiRNA target sequence
aataactgttattatcctgctt

SEQ ID NO: 215700 - DNA, 22 bp, Artificial sequence
  SiRNA target sequence
ataactgttattatcctgcttt

SEQ ID NO: 215701 - DNA, 22 bp, Artificial sequence
  SiRNA target sequence
taactgttattatcctgctttt

SEQ ID NO: 215702 - DNA, 22 bp, Artificial sequence
  SiRNA target sequence
aactgttattatcctgctttta

SEQ ID NO: 215703 - DNA, 22 bp, Artificial sequence
  SiRNA target sequence
actgttattatcctgcttttat

SEQ ID NO: 215704 - DNA, 22 bp, Artificial sequence
  SiRNA target sequence
ctgttattatcctgcttttatc

SEQ ID NO: 215705 - DNA, 22 bp, Artificial sequence
  SiRNA target sequence
tgttattatcctgcttttatca

SEQ ID NO: 215706 - DNA, 22 bp, Artificial sequence
  SiRNA target sequence
gttattatcctgcttttatcac

SEQ ID NO: 215707 - DNA, 22 bp, Artificial sequence
  SiRNA target sequence
ttattatcctgcttttatcacc

SEQ ID NO: 215708 - DNA, 22 bp, Artificial sequence
  SiRNA target sequence
tattatcctgcttttatcacca

SEQ ID NO: 215709 - DNA, 22 bp, Artificial sequence
  SiRNA target sequence
attatcctgcttttatcaccat

SEQ ID NO: 215710 - DNA, 22 bp, Artificial sequence
  SiRNA target sequence
ttatcctgcttttatcaccatt

SEQ ID NO: 215711 - DNA, 22 bp, Artificial sequence
  SiRNA target sequence
tatcctgcttttatcaccattt

SEQ ID NO: 215712 - DNA, 22 bp, Artificial sequence
  SiRNA target sequence
atcctgcttttatcaccatttc

SEQ ID NO: 215713 - DNA, 22 bp, Artificial sequence
  SiRNA target sequence
tcctgcttttatcaccatttcc

SEQ ID NO: 215714 - DNA, 22 bp, Artificial sequence
  SiRNA target sequence
cctgcttttatcaccatttcca

SEQ ID NO: 215715 - DNA, 22 bp, Artificial sequence
  SiRNA target sequence
ctgcttttatcaccatttccaa

SEQ ID NO: 215716 - DNA, 22 bp, Artificial sequence
  SiRNA target sequence
tgcttttatcaccatttccaaa

SEQ ID NO: 215717 - DNA, 22 bp, Artificial sequence
  SiRNA target sequence
gcttttatcaccatttccaaaa

SEQ ID NO: 215718 - DNA, 22 bp, Artificial sequence
  SiRNA target sequence
cttttatcaccatttccaaaat

SEQ ID NO: 215719 - DNA, 22 bp, Artificial sequence
  SiRNA target sequence
ttttatcaccatttccaaaatt

SEQ ID NO: 215720 - DNA, 22 bp, Artificial sequence
  SiRNA target sequence
tttatcaccatttccaaaatta

SEQ ID NO: 215721 - DNA, 22 bp, Artificial sequence
  SiRNA target sequence
ttatcaccatttccaaaattaa

SEQ ID NO: 215722 - DNA, 22 bp, Artificial sequence
  SiRNA target sequence
tatcaccatttccaaaattaat

SEQ ID NO: 215723 - DNA, 22 bp, Artificial sequence
  SiRNA target sequence
atcaccatttccaaaattaata

SEQ ID NO: 215724 - DNA, 22 bp, Artificial sequence
  SiRNA target sequence
tcaccatttccaaaattaatac

SEQ ID NO: 215725 - DNA, 22 bp, Artificial sequence
  SiRNA target sequence
caccatttccaaaattaataca

SEQ ID NO: 215726 - DNA, 22 bp, Artificial sequence
  SiRNA target sequence
accatttccaaaattaatacaa

SEQ ID NO: 215727 - DNA, 22 bp, Artificial sequence
  SiRNA target sequence
ccatttccaaaattaatacaaa

SEQ ID NO: 215728 - DNA, 22 bp, Artificial sequence
  SiRNA target sequence
catttccaaaattaatacaaac

SEQ ID NO: 215729 - DNA, 22 bp, Artificial sequence
  SiRNA target sequence
atttccaaaattaatacaaacc

SEQ ID NO: 215730 - DNA, 22 bp, Artificial sequence
  SiRNA target sequence
tttccaaaattaatacaaacca

SEQ ID NO: 215731 - DNA, 22 bp, Artificial sequence
  SiRNA target sequence
ttccaaaattaatacaaaccaa

SEQ ID NO: 215732 - DNA, 22 bp, Artificial sequence
  SiRNA target sequence
tccaaaattaatacaaaccaaa

SEQ ID NO: 215733 - DNA, 22 bp, Artificial sequence
  SiRNA target sequence
ccaaaattaatacaaaccaaag

SEQ ID NO: 215734 - DNA, 22 bp, Artificial sequence
  SiRNA target sequence
caaaattaatacaaaccaaagg

SEQ ID NO: 215735 - DNA, 22 bp, Artificial sequence
  SiRNA target sequence
aaaattaatacaaaccaaagga

SEQ ID NO: 215736 - DNA, 22 bp, Artificial sequence
  SiRNA target sequence
aaattaatacaaaccaaaggat

SEQ ID NO: 215737 - DNA, 22 bp, Artificial sequence
  SiRNA target sequence
aattaatacaaaccaaaggatg

SEQ ID NO: 215738 - DNA, 22 bp, Artificial sequence
  SiRNA target sequence
attaatacaaaccaaaggatgg

SEQ ID NO: 215739 - DNA, 22 bp, Artificial sequence
  SiRNA target sequence
ttaatacaaaccaaaggatgga

SEQ ID NO: 215740 - DNA, 22 bp, Artificial sequence
  SiRNA target sequence
taatacaaaccaaaggatggat

SEQ ID NO: 215741 - DNA, 22 bp, Artificial sequence
  SiRNA target sequence
aatacaaaccaaaggatggata

SEQ ID NO: 215742 - DNA, 22 bp, Artificial sequence
  SiRNA target sequence
atacaaaccaaaggatggatat

SEQ ID NO: 215743 - DNA, 22 bp, Artificial sequence
  SiRNA target sequence
tacaaaccaaaggatggatatt

SEQ ID NO: 215744 - DNA, 22 bp, Artificial sequence
  SiRNA target sequence
acaaaccaaaggatggatattt

SEQ ID NO: 215745 - DNA, 22 bp, Artificial sequence
  SiRNA target sequence
caaaccaaaggatggatatttg

SEQ ID NO: 215746 - DNA, 22 bp, Artificial sequence
  SiRNA target sequence
aaaccaaaggatggatatttgt

SEQ ID NO: 215747 - DNA, 22 bp, Artificial sequence
  SiRNA target sequence
aaccaaaggatggatatttgtt

SEQ ID NO: 215748 - DNA, 22 bp, Artificial sequence
  SiRNA target sequence
accaaaggatggatatttgttg

SEQ ID NO: 215749 - DNA, 22 bp, Artificial sequence
  SiRNA target sequence
ccaaaggatggatatttgttgc

SEQ ID NO: 215750 - DNA, 22 bp, Artificial sequence
  SiRNA target sequence
caaaggatggatatttgttgcc

SEQ ID NO: 215751 - DNA, 22 bp, Artificial sequence
  SiRNA target sequence
aaaggatggatatttgttgcca

SEQ ID NO: 215752 - DNA, 22 bp, Artificial sequence
  SiRNA target sequence
aaggatggatatttgttgccat

SEQ ID NO: 215753 - DNA, 22 bp, Artificial sequence
  SiRNA target sequence
aggatggatatttgttgccata

SEQ ID NO: 215754 - DNA, 22 bp, Artificial sequence
  SiRNA target sequence
ggatggatatttgttgccatag

SEQ ID NO: 215755 - DNA, 22 bp, Artificial sequence
  SiRNA target sequence
gatggatatttgttgccatagc

SEQ ID NO: 215756 - DNA, 22 bp, Artificial sequence
  SiRNA target sequence
atggatatttgttgccatagcg

SEQ ID NO: 215757 - DNA, 22 bp, Artificial sequence
  SiRNA target sequence
tggatatttgttgccatagcgt

SEQ ID NO: 215758 - DNA, 22 bp, Artificial sequence
  SiRNA target sequence
ggatatttgttgccatagcgtg

SEQ ID NO: 215759 - DNA, 22 bp, Artificial sequence
  SiRNA target sequence
gatatttgttgccatagcgtgc

SEQ ID NO: 215760 - DNA, 22 bp, Artificial sequence
  SiRNA target sequence
atatttgttgccatagcgtgcc

SEQ ID NO: 215761 - DNA, 22 bp, Artificial sequence
  SiRNA target sequence
tatttgttgccatagcgtgccc

SEQ ID NO: 215762 - DNA, 22 bp, Artificial sequence
  SiRNA target sequence
atttgttgccatagcgtgccca

SEQ ID NO: 215763 - DNA, 22 bp, Artificial sequence
  SiRNA target sequence
tttgttgccatagcgtgcccac

SEQ ID NO: 215764 - DNA, 22 bp, Artificial sequence
  SiRNA target sequence
ttgttgccatagcgtgcccact

SEQ ID NO: 215765 - DNA, 22 bp, Artificial sequence
  SiRNA target sequence
tgttgccatagcgtgcccactt

SEQ ID NO: 215766 - DNA, 22 bp, Artificial sequence
  SiRNA target sequence
gttgccatagcgtgcccactta

SEQ ID NO: 215767 - DNA, 22 bp, Artificial sequence
  SiRNA target sequence
ttgccatagcgtgcccacttat

SEQ ID NO: 215768 - DNA, 22 bp, Artificial sequence
  SiRNA target sequence
tgccatagcgtgcccacttatt

SEQ ID NO: 215769 - DNA, 22 bp, Artificial sequence
  SiRNA target sequence
gccatagcgtgcccacttatta

SEQ ID NO: 215770 - DNA, 22 bp, Artificial sequence
  SiRNA target sequence
ccatagcgtgcccacttattac

SEQ ID NO: 215771 - DNA, 22 bp, Artificial sequence
  SiRNA target sequence
catagcgtgcccacttattacc

SEQ ID NO: 215772 - DNA, 22 bp, Artificial sequence
  SiRNA target sequence
atagcgtgcccacttattaccc

SEQ ID NO: 215773 - DNA, 22 bp, Artificial sequence
  SiRNA target sequence
tagcgtgcccacttattaccct

SEQ ID NO: 215774 - DNA, 22 bp, Artificial sequence
  SiRNA target sequence
agcgtgcccacttattaccctt

SEQ ID NO: 215775 - DNA, 22 bp, Artificial sequence
  SiRNA target sequence
gcgtgcccacttattacccttt

SEQ ID NO: 215776 - DNA, 22 bp, Artificial sequence
  SiRNA target sequence
cgtgcccacttattaccctttt

SEQ ID NO: 215777 - DNA, 22 bp, Artificial sequence
  SiRNA target sequence
gtgcccacttattacccttttt

SEQ ID NO: 215778 - DNA, 22 bp, Artificial sequence
  SiRNA target sequence
tgcccacttattaccctttttg

SEQ ID NO: 215779 - DNA, 22 bp, Artificial sequence
  SiRNA target sequence
gcccacttattaccctttttgc

SEQ ID NO: 215780 - DNA, 22 bp, Artificial sequence
  SiRNA target sequence
cccacttattaccctttttgct

SEQ ID NO: 215781 - DNA, 22 bp, Artificial sequence
  SiRNA target sequence
ccacttattaccctttttgctg

SEQ ID NO: 215782 - DNA, 22 bp, Artificial sequence
  SiRNA target sequence
cacttattaccctttttgctgt

SEQ ID NO: 215783 - DNA, 22 bp, Artificial sequence
  SiRNA target sequence
acttattaccctttttgctgta

SEQ ID NO: 215784 - DNA, 22 bp, Artificial sequence
  SiRNA target sequence
cttattaccctttttgctgtag

SEQ ID NO: 215785 - DNA, 22 bp, Artificial sequence
  SiRNA target sequence
ttattaccctttttgctgtagt

SEQ ID NO: 215786 - DNA, 22 bp, Artificial sequence
  SiRNA target sequence
tattaccctttttgctgtagtt

SEQ ID NO: 215787 - DNA, 22 bp, Artificial sequence
  SiRNA target sequence
attaccctttttgctgtagttt

SEQ ID NO: 215788 - DNA, 22 bp, Artificial sequence
  SiRNA target sequence
ttaccctttttgctgtagtttc

SEQ ID NO: 215789 - DNA, 22 bp, Artificial sequence
  SiRNA target sequence
taccctttttgctgtagtttct

SEQ ID NO: 215790 - DNA, 22 bp, Artificial sequence
  SiRNA target sequence
accctttttgctgtagtttctg

SEQ ID NO: 215791 - DNA, 22 bp, Artificial sequence
  SiRNA target sequence
ccctttttgctgtagtttctgt

SEQ ID NO: 215792 - DNA, 22 bp, Artificial sequence
  SiRNA target sequence
cctttttgctgtagtttctgtg

SEQ ID NO: 215793 - DNA, 22 bp, Artificial sequence
  SiRNA target sequence
ctttttgctgtagtttctgtgt

SEQ ID NO: 215794 - DNA, 22 bp, Artificial sequence
  SiRNA target sequence
tttttgctgtagtttctgtgtg

SEQ ID NO: 215795 - DNA, 22 bp, Artificial sequence
  SiRNA target sequence
ttttgctgtagtttctgtgtgt

SEQ ID NO: 215796 - DNA, 22 bp, Artificial sequence
  SiRNA target sequence
tttgctgtagtttctgtgtgtg

SEQ ID NO: 215797 - DNA, 22 bp, Artificial sequence
  SiRNA target sequence
ttgctgtagtttctgtgtgtgg

SEQ ID NO: 215798 - DNA, 22 bp, Artificial sequence
  SiRNA target sequence
tgctgtagtttctgtgtgtggt

SEQ ID NO: 215799 - DNA, 22 bp, Artificial sequence
  SiRNA target sequence
gctgtagtttctgtgtgtggtc

SEQ ID NO: 215800 - DNA, 22 bp, Artificial sequence
  SiRNA target sequence
ctgtagtttctgtgtgtggtct

SEQ ID NO: 215801 - DNA, 22 bp, Artificial sequence
  SiRNA target sequence
tgtagtttctgtgtgtggtctt

SEQ ID NO: 215802 - DNA, 22 bp, Artificial sequence
  SiRNA target sequence
gtagtttctgtgtgtggtcttg

SEQ ID NO: 215803 - DNA, 22 bp, Artificial sequence
  SiRNA target sequence
tagtttctgtgtgtggtcttgc

SEQ ID NO: 215804 - DNA, 22 bp, Artificial sequence
  SiRNA target sequence
agtttctgtgtgtggtcttgct

SEQ ID NO: 215805 - DNA, 22 bp, Artificial sequence
  SiRNA target sequence
gtttctgtgtgtggtcttgctt

SEQ ID NO: 215806 - DNA, 22 bp, Artificial sequence
  SiRNA target sequence
tttctgtgtgtggtcttgcttt

SEQ ID NO: 215807 - DNA, 22 bp, Artificial sequence
  SiRNA target sequence
ttctgtgtgtggtcttgctttt

SEQ ID NO: 215808 - DNA, 22 bp, Artificial sequence
  SiRNA target sequence
tctgtgtgtggtcttgcttttt

SEQ ID NO: 215809 - DNA, 22 bp, Artificial sequence
  SiRNA target sequence
ctgtgtgtggtcttgcttttta

SEQ ID NO: 215810 - DNA, 22 bp, Artificial sequence
  SiRNA target sequence
tgtgtgtggtcttgctttttac

SEQ ID NO: 215811 - DNA, 22 bp, Artificial sequence
  SiRNA target sequence
gtgtgtggtcttgctttttaca

SEQ ID NO: 215812 - DNA, 22 bp, Artificial sequence
  SiRNA target sequence
tgtgtggtcttgctttttacaa

SEQ ID NO: 215813 - DNA, 22 bp, Artificial sequence
  SiRNA target sequence
gtgtggtcttgctttttacaat

SEQ ID NO: 215814 - DNA, 22 bp, Artificial sequence
  SiRNA target sequence
tgtggtcttgctttttacaatt

SEQ ID NO: 215815 - DNA, 22 bp, Artificial sequence
  SiRNA target sequence
gtggtcttgctttttacaatta

SEQ ID NO: 215816 - DNA, 22 bp, Artificial sequence
  SiRNA target sequence
tggtcttgctttttacaattat

SEQ ID NO: 215817 - DNA, 22 bp, Artificial sequence
  SiRNA target sequence
ggtcttgctttttacaattatc

SEQ ID NO: 215818 - DNA, 22 bp, Artificial sequence
  SiRNA target sequence
gtcttgctttttacaattatcc

SEQ ID NO: 215819 - DNA, 22 bp, Artificial sequence
  SiRNA target sequence
tcttgctttttacaattatccg

SEQ ID NO: 215820 - DNA, 22 bp, Artificial sequence
  SiRNA target sequence
cttgctttttacaattatccgg

SEQ ID NO: 215821 - DNA, 22 bp, Artificial sequence
  SiRNA target sequence
ttgctttttacaattatccggc

SEQ ID NO: 215822 - DNA, 22 bp, Artificial sequence
  SiRNA target sequence
tgctttttacaattatccggca

SEQ ID NO: 215823 - DNA, 22 bp, Artificial sequence
  SiRNA target sequence
gctttttacaattatccggcaa

SEQ ID NO: 215824 - DNA, 22 bp, Artificial sequence
  SiRNA target sequence
ctttttacaattatccggcaac

SEQ ID NO: 215825 - DNA, 22 bp, Artificial sequence
  SiRNA target sequence
tttttacaattatccggcaaca

SEQ ID NO: 215826 - DNA, 22 bp, Artificial sequence
  SiRNA target sequence
ttttacaattatccggcaacaa

SEQ ID NO: 215827 - DNA, 22 bp, Artificial sequence
  SiRNA target sequence
tttacaattatccggcaacaaa

SEQ ID NO: 215828 - DNA, 22 bp, Artificial sequence
  SiRNA target sequence
ttacaattatccggcaacaaat

SEQ ID NO: 215829 - DNA, 22 bp, Artificial sequence
  SiRNA target sequence
tacaattatccggcaacaaata

SEQ ID NO: 215830 - DNA, 22 bp, Artificial sequence
  SiRNA target sequence
acaattatccggcaacaaataa

SEQ ID NO: 215831 - DNA, 22 bp, Artificial sequence
  SiRNA target sequence
caattatccggcaacaaataat

SEQ ID NO: 215832 - DNA, 22 bp, Artificial sequence
  SiRNA target sequence
aattatccggcaacaaataatg

SEQ ID NO: 215833 - DNA, 22 bp, Artificial sequence
  SiRNA target sequence
attatccggcaacaaataatga

SEQ ID NO: 215834 - DNA, 22 bp, Artificial sequence
  SiRNA target sequence
ttatccggcaacaaataatgac

SEQ ID NO: 215835 - DNA, 22 bp, Artificial sequence
  SiRNA target sequence
tatccggcaacaaataatgaca

SEQ ID NO: 215836 - DNA, 22 bp, Artificial sequence
  SiRNA target sequence
atccggcaacaaataatgacac

SEQ ID NO: 215837 - DNA, 22 bp, Artificial sequence
  SiRNA target sequence
tccggcaacaaataatgacaca

SEQ ID NO: 215838 - DNA, 22 bp, Artificial sequence
  SiRNA target sequence
ccggcaacaaataatgacacaa

SEQ ID NO: 215839 - DNA, 22 bp, Artificial sequence
  SiRNA target sequence
cggcaacaaataatgacacaaa

SEQ ID NO: 215840 - DNA, 22 bp, Artificial sequence
  SiRNA target sequence
ggcaacaaataatgacacaaat

SEQ ID NO: 215841 - DNA, 22 bp, Artificial sequence
  SiRNA target sequence
gcaacaaataatgacacaaatt

SEQ ID NO: 215842 - DNA, 22 bp, Artificial sequence
  SiRNA target sequence
caacaaataatgacacaaattt

SEQ ID NO: 215843 - DNA, 22 bp, Artificial sequence
  SiRNA target sequence
aacaaataatgacacaaatttt

SEQ ID NO: 215844 - DNA, 22 bp, Artificial sequence
  SiRNA target sequence
acaaataatgacacaaattttt

SEQ ID NO: 215845 - DNA, 22 bp, Artificial sequence
  SiRNA target sequence
caaataatgacacaaatttttt

SEQ ID NO: 215846 - DNA, 22 bp, Artificial sequence
  SiRNA target sequence
aaataatgacacaaattttttt

SEQ ID NO: 215847 - DNA, 22 bp, Artificial sequence
  SiRNA target sequence
aataatgacacaaatttttttc

SEQ ID NO: 215848 - DNA, 22 bp, Artificial sequence
  SiRNA target sequence
ataatgacacaaatttttttct

SEQ ID NO: 215849 - DNA, 22 bp, Artificial sequence
  SiRNA target sequence
taatgacacaaatttttttcta

SEQ ID NO: 215850 - DNA, 22 bp, Artificial sequence
  SiRNA target sequence
aatgacacaaatttttttctaa

SEQ ID NO: 215851 - DNA, 22 bp, Artificial sequence
  SiRNA target sequence
atgacacaaatttttttctaaa

SEQ ID NO: 215852 - DNA, 22 bp, Artificial sequence
  SiRNA target sequence
tgacacaaatttttttctaaat

SEQ ID NO: 215853 - DNA, 22 bp, Artificial sequence
  SiRNA target sequence
gacacaaatttttttctaaatt

SEQ ID NO: 215854 - DNA, 22 bp, Artificial sequence
  SiRNA target sequence
acacaaatttttttctaaattc

SEQ ID NO: 215855 - DNA, 22 bp, Artificial sequence
  SiRNA target sequence
cacaaatttttttctaaattca

SEQ ID NO: 215856 - DNA, 22 bp, Artificial sequence
  SiRNA target sequence
acaaatttttttctaaattcat

SEQ ID NO: 215857 - DNA, 22 bp, Artificial sequence
  SiRNA target sequence
caaatttttttctaaattcatt

SEQ ID NO: 215858 - DNA, 22 bp, Artificial sequence
  SiRNA target sequence
aaatttttttctaaattcatta

SEQ ID NO: 215859 - DNA, 22 bp, Artificial sequence
  SiRNA target sequence
aatttttttctaaattcattat

SEQ ID NO: 215860 - DNA, 22 bp, Artificial sequence
  SiRNA target sequence
atttttttctaaattcattatg

SEQ ID NO: 215861 - DNA, 22 bp, Artificial sequence
  SiRNA target sequence
tttttttctaaattcattatgt

SEQ ID NO: 215862 - DNA, 22 bp, Artificial sequence
  SiRNA target sequence
ttttttctaaattcattatgtg

SEQ ID NO: 215863 - DNA, 22 bp, Artificial sequence
  SiRNA target sequence
tttttctaaattcattatgtgc

SEQ ID NO: 215864 - DNA, 22 bp, Artificial sequence
  SiRNA target sequence
ttttctaaattcattatgtgct

SEQ ID NO: 215865 - DNA, 22 bp, Artificial sequence
  SiRNA target sequence
tttctaaattcattatgtgcta

SEQ ID NO: 215866 - DNA, 22 bp, Artificial sequence
  SiRNA target sequence
ttctaaattcattatgtgctac

SEQ ID NO: 215867 - DNA, 22 bp, Artificial sequence
  SiRNA target sequence
tctaaattcattatgtgctacg

SEQ ID NO: 215868 - DNA, 22 bp, Artificial sequence
  SiRNA target sequence
ctaaattcattatgtgctacgc

SEQ ID NO: 215869 - DNA, 22 bp, Artificial sequence
  SiRNA target sequence
taaattcattatgtgctacgcc

SEQ ID NO: 215870 - DNA, 22 bp, Artificial sequence
  SiRNA target sequence
aaattcattatgtgctacgccc

SEQ ID NO: 215871 - DNA, 22 bp, Artificial sequence
  SiRNA target sequence
aattcattatgtgctacgcccg

SEQ ID NO: 215872 - DNA, 22 bp, Artificial sequence
  SiRNA target sequence
attcattatgtgctacgcccgg

SEQ ID NO: 215873 - DNA, 22 bp, Artificial sequence
  SiRNA target sequence
ttcattatgtgctacgcccggt

SEQ ID NO: 215874 - DNA, 22 bp, Artificial sequence
  SiRNA target sequence
tcattatgtgctacgcccggta

SEQ ID NO: 215875 - DNA, 22 bp, Artificial sequence
  SiRNA target sequence
cattatgtgctacgcccggtaa

SEQ ID NO: 215876 - DNA, 22 bp, Artificial sequence
  SiRNA target sequence
attatgtgctacgcccggtaaa

SEQ ID NO: 215877 - DNA, 22 bp, Artificial sequence
  SiRNA target sequence
ttatgtgctacgcccggtaaat

SEQ ID NO: 215878 - DNA, 22 bp, Artificial sequence
  SiRNA target sequence
tatgtgctacgcccggtaaatc

SEQ ID NO: 215879 - DNA, 22 bp, Artificial sequence
  SiRNA target sequence
atgtgctacgcccggtaaatcg

SEQ ID NO: 215880 - DNA, 22 bp, Artificial sequence
  SiRNA target sequence
tgtgctacgcccggtaaatcgt

SEQ ID NO: 215881 - DNA, 22 bp, Artificial sequence
  SiRNA target sequence
gtgctacgcccggtaaatcgtt

SEQ ID NO: 215882 - DNA, 22 bp, Artificial sequence
  SiRNA target sequence
tgctacgcccggtaaatcgttt

SEQ ID NO: 215883 - DNA, 22 bp, Artificial sequence
  SiRNA target sequence
gctacgcccggtaaatcgttta

SEQ ID NO: 215884 - DNA, 22 bp, Artificial sequence
  SiRNA target sequence
ctacgcccggtaaatcgtttat

SEQ ID NO: 215885 - DNA, 22 bp, Artificial sequence
  SiRNA target sequence
tacgcccggtaaatcgtttata

SEQ ID NO: 215886 - DNA, 22 bp, Artificial sequence
  SiRNA target sequence
acgcccggtaaatcgtttataa

SEQ ID NO: 215887 - DNA, 22 bp, Artificial sequence
  SiRNA target sequence
cgcccggtaaatcgtttataaa

SEQ ID NO: 215888 - DNA, 22 bp, Artificial sequence
  SiRNA target sequence
gcccggtaaatcgtttataaaa

SEQ ID NO: 215889 - DNA, 22 bp, Artificial sequence
  SiRNA target sequence
cccggtaaatcgtttataaaat

SEQ ID NO: 215890 - DNA, 22 bp, Artificial sequence
  SiRNA target sequence
ccggtaaatcgtttataaaatt

SEQ ID NO: 215891 - DNA, 22 bp, Artificial sequence
  SiRNA target sequence
cggtaaatcgtttataaaatta

SEQ ID NO: 215892 - DNA, 22 bp, Artificial sequence
  SiRNA target sequence
ggtaaatcgtttataaaattag

SEQ ID NO: 215893 - DNA, 22 bp, Artificial sequence
  SiRNA target sequence
gtaaatcgtttataaaattaga

SEQ ID NO: 215894 - DNA, 22 bp, Artificial sequence
  SiRNA target sequence
taaatcgtttataaaattagaa

SEQ ID NO: 215895 - DNA, 22 bp, Artificial sequence
  SiRNA target sequence
aaatcgtttataaaattagaaa

SEQ ID NO: 215896 - DNA, 22 bp, Artificial sequence
  SiRNA target sequence
aatcgtttataaaattagaaaa

SEQ ID NO: 215897 - DNA, 22 bp, Artificial sequence
  SiRNA target sequence
atcgtttataaaattagaaaat

SEQ ID NO: 215898 - DNA, 22 bp, Artificial sequence
  SiRNA target sequence
tcgtttataaaattagaaaatg

SEQ ID NO: 215899 - DNA, 22 bp, Artificial sequence
  SiRNA target sequence
cgtttataaaattagaaaatgt

SEQ ID NO: 215900 - DNA, 22 bp, Artificial sequence
  SiRNA target sequence
gtttataaaattagaaaatgtt

SEQ ID NO: 215901 - DNA, 22 bp, Artificial sequence
  SiRNA target sequence
tttataaaattagaaaatgttt

SEQ ID NO: 215902 - DNA, 22 bp, Artificial sequence
  SiRNA target sequence
ttataaaattagaaaatgtttt

SEQ ID NO: 215903 - DNA, 22 bp, Artificial sequence
  SiRNA target sequence
tataaaattagaaaatgtttta

SEQ ID NO: 215904 - DNA, 22 bp, Artificial sequence
  SiRNA target sequence
ataaaattagaaaatgttttag

SEQ ID NO: 215905 - DNA, 22 bp, Artificial sequence
  SiRNA target sequence
taaaattagaaaatgttttagg

SEQ ID NO: 215906 - DNA, 22 bp, Artificial sequence
  SiRNA target sequence
aaaattagaaaatgttttagga

SEQ ID NO: 215907 - DNA, 22 bp, Artificial sequence
  SiRNA target sequence
aaattagaaaatgttttaggat

SEQ ID NO: 215908 - DNA, 22 bp, Artificial sequence
  SiRNA target sequence
aattagaaaatgttttaggatg

SEQ ID NO: 215909 - DNA, 22 bp, Artificial sequence
  SiRNA target sequence
attagaaaatgttttaggatgt

SEQ ID NO: 215910 - DNA, 22 bp, Artificial sequence
  SiRNA target sequence
ttagaaaatgttttaggatgtg

SEQ ID NO: 215911 - DNA, 22 bp, Artificial sequence
  SiRNA target sequence
tagaaaatgttttaggatgtgt

SEQ ID NO: 215912 - DNA, 22 bp, Artificial sequence
  SiRNA target sequence
agaaaatgttttaggatgtgta

SEQ ID NO: 215913 - DNA, 22 bp, Artificial sequence
  SiRNA target sequence
gaaaatgttttaggatgtgtag

SEQ ID NO: 215914 - DNA, 22 bp, Artificial sequence
  SiRNA target sequence
aaaatgttttaggatgtgtagc

SEQ ID NO: 215915 - DNA, 22 bp, Artificial sequence
  SiRNA target sequence
aaatgttttaggatgtgtagct

SEQ ID NO: 215916 - DNA, 22 bp, Artificial sequence
  SiRNA target sequence
aatgttttaggatgtgtagctg

SEQ ID NO: 215917 - DNA, 22 bp, Artificial sequence
  SiRNA target sequence
atgttttaggatgtgtagctgt

SEQ ID NO: 215918 - DNA, 22 bp, Artificial sequence
  SiRNA target sequence
tgttttaggatgtgtagctgta

SEQ ID NO: 215919 - DNA, 22 bp, Artificial sequence
  SiRNA target sequence
gttttaggatgtgtagctgtag

SEQ ID NO: 215920 - DNA, 22 bp, Artificial sequence
  SiRNA target sequence
ttttaggatgtgtagctgtagc

SEQ ID NO: 215921 - DNA, 22 bp, Artificial sequence
  SiRNA target sequence
tttaggatgtgtagctgtagct

SEQ ID NO: 215922 - DNA, 22 bp, Artificial sequence
  SiRNA target sequence
ttaggatgtgtagctgtagctc

SEQ ID NO: 215923 - DNA, 22 bp, Artificial sequence
  SiRNA target sequence
taggatgtgtagctgtagctct

SEQ ID NO: 215924 - DNA, 22 bp, Artificial sequence
  SiRNA target sequence
aggatgtgtagctgtagctctt

SEQ ID NO: 215925 - DNA, 22 bp, Artificial sequence
  SiRNA target sequence
ggatgtgtagctgtagctctta

SEQ ID NO: 215926 - DNA, 22 bp, Artificial sequence
  SiRNA target sequence
gatgtgtagctgtagctcttat

SEQ ID NO: 215927 - DNA, 22 bp, Artificial sequence
  SiRNA target sequence
atgtgtagctgtagctcttatg

SEQ ID NO: 215928 - DNA, 22 bp, Artificial sequence
  SiRNA target sequence
tgtgtagctgtagctcttatga

SEQ ID NO: 215929 - DNA, 22 bp, Artificial sequence
  SiRNA target sequence
gtgtagctgtagctcttatgaa

SEQ ID NO: 215930 - DNA, 22 bp, Artificial sequence
  SiRNA target sequence
tgtagctgtagctcttatgaaa

SEQ ID NO: 215931 - DNA, 22 bp, Artificial sequence
  SiRNA target sequence
gtagctgtagctcttatgaaag

SEQ ID NO: 215932 - DNA, 22 bp, Artificial sequence
  SiRNA target sequence
tagctgtagctcttatgaaagt

SEQ ID NO: 215933 - DNA, 22 bp, Artificial sequence
  SiRNA target sequence
agctgtagctcttatgaaagta

SEQ ID NO: 215934 - DNA, 22 bp, Artificial sequence
  SiRNA target sequence
gctgtagctcttatgaaagtag

SEQ ID NO: 215935 - DNA, 22 bp, Artificial sequence
  SiRNA target sequence
ctgtagctcttatgaaagtagc

SEQ ID NO: 215936 - DNA, 22 bp, Artificial sequence
  SiRNA target sequence
tgtagctcttatgaaagtagca

SEQ ID NO: 215937 - DNA, 22 bp, Artificial sequence
  SiRNA target sequence
gtagctcttatgaaagtagcaa

SEQ ID NO: 215938 - DNA, 22 bp, Artificial sequence
  SiRNA target sequence
tagctcttatgaaagtagcaaa

SEQ ID NO: 215939 - DNA, 22 bp, Artificial sequence
  SiRNA target sequence
agctcttatgaaagtagcaaaa

SEQ ID NO: 215940 - DNA, 22 bp, Artificial sequence
  SiRNA target sequence
gctcttatgaaagtagcaaaat

SEQ ID NO: 215941 - DNA, 22 bp, Artificial sequence
  SiRNA target sequence
ctcttatgaaagtagcaaaata

SEQ ID NO: 215942 - DNA, 22 bp, Artificial sequence
  SiRNA target sequence
tcttatgaaagtagcaaaatat

SEQ ID NO: 215943 - DNA, 22 bp, Artificial sequence
  SiRNA target sequence
cttatgaaagtagcaaaatatg

SEQ ID NO: 215944 - DNA, 22 bp, Artificial sequence
  SiRNA target sequence
ttatgaaagtagcaaaatatgg

SEQ ID NO: 215945 - DNA, 22 bp, Artificial sequence
  SiRNA target sequence
tatgaaagtagcaaaatatggc

SEQ ID NO: 215946 - DNA, 22 bp, Artificial sequence
  SiRNA target sequence
atgaaagtagcaaaatatggct

SEQ ID NO: 215947 - DNA, 22 bp, Artificial sequence
  SiRNA target sequence
tgaaagtagcaaaatatggctc

SEQ ID NO: 215948 - DNA, 22 bp, Artificial sequence
  SiRNA target sequence
gaaagtagcaaaatatggctct

SEQ ID NO: 215949 - DNA, 22 bp, Artificial sequence
  SiRNA target sequence
aaagtagcaaaatatggctctt

SEQ ID NO: 215950 - DNA, 22 bp, Artificial sequence
  SiRNA target sequence
aagtagcaaaatatggctcttt

SEQ ID NO: 215951 - DNA, 22 bp, Artificial sequence
  SiRNA target sequence
agtagcaaaatatggctctttt

SEQ ID NO: 215952 - DNA, 22 bp, Artificial sequence
  SiRNA target sequence
gtagcaaaatatggctcttttg

SEQ ID NO: 215953 - DNA, 22 bp, Artificial sequence
  SiRNA target sequence
tagcaaaatatggctcttttga

SEQ ID NO: 215954 - DNA, 22 bp, Artificial sequence
  SiRNA target sequence
agcaaaatatggctcttttgat

SEQ ID NO: 215955 - DNA, 22 bp, Artificial sequence
  SiRNA target sequence
gcaaaatatggctcttttgata

SEQ ID NO: 215956 - DNA, 22 bp, Artificial sequence
  SiRNA target sequence
caaaatatggctcttttgatat

SEQ ID NO: 215957 - DNA, 22 bp, Artificial sequence
  SiRNA target sequence
aaaatatggctcttttgatatt

SEQ ID NO: 215958 - DNA, 22 bp, Artificial sequence
  SiRNA target sequence
aaatatggctcttttgatattt

SEQ ID NO: 215959 - DNA, 22 bp, Artificial sequence
  SiRNA target sequence
aatatggctcttttgatatttc

SEQ ID NO: 215960 - DNA, 22 bp, Artificial sequence
  SiRNA target sequence
atatggctcttttgatatttcc

SEQ ID NO: 215961 - DNA, 22 bp, Artificial sequence
  SiRNA target sequence
tatggctcttttgatatttcca

SEQ ID NO: 215962 - DNA, 22 bp, Artificial sequence
  SiRNA target sequence
atggctcttttgatatttccaa

SEQ ID NO: 215963 - DNA, 22 bp, Artificial sequence
  SiRNA target sequence
tggctcttttgatatttccaaa

SEQ ID NO: 215964 - DNA, 22 bp, Artificial sequence
  SiRNA target sequence
ggctcttttgatatttccaaag

SEQ ID NO: 215965 - DNA, 22 bp, Artificial sequence
  SiRNA target sequence
gctcttttgatatttccaaaga

SEQ ID NO: 215966 - DNA, 22 bp, Artificial sequence
  SiRNA target sequence
ctcttttgatatttccaaagaa

SEQ ID NO: 215967 - DNA, 22 bp, Artificial sequence
  SiRNA target sequence
tcttttgatatttccaaagaag

SEQ ID NO: 215968 - DNA, 22 bp, Artificial sequence
  SiRNA target sequence
cttttgatatttccaaagaagc

SEQ ID NO: 215969 - DNA, 22 bp, Artificial sequence
  SiRNA target sequence
ttttgatatttccaaagaagcc

SEQ ID NO: 215970 - DNA, 22 bp, Artificial sequence
  SiRNA target sequence
tttgatatttccaaagaagcca

SEQ ID NO: 215971 - DNA, 22 bp, Artificial sequence
  SiRNA target sequence
ttgatatttccaaagaagccat

SEQ ID NO: 215972 - DNA, 22 bp, Artificial sequence
  SiRNA target sequence
tgatatttccaaagaagccatt

SEQ ID NO: 215973 - DNA, 22 bp, Artificial sequence
  SiRNA target sequence
gatatttccaaagaagccattt

SEQ ID NO: 215974 - DNA, 22 bp, Artificial sequence
  SiRNA target sequence
atatttccaaagaagccatttc

SEQ ID NO: 215975 - DNA, 22 bp, Artificial sequence
  SiRNA target sequence
tatttccaaagaagccatttca

SEQ ID NO: 215976 - DNA, 22 bp, Artificial sequence
  SiRNA target sequence
atttccaaagaagccatttcaa

SEQ ID NO: 215977 - DNA, 22 bp, Artificial sequence
  SiRNA target sequence
tttccaaagaagccatttcaat

SEQ ID NO: 215978 - DNA, 22 bp, Artificial sequence
  SiRNA target sequence
ttccaaagaagccatttcaatg

SEQ ID NO: 215979 - DNA, 22 bp, Artificial sequence
  SiRNA target sequence
tccaaagaagccatttcaatgc

SEQ ID NO: 215980 - DNA, 22 bp, Artificial sequence
  SiRNA target sequence
ccaaagaagccatttcaatgca

SEQ ID NO: 215981 - DNA, 22 bp, Artificial sequence
  SiRNA target sequence
caaagaagccatttcaatgcag

SEQ ID NO: 215982 - DNA, 22 bp, Artificial sequence
  SiRNA target sequence
aaagaagccatttcaatgcaga

SEQ ID NO: 215983 - DNA, 22 bp, Artificial sequence
  SiRNA target sequence
aagaagccatttcaatgcagat

SEQ ID NO: 215984 - DNA, 22 bp, Artificial sequence
  SiRNA target sequence
agaagccatttcaatgcagatt

SEQ ID NO: 215985 - DNA, 22 bp, Artificial sequence
  SiRNA target sequence
gaagccatttcaatgcagattg

SEQ ID NO: 215986 - DNA, 22 bp, Artificial sequence
  SiRNA target sequence
aagccatttcaatgcagattga

SEQ ID NO: 215987 - DNA, 22 bp, Artificial sequence
  SiRNA target sequence
agccatttcaatgcagattgat

SEQ ID NO: 215988 - DNA, 22 bp, Artificial sequence
  SiRNA target sequence
gccatttcaatgcagattgatt

SEQ ID NO: 215989 - DNA, 22 bp, Artificial sequence
  SiRNA target sequence
ccatttcaatgcagattgattc

SEQ ID NO: 215990 - DNA, 22 bp, Artificial sequence
  SiRNA target sequence
catttcaatgcagattgattcg

SEQ ID NO: 215991 - DNA, 22 bp, Artificial sequence
  SiRNA target sequence
atttcaatgcagattgattcgt

SEQ ID NO: 215992 - DNA, 22 bp, Artificial sequence
  SiRNA target sequence
tttcaatgcagattgattcgtc

SEQ ID NO: 215993 - DNA, 22 bp, Artificial sequence
  SiRNA target sequence
ttcaatgcagattgattcgtca

SEQ ID NO: 215994 - DNA, 22 bp, Artificial sequence
  SiRNA target sequence
tcaatgcagattgattcgtcat

SEQ ID NO: 215995 - DNA, 22 bp, Artificial sequence
  SiRNA target sequence
caatgcagattgattcgtcatt

SEQ ID NO: 215996 - DNA, 22 bp, Artificial sequence
  SiRNA target sequence
aatgcagattgattcgtcattg

SEQ ID NO: 215997 - DNA, 22 bp, Artificial sequence
  SiRNA target sequence
atgcagattgattcgtcattgc

SEQ ID NO: 215998 - DNA, 22 bp, Artificial sequence
  SiRNA target sequence
tgcagattgattcgtcattgcg

SEQ ID NO: 215999 - DNA, 22 bp, Artificial sequence
  SiRNA target sequence
gcagattgattcgtcattgcgt

SEQ ID NO: 216000 - DNA, 22 bp, Artificial sequence
  SiRNA target sequence
cagattgattcgtcattgcgtg

SEQ ID NO: 216001 - DNA, 22 bp, Artificial sequence
  SiRNA target sequence
agattgattcgtcattgcgtgc

SEQ ID NO: 216002 - DNA, 22 bp, Artificial sequence
  SiRNA target sequence
gattgattcgtcattgcgtgca

SEQ ID NO: 216003 - DNA, 22 bp, Artificial sequence
  SiRNA target sequence
attgattcgtcattgcgtgcac

SEQ ID NO: 216004 - DNA, 22 bp, Artificial sequence
  SiRNA target sequence
ttgattcgtcattgcgtgcacg

SEQ ID NO: 216005 - DNA, 22 bp, Artificial sequence
  SiRNA target sequence
tgattcgtcattgcgtgcacgt

SEQ ID NO: 216006 - DNA, 22 bp, Artificial sequence
  SiRNA target sequence
gattcgtcattgcgtgcacgtt

SEQ ID NO: 216007 - DNA, 22 bp, Artificial sequence
  SiRNA target sequence
attcgtcattgcgtgcacgtta

SEQ ID NO: 216008 - DNA, 22 bp, Artificial sequence
  SiRNA target sequence
ttcgtcattgcgtgcacgttat

SEQ ID NO: 216009 - DNA, 22 bp, Artificial sequence
  SiRNA target sequence
tcgtcattgcgtgcacgttata

SEQ ID NO: 216010 - DNA, 22 bp, Artificial sequence
  SiRNA target sequence
cgtcattgcgtgcacgttataa

SEQ ID NO: 216011 - DNA, 22 bp, Artificial sequence
  SiRNA target sequence
gtcattgcgtgcacgttataaa

SEQ ID NO: 216012 - DNA, 22 bp, Artificial sequence
  SiRNA target sequence
tcattgcgtgcacgttataaag

SEQ ID NO: 216013 - DNA, 22 bp, Artificial sequence
  SiRNA target sequence
cattgcgtgcacgttataaagg

SEQ ID NO: 216014 - DNA, 22 bp, Artificial sequence
  SiRNA target sequence
attgcgtgcacgttataaagga

SEQ ID NO: 216015 - DNA, 22 bp, Artificial sequence
  SiRNA target sequence
ttgcgtgcacgttataaaggaa

SEQ ID NO: 216016 - DNA, 22 bp, Artificial sequence
  SiRNA target sequence
tgcgtgcacgttataaaggaat

SEQ ID NO: 216017 - DNA, 22 bp, Artificial sequence
  SiRNA target sequence
gcgtgcacgttataaaggaatt

SEQ ID NO: 216018 - DNA, 22 bp, Artificial sequence
  SiRNA target sequence
cgtgcacgttataaaggaattt

SEQ ID NO: 216019 - DNA, 22 bp, Artificial sequence
  SiRNA target sequence
gtgcacgttataaaggaatttt

SEQ ID NO: 216020 - DNA, 22 bp, Artificial sequence
  SiRNA target sequence
tgcacgttataaaggaattttt

SEQ ID NO: 216021 - DNA, 22 bp, Artificial sequence
  SiRNA target sequence
gcacgttataaaggaatttttg

SEQ ID NO: 216022 - DNA, 22 bp, Artificial sequence
  SiRNA target sequence
cacgttataaaggaatttttga

SEQ ID NO: 216023 - DNA, 22 bp, Artificial sequence
  SiRNA target sequence
acgttataaaggaatttttgac

SEQ ID NO: 216024 - DNA, 22 bp, Artificial sequence
  SiRNA target sequence
cgttataaaggaatttttgacg

SEQ ID NO: 216025 - DNA, 22 bp, Artificial sequence
  SiRNA target sequence
gttataaaggaatttttgacgg

SEQ ID NO: 216026 - DNA, 22 bp, Artificial sequence
  SiRNA target sequence
ttataaaggaatttttgacggt

SEQ ID NO: 216027 - DNA, 22 bp, Artificial sequence
  SiRNA target sequence
tataaaggaatttttgacggtg

SEQ ID NO: 216028 - DNA, 22 bp, Artificial sequence
  SiRNA target sequence
ataaaggaatttttgacggtgt

SEQ ID NO: 216029 - DNA, 22 bp, Artificial sequence
  SiRNA target sequence
taaaggaatttttgacggtgtt

SEQ ID NO: 216030 - DNA, 22 bp, Artificial sequence
  SiRNA target sequence
aaaggaatttttgacggtgttt

SEQ ID NO: 216031 - DNA, 22 bp, Artificial sequence
  SiRNA target sequence
aaggaatttttgacggtgtttt

SEQ ID NO: 216032 - DNA, 22 bp, Artificial sequence
  SiRNA target sequence
aggaatttttgacggtgttttt

SEQ ID NO: 216033 - DNA, 22 bp, Artificial sequence
  SiRNA target sequence
ggaatttttgacggtgtttttg

SEQ ID NO: 216034 - DNA, 22 bp, Artificial sequence
  SiRNA target sequence
gaatttttgacggtgtttttgg

SEQ ID NO: 216035 - DNA, 22 bp, Artificial sequence
  SiRNA target sequence
aatttttgacggtgtttttggt

SEQ ID NO: 216036 - DNA, 22 bp, Artificial sequence
  SiRNA target sequence
atttttgacggtgtttttggta

SEQ ID NO: 216037 - DNA, 22 bp, Artificial sequence
  SiRNA target sequence
tttttgacggtgtttttggtaa

SEQ ID NO: 216038 - DNA, 22 bp, Artificial sequence
  SiRNA target sequence
ttttgacggtgtttttggtaag

SEQ ID NO: 216039 - DNA, 22 bp, Artificial sequence
  SiRNA target sequence
tttgacggtgtttttggtaagt

SEQ ID NO: 216040 - DNA, 22 bp, Artificial sequence
  SiRNA target sequence
ttgacggtgtttttggtaagtt

SEQ ID NO: 216041 - DNA, 22 bp, Artificial sequence
  SiRNA target sequence
tgacggtgtttttggtaagtta

SEQ ID NO: 216042 - DNA, 22 bp, Artificial sequence
  SiRNA target sequence
gacggtgtttttggtaagttag

SEQ ID NO: 216043 - DNA, 22 bp, Artificial sequence
  SiRNA target sequence
acggtgtttttggtaagttagg

SEQ ID NO: 216044 - DNA, 22 bp, Artificial sequence
  SiRNA target sequence
cggtgtttttggtaagttagga

SEQ ID NO: 216045 - DNA, 22 bp, Artificial sequence
  SiRNA target sequence
ggtgtttttggtaagttaggaa

SEQ ID NO: 216046 - DNA, 22 bp, Artificial sequence
  SiRNA target sequence
gtgtttttggtaagttaggaaa

SEQ ID NO: 216047 - DNA, 22 bp, Artificial sequence
  SiRNA target sequence
tgtttttggtaagttaggaaaa

SEQ ID NO: 216048 - DNA, 22 bp, Artificial sequence
  SiRNA target sequence
gtttttggtaagttaggaaaat

SEQ ID NO: 216049 - DNA, 22 bp, Artificial sequence
  SiRNA target sequence
tttttggtaagttaggaaaatc

SEQ ID NO: 216050 - DNA, 22 bp, Artificial sequence
  SiRNA target sequence
ttttggtaagttaggaaaatct

SEQ ID NO: 216051 - DNA, 22 bp, Artificial sequence
  SiRNA target sequence
tttggtaagttaggaaaatctc

SEQ ID NO: 216052 - DNA, 22 bp, Artificial sequence
  SiRNA target sequence
ttggtaagttaggaaaatctct

SEQ ID NO: 216053 - DNA, 22 bp, Artificial sequence
  SiRNA target sequence
tggtaagttaggaaaatctctt

SEQ ID NO: 216054 - DNA, 22 bp, Artificial sequence
  SiRNA target sequence
ggtaagttaggaaaatctcttg

SEQ ID NO: 216055 - DNA, 22 bp, Artificial sequence
  SiRNA target sequence
gtaagttaggaaaatctcttgg

SEQ ID NO: 216056 - DNA, 22 bp, Artificial sequence
  SiRNA target sequence
taagttaggaaaatctcttgga

SEQ ID NO: 216057 - DNA, 22 bp, Artificial sequence
  SiRNA target sequence
aagttaggaaaatctcttggat

SEQ ID NO: 216058 - DNA, 22 bp, Artificial sequence
  SiRNA target sequence
agttaggaaaatctcttggatc

SEQ ID NO: 216059 - DNA, 22 bp, Artificial sequence
  SiRNA target sequence
gttaggaaaatctcttggatcg

SEQ ID NO: 216060 - DNA, 22 bp, Artificial sequence
  SiRNA target sequence
ttaggaaaatctcttggatcgt

SEQ ID NO: 216061 - DNA, 22 bp, Artificial sequence
  SiRNA target sequence
taggaaaatctcttggatcgtt

SEQ ID NO: 216062 - DNA, 22 bp, Artificial sequence
  SiRNA target sequence
aggaaaatctcttggatcgtta

SEQ ID NO: 216063 - DNA, 22 bp, Artificial sequence
  SiRNA target sequence
ggaaaatctcttggatcgttat

SEQ ID NO: 216064 - DNA, 22 bp, Artificial sequence
  SiRNA target sequence
gaaaatctcttggatcgttatt

SEQ ID NO: 216065 - DNA, 22 bp, Artificial sequence
  SiRNA target sequence
aaaatctcttggatcgttattt

SEQ ID NO: 216066 - DNA, 22 bp, Artificial sequence
  SiRNA target sequence
aaatctcttggatcgttatttg

SEQ ID NO: 216067 - DNA, 22 bp, Artificial sequence
  SiRNA target sequence
aatctcttggatcgttatttgt

SEQ ID NO: 216068 - DNA, 22 bp, Artificial sequence
  SiRNA target sequence
atctcttggatcgttatttgtg

SEQ ID NO: 216069 - DNA, 22 bp, Artificial sequence
  SiRNA target sequence
tctcttggatcgttatttgtgt

SEQ ID NO: 216070 - DNA, 22 bp, Artificial sequence
  SiRNA target sequence
ctcttggatcgttatttgtgtg

SEQ ID NO: 216071 - DNA, 22 bp, Artificial sequence
  SiRNA target sequence
tcttggatcgttatttgtgtgg

SEQ ID NO: 216072 - DNA, 22 bp, Artificial sequence
  SiRNA target sequence
cttggatcgttatttgtgtgga

SEQ ID NO: 216073 - DNA, 22 bp, Artificial sequence
  SiRNA target sequence
ttggatcgttatttgtgtggat

SEQ ID NO: 216074 - DNA, 22 bp, Artificial sequence
  SiRNA target sequence
tggatcgttatttgtgtggatt

SEQ ID NO: 216075 - DNA, 22 bp, Artificial sequence
  SiRNA target sequence
ggatcgttatttgtgtggatta

SEQ ID NO: 216076 - DNA, 22 bp, Artificial sequence
  SiRNA target sequence
gatcgttatttgtgtggattat

SEQ ID NO: 216077 - DNA, 22 bp, Artificial sequence
  SiRNA target sequence
atcgttatttgtgtggattatg

SEQ ID NO: 216078 - DNA, 22 bp, Artificial sequence
  SiRNA target sequence
tcgttatttgtgtggattatgg

SEQ ID NO: 216079 - DNA, 22 bp, Artificial sequence
  SiRNA target sequence
cgttatttgtgtggattatggg

SEQ ID NO: 216080 - DNA, 22 bp, Artificial sequence
  SiRNA target sequence
gttatttgtgtggattatggga

SEQ ID NO: 216081 - DNA, 22 bp, Artificial sequence
  SiRNA target sequence
ttatttgtgtggattatgggat

SEQ ID NO: 216082 - DNA, 22 bp, Artificial sequence
  SiRNA target sequence
tatttgtgtggattatgggata

SEQ ID NO: 216083 - DNA, 22 bp, Artificial sequence
  SiRNA target sequence
atttgtgtggattatgggatat

SEQ ID NO: 216084 - DNA, 22 bp, Artificial sequence
  SiRNA target sequence
tttgtgtggattatgggatatg

SEQ ID NO: 216085 - DNA, 22 bp, Artificial sequence
  SiRNA target sequence
ttgtgtggattatgggatatgc

SEQ ID NO: 216086 - DNA, 22 bp, Artificial sequence
  SiRNA target sequence
tgtgtggattatgggatatgca

SEQ ID NO: 216087 - DNA, 22 bp, Artificial sequence
  SiRNA target sequence
gtgtggattatgggatatgcat

SEQ ID NO: 216088 - DNA, 22 bp, Artificial sequence
  SiRNA target sequence
tgtggattatgggatatgcatt

SEQ ID NO: 216089 - DNA, 22 bp, Artificial sequence
  SiRNA target sequence
gtggattatgggatatgcattt

SEQ ID NO: 216090 - DNA, 22 bp, Artificial sequence
  SiRNA target sequence
tggattatgggatatgcatttc

SEQ ID NO: 216091 - DNA, 22 bp, Artificial sequence
  SiRNA target sequence
ggattatgggatatgcatttca

SEQ ID NO: 216092 - DNA, 22 bp, Artificial sequence
  SiRNA target sequence
gattatgggatatgcatttcaa

SEQ ID NO: 216093 - DNA, 22 bp, Artificial sequence
  SiRNA target sequence
attatgggatatgcatttcaaa

SEQ ID NO: 216094 - DNA, 22 bp, Artificial sequence
  SiRNA target sequence
ttatgggatatgcatttcaaac

SEQ ID NO: 216095 - DNA, 22 bp, Artificial sequence
  SiRNA target sequence
tatgggatatgcatttcaaaca

SEQ ID NO: 216096 - DNA, 22 bp, Artificial sequence
  SiRNA target sequence
atgggatatgcatttcaaacaa

SEQ ID NO: 216097 - DNA, 22 bp, Artificial sequence
  SiRNA target sequence
tgggatatgcatttcaaacaag

SEQ ID NO: 216098 - DNA, 22 bp, Artificial sequence
  SiRNA target sequence
gggatatgcatttcaaacaaga

SEQ ID NO: 216099 - DNA, 22 bp, Artificial sequence
  SiRNA target sequence
ggatatgcatttcaaacaagag

SEQ ID NO: 216100 - DNA, 22 bp, Artificial sequence
  SiRNA target sequence
gatatgcatttcaaacaagaga

SEQ ID NO: 216101 - DNA, 22 bp, Artificial sequence
  SiRNA target sequence
atatgcatttcaaacaagagat

SEQ ID NO: 216102 - DNA, 22 bp, Artificial sequence
  SiRNA target sequence
tatgcatttcaaacaagagatt

SEQ ID NO: 216103 - DNA, 22 bp, Artificial sequence
  SiRNA target sequence
atgcatttcaaacaagagattt

SEQ ID NO: 216104 - DNA, 22 bp, Artificial sequence
  SiRNA target sequence
tgcatttcaaacaagagatttt

SEQ ID NO: 216105 - DNA, 22 bp, Artificial sequence
  SiRNA target sequence
gcatttcaaacaagagatttta

SEQ ID NO: 216106 - DNA, 22 bp, Artificial sequence
  SiRNA target sequence
catttcaaacaagagattttag

SEQ ID NO: 216107 - DNA, 22 bp, Artificial sequence
  SiRNA target sequence
atttcaaacaagagattttaga

SEQ ID NO: 216108 - DNA, 22 bp, Artificial sequence
  SiRNA target sequence
tttcaaacaagagattttagaa

SEQ ID NO: 216109 - DNA, 22 bp, Artificial sequence
  SiRNA target sequence
ttcaaacaagagattttagaaa

SEQ ID NO: 216110 - DNA, 22 bp, Artificial sequence
  SiRNA target sequence
tcaaacaagagattttagaaaa

SEQ ID NO: 216111 - DNA, 22 bp, Artificial sequence
  SiRNA target sequence
caaacaagagattttagaaaat

SEQ ID NO: 216112 - DNA, 22 bp, Artificial sequence
  SiRNA target sequence
aaacaagagattttagaaaatt

SEQ ID NO: 216113 - DNA, 22 bp, Artificial sequence
  SiRNA target sequence
aacaagagattttagaaaatta

SEQ ID NO: 216114 - DNA, 22 bp, Artificial sequence
  SiRNA target sequence
acaagagattttagaaaattag

SEQ ID NO: 216115 - DNA, 22 bp, Artificial sequence
  SiRNA target sequence
caagagattttagaaaattagc

SEQ ID NO: 216116 - DNA, 22 bp, Artificial sequence
  SiRNA target sequence
aagagattttagaaaattagct

SEQ ID NO: 216117 - DNA, 22 bp, Artificial sequence
  SiRNA target sequence
agagattttagaaaattagctc

SEQ ID NO: 216118 - DNA, 22 bp, Artificial sequence
  SiRNA target sequence
gagattttagaaaattagctcc

SEQ ID NO: 216119 - DNA, 22 bp, Artificial sequence
  SiRNA target sequence
agattttagaaaattagctccc

SEQ ID NO: 216120 - DNA, 22 bp, Artificial sequence
  SiRNA target sequence
gattttagaaaattagctccct

SEQ ID NO: 216121 - DNA, 22 bp, Artificial sequence
  SiRNA target sequence
attttagaaaattagctccctt

SEQ ID NO: 216122 - DNA, 22 bp, Artificial sequence
  SiRNA target sequence
ttttagaaaattagctccctta

SEQ ID NO: 216123 - DNA, 22 bp, Artificial sequence
  SiRNA target sequence
tttagaaaattagctcccttat

SEQ ID NO: 216124 - DNA, 22 bp, Artificial sequence
  SiRNA target sequence
ttagaaaattagctcccttatg

SEQ ID NO: 216125 - DNA, 22 bp, Artificial sequence
  SiRNA target sequence
tagaaaattagctcccttatgt

SEQ ID NO: 216126 - DNA, 22 bp, Artificial sequence
  SiRNA target sequence
agaaaattagctcccttatgta

SEQ ID NO: 216127 - DNA, 22 bp, Artificial sequence
  SiRNA target sequence
gaaaattagctcccttatgtat

SEQ ID NO: 216128 - DNA, 22 bp, Artificial sequence
  SiRNA target sequence
aaaattagctcccttatgtatc

SEQ ID NO: 216129 - DNA, 22 bp, Artificial sequence
  SiRNA target sequence
aaattagctcccttatgtatca

SEQ ID NO: 216130 - DNA, 22 bp, Artificial sequence
  SiRNA target sequence
aattagctcccttatgtatcag

SEQ ID NO: 216131 - DNA, 22 bp, Artificial sequence
  SiRNA target sequence
attagctcccttatgtatcagc

SEQ ID NO: 216132 - DNA, 22 bp, Artificial sequence
  SiRNA target sequence
ttagctcccttatgtatcagcg

SEQ ID NO: 216133 - DNA, 22 bp, Artificial sequence
  SiRNA target sequence
tagctcccttatgtatcagcgt

SEQ ID NO: 216134 - DNA, 22 bp, Artificial sequence
  SiRNA target sequence
agctcccttatgtatcagcgta

SEQ ID NO: 216135 - DNA, 22 bp, Artificial sequence
  SiRNA target sequence
gctcccttatgtatcagcgtaa

SEQ ID NO: 216136 - DNA, 22 bp, Artificial sequence
  SiRNA target sequence
ctcccttatgtatcagcgtaat

SEQ ID NO: 216137 - DNA, 22 bp, Artificial sequence
  SiRNA target sequence
tcccttatgtatcagcgtaatt

SEQ ID NO: 216138 - DNA, 22 bp, Artificial sequence
  SiRNA target sequence
cccttatgtatcagcgtaattg

SEQ ID NO: 216139 - DNA, 22 bp, Artificial sequence
  SiRNA target sequence
ccttatgtatcagcgtaattgt

SEQ ID NO: 216140 - DNA, 22 bp, Artificial sequence
  SiRNA target sequence
cttatgtatcagcgtaattgtc

SEQ ID NO: 216141 - DNA, 22 bp, Artificial sequence
  SiRNA target sequence
ttatgtatcagcgtaattgtct

SEQ ID NO: 216142 - DNA, 22 bp, Artificial sequence
  SiRNA target sequence
tatgtatcagcgtaattgtctt

SEQ ID NO: 216143 - DNA, 22 bp, Artificial sequence
  SiRNA target sequence
atgtatcagcgtaattgtcttt

SEQ ID NO: 216144 - DNA, 22 bp, Artificial sequence
  SiRNA target sequence
tgtatcagcgtaattgtctttt

SEQ ID NO: 216145 - DNA, 22 bp, Artificial sequence
  SiRNA target sequence
gtatcagcgtaattgtcttttt

SEQ ID NO: 216146 - DNA, 22 bp, Artificial sequence
  SiRNA target sequence
tatcagcgtaattgtctttttt

SEQ ID NO: 216147 - DNA, 22 bp, Artificial sequence
  SiRNA target sequence
atcagcgtaattgtcttttttg

SEQ ID NO: 216148 - DNA, 22 bp, Artificial sequence
  SiRNA target sequence
tcagcgtaattgtcttttttgt

SEQ ID NO: 216149 - DNA, 22 bp, Artificial sequence
  SiRNA target sequence
cagcgtaattgtcttttttgtt

SEQ ID NO: 216150 - DNA, 22 bp, Artificial sequence
  SiRNA target sequence
agcgtaattgtcttttttgtta

SEQ ID NO: 216151 - DNA, 22 bp, Artificial sequence
  SiRNA target sequence
gcgtaattgtcttttttgttat

SEQ ID NO: 216152 - DNA, 22 bp, Artificial sequence
  SiRNA target sequence
cgtaattgtcttttttgttatt

SEQ ID NO: 216153 - DNA, 22 bp, Artificial sequence
  SiRNA target sequence
gtaattgtcttttttgttatta

SEQ ID NO: 216154 - DNA, 22 bp, Artificial sequence
  SiRNA target sequence
taattgtcttttttgttattat

SEQ ID NO: 216155 - DNA, 22 bp, Artificial sequence
  SiRNA target sequence
aattgtcttttttgttattatt

SEQ ID NO: 216156 - DNA, 22 bp, Artificial sequence
  SiRNA target sequence
attgtcttttttgttattattt

SEQ ID NO: 216157 - DNA, 22 bp, Artificial sequence
  SiRNA target sequence
ttgtcttttttgttattatttg

SEQ ID NO: 216158 - DNA, 22 bp, Artificial sequence
  SiRNA target sequence
tgtcttttttgttattatttgg

SEQ ID NO: 216159 - DNA, 22 bp, Artificial sequence
  SiRNA target sequence
gtcttttttgttattatttgga

SEQ ID NO: 216160 - DNA, 22 bp, Artificial sequence
  SiRNA target sequence
tcttttttgttattatttggat

SEQ ID NO: 216161 - DNA, 22 bp, Artificial sequence
  SiRNA target sequence
cttttttgttattatttggatt

SEQ ID NO: 216162 - DNA, 22 bp, Artificial sequence
  SiRNA target sequence
ttttttgttattatttggattt

SEQ ID NO: 216163 - DNA, 22 bp, Artificial sequence
  SiRNA target sequence
tttttgttattatttggattta

SEQ ID NO: 216164 - DNA, 22 bp, Artificial sequence
  SiRNA target sequence
ttttgttattatttggatttat

SEQ ID NO: 216165 - DNA, 22 bp, Artificial sequence
  SiRNA target sequence
tttgttattatttggatttatt

SEQ ID NO: 216166 - DNA, 22 bp, Artificial sequence
  SiRNA target sequence
ttgttattatttggatttattc

SEQ ID NO: 216167 - DNA, 22 bp, Artificial sequence
  SiRNA target sequence
tgttattatttggatttattca

SEQ ID NO: 216168 - DNA, 22 bp, Artificial sequence
  SiRNA target sequence
gttattatttggatttattcag

SEQ ID NO: 216169 - DNA, 22 bp, Artificial sequence
  SiRNA target sequence
ttattatttggatttattcagt

SEQ ID NO: 216170 - DNA, 22 bp, Artificial sequence
  SiRNA target sequence
tattatttggatttattcagtt

SEQ ID NO: 216171 - DNA, 22 bp, Artificial sequence
  SiRNA target sequence
attatttggatttattcagtta

SEQ ID NO: 216172 - DNA, 22 bp, Artificial sequence
  SiRNA target sequence
ttatttggatttattcagttat

SEQ ID NO: 216173 - DNA, 22 bp, Artificial sequence
  SiRNA target sequence
tatttggatttattcagttatt

SEQ ID NO: 216174 - DNA, 22 bp, Artificial sequence
  SiRNA target sequence
atttggatttattcagttattt

SEQ ID NO: 216175 - DNA, 22 bp, Artificial sequence
  SiRNA target sequence
tttggatttattcagttattta

SEQ ID NO: 216176 - DNA, 22 bp, Artificial sequence
  SiRNA target sequence
ttggatttattcagttatttat

SEQ ID NO: 216177 - DNA, 22 bp, Artificial sequence
  SiRNA target sequence
tggatttattcagttatttatt

SEQ ID NO: 216178 - DNA, 22 bp, Artificial sequence
  SiRNA target sequence
ggatttattcagttatttattt

SEQ ID NO: 216179 - DNA, 22 bp, Artificial sequence
  SiRNA target sequence
gatttattcagttatttattta

SEQ ID NO: 216180 - DNA, 22 bp, Artificial sequence
  SiRNA target sequence
atttattcagttatttatttaa

SEQ ID NO: 216181 - DNA, 22 bp, Artificial sequence
  SiRNA target sequence
tttattcagttatttatttaaa

SEQ ID NO: 216182 - DNA, 22 bp, Artificial sequence
  SiRNA target sequence
ttattcagttatttatttaaat

SEQ ID NO: 216183 - DNA, 22 bp, Artificial sequence
  SiRNA target sequence
tattcagttatttatttaaata

SEQ ID NO: 216184 - DNA, 22 bp, Artificial sequence
  SiRNA target sequence
attcagttatttatttaaataa

SEQ ID NO: 216185 - DNA, 22 bp, Artificial sequence
  SiRNA target sequence
ttcagttatttatttaaataag

SEQ ID NO: 216186 - DNA, 22 bp, Artificial sequence
  SiRNA target sequence
tcagttatttatttaaataaga

SEQ ID NO: 216187 - DNA, 22 bp, Artificial sequence
  SiRNA target sequence
cagttatttatttaaataagaa

SEQ ID NO: 216188 - DNA, 22 bp, Artificial sequence
  SiRNA target sequence
agttatttatttaaataagaaa

SEQ ID NO: 216189 - DNA, 22 bp, Artificial sequence
  SiRNA target sequence
gttatttatttaaataagaaat

SEQ ID NO: 216190 - DNA, 22 bp, Artificial sequence
  SiRNA target sequence
ttatttatttaaataagaaata

SEQ ID NO: 216191 - DNA, 22 bp, Artificial sequence
  SiRNA target sequence
tatttatttaaataagaaatac

SEQ ID NO: 216192 - DNA, 22 bp, Artificial sequence
  SiRNA target sequence
atttatttaaataagaaataca

SEQ ID NO: 216193 - DNA, 22 bp, Artificial sequence
  SiRNA target sequence
tttatttaaataagaaatacaa

SEQ ID NO: 216194 - DNA, 22 bp, Artificial sequence
  SiRNA target sequence
ttatttaaataagaaatacaaa

SEQ ID NO: 216195 - DNA, 22 bp, Artificial sequence
  SiRNA target sequence
tatttaaataagaaatacaaag

SEQ ID NO: 216196 - DNA, 22 bp, Artificial sequence
  SiRNA target sequence
atttaaataagaaatacaaaga

SEQ ID NO: 216197 - DNA, 22 bp, Artificial sequence
  SiRNA target sequence
tttaaataagaaatacaaagaa

SEQ ID NO: 216198 - DNA, 22 bp, Artificial sequence
  SiRNA target sequence
ttaaataagaaatacaaagaat

SEQ ID NO: 216199 - DNA, 22 bp, Artificial sequence
  SiRNA target sequence
taaataagaaatacaaagaatc

SEQ ID NO: 216200 - DNA, 22 bp, Artificial sequence
  SiRNA target sequence
aaataagaaatacaaagaatca

SEQ ID NO: 216201 - DNA, 22 bp, Artificial sequence
  SiRNA target sequence
aataagaaatacaaagaatcag

SEQ ID NO: 216202 - DNA, 22 bp, Artificial sequence
  SiRNA target sequence
ataagaaatacaaagaatcagt

SEQ ID NO: 216203 - DNA, 22 bp, Artificial sequence
  SiRNA target sequence
taagaaatacaaagaatcagtt

SEQ ID NO: 216204 - DNA, 22 bp, Artificial sequence
  SiRNA target sequence
aagaaatacaaagaatcagttg

SEQ ID NO: 216205 - DNA, 22 bp, Artificial sequence
  SiRNA target sequence
agaaatacaaagaatcagttgt

SEQ ID NO: 216206 - DNA, 22 bp, Artificial sequence
  SiRNA target sequence
gaaatacaaagaatcagttgtt

SEQ ID NO: 216207 - DNA, 22 bp, Artificial sequence
  SiRNA target sequence
aaatacaaagaatcagttgtta

SEQ ID NO: 216208 - DNA, 22 bp, Artificial sequence
  SiRNA target sequence
aatacaaagaatcagttgttag

SEQ ID NO: 216209 - DNA, 22 bp, Artificial sequence
  SiRNA target sequence
atacaaagaatcagttgttagt

SEQ ID NO: 216210 - DNA, 22 bp, Artificial sequence
  SiRNA target sequence
tacaaagaatcagttgttagta

SEQ ID NO: 216211 - DNA, 22 bp, Artificial sequence
  SiRNA target sequence
acaaagaatcagttgttagtaa

SEQ ID NO: 216212 - DNA, 22 bp, Artificial sequence
  SiRNA target sequence
caaagaatcagttgttagtaat

SEQ ID NO: 216213 - DNA, 22 bp, Artificial sequence
  SiRNA target sequence
aaagaatcagttgttagtaatt

SEQ ID NO: 216214 - DNA, 22 bp, Artificial sequence
  SiRNA target sequence
aagaatcagttgttagtaattt

SEQ ID NO: 216215 - DNA, 22 bp, Artificial sequence
  SiRNA target sequence
agaatcagttgttagtaattta

SEQ ID NO: 216216 - DNA, 22 bp, Artificial sequence
  SiRNA target sequence
gaatcagttgttagtaatttac

SEQ ID NO: 216217 - DNA, 22 bp, Artificial sequence
  SiRNA target sequence
aatcagttgttagtaatttacc

SEQ ID NO: 216218 - DNA, 22 bp, Artificial sequence
  SiRNA target sequence
atcagttgttagtaatttaccc

SEQ ID NO: 216219 - DNA, 22 bp, Artificial sequence
  SiRNA target sequence
tcagttgttagtaatttaccca

SEQ ID NO: 216220 - DNA, 22 bp, Artificial sequence
  SiRNA target sequence
cagttgttagtaatttacccat

SEQ ID NO: 216221 - DNA, 22 bp, Artificial sequence
  SiRNA target sequence
agttgttagtaatttacccatc

SEQ ID NO: 216222 - DNA, 22 bp, Artificial sequence
  SiRNA target sequence
gttgttagtaatttacccatcg

SEQ ID NO: 216223 - DNA, 22 bp, Artificial sequence
  SiRNA target sequence
ttgttagtaatttacccatcga

SEQ ID NO: 216224 - DNA, 22 bp, Artificial sequence
  SiRNA target sequence
tgttagtaatttacccatcgat

SEQ ID NO: 216225 - DNA, 22 bp, Artificial sequence
  SiRNA target sequence
gttagtaatttacccatcgatg

SEQ ID NO: 216226 - DNA, 22 bp, Artificial sequence
  SiRNA target sequence
ttagtaatttacccatcgatgt

SEQ ID NO: 216227 - DNA, 22 bp, Artificial sequence
  SiRNA target sequence
tagtaatttacccatcgatgtt

SEQ ID NO: 216228 - DNA, 22 bp, Artificial sequence
  SiRNA target sequence
agtaatttacccatcgatgttg

SEQ ID NO: 216229 - DNA, 22 bp, Artificial sequence
  SiRNA target sequence
gtaatttacccatcgatgttga

SEQ ID NO: 216230 - DNA, 22 bp, Artificial sequence
  SiRNA target sequence
taatttacccatcgatgttgat

SEQ ID NO: 216231 - DNA, 22 bp, Artificial sequence
  SiRNA target sequence
aatttacccatcgatgttgatt

SEQ ID NO: 216232 - DNA, 22 bp, Artificial sequence
  SiRNA target sequence
atttacccatcgatgttgattt

SEQ ID NO: 216233 - DNA, 22 bp, Artificial sequence
  SiRNA target sequence
tttacccatcgatgttgatttg

SEQ ID NO: 216234 - DNA, 22 bp, Artificial sequence
  SiRNA target sequence
ttacccatcgatgttgatttgt

SEQ ID NO: 216235 - DNA, 22 bp, Artificial sequence
  SiRNA target sequence
tacccatcgatgttgatttgtt

SEQ ID NO: 216236 - DNA, 22 bp, Artificial sequence
  SiRNA target sequence
acccatcgatgttgatttgttt

SEQ ID NO: 216237 - DNA, 22 bp, Artificial sequence
  SiRNA target sequence
cccatcgatgttgatttgtttg

SEQ ID NO: 216238 - DNA, 22 bp, Artificial sequence
  SiRNA target sequence
ccatcgatgttgatttgtttgc

SEQ ID NO: 216239 - DNA, 22 bp, Artificial sequence
  SiRNA target sequence
catcgatgttgatttgtttgca

SEQ ID NO: 216240 - DNA, 22 bp, Artificial sequence
  SiRNA target sequence
atcgatgttgatttgtttgcat

SEQ ID NO: 216241 - DNA, 22 bp, Artificial sequence
  SiRNA target sequence
tcgatgttgatttgtttgcatc

SEQ ID NO: 216242 - DNA, 22 bp, Artificial sequence
  SiRNA target sequence
cgatgttgatttgtttgcatca

SEQ ID NO: 216243 - DNA, 22 bp, Artificial sequence
  SiRNA target sequence
gatgttgatttgtttgcatcaa

SEQ ID NO: 216244 - DNA, 22 bp, Artificial sequence
  SiRNA target sequence
atgttgatttgtttgcatcaaa

SEQ ID NO: 216245 - DNA, 22 bp, Artificial sequence
  SiRNA target sequence
tgttgatttgtttgcatcaaag

SEQ ID NO: 216246 - DNA, 22 bp, Artificial sequence
  SiRNA target sequence
gttgatttgtttgcatcaaagt

SEQ ID NO: 216247 - DNA, 22 bp, Artificial sequence
  SiRNA target sequence
ttgatttgtttgcatcaaagtt

SEQ ID NO: 216248 - DNA, 22 bp, Artificial sequence
  SiRNA target sequence
tgatttgtttgcatcaaagttg

SEQ ID NO: 216249 - DNA, 22 bp, Artificial sequence
  SiRNA target sequence
gatttgtttgcatcaaagttgt

SEQ ID NO: 216250 - DNA, 22 bp, Artificial sequence
  SiRNA target sequence
atttgtttgcatcaaagttgtt

SEQ ID NO: 216251 - DNA, 22 bp, Artificial sequence
  SiRNA target sequence
tttgtttgcatcaaagttgtta

SEQ ID NO: 216252 - DNA, 22 bp, Artificial sequence
  SiRNA target sequence
ttgtttgcatcaaagttgttag

SEQ ID NO: 216253 - DNA, 22 bp, Artificial sequence
  SiRNA target sequence
tgtttgcatcaaagttgttaga

SEQ ID NO: 216254 - DNA, 22 bp, Artificial sequence
  SiRNA target sequence
gtttgcatcaaagttgttagat

SEQ ID NO: 216255 - DNA, 22 bp, Artificial sequence
  SiRNA target sequence
tttgcatcaaagttgttagata

SEQ ID NO: 216256 - DNA, 22 bp, Artificial sequence
  SiRNA target sequence
ttgcatcaaagttgttagataa

SEQ ID NO: 216257 - DNA, 22 bp, Artificial sequence
  SiRNA target sequence
tgcatcaaagttgttagataat

SEQ ID NO: 216258 - DNA, 22 bp, Artificial sequence
  SiRNA target sequence
gcatcaaagttgttagataata

SEQ ID NO: 216259 - DNA, 22 bp, Artificial sequence
  SiRNA target sequence
catcaaagttgttagataataa

SEQ ID NO: 216260 - DNA, 22 bp, Artificial sequence
  SiRNA target sequence
atcaaagttgttagataataaa

SEQ ID NO: 216261 - DNA, 22 bp, Artificial sequence
  SiRNA target sequence
tcaaagttgttagataataaaa

SEQ ID NO: 216262 - DNA, 22 bp, Artificial sequence
  SiRNA target sequence
caaagttgttagataataaaaa

SEQ ID NO: 216263 - DNA, 22 bp, Artificial sequence
  SiRNA target sequence
aaagttgttagataataaaaaa

SEQ ID NO: 216264 - DNA, 22 bp, Artificial sequence
  SiRNA target sequence
aagttgttagataataaaaaag

SEQ ID NO: 216265 - DNA, 22 bp, Artificial sequence
  SiRNA target sequence
agttgttagataataaaaaaga

SEQ ID NO: 216266 - DNA, 22 bp, Artificial sequence
  SiRNA target sequence
gttgttagataataaaaaagaa

SEQ ID NO: 216267 - DNA, 22 bp, Artificial sequence
  SiRNA target sequence
ttgttagataataaaaaagaag

SEQ ID NO: 216268 - DNA, 22 bp, Artificial sequence
  SiRNA target sequence
tgttagataataaaaaagaaga

SEQ ID NO: 216269 - DNA, 22 bp, Artificial sequence
  SiRNA target sequence
gttagataataaaaaagaagag

SEQ ID NO: 216270 - DNA, 22 bp, Artificial sequence
  SiRNA target sequence
ttagataataaaaaagaagagg

SEQ ID NO: 216271 - DNA, 22 bp, Artificial sequence
  SiRNA target sequence
tagataataaaaaagaagagga

SEQ ID NO: 216272 - DNA, 22 bp, Artificial sequence
  SiRNA target sequence
agataataaaaaagaagaggaa

SEQ ID NO: 216273 - DNA, 22 bp, Artificial sequence
  SiRNA target sequence
gataataaaaaagaagaggaaa

SEQ ID NO: 216274 - DNA, 22 bp, Artificial sequence
  SiRNA target sequence
ataataaaaaagaagaggaaat

SEQ ID NO: 216275 - DNA, 22 bp, Artificial sequence
  SiRNA target sequence
taataaaaaagaagaggaaatt

SEQ ID NO: 216276 - DNA, 22 bp, Artificial sequence
  SiRNA target sequence
aataaaaaagaagaggaaattg

SEQ ID NO: 216277 - DNA, 22 bp, Artificial sequence
  SiRNA target sequence
ataaaaaagaagaggaaattga

SEQ ID NO: 216278 - DNA, 22 bp, Artificial sequence
  SiRNA target sequence
taaaaaagaagaggaaattgat

SEQ ID NO: 216279 - DNA, 22 bp, Artificial sequence
  SiRNA target sequence
aaaaaagaagaggaaattgatg

SEQ ID NO: 216280 - DNA, 22 bp, Artificial sequence
  SiRNA target sequence
aaaaagaagaggaaattgatgt

SEQ ID NO: 216281 - DNA, 22 bp, Artificial sequence
  SiRNA target sequence
aaaagaagaggaaattgatgtg

SEQ ID NO: 216282 - DNA, 22 bp, Artificial sequence
  SiRNA target sequence
aaagaagaggaaattgatgtgt

SEQ ID NO: 216283 - DNA, 22 bp, Artificial sequence
  SiRNA target sequence
aagaagaggaaattgatgtgtc

SEQ ID NO: 216284 - DNA, 22 bp, Artificial sequence
  SiRNA target sequence
agaagaggaaattgatgtgtca

SEQ ID NO: 216285 - DNA, 22 bp, Artificial sequence
  SiRNA target sequence
gaagaggaaattgatgtgtcag

SEQ ID NO: 216286 - DNA, 22 bp, Artificial sequence
  SiRNA target sequence
aagaggaaattgatgtgtcagt

SEQ ID NO: 216287 - DNA, 22 bp, Artificial sequence
  SiRNA target sequence
agaggaaattgatgtgtcagtg

SEQ ID NO: 216288 - DNA, 22 bp, Artificial sequence
  SiRNA target sequence
gaggaaattgatgtgtcagtgc

SEQ ID NO: 216289 - DNA, 22 bp, Artificial sequence
  SiRNA target sequence
aggaaattgatgtgtcagtgct

SEQ ID NO: 216290 - DNA, 22 bp, Artificial sequence
  SiRNA target sequence
ggaaattgatgtgtcagtgctc

SEQ ID NO: 216291 - DNA, 22 bp, Artificial sequence
  SiRNA target sequence
gaaattgatgtgtcagtgctcg

SEQ ID NO: 216292 - DNA, 22 bp, Artificial sequence
  SiRNA target sequence
aaattgatgtgtcagtgctcgt

SEQ ID NO: 216293 - DNA, 22 bp, Artificial sequence
  SiRNA target sequence
aattgatgtgtcagtgctcgtt

SEQ ID NO: 216294 - DNA, 22 bp, Artificial sequence
  SiRNA target sequence
attgatgtgtcagtgctcgtta

SEQ ID NO: 216295 - DNA, 22 bp, Artificial sequence
  SiRNA target sequence
ttgatgtgtcagtgctcgttaa

SEQ ID NO: 216296 - DNA, 22 bp, Artificial sequence
  SiRNA target sequence
tgatgtgtcagtgctcgttaat

SEQ ID NO: 216297 - DNA, 22 bp, Artificial sequence
  SiRNA target sequence
gatgtgtcagtgctcgttaatt

SEQ ID NO: 216298 - DNA, 22 bp, Artificial sequence
  SiRNA target sequence
atgtgtcagtgctcgttaatta

SEQ ID NO: 216299 - DNA, 22 bp, Artificial sequence
  SiRNA target sequence
tgtgtcagtgctcgttaattaa

SEQ ID NO: 216300 - DNA, 23 bp, Artificial sequence
  SiRNA target sequence
atgattgagaggggtattatgga

SEQ ID NO: 216301 - DNA, 23 bp, Artificial sequence
  SiRNA target sequence
tgattgagaggggtattatggaa

SEQ ID NO: 216302 - DNA, 23 bp, Artificial sequence
  SiRNA target sequence
gattgagaggggtattatggaaa

SEQ ID NO: 216303 - DNA, 23 bp, Artificial sequence
  SiRNA target sequence
attgagaggggtattatggaaaa

SEQ ID NO: 216304 - DNA, 23 bp, Artificial sequence
  SiRNA target sequence
ttgagaggggtattatggaaaaa

SEQ ID NO: 216305 - DNA, 23 bp, Artificial sequence
  SiRNA target sequence
tgagaggggtattatggaaaaaa

SEQ ID NO: 216306 - DNA, 23 bp, Artificial sequence
  SiRNA target sequence
gagaggggtattatggaaaaaat

SEQ ID NO: 216307 - DNA, 23 bp, Artificial sequence
  SiRNA target sequence
agaggggtattatggaaaaaata

SEQ ID NO: 216308 - DNA, 23 bp, Artificial sequence
  SiRNA target sequence
gaggggtattatggaaaaaataa

SEQ ID NO: 216309 - DNA, 23 bp, Artificial sequence
  SiRNA target sequence
aggggtattatggaaaaaataaa

SEQ ID NO: 216310 - DNA, 23 bp, Artificial sequence
  SiRNA target sequence
ggggtattatggaaaaaataaaa

SEQ ID NO: 216311 - DNA, 23 bp, Artificial sequence
  SiRNA target sequence
gggtattatggaaaaaataaaaa

SEQ ID NO: 216312 - DNA, 23 bp, Artificial sequence
  SiRNA target sequence
ggtattatggaaaaaataaaaaa

SEQ ID NO: 216313 - DNA, 23 bp, Artificial sequence
  SiRNA target sequence
gtattatggaaaaaataaaaaat

SEQ ID NO: 216314 - DNA, 23 bp, Artificial sequence
  SiRNA target sequence
tattatggaaaaaataaaaaatt

SEQ ID NO: 216315 - DNA, 23 bp, Artificial sequence
  SiRNA target sequence
attatggaaaaaataaaaaattt

SEQ ID NO: 216316 - DNA, 23 bp, Artificial sequence
  SiRNA target sequence
ttatggaaaaaataaaaaattta

SEQ ID NO: 216317 - DNA, 23 bp, Artificial sequence
  SiRNA target sequence
tatggaaaaaataaaaaatttat

SEQ ID NO: 216318 - DNA, 23 bp, Artificial sequence
  SiRNA target sequence
atggaaaaaataaaaaatttatt

SEQ ID NO: 216319 - DNA, 23 bp, Artificial sequence
  SiRNA target sequence
tggaaaaaataaaaaatttatta

SEQ ID NO: 216320 - DNA, 23 bp, Artificial sequence
  SiRNA target sequence
ggaaaaaataaaaaatttattaa

SEQ ID NO: 216321 - DNA, 23 bp, Artificial sequence
  SiRNA target sequence
gaaaaaataaaaaatttattaac

SEQ ID NO: 216322 - DNA, 23 bp, Artificial sequence
  SiRNA target sequence
aaaaaataaaaaatttattaaca

SEQ ID NO: 216323 - DNA, 23 bp, Artificial sequence
  SiRNA target sequence
aaaaataaaaaatttattaacag

SEQ ID NO: 216324 - DNA, 23 bp, Artificial sequence
  SiRNA target sequence
aaaataaaaaatttattaacaga

SEQ ID NO: 216325 - DNA, 23 bp, Artificial sequence
  SiRNA target sequence
aaataaaaaatttattaacagag

SEQ ID NO: 216326 - DNA, 23 bp, Artificial sequence
  SiRNA target sequence
aataaaaaatttattaacagagg

SEQ ID NO: 216327 - DNA, 23 bp, Artificial sequence
  SiRNA target sequence
ataaaaaatttattaacagagga

SEQ ID NO: 216328 - DNA, 23 bp, Artificial sequence
  SiRNA target sequence
taaaaaatttattaacagaggat

SEQ ID NO: 216329 - DNA, 23 bp, Artificial sequence
  SiRNA target sequence
aaaaaatttattaacagaggatg

SEQ ID NO: 216330 - DNA, 23 bp, Artificial sequence
  SiRNA target sequence
aaaaatttattaacagaggatga

SEQ ID NO: 216331 - DNA, 23 bp, Artificial sequence
  SiRNA target sequence
aaaatttattaacagaggatgaa

SEQ ID NO: 216332 - DNA, 23 bp, Artificial sequence
  SiRNA target sequence
aaatttattaacagaggatgaag

SEQ ID NO: 216333 - DNA, 23 bp, Artificial sequence
  SiRNA target sequence
aatttattaacagaggatgaagt

SEQ ID NO: 216334 - DNA, 23 bp, Artificial sequence
  SiRNA target sequence
atttattaacagaggatgaagta

SEQ ID NO: 216335 - DNA, 23 bp, Artificial sequence
  SiRNA target sequence
tttattaacagaggatgaagtag

SEQ ID NO: 216336 - DNA, 23 bp, Artificial sequence
  SiRNA target sequence
ttattaacagaggatgaagtaga

SEQ ID NO: 216337 - DNA, 23 bp, Artificial sequence
  SiRNA target sequence
tattaacagaggatgaagtagaa

SEQ ID NO: 216338 - DNA, 23 bp, Artificial sequence
  SiRNA target sequence
attaacagaggatgaagtagaag

SEQ ID NO: 216339 - DNA, 23 bp, Artificial sequence
  SiRNA target sequence
ttaacagaggatgaagtagaagc

SEQ ID NO: 216340 - DNA, 23 bp, Artificial sequence
  SiRNA target sequence
taacagaggatgaagtagaagca

SEQ ID NO: 216341 - DNA, 23 bp, Artificial sequence
  SiRNA target sequence
aacagaggatgaagtagaagcag

SEQ ID NO: 216342 - DNA, 23 bp, Artificial sequence
  SiRNA target sequence
acagaggatgaagtagaagcaga

SEQ ID NO: 216343 - DNA, 23 bp, Artificial sequence
  SiRNA target sequence
cagaggatgaagtagaagcagaa

SEQ ID NO: 216344 - DNA, 23 bp, Artificial sequence
  SiRNA target sequence
agaggatgaagtagaagcagaag

SEQ ID NO: 216345 - DNA, 23 bp, Artificial sequence
  SiRNA target sequence
gaggatgaagtagaagcagaagc

SEQ ID NO: 216346 - DNA, 23 bp, Artificial sequence
  SiRNA target sequence
aggatgaagtagaagcagaagca

SEQ ID NO: 216347 - DNA, 23 bp, Artificial sequence
  SiRNA target sequence
ggatgaagtagaagcagaagcaa

SEQ ID NO: 216348 - DNA, 23 bp, Artificial sequence
  SiRNA target sequence
gatgaagtagaagcagaagcaaa

SEQ ID NO: 216349 - DNA, 23 bp, Artificial sequence
  SiRNA target sequence
atgaagtagaagcagaagcaaat

SEQ ID NO: 216350 - DNA, 23 bp, Artificial sequence
  SiRNA target sequence
tgaagtagaagcagaagcaaatt

SEQ ID NO: 216351 - DNA, 23 bp, Artificial sequence
  SiRNA target sequence
gaagtagaagcagaagcaaattc

SEQ ID NO: 216352 - DNA, 23 bp, Artificial sequence
  SiRNA target sequence
aagtagaagcagaagcaaattct

SEQ ID NO: 216353 - DNA, 23 bp, Artificial sequence
  SiRNA target sequence
agtagaagcagaagcaaattctg

SEQ ID NO: 216354 - DNA, 23 bp, Artificial sequence
  SiRNA target sequence
gtagaagcagaagcaaattctgg

SEQ ID NO: 216355 - DNA, 23 bp, Artificial sequence
  SiRNA target sequence
tagaagcagaagcaaattctgga

SEQ ID NO: 216356 - DNA, 23 bp, Artificial sequence
  SiRNA target sequence
agaagcagaagcaaattctggaa

SEQ ID NO: 216357 - DNA, 23 bp, Artificial sequence
  SiRNA target sequence
gaagcagaagcaaattctggaag

SEQ ID NO: 216358 - DNA, 23 bp, Artificial sequence
  SiRNA target sequence
aagcagaagcaaattctggaagg

SEQ ID NO: 216359 - DNA, 23 bp, Artificial sequence
  SiRNA target sequence
agcagaagcaaattctggaaggg

SEQ ID NO: 216360 - DNA, 23 bp, Artificial sequence
  SiRNA target sequence
gcagaagcaaattctggaagggg

SEQ ID NO: 216361 - DNA, 23 bp, Artificial sequence
  SiRNA target sequence
cagaagcaaattctggaaggggc

SEQ ID NO: 216362 - DNA, 23 bp, Artificial sequence
  SiRNA target sequence
agaagcaaattctggaaggggca

SEQ ID NO: 216363 - DNA, 23 bp, Artificial sequence
  SiRNA target sequence
gaagcaaattctggaaggggcat

SEQ ID NO: 216364 - DNA, 23 bp, Artificial sequence
  SiRNA target sequence
aagcaaattctggaaggggcatt

SEQ ID NO: 216365 - DNA, 23 bp, Artificial sequence
  SiRNA target sequence
agcaaattctggaaggggcattt

SEQ ID NO: 216366 - DNA, 23 bp, Artificial sequence
  SiRNA target sequence
gcaaattctggaaggggcatttt

SEQ ID NO: 216367 - DNA, 23 bp, Artificial sequence
  SiRNA target sequence
caaattctggaaggggcatttta

SEQ ID NO: 216368 - DNA, 23 bp, Artificial sequence
  SiRNA target sequence
aaattctggaaggggcattttat

SEQ ID NO: 216369 - DNA, 23 bp, Artificial sequence
  SiRNA target sequence
aattctggaaggggcattttatc

SEQ ID NO: 216370 - DNA, 23 bp, Artificial sequence
  SiRNA target sequence
attctggaaggggcattttatca

SEQ ID NO: 216371 - DNA, 23 bp, Artificial sequence
  SiRNA target sequence
ttctggaaggggcattttatcaa

SEQ ID NO: 216372 - DNA, 23 bp, Artificial sequence
  SiRNA target sequence
tctggaaggggcattttatcaat

SEQ ID NO: 216373 - DNA, 23 bp, Artificial sequence
  SiRNA target sequence
ctggaaggggcattttatcaata

SEQ ID NO: 216374 - DNA, 23 bp, Artificial sequence
  SiRNA target sequence
tggaaggggcattttatcaatat

SEQ ID NO: 216375 - DNA, 23 bp, Artificial sequence
  SiRNA target sequence
ggaaggggcattttatcaatatt

SEQ ID NO: 216376 - DNA, 23 bp, Artificial sequence
  SiRNA target sequence
gaaggggcattttatcaatattt

SEQ ID NO: 216377 - DNA, 23 bp, Artificial sequence
  SiRNA target sequence
aaggggcattttatcaatattta

SEQ ID NO: 216378 - DNA, 23 bp, Artificial sequence
  SiRNA target sequence
aggggcattttatcaatatttag

SEQ ID NO: 216379 - DNA, 23 bp, Artificial sequence
  SiRNA target sequence
ggggcattttatcaatatttaga

SEQ ID NO: 216380 - DNA, 23 bp, Artificial sequence
  SiRNA target sequence
gggcattttatcaatatttagaa

SEQ ID NO: 216381 - DNA, 23 bp, Artificial sequence
  SiRNA target sequence
ggcattttatcaatatttagaat

SEQ ID NO: 216382 - DNA, 23 bp, Artificial sequence
  SiRNA target sequence
gcattttatcaatatttagaatt

SEQ ID NO: 216383 - DNA, 23 bp, Artificial sequence
  SiRNA target sequence
cattttatcaatatttagaattg

SEQ ID NO: 216384 - DNA, 23 bp, Artificial sequence
  SiRNA target sequence
attttatcaatatttagaattgc

SEQ ID NO: 216385 - DNA, 23 bp, Artificial sequence
  SiRNA target sequence
ttttatcaatatttagaattgct

SEQ ID NO: 216386 - DNA, 23 bp, Artificial sequence
  SiRNA target sequence
tttatcaatatttagaattgcta

SEQ ID NO: 216387 - DNA, 23 bp, Artificial sequence
  SiRNA target sequence
ttatcaatatttagaattgctaa

SEQ ID NO: 216388 - DNA, 23 bp, Artificial sequence
  SiRNA target sequence
tatcaatatttagaattgctaag

SEQ ID NO: 216389 - DNA, 23 bp, Artificial sequence
  SiRNA target sequence
atcaatatttagaattgctaagg

SEQ ID NO: 216390 - DNA, 23 bp, Artificial sequence
  SiRNA target sequence
tcaatatttagaattgctaaggt

SEQ ID NO: 216391 - DNA, 23 bp, Artificial sequence
  SiRNA target sequence
caatatttagaattgctaaggta

SEQ ID NO: 216392 - DNA, 23 bp, Artificial sequence
  SiRNA target sequence
aatatttagaattgctaaggtag

SEQ ID NO: 216393 - DNA, 23 bp, Artificial sequence
  SiRNA target sequence
atatttagaattgctaaggtaga

SEQ ID NO: 216394 - DNA, 23 bp, Artificial sequence
  SiRNA target sequence
tatttagaattgctaaggtagaa

SEQ ID NO: 216395 - DNA, 23 bp, Artificial sequence
  SiRNA target sequence
atttagaattgctaaggtagaaa

SEQ ID NO: 216396 - DNA, 23 bp, Artificial sequence
  SiRNA target sequence
tttagaattgctaaggtagaaag

SEQ ID NO: 216397 - DNA, 23 bp, Artificial sequence
  SiRNA target sequence
ttagaattgctaaggtagaaaga

SEQ ID NO: 216398 - DNA, 23 bp, Artificial sequence
  SiRNA target sequence
tagaattgctaaggtagaaagaa

SEQ ID NO: 216399 - DNA, 23 bp, Artificial sequence
  SiRNA target sequence
agaattgctaaggtagaaagaag

SEQ ID NO: 216400 - DNA, 23 bp, Artificial sequence
  SiRNA target sequence
gaattgctaaggtagaaagaaga

SEQ ID NO: 216401 - DNA, 23 bp, Artificial sequence
  SiRNA target sequence
aattgctaaggtagaaagaagaa

SEQ ID NO: 216402 - DNA, 23 bp, Artificial sequence
  SiRNA target sequence
attgctaaggtagaaagaagaat

SEQ ID NO: 216403 - DNA, 23 bp, Artificial sequence
  SiRNA target sequence
ttgctaaggtagaaagaagaatg

SEQ ID NO: 216404 - DNA, 23 bp, Artificial sequence
  SiRNA target sequence
tgctaaggtagaaagaagaatgt

SEQ ID NO: 216405 - DNA, 23 bp, Artificial sequence
  SiRNA target sequence
gctaaggtagaaagaagaatgtt

SEQ ID NO: 216406 - DNA, 23 bp, Artificial sequence
  SiRNA target sequence
ctaaggtagaaagaagaatgttt

SEQ ID NO: 216407 - DNA, 23 bp, Artificial sequence
  SiRNA target sequence
taaggtagaaagaagaatgtttt

SEQ ID NO: 216408 - DNA, 23 bp, Artificial sequence
  SiRNA target sequence
aaggtagaaagaagaatgttttg

SEQ ID NO: 216409 - DNA, 23 bp, Artificial sequence
  SiRNA target sequence
aggtagaaagaagaatgttttgg

SEQ ID NO: 216410 - DNA, 23 bp, Artificial sequence
  SiRNA target sequence
ggtagaaagaagaatgttttggc

SEQ ID NO: 216411 - DNA, 23 bp, Artificial sequence
  SiRNA target sequence
gtagaaagaagaatgttttggct

SEQ ID NO: 216412 - DNA, 23 bp, Artificial sequence
  SiRNA target sequence
tagaaagaagaatgttttggctt

SEQ ID NO: 216413 - DNA, 23 bp, Artificial sequence
  SiRNA target sequence
agaaagaagaatgttttggctta

SEQ ID NO: 216414 - DNA, 23 bp, Artificial sequence
  SiRNA target sequence
gaaagaagaatgttttggcttat

SEQ ID NO: 216415 - DNA, 23 bp, Artificial sequence
  SiRNA target sequence
aaagaagaatgttttggcttatg

SEQ ID NO: 216416 - DNA, 23 bp, Artificial sequence
  SiRNA target sequence
aagaagaatgttttggcttatga

SEQ ID NO: 216417 - DNA, 23 bp, Artificial sequence
  SiRNA target sequence
agaagaatgttttggcttatgac

SEQ ID NO: 216418 - DNA, 23 bp, Artificial sequence
  SiRNA target sequence
gaagaatgttttggcttatgacg

SEQ ID NO: 216419 - DNA, 23 bp, Artificial sequence
  SiRNA target sequence
aagaatgttttggcttatgacgc

SEQ ID NO: 216420 - DNA, 23 bp, Artificial sequence
  SiRNA target sequence
agaatgttttggcttatgacgct

SEQ ID NO: 216421 - DNA, 23 bp, Artificial sequence
  SiRNA target sequence
gaatgttttggcttatgacgctt

SEQ ID NO: 216422 - DNA, 23 bp, Artificial sequence
  SiRNA target sequence
aatgttttggcttatgacgctta

SEQ ID NO: 216423 - DNA, 23 bp, Artificial sequence
  SiRNA target sequence
atgttttggcttatgacgcttat

SEQ ID NO: 216424 - DNA, 23 bp, Artificial sequence
  SiRNA target sequence
tgttttggcttatgacgcttatg

SEQ ID NO: 216425 - DNA, 23 bp, Artificial sequence
  SiRNA target sequence
gttttggcttatgacgcttatgt

SEQ ID NO: 216426 - DNA, 23 bp, Artificial sequence
  SiRNA target sequence
ttttggcttatgacgcttatgtt

SEQ ID NO: 216427 - DNA, 23 bp, Artificial sequence
  SiRNA target sequence
tttggcttatgacgcttatgttt

SEQ ID NO: 216428 - DNA, 23 bp, Artificial sequence
  SiRNA target sequence
ttggcttatgacgcttatgtttt

SEQ ID NO: 216429 - DNA, 23 bp, Artificial sequence
  SiRNA target sequence
tggcttatgacgcttatgttttc

SEQ ID NO: 216430 - DNA, 23 bp, Artificial sequence
  SiRNA target sequence
ggcttatgacgcttatgttttcg

SEQ ID NO: 216431 - DNA, 23 bp, Artificial sequence
  SiRNA target sequence
gcttatgacgcttatgttttcgc

SEQ ID NO: 216432 - DNA, 23 bp, Artificial sequence
  SiRNA target sequence
cttatgacgcttatgttttcgct

SEQ ID NO: 216433 - DNA, 23 bp, Artificial sequence
  SiRNA target sequence
ttatgacgcttatgttttcgctt

SEQ ID NO: 216434 - DNA, 23 bp, Artificial sequence
  SiRNA target sequence
tatgacgcttatgttttcgctta

SEQ ID NO: 216435 - DNA, 23 bp, Artificial sequence
  SiRNA target sequence
atgacgcttatgttttcgcttat

SEQ ID NO: 216436 - DNA, 23 bp, Artificial sequence
  SiRNA target sequence
tgacgcttatgttttcgcttatt

SEQ ID NO: 216437 - DNA, 23 bp, Artificial sequence
  SiRNA target sequence
gacgcttatgttttcgcttattt

SEQ ID NO: 216438 - DNA, 23 bp, Artificial sequence
  SiRNA target sequence
acgcttatgttttcgcttatttc

SEQ ID NO: 216439 - DNA, 23 bp, Artificial sequence
  SiRNA target sequence
cgcttatgttttcgcttatttcc

SEQ ID NO: 216440 - DNA, 23 bp, Artificial sequence
  SiRNA target sequence
gcttatgttttcgcttatttcct

SEQ ID NO: 216441 - DNA, 23 bp, Artificial sequence
  SiRNA target sequence
cttatgttttcgcttatttcctt

SEQ ID NO: 216442 - DNA, 23 bp, Artificial sequence
  SiRNA target sequence
ttatgttttcgcttatttccttt

SEQ ID NO: 216443 - DNA, 23 bp, Artificial sequence
  SiRNA target sequence
tatgttttcgcttatttccttta

SEQ ID NO: 216444 - DNA, 23 bp, Artificial sequence
  SiRNA target sequence
atgttttcgcttatttcctttat

SEQ ID NO: 216445 - DNA, 23 bp, Artificial sequence
  SiRNA target sequence
tgttttcgcttatttcctttatt

SEQ ID NO: 216446 - DNA, 23 bp, Artificial sequence
  SiRNA target sequence
gttttcgcttatttcctttattt

SEQ ID NO: 216447 - DNA, 23 bp, Artificial sequence
  SiRNA target sequence
ttttcgcttatttcctttattta

SEQ ID NO: 216448 - DNA, 23 bp, Artificial sequence
  SiRNA target sequence
tttcgcttatttcctttatttac

SEQ ID NO: 216449 - DNA, 23 bp, Artificial sequence
  SiRNA target sequence
ttcgcttatttcctttatttact

SEQ ID NO: 216450 - DNA, 23 bp, Artificial sequence
  SiRNA target sequence
tcgcttatttcctttatttactc

SEQ ID NO: 216451 - DNA, 23 bp, Artificial sequence
  SiRNA target sequence
cgcttatttcctttatttactca

SEQ ID NO: 216452 - DNA, 23 bp, Artificial sequence
  SiRNA target sequence
gcttatttcctttatttactcag

SEQ ID NO: 216453 - DNA, 23 bp, Artificial sequence
  SiRNA target sequence
cttatttcctttatttactcagt

SEQ ID NO: 216454 - DNA, 23 bp, Artificial sequence
  SiRNA target sequence
ttatttcctttatttactcagta

SEQ ID NO: 216455 - DNA, 23 bp, Artificial sequence
  SiRNA target sequence
tatttcctttatttactcagtag

SEQ ID NO: 216456 - DNA, 23 bp, Artificial sequence
  SiRNA target sequence
atttcctttatttactcagtagg

SEQ ID NO: 216457 - DNA, 23 bp, Artificial sequence
  SiRNA target sequence
tttcctttatttactcagtagga

SEQ ID NO: 216458 - DNA, 23 bp, Artificial sequence
  SiRNA target sequence
ttcctttatttactcagtaggac

SEQ ID NO: 216459 - DNA, 23 bp, Artificial sequence
  SiRNA target sequence
tcctttatttactcagtaggacg

SEQ ID NO: 216460 - DNA, 23 bp, Artificial sequence
  SiRNA target sequence
cctttatttactcagtaggacga

SEQ ID NO: 216461 - DNA, 23 bp, Artificial sequence
  SiRNA target sequence
ctttatttactcagtaggacgag

SEQ ID NO: 216462 - DNA, 23 bp, Artificial sequence
  SiRNA target sequence
tttatttactcagtaggacgagt

SEQ ID NO: 216463 - DNA, 23 bp, Artificial sequence
  SiRNA target sequence
ttatttactcagtaggacgagtg

SEQ ID NO: 216464 - DNA, 23 bp, Artificial sequence
  SiRNA target sequence
tatttactcagtaggacgagtgt

SEQ ID NO: 216465 - DNA, 23 bp, Artificial sequence
  SiRNA target sequence
atttactcagtaggacgagtgtt

SEQ ID NO: 216466 - DNA, 23 bp, Artificial sequence
  SiRNA target sequence
tttactcagtaggacgagtgtta

SEQ ID NO: 216467 - DNA, 23 bp, Artificial sequence
  SiRNA target sequence
ttactcagtaggacgagtgttaa

SEQ ID NO: 216468 - DNA, 23 bp, Artificial sequence
  SiRNA target sequence
tactcagtaggacgagtgttaaa

SEQ ID NO: 216469 - DNA, 23 bp, Artificial sequence
  SiRNA target sequence
actcagtaggacgagtgttaaaa

SEQ ID NO: 216470 - DNA, 23 bp, Artificial sequence
  SiRNA target sequence
ctcagtaggacgagtgttaaaag

SEQ ID NO: 216471 - DNA, 23 bp, Artificial sequence
  SiRNA target sequence
tcagtaggacgagtgttaaaaga

SEQ ID NO: 216472 - DNA, 23 bp, Artificial sequence
  SiRNA target sequence
cagtaggacgagtgttaaaagat

SEQ ID NO: 216473 - DNA, 23 bp, Artificial sequence
  SiRNA target sequence
agtaggacgagtgttaaaagatg

SEQ ID NO: 216474 - DNA, 23 bp, Artificial sequence
  SiRNA target sequence
gtaggacgagtgttaaaagatgc

SEQ ID NO: 216475 - DNA, 23 bp, Artificial sequence
  SiRNA target sequence
taggacgagtgttaaaagatgca

SEQ ID NO: 216476 - DNA, 23 bp, Artificial sequence
  SiRNA target sequence
aggacgagtgttaaaagatgcag

SEQ ID NO: 216477 - DNA, 23 bp, Artificial sequence
  SiRNA target sequence
ggacgagtgttaaaagatgcagc

SEQ ID NO: 216478 - DNA, 23 bp, Artificial sequence
  SiRNA target sequence
gacgagtgttaaaagatgcagca

SEQ ID NO: 216479 - DNA, 23 bp, Artificial sequence
  SiRNA target sequence
acgagtgttaaaagatgcagcag

SEQ ID NO: 216480 - DNA, 23 bp, Artificial sequence
  SiRNA target sequence
cgagtgttaaaagatgcagcagt

SEQ ID NO: 216481 - DNA, 23 bp, Artificial sequence
  SiRNA target sequence
gagtgttaaaagatgcagcagtt

SEQ ID NO: 216482 - DNA, 23 bp, Artificial sequence
  SiRNA target sequence
agtgttaaaagatgcagcagttc

SEQ ID NO: 216483 - DNA, 23 bp, Artificial sequence
  SiRNA target sequence
gtgttaaaagatgcagcagttct

SEQ ID NO: 216484 - DNA, 23 bp, Artificial sequence
  SiRNA target sequence
tgttaaaagatgcagcagttctt

SEQ ID NO: 216485 - DNA, 23 bp, Artificial sequence
  SiRNA target sequence
gttaaaagatgcagcagttctta

SEQ ID NO: 216486 - DNA, 23 bp, Artificial sequence
  SiRNA target sequence
ttaaaagatgcagcagttcttag

SEQ ID NO: 216487 - DNA, 23 bp, Artificial sequence
  SiRNA target sequence
taaaagatgcagcagttcttagt

SEQ ID NO: 216488 - DNA, 23 bp, Artificial sequence
  SiRNA target sequence
aaaagatgcagcagttcttagta

SEQ ID NO: 216489 - DNA, 23 bp, Artificial sequence
  SiRNA target sequence
aaagatgcagcagttcttagtag

SEQ ID NO: 216490 - DNA, 23 bp, Artificial sequence
  SiRNA target sequence
aagatgcagcagttcttagtaga

SEQ ID NO: 216491 - DNA, 23 bp, Artificial sequence
  SiRNA target sequence
agatgcagcagttcttagtagac

SEQ ID NO: 216492 - DNA, 23 bp, Artificial sequence
  SiRNA target sequence
gatgcagcagttcttagtagaca

SEQ ID NO: 216493 - DNA, 23 bp, Artificial sequence
  SiRNA target sequence
atgcagcagttcttagtagacag

SEQ ID NO: 216494 - DNA, 23 bp, Artificial sequence
  SiRNA target sequence
tgcagcagttcttagtagacaga

SEQ ID NO: 216495 - DNA, 23 bp, Artificial sequence
  SiRNA target sequence
gcagcagttcttagtagacagat

SEQ ID NO: 216496 - DNA, 23 bp, Artificial sequence
  SiRNA target sequence
cagcagttcttagtagacagatg

SEQ ID NO: 216497 - DNA, 23 bp, Artificial sequence
  SiRNA target sequence
agcagttcttagtagacagatgc

SEQ ID NO: 216498 - DNA, 23 bp, Artificial sequence
  SiRNA target sequence
gcagttcttagtagacagatgcc

SEQ ID NO: 216499 - DNA, 23 bp, Artificial sequence
  SiRNA target sequence
cagttcttagtagacagatgcca

SEQ ID NO: 216500 - DNA, 23 bp, Artificial sequence
  SiRNA target sequence
agttcttagtagacagatgccac

SEQ ID NO: 216501 - DNA, 23 bp, Artificial sequence
  SiRNA target sequence
gttcttagtagacagatgccact

SEQ ID NO: 216502 - DNA, 23 bp, Artificial sequence
  SiRNA target sequence
ttcttagtagacagatgccacta

SEQ ID NO: 216503 - DNA, 23 bp, Artificial sequence
  SiRNA target sequence
tcttagtagacagatgccactat

SEQ ID NO: 216504 - DNA, 23 bp, Artificial sequence
  SiRNA target sequence
cttagtagacagatgccactatc

SEQ ID NO: 216505 - DNA, 23 bp, Artificial sequence
  SiRNA target sequence
ttagtagacagatgccactatcc

SEQ ID NO: 216506 - DNA, 23 bp, Artificial sequence
  SiRNA target sequence
tagtagacagatgccactatcca

SEQ ID NO: 216507 - DNA, 23 bp, Artificial sequence
  SiRNA target sequence
agtagacagatgccactatccat

SEQ ID NO: 216508 - DNA, 23 bp, Artificial sequence
  SiRNA target sequence
gtagacagatgccactatccatt

SEQ ID NO: 216509 - DNA, 23 bp, Artificial sequence
  SiRNA target sequence
tagacagatgccactatccatta

SEQ ID NO: 216510 - DNA, 23 bp, Artificial sequence
  SiRNA target sequence
agacagatgccactatccattaa

SEQ ID NO: 216511 - DNA, 23 bp, Artificial sequence
  SiRNA target sequence
gacagatgccactatccattaat

SEQ ID NO: 216512 - DNA, 23 bp, Artificial sequence
  SiRNA target sequence
acagatgccactatccattaatt

SEQ ID NO: 216513 - DNA, 23 bp, Artificial sequence
  SiRNA target sequence
cagatgccactatccattaattg

SEQ ID NO: 216514 - DNA, 23 bp, Artificial sequence
  SiRNA target sequence
agatgccactatccattaattgt

SEQ ID NO: 216515 - DNA, 23 bp, Artificial sequence
  SiRNA target sequence
gatgccactatccattaattgtc

SEQ ID NO: 216516 - DNA, 23 bp, Artificial sequence
  SiRNA target sequence
atgccactatccattaattgtct

SEQ ID NO: 216517 - DNA, 23 bp, Artificial sequence
  SiRNA target sequence
tgccactatccattaattgtctt

SEQ ID NO: 216518 - DNA, 23 bp, Artificial sequence
  SiRNA target sequence
gccactatccattaattgtctta

SEQ ID NO: 216519 - DNA, 23 bp, Artificial sequence
  SiRNA target sequence
ccactatccattaattgtcttaa

SEQ ID NO: 216520 - DNA, 23 bp, Artificial sequence
  SiRNA target sequence
cactatccattaattgtcttaaa

SEQ ID NO: 216521 - DNA, 23 bp, Artificial sequence
  SiRNA target sequence
actatccattaattgtcttaaaa

SEQ ID NO: 216522 - DNA, 23 bp, Artificial sequence
  SiRNA target sequence
ctatccattaattgtcttaaaag

SEQ ID NO: 216523 - DNA, 23 bp, Artificial sequence
  SiRNA target sequence
tatccattaattgtcttaaaagc

SEQ ID NO: 216524 - DNA, 23 bp, Artificial sequence
  SiRNA target sequence
atccattaattgtcttaaaagct

SEQ ID NO: 216525 - DNA, 23 bp, Artificial sequence
  SiRNA target sequence
tccattaattgtcttaaaagctt

SEQ ID NO: 216526 - DNA, 23 bp, Artificial sequence
  SiRNA target sequence
ccattaattgtcttaaaagcttt

SEQ ID NO: 216527 - DNA, 23 bp, Artificial sequence
  SiRNA target sequence
cattaattgtcttaaaagctttg

SEQ ID NO: 216528 - DNA, 23 bp, Artificial sequence
  SiRNA target sequence
attaattgtcttaaaagctttgt

SEQ ID NO: 216529 - DNA, 23 bp, Artificial sequence
  SiRNA target sequence
ttaattgtcttaaaagctttgta

SEQ ID NO: 216530 - DNA, 23 bp, Artificial sequence
  SiRNA target sequence
taattgtcttaaaagctttgtaa

SEQ ID NO: 216531 - DNA, 23 bp, Artificial sequence
  SiRNA target sequence
aattgtcttaaaagctttgtaat

SEQ ID NO: 216532 - DNA, 23 bp, Artificial sequence
  SiRNA target sequence
attgtcttaaaagctttgtaatt

SEQ ID NO: 216533 - DNA, 23 bp, Artificial sequence
  SiRNA target sequence
ttgtcttaaaagctttgtaattt

SEQ ID NO: 216534 - DNA, 23 bp, Artificial sequence
  SiRNA target sequence
tgtcttaaaagctttgtaatttt

SEQ ID NO: 216535 - DNA, 23 bp, Artificial sequence
  SiRNA target sequence
gtcttaaaagctttgtaatttta

SEQ ID NO: 216536 - DNA, 23 bp, Artificial sequence
  SiRNA target sequence
tcttaaaagctttgtaattttac

SEQ ID NO: 216537 - DNA, 23 bp, Artificial sequence
  SiRNA target sequence
cttaaaagctttgtaattttacc

SEQ ID NO: 216538 - DNA, 23 bp, Artificial sequence
  SiRNA target sequence
ttaaaagctttgtaattttacca

SEQ ID NO: 216539 - DNA, 23 bp, Artificial sequence
  SiRNA target sequence
taaaagctttgtaattttaccag

SEQ ID NO: 216540 - DNA, 23 bp, Artificial sequence
  SiRNA target sequence
aaaagctttgtaattttaccagt

SEQ ID NO: 216541 - DNA, 23 bp, Artificial sequence
  SiRNA target sequence
aaagctttgtaattttaccagtt

SEQ ID NO: 216542 - DNA, 23 bp, Artificial sequence
  SiRNA target sequence
aagctttgtaattttaccagtta

SEQ ID NO: 216543 - DNA, 23 bp, Artificial sequence
  SiRNA target sequence
agctttgtaattttaccagttac

SEQ ID NO: 216544 - DNA, 23 bp, Artificial sequence
  SiRNA target sequence
gctttgtaattttaccagttact

SEQ ID NO: 216545 - DNA, 23 bp, Artificial sequence
  SiRNA target sequence
ctttgtaattttaccagttactc

SEQ ID NO: 216546 - DNA, 23 bp, Artificial sequence
  SiRNA target sequence
tttgtaattttaccagttactct

SEQ ID NO: 216547 - DNA, 23 bp, Artificial sequence
  SiRNA target sequence
ttgtaattttaccagttactctt

SEQ ID NO: 216548 - DNA, 23 bp, Artificial sequence
  SiRNA target sequence
tgtaattttaccagttactcttg

SEQ ID NO: 216549 - DNA, 23 bp, Artificial sequence
  SiRNA target sequence
gtaattttaccagttactcttgt

SEQ ID NO: 216550 - DNA, 23 bp, Artificial sequence
  SiRNA target sequence
taattttaccagttactcttgtt

SEQ ID NO: 216551 - DNA, 23 bp, Artificial sequence
  SiRNA target sequence
aattttaccagttactcttgttt

SEQ ID NO: 216552 - DNA, 23 bp, Artificial sequence
  SiRNA target sequence
attttaccagttactcttgtttg

SEQ ID NO: 216553 - DNA, 23 bp, Artificial sequence
  SiRNA target sequence
ttttaccagttactcttgtttgt

SEQ ID NO: 216554 - DNA, 23 bp, Artificial sequence
  SiRNA target sequence
tttaccagttactcttgtttgtg

SEQ ID NO: 216555 - DNA, 23 bp, Artificial sequence
  SiRNA target sequence
ttaccagttactcttgtttgtgt

SEQ ID NO: 216556 - DNA, 23 bp, Artificial sequence
  SiRNA target sequence
taccagttactcttgtttgtgta

SEQ ID NO: 216557 - DNA, 23 bp, Artificial sequence
  SiRNA target sequence
accagttactcttgtttgtgtag

SEQ ID NO: 216558 - DNA, 23 bp, Artificial sequence
  SiRNA target sequence
ccagttactcttgtttgtgtagg

SEQ ID NO: 216559 - DNA, 23 bp, Artificial sequence
  SiRNA target sequence
cagttactcttgtttgtgtagga

SEQ ID NO: 216560 - DNA, 23 bp, Artificial sequence
  SiRNA target sequence
agttactcttgtttgtgtaggat

SEQ ID NO: 216561 - DNA, 23 bp, Artificial sequence
  SiRNA target sequence
gttactcttgtttgtgtaggatt

SEQ ID NO: 216562 - DNA, 23 bp, Artificial sequence
  SiRNA target sequence
ttactcttgtttgtgtaggatta

SEQ ID NO: 216563 - DNA, 23 bp, Artificial sequence
  SiRNA target sequence
tactcttgtttgtgtaggattaa

SEQ ID NO: 216564 - DNA, 23 bp, Artificial sequence
  SiRNA target sequence
actcttgtttgtgtaggattaat

SEQ ID NO: 216565 - DNA, 23 bp, Artificial sequence
  SiRNA target sequence
ctcttgtttgtgtaggattaatt

SEQ ID NO: 216566 - DNA, 23 bp, Artificial sequence
  SiRNA target sequence
tcttgtttgtgtaggattaattc

SEQ ID NO: 216567 - DNA, 23 bp, Artificial sequence
  SiRNA target sequence
cttgtttgtgtaggattaattca

SEQ ID NO: 216568 - DNA, 23 bp, Artificial sequence
  SiRNA target sequence
ttgtttgtgtaggattaattcag

SEQ ID NO: 216569 - DNA, 23 bp, Artificial sequence
  SiRNA target sequence
tgtttgtgtaggattaattcaga

SEQ ID NO: 216570 - DNA, 23 bp, Artificial sequence
  SiRNA target sequence
gtttgtgtaggattaattcagaa

SEQ ID NO: 216571 - DNA, 23 bp, Artificial sequence
  SiRNA target sequence
tttgtgtaggattaattcagaag

SEQ ID NO: 216572 - DNA, 23 bp, Artificial sequence
  SiRNA target sequence
ttgtgtaggattaattcagaagt

SEQ ID NO: 216573 - DNA, 23 bp, Artificial sequence
  SiRNA target sequence
tgtgtaggattaattcagaagtc

SEQ ID NO: 216574 - DNA, 23 bp, Artificial sequence
  SiRNA target sequence
gtgtaggattaattcagaagtct

SEQ ID NO: 216575 - DNA, 23 bp, Artificial sequence
  SiRNA target sequence
tgtaggattaattcagaagtcta

SEQ ID NO: 216576 - DNA, 23 bp, Artificial sequence
  SiRNA target sequence
gtaggattaattcagaagtctac

SEQ ID NO: 216577 - DNA, 23 bp, Artificial sequence
  SiRNA target sequence
taggattaattcagaagtctaca

SEQ ID NO: 216578 - DNA, 23 bp, Artificial sequence
  SiRNA target sequence
aggattaattcagaagtctacac

SEQ ID NO: 216579 - DNA, 23 bp, Artificial sequence
  SiRNA target sequence
ggattaattcagaagtctacact

SEQ ID NO: 216580 - DNA, 23 bp, Artificial sequence
  SiRNA target sequence
gattaattcagaagtctacactc

SEQ ID NO: 216581 - DNA, 23 bp, Artificial sequence
  SiRNA target sequence
attaattcagaagtctacactct

SEQ ID NO: 216582 - DNA, 23 bp, Artificial sequence
  SiRNA target sequence
ttaattcagaagtctacactctc

SEQ ID NO: 216583 - DNA, 23 bp, Artificial sequence
  SiRNA target sequence
taattcagaagtctacactctct

SEQ ID NO: 216584 - DNA, 23 bp, Artificial sequence
  SiRNA target sequence
aattcagaagtctacactctctt

SEQ ID NO: 216585 - DNA, 23 bp, Artificial sequence
  SiRNA target sequence
attcagaagtctacactctctta

SEQ ID NO: 216586 - DNA, 23 bp, Artificial sequence
  SiRNA target sequence
ttcagaagtctacactctcttat

SEQ ID NO: 216587 - DNA, 23 bp, Artificial sequence
  SiRNA target sequence
tcagaagtctacactctcttatt

SEQ ID NO: 216588 - DNA, 23 bp, Artificial sequence
  SiRNA target sequence
cagaagtctacactctcttattc

SEQ ID NO: 216589 - DNA, 23 bp, Artificial sequence
  SiRNA target sequence
agaagtctacactctcttattct

SEQ ID NO: 216590 - DNA, 23 bp, Artificial sequence
  SiRNA target sequence
gaagtctacactctcttattctt

SEQ ID NO: 216591 - DNA, 23 bp, Artificial sequence
  SiRNA target sequence
aagtctacactctcttattcttt

SEQ ID NO: 216592 - DNA, 23 bp, Artificial sequence
  SiRNA target sequence
agtctacactctcttattctttt

SEQ ID NO: 216593 - DNA, 23 bp, Artificial sequence
  SiRNA target sequence
gtctacactctcttattctttta

SEQ ID NO: 216594 - DNA, 23 bp, Artificial sequence
  SiRNA target sequence
tctacactctcttattcttttac

SEQ ID NO: 216595 - DNA, 23 bp, Artificial sequence
  SiRNA target sequence
ctacactctcttattcttttaca

SEQ ID NO: 216596 - DNA, 23 bp, Artificial sequence
  SiRNA target sequence
tacactctcttattcttttacaa

SEQ ID NO: 216597 - DNA, 23 bp, Artificial sequence
  SiRNA target sequence
acactctcttattcttttacaaa

SEQ ID NO: 216598 - DNA, 23 bp, Artificial sequence
  SiRNA target sequence
cactctcttattcttttacaaaa

SEQ ID NO: 216599 - DNA, 23 bp, Artificial sequence
  SiRNA target sequence
actctcttattcttttacaaaaa

SEQ ID NO: 216600 - DNA, 23 bp, Artificial sequence
  SiRNA target sequence
ctctcttattcttttacaaaaat

SEQ ID NO: 216601 - DNA, 23 bp, Artificial sequence
  SiRNA target sequence
tctcttattcttttacaaaaata

SEQ ID NO: 216602 - DNA, 23 bp, Artificial sequence
  SiRNA target sequence
ctcttattcttttacaaaaatat

SEQ ID NO: 216603 - DNA, 23 bp, Artificial sequence
  SiRNA target sequence
tcttattcttttacaaaaatatt

SEQ ID NO: 216604 - DNA, 23 bp, Artificial sequence
  SiRNA target sequence
cttattcttttacaaaaatattt

SEQ ID NO: 216605 - DNA, 23 bp, Artificial sequence
  SiRNA target sequence
ttattcttttacaaaaatatttg

SEQ ID NO: 216606 - DNA, 23 bp, Artificial sequence
  SiRNA target sequence
tattcttttacaaaaatatttga

SEQ ID NO: 216607 - DNA, 23 bp, Artificial sequence
  SiRNA target sequence
attcttttacaaaaatatttgat

SEQ ID NO: 216608 - DNA, 23 bp, Artificial sequence
  SiRNA target sequence
ttcttttacaaaaatatttgatg

SEQ ID NO: 216609 - DNA, 23 bp, Artificial sequence
  SiRNA target sequence
tcttttacaaaaatatttgatgg

SEQ ID NO: 216610 - DNA, 23 bp, Artificial sequence
  SiRNA target sequence
cttttacaaaaatatttgatggt

SEQ ID NO: 216611 - DNA, 23 bp, Artificial sequence
  SiRNA target sequence
ttttacaaaaatatttgatggtg

SEQ ID NO: 216612 - DNA, 23 bp, Artificial sequence
  SiRNA target sequence
tttacaaaaatatttgatggtgc

SEQ ID NO: 216613 - DNA, 23 bp, Artificial sequence
  SiRNA target sequence
ttacaaaaatatttgatggtgca

SEQ ID NO: 216614 - DNA, 23 bp, Artificial sequence
  SiRNA target sequence
tacaaaaatatttgatggtgcat

SEQ ID NO: 216615 - DNA, 23 bp, Artificial sequence
  SiRNA target sequence
acaaaaatatttgatggtgcatt

SEQ ID NO: 216616 - DNA, 23 bp, Artificial sequence
  SiRNA target sequence
caaaaatatttgatggtgcattg

SEQ ID NO: 216617 - DNA, 23 bp, Artificial sequence
  SiRNA target sequence
aaaaatatttgatggtgcattgt

SEQ ID NO: 216618 - DNA, 23 bp, Artificial sequence
  SiRNA target sequence
aaaatatttgatggtgcattgtt

SEQ ID NO: 216619 - DNA, 23 bp, Artificial sequence
  SiRNA target sequence
aaatatttgatggtgcattgtta

SEQ ID NO: 216620 - DNA, 23 bp, Artificial sequence
  SiRNA target sequence
aatatttgatggtgcattgttaa

SEQ ID NO: 216621 - DNA, 23 bp, Artificial sequence
  SiRNA target sequence
atatttgatggtgcattgttaat

SEQ ID NO: 216622 - DNA, 23 bp, Artificial sequence
  SiRNA target sequence
tatttgatggtgcattgttaata

SEQ ID NO: 216623 - DNA, 23 bp, Artificial sequence
  SiRNA target sequence
atttgatggtgcattgttaatat

SEQ ID NO: 216624 - DNA, 23 bp, Artificial sequence
  SiRNA target sequence
tttgatggtgcattgttaatatt

SEQ ID NO: 216625 - DNA, 23 bp, Artificial sequence
  SiRNA target sequence
ttgatggtgcattgttaatattt

SEQ ID NO: 216626 - DNA, 23 bp, Artificial sequence
  SiRNA target sequence
tgatggtgcattgttaatatttg

SEQ ID NO: 216627 - DNA, 23 bp, Artificial sequence
  SiRNA target sequence
gatggtgcattgttaatatttgc

SEQ ID NO: 216628 - DNA, 23 bp, Artificial sequence
  SiRNA target sequence
atggtgcattgttaatatttgct

SEQ ID NO: 216629 - DNA, 23 bp, Artificial sequence
  SiRNA target sequence
tggtgcattgttaatatttgctt

SEQ ID NO: 216630 - DNA, 23 bp, Artificial sequence
  SiRNA target sequence
ggtgcattgttaatatttgcttt

SEQ ID NO: 216631 - DNA, 23 bp, Artificial sequence
  SiRNA target sequence
gtgcattgttaatatttgctttt

SEQ ID NO: 216632 - DNA, 23 bp, Artificial sequence
  SiRNA target sequence
tgcattgttaatatttgcttttc

SEQ ID NO: 216633 - DNA, 23 bp, Artificial sequence
  SiRNA target sequence
gcattgttaatatttgcttttct

SEQ ID NO: 216634 - DNA, 23 bp, Artificial sequence
  SiRNA target sequence
cattgttaatatttgcttttctt

SEQ ID NO: 216635 - DNA, 23 bp, Artificial sequence
  SiRNA target sequence
attgttaatatttgcttttcttt

SEQ ID NO: 216636 - DNA, 23 bp, Artificial sequence
  SiRNA target sequence
ttgttaatatttgcttttcttta

SEQ ID NO: 216637 - DNA, 23 bp, Artificial sequence
  SiRNA target sequence
tgttaatatttgcttttctttat

SEQ ID NO: 216638 - DNA, 23 bp, Artificial sequence
  SiRNA target sequence
gttaatatttgcttttctttata

SEQ ID NO: 216639 - DNA, 23 bp, Artificial sequence
  SiRNA target sequence
ttaatatttgcttttctttatat

SEQ ID NO: 216640 - DNA, 23 bp, Artificial sequence
  SiRNA target sequence
taatatttgcttttctttatatc

SEQ ID NO: 216641 - DNA, 23 bp, Artificial sequence
  SiRNA target sequence
aatatttgcttttctttatatca

SEQ ID NO: 216642 - DNA, 23 bp, Artificial sequence
  SiRNA target sequence
atatttgcttttctttatatcat

SEQ ID NO: 216643 - DNA, 23 bp, Artificial sequence
  SiRNA target sequence
tatttgcttttctttatatcatt

SEQ ID NO: 216644 - DNA, 23 bp, Artificial sequence
  SiRNA target sequence
atttgcttttctttatatcattc

SEQ ID NO: 216645 - DNA, 23 bp, Artificial sequence
  SiRNA target sequence
tttgcttttctttatatcattct

SEQ ID NO: 216646 - DNA, 23 bp, Artificial sequence
  SiRNA target sequence
ttgcttttctttatatcattctt

SEQ ID NO: 216647 - DNA, 23 bp, Artificial sequence
  SiRNA target sequence
tgcttttctttatatcattcttg

SEQ ID NO: 216648 - DNA, 23 bp, Artificial sequence
  SiRNA target sequence
gcttttctttatatcattcttgg

SEQ ID NO: 216649 - DNA, 23 bp, Artificial sequence
  SiRNA target sequence
cttttctttatatcattcttggt

SEQ ID NO: 216650 - DNA, 23 bp, Artificial sequence
  SiRNA target sequence
ttttctttatatcattcttggtc

SEQ ID NO: 216651 - DNA, 23 bp, Artificial sequence
  SiRNA target sequence
tttctttatatcattcttggtct

SEQ ID NO: 216652 - DNA, 23 bp, Artificial sequence
  SiRNA target sequence
ttctttatatcattcttggtcta

SEQ ID NO: 216653 - DNA, 23 bp, Artificial sequence
  SiRNA target sequence
tctttatatcattcttggtctag

SEQ ID NO: 216654 - DNA, 23 bp, Artificial sequence
  SiRNA target sequence
ctttatatcattcttggtctagt

SEQ ID NO: 216655 - DNA, 23 bp, Artificial sequence
  SiRNA target sequence
tttatatcattcttggtctagtt

SEQ ID NO: 216656 - DNA, 23 bp, Artificial sequence
  SiRNA target sequence
ttatatcattcttggtctagttc

SEQ ID NO: 216657 - DNA, 23 bp, Artificial sequence
  SiRNA target sequence
tatatcattcttggtctagttct

SEQ ID NO: 216658 - DNA, 23 bp, Artificial sequence
  SiRNA target sequence
atatcattcttggtctagttctt

SEQ ID NO: 216659 - DNA, 23 bp, Artificial sequence
  SiRNA target sequence
tatcattcttggtctagttcttc

SEQ ID NO: 216660 - DNA, 23 bp, Artificial sequence
  SiRNA target sequence
atcattcttggtctagttcttct

SEQ ID NO: 216661 - DNA, 23 bp, Artificial sequence
  SiRNA target sequence
tcattcttggtctagttcttctt

SEQ ID NO: 216662 - DNA, 23 bp, Artificial sequence
  SiRNA target sequence
cattcttggtctagttcttcttc

SEQ ID NO: 216663 - DNA, 23 bp, Artificial sequence
  SiRNA target sequence
attcttggtctagttcttcttcc

SEQ ID NO: 216664 - DNA, 23 bp, Artificial sequence
  SiRNA target sequence
ttcttggtctagttcttcttcca

SEQ ID NO: 216665 - DNA, 23 bp, Artificial sequence
  SiRNA target sequence
tcttggtctagttcttcttccat

SEQ ID NO: 216666 - DNA, 23 bp, Artificial sequence
  SiRNA target sequence
cttggtctagttcttcttccata

SEQ ID NO: 216667 - DNA, 23 bp, Artificial sequence
  SiRNA target sequence
ttggtctagttcttcttccatat

SEQ ID NO: 216668 - DNA, 23 bp, Artificial sequence
  SiRNA target sequence
tggtctagttcttcttccatatt

SEQ ID NO: 216669 - DNA, 23 bp, Artificial sequence
  SiRNA target sequence
ggtctagttcttcttccatattc

SEQ ID NO: 216670 - DNA, 23 bp, Artificial sequence
  SiRNA target sequence
gtctagttcttcttccatattct

SEQ ID NO: 216671 - DNA, 23 bp, Artificial sequence
  SiRNA target sequence
tctagttcttcttccatattctc

SEQ ID NO: 216672 - DNA, 23 bp, Artificial sequence
  SiRNA target sequence
ctagttcttcttccatattctca

SEQ ID NO: 216673 - DNA, 23 bp, Artificial sequence
  SiRNA target sequence
tagttcttcttccatattctcat

SEQ ID NO: 216674 - DNA, 23 bp, Artificial sequence
  SiRNA target sequence
agttcttcttccatattctcatc

SEQ ID NO: 216675 - DNA, 23 bp, Artificial sequence
  SiRNA target sequence
gttcttcttccatattctcatct

SEQ ID NO: 216676 - DNA, 23 bp, Artificial sequence
  SiRNA target sequence
ttcttcttccatattctcatctt

SEQ ID NO: 216677 - DNA, 23 bp, Artificial sequence
  SiRNA target sequence
tcttcttccatattctcatcttt

SEQ ID NO: 216678 - DNA, 23 bp, Artificial sequence
  SiRNA target sequence
cttcttccatattctcatctttt

SEQ ID NO: 216679 - DNA, 23 bp, Artificial sequence
  SiRNA target sequence
ttcttccatattctcatcttttc

SEQ ID NO: 216680 - DNA, 23 bp, Artificial sequence
  SiRNA target sequence
tcttccatattctcatcttttcc

SEQ ID NO: 216681 - DNA, 23 bp, Artificial sequence
  SiRNA target sequence
cttccatattctcatcttttcca

SEQ ID NO: 216682 - DNA, 23 bp, Artificial sequence
  SiRNA target sequence
ttccatattctcatcttttccag

SEQ ID NO: 216683 - DNA, 23 bp, Artificial sequence
  SiRNA target sequence
tccatattctcatcttttccagc

SEQ ID NO: 216684 - DNA, 23 bp, Artificial sequence
  SiRNA target sequence
ccatattctcatcttttccagct

SEQ ID NO: 216685 - DNA, 23 bp, Artificial sequence
  SiRNA target sequence
catattctcatcttttccagctt

SEQ ID NO: 216686 - DNA, 23 bp, Artificial sequence
  SiRNA target sequence
atattctcatcttttccagcttg

SEQ ID NO: 216687 - DNA, 23 bp, Artificial sequence
  SiRNA target sequence
tattctcatcttttccagcttga

SEQ ID NO: 216688 - DNA, 23 bp, Artificial sequence
  SiRNA target sequence
attctcatcttttccagcttgat

SEQ ID NO: 216689 - DNA, 23 bp, Artificial sequence
  SiRNA target sequence
ttctcatcttttccagcttgata

SEQ ID NO: 216690 - DNA, 23 bp, Artificial sequence
  SiRNA target sequence
tctcatcttttccagcttgatag

SEQ ID NO: 216691 - DNA, 23 bp, Artificial sequence
  SiRNA target sequence
ctcatcttttccagcttgatagt

SEQ ID NO: 216692 - DNA, 23 bp, Artificial sequence
  SiRNA target sequence
tcatcttttccagcttgatagtt

SEQ ID NO: 216693 - DNA, 23 bp, Artificial sequence
  SiRNA target sequence
catcttttccagcttgatagtta

SEQ ID NO: 216694 - DNA, 23 bp, Artificial sequence
  SiRNA target sequence
atcttttccagcttgatagttat

SEQ ID NO: 216695 - DNA, 23 bp, Artificial sequence
  SiRNA target sequence
tcttttccagcttgatagttatt

SEQ ID NO: 216696 - DNA, 23 bp, Artificial sequence
  SiRNA target sequence
cttttccagcttgatagttattt

SEQ ID NO: 216697 - DNA, 23 bp, Artificial sequence
  SiRNA target sequence
ttttccagcttgatagttatttt

SEQ ID NO: 216698 - DNA, 23 bp, Artificial sequence
  SiRNA target sequence
tttccagcttgatagttattttt

SEQ ID NO: 216699 - DNA, 23 bp, Artificial sequence
  SiRNA target sequence
ttccagcttgatagttatttttt

SEQ ID NO: 216700 - DNA, 23 bp, Artificial sequence
  SiRNA target sequence
tccagcttgatagttattttttt

SEQ ID NO: 216701 - DNA, 23 bp, Artificial sequence
  SiRNA target sequence
ccagcttgatagttattttttta

SEQ ID NO: 216702 - DNA, 23 bp, Artificial sequence
  SiRNA target sequence
cagcttgatagttatttttttag

SEQ ID NO: 216703 - DNA, 23 bp, Artificial sequence
  SiRNA target sequence
agcttgatagttatttttttaga

SEQ ID NO: 216704 - DNA, 23 bp, Artificial sequence
  SiRNA target sequence
gcttgatagttatttttttagag

SEQ ID NO: 216705 - DNA, 23 bp, Artificial sequence
  SiRNA target sequence
cttgatagttatttttttagaga

SEQ ID NO: 216706 - DNA, 23 bp, Artificial sequence
  SiRNA target sequence
ttgatagttatttttttagagac

SEQ ID NO: 216707 - DNA, 23 bp, Artificial sequence
  SiRNA target sequence
tgatagttatttttttagagacc

SEQ ID NO: 216708 - DNA, 23 bp, Artificial sequence
  SiRNA target sequence
gatagttatttttttagagacct

SEQ ID NO: 216709 - DNA, 23 bp, Artificial sequence
  SiRNA target sequence
atagttatttttttagagacctt

SEQ ID NO: 216710 - DNA, 23 bp, Artificial sequence
  SiRNA target sequence
tagttatttttttagagaccttt

SEQ ID NO: 216711 - DNA, 23 bp, Artificial sequence
  SiRNA target sequence
agttatttttttagagacctttt

SEQ ID NO: 216712 - DNA, 23 bp, Artificial sequence
  SiRNA target sequence
gttatttttttagagaccttttt

SEQ ID NO: 216713 - DNA, 23 bp, Artificial sequence
  SiRNA target sequence
ttatttttttagagaccttttta

SEQ ID NO: 216714 - DNA, 23 bp, Artificial sequence
  SiRNA target sequence
tatttttttagagacctttttag

SEQ ID NO: 216715 - DNA, 23 bp, Artificial sequence
  SiRNA target sequence
atttttttagagacctttttagt

SEQ ID NO: 216716 - DNA, 23 bp, Artificial sequence
  SiRNA target sequence
tttttttagagacctttttagtg

SEQ ID NO: 216717 - DNA, 23 bp, Artificial sequence
  SiRNA target sequence
ttttttagagacctttttagtga

SEQ ID NO: 216718 - DNA, 23 bp, Artificial sequence
  SiRNA target sequence
tttttagagacctttttagtgat

SEQ ID NO: 216719 - DNA, 23 bp, Artificial sequence
  SiRNA target sequence
ttttagagacctttttagtgatg

SEQ ID NO: 216720 - DNA, 23 bp, Artificial sequence
  SiRNA target sequence
tttagagacctttttagtgatgg

SEQ ID NO: 216721 - DNA, 23 bp, Artificial sequence
  SiRNA target sequence
ttagagacctttttagtgatggg

SEQ ID NO: 216722 - DNA, 23 bp, Artificial sequence
  SiRNA target sequence
tagagacctttttagtgatggga

SEQ ID NO: 216723 - DNA, 23 bp, Artificial sequence
  SiRNA target sequence
agagacctttttagtgatgggaa

SEQ ID NO: 216724 - DNA, 23 bp, Artificial sequence
  SiRNA target sequence
gagacctttttagtgatgggaaa

SEQ ID NO: 216725 - DNA, 23 bp, Artificial sequence
  SiRNA target sequence
agacctttttagtgatgggaaat

SEQ ID NO: 216726 - DNA, 23 bp, Artificial sequence
  SiRNA target sequence
gacctttttagtgatgggaaatg

SEQ ID NO: 216727 - DNA, 23 bp, Artificial sequence
  SiRNA target sequence
acctttttagtgatgggaaatgt

SEQ ID NO: 216728 - DNA, 23 bp, Artificial sequence
  SiRNA target sequence
cctttttagtgatgggaaatgtg

SEQ ID NO: 216729 - DNA, 23 bp, Artificial sequence
  SiRNA target sequence
ctttttagtgatgggaaatgtgt

SEQ ID NO: 216730 - DNA, 23 bp, Artificial sequence
  SiRNA target sequence
tttttagtgatgggaaatgtgtt

SEQ ID NO: 216731 - DNA, 23 bp, Artificial sequence
  SiRNA target sequence
ttttagtgatgggaaatgtgttg

SEQ ID NO: 216732 - DNA, 23 bp, Artificial sequence
  SiRNA target sequence
tttagtgatgggaaatgtgttgt

SEQ ID NO: 216733 - DNA, 23 bp, Artificial sequence
  SiRNA target sequence
ttagtgatgggaaatgtgttgta

SEQ ID NO: 216734 - DNA, 23 bp, Artificial sequence
  SiRNA target sequence
tagtgatgggaaatgtgttgtaa

SEQ ID NO: 216735 - DNA, 23 bp, Artificial sequence
  SiRNA target sequence
agtgatgggaaatgtgttgtaag

SEQ ID NO: 216736 - DNA, 23 bp, Artificial sequence
  SiRNA target sequence
gtgatgggaaatgtgttgtaaga

SEQ ID NO: 216737 - DNA, 23 bp, Artificial sequence
  SiRNA target sequence
tgatgggaaatgtgttgtaagag

SEQ ID NO: 216738 - DNA, 23 bp, Artificial sequence
  SiRNA target sequence
gatgggaaatgtgttgtaagagg

SEQ ID NO: 216739 - DNA, 23 bp, Artificial sequence
  SiRNA target sequence
atgggaaatgtgttgtaagaggc

SEQ ID NO: 216740 - DNA, 23 bp, Artificial sequence
  SiRNA target sequence
tgggaaatgtgttgtaagaggct

SEQ ID NO: 216741 - DNA, 23 bp, Artificial sequence
  SiRNA target sequence
gggaaatgtgttgtaagaggcta

SEQ ID NO: 216742 - DNA, 23 bp, Artificial sequence
  SiRNA target sequence
ggaaatgtgttgtaagaggctat

SEQ ID NO: 216743 - DNA, 23 bp, Artificial sequence
  SiRNA target sequence
gaaatgtgttgtaagaggctatg

SEQ ID NO: 216744 - DNA, 23 bp, Artificial sequence
  SiRNA target sequence
aaatgtgttgtaagaggctatga

SEQ ID NO: 216745 - DNA, 23 bp, Artificial sequence
  SiRNA target sequence
aatgtgttgtaagaggctatgat

SEQ ID NO: 216746 - DNA, 23 bp, Artificial sequence
  SiRNA target sequence
atgtgttgtaagaggctatgatg

SEQ ID NO: 216747 - DNA, 23 bp, Artificial sequence
  SiRNA target sequence
tgtgttgtaagaggctatgatgc

SEQ ID NO: 216748 - DNA, 23 bp, Artificial sequence
  SiRNA target sequence
gtgttgtaagaggctatgatgct

SEQ ID NO: 216749 - DNA, 23 bp, Artificial sequence
  SiRNA target sequence
tgttgtaagaggctatgatgctt

SEQ ID NO: 216750 - DNA, 23 bp, Artificial sequence
  SiRNA target sequence
gttgtaagaggctatgatgcttt

SEQ ID NO: 216751 - DNA, 23 bp, Artificial sequence
  SiRNA target sequence
ttgtaagaggctatgatgcttta

SEQ ID NO: 216752 - DNA, 23 bp, Artificial sequence
  SiRNA target sequence
tgtaagaggctatgatgctttat

SEQ ID NO: 216753 - DNA, 23 bp, Artificial sequence
  SiRNA target sequence
gtaagaggctatgatgctttatt

SEQ ID NO: 216754 - DNA, 23 bp, Artificial sequence
  SiRNA target sequence
taagaggctatgatgctttatta

SEQ ID NO: 216755 - DNA, 23 bp, Artificial sequence
  SiRNA target sequence
aagaggctatgatgctttattat

SEQ ID NO: 216756 - DNA, 23 bp, Artificial sequence
  SiRNA target sequence
agaggctatgatgctttattatc

SEQ ID NO: 216757 - DNA, 23 bp, Artificial sequence
  SiRNA target sequence
gaggctatgatgctttattatct

SEQ ID NO: 216758 - DNA, 23 bp, Artificial sequence
  SiRNA target sequence
aggctatgatgctttattatctt

SEQ ID NO: 216759 - DNA, 23 bp, Artificial sequence
  SiRNA target sequence
ggctatgatgctttattatcttt

SEQ ID NO: 216760 - DNA, 23 bp, Artificial sequence
  SiRNA target sequence
gctatgatgctttattatctttg

SEQ ID NO: 216761 - DNA, 23 bp, Artificial sequence
  SiRNA target sequence
ctatgatgctttattatctttgg

SEQ ID NO: 216762 - DNA, 23 bp, Artificial sequence
  SiRNA target sequence
tatgatgctttattatctttggc

SEQ ID NO: 216763 - DNA, 23 bp, Artificial sequence
  SiRNA target sequence
atgatgctttattatctttggca

SEQ ID NO: 216764 - DNA, 23 bp, Artificial sequence
  SiRNA target sequence
tgatgctttattatctttggcac

SEQ ID NO: 216765 - DNA, 23 bp, Artificial sequence
  SiRNA target sequence
gatgctttattatctttggcact

SEQ ID NO: 216766 - DNA, 23 bp, Artificial sequence
  SiRNA target sequence
atgctttattatctttggcactg

SEQ ID NO: 216767 - DNA, 23 bp, Artificial sequence
  SiRNA target sequence
tgctttattatctttggcactgg

SEQ ID NO: 216768 - DNA, 23 bp, Artificial sequence
  SiRNA target sequence
gctttattatctttggcactggt

SEQ ID NO: 216769 - DNA, 23 bp, Artificial sequence
  SiRNA target sequence
ctttattatctttggcactggtc

SEQ ID NO: 216770 - DNA, 23 bp, Artificial sequence
  SiRNA target sequence
tttattatctttggcactggtct

SEQ ID NO: 216771 - DNA, 23 bp, Artificial sequence
  SiRNA target sequence
ttattatctttggcactggtctt

SEQ ID NO: 216772 - DNA, 23 bp, Artificial sequence
  SiRNA target sequence
tattatctttggcactggtcttt

SEQ ID NO: 216773 - DNA, 23 bp, Artificial sequence
  SiRNA target sequence
attatctttggcactggtcttta

SEQ ID NO: 216774 - DNA, 23 bp, Artificial sequence
  SiRNA target sequence
ttatctttggcactggtctttaa

SEQ ID NO: 216775 - DNA, 23 bp, Artificial sequence
  SiRNA target sequence
tatctttggcactggtctttaac

SEQ ID NO: 216776 - DNA, 23 bp, Artificial sequence
  SiRNA target sequence
atctttggcactggtctttaacg

SEQ ID NO: 216777 - DNA, 23 bp, Artificial sequence
  SiRNA target sequence
tctttggcactggtctttaacga

SEQ ID NO: 216778 - DNA, 23 bp, Artificial sequence
  SiRNA target sequence
ctttggcactggtctttaacgaa

SEQ ID NO: 216779 - DNA, 23 bp, Artificial sequence
  SiRNA target sequence
tttggcactggtctttaacgaat

SEQ ID NO: 216780 - DNA, 23 bp, Artificial sequence
  SiRNA target sequence
ttggcactggtctttaacgaatg

SEQ ID NO: 216781 - DNA, 23 bp, Artificial sequence
  SiRNA target sequence
tggcactggtctttaacgaatgg

SEQ ID NO: 216782 - DNA, 23 bp, Artificial sequence
  SiRNA target sequence
ggcactggtctttaacgaatgga

SEQ ID NO: 216783 - DNA, 23 bp, Artificial sequence
  SiRNA target sequence
gcactggtctttaacgaatggac

SEQ ID NO: 216784 - DNA, 23 bp, Artificial sequence
  SiRNA target sequence
cactggtctttaacgaatggaca

SEQ ID NO: 216785 - DNA, 23 bp, Artificial sequence
  SiRNA target sequence
actggtctttaacgaatggacat

SEQ ID NO: 216786 - DNA, 23 bp, Artificial sequence
  SiRNA target sequence
ctggtctttaacgaatggacatc

SEQ ID NO: 216787 - DNA, 23 bp, Artificial sequence
  SiRNA target sequence
tggtctttaacgaatggacatcc

SEQ ID NO: 216788 - DNA, 23 bp, Artificial sequence
  SiRNA target sequence
ggtctttaacgaatggacatcct

SEQ ID NO: 216789 - DNA, 23 bp, Artificial sequence
  SiRNA target sequence
gtctttaacgaatggacatcctc

SEQ ID NO: 216790 - DNA, 23 bp, Artificial sequence
  SiRNA target sequence
tctttaacgaatggacatcctct

SEQ ID NO: 216791 - DNA, 23 bp, Artificial sequence
  SiRNA target sequence
ctttaacgaatggacatcctctc

SEQ ID NO: 216792 - DNA, 23 bp, Artificial sequence
  SiRNA target sequence
tttaacgaatggacatcctctct

SEQ ID NO: 216793 - DNA, 23 bp, Artificial sequence
  SiRNA target sequence
ttaacgaatggacatcctctcta

SEQ ID NO: 216794 - DNA, 23 bp, Artificial sequence
  SiRNA target sequence
taacgaatggacatcctctctag

SEQ ID NO: 216795 - DNA, 23 bp, Artificial sequence
  SiRNA target sequence
aacgaatggacatcctctctagt

SEQ ID NO: 216796 - DNA, 23 bp, Artificial sequence
  SiRNA target sequence
acgaatggacatcctctctagtt

SEQ ID NO: 216797 - DNA, 23 bp, Artificial sequence
  SiRNA target sequence
cgaatggacatcctctctagttt

SEQ ID NO: 216798 - DNA, 23 bp, Artificial sequence
  SiRNA target sequence
gaatggacatcctctctagttta

SEQ ID NO: 216799 - DNA, 23 bp, Artificial sequence
  SiRNA target sequence
aatggacatcctctctagtttac

SEQ ID NO: 216800 - DNA, 23 bp, Artificial sequence
  SiRNA target sequence
atggacatcctctctagtttaca

SEQ ID NO: 216801 - DNA, 23 bp, Artificial sequence
  SiRNA target sequence
tggacatcctctctagtttacat

SEQ ID NO: 216802 - DNA, 23 bp, Artificial sequence
  SiRNA target sequence
ggacatcctctctagtttacatt

SEQ ID NO: 216803 - DNA, 23 bp, Artificial sequence
  SiRNA target sequence
gacatcctctctagtttacattg

SEQ ID NO: 216804 - DNA, 23 bp, Artificial sequence
  SiRNA target sequence
acatcctctctagtttacattgt

SEQ ID NO: 216805 - DNA, 23 bp, Artificial sequence
  SiRNA target sequence
catcctctctagtttacattgtt

SEQ ID NO: 216806 - DNA, 23 bp, Artificial sequence
  SiRNA target sequence
atcctctctagtttacattgttt

SEQ ID NO: 216807 - DNA, 23 bp, Artificial sequence
  SiRNA target sequence
tcctctctagtttacattgtttc

SEQ ID NO: 216808 - DNA, 23 bp, Artificial sequence
  SiRNA target sequence
cctctctagtttacattgtttca

SEQ ID NO: 216809 - DNA, 23 bp, Artificial sequence
  SiRNA target sequence
ctctctagtttacattgtttcag

SEQ ID NO: 216810 - DNA, 23 bp, Artificial sequence
  SiRNA target sequence
tctctagtttacattgtttcaga

SEQ ID NO: 216811 - DNA, 23 bp, Artificial sequence
  SiRNA target sequence
ctctagtttacattgtttcagaa

SEQ ID NO: 216812 - DNA, 23 bp, Artificial sequence
  SiRNA target sequence
tctagtttacattgtttcagaaa

SEQ ID NO: 216813 - DNA, 23 bp, Artificial sequence
  SiRNA target sequence
ctagtttacattgtttcagaaat

SEQ ID NO: 216814 - DNA, 23 bp, Artificial sequence
  SiRNA target sequence
tagtttacattgtttcagaaatg

SEQ ID NO: 216815 - DNA, 23 bp, Artificial sequence
  SiRNA target sequence
agtttacattgtttcagaaatgt

SEQ ID NO: 216816 - DNA, 23 bp, Artificial sequence
  SiRNA target sequence
gtttacattgtttcagaaatgtt

SEQ ID NO: 216817 - DNA, 23 bp, Artificial sequence
  SiRNA target sequence
tttacattgtttcagaaatgttt

SEQ ID NO: 216818 - DNA, 23 bp, Artificial sequence
  SiRNA target sequence
ttacattgtttcagaaatgtttg

SEQ ID NO: 216819 - DNA, 23 bp, Artificial sequence
  SiRNA target sequence
tacattgtttcagaaatgtttgg

SEQ ID NO: 216820 - DNA, 23 bp, Artificial sequence
  SiRNA target sequence
acattgtttcagaaatgtttggt

SEQ ID NO: 216821 - DNA, 23 bp, Artificial sequence
  SiRNA target sequence
cattgtttcagaaatgtttggta

SEQ ID NO: 216822 - DNA, 23 bp, Artificial sequence
  SiRNA target sequence
attgtttcagaaatgtttggtaa

SEQ ID NO: 216823 - DNA, 23 bp, Artificial sequence
  SiRNA target sequence
ttgtttcagaaatgtttggtaat

SEQ ID NO: 216824 - DNA, 23 bp, Artificial sequence
  SiRNA target sequence
tgtttcagaaatgtttggtaatt

SEQ ID NO: 216825 - DNA, 23 bp, Artificial sequence
  SiRNA target sequence
gtttcagaaatgtttggtaattt

SEQ ID NO: 216826 - DNA, 23 bp, Artificial sequence
  SiRNA target sequence
tttcagaaatgtttggtaattta

SEQ ID NO: 216827 - DNA, 23 bp, Artificial sequence
  SiRNA target sequence
ttcagaaatgtttggtaatttag

SEQ ID NO: 216828 - DNA, 23 bp, Artificial sequence
  SiRNA target sequence
tcagaaatgtttggtaatttagt

SEQ ID NO: 216829 - DNA, 23 bp, Artificial sequence
  SiRNA target sequence
cagaaatgtttggtaatttagta

SEQ ID NO: 216830 - DNA, 23 bp, Artificial sequence
  SiRNA target sequence
agaaatgtttggtaatttagtat

SEQ ID NO: 216831 - DNA, 23 bp, Artificial sequence
  SiRNA target sequence
gaaatgtttggtaatttagtatt

SEQ ID NO: 216832 - DNA, 23 bp, Artificial sequence
  SiRNA target sequence
aaatgtttggtaatttagtattg

SEQ ID NO: 216833 - DNA, 23 bp, Artificial sequence
  SiRNA target sequence
aatgtttggtaatttagtattgt

SEQ ID NO: 216834 - DNA, 23 bp, Artificial sequence
  SiRNA target sequence
atgtttggtaatttagtattgtc

SEQ ID NO: 216835 - DNA, 23 bp, Artificial sequence
  SiRNA target sequence
tgtttggtaatttagtattgtct

SEQ ID NO: 216836 - DNA, 23 bp, Artificial sequence
  SiRNA target sequence
gtttggtaatttagtattgtctt

SEQ ID NO: 216837 - DNA, 23 bp, Artificial sequence
  SiRNA target sequence
tttggtaatttagtattgtctta

SEQ ID NO: 216838 - DNA, 23 bp, Artificial sequence
  SiRNA target sequence
ttggtaatttagtattgtcttat

SEQ ID NO: 216839 - DNA, 23 bp, Artificial sequence
  SiRNA target sequence
tggtaatttagtattgtcttatt

SEQ ID NO: 216840 - DNA, 23 bp, Artificial sequence
  SiRNA target sequence
ggtaatttagtattgtcttattt

SEQ ID NO: 216841 - DNA, 23 bp, Artificial sequence
  SiRNA target sequence
gtaatttagtattgtcttatttc

SEQ ID NO: 216842 - DNA, 23 bp, Artificial sequence
  SiRNA target sequence
taatttagtattgtcttatttct

SEQ ID NO: 216843 - DNA, 23 bp, Artificial sequence
  SiRNA target sequence
aatttagtattgtcttatttctt

SEQ ID NO: 216844 - DNA, 23 bp, Artificial sequence
  SiRNA target sequence
atttagtattgtcttatttcttc

SEQ ID NO: 216845 - DNA, 23 bp, Artificial sequence
  SiRNA target sequence
tttagtattgtcttatttcttct

SEQ ID NO: 216846 - DNA, 23 bp, Artificial sequence
  SiRNA target sequence
ttagtattgtcttatttcttctt

SEQ ID NO: 216847 - DNA, 23 bp, Artificial sequence
  SiRNA target sequence
tagtattgtcttatttcttcttg

SEQ ID NO: 216848 - DNA, 23 bp, Artificial sequence
  SiRNA target sequence
agtattgtcttatttcttcttga

SEQ ID NO: 216849 - DNA, 23 bp, Artificial sequence
  SiRNA target sequence
gtattgtcttatttcttcttgac

SEQ ID NO: 216850 - DNA, 23 bp, Artificial sequence
  SiRNA target sequence
tattgtcttatttcttcttgacg

SEQ ID NO: 216851 - DNA, 23 bp, Artificial sequence
  SiRNA target sequence
attgtcttatttcttcttgacgt

SEQ ID NO: 216852 - DNA, 23 bp, Artificial sequence
  SiRNA target sequence
ttgtcttatttcttcttgacgtt

SEQ ID NO: 216853 - DNA, 23 bp, Artificial sequence
  SiRNA target sequence
tgtcttatttcttcttgacgttt

SEQ ID NO: 216854 - DNA, 23 bp, Artificial sequence
  SiRNA target sequence
gtcttatttcttcttgacgtttg

SEQ ID NO: 216855 - DNA, 23 bp, Artificial sequence
  SiRNA target sequence
tcttatttcttcttgacgtttgc

SEQ ID NO: 216856 - DNA, 23 bp, Artificial sequence
  SiRNA target sequence
cttatttcttcttgacgtttgct

SEQ ID NO: 216857 - DNA, 23 bp, Artificial sequence
  SiRNA target sequence
ttatttcttcttgacgtttgcta

SEQ ID NO: 216858 - DNA, 23 bp, Artificial sequence
  SiRNA target sequence
tatttcttcttgacgtttgctaa

SEQ ID NO: 216859 - DNA, 23 bp, Artificial sequence
  SiRNA target sequence
atttcttcttgacgtttgctaat

SEQ ID NO: 216860 - DNA, 23 bp, Artificial sequence
  SiRNA target sequence
tttcttcttgacgtttgctaatt

SEQ ID NO: 216861 - DNA, 23 bp, Artificial sequence
  SiRNA target sequence
ttcttcttgacgtttgctaattc

SEQ ID NO: 216862 - DNA, 23 bp, Artificial sequence
  SiRNA target sequence
tcttcttgacgtttgctaattct

SEQ ID NO: 216863 - DNA, 23 bp, Artificial sequence
  SiRNA target sequence
cttcttgacgtttgctaattctt

SEQ ID NO: 216864 - DNA, 23 bp, Artificial sequence
  SiRNA target sequence
ttcttgacgtttgctaattcttt

SEQ ID NO: 216865 - DNA, 23 bp, Artificial sequence
  SiRNA target sequence
tcttgacgtttgctaattcttta

SEQ ID NO: 216866 - DNA, 23 bp, Artificial sequence
  SiRNA target sequence
cttgacgtttgctaattctttaa

SEQ ID NO: 216867 - DNA, 23 bp, Artificial sequence
  SiRNA target sequence
ttgacgtttgctaattctttaac

SEQ ID NO: 216868 - DNA, 23 bp, Artificial sequence
  SiRNA target sequence
tgacgtttgctaattctttaaca

SEQ ID NO: 216869 - DNA, 23 bp, Artificial sequence
  SiRNA target sequence
gacgtttgctaattctttaacaa

SEQ ID NO: 216870 - DNA, 23 bp, Artificial sequence
  SiRNA target sequence
acgtttgctaattctttaacaac

SEQ ID NO: 216871 - DNA, 23 bp, Artificial sequence
  SiRNA target sequence
cgtttgctaattctttaacaact

SEQ ID NO: 216872 - DNA, 23 bp, Artificial sequence
  SiRNA target sequence
gtttgctaattctttaacaactc

SEQ ID NO: 216873 - DNA, 23 bp, Artificial sequence
  SiRNA target sequence
tttgctaattctttaacaactcc

SEQ ID NO: 216874 - DNA, 23 bp, Artificial sequence
  SiRNA target sequence
ttgctaattctttaacaactcca

SEQ ID NO: 216875 - DNA, 23 bp, Artificial sequence
  SiRNA target sequence
tgctaattctttaacaactccag

SEQ ID NO: 216876 - DNA, 23 bp, Artificial sequence
  SiRNA target sequence
gctaattctttaacaactccagg

SEQ ID NO: 216877 - DNA, 23 bp, Artificial sequence
  SiRNA target sequence
ctaattctttaacaactccagga

SEQ ID NO: 216878 - DNA, 23 bp, Artificial sequence
  SiRNA target sequence
taattctttaacaactccaggac

SEQ ID NO: 216879 - DNA, 23 bp, Artificial sequence
  SiRNA target sequence
aattctttaacaactccaggaca

SEQ ID NO: 216880 - DNA, 23 bp, Artificial sequence
  SiRNA target sequence
attctttaacaactccaggacaa

SEQ ID NO: 216881 - DNA, 23 bp, Artificial sequence
  SiRNA target sequence
ttctttaacaactccaggacaaa

SEQ ID NO: 216882 - DNA, 23 bp, Artificial sequence
  SiRNA target sequence
tctttaacaactccaggacaaag

SEQ ID NO: 216883 - DNA, 23 bp, Artificial sequence
  SiRNA target sequence
ctttaacaactccaggacaaagt

SEQ ID NO: 216884 - DNA, 23 bp, Artificial sequence
  SiRNA target sequence
tttaacaactccaggacaaagtg

SEQ ID NO: 216885 - DNA, 23 bp, Artificial sequence
  SiRNA target sequence
ttaacaactccaggacaaagtgc

SEQ ID NO: 216886 - DNA, 23 bp, Artificial sequence
  SiRNA target sequence
taacaactccaggacaaagtgca

SEQ ID NO: 216887 - DNA, 23 bp, Artificial sequence
  SiRNA target sequence
aacaactccaggacaaagtgcaa

SEQ ID NO: 216888 - DNA, 23 bp, Artificial sequence
  SiRNA target sequence
acaactccaggacaaagtgcaag

SEQ ID NO: 216889 - DNA, 23 bp, Artificial sequence
  SiRNA target sequence
caactccaggacaaagtgcaaga

SEQ ID NO: 216890 - DNA, 23 bp, Artificial sequence
  SiRNA target sequence
aactccaggacaaagtgcaagat

SEQ ID NO: 216891 - DNA, 23 bp, Artificial sequence
  SiRNA target sequence
actccaggacaaagtgcaagatt

SEQ ID NO: 216892 - DNA, 23 bp, Artificial sequence
  SiRNA target sequence
ctccaggacaaagtgcaagattc

SEQ ID NO: 216893 - DNA, 23 bp, Artificial sequence
  SiRNA target sequence
tccaggacaaagtgcaagattca

SEQ ID NO: 216894 - DNA, 23 bp, Artificial sequence
  SiRNA target sequence
ccaggacaaagtgcaagattcat

SEQ ID NO: 216895 - DNA, 23 bp, Artificial sequence
  SiRNA target sequence
caggacaaagtgcaagattcata

SEQ ID NO: 216896 - DNA, 23 bp, Artificial sequence
  SiRNA target sequence
aggacaaagtgcaagattcatac

SEQ ID NO: 216897 - DNA, 23 bp, Artificial sequence
  SiRNA target sequence
ggacaaagtgcaagattcatacc

SEQ ID NO: 216898 - DNA, 23 bp, Artificial sequence
  SiRNA target sequence
gacaaagtgcaagattcatacct

SEQ ID NO: 216899 - DNA, 23 bp, Artificial sequence
  SiRNA target sequence
acaaagtgcaagattcatacctt

SEQ ID NO: 216900 - DNA, 23 bp, Artificial sequence
  SiRNA target sequence
caaagtgcaagattcataccttt

SEQ ID NO: 216901 - DNA, 23 bp, Artificial sequence
  SiRNA target sequence
aaagtgcaagattcataccttta

SEQ ID NO: 216902 - DNA, 23 bp, Artificial sequence
  SiRNA target sequence
aagtgcaagattcatacctttat

SEQ ID NO: 216903 - DNA, 23 bp, Artificial sequence
  SiRNA target sequence
agtgcaagattcatacctttatt

SEQ ID NO: 216904 - DNA, 23 bp, Artificial sequence
  SiRNA target sequence
gtgcaagattcatacctttattt

SEQ ID NO: 216905 - DNA, 23 bp, Artificial sequence
  SiRNA target sequence
tgcaagattcatacctttatttt

SEQ ID NO: 216906 - DNA, 23 bp, Artificial sequence
  SiRNA target sequence
gcaagattcatacctttatttta

SEQ ID NO: 216907 - DNA, 23 bp, Artificial sequence
  SiRNA target sequence
caagattcatacctttattttat

SEQ ID NO: 216908 - DNA, 23 bp, Artificial sequence
  SiRNA target sequence
aagattcatacctttattttatg

SEQ ID NO: 216909 - DNA, 23 bp, Artificial sequence
  SiRNA target sequence
agattcatacctttattttatgt

SEQ ID NO: 216910 - DNA, 23 bp, Artificial sequence
  SiRNA target sequence
gattcatacctttattttatgtt

SEQ ID NO: 216911 - DNA, 23 bp, Artificial sequence
  SiRNA target sequence
attcatacctttattttatgttt

SEQ ID NO: 216912 - DNA, 23 bp, Artificial sequence
  SiRNA target sequence
ttcatacctttattttatgtttt

SEQ ID NO: 216913 - DNA, 23 bp, Artificial sequence
  SiRNA target sequence
tcatacctttattttatgttttc

SEQ ID NO: 216914 - DNA, 23 bp, Artificial sequence
  SiRNA target sequence
catacctttattttatgttttct

SEQ ID NO: 216915 - DNA, 23 bp, Artificial sequence
  SiRNA target sequence
atacctttattttatgttttctc

SEQ ID NO: 216916 - DNA, 23 bp, Artificial sequence
  SiRNA target sequence
tacctttattttatgttttctcg

SEQ ID NO: 216917 - DNA, 23 bp, Artificial sequence
  SiRNA target sequence
acctttattttatgttttctcga

SEQ ID NO: 216918 - DNA, 23 bp, Artificial sequence
  SiRNA target sequence
cctttattttatgttttctcgaa

SEQ ID NO: 216919 - DNA, 23 bp, Artificial sequence
  SiRNA target sequence
ctttattttatgttttctcgaat

SEQ ID NO: 216920 - DNA, 23 bp, Artificial sequence
  SiRNA target sequence
tttattttatgttttctcgaata

SEQ ID NO: 216921 - DNA, 23 bp, Artificial sequence
  SiRNA target sequence
ttattttatgttttctcgaatat

SEQ ID NO: 216922 - DNA, 23 bp, Artificial sequence
  SiRNA target sequence
tattttatgttttctcgaatatt

SEQ ID NO: 216923 - DNA, 23 bp, Artificial sequence
  SiRNA target sequence
attttatgttttctcgaatattt

SEQ ID NO: 216924 - DNA, 23 bp, Artificial sequence
  SiRNA target sequence
ttttatgttttctcgaatatttc

SEQ ID NO: 216925 - DNA, 23 bp, Artificial sequence
  SiRNA target sequence
tttatgttttctcgaatatttct

SEQ ID NO: 216926 - DNA, 23 bp, Artificial sequence
  SiRNA target sequence
ttatgttttctcgaatatttctc

SEQ ID NO: 216927 - DNA, 23 bp, Artificial sequence
  SiRNA target sequence
tatgttttctcgaatatttctct

SEQ ID NO: 216928 - DNA, 23 bp, Artificial sequence
  SiRNA target sequence
atgttttctcgaatatttctctt

SEQ ID NO: 216929 - DNA, 23 bp, Artificial sequence
  SiRNA target sequence
tgttttctcgaatatttctcttt

SEQ ID NO: 216930 - DNA, 23 bp, Artificial sequence
  SiRNA target sequence
gttttctcgaatatttctctttt

SEQ ID NO: 216931 - DNA, 23 bp, Artificial sequence
  SiRNA target sequence
ttttctcgaatatttctcttttc

SEQ ID NO: 216932 - DNA, 23 bp, Artificial sequence
  SiRNA target sequence
tttctcgaatatttctcttttct

SEQ ID NO: 216933 - DNA, 23 bp, Artificial sequence
  SiRNA target sequence
ttctcgaatatttctcttttctt

SEQ ID NO: 216934 - DNA, 23 bp, Artificial sequence
  SiRNA target sequence
tctcgaatatttctcttttctta

SEQ ID NO: 216935 - DNA, 23 bp, Artificial sequence
  SiRNA target sequence
ctcgaatatttctcttttcttat

SEQ ID NO: 216936 - DNA, 23 bp, Artificial sequence
  SiRNA target sequence
tcgaatatttctcttttcttatc

SEQ ID NO: 216937 - DNA, 23 bp, Artificial sequence
  SiRNA target sequence
cgaatatttctcttttcttatct

SEQ ID NO: 216938 - DNA, 23 bp, Artificial sequence
  SiRNA target sequence
gaatatttctcttttcttatctt

SEQ ID NO: 216939 - DNA, 23 bp, Artificial sequence
  SiRNA target sequence
aatatttctcttttcttatcttc

SEQ ID NO: 216940 - DNA, 23 bp, Artificial sequence
  SiRNA target sequence
atatttctcttttcttatcttct

SEQ ID NO: 216941 - DNA, 23 bp, Artificial sequence
  SiRNA target sequence
tatttctcttttcttatcttctc

SEQ ID NO: 216942 - DNA, 23 bp, Artificial sequence
  SiRNA target sequence
atttctcttttcttatcttctca

SEQ ID NO: 216943 - DNA, 23 bp, Artificial sequence
  SiRNA target sequence
tttctcttttcttatcttctcaa

SEQ ID NO: 216944 - DNA, 23 bp, Artificial sequence
  SiRNA target sequence
ttctcttttcttatcttctcaag

SEQ ID NO: 216945 - DNA, 23 bp, Artificial sequence
  SiRNA target sequence
tctcttttcttatcttctcaagt

SEQ ID NO: 216946 - DNA, 23 bp, Artificial sequence
  SiRNA target sequence
ctcttttcttatcttctcaagtg

SEQ ID NO: 216947 - DNA, 23 bp, Artificial sequence
  SiRNA target sequence
tcttttcttatcttctcaagtga

SEQ ID NO: 216948 - DNA, 23 bp, Artificial sequence
  SiRNA target sequence
cttttcttatcttctcaagtgac

SEQ ID NO: 216949 - DNA, 23 bp, Artificial sequence
  SiRNA target sequence
ttttcttatcttctcaagtgaca

SEQ ID NO: 216950 - DNA, 23 bp, Artificial sequence
  SiRNA target sequence
tttcttatcttctcaagtgacag

SEQ ID NO: 216951 - DNA, 23 bp, Artificial sequence
  SiRNA target sequence
ttcttatcttctcaagtgacaga

SEQ ID NO: 216952 - DNA, 23 bp, Artificial sequence
  SiRNA target sequence
tcttatcttctcaagtgacagaa

SEQ ID NO: 216953 - DNA, 23 bp, Artificial sequence
  SiRNA target sequence
cttatcttctcaagtgacagaac

SEQ ID NO: 216954 - DNA, 23 bp, Artificial sequence
  SiRNA target sequence
ttatcttctcaagtgacagaact

SEQ ID NO: 216955 - DNA, 23 bp, Artificial sequence
  SiRNA target sequence
tatcttctcaagtgacagaactt

SEQ ID NO: 216956 - DNA, 23 bp, Artificial sequence
  SiRNA target sequence
atcttctcaagtgacagaacttt

SEQ ID NO: 216957 - DNA, 23 bp, Artificial sequence
  SiRNA target sequence
tcttctcaagtgacagaactttt

SEQ ID NO: 216958 - DNA, 23 bp, Artificial sequence
  SiRNA target sequence
cttctcaagtgacagaacttttt

SEQ ID NO: 216959 - DNA, 23 bp, Artificial sequence
  SiRNA target sequence
ttctcaagtgacagaacttttta

SEQ ID NO: 216960 - DNA, 23 bp, Artificial sequence
  SiRNA target sequence
tctcaagtgacagaactttttac

SEQ ID NO: 216961 - DNA, 23 bp, Artificial sequence
  SiRNA target sequence
ctcaagtgacagaactttttaca

SEQ ID NO: 216962 - DNA, 23 bp, Artificial sequence
  SiRNA target sequence
tcaagtgacagaactttttacaa

SEQ ID NO: 216963 - DNA, 23 bp, Artificial sequence
  SiRNA target sequence
caagtgacagaactttttacaag

SEQ ID NO: 216964 - DNA, 23 bp, Artificial sequence
  SiRNA target sequence
aagtgacagaactttttacaaga

SEQ ID NO: 216965 - DNA, 23 bp, Artificial sequence
  SiRNA target sequence
agtgacagaactttttacaagat

SEQ ID NO: 216966 - DNA, 23 bp, Artificial sequence
  SiRNA target sequence
gtgacagaactttttacaagata

SEQ ID NO: 216967 - DNA, 23 bp, Artificial sequence
  SiRNA target sequence
tgacagaactttttacaagatat

SEQ ID NO: 216968 - DNA, 23 bp, Artificial sequence
  SiRNA target sequence
gacagaactttttacaagatata

SEQ ID NO: 216969 - DNA, 23 bp, Artificial sequence
  SiRNA target sequence
acagaactttttacaagatatag

SEQ ID NO: 216970 - DNA, 23 bp, Artificial sequence
  SiRNA target sequence
cagaactttttacaagatataga

SEQ ID NO: 216971 - DNA, 23 bp, Artificial sequence
  SiRNA target sequence
agaactttttacaagatatagat

SEQ ID NO: 216972 - DNA, 23 bp, Artificial sequence
  SiRNA target sequence
gaactttttacaagatatagatc

SEQ ID NO: 216973 - DNA, 23 bp, Artificial sequence
  SiRNA target sequence
aactttttacaagatatagatca

SEQ ID NO: 216974 - DNA, 23 bp, Artificial sequence
  SiRNA target sequence
actttttacaagatatagatcaa

SEQ ID NO: 216975 - DNA, 23 bp, Artificial sequence
  SiRNA target sequence
ctttttacaagatatagatcaaa

SEQ ID NO: 216976 - DNA, 23 bp, Artificial sequence
  SiRNA target sequence
tttttacaagatatagatcaaag

SEQ ID NO: 216977 - DNA, 23 bp, Artificial sequence
  SiRNA target sequence
ttttacaagatatagatcaaagc

SEQ ID NO: 216978 - DNA, 23 bp, Artificial sequence
  SiRNA target sequence
tttacaagatatagatcaaagct

SEQ ID NO: 216979 - DNA, 23 bp, Artificial sequence
  SiRNA target sequence
ttacaagatatagatcaaagctc

SEQ ID NO: 216980 - DNA, 23 bp, Artificial sequence
  SiRNA target sequence
tacaagatatagatcaaagctca

SEQ ID NO: 216981 - DNA, 23 bp, Artificial sequence
  SiRNA target sequence
acaagatatagatcaaagctcac

SEQ ID NO: 216982 - DNA, 23 bp, Artificial sequence
  SiRNA target sequence
caagatatagatcaaagctcact

SEQ ID NO: 216983 - DNA, 23 bp, Artificial sequence
  SiRNA target sequence
aagatatagatcaaagctcactt

SEQ ID NO: 216984 - DNA, 23 bp, Artificial sequence
  SiRNA target sequence
agatatagatcaaagctcacttt

SEQ ID NO: 216985 - DNA, 23 bp, Artificial sequence
  SiRNA target sequence
gatatagatcaaagctcactttc

SEQ ID NO: 216986 - DNA, 23 bp, Artificial sequence
  SiRNA target sequence
atatagatcaaagctcactttct

SEQ ID NO: 216987 - DNA, 23 bp, Artificial sequence
  SiRNA target sequence
tatagatcaaagctcactttctc

SEQ ID NO: 216988 - DNA, 23 bp, Artificial sequence
  SiRNA target sequence
atagatcaaagctcactttctca

SEQ ID NO: 216989 - DNA, 23 bp, Artificial sequence
  SiRNA target sequence
tagatcaaagctcactttctcag

SEQ ID NO: 216990 - DNA, 23 bp, Artificial sequence
  SiRNA target sequence
agatcaaagctcactttctcaga

SEQ ID NO: 216991 - DNA, 23 bp, Artificial sequence
  SiRNA target sequence
gatcaaagctcactttctcagag

SEQ ID NO: 216992 - DNA, 23 bp, Artificial sequence
  SiRNA target sequence
atcaaagctcactttctcagagg

SEQ ID NO: 216993 - DNA, 23 bp, Artificial sequence
  SiRNA target sequence
tcaaagctcactttctcagaggc

SEQ ID NO: 216994 - DNA, 23 bp, Artificial sequence
  SiRNA target sequence
caaagctcactttctcagaggcg

SEQ ID NO: 216995 - DNA, 23 bp, Artificial sequence
  SiRNA target sequence
aaagctcactttctcagaggcgg

SEQ ID NO: 216996 - DNA, 23 bp, Artificial sequence
  SiRNA target sequence
aagctcactttctcagaggcgga

SEQ ID NO: 216997 - DNA, 23 bp, Artificial sequence
  SiRNA target sequence
agctcactttctcagaggcggaa

SEQ ID NO: 216998 - DNA, 23 bp, Artificial sequence
  SiRNA target sequence
gctcactttctcagaggcggaat

SEQ ID NO: 216999 - DNA, 23 bp, Artificial sequence
  SiRNA target sequence
ctcactttctcagaggcggaatt

SEQ ID NO: 217000 - DNA, 23 bp, Artificial sequence
  SiRNA target sequence
tcactttctcagaggcggaattt

SEQ ID NO: 217001 - DNA, 23 bp, Artificial sequence
  SiRNA target sequence
cactttctcagaggcggaatttt

SEQ ID NO: 217002 - DNA, 23 bp, Artificial sequence
  SiRNA target sequence
actttctcagaggcggaattttt

SEQ ID NO: 217003 - DNA, 23 bp, Artificial sequence
  SiRNA target sequence
ctttctcagaggcggaattttta

SEQ ID NO: 217004 - DNA, 23 bp, Artificial sequence
  SiRNA target sequence
tttctcagaggcggaatttttat

SEQ ID NO: 217005 - DNA, 23 bp, Artificial sequence
  SiRNA target sequence
ttctcagaggcggaatttttata

SEQ ID NO: 217006 - DNA, 23 bp, Artificial sequence
  SiRNA target sequence
tctcagaggcggaatttttatat

SEQ ID NO: 217007 - DNA, 23 bp, Artificial sequence
  SiRNA target sequence
ctcagaggcggaatttttatata

SEQ ID NO: 217008 - DNA, 23 bp, Artificial sequence
  SiRNA target sequence
tcagaggcggaatttttatataa

SEQ ID NO: 217009 - DNA, 23 bp, Artificial sequence
  SiRNA target sequence
cagaggcggaatttttatataat

SEQ ID NO: 217010 - DNA, 23 bp, Artificial sequence
  SiRNA target sequence
agaggcggaatttttatataatg

SEQ ID NO: 217011 - DNA, 23 bp, Artificial sequence
  SiRNA target sequence
gaggcggaatttttatataatgg

SEQ ID NO: 217012 - DNA, 23 bp, Artificial sequence
  SiRNA target sequence
aggcggaatttttatataatggc

SEQ ID NO: 217013 - DNA, 23 bp, Artificial sequence
  SiRNA target sequence
ggcggaatttttatataatggct

SEQ ID NO: 217014 - DNA, 23 bp, Artificial sequence
  SiRNA target sequence
gcggaatttttatataatggctt

SEQ ID NO: 217015 - DNA, 23 bp, Artificial sequence
  SiRNA target sequence
cggaatttttatataatggcttt

SEQ ID NO: 217016 - DNA, 23 bp, Artificial sequence
  SiRNA target sequence
ggaatttttatataatggctttt

SEQ ID NO: 217017 - DNA, 23 bp, Artificial sequence
  SiRNA target sequence
gaatttttatataatggcttttt

SEQ ID NO: 217018 - DNA, 23 bp, Artificial sequence
  SiRNA target sequence
aatttttatataatggctttttt

SEQ ID NO: 217019 - DNA, 23 bp, Artificial sequence
  SiRNA target sequence
atttttatataatggcttttttg

SEQ ID NO: 217020 - DNA, 23 bp, Artificial sequence
  SiRNA target sequence
tttttatataatggcttttttgt

SEQ ID NO: 217021 - DNA, 23 bp, Artificial sequence
  SiRNA target sequence
ttttatataatggcttttttgta

SEQ ID NO: 217022 - DNA, 23 bp, Artificial sequence
  SiRNA target sequence
tttatataatggcttttttgtat

SEQ ID NO: 217023 - DNA, 23 bp, Artificial sequence
  SiRNA target sequence
ttatataatggcttttttgtatt

SEQ ID NO: 217024 - DNA, 23 bp, Artificial sequence
  SiRNA target sequence
tatataatggcttttttgtattt

SEQ ID NO: 217025 - DNA, 23 bp, Artificial sequence
  SiRNA target sequence
atataatggcttttttgtatttt

SEQ ID NO: 217026 - DNA, 23 bp, Artificial sequence
  SiRNA target sequence
tataatggcttttttgtattttc

SEQ ID NO: 217027 - DNA, 23 bp, Artificial sequence
  SiRNA target sequence
ataatggcttttttgtattttct

SEQ ID NO: 217028 - DNA, 23 bp, Artificial sequence
  SiRNA target sequence
taatggcttttttgtattttctg

SEQ ID NO: 217029 - DNA, 23 bp, Artificial sequence
  SiRNA target sequence
aatggcttttttgtattttctgg

SEQ ID NO: 217030 - DNA, 23 bp, Artificial sequence
  SiRNA target sequence
atggcttttttgtattttctgga

SEQ ID NO: 217031 - DNA, 23 bp, Artificial sequence
  SiRNA target sequence
tggcttttttgtattttctggag

SEQ ID NO: 217032 - DNA, 23 bp, Artificial sequence
  SiRNA target sequence
ggcttttttgtattttctggagt

SEQ ID NO: 217033 - DNA, 23 bp, Artificial sequence
  SiRNA target sequence
gcttttttgtattttctggagtt

SEQ ID NO: 217034 - DNA, 23 bp, Artificial sequence
  SiRNA target sequence
cttttttgtattttctggagttc

SEQ ID NO: 217035 - DNA, 23 bp, Artificial sequence
  SiRNA target sequence
ttttttgtattttctggagttct

SEQ ID NO: 217036 - DNA, 23 bp, Artificial sequence
  SiRNA target sequence
tttttgtattttctggagttcta

SEQ ID NO: 217037 - DNA, 23 bp, Artificial sequence
  SiRNA target sequence
ttttgtattttctggagttctag

SEQ ID NO: 217038 - DNA, 23 bp, Artificial sequence
  SiRNA target sequence
tttgtattttctggagttctagt

SEQ ID NO: 217039 - DNA, 23 bp, Artificial sequence
  SiRNA target sequence
ttgtattttctggagttctagta

SEQ ID NO: 217040 - DNA, 23 bp, Artificial sequence
  SiRNA target sequence
tgtattttctggagttctagtaa

SEQ ID NO: 217041 - DNA, 23 bp, Artificial sequence
  SiRNA target sequence
gtattttctggagttctagtaat

SEQ ID NO: 217042 - DNA, 23 bp, Artificial sequence
  SiRNA target sequence
tattttctggagttctagtaata

SEQ ID NO: 217043 - DNA, 23 bp, Artificial sequence
  SiRNA target sequence
attttctggagttctagtaatag

SEQ ID NO: 217044 - DNA, 23 bp, Artificial sequence
  SiRNA target sequence
ttttctggagttctagtaatagt

SEQ ID NO: 217045 - DNA, 23 bp, Artificial sequence
  SiRNA target sequence
tttctggagttctagtaatagtt

SEQ ID NO: 217046 - DNA, 23 bp, Artificial sequence
  SiRNA target sequence
ttctggagttctagtaatagtta

SEQ ID NO: 217047 - DNA, 23 bp, Artificial sequence
  SiRNA target sequence
tctggagttctagtaatagttat

SEQ ID NO: 217048 - DNA, 23 bp, Artificial sequence
  SiRNA target sequence
ctggagttctagtaatagttata

SEQ ID NO: 217049 - DNA, 23 bp, Artificial sequence
  SiRNA target sequence
tggagttctagtaatagttatat

SEQ ID NO: 217050 - DNA, 23 bp, Artificial sequence
  SiRNA target sequence
ggagttctagtaatagttatatt

SEQ ID NO: 217051 - DNA, 23 bp, Artificial sequence
  SiRNA target sequence
gagttctagtaatagttatattt

SEQ ID NO: 217052 - DNA, 23 bp, Artificial sequence
  SiRNA target sequence
agttctagtaatagttatatttt

SEQ ID NO: 217053 - DNA, 23 bp, Artificial sequence
  SiRNA target sequence
gttctagtaatagttatattttt

SEQ ID NO: 217054 - DNA, 23 bp, Artificial sequence
  SiRNA target sequence
ttctagtaatagttatattttta

SEQ ID NO: 217055 - DNA, 23 bp, Artificial sequence
  SiRNA target sequence
tctagtaatagttatatttttaa

SEQ ID NO: 217056 - DNA, 23 bp, Artificial sequence
  SiRNA target sequence
ctagtaatagttatatttttaat

SEQ ID NO: 217057 - DNA, 23 bp, Artificial sequence
  SiRNA target sequence
tagtaatagttatatttttaatt

SEQ ID NO: 217058 - DNA, 23 bp, Artificial sequence
  SiRNA target sequence
agtaatagttatatttttaatta

SEQ ID NO: 217059 - DNA, 23 bp, Artificial sequence
  SiRNA target sequence
gtaatagttatatttttaattaa

SEQ ID NO: 217060 - DNA, 23 bp, Artificial sequence
  SiRNA target sequence
taatagttatatttttaattaaa

SEQ ID NO: 217061 - DNA, 23 bp, Artificial sequence
  SiRNA target sequence
aatagttatatttttaattaaaa

SEQ ID NO: 217062 - DNA, 23 bp, Artificial sequence
  SiRNA target sequence
atagttatatttttaattaaaaa

SEQ ID NO: 217063 - DNA, 23 bp, Artificial sequence
  SiRNA target sequence
tagttatatttttaattaaaaaa

SEQ ID NO: 217064 - DNA, 23 bp, Artificial sequence
  SiRNA target sequence
agttatatttttaattaaaaaat

SEQ ID NO: 217065 - DNA, 23 bp, Artificial sequence
  SiRNA target sequence
gttatatttttaattaaaaaata

SEQ ID NO: 217066 - DNA, 23 bp, Artificial sequence
  SiRNA target sequence
ttatatttttaattaaaaaatat

SEQ ID NO: 217067 - DNA, 23 bp, Artificial sequence
  SiRNA target sequence
tatatttttaattaaaaaatatt

SEQ ID NO: 217068 - DNA, 23 bp, Artificial sequence
  SiRNA target sequence
atatttttaattaaaaaatattt

SEQ ID NO: 217069 - DNA, 23 bp, Artificial sequence
  SiRNA target sequence
tatttttaattaaaaaatatttg

SEQ ID NO: 217070 - DNA, 23 bp, Artificial sequence
  SiRNA target sequence
atttttaattaaaaaatatttgg

SEQ ID NO: 217071 - DNA, 23 bp, Artificial sequence
  SiRNA target sequence
tttttaattaaaaaatatttgga

SEQ ID NO: 217072 - DNA, 23 bp, Artificial sequence
  SiRNA target sequence
ttttaattaaaaaatatttggag

SEQ ID NO: 217073 - DNA, 23 bp, Artificial sequence
  SiRNA target sequence
tttaattaaaaaatatttggaga

SEQ ID NO: 217074 - DNA, 23 bp, Artificial sequence
  SiRNA target sequence
ttaattaaaaaatatttggagag

SEQ ID NO: 217075 - DNA, 23 bp, Artificial sequence
  SiRNA target sequence
taattaaaaaatatttggagagg

SEQ ID NO: 217076 - DNA, 23 bp, Artificial sequence
  SiRNA target sequence
aattaaaaaatatttggagagga

SEQ ID NO: 217077 - DNA, 23 bp, Artificial sequence
  SiRNA target sequence
attaaaaaatatttggagaggaa

SEQ ID NO: 217078 - DNA, 23 bp, Artificial sequence
  SiRNA target sequence
ttaaaaaatatttggagaggaat

SEQ ID NO: 217079 - DNA, 23 bp, Artificial sequence
  SiRNA target sequence
taaaaaatatttggagaggaatg

SEQ ID NO: 217080 - DNA, 23 bp, Artificial sequence
  SiRNA target sequence
aaaaaatatttggagaggaatgt

SEQ ID NO: 217081 - DNA, 23 bp, Artificial sequence
  SiRNA target sequence
aaaaatatttggagaggaatgtg

SEQ ID NO: 217082 - DNA, 23 bp, Artificial sequence
  SiRNA target sequence
aaaatatttggagaggaatgtga

SEQ ID NO: 217083 - DNA, 23 bp, Artificial sequence
  SiRNA target sequence
aaatatttggagaggaatgtgac

SEQ ID NO: 217084 - DNA, 23 bp, Artificial sequence
  SiRNA target sequence
aatatttggagaggaatgtgact

SEQ ID NO: 217085 - DNA, 23 bp, Artificial sequence
  SiRNA target sequence
atatttggagaggaatgtgacta

SEQ ID NO: 217086 - DNA, 23 bp, Artificial sequence
  SiRNA target sequence
tatttggagaggaatgtgactaa

SEQ ID NO: 217087 - DNA, 23 bp, Artificial sequence
  SiRNA target sequence
atttggagaggaatgtgactaac

SEQ ID NO: 217088 - DNA, 23 bp, Artificial sequence
  SiRNA target sequence
tttggagaggaatgtgactaaca

SEQ ID NO: 217089 - DNA, 23 bp, Artificial sequence
  SiRNA target sequence
ttggagaggaatgtgactaacaa

SEQ ID NO: 217090 - DNA, 23 bp, Artificial sequence
  SiRNA target sequence
tggagaggaatgtgactaacaaa

SEQ ID NO: 217091 - DNA, 23 bp, Artificial sequence
  SiRNA target sequence
ggagaggaatgtgactaacaaac

SEQ ID NO: 217092 - DNA, 23 bp, Artificial sequence
  SiRNA target sequence
gagaggaatgtgactaacaaacc

SEQ ID NO: 217093 - DNA, 23 bp, Artificial sequence
  SiRNA target sequence
agaggaatgtgactaacaaacct

SEQ ID NO: 217094 - DNA, 23 bp, Artificial sequence
  SiRNA target sequence
gaggaatgtgactaacaaacctt

SEQ ID NO: 217095 - DNA, 23 bp, Artificial sequence
  SiRNA target sequence
aggaatgtgactaacaaaccttt

SEQ ID NO: 217096 - DNA, 23 bp, Artificial sequence
  SiRNA target sequence
ggaatgtgactaacaaacctttg

SEQ ID NO: 217097 - DNA, 23 bp, Artificial sequence
  SiRNA target sequence
gaatgtgactaacaaacctttgt

SEQ ID NO: 217098 - DNA, 23 bp, Artificial sequence
  SiRNA target sequence
aatgtgactaacaaacctttgtt

SEQ ID NO: 217099 - DNA, 23 bp, Artificial sequence
  SiRNA target sequence
atgtgactaacaaacctttgttt

SEQ ID NO: 217100 - DNA, 23 bp, Artificial sequence
  SiRNA target sequence
tgtgactaacaaacctttgtttg

SEQ ID NO: 217101 - DNA, 23 bp, Artificial sequence
  SiRNA target sequence
gtgactaacaaacctttgtttgt

SEQ ID NO: 217102 - DNA, 23 bp, Artificial sequence
  SiRNA target sequence
tgactaacaaacctttgtttgtt

SEQ ID NO: 217103 - DNA, 23 bp, Artificial sequence
  SiRNA target sequence
gactaacaaacctttgtttgttg

SEQ ID NO: 217104 - DNA, 23 bp, Artificial sequence
  SiRNA target sequence
actaacaaacctttgtttgttgt

SEQ ID NO: 217105 - DNA, 23 bp, Artificial sequence
  SiRNA target sequence
ctaacaaacctttgtttgttgta

SEQ ID NO: 217106 - DNA, 23 bp, Artificial sequence
  SiRNA target sequence
taacaaacctttgtttgttgtaa

SEQ ID NO: 217107 - DNA, 23 bp, Artificial sequence
  SiRNA target sequence
aacaaacctttgtttgttgtaaa

SEQ ID NO: 217108 - DNA, 23 bp, Artificial sequence
  SiRNA target sequence
acaaacctttgtttgttgtaaaa

SEQ ID NO: 217109 - DNA, 23 bp, Artificial sequence
  SiRNA target sequence
caaacctttgtttgttgtaaaat

SEQ ID NO: 217110 - DNA, 23 bp, Artificial sequence
  SiRNA target sequence
aaacctttgtttgttgtaaaatc

SEQ ID NO: 217111 - DNA, 23 bp, Artificial sequence
  SiRNA target sequence
aacctttgtttgttgtaaaatct

SEQ ID NO: 217112 - DNA, 23 bp, Artificial sequence
  SiRNA target sequence
acctttgtttgttgtaaaatctg

SEQ ID NO: 217113 - DNA, 23 bp, Artificial sequence
  SiRNA target sequence
cctttgtttgttgtaaaatctgt

SEQ ID NO: 217114 - DNA, 23 bp, Artificial sequence
  SiRNA target sequence
ctttgtttgttgtaaaatctgtt

SEQ ID NO: 217115 - DNA, 23 bp, Artificial sequence
  SiRNA target sequence
tttgtttgttgtaaaatctgtta

SEQ ID NO: 217116 - DNA, 23 bp, Artificial sequence
  SiRNA target sequence
ttgtttgttgtaaaatctgttaa

SEQ ID NO: 217117 - DNA, 23 bp, Artificial sequence
  SiRNA target sequence
tgtttgttgtaaaatctgttaaa

SEQ ID NO: 217118 - DNA, 23 bp, Artificial sequence
  SiRNA target sequence
gtttgttgtaaaatctgttaaaa

SEQ ID NO: 217119 - DNA, 23 bp, Artificial sequence
  SiRNA target sequence
tttgttgtaaaatctgttaaaaa

SEQ ID NO: 217120 - DNA, 23 bp, Artificial sequence
  SiRNA target sequence
ttgttgtaaaatctgttaaaaag

SEQ ID NO: 217121 - DNA, 23 bp, Artificial sequence
  SiRNA target sequence
tgttgtaaaatctgttaaaaaga

SEQ ID NO: 217122 - DNA, 23 bp, Artificial sequence
  SiRNA target sequence
gttgtaaaatctgttaaaaagaa

SEQ ID NO: 217123 - DNA, 23 bp, Artificial sequence
  SiRNA target sequence
ttgtaaaatctgttaaaaagaag

SEQ ID NO: 217124 - DNA, 23 bp, Artificial sequence
  SiRNA target sequence
tgtaaaatctgttaaaaagaagg

SEQ ID NO: 217125 - DNA, 23 bp, Artificial sequence
  SiRNA target sequence
gtaaaatctgttaaaaagaaggg

SEQ ID NO: 217126 - DNA, 23 bp, Artificial sequence
  SiRNA target sequence
taaaatctgttaaaaagaaggga

SEQ ID NO: 217127 - DNA, 23 bp, Artificial sequence
  SiRNA target sequence
aaaatctgttaaaaagaagggac

SEQ ID NO: 217128 - DNA, 23 bp, Artificial sequence
  SiRNA target sequence
aaatctgttaaaaagaagggacc

SEQ ID NO: 217129 - DNA, 23 bp, Artificial sequence
  SiRNA target sequence
aatctgttaaaaagaagggacca

SEQ ID NO: 217130 - DNA, 23 bp, Artificial sequence
  SiRNA target sequence
atctgttaaaaagaagggaccaa

SEQ ID NO: 217131 - DNA, 23 bp, Artificial sequence
  SiRNA target sequence
tctgttaaaaagaagggaccaaa

SEQ ID NO: 217132 - DNA, 23 bp, Artificial sequence
  SiRNA target sequence
ctgttaaaaagaagggaccaaaa

SEQ ID NO: 217133 - DNA, 23 bp, Artificial sequence
  SiRNA target sequence
tgttaaaaagaagggaccaaaag

SEQ ID NO: 217134 - DNA, 23 bp, Artificial sequence
  SiRNA target sequence
gttaaaaagaagggaccaaaagt

SEQ ID NO: 217135 - DNA, 23 bp, Artificial sequence
  SiRNA target sequence
ttaaaaagaagggaccaaaagtt

SEQ ID NO: 217136 - DNA, 23 bp, Artificial sequence
  SiRNA target sequence
taaaaagaagggaccaaaagtta

SEQ ID NO: 217137 - DNA, 23 bp, Artificial sequence
  SiRNA target sequence
aaaaagaagggaccaaaagttaa

SEQ ID NO: 217138 - DNA, 23 bp, Artificial sequence
  SiRNA target sequence
aaaagaagggaccaaaagttaaa

SEQ ID NO: 217139 - DNA, 23 bp, Artificial sequence
  SiRNA target sequence
aaagaagggaccaaaagttaaag

SEQ ID NO: 217140 - DNA, 23 bp, Artificial sequence
  SiRNA target sequence
aagaagggaccaaaagttaaagt

SEQ ID NO: 217141 - DNA, 23 bp, Artificial sequence
  SiRNA target sequence
agaagggaccaaaagttaaagta

SEQ ID NO: 217142 - DNA, 23 bp, Artificial sequence
  SiRNA target sequence
gaagggaccaaaagttaaagtag

SEQ ID NO: 217143 - DNA, 23 bp, Artificial sequence
  SiRNA target sequence
aagggaccaaaagttaaagtagg

SEQ ID NO: 217144 - DNA, 23 bp, Artificial sequence
  SiRNA target sequence
agggaccaaaagttaaagtagga

SEQ ID NO: 217145 - DNA, 23 bp, Artificial sequence
  SiRNA target sequence
gggaccaaaagttaaagtaggat

SEQ ID NO: 217146 - DNA, 23 bp, Artificial sequence
  SiRNA target sequence
ggaccaaaagttaaagtaggatt

SEQ ID NO: 217147 - DNA, 23 bp, Artificial sequence
  SiRNA target sequence
gaccaaaagttaaagtaggattt

SEQ ID NO: 217148 - DNA, 23 bp, Artificial sequence
  SiRNA target sequence
accaaaagttaaagtaggatttg

SEQ ID NO: 217149 - DNA, 23 bp, Artificial sequence
  SiRNA target sequence
ccaaaagttaaagtaggatttgc

SEQ ID NO: 217150 - DNA, 23 bp, Artificial sequence
  SiRNA target sequence
caaaagttaaagtaggatttgcg

SEQ ID NO: 217151 - DNA, 23 bp, Artificial sequence
  SiRNA target sequence
aaaagttaaagtaggatttgcgg

SEQ ID NO: 217152 - DNA, 23 bp, Artificial sequence
  SiRNA target sequence
aaagttaaagtaggatttgcgga

SEQ ID NO: 217153 - DNA, 23 bp, Artificial sequence
  SiRNA target sequence
aagttaaagtaggatttgcggag

SEQ ID NO: 217154 - DNA, 23 bp, Artificial sequence
  SiRNA target sequence
agttaaagtaggatttgcggagg

SEQ ID NO: 217155 - DNA, 23 bp, Artificial sequence
  SiRNA target sequence
gttaaagtaggatttgcggaggg

SEQ ID NO: 217156 - DNA, 23 bp, Artificial sequence
  SiRNA target sequence
ttaaagtaggatttgcggagggc

SEQ ID NO: 217157 - DNA, 23 bp, Artificial sequence
  SiRNA target sequence
taaagtaggatttgcggagggcc

SEQ ID NO: 217158 - DNA, 23 bp, Artificial sequence
  SiRNA target sequence
aaagtaggatttgcggagggcct

SEQ ID NO: 217159 - DNA, 23 bp, Artificial sequence
  SiRNA target sequence
aagtaggatttgcggagggcctt

SEQ ID NO: 217160 - DNA, 23 bp, Artificial sequence
  SiRNA target sequence
agtaggatttgcggagggcctta

SEQ ID NO: 217161 - DNA, 23 bp, Artificial sequence
  SiRNA target sequence
gtaggatttgcggagggccttaa

SEQ ID NO: 217162 - DNA, 23 bp, Artificial sequence
  SiRNA target sequence
taggatttgcggagggccttaaa

SEQ ID NO: 217163 - DNA, 23 bp, Artificial sequence
  SiRNA target sequence
aggatttgcggagggccttaaag

SEQ ID NO: 217164 - DNA, 23 bp, Artificial sequence
  SiRNA target sequence
ggatttgcggagggccttaaaga

SEQ ID NO: 217165 - DNA, 23 bp, Artificial sequence
  SiRNA target sequence
gatttgcggagggccttaaagaa

SEQ ID NO: 217166 - DNA, 23 bp, Artificial sequence
  SiRNA target sequence
atttgcggagggccttaaagaaa

SEQ ID NO: 217167 - DNA, 23 bp, Artificial sequence
  SiRNA target sequence
tttgcggagggccttaaagaaat

SEQ ID NO: 217168 - DNA, 23 bp, Artificial sequence
  SiRNA target sequence
ttgcggagggccttaaagaaatg

SEQ ID NO: 217169 - DNA, 23 bp, Artificial sequence
  SiRNA target sequence
tgcggagggccttaaagaaatga

SEQ ID NO: 217170 - DNA, 23 bp, Artificial sequence
  SiRNA target sequence
gcggagggccttaaagaaatgat

SEQ ID NO: 217171 - DNA, 23 bp, Artificial sequence
  SiRNA target sequence
cggagggccttaaagaaatgatg

SEQ ID NO: 217172 - DNA, 23 bp, Artificial sequence
  SiRNA target sequence
ggagggccttaaagaaatgatgg

SEQ ID NO: 217173 - DNA, 23 bp, Artificial sequence
  SiRNA target sequence
gagggccttaaagaaatgatggc

SEQ ID NO: 217174 - DNA, 23 bp, Artificial sequence
  SiRNA target sequence
agggccttaaagaaatgatggca

SEQ ID NO: 217175 - DNA, 23 bp, Artificial sequence
  SiRNA target sequence
gggccttaaagaaatgatggcat

SEQ ID NO: 217176 - DNA, 23 bp, Artificial sequence
  SiRNA target sequence
ggccttaaagaaatgatggcatc

SEQ ID NO: 217177 - DNA, 23 bp, Artificial sequence
  SiRNA target sequence
gccttaaagaaatgatggcatca

SEQ ID NO: 217178 - DNA, 23 bp, Artificial sequence
  SiRNA target sequence
ccttaaagaaatgatggcatcaa

SEQ ID NO: 217179 - DNA, 23 bp, Artificial sequence
  SiRNA target sequence
cttaaagaaatgatggcatcaaa

SEQ ID NO: 217180 - DNA, 23 bp, Artificial sequence
  SiRNA target sequence
ttaaagaaatgatggcatcaaag

SEQ ID NO: 217181 - DNA, 23 bp, Artificial sequence
  SiRNA target sequence
taaagaaatgatggcatcaaagt

SEQ ID NO: 217182 - DNA, 23 bp, Artificial sequence
  SiRNA target sequence
aaagaaatgatggcatcaaagtt

SEQ ID NO: 217183 - DNA, 23 bp, Artificial sequence
  SiRNA target sequence
aagaaatgatggcatcaaagtta

SEQ ID NO: 217184 - DNA, 23 bp, Artificial sequence
  SiRNA target sequence
agaaatgatggcatcaaagttat

SEQ ID NO: 217185 - DNA, 23 bp, Artificial sequence
  SiRNA target sequence
gaaatgatggcatcaaagttatt

SEQ ID NO: 217186 - DNA, 23 bp, Artificial sequence
  SiRNA target sequence
aaatgatggcatcaaagttatta

SEQ ID NO: 217187 - DNA, 23 bp, Artificial sequence
  SiRNA target sequence
aatgatggcatcaaagttattac

SEQ ID NO: 217188 - DNA, 23 bp, Artificial sequence
  SiRNA target sequence
atgatggcatcaaagttattact

SEQ ID NO: 217189 - DNA, 23 bp, Artificial sequence
  SiRNA target sequence
tgatggcatcaaagttattactt

SEQ ID NO: 217190 - DNA, 23 bp, Artificial sequence
  SiRNA target sequence
gatggcatcaaagttattactta

SEQ ID NO: 217191 - DNA, 23 bp, Artificial sequence
  SiRNA target sequence
atggcatcaaagttattacttaa

SEQ ID NO: 217192 - DNA, 23 bp, Artificial sequence
  SiRNA target sequence
tggcatcaaagttattacttaac

SEQ ID NO: 217193 - DNA, 23 bp, Artificial sequence
  SiRNA target sequence
ggcatcaaagttattacttaaca

SEQ ID NO: 217194 - DNA, 23 bp, Artificial sequence
  SiRNA target sequence
gcatcaaagttattacttaacat

SEQ ID NO: 217195 - DNA, 23 bp, Artificial sequence
  SiRNA target sequence
catcaaagttattacttaacatt

SEQ ID NO: 217196 - DNA, 23 bp, Artificial sequence
  SiRNA target sequence
atcaaagttattacttaacattt

SEQ ID NO: 217197 - DNA, 23 bp, Artificial sequence
  SiRNA target sequence
tcaaagttattacttaacatttc

SEQ ID NO: 217198 - DNA, 23 bp, Artificial sequence
  SiRNA target sequence
caaagttattacttaacatttca

SEQ ID NO: 217199 - DNA, 23 bp, Artificial sequence
  SiRNA target sequence
aaagttattacttaacatttcat

SEQ ID NO: 217200 - DNA, 23 bp, Artificial sequence
  SiRNA target sequence
aagttattacttaacatttcatt

SEQ ID NO: 217201 - DNA, 23 bp, Artificial sequence
  SiRNA target sequence
agttattacttaacatttcatta

SEQ ID NO: 217202 - DNA, 23 bp, Artificial sequence
  SiRNA target sequence
gttattacttaacatttcattaa

SEQ ID NO: 217203 - DNA, 23 bp, Artificial sequence
  SiRNA target sequence
ttattacttaacatttcattaac

SEQ ID NO: 217204 - DNA, 23 bp, Artificial sequence
  SiRNA target sequence
tattacttaacatttcattaact

SEQ ID NO: 217205 - DNA, 23 bp, Artificial sequence
  SiRNA target sequence
attacttaacatttcattaactg

SEQ ID NO: 217206 - DNA, 23 bp, Artificial sequence
  SiRNA target sequence
ttacttaacatttcattaactgt

SEQ ID NO: 217207 - DNA, 23 bp, Artificial sequence
  SiRNA target sequence
tacttaacatttcattaactgtt

SEQ ID NO: 217208 - DNA, 23 bp, Artificial sequence
  SiRNA target sequence
acttaacatttcattaactgtta

SEQ ID NO: 217209 - DNA, 23 bp, Artificial sequence
  SiRNA target sequence
cttaacatttcattaactgttat

SEQ ID NO: 217210 - DNA, 23 bp, Artificial sequence
  SiRNA target sequence
ttaacatttcattaactgttatg

SEQ ID NO: 217211 - DNA, 23 bp, Artificial sequence
  SiRNA target sequence
taacatttcattaactgttatgt

SEQ ID NO: 217212 - DNA, 23 bp, Artificial sequence
  SiRNA target sequence
aacatttcattaactgttatgtt

SEQ ID NO: 217213 - DNA, 23 bp, Artificial sequence
  SiRNA target sequence
acatttcattaactgttatgttc

SEQ ID NO: 217214 - DNA, 23 bp, Artificial sequence
  SiRNA target sequence
catttcattaactgttatgttct

SEQ ID NO: 217215 - DNA, 23 bp, Artificial sequence
  SiRNA target sequence
atttcattaactgttatgttcta

SEQ ID NO: 217216 - DNA, 23 bp, Artificial sequence
  SiRNA target sequence
tttcattaactgttatgttctat

SEQ ID NO: 217217 - DNA, 23 bp, Artificial sequence
  SiRNA target sequence
ttcattaactgttatgttctatg

SEQ ID NO: 217218 - DNA, 23 bp, Artificial sequence
  SiRNA target sequence
tcattaactgttatgttctatgg

SEQ ID NO: 217219 - DNA, 23 bp, Artificial sequence
  SiRNA target sequence
cattaactgttatgttctatggt

SEQ ID NO: 217220 - DNA, 23 bp, Artificial sequence
  SiRNA target sequence
attaactgttatgttctatggta

SEQ ID NO: 217221 - DNA, 23 bp, Artificial sequence
  SiRNA target sequence
ttaactgttatgttctatggtat

SEQ ID NO: 217222 - DNA, 23 bp, Artificial sequence
  SiRNA target sequence
taactgttatgttctatggtata

SEQ ID NO: 217223 - DNA, 23 bp, Artificial sequence
  SiRNA target sequence
aactgttatgttctatggtatat

SEQ ID NO: 217224 - DNA, 23 bp, Artificial sequence
  SiRNA target sequence
actgttatgttctatggtatatc

SEQ ID NO: 217225 - DNA, 23 bp, Artificial sequence
  SiRNA target sequence
ctgttatgttctatggtatatca

SEQ ID NO: 217226 - DNA, 23 bp, Artificial sequence
  SiRNA target sequence
tgttatgttctatggtatatcaa

SEQ ID NO: 217227 - DNA, 23 bp, Artificial sequence
  SiRNA target sequence
gttatgttctatggtatatcaac

SEQ ID NO: 217228 - DNA, 23 bp, Artificial sequence
  SiRNA target sequence
ttatgttctatggtatatcaact

SEQ ID NO: 217229 - DNA, 23 bp, Artificial sequence
  SiRNA target sequence
tatgttctatggtatatcaacta

SEQ ID NO: 217230 - DNA, 23 bp, Artificial sequence
  SiRNA target sequence
atgttctatggtatatcaactaa

SEQ ID NO: 217231 - DNA, 23 bp, Artificial sequence
  SiRNA target sequence
tgttctatggtatatcaactaat

SEQ ID NO: 217232 - DNA, 23 bp, Artificial sequence
  SiRNA target sequence
gttctatggtatatcaactaatt

SEQ ID NO: 217233 - DNA, 23 bp, Artificial sequence
  SiRNA target sequence
ttctatggtatatcaactaattt

SEQ ID NO: 217234 - DNA, 23 bp, Artificial sequence
  SiRNA target sequence
tctatggtatatcaactaattta

SEQ ID NO: 217235 - DNA, 23 bp, Artificial sequence
  SiRNA target sequence
ctatggtatatcaactaatttaa

SEQ ID NO: 217236 - DNA, 23 bp, Artificial sequence
  SiRNA target sequence
tatggtatatcaactaatttaat

SEQ ID NO: 217237 - DNA, 23 bp, Artificial sequence
  SiRNA target sequence
atggtatatcaactaatttaata

SEQ ID NO: 217238 - DNA, 23 bp, Artificial sequence
  SiRNA target sequence
tggtatatcaactaatttaatag

SEQ ID NO: 217239 - DNA, 23 bp, Artificial sequence
  SiRNA target sequence
ggtatatcaactaatttaataga

SEQ ID NO: 217240 - DNA, 23 bp, Artificial sequence
  SiRNA target sequence
gtatatcaactaatttaatagaa

SEQ ID NO: 217241 - DNA, 23 bp, Artificial sequence
  SiRNA target sequence
tatatcaactaatttaatagaat

SEQ ID NO: 217242 - DNA, 23 bp, Artificial sequence
  SiRNA target sequence
atatcaactaatttaatagaatc

SEQ ID NO: 217243 - DNA, 23 bp, Artificial sequence
  SiRNA target sequence
tatcaactaatttaatagaatca

SEQ ID NO: 217244 - DNA, 23 bp, Artificial sequence
  SiRNA target sequence
atcaactaatttaatagaatcaa

SEQ ID NO: 217245 - DNA, 23 bp, Artificial sequence
  SiRNA target sequence
tcaactaatttaatagaatcaac

SEQ ID NO: 217246 - DNA, 23 bp, Artificial sequence
  SiRNA target sequence
caactaatttaatagaatcaaca

SEQ ID NO: 217247 - DNA, 23 bp, Artificial sequence
  SiRNA target sequence
aactaatttaatagaatcaacat

SEQ ID NO: 217248 - DNA, 23 bp, Artificial sequence
  SiRNA target sequence
actaatttaatagaatcaacatt

SEQ ID NO: 217249 - DNA, 23 bp, Artificial sequence
  SiRNA target sequence
ctaatttaatagaatcaacattt

SEQ ID NO: 217250 - DNA, 23 bp, Artificial sequence
  SiRNA target sequence
taatttaatagaatcaacattta

SEQ ID NO: 217251 - DNA, 23 bp, Artificial sequence
  SiRNA target sequence
aatttaatagaatcaacatttaa

SEQ ID NO: 217252 - DNA, 23 bp, Artificial sequence
  SiRNA target sequence
atttaatagaatcaacatttaaa

SEQ ID NO: 217253 - DNA, 23 bp, Artificial sequence
  SiRNA target sequence
tttaatagaatcaacatttaaaa

SEQ ID NO: 217254 - DNA, 23 bp, Artificial sequence
  SiRNA target sequence
ttaatagaatcaacatttaaaag

SEQ ID NO: 217255 - DNA, 23 bp, Artificial sequence
  SiRNA target sequence
taatagaatcaacatttaaaagt

SEQ ID NO: 217256 - DNA, 23 bp, Artificial sequence
  SiRNA target sequence
aatagaatcaacatttaaaagtg

SEQ ID NO: 217257 - DNA, 23 bp, Artificial sequence
  SiRNA target sequence
atagaatcaacatttaaaagtgg

SEQ ID NO: 217258 - DNA, 23 bp, Artificial sequence
  SiRNA target sequence
tagaatcaacatttaaaagtgga

SEQ ID NO: 217259 - DNA, 23 bp, Artificial sequence
  SiRNA target sequence
agaatcaacatttaaaagtggac

SEQ ID NO: 217260 - DNA, 23 bp, Artificial sequence
  SiRNA target sequence
gaatcaacatttaaaagtggact

SEQ ID NO: 217261 - DNA, 23 bp, Artificial sequence
  SiRNA target sequence
aatcaacatttaaaagtggactt

SEQ ID NO: 217262 - DNA, 23 bp, Artificial sequence
  SiRNA target sequence
atcaacatttaaaagtggacttg

SEQ ID NO: 217263 - DNA, 23 bp, Artificial sequence
  SiRNA target sequence
tcaacatttaaaagtggacttgt

SEQ ID NO: 217264 - DNA, 23 bp, Artificial sequence
  SiRNA target sequence
caacatttaaaagtggacttgtg

SEQ ID NO: 217265 - DNA, 23 bp, Artificial sequence
  SiRNA target sequence
aacatttaaaagtggacttgtga

SEQ ID NO: 217266 - DNA, 23 bp, Artificial sequence
  SiRNA target sequence
acatttaaaagtggacttgtgaa

SEQ ID NO: 217267 - DNA, 23 bp, Artificial sequence
  SiRNA target sequence
catttaaaagtggacttgtgaaa

SEQ ID NO: 217268 - DNA, 23 bp, Artificial sequence
  SiRNA target sequence
atttaaaagtggacttgtgaaag

SEQ ID NO: 217269 - DNA, 23 bp, Artificial sequence
  SiRNA target sequence
tttaaaagtggacttgtgaaagg

SEQ ID NO: 217270 - DNA, 23 bp, Artificial sequence
  SiRNA target sequence
ttaaaagtggacttgtgaaaggt

SEQ ID NO: 217271 - DNA, 23 bp, Artificial sequence
  SiRNA target sequence
taaaagtggacttgtgaaaggtg

SEQ ID NO: 217272 - DNA, 23 bp, Artificial sequence
  SiRNA target sequence
aaaagtggacttgtgaaaggtgc

SEQ ID NO: 217273 - DNA, 23 bp, Artificial sequence
  SiRNA target sequence
aaagtggacttgtgaaaggtgca

SEQ ID NO: 217274 - DNA, 23 bp, Artificial sequence
  SiRNA target sequence
aagtggacttgtgaaaggtgcag

SEQ ID NO: 217275 - DNA, 23 bp, Artificial sequence
  SiRNA target sequence
agtggacttgtgaaaggtgcaga

SEQ ID NO: 217276 - DNA, 23 bp, Artificial sequence
  SiRNA target sequence
gtggacttgtgaaaggtgcagaa

SEQ ID NO: 217277 - DNA, 23 bp, Artificial sequence
  SiRNA target sequence
tggacttgtgaaaggtgcagaag

SEQ ID NO: 217278 - DNA, 23 bp, Artificial sequence
  SiRNA target sequence
ggacttgtgaaaggtgcagaaga

SEQ ID NO: 217279 - DNA, 23 bp, Artificial sequence
  SiRNA target sequence
gacttgtgaaaggtgcagaagaa

SEQ ID NO: 217280 - DNA, 23 bp, Artificial sequence
  SiRNA target sequence
acttgtgaaaggtgcagaagaat

SEQ ID NO: 217281 - DNA, 23 bp, Artificial sequence
  SiRNA target sequence
cttgtgaaaggtgcagaagaatt

SEQ ID NO: 217282 - DNA, 23 bp, Artificial sequence
  SiRNA target sequence
ttgtgaaaggtgcagaagaatta

SEQ ID NO: 217283 - DNA, 23 bp, Artificial sequence
  SiRNA target sequence
tgtgaaaggtgcagaagaattaa

SEQ ID NO: 217284 - DNA, 23 bp, Artificial sequence
  SiRNA target sequence
gtgaaaggtgcagaagaattaaa

SEQ ID NO: 217285 - DNA, 23 bp, Artificial sequence
  SiRNA target sequence
tgaaaggtgcagaagaattaaac

SEQ ID NO: 217286 - DNA, 23 bp, Artificial sequence
  SiRNA target sequence
gaaaggtgcagaagaattaaacg

SEQ ID NO: 217287 - DNA, 23 bp, Artificial sequence
  SiRNA target sequence
aaaggtgcagaagaattaaacga

SEQ ID NO: 217288 - DNA, 23 bp, Artificial sequence
  SiRNA target sequence
aaggtgcagaagaattaaacgag

SEQ ID NO: 217289 - DNA, 23 bp, Artificial sequence
  SiRNA target sequence
aggtgcagaagaattaaacgaga

SEQ ID NO: 217290 - DNA, 23 bp, Artificial sequence
  SiRNA target sequence
ggtgcagaagaattaaacgagaa

SEQ ID NO: 217291 - DNA, 23 bp, Artificial sequence
  SiRNA target sequence
gtgcagaagaattaaacgagaat

SEQ ID NO: 217292 - DNA, 23 bp, Artificial sequence
  SiRNA target sequence
tgcagaagaattaaacgagaata

SEQ ID NO: 217293 - DNA, 23 bp, Artificial sequence
  SiRNA target sequence
gcagaagaattaaacgagaatac

SEQ ID NO: 217294 - DNA, 23 bp, Artificial sequence
  SiRNA target sequence
cagaagaattaaacgagaatact

SEQ ID NO: 217295 - DNA, 23 bp, Artificial sequence
  SiRNA target sequence
agaagaattaaacgagaatacta

SEQ ID NO: 217296 - DNA, 23 bp, Artificial sequence
  SiRNA target sequence
gaagaattaaacgagaatactaa

SEQ ID NO: 217297 - DNA, 23 bp, Artificial sequence
  SiRNA target sequence
aagaattaaacgagaatactaaa

SEQ ID NO: 217298 - DNA, 23 bp, Artificial sequence
  SiRNA target sequence
agaattaaacgagaatactaaaa

SEQ ID NO: 217299 - DNA, 23 bp, Artificial sequence
  SiRNA target sequence
gaattaaacgagaatactaaaag

SEQ ID NO: 217300 - DNA, 23 bp, Artificial sequence
  SiRNA target sequence
aattaaacgagaatactaaaagt

SEQ ID NO: 217301 - DNA, 23 bp, Artificial sequence
  SiRNA target sequence
attaaacgagaatactaaaagtt

SEQ ID NO: 217302 - DNA, 23 bp, Artificial sequence
  SiRNA target sequence
ttaaacgagaatactaaaagtta

SEQ ID NO: 217303 - DNA, 23 bp, Artificial sequence
  SiRNA target sequence
taaacgagaatactaaaagttat

SEQ ID NO: 217304 - DNA, 23 bp, Artificial sequence
  SiRNA target sequence
aaacgagaatactaaaagttatt

SEQ ID NO: 217305 - DNA, 23 bp, Artificial sequence
  SiRNA target sequence
aacgagaatactaaaagttattc

SEQ ID NO: 217306 - DNA, 23 bp, Artificial sequence
  SiRNA target sequence
acgagaatactaaaagttattct

SEQ ID NO: 217307 - DNA, 23 bp, Artificial sequence
  SiRNA target sequence
cgagaatactaaaagttattcta

SEQ ID NO: 217308 - DNA, 23 bp, Artificial sequence
  SiRNA target sequence
gagaatactaaaagttattctat

SEQ ID NO: 217309 - DNA, 23 bp, Artificial sequence
  SiRNA target sequence
agaatactaaaagttattctatg

SEQ ID NO: 217310 - DNA, 23 bp, Artificial sequence
  SiRNA target sequence
gaatactaaaagttattctatgg

SEQ ID NO: 217311 - DNA, 23 bp, Artificial sequence
  SiRNA target sequence
aatactaaaagttattctatggg

SEQ ID NO: 217312 - DNA, 23 bp, Artificial sequence
  SiRNA target sequence
atactaaaagttattctatggga

SEQ ID NO: 217313 - DNA, 23 bp, Artificial sequence
  SiRNA target sequence
tactaaaagttattctatgggat

SEQ ID NO: 217314 - DNA, 23 bp, Artificial sequence
  SiRNA target sequence
actaaaagttattctatgggata

SEQ ID NO: 217315 - DNA, 23 bp, Artificial sequence
  SiRNA target sequence
ctaaaagttattctatgggatat

SEQ ID NO: 217316 - DNA, 23 bp, Artificial sequence
  SiRNA target sequence
taaaagttattctatgggatata

SEQ ID NO: 217317 - DNA, 23 bp, Artificial sequence
  SiRNA target sequence
aaaagttattctatgggatataa

SEQ ID NO: 217318 - DNA, 23 bp, Artificial sequence
  SiRNA target sequence
aaagttattctatgggatataat

SEQ ID NO: 217319 - DNA, 23 bp, Artificial sequence
  SiRNA target sequence
aagttattctatgggatataatt

SEQ ID NO: 217320 - DNA, 23 bp, Artificial sequence
  SiRNA target sequence
agttattctatgggatataattc

SEQ ID NO: 217321 - DNA, 23 bp, Artificial sequence
  SiRNA target sequence
gttattctatgggatataattca

SEQ ID NO: 217322 - DNA, 23 bp, Artificial sequence
  SiRNA target sequence
ttattctatgggatataattcat

SEQ ID NO: 217323 - DNA, 23 bp, Artificial sequence
  SiRNA target sequence
tattctatgggatataattcatt

SEQ ID NO: 217324 - DNA, 23 bp, Artificial sequence
  SiRNA target sequence
attctatgggatataattcattt

SEQ ID NO: 217325 - DNA, 23 bp, Artificial sequence
  SiRNA target sequence
ttctatgggatataattcatttg

SEQ ID NO: 217326 - DNA, 23 bp, Artificial sequence
  SiRNA target sequence
tctatgggatataattcatttga

SEQ ID NO: 217327 - DNA, 23 bp, Artificial sequence
  SiRNA target sequence
ctatgggatataattcatttgaa

SEQ ID NO: 217328 - DNA, 23 bp, Artificial sequence
  SiRNA target sequence
tatgggatataattcatttgaac

SEQ ID NO: 217329 - DNA, 23 bp, Artificial sequence
  SiRNA target sequence
atgggatataattcatttgaaca

SEQ ID NO: 217330 - DNA, 23 bp, Artificial sequence
  SiRNA target sequence
tgggatataattcatttgaacaa

SEQ ID NO: 217331 - DNA, 23 bp, Artificial sequence
  SiRNA target sequence
gggatataattcatttgaacaaa

SEQ ID NO: 217332 - DNA, 23 bp, Artificial sequence
  SiRNA target sequence
ggatataattcatttgaacaaaa

SEQ ID NO: 217333 - DNA, 23 bp, Artificial sequence
  SiRNA target sequence
gatataattcatttgaacaaaag

SEQ ID NO: 217334 - DNA, 23 bp, Artificial sequence
  SiRNA target sequence
atataattcatttgaacaaaaga

SEQ ID NO: 217335 - DNA, 23 bp, Artificial sequence
  SiRNA target sequence
tataattcatttgaacaaaagat

SEQ ID NO: 217336 - DNA, 23 bp, Artificial sequence
  SiRNA target sequence
ataattcatttgaacaaaagata

SEQ ID NO: 217337 - DNA, 23 bp, Artificial sequence
  SiRNA target sequence
taattcatttgaacaaaagatag

SEQ ID NO: 217338 - DNA, 23 bp, Artificial sequence
  SiRNA target sequence
aattcatttgaacaaaagatagc

SEQ ID NO: 217339 - DNA, 23 bp, Artificial sequence
  SiRNA target sequence
attcatttgaacaaaagatagca

SEQ ID NO: 217340 - DNA, 23 bp, Artificial sequence
  SiRNA target sequence
ttcatttgaacaaaagatagcat

SEQ ID NO: 217341 - DNA, 23 bp, Artificial sequence
  SiRNA target sequence
tcatttgaacaaaagatagcatc

SEQ ID NO: 217342 - DNA, 23 bp, Artificial sequence
  SiRNA target sequence
catttgaacaaaagatagcatca

SEQ ID NO: 217343 - DNA, 23 bp, Artificial sequence
  SiRNA target sequence
atttgaacaaaagatagcatcaa

SEQ ID NO: 217344 - DNA, 23 bp, Artificial sequence
  SiRNA target sequence
tttgaacaaaagatagcatcaat

SEQ ID NO: 217345 - DNA, 23 bp, Artificial sequence
  SiRNA target sequence
ttgaacaaaagatagcatcaata

SEQ ID NO: 217346 - DNA, 23 bp, Artificial sequence
  SiRNA target sequence
tgaacaaaagatagcatcaataa

SEQ ID NO: 217347 - DNA, 23 bp, Artificial sequence
  SiRNA target sequence
gaacaaaagatagcatcaataac

SEQ ID NO: 217348 - DNA, 23 bp, Artificial sequence
  SiRNA target sequence
aacaaaagatagcatcaataact

SEQ ID NO: 217349 - DNA, 23 bp, Artificial sequence
  SiRNA target sequence
acaaaagatagcatcaataactg

SEQ ID NO: 217350 - DNA, 23 bp, Artificial sequence
  SiRNA target sequence
caaaagatagcatcaataactgt

SEQ ID NO: 217351 - DNA, 23 bp, Artificial sequence
  SiRNA target sequence
aaaagatagcatcaataactgtt

SEQ ID NO: 217352 - DNA, 23 bp, Artificial sequence
  SiRNA target sequence
aaagatagcatcaataactgtta

SEQ ID NO: 217353 - DNA, 23 bp, Artificial sequence
  SiRNA target sequence
aagatagcatcaataactgttat

SEQ ID NO: 217354 - DNA, 23 bp, Artificial sequence
  SiRNA target sequence
agatagcatcaataactgttatt

SEQ ID NO: 217355 - DNA, 23 bp, Artificial sequence
  SiRNA target sequence
gatagcatcaataactgttatta

SEQ ID NO: 217356 - DNA, 23 bp, Artificial sequence
  SiRNA target sequence
atagcatcaataactgttattat

SEQ ID NO: 217357 - DNA, 23 bp, Artificial sequence
  SiRNA target sequence
tagcatcaataactgttattatc

SEQ ID NO: 217358 - DNA, 23 bp, Artificial sequence
  SiRNA target sequence
agcatcaataactgttattatcc

SEQ ID NO: 217359 - DNA, 23 bp, Artificial sequence
  SiRNA target sequence
gcatcaataactgttattatcct

SEQ ID NO: 217360 - DNA, 23 bp, Artificial sequence
  SiRNA target sequence
catcaataactgttattatcctg

SEQ ID NO: 217361 - DNA, 23 bp, Artificial sequence
  SiRNA target sequence
atcaataactgttattatcctgc

SEQ ID NO: 217362 - DNA, 23 bp, Artificial sequence
  SiRNA target sequence
tcaataactgttattatcctgct

SEQ ID NO: 217363 - DNA, 23 bp, Artificial sequence
  SiRNA target sequence
caataactgttattatcctgctt

SEQ ID NO: 217364 - DNA, 23 bp, Artificial sequence
  SiRNA target sequence
aataactgttattatcctgcttt

SEQ ID NO: 217365 - DNA, 23 bp, Artificial sequence
  SiRNA target sequence
ataactgttattatcctgctttt

SEQ ID NO: 217366 - DNA, 23 bp, Artificial sequence
  SiRNA target sequence
taactgttattatcctgctttta

SEQ ID NO: 217367 - DNA, 23 bp, Artificial sequence
  SiRNA target sequence
aactgttattatcctgcttttat

SEQ ID NO: 217368 - DNA, 23 bp, Artificial sequence
  SiRNA target sequence
actgttattatcctgcttttatc

SEQ ID NO: 217369 - DNA, 23 bp, Artificial sequence
  SiRNA target sequence
ctgttattatcctgcttttatca

SEQ ID NO: 217370 - DNA, 23 bp, Artificial sequence
  SiRNA target sequence
tgttattatcctgcttttatcac

SEQ ID NO: 217371 - DNA, 23 bp, Artificial sequence
  SiRNA target sequence
gttattatcctgcttttatcacc

SEQ ID NO: 217372 - DNA, 23 bp, Artificial sequence
  SiRNA target sequence
ttattatcctgcttttatcacca

SEQ ID NO: 217373 - DNA, 23 bp, Artificial sequence
  SiRNA target sequence
tattatcctgcttttatcaccat

SEQ ID NO: 217374 - DNA, 23 bp, Artificial sequence
  SiRNA target sequence
attatcctgcttttatcaccatt

SEQ ID NO: 217375 - DNA, 23 bp, Artificial sequence
  SiRNA target sequence
ttatcctgcttttatcaccattt

SEQ ID NO: 217376 - DNA, 23 bp, Artificial sequence
  SiRNA target sequence
tatcctgcttttatcaccatttc

SEQ ID NO: 217377 - DNA, 23 bp, Artificial sequence
  SiRNA target sequence
atcctgcttttatcaccatttcc

SEQ ID NO: 217378 - DNA, 23 bp, Artificial sequence
  SiRNA target sequence
tcctgcttttatcaccatttcca

SEQ ID NO: 217379 - DNA, 23 bp, Artificial sequence
  SiRNA target sequence
cctgcttttatcaccatttccaa

SEQ ID NO: 217380 - DNA, 23 bp, Artificial sequence
  SiRNA target sequence
ctgcttttatcaccatttccaaa

SEQ ID NO: 217381 - DNA, 23 bp, Artificial sequence
  SiRNA target sequence
tgcttttatcaccatttccaaaa

SEQ ID NO: 217382 - DNA, 23 bp, Artificial sequence
  SiRNA target sequence
gcttttatcaccatttccaaaat

SEQ ID NO: 217383 - DNA, 23 bp, Artificial sequence
  SiRNA target sequence
cttttatcaccatttccaaaatt

SEQ ID NO: 217384 - DNA, 23 bp, Artificial sequence
  SiRNA target sequence
ttttatcaccatttccaaaatta

SEQ ID NO: 217385 - DNA, 23 bp, Artificial sequence
  SiRNA target sequence
tttatcaccatttccaaaattaa

SEQ ID NO: 217386 - DNA, 23 bp, Artificial sequence
  SiRNA target sequence
ttatcaccatttccaaaattaat

SEQ ID NO: 217387 - DNA, 23 bp, Artificial sequence
  SiRNA target sequence
tatcaccatttccaaaattaata

SEQ ID NO: 217388 - DNA, 23 bp, Artificial sequence
  SiRNA target sequence
atcaccatttccaaaattaatac

SEQ ID NO: 217389 - DNA, 23 bp, Artificial sequence
  SiRNA target sequence
tcaccatttccaaaattaataca

SEQ ID NO: 217390 - DNA, 23 bp, Artificial sequence
  SiRNA target sequence
caccatttccaaaattaatacaa

SEQ ID NO: 217391 - DNA, 23 bp, Artificial sequence
  SiRNA target sequence
accatttccaaaattaatacaaa

SEQ ID NO: 217392 - DNA, 23 bp, Artificial sequence
  SiRNA target sequence
ccatttccaaaattaatacaaac

SEQ ID NO: 217393 - DNA, 23 bp, Artificial sequence
  SiRNA target sequence
catttccaaaattaatacaaacc

SEQ ID NO: 217394 - DNA, 23 bp, Artificial sequence
  SiRNA target sequence
atttccaaaattaatacaaacca

SEQ ID NO: 217395 - DNA, 23 bp, Artificial sequence
  SiRNA target sequence
tttccaaaattaatacaaaccaa

SEQ ID NO: 217396 - DNA, 23 bp, Artificial sequence
  SiRNA target sequence
ttccaaaattaatacaaaccaaa

SEQ ID NO: 217397 - DNA, 23 bp, Artificial sequence
  SiRNA target sequence
tccaaaattaatacaaaccaaag

SEQ ID NO: 217398 - DNA, 23 bp, Artificial sequence
  SiRNA target sequence
ccaaaattaatacaaaccaaagg

SEQ ID NO: 217399 - DNA, 23 bp, Artificial sequence
  SiRNA target sequence
caaaattaatacaaaccaaagga

SEQ ID NO: 217400 - DNA, 23 bp, Artificial sequence
  SiRNA target sequence
aaaattaatacaaaccaaaggat

SEQ ID NO: 217401 - DNA, 23 bp, Artificial sequence
  SiRNA target sequence
aaattaatacaaaccaaaggatg

SEQ ID NO: 217402 - DNA, 23 bp, Artificial sequence
  SiRNA target sequence
aattaatacaaaccaaaggatgg

SEQ ID NO: 217403 - DNA, 23 bp, Artificial sequence
  SiRNA target sequence
attaatacaaaccaaaggatgga

SEQ ID NO: 217404 - DNA, 23 bp, Artificial sequence
  SiRNA target sequence
ttaatacaaaccaaaggatggat

SEQ ID NO: 217405 - DNA, 23 bp, Artificial sequence
  SiRNA target sequence
taatacaaaccaaaggatggata

SEQ ID NO: 217406 - DNA, 23 bp, Artificial sequence
  SiRNA target sequence
aatacaaaccaaaggatggatat

SEQ ID NO: 217407 - DNA, 23 bp, Artificial sequence
  SiRNA target sequence
atacaaaccaaaggatggatatt

SEQ ID NO: 217408 - DNA, 23 bp, Artificial sequence
  SiRNA target sequence
tacaaaccaaaggatggatattt

SEQ ID NO: 217409 - DNA, 23 bp, Artificial sequence
  SiRNA target sequence
acaaaccaaaggatggatatttg

SEQ ID NO: 217410 - DNA, 23 bp, Artificial sequence
  SiRNA target sequence
caaaccaaaggatggatatttgt

SEQ ID NO: 217411 - DNA, 23 bp, Artificial sequence
  SiRNA target sequence
aaaccaaaggatggatatttgtt

SEQ ID NO: 217412 - DNA, 23 bp, Artificial sequence
  SiRNA target sequence
aaccaaaggatggatatttgttg

SEQ ID NO: 217413 - DNA, 23 bp, Artificial sequence
  SiRNA target sequence
accaaaggatggatatttgttgc

SEQ ID NO: 217414 - DNA, 23 bp, Artificial sequence
  SiRNA target sequence
ccaaaggatggatatttgttgcc

SEQ ID NO: 217415 - DNA, 23 bp, Artificial sequence
  SiRNA target sequence
caaaggatggatatttgttgcca

SEQ ID NO: 217416 - DNA, 23 bp, Artificial sequence
  SiRNA target sequence
aaaggatggatatttgttgccat

SEQ ID NO: 217417 - DNA, 23 bp, Artificial sequence
  SiRNA target sequence
aaggatggatatttgttgccata

SEQ ID NO: 217418 - DNA, 23 bp, Artificial sequence
  SiRNA target sequence
aggatggatatttgttgccatag

SEQ ID NO: 217419 - DNA, 23 bp, Artificial sequence
  SiRNA target sequence
ggatggatatttgttgccatagc

SEQ ID NO: 217420 - DNA, 23 bp, Artificial sequence
  SiRNA target sequence
gatggatatttgttgccatagcg

SEQ ID NO: 217421 - DNA, 23 bp, Artificial sequence
  SiRNA target sequence
atggatatttgttgccatagcgt

SEQ ID NO: 217422 - DNA, 23 bp, Artificial sequence
  SiRNA target sequence
tggatatttgttgccatagcgtg

SEQ ID NO: 217423 - DNA, 23 bp, Artificial sequence
  SiRNA target sequence
ggatatttgttgccatagcgtgc

SEQ ID NO: 217424 - DNA, 23 bp, Artificial sequence
  SiRNA target sequence
gatatttgttgccatagcgtgcc

SEQ ID NO: 217425 - DNA, 23 bp, Artificial sequence
  SiRNA target sequence
atatttgttgccatagcgtgccc

SEQ ID NO: 217426 - DNA, 23 bp, Artificial sequence
  SiRNA target sequence
tatttgttgccatagcgtgccca

SEQ ID NO: 217427 - DNA, 23 bp, Artificial sequence
  SiRNA target sequence
atttgttgccatagcgtgcccac

SEQ ID NO: 217428 - DNA, 23 bp, Artificial sequence
  SiRNA target sequence
tttgttgccatagcgtgcccact

SEQ ID NO: 217429 - DNA, 23 bp, Artificial sequence
  SiRNA target sequence
ttgttgccatagcgtgcccactt

SEQ ID NO: 217430 - DNA, 23 bp, Artificial sequence
  SiRNA target sequence
tgttgccatagcgtgcccactta

SEQ ID NO: 217431 - DNA, 23 bp, Artificial sequence
  SiRNA target sequence
gttgccatagcgtgcccacttat

SEQ ID NO: 217432 - DNA, 23 bp, Artificial sequence
  SiRNA target sequence
ttgccatagcgtgcccacttatt

SEQ ID NO: 217433 - DNA, 23 bp, Artificial sequence
  SiRNA target sequence
tgccatagcgtgcccacttatta

SEQ ID NO: 217434 - DNA, 23 bp, Artificial sequence
  SiRNA target sequence
gccatagcgtgcccacttattac

SEQ ID NO: 217435 - DNA, 23 bp, Artificial sequence
  SiRNA target sequence
ccatagcgtgcccacttattacc

SEQ ID NO: 217436 - DNA, 23 bp, Artificial sequence
  SiRNA target sequence
catagcgtgcccacttattaccc

SEQ ID NO: 217437 - DNA, 23 bp, Artificial sequence
  SiRNA target sequence
atagcgtgcccacttattaccct

SEQ ID NO: 217438 - DNA, 23 bp, Artificial sequence
  SiRNA target sequence
tagcgtgcccacttattaccctt

SEQ ID NO: 217439 - DNA, 23 bp, Artificial sequence
  SiRNA target sequence
agcgtgcccacttattacccttt

SEQ ID NO: 217440 - DNA, 23 bp, Artificial sequence
  SiRNA target sequence
gcgtgcccacttattaccctttt

SEQ ID NO: 217441 - DNA, 23 bp, Artificial sequence
  SiRNA target sequence
cgtgcccacttattacccttttt

SEQ ID NO: 217442 - DNA, 23 bp, Artificial sequence
  SiRNA target sequence
gtgcccacttattaccctttttg

SEQ ID NO: 217443 - DNA, 23 bp, Artificial sequence
  SiRNA target sequence
tgcccacttattaccctttttgc

SEQ ID NO: 217444 - DNA, 23 bp, Artificial sequence
  SiRNA target sequence
gcccacttattaccctttttgct

SEQ ID NO: 217445 - DNA, 23 bp, Artificial sequence
  SiRNA target sequence
cccacttattaccctttttgctg

SEQ ID NO: 217446 - DNA, 23 bp, Artificial sequence
  SiRNA target sequence
ccacttattaccctttttgctgt

SEQ ID NO: 217447 - DNA, 23 bp, Artificial sequence
  SiRNA target sequence
cacttattaccctttttgctgta

SEQ ID NO: 217448 - DNA, 23 bp, Artificial sequence
  SiRNA target sequence
acttattaccctttttgctgtag

SEQ ID NO: 217449 - DNA, 23 bp, Artificial sequence
  SiRNA target sequence
cttattaccctttttgctgtagt

SEQ ID NO: 217450 - DNA, 23 bp, Artificial sequence
  SiRNA target sequence
ttattaccctttttgctgtagtt

SEQ ID NO: 217451 - DNA, 23 bp, Artificial sequence
  SiRNA target sequence
tattaccctttttgctgtagttt

SEQ ID NO: 217452 - DNA, 23 bp, Artificial sequence
  SiRNA target sequence
attaccctttttgctgtagtttc

SEQ ID NO: 217453 - DNA, 23 bp, Artificial sequence
  SiRNA target sequence
ttaccctttttgctgtagtttct

SEQ ID NO: 217454 - DNA, 23 bp, Artificial sequence
  SiRNA target sequence
taccctttttgctgtagtttctg

SEQ ID NO: 217455 - DNA, 23 bp, Artificial sequence
  SiRNA target sequence
accctttttgctgtagtttctgt

SEQ ID NO: 217456 - DNA, 23 bp, Artificial sequence
  SiRNA target sequence
ccctttttgctgtagtttctgtg

SEQ ID NO: 217457 - DNA, 23 bp, Artificial sequence
  SiRNA target sequence
cctttttgctgtagtttctgtgt

SEQ ID NO: 217458 - DNA, 23 bp, Artificial sequence
  SiRNA target sequence
ctttttgctgtagtttctgtgtg

SEQ ID NO: 217459 - DNA, 23 bp, Artificial sequence
  SiRNA target sequence
tttttgctgtagtttctgtgtgt

SEQ ID NO: 217460 - DNA, 23 bp, Artificial sequence
  SiRNA target sequence
ttttgctgtagtttctgtgtgtg

SEQ ID NO: 217461 - DNA, 23 bp, Artificial sequence
  SiRNA target sequence
tttgctgtagtttctgtgtgtgg

SEQ ID NO: 217462 - DNA, 23 bp, Artificial sequence
  SiRNA target sequence
ttgctgtagtttctgtgtgtggt

SEQ ID NO: 217463 - DNA, 23 bp, Artificial sequence
  SiRNA target sequence
tgctgtagtttctgtgtgtggtc

SEQ ID NO: 217464 - DNA, 23 bp, Artificial sequence
  SiRNA target sequence
gctgtagtttctgtgtgtggtct

SEQ ID NO: 217465 - DNA, 23 bp, Artificial sequence
  SiRNA target sequence
ctgtagtttctgtgtgtggtctt

SEQ ID NO: 217466 - DNA, 23 bp, Artificial sequence
  SiRNA target sequence
tgtagtttctgtgtgtggtcttg

SEQ ID NO: 217467 - DNA, 23 bp, Artificial sequence
  SiRNA target sequence
gtagtttctgtgtgtggtcttgc

SEQ ID NO: 217468 - DNA, 23 bp, Artificial sequence
  SiRNA target sequence
tagtttctgtgtgtggtcttgct

SEQ ID NO: 217469 - DNA, 23 bp, Artificial sequence
  SiRNA target sequence
agtttctgtgtgtggtcttgctt

SEQ ID NO: 217470 - DNA, 23 bp, Artificial sequence
  SiRNA target sequence
gtttctgtgtgtggtcttgcttt

SEQ ID NO: 217471 - DNA, 23 bp, Artificial sequence
  SiRNA target sequence
tttctgtgtgtggtcttgctttt

SEQ ID NO: 217472 - DNA, 23 bp, Artificial sequence
  SiRNA target sequence
ttctgtgtgtggtcttgcttttt

SEQ ID NO: 217473 - DNA, 23 bp, Artificial sequence
  SiRNA target sequence
tctgtgtgtggtcttgcttttta

SEQ ID NO: 217474 - DNA, 23 bp, Artificial sequence
  SiRNA target sequence
ctgtgtgtggtcttgctttttac

SEQ ID NO: 217475 - DNA, 23 bp, Artificial sequence
  SiRNA target sequence
tgtgtgtggtcttgctttttaca

SEQ ID NO: 217476 - DNA, 23 bp, Artificial sequence
  SiRNA target sequence
gtgtgtggtcttgctttttacaa

SEQ ID NO: 217477 - DNA, 23 bp, Artificial sequence
  SiRNA target sequence
tgtgtggtcttgctttttacaat

SEQ ID NO: 217478 - DNA, 23 bp, Artificial sequence
  SiRNA target sequence
gtgtggtcttgctttttacaatt

SEQ ID NO: 217479 - DNA, 23 bp, Artificial sequence
  SiRNA target sequence
tgtggtcttgctttttacaatta

SEQ ID NO: 217480 - DNA, 23 bp, Artificial sequence
  SiRNA target sequence
gtggtcttgctttttacaattat

SEQ ID NO: 217481 - DNA, 23 bp, Artificial sequence
  SiRNA target sequence
tggtcttgctttttacaattatc

SEQ ID NO: 217482 - DNA, 23 bp, Artificial sequence
  SiRNA target sequence
ggtcttgctttttacaattatcc

SEQ ID NO: 217483 - DNA, 23 bp, Artificial sequence
  SiRNA target sequence
gtcttgctttttacaattatccg

SEQ ID NO: 217484 - DNA, 23 bp, Artificial sequence
  SiRNA target sequence
tcttgctttttacaattatccgg

SEQ ID NO: 217485 - DNA, 23 bp, Artificial sequence
  SiRNA target sequence
cttgctttttacaattatccggc

SEQ ID NO: 217486 - DNA, 23 bp, Artificial sequence
  SiRNA target sequence
ttgctttttacaattatccggca

SEQ ID NO: 217487 - DNA, 23 bp, Artificial sequence
  SiRNA target sequence
tgctttttacaattatccggcaa

SEQ ID NO: 217488 - DNA, 23 bp, Artificial sequence
  SiRNA target sequence
gctttttacaattatccggcaac

SEQ ID NO: 217489 - DNA, 23 bp, Artificial sequence
  SiRNA target sequence
ctttttacaattatccggcaaca

SEQ ID NO: 217490 - DNA, 23 bp, Artificial sequence
  SiRNA target sequence
tttttacaattatccggcaacaa

SEQ ID NO: 217491 - DNA, 23 bp, Artificial sequence
  SiRNA target sequence
ttttacaattatccggcaacaaa

SEQ ID NO: 217492 - DNA, 23 bp, Artificial sequence
  SiRNA target sequence
tttacaattatccggcaacaaat

SEQ ID NO: 217493 - DNA, 23 bp, Artificial sequence
  SiRNA target sequence
ttacaattatccggcaacaaata

SEQ ID NO: 217494 - DNA, 23 bp, Artificial sequence
  SiRNA target sequence
tacaattatccggcaacaaataa

SEQ ID NO: 217495 - DNA, 23 bp, Artificial sequence
  SiRNA target sequence
acaattatccggcaacaaataat

SEQ ID NO: 217496 - DNA, 23 bp, Artificial sequence
  SiRNA target sequence
caattatccggcaacaaataatg

SEQ ID NO: 217497 - DNA, 23 bp, Artificial sequence
  SiRNA target sequence
aattatccggcaacaaataatga

SEQ ID NO: 217498 - DNA, 23 bp, Artificial sequence
  SiRNA target sequence
attatccggcaacaaataatgac

SEQ ID NO: 217499 - DNA, 23 bp, Artificial sequence
  SiRNA target sequence
ttatccggcaacaaataatgaca

SEQ ID NO: 217500 - DNA, 23 bp, Artificial sequence
  SiRNA target sequence
tatccggcaacaaataatgacac

SEQ ID NO: 217501 - DNA, 23 bp, Artificial sequence
  SiRNA target sequence
atccggcaacaaataatgacaca

SEQ ID NO: 217502 - DNA, 23 bp, Artificial sequence
  SiRNA target sequence
tccggcaacaaataatgacacaa

SEQ ID NO: 217503 - DNA, 23 bp, Artificial sequence
  SiRNA target sequence
ccggcaacaaataatgacacaaa

SEQ ID NO: 217504 - DNA, 23 bp, Artificial sequence
  SiRNA target sequence
cggcaacaaataatgacacaaat

SEQ ID NO: 217505 - DNA, 23 bp, Artificial sequence
  SiRNA target sequence
ggcaacaaataatgacacaaatt

SEQ ID NO: 217506 - DNA, 23 bp, Artificial sequence
  SiRNA target sequence
gcaacaaataatgacacaaattt

SEQ ID NO: 217507 - DNA, 23 bp, Artificial sequence
  SiRNA target sequence
caacaaataatgacacaaatttt

SEQ ID NO: 217508 - DNA, 23 bp, Artificial sequence
  SiRNA target sequence
aacaaataatgacacaaattttt

SEQ ID NO: 217509 - DNA, 23 bp, Artificial sequence
  SiRNA target sequence
acaaataatgacacaaatttttt

SEQ ID NO: 217510 - DNA, 23 bp, Artificial sequence
  SiRNA target sequence
caaataatgacacaaattttttt

SEQ ID NO: 217511 - DNA, 23 bp, Artificial sequence
  SiRNA target sequence
aaataatgacacaaatttttttc

SEQ ID NO: 217512 - DNA, 23 bp, Artificial sequence
  SiRNA target sequence
aataatgacacaaatttttttct

SEQ ID NO: 217513 - DNA, 23 bp, Artificial sequence
  SiRNA target sequence
ataatgacacaaatttttttcta

SEQ ID NO: 217514 - DNA, 23 bp, Artificial sequence
  SiRNA target sequence
taatgacacaaatttttttctaa

SEQ ID NO: 217515 - DNA, 23 bp, Artificial sequence
  SiRNA target sequence
aatgacacaaatttttttctaaa

SEQ ID NO: 217516 - DNA, 23 bp, Artificial sequence
  SiRNA target sequence
atgacacaaatttttttctaaat

SEQ ID NO: 217517 - DNA, 23 bp, Artificial sequence
  SiRNA target sequence
tgacacaaatttttttctaaatt

SEQ ID NO: 217518 - DNA, 23 bp, Artificial sequence
  SiRNA target sequence
gacacaaatttttttctaaattc

SEQ ID NO: 217519 - DNA, 23 bp, Artificial sequence
  SiRNA target sequence
acacaaatttttttctaaattca

SEQ ID NO: 217520 - DNA, 23 bp, Artificial sequence
  SiRNA target sequence
cacaaatttttttctaaattcat

SEQ ID NO: 217521 - DNA, 23 bp, Artificial sequence
  SiRNA target sequence
acaaatttttttctaaattcatt

SEQ ID NO: 217522 - DNA, 23 bp, Artificial sequence
  SiRNA target sequence
caaatttttttctaaattcatta

SEQ ID NO: 217523 - DNA, 23 bp, Artificial sequence
  SiRNA target sequence
aaatttttttctaaattcattat

SEQ ID NO: 217524 - DNA, 23 bp, Artificial sequence
  SiRNA target sequence
aatttttttctaaattcattatg

SEQ ID NO: 217525 - DNA, 23 bp, Artificial sequence
  SiRNA target sequence
atttttttctaaattcattatgt

SEQ ID NO: 217526 - DNA, 23 bp, Artificial sequence
  SiRNA target sequence
tttttttctaaattcattatgtg

SEQ ID NO: 217527 - DNA, 23 bp, Artificial sequence
  SiRNA target sequence
ttttttctaaattcattatgtgc

SEQ ID NO: 217528 - DNA, 23 bp, Artificial sequence
  SiRNA target sequence
tttttctaaattcattatgtgct

SEQ ID NO: 217529 - DNA, 23 bp, Artificial sequence
  SiRNA target sequence
ttttctaaattcattatgtgcta

SEQ ID NO: 217530 - DNA, 23 bp, Artificial sequence
  SiRNA target sequence
tttctaaattcattatgtgctac

SEQ ID NO: 217531 - DNA, 23 bp, Artificial sequence
  SiRNA target sequence
ttctaaattcattatgtgctacg

SEQ ID NO: 217532 - DNA, 23 bp, Artificial sequence
  SiRNA target sequence
tctaaattcattatgtgctacgc

SEQ ID NO: 217533 - DNA, 23 bp, Artificial sequence
  SiRNA target sequence
ctaaattcattatgtgctacgcc

SEQ ID NO: 217534 - DNA, 23 bp, Artificial sequence
  SiRNA target sequence
taaattcattatgtgctacgccc

SEQ ID NO: 217535 - DNA, 23 bp, Artificial sequence
  SiRNA target sequence
aaattcattatgtgctacgcccg

SEQ ID NO: 217536 - DNA, 23 bp, Artificial sequence
  SiRNA target sequence
aattcattatgtgctacgcccgg

SEQ ID NO: 217537 - DNA, 23 bp, Artificial sequence
  SiRNA target sequence
attcattatgtgctacgcccggt

SEQ ID NO: 217538 - DNA, 23 bp, Artificial sequence
  SiRNA target sequence
ttcattatgtgctacgcccggta

SEQ ID NO: 217539 - DNA, 23 bp, Artificial sequence
  SiRNA target sequence
tcattatgtgctacgcccggtaa

SEQ ID NO: 217540 - DNA, 23 bp, Artificial sequence
  SiRNA target sequence
cattatgtgctacgcccggtaaa

SEQ ID NO: 217541 - DNA, 23 bp, Artificial sequence
  SiRNA target sequence
attatgtgctacgcccggtaaat

SEQ ID NO: 217542 - DNA, 23 bp, Artificial sequence
  SiRNA target sequence
ttatgtgctacgcccggtaaatc

SEQ ID NO: 217543 - DNA, 23 bp, Artificial sequence
  SiRNA target sequence
tatgtgctacgcccggtaaatcg

SEQ ID NO: 217544 - DNA, 23 bp, Artificial sequence
  SiRNA target sequence
atgtgctacgcccggtaaatcgt

SEQ ID NO: 217545 - DNA, 23 bp, Artificial sequence
  SiRNA target sequence
tgtgctacgcccggtaaatcgtt

SEQ ID NO: 217546 - DNA, 23 bp, Artificial sequence
  SiRNA target sequence
gtgctacgcccggtaaatcgttt

SEQ ID NO: 217547 - DNA, 23 bp, Artificial sequence
  SiRNA target sequence
tgctacgcccggtaaatcgttta

SEQ ID NO: 217548 - DNA, 23 bp, Artificial sequence
  SiRNA target sequence
gctacgcccggtaaatcgtttat

SEQ ID NO: 217549 - DNA, 23 bp, Artificial sequence
  SiRNA target sequence
ctacgcccggtaaatcgtttata

SEQ ID NO: 217550 - DNA, 23 bp, Artificial sequence
  SiRNA target sequence
tacgcccggtaaatcgtttataa

SEQ ID NO: 217551 - DNA, 23 bp, Artificial sequence
  SiRNA target sequence
acgcccggtaaatcgtttataaa

SEQ ID NO: 217552 - DNA, 23 bp, Artificial sequence
  SiRNA target sequence
cgcccggtaaatcgtttataaaa

SEQ ID NO: 217553 - DNA, 23 bp, Artificial sequence
  SiRNA target sequence
gcccggtaaatcgtttataaaat

SEQ ID NO: 217554 - DNA, 23 bp, Artificial sequence
  SiRNA target sequence
cccggtaaatcgtttataaaatt

SEQ ID NO: 217555 - DNA, 23 bp, Artificial sequence
  SiRNA target sequence
ccggtaaatcgtttataaaatta

SEQ ID NO: 217556 - DNA, 23 bp, Artificial sequence
  SiRNA target sequence
cggtaaatcgtttataaaattag

SEQ ID NO: 217557 - DNA, 23 bp, Artificial sequence
  SiRNA target sequence
ggtaaatcgtttataaaattaga

SEQ ID NO: 217558 - DNA, 23 bp, Artificial sequence
  SiRNA target sequence
gtaaatcgtttataaaattagaa

SEQ ID NO: 217559 - DNA, 23 bp, Artificial sequence
  SiRNA target sequence
taaatcgtttataaaattagaaa

SEQ ID NO: 217560 - DNA, 23 bp, Artificial sequence
  SiRNA target sequence
aaatcgtttataaaattagaaaa

SEQ ID NO: 217561 - DNA, 23 bp, Artificial sequence
  SiRNA target sequence
aatcgtttataaaattagaaaat

SEQ ID NO: 217562 - DNA, 23 bp, Artificial sequence
  SiRNA target sequence
atcgtttataaaattagaaaatg

SEQ ID NO: 217563 - DNA, 23 bp, Artificial sequence
  SiRNA target sequence
tcgtttataaaattagaaaatgt

SEQ ID NO: 217564 - DNA, 23 bp, Artificial sequence
  SiRNA target sequence
cgtttataaaattagaaaatgtt

SEQ ID NO: 217565 - DNA, 23 bp, Artificial sequence
  SiRNA target sequence
gtttataaaattagaaaatgttt

SEQ ID NO: 217566 - DNA, 23 bp, Artificial sequence
  SiRNA target sequence
tttataaaattagaaaatgtttt

SEQ ID NO: 217567 - DNA, 23 bp, Artificial sequence
  SiRNA target sequence
ttataaaattagaaaatgtttta

SEQ ID NO: 217568 - DNA, 23 bp, Artificial sequence
  SiRNA target sequence
tataaaattagaaaatgttttag

SEQ ID NO: 217569 - DNA, 23 bp, Artificial sequence
  SiRNA target sequence
ataaaattagaaaatgttttagg

SEQ ID NO: 217570 - DNA, 23 bp, Artificial sequence
  SiRNA target sequence
taaaattagaaaatgttttagga

SEQ ID NO: 217571 - DNA, 23 bp, Artificial sequence
  SiRNA target sequence
aaaattagaaaatgttttaggat

SEQ ID NO: 217572 - DNA, 23 bp, Artificial sequence
  SiRNA target sequence
aaattagaaaatgttttaggatg

SEQ ID NO: 217573 - DNA, 23 bp, Artificial sequence
  SiRNA target sequence
aattagaaaatgttttaggatgt

SEQ ID NO: 217574 - DNA, 23 bp, Artificial sequence
  SiRNA target sequence
attagaaaatgttttaggatgtg

SEQ ID NO: 217575 - DNA, 23 bp, Artificial sequence
  SiRNA target sequence
ttagaaaatgttttaggatgtgt

SEQ ID NO: 217576 - DNA, 23 bp, Artificial sequence
  SiRNA target sequence
tagaaaatgttttaggatgtgta

SEQ ID NO: 217577 - DNA, 23 bp, Artificial sequence
  SiRNA target sequence
agaaaatgttttaggatgtgtag

SEQ ID NO: 217578 - DNA, 23 bp, Artificial sequence
  SiRNA target sequence
gaaaatgttttaggatgtgtagc

SEQ ID NO: 217579 - DNA, 23 bp, Artificial sequence
  SiRNA target sequence
aaaatgttttaggatgtgtagct

SEQ ID NO: 217580 - DNA, 23 bp, Artificial sequence
  SiRNA target sequence
aaatgttttaggatgtgtagctg

SEQ ID NO: 217581 - DNA, 23 bp, Artificial sequence
  SiRNA target sequence
aatgttttaggatgtgtagctgt

SEQ ID NO: 217582 - DNA, 23 bp, Artificial sequence
  SiRNA target sequence
atgttttaggatgtgtagctgta

SEQ ID NO: 217583 - DNA, 23 bp, Artificial sequence
  SiRNA target sequence
tgttttaggatgtgtagctgtag

SEQ ID NO: 217584 - DNA, 23 bp, Artificial sequence
  SiRNA target sequence
gttttaggatgtgtagctgtagc

SEQ ID NO: 217585 - DNA, 23 bp, Artificial sequence
  SiRNA target sequence
ttttaggatgtgtagctgtagct

SEQ ID NO: 217586 - DNA, 23 bp, Artificial sequence
  SiRNA target sequence
tttaggatgtgtagctgtagctc

SEQ ID NO: 217587 - DNA, 23 bp, Artificial sequence
  SiRNA target sequence
ttaggatgtgtagctgtagctct

SEQ ID NO: 217588 - DNA, 23 bp, Artificial sequence
  SiRNA target sequence
taggatgtgtagctgtagctctt

SEQ ID NO: 217589 - DNA, 23 bp, Artificial sequence
  SiRNA target sequence
aggatgtgtagctgtagctctta

SEQ ID NO: 217590 - DNA, 23 bp, Artificial sequence
  SiRNA target sequence
ggatgtgtagctgtagctcttat

SEQ ID NO: 217591 - DNA, 23 bp, Artificial sequence
  SiRNA target sequence
gatgtgtagctgtagctcttatg

SEQ ID NO: 217592 - DNA, 23 bp, Artificial sequence
  SiRNA target sequence
atgtgtagctgtagctcttatga

SEQ ID NO: 217593 - DNA, 23 bp, Artificial sequence
  SiRNA target sequence
tgtgtagctgtagctcttatgaa

SEQ ID NO: 217594 - DNA, 23 bp, Artificial sequence
  SiRNA target sequence
gtgtagctgtagctcttatgaaa

SEQ ID NO: 217595 - DNA, 23 bp, Artificial sequence
  SiRNA target sequence
tgtagctgtagctcttatgaaag

SEQ ID NO: 217596 - DNA, 23 bp, Artificial sequence
  SiRNA target sequence
gtagctgtagctcttatgaaagt

SEQ ID NO: 217597 - DNA, 23 bp, Artificial sequence
  SiRNA target sequence
tagctgtagctcttatgaaagta

SEQ ID NO: 217598 - DNA, 23 bp, Artificial sequence
  SiRNA target sequence
agctgtagctcttatgaaagtag

SEQ ID NO: 217599 - DNA, 23 bp, Artificial sequence
  SiRNA target sequence
gctgtagctcttatgaaagtagc

SEQ ID NO: 217600 - DNA, 23 bp, Artificial sequence
  SiRNA target sequence
ctgtagctcttatgaaagtagca

SEQ ID NO: 217601 - DNA, 23 bp, Artificial sequence
  SiRNA target sequence
tgtagctcttatgaaagtagcaa

SEQ ID NO: 217602 - DNA, 23 bp, Artificial sequence
  SiRNA target sequence
gtagctcttatgaaagtagcaaa

SEQ ID NO: 217603 - DNA, 23 bp, Artificial sequence
  SiRNA target sequence
tagctcttatgaaagtagcaaaa

SEQ ID NO: 217604 - DNA, 23 bp, Artificial sequence
  SiRNA target sequence
agctcttatgaaagtagcaaaat

SEQ ID NO: 217605 - DNA, 23 bp, Artificial sequence
  SiRNA target sequence
gctcttatgaaagtagcaaaata

SEQ ID NO: 217606 - DNA, 23 bp, Artificial sequence
  SiRNA target sequence
ctcttatgaaagtagcaaaatat

SEQ ID NO: 217607 - DNA, 23 bp, Artificial sequence
  SiRNA target sequence
tcttatgaaagtagcaaaatatg

SEQ ID NO: 217608 - DNA, 23 bp, Artificial sequence
  SiRNA target sequence
cttatgaaagtagcaaaatatgg

SEQ ID NO: 217609 - DNA, 23 bp, Artificial sequence
  SiRNA target sequence
ttatgaaagtagcaaaatatggc

SEQ ID NO: 217610 - DNA, 23 bp, Artificial sequence
  SiRNA target sequence
tatgaaagtagcaaaatatggct

SEQ ID NO: 217611 - DNA, 23 bp, Artificial sequence
  SiRNA target sequence
atgaaagtagcaaaatatggctc

SEQ ID NO: 217612 - DNA, 23 bp, Artificial sequence
  SiRNA target sequence
tgaaagtagcaaaatatggctct

SEQ ID NO: 217613 - DNA, 23 bp, Artificial sequence
  SiRNA target sequence
gaaagtagcaaaatatggctctt

SEQ ID NO: 217614 - DNA, 23 bp, Artificial sequence
  SiRNA target sequence
aaagtagcaaaatatggctcttt

SEQ ID NO: 217615 - DNA, 23 bp, Artificial sequence
  SiRNA target sequence
aagtagcaaaatatggctctttt

SEQ ID NO: 217616 - DNA, 23 bp, Artificial sequence
  SiRNA target sequence
agtagcaaaatatggctcttttg

SEQ ID NO: 217617 - DNA, 23 bp, Artificial sequence
  SiRNA target sequence
gtagcaaaatatggctcttttga

SEQ ID NO: 217618 - DNA, 23 bp, Artificial sequence
  SiRNA target sequence
tagcaaaatatggctcttttgat

SEQ ID NO: 217619 - DNA, 23 bp, Artificial sequence
  SiRNA target sequence
agcaaaatatggctcttttgata

SEQ ID NO: 217620 - DNA, 23 bp, Artificial sequence
  SiRNA target sequence
gcaaaatatggctcttttgatat

SEQ ID NO: 217621 - DNA, 23 bp, Artificial sequence
  SiRNA target sequence
caaaatatggctcttttgatatt

SEQ ID NO: 217622 - DNA, 23 bp, Artificial sequence
  SiRNA target sequence
aaaatatggctcttttgatattt

SEQ ID NO: 217623 - DNA, 23 bp, Artificial sequence
  SiRNA target sequence
aaatatggctcttttgatatttc

SEQ ID NO: 217624 - DNA, 23 bp, Artificial sequence
  SiRNA target sequence
aatatggctcttttgatatttcc

SEQ ID NO: 217625 - DNA, 23 bp, Artificial sequence
  SiRNA target sequence
atatggctcttttgatatttcca

SEQ ID NO: 217626 - DNA, 23 bp, Artificial sequence
  SiRNA target sequence
tatggctcttttgatatttccaa

SEQ ID NO: 217627 - DNA, 23 bp, Artificial sequence
  SiRNA target sequence
atggctcttttgatatttccaaa

SEQ ID NO: 217628 - DNA, 23 bp, Artificial sequence
  SiRNA target sequence
tggctcttttgatatttccaaag

SEQ ID NO: 217629 - DNA, 23 bp, Artificial sequence
  SiRNA target sequence
ggctcttttgatatttccaaaga

SEQ ID NO: 217630 - DNA, 23 bp, Artificial sequence
  SiRNA target sequence
gctcttttgatatttccaaagaa

SEQ ID NO: 217631 - DNA, 23 bp, Artificial sequence
  SiRNA target sequence
ctcttttgatatttccaaagaag

SEQ ID NO: 217632 - DNA, 23 bp, Artificial sequence
  SiRNA target sequence
tcttttgatatttccaaagaagc

SEQ ID NO: 217633 - DNA, 23 bp, Artificial sequence
  SiRNA target sequence
cttttgatatttccaaagaagcc

SEQ ID NO: 217634 - DNA, 23 bp, Artificial sequence
  SiRNA target sequence
ttttgatatttccaaagaagcca

SEQ ID NO: 217635 - DNA, 23 bp, Artificial sequence
  SiRNA target sequence
tttgatatttccaaagaagccat

SEQ ID NO: 217636 - DNA, 23 bp, Artificial sequence
  SiRNA target sequence
ttgatatttccaaagaagccatt

SEQ ID NO: 217637 - DNA, 23 bp, Artificial sequence
  SiRNA target sequence
tgatatttccaaagaagccattt

SEQ ID NO: 217638 - DNA, 23 bp, Artificial sequence
  SiRNA target sequence
gatatttccaaagaagccatttc

SEQ ID NO: 217639 - DNA, 23 bp, Artificial sequence
  SiRNA target sequence
atatttccaaagaagccatttca

SEQ ID NO: 217640 - DNA, 23 bp, Artificial sequence
  SiRNA target sequence
tatttccaaagaagccatttcaa

SEQ ID NO: 217641 - DNA, 23 bp, Artificial sequence
  SiRNA target sequence
atttccaaagaagccatttcaat

SEQ ID NO: 217642 - DNA, 23 bp, Artificial sequence
  SiRNA target sequence
tttccaaagaagccatttcaatg

SEQ ID NO: 217643 - DNA, 23 bp, Artificial sequence
  SiRNA target sequence
ttccaaagaagccatttcaatgc

SEQ ID NO: 217644 - DNA, 23 bp, Artificial sequence
  SiRNA target sequence
tccaaagaagccatttcaatgca

SEQ ID NO: 217645 - DNA, 23 bp, Artificial sequence
  SiRNA target sequence
ccaaagaagccatttcaatgcag

SEQ ID NO: 217646 - DNA, 23 bp, Artificial sequence
  SiRNA target sequence
caaagaagccatttcaatgcaga

SEQ ID NO: 217647 - DNA, 23 bp, Artificial sequence
  SiRNA target sequence
aaagaagccatttcaatgcagat

SEQ ID NO: 217648 - DNA, 23 bp, Artificial sequence
  SiRNA target sequence
aagaagccatttcaatgcagatt

SEQ ID NO: 217649 - DNA, 23 bp, Artificial sequence
  SiRNA target sequence
agaagccatttcaatgcagattg

SEQ ID NO: 217650 - DNA, 23 bp, Artificial sequence
  SiRNA target sequence
gaagccatttcaatgcagattga

SEQ ID NO: 217651 - DNA, 23 bp, Artificial sequence
  SiRNA target sequence
aagccatttcaatgcagattgat

SEQ ID NO: 217652 - DNA, 23 bp, Artificial sequence
  SiRNA target sequence
agccatttcaatgcagattgatt

SEQ ID NO: 217653 - DNA, 23 bp, Artificial sequence
  SiRNA target sequence
gccatttcaatgcagattgattc

SEQ ID NO: 217654 - DNA, 23 bp, Artificial sequence
  SiRNA target sequence
ccatttcaatgcagattgattcg

SEQ ID NO: 217655 - DNA, 23 bp, Artificial sequence
  SiRNA target sequence
catttcaatgcagattgattcgt

SEQ ID NO: 217656 - DNA, 23 bp, Artificial sequence
  SiRNA target sequence
atttcaatgcagattgattcgtc

SEQ ID NO: 217657 - DNA, 23 bp, Artificial sequence
  SiRNA target sequence
tttcaatgcagattgattcgtca

SEQ ID NO: 217658 - DNA, 23 bp, Artificial sequence
  SiRNA target sequence
ttcaatgcagattgattcgtcat

SEQ ID NO: 217659 - DNA, 23 bp, Artificial sequence
  SiRNA target sequence
tcaatgcagattgattcgtcatt

SEQ ID NO: 217660 - DNA, 23 bp, Artificial sequence
  SiRNA target sequence
caatgcagattgattcgtcattg

SEQ ID NO: 217661 - DNA, 23 bp, Artificial sequence
  SiRNA target sequence
aatgcagattgattcgtcattgc

SEQ ID NO: 217662 - DNA, 23 bp, Artificial sequence
  SiRNA target sequence
atgcagattgattcgtcattgcg

SEQ ID NO: 217663 - DNA, 23 bp, Artificial sequence
  SiRNA target sequence
tgcagattgattcgtcattgcgt

SEQ ID NO: 217664 - DNA, 23 bp, Artificial sequence
  SiRNA target sequence
gcagattgattcgtcattgcgtg

SEQ ID NO: 217665 - DNA, 23 bp, Artificial sequence
  SiRNA target sequence
cagattgattcgtcattgcgtgc

SEQ ID NO: 217666 - DNA, 23 bp, Artificial sequence
  SiRNA target sequence
agattgattcgtcattgcgtgca

SEQ ID NO: 217667 - DNA, 23 bp, Artificial sequence
  SiRNA target sequence
gattgattcgtcattgcgtgcac

SEQ ID NO: 217668 - DNA, 23 bp, Artificial sequence
  SiRNA target sequence
attgattcgtcattgcgtgcacg

SEQ ID NO: 217669 - DNA, 23 bp, Artificial sequence
  SiRNA target sequence
ttgattcgtcattgcgtgcacgt

SEQ ID NO: 217670 - DNA, 23 bp, Artificial sequence
  SiRNA target sequence
tgattcgtcattgcgtgcacgtt

SEQ ID NO: 217671 - DNA, 23 bp, Artificial sequence
  SiRNA target sequence
gattcgtcattgcgtgcacgtta

SEQ ID NO: 217672 - DNA, 23 bp, Artificial sequence
  SiRNA target sequence
attcgtcattgcgtgcacgttat

SEQ ID NO: 217673 - DNA, 23 bp, Artificial sequence
  SiRNA target sequence
ttcgtcattgcgtgcacgttata

SEQ ID NO: 217674 - DNA, 23 bp, Artificial sequence
  SiRNA target sequence
tcgtcattgcgtgcacgttataa

SEQ ID NO: 217675 - DNA, 23 bp, Artificial sequence
  SiRNA target sequence
cgtcattgcgtgcacgttataaa

SEQ ID NO: 217676 - DNA, 23 bp, Artificial sequence
  SiRNA target sequence
gtcattgcgtgcacgttataaag

SEQ ID NO: 217677 - DNA, 23 bp, Artificial sequence
  SiRNA target sequence
tcattgcgtgcacgttataaagg

SEQ ID NO: 217678 - DNA, 23 bp, Artificial sequence
  SiRNA target sequence
cattgcgtgcacgttataaagga

SEQ ID NO: 217679 - DNA, 23 bp, Artificial sequence
  SiRNA target sequence
attgcgtgcacgttataaaggaa

SEQ ID NO: 217680 - DNA, 23 bp, Artificial sequence
  SiRNA target sequence
ttgcgtgcacgttataaaggaat

SEQ ID NO: 217681 - DNA, 23 bp, Artificial sequence
  SiRNA target sequence
tgcgtgcacgttataaaggaatt

SEQ ID NO: 217682 - DNA, 23 bp, Artificial sequence
  SiRNA target sequence
gcgtgcacgttataaaggaattt

SEQ ID NO: 217683 - DNA, 23 bp, Artificial sequence
  SiRNA target sequence
cgtgcacgttataaaggaatttt

SEQ ID NO: 217684 - DNA, 23 bp, Artificial sequence
  SiRNA target sequence
gtgcacgttataaaggaattttt

SEQ ID NO: 217685 - DNA, 23 bp, Artificial sequence
  SiRNA target sequence
tgcacgttataaaggaatttttg

SEQ ID NO: 217686 - DNA, 23 bp, Artificial sequence
  SiRNA target sequence
gcacgttataaaggaatttttga

SEQ ID NO: 217687 - DNA, 23 bp, Artificial sequence
  SiRNA target sequence
cacgttataaaggaatttttgac

SEQ ID NO: 217688 - DNA, 23 bp, Artificial sequence
  SiRNA target sequence
acgttataaaggaatttttgacg

SEQ ID NO: 217689 - DNA, 23 bp, Artificial sequence
  SiRNA target sequence
cgttataaaggaatttttgacgg

SEQ ID NO: 217690 - DNA, 23 bp, Artificial sequence
  SiRNA target sequence
gttataaaggaatttttgacggt

SEQ ID NO: 217691 - DNA, 23 bp, Artificial sequence
  SiRNA target sequence
ttataaaggaatttttgacggtg

SEQ ID NO: 217692 - DNA, 23 bp, Artificial sequence
  SiRNA target sequence
tataaaggaatttttgacggtgt

SEQ ID NO: 217693 - DNA, 23 bp, Artificial sequence
  SiRNA target sequence
ataaaggaatttttgacggtgtt

SEQ ID NO: 217694 - DNA, 23 bp, Artificial sequence
  SiRNA target sequence
taaaggaatttttgacggtgttt

SEQ ID NO: 217695 - DNA, 23 bp, Artificial sequence
  SiRNA target sequence
aaaggaatttttgacggtgtttt

SEQ ID NO: 217696 - DNA, 23 bp, Artificial sequence
  SiRNA target sequence
aaggaatttttgacggtgttttt

SEQ ID NO: 217697 - DNA, 23 bp, Artificial sequence
  SiRNA target sequence
aggaatttttgacggtgtttttg

SEQ ID NO: 217698 - DNA, 23 bp, Artificial sequence
  SiRNA target sequence
ggaatttttgacggtgtttttgg

SEQ ID NO: 217699 - DNA, 23 bp, Artificial sequence
  SiRNA target sequence
gaatttttgacggtgtttttggt

SEQ ID NO: 217700 - DNA, 23 bp, Artificial sequence
  SiRNA target sequence
aatttttgacggtgtttttggta

SEQ ID NO: 217701 - DNA, 23 bp, Artificial sequence
  SiRNA target sequence
atttttgacggtgtttttggtaa

SEQ ID NO: 217702 - DNA, 23 bp, Artificial sequence
  SiRNA target sequence
tttttgacggtgtttttggtaag

SEQ ID NO: 217703 - DNA, 23 bp, Artificial sequence
  SiRNA target sequence
ttttgacggtgtttttggtaagt

SEQ ID NO: 217704 - DNA, 23 bp, Artificial sequence
  SiRNA target sequence
tttgacggtgtttttggtaagtt

SEQ ID NO: 217705 - DNA, 23 bp, Artificial sequence
  SiRNA target sequence
ttgacggtgtttttggtaagtta

SEQ ID NO: 217706 - DNA, 23 bp, Artificial sequence
  SiRNA target sequence
tgacggtgtttttggtaagttag

SEQ ID NO: 217707 - DNA, 23 bp, Artificial sequence
  SiRNA target sequence
gacggtgtttttggtaagttagg

SEQ ID NO: 217708 - DNA, 23 bp, Artificial sequence
  SiRNA target sequence
acggtgtttttggtaagttagga

SEQ ID NO: 217709 - DNA, 23 bp, Artificial sequence
  SiRNA target sequence
cggtgtttttggtaagttaggaa

SEQ ID NO: 217710 - DNA, 23 bp, Artificial sequence
  SiRNA target sequence
ggtgtttttggtaagttaggaaa

SEQ ID NO: 217711 - DNA, 23 bp, Artificial sequence
  SiRNA target sequence
gtgtttttggtaagttaggaaaa

SEQ ID NO: 217712 - DNA, 23 bp, Artificial sequence
  SiRNA target sequence
tgtttttggtaagttaggaaaat

SEQ ID NO: 217713 - DNA, 23 bp, Artificial sequence
  SiRNA target sequence
gtttttggtaagttaggaaaatc

SEQ ID NO: 217714 - DNA, 23 bp, Artificial sequence
  SiRNA target sequence
tttttggtaagttaggaaaatct

SEQ ID NO: 217715 - DNA, 23 bp, Artificial sequence
  SiRNA target sequence
ttttggtaagttaggaaaatctc

SEQ ID NO: 217716 - DNA, 23 bp, Artificial sequence
  SiRNA target sequence
tttggtaagttaggaaaatctct

SEQ ID NO: 217717 - DNA, 23 bp, Artificial sequence
  SiRNA target sequence
ttggtaagttaggaaaatctctt

SEQ ID NO: 217718 - DNA, 23 bp, Artificial sequence
  SiRNA target sequence
tggtaagttaggaaaatctcttg

SEQ ID NO: 217719 - DNA, 23 bp, Artificial sequence
  SiRNA target sequence
ggtaagttaggaaaatctcttgg

SEQ ID NO: 217720 - DNA, 23 bp, Artificial sequence
  SiRNA target sequence
gtaagttaggaaaatctcttgga

SEQ ID NO: 217721 - DNA, 23 bp, Artificial sequence
  SiRNA target sequence
taagttaggaaaatctcttggat

SEQ ID NO: 217722 - DNA, 23 bp, Artificial sequence
  SiRNA target sequence
aagttaggaaaatctcttggatc

SEQ ID NO: 217723 - DNA, 23 bp, Artificial sequence
  SiRNA target sequence
agttaggaaaatctcttggatcg

SEQ ID NO: 217724 - DNA, 23 bp, Artificial sequence
  SiRNA target sequence
gttaggaaaatctcttggatcgt

SEQ ID NO: 217725 - DNA, 23 bp, Artificial sequence
  SiRNA target sequence
ttaggaaaatctcttggatcgtt

SEQ ID NO: 217726 - DNA, 23 bp, Artificial sequence
  SiRNA target sequence
taggaaaatctcttggatcgtta

SEQ ID NO: 217727 - DNA, 23 bp, Artificial sequence
  SiRNA target sequence
aggaaaatctcttggatcgttat

SEQ ID NO: 217728 - DNA, 23 bp, Artificial sequence
  SiRNA target sequence
ggaaaatctcttggatcgttatt

SEQ ID NO: 217729 - DNA, 23 bp, Artificial sequence
  SiRNA target sequence
gaaaatctcttggatcgttattt

SEQ ID NO: 217730 - DNA, 23 bp, Artificial sequence
  SiRNA target sequence
aaaatctcttggatcgttatttg

SEQ ID NO: 217731 - DNA, 23 bp, Artificial sequence
  SiRNA target sequence
aaatctcttggatcgttatttgt

SEQ ID NO: 217732 - DNA, 23 bp, Artificial sequence
  SiRNA target sequence
aatctcttggatcgttatttgtg

SEQ ID NO: 217733 - DNA, 23 bp, Artificial sequence
  SiRNA target sequence
atctcttggatcgttatttgtgt

SEQ ID NO: 217734 - DNA, 23 bp, Artificial sequence
  SiRNA target sequence
tctcttggatcgttatttgtgtg

SEQ ID NO: 217735 - DNA, 23 bp, Artificial sequence
  SiRNA target sequence
ctcttggatcgttatttgtgtgg

SEQ ID NO: 217736 - DNA, 23 bp, Artificial sequence
  SiRNA target sequence
tcttggatcgttatttgtgtgga

SEQ ID NO: 217737 - DNA, 23 bp, Artificial sequence
  SiRNA target sequence
cttggatcgttatttgtgtggat

SEQ ID NO: 217738 - DNA, 23 bp, Artificial sequence
  SiRNA target sequence
ttggatcgttatttgtgtggatt

SEQ ID NO: 217739 - DNA, 23 bp, Artificial sequence
  SiRNA target sequence
tggatcgttatttgtgtggatta

SEQ ID NO: 217740 - DNA, 23 bp, Artificial sequence
  SiRNA target sequence
ggatcgttatttgtgtggattat

SEQ ID NO: 217741 - DNA, 23 bp, Artificial sequence
  SiRNA target sequence
gatcgttatttgtgtggattatg

SEQ ID NO: 217742 - DNA, 23 bp, Artificial sequence
  SiRNA target sequence
atcgttatttgtgtggattatgg

SEQ ID NO: 217743 - DNA, 23 bp, Artificial sequence
  SiRNA target sequence
tcgttatttgtgtggattatggg

SEQ ID NO: 217744 - DNA, 23 bp, Artificial sequence
  SiRNA target sequence
cgttatttgtgtggattatggga

SEQ ID NO: 217745 - DNA, 23 bp, Artificial sequence
  SiRNA target sequence
gttatttgtgtggattatgggat

SEQ ID NO: 217746 - DNA, 23 bp, Artificial sequence
  SiRNA target sequence
ttatttgtgtggattatgggata

SEQ ID NO: 217747 - DNA, 23 bp, Artificial sequence
  SiRNA target sequence
tatttgtgtggattatgggatat

SEQ ID NO: 217748 - DNA, 23 bp, Artificial sequence
  SiRNA target sequence
atttgtgtggattatgggatatg

SEQ ID NO: 217749 - DNA, 23 bp, Artificial sequence
  SiRNA target sequence
tttgtgtggattatgggatatgc

SEQ ID NO: 217750 - DNA, 23 bp, Artificial sequence
  SiRNA target sequence
ttgtgtggattatgggatatgca

SEQ ID NO: 217751 - DNA, 23 bp, Artificial sequence
  SiRNA target sequence
tgtgtggattatgggatatgcat

SEQ ID NO: 217752 - DNA, 23 bp, Artificial sequence
  SiRNA target sequence
gtgtggattatgggatatgcatt

SEQ ID NO: 217753 - DNA, 23 bp, Artificial sequence
  SiRNA target sequence
tgtggattatgggatatgcattt

SEQ ID NO: 217754 - DNA, 23 bp, Artificial sequence
  SiRNA target sequence
gtggattatgggatatgcatttc

SEQ ID NO: 217755 - DNA, 23 bp, Artificial sequence
  SiRNA target sequence
tggattatgggatatgcatttca

SEQ ID NO: 217756 - DNA, 23 bp, Artificial sequence
  SiRNA target sequence
ggattatgggatatgcatttcaa

SEQ ID NO: 217757 - DNA, 23 bp, Artificial sequence
  SiRNA target sequence
gattatgggatatgcatttcaaa

SEQ ID NO: 217758 - DNA, 23 bp, Artificial sequence
  SiRNA target sequence
attatgggatatgcatttcaaac

SEQ ID NO: 217759 - DNA, 23 bp, Artificial sequence
  SiRNA target sequence
ttatgggatatgcatttcaaaca

SEQ ID NO: 217760 - DNA, 23 bp, Artificial sequence
  SiRNA target sequence
tatgggatatgcatttcaaacaa

SEQ ID NO: 217761 - DNA, 23 bp, Artificial sequence
  SiRNA target sequence
atgggatatgcatttcaaacaag

SEQ ID NO: 217762 - DNA, 23 bp, Artificial sequence
  SiRNA target sequence
tgggatatgcatttcaaacaaga

SEQ ID NO: 217763 - DNA, 23 bp, Artificial sequence
  SiRNA target sequence
gggatatgcatttcaaacaagag

SEQ ID NO: 217764 - DNA, 23 bp, Artificial sequence
  SiRNA target sequence
ggatatgcatttcaaacaagaga

SEQ ID NO: 217765 - DNA, 23 bp, Artificial sequence
  SiRNA target sequence
gatatgcatttcaaacaagagat

SEQ ID NO: 217766 - DNA, 23 bp, Artificial sequence
  SiRNA target sequence
atatgcatttcaaacaagagatt

SEQ ID NO: 217767 - DNA, 23 bp, Artificial sequence
  SiRNA target sequence
tatgcatttcaaacaagagattt

SEQ ID NO: 217768 - DNA, 23 bp, Artificial sequence
  SiRNA target sequence
atgcatttcaaacaagagatttt

SEQ ID NO: 217769 - DNA, 23 bp, Artificial sequence
  SiRNA target sequence
tgcatttcaaacaagagatttta

SEQ ID NO: 217770 - DNA, 23 bp, Artificial sequence
  SiRNA target sequence
gcatttcaaacaagagattttag

SEQ ID NO: 217771 - DNA, 23 bp, Artificial sequence
  SiRNA target sequence
catttcaaacaagagattttaga

SEQ ID NO: 217772 - DNA, 23 bp, Artificial sequence
  SiRNA target sequence
atttcaaacaagagattttagaa

SEQ ID NO: 217773 - DNA, 23 bp, Artificial sequence
  SiRNA target sequence
tttcaaacaagagattttagaaa

SEQ ID NO: 217774 - DNA, 23 bp, Artificial sequence
  SiRNA target sequence
ttcaaacaagagattttagaaaa

SEQ ID NO: 217775 - DNA, 23 bp, Artificial sequence
  SiRNA target sequence
tcaaacaagagattttagaaaat

SEQ ID NO: 217776 - DNA, 23 bp, Artificial sequence
  SiRNA target sequence
caaacaagagattttagaaaatt

SEQ ID NO: 217777 - DNA, 23 bp, Artificial sequence
  SiRNA target sequence
aaacaagagattttagaaaatta

SEQ ID NO: 217778 - DNA, 23 bp, Artificial sequence
  SiRNA target sequence
aacaagagattttagaaaattag

SEQ ID NO: 217779 - DNA, 23 bp, Artificial sequence
  SiRNA target sequence
acaagagattttagaaaattagc

SEQ ID NO: 217780 - DNA, 23 bp, Artificial sequence
  SiRNA target sequence
caagagattttagaaaattagct

SEQ ID NO: 217781 - DNA, 23 bp, Artificial sequence
  SiRNA target sequence
aagagattttagaaaattagctc

SEQ ID NO: 217782 - DNA, 23 bp, Artificial sequence
  SiRNA target sequence
agagattttagaaaattagctcc

SEQ ID NO: 217783 - DNA, 23 bp, Artificial sequence
  SiRNA target sequence
gagattttagaaaattagctccc

SEQ ID NO: 217784 - DNA, 23 bp, Artificial sequence
  SiRNA target sequence
agattttagaaaattagctccct

SEQ ID NO: 217785 - DNA, 23 bp, Artificial sequence
  SiRNA target sequence
gattttagaaaattagctccctt

SEQ ID NO: 217786 - DNA, 23 bp, Artificial sequence
  SiRNA target sequence
attttagaaaattagctccctta

SEQ ID NO: 217787 - DNA, 23 bp, Artificial sequence
  SiRNA target sequence
ttttagaaaattagctcccttat

SEQ ID NO: 217788 - DNA, 23 bp, Artificial sequence
  SiRNA target sequence
tttagaaaattagctcccttatg

SEQ ID NO: 217789 - DNA, 23 bp, Artificial sequence
  SiRNA target sequence
ttagaaaattagctcccttatgt

SEQ ID NO: 217790 - DNA, 23 bp, Artificial sequence
  SiRNA target sequence
tagaaaattagctcccttatgta

SEQ ID NO: 217791 - DNA, 23 bp, Artificial sequence
  SiRNA target sequence
agaaaattagctcccttatgtat

SEQ ID NO: 217792 - DNA, 23 bp, Artificial sequence
  SiRNA target sequence
gaaaattagctcccttatgtatc

SEQ ID NO: 217793 - DNA, 23 bp, Artificial sequence
  SiRNA target sequence
aaaattagctcccttatgtatca

SEQ ID NO: 217794 - DNA, 23 bp, Artificial sequence
  SiRNA target sequence
aaattagctcccttatgtatcag

SEQ ID NO: 217795 - DNA, 23 bp, Artificial sequence
  SiRNA target sequence
aattagctcccttatgtatcagc

SEQ ID NO: 217796 - DNA, 23 bp, Artificial sequence
  SiRNA target sequence
attagctcccttatgtatcagcg

SEQ ID NO: 217797 - DNA, 23 bp, Artificial sequence
  SiRNA target sequence
ttagctcccttatgtatcagcgt

SEQ ID NO: 217798 - DNA, 23 bp, Artificial sequence
  SiRNA target sequence
tagctcccttatgtatcagcgta

SEQ ID NO: 217799 - DNA, 23 bp, Artificial sequence
  SiRNA target sequence
agctcccttatgtatcagcgtaa

SEQ ID NO: 217800 - DNA, 23 bp, Artificial sequence
  SiRNA target sequence
gctcccttatgtatcagcgtaat

SEQ ID NO: 217801 - DNA, 23 bp, Artificial sequence
  SiRNA target sequence
ctcccttatgtatcagcgtaatt

SEQ ID NO: 217802 - DNA, 23 bp, Artificial sequence
  SiRNA target sequence
tcccttatgtatcagcgtaattg

SEQ ID NO: 217803 - DNA, 23 bp, Artificial sequence
  SiRNA target sequence
cccttatgtatcagcgtaattgt

SEQ ID NO: 217804 - DNA, 23 bp, Artificial sequence
  SiRNA target sequence
ccttatgtatcagcgtaattgtc

SEQ ID NO: 217805 - DNA, 23 bp, Artificial sequence
  SiRNA target sequence
cttatgtatcagcgtaattgtct

SEQ ID NO: 217806 - DNA, 23 bp, Artificial sequence
  SiRNA target sequence
ttatgtatcagcgtaattgtctt

SEQ ID NO: 217807 - DNA, 23 bp, Artificial sequence
  SiRNA target sequence
tatgtatcagcgtaattgtcttt

SEQ ID NO: 217808 - DNA, 23 bp, Artificial sequence
  SiRNA target sequence
atgtatcagcgtaattgtctttt

SEQ ID NO: 217809 - DNA, 23 bp, Artificial sequence
  SiRNA target sequence
tgtatcagcgtaattgtcttttt

SEQ ID NO: 217810 - DNA, 23 bp, Artificial sequence
  SiRNA target sequence
gtatcagcgtaattgtctttttt

SEQ ID NO: 217811 - DNA, 23 bp, Artificial sequence
  SiRNA target sequence
tatcagcgtaattgtcttttttg

SEQ ID NO: 217812 - DNA, 23 bp, Artificial sequence
  SiRNA target sequence
atcagcgtaattgtcttttttgt

SEQ ID NO: 217813 - DNA, 23 bp, Artificial sequence
  SiRNA target sequence
tcagcgtaattgtcttttttgtt

SEQ ID NO: 217814 - DNA, 23 bp, Artificial sequence
  SiRNA target sequence
cagcgtaattgtcttttttgtta

SEQ ID NO: 217815 - DNA, 23 bp, Artificial sequence
  SiRNA target sequence
agcgtaattgtcttttttgttat

SEQ ID NO: 217816 - DNA, 23 bp, Artificial sequence
  SiRNA target sequence
gcgtaattgtcttttttgttatt

SEQ ID NO: 217817 - DNA, 23 bp, Artificial sequence
  SiRNA target sequence
cgtaattgtcttttttgttatta

SEQ ID NO: 217818 - DNA, 23 bp, Artificial sequence
  SiRNA target sequence
gtaattgtcttttttgttattat

SEQ ID NO: 217819 - DNA, 23 bp, Artificial sequence
  SiRNA target sequence
taattgtcttttttgttattatt

SEQ ID NO: 217820 - DNA, 23 bp, Artificial sequence
  SiRNA target sequence
aattgtcttttttgttattattt

SEQ ID NO: 217821 - DNA, 23 bp, Artificial sequence
  SiRNA target sequence
attgtcttttttgttattatttg

SEQ ID NO: 217822 - DNA, 23 bp, Artificial sequence
  SiRNA target sequence
ttgtcttttttgttattatttgg

SEQ ID NO: 217823 - DNA, 23 bp, Artificial sequence
  SiRNA target sequence
tgtcttttttgttattatttgga

SEQ ID NO: 217824 - DNA, 23 bp, Artificial sequence
  SiRNA target sequence
gtcttttttgttattatttggat

SEQ ID NO: 217825 - DNA, 23 bp, Artificial sequence
  SiRNA target sequence
tcttttttgttattatttggatt

SEQ ID NO: 217826 - DNA, 23 bp, Artificial sequence
  SiRNA target sequence
cttttttgttattatttggattt

SEQ ID NO: 217827 - DNA, 23 bp, Artificial sequence
  SiRNA target sequence
ttttttgttattatttggattta

SEQ ID NO: 217828 - DNA, 23 bp, Artificial sequence
  SiRNA target sequence
tttttgttattatttggatttat

SEQ ID NO: 217829 - DNA, 23 bp, Artificial sequence
  SiRNA target sequence
ttttgttattatttggatttatt

SEQ ID NO: 217830 - DNA, 23 bp, Artificial sequence
  SiRNA target sequence
tttgttattatttggatttattc

SEQ ID NO: 217831 - DNA, 23 bp, Artificial sequence
  SiRNA target sequence
ttgttattatttggatttattca

SEQ ID NO: 217832 - DNA, 23 bp, Artificial sequence
  SiRNA target sequence
tgttattatttggatttattcag

SEQ ID NO: 217833 - DNA, 23 bp, Artificial sequence
  SiRNA target sequence
gttattatttggatttattcagt

SEQ ID NO: 217834 - DNA, 23 bp, Artificial sequence
  SiRNA target sequence
ttattatttggatttattcagtt

SEQ ID NO: 217835 - DNA, 23 bp, Artificial sequence
  SiRNA target sequence
tattatttggatttattcagtta

SEQ ID NO: 217836 - DNA, 23 bp, Artificial sequence
  SiRNA target sequence
attatttggatttattcagttat

SEQ ID NO: 217837 - DNA, 23 bp, Artificial sequence
  SiRNA target sequence
ttatttggatttattcagttatt

SEQ ID NO: 217838 - DNA, 23 bp, Artificial sequence
  SiRNA target sequence
tatttggatttattcagttattt

SEQ ID NO: 217839 - DNA, 23 bp, Artificial sequence
  SiRNA target sequence
atttggatttattcagttattta

SEQ ID NO: 217840 - DNA, 23 bp, Artificial sequence
  SiRNA target sequence
tttggatttattcagttatttat

SEQ ID NO: 217841 - DNA, 23 bp, Artificial sequence
  SiRNA target sequence
ttggatttattcagttatttatt

SEQ ID NO: 217842 - DNA, 23 bp, Artificial sequence
  SiRNA target sequence
tggatttattcagttatttattt

SEQ ID NO: 217843 - DNA, 23 bp, Artificial sequence
  SiRNA target sequence
ggatttattcagttatttattta

SEQ ID NO: 217844 - DNA, 23 bp, Artificial sequence
  SiRNA target sequence
gatttattcagttatttatttaa

SEQ ID NO: 217845 - DNA, 23 bp, Artificial sequence
  SiRNA target sequence
atttattcagttatttatttaaa

SEQ ID NO: 217846 - DNA, 23 bp, Artificial sequence
  SiRNA target sequence
tttattcagttatttatttaaat

SEQ ID NO: 217847 - DNA, 23 bp, Artificial sequence
  SiRNA target sequence
ttattcagttatttatttaaata

SEQ ID NO: 217848 - DNA, 23 bp, Artificial sequence
  SiRNA target sequence
tattcagttatttatttaaataa

SEQ ID NO: 217849 - DNA, 23 bp, Artificial sequence
  SiRNA target sequence
attcagttatttatttaaataag

SEQ ID NO: 217850 - DNA, 23 bp, Artificial sequence
  SiRNA target sequence
ttcagttatttatttaaataaga

SEQ ID NO: 217851 - DNA, 23 bp, Artificial sequence
  SiRNA target sequence
tcagttatttatttaaataagaa

SEQ ID NO: 217852 - DNA, 23 bp, Artificial sequence
  SiRNA target sequence
cagttatttatttaaataagaaa

SEQ ID NO: 217853 - DNA, 23 bp, Artificial sequence
  SiRNA target sequence
agttatttatttaaataagaaat

SEQ ID NO: 217854 - DNA, 23 bp, Artificial sequence
  SiRNA target sequence
gttatttatttaaataagaaata

SEQ ID NO: 217855 - DNA, 23 bp, Artificial sequence
  SiRNA target sequence
ttatttatttaaataagaaatac

SEQ ID NO: 217856 - DNA, 23 bp, Artificial sequence
  SiRNA target sequence
tatttatttaaataagaaataca

SEQ ID NO: 217857 - DNA, 23 bp, Artificial sequence
  SiRNA target sequence
atttatttaaataagaaatacaa

SEQ ID NO: 217858 - DNA, 23 bp, Artificial sequence
  SiRNA target sequence
tttatttaaataagaaatacaaa

SEQ ID NO: 217859 - DNA, 23 bp, Artificial sequence
  SiRNA target sequence
ttatttaaataagaaatacaaag

SEQ ID NO: 217860 - DNA, 23 bp, Artificial sequence
  SiRNA target sequence
tatttaaataagaaatacaaaga

SEQ ID NO: 217861 - DNA, 23 bp, Artificial sequence
  SiRNA target sequence
atttaaataagaaatacaaagaa

SEQ ID NO: 217862 - DNA, 23 bp, Artificial sequence
  SiRNA target sequence
tttaaataagaaatacaaagaat

SEQ ID NO: 217863 - DNA, 23 bp, Artificial sequence
  SiRNA target sequence
ttaaataagaaatacaaagaatc

SEQ ID NO: 217864 - DNA, 23 bp, Artificial sequence
  SiRNA target sequence
taaataagaaatacaaagaatca

SEQ ID NO: 217865 - DNA, 23 bp, Artificial sequence
  SiRNA target sequence
aaataagaaatacaaagaatcag

SEQ ID NO: 217866 - DNA, 23 bp, Artificial sequence
  SiRNA target sequence
aataagaaatacaaagaatcagt

SEQ ID NO: 217867 - DNA, 23 bp, Artificial sequence
  SiRNA target sequence
ataagaaatacaaagaatcagtt

SEQ ID NO: 217868 - DNA, 23 bp, Artificial sequence
  SiRNA target sequence
taagaaatacaaagaatcagttg

SEQ ID NO: 217869 - DNA, 23 bp, Artificial sequence
  SiRNA target sequence
aagaaatacaaagaatcagttgt

SEQ ID NO: 217870 - DNA, 23 bp, Artificial sequence
  SiRNA target sequence
agaaatacaaagaatcagttgtt

SEQ ID NO: 217871 - DNA, 23 bp, Artificial sequence
  SiRNA target sequence
gaaatacaaagaatcagttgtta

SEQ ID NO: 217872 - DNA, 23 bp, Artificial sequence
  SiRNA target sequence
aaatacaaagaatcagttgttag

SEQ ID NO: 217873 - DNA, 23 bp, Artificial sequence
  SiRNA target sequence
aatacaaagaatcagttgttagt

SEQ ID NO: 217874 - DNA, 23 bp, Artificial sequence
  SiRNA target sequence
atacaaagaatcagttgttagta

SEQ ID NO: 217875 - DNA, 23 bp, Artificial sequence
  SiRNA target sequence
tacaaagaatcagttgttagtaa

SEQ ID NO: 217876 - DNA, 23 bp, Artificial sequence
  SiRNA target sequence
acaaagaatcagttgttagtaat

SEQ ID NO: 217877 - DNA, 23 bp, Artificial sequence
  SiRNA target sequence
caaagaatcagttgttagtaatt

SEQ ID NO: 217878 - DNA, 23 bp, Artificial sequence
  SiRNA target sequence
aaagaatcagttgttagtaattt

SEQ ID NO: 217879 - DNA, 23 bp, Artificial sequence
  SiRNA target sequence
aagaatcagttgttagtaattta

SEQ ID NO: 217880 - DNA, 23 bp, Artificial sequence
  SiRNA target sequence
agaatcagttgttagtaatttac

SEQ ID NO: 217881 - DNA, 23 bp, Artificial sequence
  SiRNA target sequence
gaatcagttgttagtaatttacc

SEQ ID NO: 217882 - DNA, 23 bp, Artificial sequence
  SiRNA target sequence
aatcagttgttagtaatttaccc

SEQ ID NO: 217883 - DNA, 23 bp, Artificial sequence
  SiRNA target sequence
atcagttgttagtaatttaccca

SEQ ID NO: 217884 - DNA, 23 bp, Artificial sequence
  SiRNA target sequence
tcagttgttagtaatttacccat

SEQ ID NO: 217885 - DNA, 23 bp, Artificial sequence
  SiRNA target sequence
cagttgttagtaatttacccatc

SEQ ID NO: 217886 - DNA, 23 bp, Artificial sequence
  SiRNA target sequence
agttgttagtaatttacccatcg

SEQ ID NO: 217887 - DNA, 23 bp, Artificial sequence
  SiRNA target sequence
gttgttagtaatttacccatcga

SEQ ID NO: 217888 - DNA, 23 bp, Artificial sequence
  SiRNA target sequence
ttgttagtaatttacccatcgat

SEQ ID NO: 217889 - DNA, 23 bp, Artificial sequence
  SiRNA target sequence
tgttagtaatttacccatcgatg

SEQ ID NO: 217890 - DNA, 23 bp, Artificial sequence
  SiRNA target sequence
gttagtaatttacccatcgatgt

SEQ ID NO: 217891 - DNA, 23 bp, Artificial sequence
  SiRNA target sequence
ttagtaatttacccatcgatgtt

SEQ ID NO: 217892 - DNA, 23 bp, Artificial sequence
  SiRNA target sequence
tagtaatttacccatcgatgttg

SEQ ID NO: 217893 - DNA, 23 bp, Artificial sequence
  SiRNA target sequence
agtaatttacccatcgatgttga

SEQ ID NO: 217894 - DNA, 23 bp, Artificial sequence
  SiRNA target sequence
gtaatttacccatcgatgttgat

SEQ ID NO: 217895 - DNA, 23 bp, Artificial sequence
  SiRNA target sequence
taatttacccatcgatgttgatt

SEQ ID NO: 217896 - DNA, 23 bp, Artificial sequence
  SiRNA target sequence
aatttacccatcgatgttgattt

SEQ ID NO: 217897 - DNA, 23 bp, Artificial sequence
  SiRNA target sequence
atttacccatcgatgttgatttg

SEQ ID NO: 217898 - DNA, 23 bp, Artificial sequence
  SiRNA target sequence
tttacccatcgatgttgatttgt

SEQ ID NO: 217899 - DNA, 23 bp, Artificial sequence
  SiRNA target sequence
ttacccatcgatgttgatttgtt

SEQ ID NO: 217900 - DNA, 23 bp, Artificial sequence
  SiRNA target sequence
tacccatcgatgttgatttgttt

SEQ ID NO: 217901 - DNA, 23 bp, Artificial sequence
  SiRNA target sequence
acccatcgatgttgatttgtttg

SEQ ID NO: 217902 - DNA, 23 bp, Artificial sequence
  SiRNA target sequence
cccatcgatgttgatttgtttgc

SEQ ID NO: 217903 - DNA, 23 bp, Artificial sequence
  SiRNA target sequence
ccatcgatgttgatttgtttgca

SEQ ID NO: 217904 - DNA, 23 bp, Artificial sequence
  SiRNA target sequence
catcgatgttgatttgtttgcat

SEQ ID NO: 217905 - DNA, 23 bp, Artificial sequence
  SiRNA target sequence
atcgatgttgatttgtttgcatc

SEQ ID NO: 217906 - DNA, 23 bp, Artificial sequence
  SiRNA target sequence
tcgatgttgatttgtttgcatca

SEQ ID NO: 217907 - DNA, 23 bp, Artificial sequence
  SiRNA target sequence
cgatgttgatttgtttgcatcaa

SEQ ID NO: 217908 - DNA, 23 bp, Artificial sequence
  SiRNA target sequence
gatgttgatttgtttgcatcaaa

SEQ ID NO: 217909 - DNA, 23 bp, Artificial sequence
  SiRNA target sequence
atgttgatttgtttgcatcaaag

SEQ ID NO: 217910 - DNA, 23 bp, Artificial sequence
  SiRNA target sequence
tgttgatttgtttgcatcaaagt

SEQ ID NO: 217911 - DNA, 23 bp, Artificial sequence
  SiRNA target sequence
gttgatttgtttgcatcaaagtt

SEQ ID NO: 217912 - DNA, 23 bp, Artificial sequence
  SiRNA target sequence
ttgatttgtttgcatcaaagttg

SEQ ID NO: 217913 - DNA, 23 bp, Artificial sequence
  SiRNA target sequence
tgatttgtttgcatcaaagttgt

SEQ ID NO: 217914 - DNA, 23 bp, Artificial sequence
  SiRNA target sequence
gatttgtttgcatcaaagttgtt

SEQ ID NO: 217915 - DNA, 23 bp, Artificial sequence
  SiRNA target sequence
atttgtttgcatcaaagttgtta

SEQ ID NO: 217916 - DNA, 23 bp, Artificial sequence
  SiRNA target sequence
tttgtttgcatcaaagttgttag

SEQ ID NO: 217917 - DNA, 23 bp, Artificial sequence
  SiRNA target sequence
ttgtttgcatcaaagttgttaga

SEQ ID NO: 217918 - DNA, 23 bp, Artificial sequence
  SiRNA target sequence
tgtttgcatcaaagttgttagat

SEQ ID NO: 217919 - DNA, 23 bp, Artificial sequence
  SiRNA target sequence
gtttgcatcaaagttgttagata

SEQ ID NO: 217920 - DNA, 23 bp, Artificial sequence
  SiRNA target sequence
tttgcatcaaagttgttagataa

SEQ ID NO: 217921 - DNA, 23 bp, Artificial sequence
  SiRNA target sequence
ttgcatcaaagttgttagataat

SEQ ID NO: 217922 - DNA, 23 bp, Artificial sequence
  SiRNA target sequence
tgcatcaaagttgttagataata

SEQ ID NO: 217923 - DNA, 23 bp, Artificial sequence
  SiRNA target sequence
gcatcaaagttgttagataataa

SEQ ID NO: 217924 - DNA, 23 bp, Artificial sequence
  SiRNA target sequence
catcaaagttgttagataataaa

SEQ ID NO: 217925 - DNA, 23 bp, Artificial sequence
  SiRNA target sequence
atcaaagttgttagataataaaa

SEQ ID NO: 217926 - DNA, 23 bp, Artificial sequence
  SiRNA target sequence
tcaaagttgttagataataaaaa

SEQ ID NO: 217927 - DNA, 23 bp, Artificial sequence
  SiRNA target sequence
caaagttgttagataataaaaaa

SEQ ID NO: 217928 - DNA, 23 bp, Artificial sequence
  SiRNA target sequence
aaagttgttagataataaaaaag

SEQ ID NO: 217929 - DNA, 23 bp, Artificial sequence
  SiRNA target sequence
aagttgttagataataaaaaaga

SEQ ID NO: 217930 - DNA, 23 bp, Artificial sequence
  SiRNA target sequence
agttgttagataataaaaaagaa

SEQ ID NO: 217931 - DNA, 23 bp, Artificial sequence
  SiRNA target sequence
gttgttagataataaaaaagaag

SEQ ID NO: 217932 - DNA, 23 bp, Artificial sequence
  SiRNA target sequence
ttgttagataataaaaaagaaga

SEQ ID NO: 217933 - DNA, 23 bp, Artificial sequence
  SiRNA target sequence
tgttagataataaaaaagaagag

SEQ ID NO: 217934 - DNA, 23 bp, Artificial sequence
  SiRNA target sequence
gttagataataaaaaagaagagg

SEQ ID NO: 217935 - DNA, 23 bp, Artificial sequence
  SiRNA target sequence
ttagataataaaaaagaagagga

SEQ ID NO: 217936 - DNA, 23 bp, Artificial sequence
  SiRNA target sequence
tagataataaaaaagaagaggaa

SEQ ID NO: 217937 - DNA, 23 bp, Artificial sequence
  SiRNA target sequence
agataataaaaaagaagaggaaa

SEQ ID NO: 217938 - DNA, 23 bp, Artificial sequence
  SiRNA target sequence
gataataaaaaagaagaggaaat

SEQ ID NO: 217939 - DNA, 23 bp, Artificial sequence
  SiRNA target sequence
ataataaaaaagaagaggaaatt

SEQ ID NO: 217940 - DNA, 23 bp, Artificial sequence
  SiRNA target sequence
taataaaaaagaagaggaaattg

SEQ ID NO: 217941 - DNA, 23 bp, Artificial sequence
  SiRNA target sequence
aataaaaaagaagaggaaattga

SEQ ID NO: 217942 - DNA, 23 bp, Artificial sequence
  SiRNA target sequence
ataaaaaagaagaggaaattgat

SEQ ID NO: 217943 - DNA, 23 bp, Artificial sequence
  SiRNA target sequence
taaaaaagaagaggaaattgatg

SEQ ID NO: 217944 - DNA, 23 bp, Artificial sequence
  SiRNA target sequence
aaaaaagaagaggaaattgatgt

SEQ ID NO: 217945 - DNA, 23 bp, Artificial sequence
  SiRNA target sequence
aaaaagaagaggaaattgatgtg

SEQ ID NO: 217946 - DNA, 23 bp, Artificial sequence
  SiRNA target sequence
aaaagaagaggaaattgatgtgt

SEQ ID NO: 217947 - DNA, 23 bp, Artificial sequence
  SiRNA target sequence
aaagaagaggaaattgatgtgtc

SEQ ID NO: 217948 - DNA, 23 bp, Artificial sequence
  SiRNA target sequence
aagaagaggaaattgatgtgtca

SEQ ID NO: 217949 - DNA, 23 bp, Artificial sequence
  SiRNA target sequence
agaagaggaaattgatgtgtcag

SEQ ID NO: 217950 - DNA, 23 bp, Artificial sequence
  SiRNA target sequence
gaagaggaaattgatgtgtcagt

SEQ ID NO: 217951 - DNA, 23 bp, Artificial sequence
  SiRNA target sequence
aagaggaaattgatgtgtcagtg

SEQ ID NO: 217952 - DNA, 23 bp, Artificial sequence
  SiRNA target sequence
agaggaaattgatgtgtcagtgc

SEQ ID NO: 217953 - DNA, 23 bp, Artificial sequence
  SiRNA target sequence
gaggaaattgatgtgtcagtgct

SEQ ID NO: 217954 - DNA, 23 bp, Artificial sequence
  SiRNA target sequence
aggaaattgatgtgtcagtgctc

SEQ ID NO: 217955 - DNA, 23 bp, Artificial sequence
  SiRNA target sequence
ggaaattgatgtgtcagtgctcg

SEQ ID NO: 217956 - DNA, 23 bp, Artificial sequence
  SiRNA target sequence
gaaattgatgtgtcagtgctcgt

SEQ ID NO: 217957 - DNA, 23 bp, Artificial sequence
  SiRNA target sequence
aaattgatgtgtcagtgctcgtt

SEQ ID NO: 217958 - DNA, 23 bp, Artificial sequence
  SiRNA target sequence
aattgatgtgtcagtgctcgtta

SEQ ID NO: 217959 - DNA, 23 bp, Artificial sequence
  SiRNA target sequence
attgatgtgtcagtgctcgttaa

SEQ ID NO: 217960 - DNA, 23 bp, Artificial sequence
  SiRNA target sequence
ttgatgtgtcagtgctcgttaat

SEQ ID NO: 217961 - DNA, 23 bp, Artificial sequence
  SiRNA target sequence
tgatgtgtcagtgctcgttaatt

SEQ ID NO: 217962 - DNA, 23 bp, Artificial sequence
  SiRNA target sequence
gatgtgtcagtgctcgttaatta

SEQ ID NO: 217963 - DNA, 23 bp, Artificial sequence
  SiRNA target sequence
atgtgtcagtgctcgttaattaa

SEQ ID NO: 217964 - DNA, 24 bp, Artificial sequence
  SiRNA target sequence
atgattgagaggggtattatggaa

SEQ ID NO: 217965 - DNA, 24 bp, Artificial sequence
  SiRNA target sequence
tgattgagaggggtattatggaaa

SEQ ID NO: 217966 - DNA, 24 bp, Artificial sequence
  SiRNA target sequence
gattgagaggggtattatggaaaa

SEQ ID NO: 217967 - DNA, 24 bp, Artificial sequence
  SiRNA target sequence
attgagaggggtattatggaaaaa

SEQ ID NO: 217968 - DNA, 24 bp, Artificial sequence
  SiRNA target sequence
ttgagaggggtattatggaaaaaa

SEQ ID NO: 217969 - DNA, 24 bp, Artificial sequence
  SiRNA target sequence
tgagaggggtattatggaaaaaat

SEQ ID NO: 217970 - DNA, 24 bp, Artificial sequence
  SiRNA target sequence
gagaggggtattatggaaaaaata

SEQ ID NO: 217971 - DNA, 24 bp, Artificial sequence
  SiRNA target sequence
agaggggtattatggaaaaaataa

SEQ ID NO: 217972 - DNA, 24 bp, Artificial sequence
  SiRNA target sequence
gaggggtattatggaaaaaataaa

SEQ ID NO: 217973 - DNA, 24 bp, Artificial sequence
  SiRNA target sequence
aggggtattatggaaaaaataaaa

SEQ ID NO: 217974 - DNA, 24 bp, Artificial sequence
  SiRNA target sequence
ggggtattatggaaaaaataaaaa

SEQ ID NO: 217975 - DNA, 24 bp, Artificial sequence
  SiRNA target sequence
gggtattatggaaaaaataaaaaa

SEQ ID NO: 217976 - DNA, 24 bp, Artificial sequence
  SiRNA target sequence
ggtattatggaaaaaataaaaaat

SEQ ID NO: 217977 - DNA, 24 bp, Artificial sequence
  SiRNA target sequence
gtattatggaaaaaataaaaaatt

SEQ ID NO: 217978 - DNA, 24 bp, Artificial sequence
  SiRNA target sequence
tattatggaaaaaataaaaaattt

SEQ ID NO: 217979 - DNA, 24 bp, Artificial sequence
  SiRNA target sequence
attatggaaaaaataaaaaattta

SEQ ID NO: 217980 - DNA, 24 bp, Artificial sequence
  SiRNA target sequence
ttatggaaaaaataaaaaatttat

SEQ ID NO: 217981 - DNA, 24 bp, Artificial sequence
  SiRNA target sequence
tatggaaaaaataaaaaatttatt

SEQ ID NO: 217982 - DNA, 24 bp, Artificial sequence
  SiRNA target sequence
atggaaaaaataaaaaatttatta

SEQ ID NO: 217983 - DNA, 24 bp, Artificial sequence
  SiRNA target sequence
tggaaaaaataaaaaatttattaa

SEQ ID NO: 217984 - DNA, 24 bp, Artificial sequence
  SiRNA target sequence
ggaaaaaataaaaaatttattaac

SEQ ID NO: 217985 - DNA, 24 bp, Artificial sequence
  SiRNA target sequence
gaaaaaataaaaaatttattaaca

SEQ ID NO: 217986 - DNA, 24 bp, Artificial sequence
  SiRNA target sequence
aaaaaataaaaaatttattaacag

SEQ ID NO: 217987 - DNA, 24 bp, Artificial sequence
  SiRNA target sequence
aaaaataaaaaatttattaacaga

SEQ ID NO: 217988 - DNA, 24 bp, Artificial sequence
  SiRNA target sequence
aaaataaaaaatttattaacagag

SEQ ID NO: 217989 - DNA, 24 bp, Artificial sequence
  SiRNA target sequence
aaataaaaaatttattaacagagg

SEQ ID NO: 217990 - DNA, 24 bp, Artificial sequence
  SiRNA target sequence
aataaaaaatttattaacagagga

SEQ ID NO: 217991 - DNA, 24 bp, Artificial sequence
  SiRNA target sequence
ataaaaaatttattaacagaggat

SEQ ID NO: 217992 - DNA, 24 bp, Artificial sequence
  SiRNA target sequence
taaaaaatttattaacagaggatg

SEQ ID NO: 217993 - DNA, 24 bp, Artificial sequence
  SiRNA target sequence
aaaaaatttattaacagaggatga

SEQ ID NO: 217994 - DNA, 24 bp, Artificial sequence
  SiRNA target sequence
aaaaatttattaacagaggatgaa

SEQ ID NO: 217995 - DNA, 24 bp, Artificial sequence
  SiRNA target sequence
aaaatttattaacagaggatgaag

SEQ ID NO: 217996 - DNA, 24 bp, Artificial sequence
  SiRNA target sequence
aaatttattaacagaggatgaagt

SEQ ID NO: 217997 - DNA, 24 bp, Artificial sequence
  SiRNA target sequence
aatttattaacagaggatgaagta

SEQ ID NO: 217998 - DNA, 24 bp, Artificial sequence
  SiRNA target sequence
atttattaacagaggatgaagtag

SEQ ID NO: 217999 - DNA, 24 bp, Artificial sequence
  SiRNA target sequence
tttattaacagaggatgaagtaga

SEQ ID NO: 218000 - DNA, 24 bp, Artificial sequence
  SiRNA target sequence
ttattaacagaggatgaagtagaa

SEQ ID NO: 218001 - DNA, 24 bp, Artificial sequence
  SiRNA target sequence
tattaacagaggatgaagtagaag

SEQ ID NO: 218002 - DNA, 24 bp, Artificial sequence
  SiRNA target sequence
attaacagaggatgaagtagaagc

SEQ ID NO: 218003 - DNA, 24 bp, Artificial sequence
  SiRNA target sequence
ttaacagaggatgaagtagaagca

SEQ ID NO: 218004 - DNA, 24 bp, Artificial sequence
  SiRNA target sequence
taacagaggatgaagtagaagcag

SEQ ID NO: 218005 - DNA, 24 bp, Artificial sequence
  SiRNA target sequence
aacagaggatgaagtagaagcaga

SEQ ID NO: 218006 - DNA, 24 bp, Artificial sequence
  SiRNA target sequence
acagaggatgaagtagaagcagaa

SEQ ID NO: 218007 - DNA, 24 bp, Artificial sequence
  SiRNA target sequence
cagaggatgaagtagaagcagaag

SEQ ID NO: 218008 - DNA, 24 bp, Artificial sequence
  SiRNA target sequence
agaggatgaagtagaagcagaagc

SEQ ID NO: 218009 - DNA, 24 bp, Artificial sequence
  SiRNA target sequence
gaggatgaagtagaagcagaagca

SEQ ID NO: 218010 - DNA, 24 bp, Artificial sequence
  SiRNA target sequence
aggatgaagtagaagcagaagcaa

SEQ ID NO: 218011 - DNA, 24 bp, Artificial sequence
  SiRNA target sequence
ggatgaagtagaagcagaagcaaa

SEQ ID NO: 218012 - DNA, 24 bp, Artificial sequence
  SiRNA target sequence
gatgaagtagaagcagaagcaaat

SEQ ID NO: 218013 - DNA, 24 bp, Artificial sequence
  SiRNA target sequence
atgaagtagaagcagaagcaaatt

SEQ ID NO: 218014 - DNA, 24 bp, Artificial sequence
  SiRNA target sequence
tgaagtagaagcagaagcaaattc

SEQ ID NO: 218015 - DNA, 24 bp, Artificial sequence
  SiRNA target sequence
gaagtagaagcagaagcaaattct

SEQ ID NO: 218016 - DNA, 24 bp, Artificial sequence
  SiRNA target sequence
aagtagaagcagaagcaaattctg

SEQ ID NO: 218017 - DNA, 24 bp, Artificial sequence
  SiRNA target sequence
agtagaagcagaagcaaattctgg

SEQ ID NO: 218018 - DNA, 24 bp, Artificial sequence
  SiRNA target sequence
gtagaagcagaagcaaattctgga

SEQ ID NO: 218019 - DNA, 24 bp, Artificial sequence
  SiRNA target sequence
tagaagcagaagcaaattctggaa

SEQ ID NO: 218020 - DNA, 24 bp, Artificial sequence
  SiRNA target sequence
agaagcagaagcaaattctggaag

SEQ ID NO: 218021 - DNA, 24 bp, Artificial sequence
  SiRNA target sequence
gaagcagaagcaaattctggaagg

SEQ ID NO: 218022 - DNA, 24 bp, Artificial sequence
  SiRNA target sequence
aagcagaagcaaattctggaaggg

SEQ ID NO: 218023 - DNA, 24 bp, Artificial sequence
  SiRNA target sequence
agcagaagcaaattctggaagggg

SEQ ID NO: 218024 - DNA, 24 bp, Artificial sequence
  SiRNA target sequence
gcagaagcaaattctggaaggggc

SEQ ID NO: 218025 - DNA, 24 bp, Artificial sequence
  SiRNA target sequence
cagaagcaaattctggaaggggca

SEQ ID NO: 218026 - DNA, 24 bp, Artificial sequence
  SiRNA target sequence
agaagcaaattctggaaggggcat

SEQ ID NO: 218027 - DNA, 24 bp, Artificial sequence
  SiRNA target sequence
gaagcaaattctggaaggggcatt

SEQ ID NO: 218028 - DNA, 24 bp, Artificial sequence
  SiRNA target sequence
aagcaaattctggaaggggcattt

SEQ ID NO: 218029 - DNA, 24 bp, Artificial sequence
  SiRNA target sequence
agcaaattctggaaggggcatttt

SEQ ID NO: 218030 - DNA, 24 bp, Artificial sequence
  SiRNA target sequence
gcaaattctggaaggggcatttta

SEQ ID NO: 218031 - DNA, 24 bp, Artificial sequence
  SiRNA target sequence
caaattctggaaggggcattttat

SEQ ID NO: 218032 - DNA, 24 bp, Artificial sequence
  SiRNA target sequence
aaattctggaaggggcattttatc

SEQ ID NO: 218033 - DNA, 24 bp, Artificial sequence
  SiRNA target sequence
aattctggaaggggcattttatca

SEQ ID NO: 218034 - DNA, 24 bp, Artificial sequence
  SiRNA target sequence
attctggaaggggcattttatcaa

SEQ ID NO: 218035 - DNA, 24 bp, Artificial sequence
  SiRNA target sequence
ttctggaaggggcattttatcaat

SEQ ID NO: 218036 - DNA, 24 bp, Artificial sequence
  SiRNA target sequence
tctggaaggggcattttatcaata

SEQ ID NO: 218037 - DNA, 24 bp, Artificial sequence
  SiRNA target sequence
ctggaaggggcattttatcaatat

SEQ ID NO: 218038 - DNA, 24 bp, Artificial sequence
  SiRNA target sequence
tggaaggggcattttatcaatatt

SEQ ID NO: 218039 - DNA, 24 bp, Artificial sequence
  SiRNA target sequence
ggaaggggcattttatcaatattt

SEQ ID NO: 218040 - DNA, 24 bp, Artificial sequence
  SiRNA target sequence
gaaggggcattttatcaatattta

SEQ ID NO: 218041 - DNA, 24 bp, Artificial sequence
  SiRNA target sequence
aaggggcattttatcaatatttag

SEQ ID NO: 218042 - DNA, 24 bp, Artificial sequence
  SiRNA target sequence
aggggcattttatcaatatttaga

SEQ ID NO: 218043 - DNA, 24 bp, Artificial sequence
  SiRNA target sequence
ggggcattttatcaatatttagaa

SEQ ID NO: 218044 - DNA, 24 bp, Artificial sequence
  SiRNA target sequence
gggcattttatcaatatttagaat

SEQ ID NO: 218045 - DNA, 24 bp, Artificial sequence
  SiRNA target sequence
ggcattttatcaatatttagaatt

SEQ ID NO: 218046 - DNA, 24 bp, Artificial sequence
  SiRNA target sequence
gcattttatcaatatttagaattg

SEQ ID NO: 218047 - DNA, 24 bp, Artificial sequence
  SiRNA target sequence
cattttatcaatatttagaattgc

SEQ ID NO: 218048 - DNA, 24 bp, Artificial sequence
  SiRNA target sequence
attttatcaatatttagaattgct

SEQ ID NO: 218049 - DNA, 24 bp, Artificial sequence
  SiRNA target sequence
ttttatcaatatttagaattgcta

SEQ ID NO: 218050 - DNA, 24 bp, Artificial sequence
  SiRNA target sequence
tttatcaatatttagaattgctaa

SEQ ID NO: 218051 - DNA, 24 bp, Artificial sequence
  SiRNA target sequence
ttatcaatatttagaattgctaag

SEQ ID NO: 218052 - DNA, 24 bp, Artificial sequence
  SiRNA target sequence
tatcaatatttagaattgctaagg

SEQ ID NO: 218053 - DNA, 24 bp, Artificial sequence
  SiRNA target sequence
atcaatatttagaattgctaaggt

SEQ ID NO: 218054 - DNA, 24 bp, Artificial sequence
  SiRNA target sequence
tcaatatttagaattgctaaggta

SEQ ID NO: 218055 - DNA, 24 bp, Artificial sequence
  SiRNA target sequence
caatatttagaattgctaaggtag

SEQ ID NO: 218056 - DNA, 24 bp, Artificial sequence
  SiRNA target sequence
aatatttagaattgctaaggtaga

SEQ ID NO: 218057 - DNA, 24 bp, Artificial sequence
  SiRNA target sequence
atatttagaattgctaaggtagaa

SEQ ID NO: 218058 - DNA, 24 bp, Artificial sequence
  SiRNA target sequence
tatttagaattgctaaggtagaaa

SEQ ID NO: 218059 - DNA, 24 bp, Artificial sequence
  SiRNA target sequence
atttagaattgctaaggtagaaag

SEQ ID NO: 218060 - DNA, 24 bp, Artificial sequence
  SiRNA target sequence
tttagaattgctaaggtagaaaga

SEQ ID NO: 218061 - DNA, 24 bp, Artificial sequence
  SiRNA target sequence
ttagaattgctaaggtagaaagaa

SEQ ID NO: 218062 - DNA, 24 bp, Artificial sequence
  SiRNA target sequence
tagaattgctaaggtagaaagaag

SEQ ID NO: 218063 - DNA, 24 bp, Artificial sequence
  SiRNA target sequence
agaattgctaaggtagaaagaaga

SEQ ID NO: 218064 - DNA, 24 bp, Artificial sequence
  SiRNA target sequence
gaattgctaaggtagaaagaagaa

SEQ ID NO: 218065 - DNA, 24 bp, Artificial sequence
  SiRNA target sequence
aattgctaaggtagaaagaagaat

SEQ ID NO: 218066 - DNA, 24 bp, Artificial sequence
  SiRNA target sequence
attgctaaggtagaaagaagaatg

SEQ ID NO: 218067 - DNA, 24 bp, Artificial sequence
  SiRNA target sequence
ttgctaaggtagaaagaagaatgt

SEQ ID NO: 218068 - DNA, 24 bp, Artificial sequence
  SiRNA target sequence
tgctaaggtagaaagaagaatgtt

SEQ ID NO: 218069 - DNA, 24 bp, Artificial sequence
  SiRNA target sequence
gctaaggtagaaagaagaatgttt

SEQ ID NO: 218070 - DNA, 24 bp, Artificial sequence
  SiRNA target sequence
ctaaggtagaaagaagaatgtttt

SEQ ID NO: 218071 - DNA, 24 bp, Artificial sequence
  SiRNA target sequence
taaggtagaaagaagaatgttttg

SEQ ID NO: 218072 - DNA, 24 bp, Artificial sequence
  SiRNA target sequence
aaggtagaaagaagaatgttttgg

SEQ ID NO: 218073 - DNA, 24 bp, Artificial sequence
  SiRNA target sequence
aggtagaaagaagaatgttttggc

SEQ ID NO: 218074 - DNA, 24 bp, Artificial sequence
  SiRNA target sequence
ggtagaaagaagaatgttttggct

SEQ ID NO: 218075 - DNA, 24 bp, Artificial sequence
  SiRNA target sequence
gtagaaagaagaatgttttggctt

SEQ ID NO: 218076 - DNA, 24 bp, Artificial sequence
  SiRNA target sequence
tagaaagaagaatgttttggctta

SEQ ID NO: 218077 - DNA, 24 bp, Artificial sequence
  SiRNA target sequence
agaaagaagaatgttttggcttat

SEQ ID NO: 218078 - DNA, 24 bp, Artificial sequence
  SiRNA target sequence
gaaagaagaatgttttggcttatg

SEQ ID NO: 218079 - DNA, 24 bp, Artificial sequence
  SiRNA target sequence
aaagaagaatgttttggcttatga

SEQ ID NO: 218080 - DNA, 24 bp, Artificial sequence
  SiRNA target sequence
aagaagaatgttttggcttatgac

SEQ ID NO: 218081 - DNA, 24 bp, Artificial sequence
  SiRNA target sequence
agaagaatgttttggcttatgacg

SEQ ID NO: 218082 - DNA, 24 bp, Artificial sequence
  SiRNA target sequence
gaagaatgttttggcttatgacgc

SEQ ID NO: 218083 - DNA, 24 bp, Artificial sequence
  SiRNA target sequence
aagaatgttttggcttatgacgct

SEQ ID NO: 218084 - DNA, 24 bp, Artificial sequence
  SiRNA target sequence
agaatgttttggcttatgacgctt

SEQ ID NO: 218085 - DNA, 24 bp, Artificial sequence
  SiRNA target sequence
gaatgttttggcttatgacgctta

SEQ ID NO: 218086 - DNA, 24 bp, Artificial sequence
  SiRNA target sequence
aatgttttggcttatgacgcttat

SEQ ID NO: 218087 - DNA, 24 bp, Artificial sequence
  SiRNA target sequence
atgttttggcttatgacgcttatg

SEQ ID NO: 218088 - DNA, 24 bp, Artificial sequence
  SiRNA target sequence
tgttttggcttatgacgcttatgt

SEQ ID NO: 218089 - DNA, 24 bp, Artificial sequence
  SiRNA target sequence
gttttggcttatgacgcttatgtt

SEQ ID NO: 218090 - DNA, 24 bp, Artificial sequence
  SiRNA target sequence
ttttggcttatgacgcttatgttt

SEQ ID NO: 218091 - DNA, 24 bp, Artificial sequence
  SiRNA target sequence
tttggcttatgacgcttatgtttt

SEQ ID NO: 218092 - DNA, 24 bp, Artificial sequence
  SiRNA target sequence
ttggcttatgacgcttatgttttc

SEQ ID NO: 218093 - DNA, 24 bp, Artificial sequence
  SiRNA target sequence
tggcttatgacgcttatgttttcg

SEQ ID NO: 218094 - DNA, 24 bp, Artificial sequence
  SiRNA target sequence
ggcttatgacgcttatgttttcgc

SEQ ID NO: 218095 - DNA, 24 bp, Artificial sequence
  SiRNA target sequence
gcttatgacgcttatgttttcgct

SEQ ID NO: 218096 - DNA, 24 bp, Artificial sequence
  SiRNA target sequence
cttatgacgcttatgttttcgctt

SEQ ID NO: 218097 - DNA, 24 bp, Artificial sequence
  SiRNA target sequence
ttatgacgcttatgttttcgctta

SEQ ID NO: 218098 - DNA, 24 bp, Artificial sequence
  SiRNA target sequence
tatgacgcttatgttttcgcttat

SEQ ID NO: 218099 - DNA, 24 bp, Artificial sequence
  SiRNA target sequence
atgacgcttatgttttcgcttatt

SEQ ID NO: 218100 - DNA, 24 bp, Artificial sequence
  SiRNA target sequence
tgacgcttatgttttcgcttattt

SEQ ID NO: 218101 - DNA, 24 bp, Artificial sequence
  SiRNA target sequence
gacgcttatgttttcgcttatttc

SEQ ID NO: 218102 - DNA, 24 bp, Artificial sequence
  SiRNA target sequence
acgcttatgttttcgcttatttcc

SEQ ID NO: 218103 - DNA, 24 bp, Artificial sequence
  SiRNA target sequence
cgcttatgttttcgcttatttcct

SEQ ID NO: 218104 - DNA, 24 bp, Artificial sequence
  SiRNA target sequence
gcttatgttttcgcttatttcctt

SEQ ID NO: 218105 - DNA, 24 bp, Artificial sequence
  SiRNA target sequence
cttatgttttcgcttatttccttt

SEQ ID NO: 218106 - DNA, 24 bp, Artificial sequence
  SiRNA target sequence
ttatgttttcgcttatttccttta

SEQ ID NO: 218107 - DNA, 24 bp, Artificial sequence
  SiRNA target sequence
tatgttttcgcttatttcctttat

SEQ ID NO: 218108 - DNA, 24 bp, Artificial sequence
  SiRNA target sequence
atgttttcgcttatttcctttatt

SEQ ID NO: 218109 - DNA, 24 bp, Artificial sequence
  SiRNA target sequence
tgttttcgcttatttcctttattt

SEQ ID NO: 218110 - DNA, 24 bp, Artificial sequence
  SiRNA target sequence
gttttcgcttatttcctttattta

SEQ ID NO: 218111 - DNA, 24 bp, Artificial sequence
  SiRNA target sequence
ttttcgcttatttcctttatttac

SEQ ID NO: 218112 - DNA, 24 bp, Artificial sequence
  SiRNA target sequence
tttcgcttatttcctttatttact

SEQ ID NO: 218113 - DNA, 24 bp, Artificial sequence
  SiRNA target sequence
ttcgcttatttcctttatttactc

SEQ ID NO: 218114 - DNA, 24 bp, Artificial sequence
  SiRNA target sequence
tcgcttatttcctttatttactca

SEQ ID NO: 218115 - DNA, 24 bp, Artificial sequence
  SiRNA target sequence
cgcttatttcctttatttactcag

SEQ ID NO: 218116 - DNA, 24 bp, Artificial sequence
  SiRNA target sequence
gcttatttcctttatttactcagt

SEQ ID NO: 218117 - DNA, 24 bp, Artificial sequence
  SiRNA target sequence
cttatttcctttatttactcagta

SEQ ID NO: 218118 - DNA, 24 bp, Artificial sequence
  SiRNA target sequence
ttatttcctttatttactcagtag

SEQ ID NO: 218119 - DNA, 24 bp, Artificial sequence
  SiRNA target sequence
tatttcctttatttactcagtagg

SEQ ID NO: 218120 - DNA, 24 bp, Artificial sequence
  SiRNA target sequence
atttcctttatttactcagtagga

SEQ ID NO: 218121 - DNA, 24 bp, Artificial sequence
  SiRNA target sequence
tttcctttatttactcagtaggac

SEQ ID NO: 218122 - DNA, 24 bp, Artificial sequence
  SiRNA target sequence
ttcctttatttactcagtaggacg

SEQ ID NO: 218123 - DNA, 24 bp, Artificial sequence
  SiRNA target sequence
tcctttatttactcagtaggacga

SEQ ID NO: 218124 - DNA, 24 bp, Artificial sequence
  SiRNA target sequence
cctttatttactcagtaggacgag

SEQ ID NO: 218125 - DNA, 24 bp, Artificial sequence
  SiRNA target sequence
ctttatttactcagtaggacgagt

SEQ ID NO: 218126 - DNA, 24 bp, Artificial sequence
  SiRNA target sequence
tttatttactcagtaggacgagtg

SEQ ID NO: 218127 - DNA, 24 bp, Artificial sequence
  SiRNA target sequence
ttatttactcagtaggacgagtgt

SEQ ID NO: 218128 - DNA, 24 bp, Artificial sequence
  SiRNA target sequence
tatttactcagtaggacgagtgtt

SEQ ID NO: 218129 - DNA, 24 bp, Artificial sequence
  SiRNA target sequence
atttactcagtaggacgagtgtta

SEQ ID NO: 218130 - DNA, 24 bp, Artificial sequence
  SiRNA target sequence
tttactcagtaggacgagtgttaa

SEQ ID NO: 218131 - DNA, 24 bp, Artificial sequence
  SiRNA target sequence
ttactcagtaggacgagtgttaaa

SEQ ID NO: 218132 - DNA, 24 bp, Artificial sequence
  SiRNA target sequence
tactcagtaggacgagtgttaaaa

SEQ ID NO: 218133 - DNA, 24 bp, Artificial sequence
  SiRNA target sequence
actcagtaggacgagtgttaaaag

SEQ ID NO: 218134 - DNA, 24 bp, Artificial sequence
  SiRNA target sequence
ctcagtaggacgagtgttaaaaga

SEQ ID NO: 218135 - DNA, 24 bp, Artificial sequence
  SiRNA target sequence
tcagtaggacgagtgttaaaagat

SEQ ID NO: 218136 - DNA, 24 bp, Artificial sequence
  SiRNA target sequence
cagtaggacgagtgttaaaagatg

SEQ ID NO: 218137 - DNA, 24 bp, Artificial sequence
  SiRNA target sequence
agtaggacgagtgttaaaagatgc

SEQ ID NO: 218138 - DNA, 24 bp, Artificial sequence
  SiRNA target sequence
gtaggacgagtgttaaaagatgca

SEQ ID NO: 218139 - DNA, 24 bp, Artificial sequence
  SiRNA target sequence
taggacgagtgttaaaagatgcag

SEQ ID NO: 218140 - DNA, 24 bp, Artificial sequence
  SiRNA target sequence
aggacgagtgttaaaagatgcagc

SEQ ID NO: 218141 - DNA, 24 bp, Artificial sequence
  SiRNA target sequence
ggacgagtgttaaaagatgcagca

SEQ ID NO: 218142 - DNA, 24 bp, Artificial sequence
  SiRNA target sequence
gacgagtgttaaaagatgcagcag

SEQ ID NO: 218143 - DNA, 24 bp, Artificial sequence
  SiRNA target sequence
acgagtgttaaaagatgcagcagt

SEQ ID NO: 218144 - DNA, 24 bp, Artificial sequence
  SiRNA target sequence
cgagtgttaaaagatgcagcagtt

SEQ ID NO: 218145 - DNA, 24 bp, Artificial sequence
  SiRNA target sequence
gagtgttaaaagatgcagcagttc

SEQ ID NO: 218146 - DNA, 24 bp, Artificial sequence
  SiRNA target sequence
agtgttaaaagatgcagcagttct

SEQ ID NO: 218147 - DNA, 24 bp, Artificial sequence
  SiRNA target sequence
gtgttaaaagatgcagcagttctt

SEQ ID NO: 218148 - DNA, 24 bp, Artificial sequence
  SiRNA target sequence
tgttaaaagatgcagcagttctta

SEQ ID NO: 218149 - DNA, 24 bp, Artificial sequence
  SiRNA target sequence
gttaaaagatgcagcagttcttag

SEQ ID NO: 218150 - DNA, 24 bp, Artificial sequence
  SiRNA target sequence
ttaaaagatgcagcagttcttagt

SEQ ID NO: 218151 - DNA, 24 bp, Artificial sequence
  SiRNA target sequence
taaaagatgcagcagttcttagta

SEQ ID NO: 218152 - DNA, 24 bp, Artificial sequence
  SiRNA target sequence
aaaagatgcagcagttcttagtag

SEQ ID NO: 218153 - DNA, 24 bp, Artificial sequence
  SiRNA target sequence
aaagatgcagcagttcttagtaga

SEQ ID NO: 218154 - DNA, 24 bp, Artificial sequence
  SiRNA target sequence
aagatgcagcagttcttagtagac

SEQ ID NO: 218155 - DNA, 24 bp, Artificial sequence
  SiRNA target sequence
agatgcagcagttcttagtagaca

SEQ ID NO: 218156 - DNA, 24 bp, Artificial sequence
  SiRNA target sequence
gatgcagcagttcttagtagacag

SEQ ID NO: 218157 - DNA, 24 bp, Artificial sequence
  SiRNA target sequence
atgcagcagttcttagtagacaga

SEQ ID NO: 218158 - DNA, 24 bp, Artificial sequence
  SiRNA target sequence
tgcagcagttcttagtagacagat

SEQ ID NO: 218159 - DNA, 24 bp, Artificial sequence
  SiRNA target sequence
gcagcagttcttagtagacagatg

SEQ ID NO: 218160 - DNA, 24 bp, Artificial sequence
  SiRNA target sequence
cagcagttcttagtagacagatgc

SEQ ID NO: 218161 - DNA, 24 bp, Artificial sequence
  SiRNA target sequence
agcagttcttagtagacagatgcc

SEQ ID NO: 218162 - DNA, 24 bp, Artificial sequence
  SiRNA target sequence
gcagttcttagtagacagatgcca

SEQ ID NO: 218163 - DNA, 24 bp, Artificial sequence
  SiRNA target sequence
cagttcttagtagacagatgccac

SEQ ID NO: 218164 - DNA, 24 bp, Artificial sequence
  SiRNA target sequence
agttcttagtagacagatgccact

SEQ ID NO: 218165 - DNA, 24 bp, Artificial sequence
  SiRNA target sequence
gttcttagtagacagatgccacta

SEQ ID NO: 218166 - DNA, 24 bp, Artificial sequence
  SiRNA target sequence
ttcttagtagacagatgccactat

SEQ ID NO: 218167 - DNA, 24 bp, Artificial sequence
  SiRNA target sequence
tcttagtagacagatgccactatc

SEQ ID NO: 218168 - DNA, 24 bp, Artificial sequence
  SiRNA target sequence
cttagtagacagatgccactatcc

SEQ ID NO: 218169 - DNA, 24 bp, Artificial sequence
  SiRNA target sequence
ttagtagacagatgccactatcca

SEQ ID NO: 218170 - DNA, 24 bp, Artificial sequence
  SiRNA target sequence
tagtagacagatgccactatccat

SEQ ID NO: 218171 - DNA, 24 bp, Artificial sequence
  SiRNA target sequence
agtagacagatgccactatccatt

SEQ ID NO: 218172 - DNA, 24 bp, Artificial sequence
  SiRNA target sequence
gtagacagatgccactatccatta

SEQ ID NO: 218173 - DNA, 24 bp, Artificial sequence
  SiRNA target sequence
tagacagatgccactatccattaa

SEQ ID NO: 218174 - DNA, 24 bp, Artificial sequence
  SiRNA target sequence
agacagatgccactatccattaat

SEQ ID NO: 218175 - DNA, 24 bp, Artificial sequence
  SiRNA target sequence
gacagatgccactatccattaatt

SEQ ID NO: 218176 - DNA, 24 bp, Artificial sequence
  SiRNA target sequence
acagatgccactatccattaattg

SEQ ID NO: 218177 - DNA, 24 bp, Artificial sequence
  SiRNA target sequence
cagatgccactatccattaattgt

SEQ ID NO: 218178 - DNA, 24 bp, Artificial sequence
  SiRNA target sequence
agatgccactatccattaattgtc

SEQ ID NO: 218179 - DNA, 24 bp, Artificial sequence
  SiRNA target sequence
gatgccactatccattaattgtct

SEQ ID NO: 218180 - DNA, 24 bp, Artificial sequence
  SiRNA target sequence
atgccactatccattaattgtctt

SEQ ID NO: 218181 - DNA, 24 bp, Artificial sequence
  SiRNA target sequence
tgccactatccattaattgtctta

SEQ ID NO: 218182 - DNA, 24 bp, Artificial sequence
  SiRNA target sequence
gccactatccattaattgtcttaa

SEQ ID NO: 218183 - DNA, 24 bp, Artificial sequence
  SiRNA target sequence
ccactatccattaattgtcttaaa

SEQ ID NO: 218184 - DNA, 24 bp, Artificial sequence
  SiRNA target sequence
cactatccattaattgtcttaaaa

SEQ ID NO: 218185 - DNA, 24 bp, Artificial sequence
  SiRNA target sequence
actatccattaattgtcttaaaag

SEQ ID NO: 218186 - DNA, 24 bp, Artificial sequence
  SiRNA target sequence
ctatccattaattgtcttaaaagc

SEQ ID NO: 218187 - DNA, 24 bp, Artificial sequence
  SiRNA target sequence
tatccattaattgtcttaaaagct

SEQ ID NO: 218188 - DNA, 24 bp, Artificial sequence
  SiRNA target sequence
atccattaattgtcttaaaagctt

SEQ ID NO: 218189 - DNA, 24 bp, Artificial sequence
  SiRNA target sequence
tccattaattgtcttaaaagcttt

SEQ ID NO: 218190 - DNA, 24 bp, Artificial sequence
  SiRNA target sequence
ccattaattgtcttaaaagctttg

SEQ ID NO: 218191 - DNA, 24 bp, Artificial sequence
  SiRNA target sequence
cattaattgtcttaaaagctttgt

SEQ ID NO: 218192 - DNA, 24 bp, Artificial sequence
  SiRNA target sequence
attaattgtcttaaaagctttgta

SEQ ID NO: 218193 - DNA, 24 bp, Artificial sequence
  SiRNA target sequence
ttaattgtcttaaaagctttgtaa

SEQ ID NO: 218194 - DNA, 24 bp, Artificial sequence
  SiRNA target sequence
taattgtcttaaaagctttgtaat

SEQ ID NO: 218195 - DNA, 24 bp, Artificial sequence
  SiRNA target sequence
aattgtcttaaaagctttgtaatt

SEQ ID NO: 218196 - DNA, 24 bp, Artificial sequence
  SiRNA target sequence
attgtcttaaaagctttgtaattt

SEQ ID NO: 218197 - DNA, 24 bp, Artificial sequence
  SiRNA target sequence
ttgtcttaaaagctttgtaatttt

SEQ ID NO: 218198 - DNA, 24 bp, Artificial sequence
  SiRNA target sequence
tgtcttaaaagctttgtaatttta

SEQ ID NO: 218199 - DNA, 24 bp, Artificial sequence
  SiRNA target sequence
gtcttaaaagctttgtaattttac

SEQ ID NO: 218200 - DNA, 24 bp, Artificial sequence
  SiRNA target sequence
tcttaaaagctttgtaattttacc

SEQ ID NO: 218201 - DNA, 24 bp, Artificial sequence
  SiRNA target sequence
cttaaaagctttgtaattttacca

SEQ ID NO: 218202 - DNA, 24 bp, Artificial sequence
  SiRNA target sequence
ttaaaagctttgtaattttaccag

SEQ ID NO: 218203 - DNA, 24 bp, Artificial sequence
  SiRNA target sequence
taaaagctttgtaattttaccagt

SEQ ID NO: 218204 - DNA, 24 bp, Artificial sequence
  SiRNA target sequence
aaaagctttgtaattttaccagtt

SEQ ID NO: 218205 - DNA, 24 bp, Artificial sequence
  SiRNA target sequence
aaagctttgtaattttaccagtta

SEQ ID NO: 218206 - DNA, 24 bp, Artificial sequence
  SiRNA target sequence
aagctttgtaattttaccagttac

SEQ ID NO: 218207 - DNA, 24 bp, Artificial sequence
  SiRNA target sequence
agctttgtaattttaccagttact

SEQ ID NO: 218208 - DNA, 24 bp, Artificial sequence
  SiRNA target sequence
gctttgtaattttaccagttactc

SEQ ID NO: 218209 - DNA, 24 bp, Artificial sequence
  SiRNA target sequence
ctttgtaattttaccagttactct

SEQ ID NO: 218210 - DNA, 24 bp, Artificial sequence
  SiRNA target sequence
tttgtaattttaccagttactctt

SEQ ID NO: 218211 - DNA, 24 bp, Artificial sequence
  SiRNA target sequence
ttgtaattttaccagttactcttg

SEQ ID NO: 218212 - DNA, 24 bp, Artificial sequence
  SiRNA target sequence
tgtaattttaccagttactcttgt

SEQ ID NO: 218213 - DNA, 24 bp, Artificial sequence
  SiRNA target sequence
gtaattttaccagttactcttgtt

SEQ ID NO: 218214 - DNA, 24 bp, Artificial sequence
  SiRNA target sequence
taattttaccagttactcttgttt

SEQ ID NO: 218215 - DNA, 24 bp, Artificial sequence
  SiRNA target sequence
aattttaccagttactcttgtttg

SEQ ID NO: 218216 - DNA, 24 bp, Artificial sequence
  SiRNA target sequence
attttaccagttactcttgtttgt

SEQ ID NO: 218217 - DNA, 24 bp, Artificial sequence
  SiRNA target sequence
ttttaccagttactcttgtttgtg

SEQ ID NO: 218218 - DNA, 24 bp, Artificial sequence
  SiRNA target sequence
tttaccagttactcttgtttgtgt

SEQ ID NO: 218219 - DNA, 24 bp, Artificial sequence
  SiRNA target sequence
ttaccagttactcttgtttgtgta

SEQ ID NO: 218220 - DNA, 24 bp, Artificial sequence
  SiRNA target sequence
taccagttactcttgtttgtgtag

SEQ ID NO: 218221 - DNA, 24 bp, Artificial sequence
  SiRNA target sequence
accagttactcttgtttgtgtagg

SEQ ID NO: 218222 - DNA, 24 bp, Artificial sequence
  SiRNA target sequence
ccagttactcttgtttgtgtagga

SEQ ID NO: 218223 - DNA, 24 bp, Artificial sequence
  SiRNA target sequence
cagttactcttgtttgtgtaggat

SEQ ID NO: 218224 - DNA, 24 bp, Artificial sequence
  SiRNA target sequence
agttactcttgtttgtgtaggatt

SEQ ID NO: 218225 - DNA, 24 bp, Artificial sequence
  SiRNA target sequence
gttactcttgtttgtgtaggatta

SEQ ID NO: 218226 - DNA, 24 bp, Artificial sequence
  SiRNA target sequence
ttactcttgtttgtgtaggattaa

SEQ ID NO: 218227 - DNA, 24 bp, Artificial sequence
  SiRNA target sequence
tactcttgtttgtgtaggattaat

SEQ ID NO: 218228 - DNA, 24 bp, Artificial sequence
  SiRNA target sequence
actcttgtttgtgtaggattaatt

SEQ ID NO: 218229 - DNA, 24 bp, Artificial sequence
  SiRNA target sequence
ctcttgtttgtgtaggattaattc

SEQ ID NO: 218230 - DNA, 24 bp, Artificial sequence
  SiRNA target sequence
tcttgtttgtgtaggattaattca

SEQ ID NO: 218231 - DNA, 24 bp, Artificial sequence
  SiRNA target sequence
cttgtttgtgtaggattaattcag

SEQ ID NO: 218232 - DNA, 24 bp, Artificial sequence
  SiRNA target sequence
ttgtttgtgtaggattaattcaga

SEQ ID NO: 218233 - DNA, 24 bp, Artificial sequence
  SiRNA target sequence
tgtttgtgtaggattaattcagaa

SEQ ID NO: 218234 - DNA, 24 bp, Artificial sequence
  SiRNA target sequence
gtttgtgtaggattaattcagaag

SEQ ID NO: 218235 - DNA, 24 bp, Artificial sequence
  SiRNA target sequence
tttgtgtaggattaattcagaagt

SEQ ID NO: 218236 - DNA, 24 bp, Artificial sequence
  SiRNA target sequence
ttgtgtaggattaattcagaagtc

SEQ ID NO: 218237 - DNA, 24 bp, Artificial sequence
  SiRNA target sequence
tgtgtaggattaattcagaagtct

SEQ ID NO: 218238 - DNA, 24 bp, Artificial sequence
  SiRNA target sequence
gtgtaggattaattcagaagtcta

SEQ ID NO: 218239 - DNA, 24 bp, Artificial sequence
  SiRNA target sequence
tgtaggattaattcagaagtctac

SEQ ID NO: 218240 - DNA, 24 bp, Artificial sequence
  SiRNA target sequence
gtaggattaattcagaagtctaca

SEQ ID NO: 218241 - DNA, 24 bp, Artificial sequence
  SiRNA target sequence
taggattaattcagaagtctacac

SEQ ID NO: 218242 - DNA, 24 bp, Artificial sequence
  SiRNA target sequence
aggattaattcagaagtctacact

SEQ ID NO: 218243 - DNA, 24 bp, Artificial sequence
  SiRNA target sequence
ggattaattcagaagtctacactc

SEQ ID NO: 218244 - DNA, 24 bp, Artificial sequence
  SiRNA target sequence
gattaattcagaagtctacactct

SEQ ID NO: 218245 - DNA, 24 bp, Artificial sequence
  SiRNA target sequence
attaattcagaagtctacactctc

SEQ ID NO: 218246 - DNA, 24 bp, Artificial sequence
  SiRNA target sequence
ttaattcagaagtctacactctct

SEQ ID NO: 218247 - DNA, 24 bp, Artificial sequence
  SiRNA target sequence
taattcagaagtctacactctctt

SEQ ID NO: 218248 - DNA, 24 bp, Artificial sequence
  SiRNA target sequence
aattcagaagtctacactctctta

SEQ ID NO: 218249 - DNA, 24 bp, Artificial sequence
  SiRNA target sequence
attcagaagtctacactctcttat

SEQ ID NO: 218250 - DNA, 24 bp, Artificial sequence
  SiRNA target sequence
ttcagaagtctacactctcttatt

SEQ ID NO: 218251 - DNA, 24 bp, Artificial sequence
  SiRNA target sequence
tcagaagtctacactctcttattc

SEQ ID NO: 218252 - DNA, 24 bp, Artificial sequence
  SiRNA target sequence
cagaagtctacactctcttattct

SEQ ID NO: 218253 - DNA, 24 bp, Artificial sequence
  SiRNA target sequence
agaagtctacactctcttattctt

SEQ ID NO: 218254 - DNA, 24 bp, Artificial sequence
  SiRNA target sequence
gaagtctacactctcttattcttt

SEQ ID NO: 218255 - DNA, 24 bp, Artificial sequence
  SiRNA target sequence
aagtctacactctcttattctttt

SEQ ID NO: 218256 - DNA, 24 bp, Artificial sequence
  SiRNA target sequence
agtctacactctcttattctttta

SEQ ID NO: 218257 - DNA, 24 bp, Artificial sequence
  SiRNA target sequence
gtctacactctcttattcttttac

SEQ ID NO: 218258 - DNA, 24 bp, Artificial sequence
  SiRNA target sequence
tctacactctcttattcttttaca

SEQ ID NO: 218259 - DNA, 24 bp, Artificial sequence
  SiRNA target sequence
ctacactctcttattcttttacaa

SEQ ID NO: 218260 - DNA, 24 bp, Artificial sequence
  SiRNA target sequence
tacactctcttattcttttacaaa

SEQ ID NO: 218261 - DNA, 24 bp, Artificial sequence
  SiRNA target sequence
acactctcttattcttttacaaaa

SEQ ID NO: 218262 - DNA, 24 bp, Artificial sequence
  SiRNA target sequence
cactctcttattcttttacaaaaa

SEQ ID NO: 218263 - DNA, 24 bp, Artificial sequence
  SiRNA target sequence
actctcttattcttttacaaaaat

SEQ ID NO: 218264 - DNA, 24 bp, Artificial sequence
  SiRNA target sequence
ctctcttattcttttacaaaaata

SEQ ID NO: 218265 - DNA, 24 bp, Artificial sequence
  SiRNA target sequence
tctcttattcttttacaaaaatat

SEQ ID NO: 218266 - DNA, 24 bp, Artificial sequence
  SiRNA target sequence
ctcttattcttttacaaaaatatt

SEQ ID NO: 218267 - DNA, 24 bp, Artificial sequence
  SiRNA target sequence
tcttattcttttacaaaaatattt

SEQ ID NO: 218268 - DNA, 24 bp, Artificial sequence
  SiRNA target sequence
cttattcttttacaaaaatatttg

SEQ ID NO: 218269 - DNA, 24 bp, Artificial sequence
  SiRNA target sequence
ttattcttttacaaaaatatttga

SEQ ID NO: 218270 - DNA, 24 bp, Artificial sequence
  SiRNA target sequence
tattcttttacaaaaatatttgat

SEQ ID NO: 218271 - DNA, 24 bp, Artificial sequence
  SiRNA target sequence
attcttttacaaaaatatttgatg

SEQ ID NO: 218272 - DNA, 24 bp, Artificial sequence
  SiRNA target sequence
ttcttttacaaaaatatttgatgg

SEQ ID NO: 218273 - DNA, 24 bp, Artificial sequence
  SiRNA target sequence
tcttttacaaaaatatttgatggt

SEQ ID NO: 218274 - DNA, 24 bp, Artificial sequence
  SiRNA target sequence
cttttacaaaaatatttgatggtg

SEQ ID NO: 218275 - DNA, 24 bp, Artificial sequence
  SiRNA target sequence
ttttacaaaaatatttgatggtgc

SEQ ID NO: 218276 - DNA, 24 bp, Artificial sequence
  SiRNA target sequence
tttacaaaaatatttgatggtgca

SEQ ID NO: 218277 - DNA, 24 bp, Artificial sequence
  SiRNA target sequence
ttacaaaaatatttgatggtgcat

SEQ ID NO: 218278 - DNA, 24 bp, Artificial sequence
  SiRNA target sequence
tacaaaaatatttgatggtgcatt

SEQ ID NO: 218279 - DNA, 24 bp, Artificial sequence
  SiRNA target sequence
acaaaaatatttgatggtgcattg

SEQ ID NO: 218280 - DNA, 24 bp, Artificial sequence
  SiRNA target sequence
caaaaatatttgatggtgcattgt

SEQ ID NO: 218281 - DNA, 24 bp, Artificial sequence
  SiRNA target sequence
aaaaatatttgatggtgcattgtt

SEQ ID NO: 218282 - DNA, 24 bp, Artificial sequence
  SiRNA target sequence
aaaatatttgatggtgcattgtta

SEQ ID NO: 218283 - DNA, 24 bp, Artificial sequence
  SiRNA target sequence
aaatatttgatggtgcattgttaa

SEQ ID NO: 218284 - DNA, 24 bp, Artificial sequence
  SiRNA target sequence
aatatttgatggtgcattgttaat

SEQ ID NO: 218285 - DNA, 24 bp, Artificial sequence
  SiRNA target sequence
atatttgatggtgcattgttaata

SEQ ID NO: 218286 - DNA, 24 bp, Artificial sequence
  SiRNA target sequence
tatttgatggtgcattgttaatat

SEQ ID NO: 218287 - DNA, 24 bp, Artificial sequence
  SiRNA target sequence
atttgatggtgcattgttaatatt

SEQ ID NO: 218288 - DNA, 24 bp, Artificial sequence
  SiRNA target sequence
tttgatggtgcattgttaatattt

SEQ ID NO: 218289 - DNA, 24 bp, Artificial sequence
  SiRNA target sequence
ttgatggtgcattgttaatatttg

SEQ ID NO: 218290 - DNA, 24 bp, Artificial sequence
  SiRNA target sequence
tgatggtgcattgttaatatttgc

SEQ ID NO: 218291 - DNA, 24 bp, Artificial sequence
  SiRNA target sequence
gatggtgcattgttaatatttgct

SEQ ID NO: 218292 - DNA, 24 bp, Artificial sequence
  SiRNA target sequence
atggtgcattgttaatatttgctt

SEQ ID NO: 218293 - DNA, 24 bp, Artificial sequence
  SiRNA target sequence
tggtgcattgttaatatttgcttt

SEQ ID NO: 218294 - DNA, 24 bp, Artificial sequence
  SiRNA target sequence
ggtgcattgttaatatttgctttt

SEQ ID NO: 218295 - DNA, 24 bp, Artificial sequence
  SiRNA target sequence
gtgcattgttaatatttgcttttc

SEQ ID NO: 218296 - DNA, 24 bp, Artificial sequence
  SiRNA target sequence
tgcattgttaatatttgcttttct

SEQ ID NO: 218297 - DNA, 24 bp, Artificial sequence
  SiRNA target sequence
gcattgttaatatttgcttttctt

SEQ ID NO: 218298 - DNA, 24 bp, Artificial sequence
  SiRNA target sequence
cattgttaatatttgcttttcttt

SEQ ID NO: 218299 - DNA, 24 bp, Artificial sequence
  SiRNA target sequence
attgttaatatttgcttttcttta

SEQ ID NO: 218300 - DNA, 24 bp, Artificial sequence
  SiRNA target sequence
ttgttaatatttgcttttctttat

SEQ ID NO: 218301 - DNA, 24 bp, Artificial sequence
  SiRNA target sequence
tgttaatatttgcttttctttata

SEQ ID NO: 218302 - DNA, 24 bp, Artificial sequence
  SiRNA target sequence
gttaatatttgcttttctttatat

SEQ ID NO: 218303 - DNA, 24 bp, Artificial sequence
  SiRNA target sequence
ttaatatttgcttttctttatatc

SEQ ID NO: 218304 - DNA, 24 bp, Artificial sequence
  SiRNA target sequence
taatatttgcttttctttatatca

SEQ ID NO: 218305 - DNA, 24 bp, Artificial sequence
  SiRNA target sequence
aatatttgcttttctttatatcat

SEQ ID NO: 218306 - DNA, 24 bp, Artificial sequence
  SiRNA target sequence
atatttgcttttctttatatcatt

SEQ ID NO: 218307 - DNA, 24 bp, Artificial sequence
  SiRNA target sequence
tatttgcttttctttatatcattc

SEQ ID NO: 218308 - DNA, 24 bp, Artificial sequence
  SiRNA target sequence
atttgcttttctttatatcattct

SEQ ID NO: 218309 - DNA, 24 bp, Artificial sequence
  SiRNA target sequence
tttgcttttctttatatcattctt

SEQ ID NO: 218310 - DNA, 24 bp, Artificial sequence
  SiRNA target sequence
ttgcttttctttatatcattcttg

SEQ ID NO: 218311 - DNA, 24 bp, Artificial sequence
  SiRNA target sequence
tgcttttctttatatcattcttgg

SEQ ID NO: 218312 - DNA, 24 bp, Artificial sequence
  SiRNA target sequence
gcttttctttatatcattcttggt

SEQ ID NO: 218313 - DNA, 24 bp, Artificial sequence
  SiRNA target sequence
cttttctttatatcattcttggtc

SEQ ID NO: 218314 - DNA, 24 bp, Artificial sequence
  SiRNA target sequence
ttttctttatatcattcttggtct

SEQ ID NO: 218315 - DNA, 24 bp, Artificial sequence
  SiRNA target sequence
tttctttatatcattcttggtcta

SEQ ID NO: 218316 - DNA, 24 bp, Artificial sequence
  SiRNA target sequence
ttctttatatcattcttggtctag

SEQ ID NO: 218317 - DNA, 24 bp, Artificial sequence
  SiRNA target sequence
tctttatatcattcttggtctagt

SEQ ID NO: 218318 - DNA, 24 bp, Artificial sequence
  SiRNA target sequence
ctttatatcattcttggtctagtt

SEQ ID NO: 218319 - DNA, 24 bp, Artificial sequence
  SiRNA target sequence
tttatatcattcttggtctagttc

SEQ ID NO: 218320 - DNA, 24 bp, Artificial sequence
  SiRNA target sequence
ttatatcattcttggtctagttct

SEQ ID NO: 218321 - DNA, 24 bp, Artificial sequence
  SiRNA target sequence
tatatcattcttggtctagttctt

SEQ ID NO: 218322 - DNA, 24 bp, Artificial sequence
  SiRNA target sequence
atatcattcttggtctagttcttc

SEQ ID NO: 218323 - DNA, 24 bp, Artificial sequence
  SiRNA target sequence
tatcattcttggtctagttcttct

SEQ ID NO: 218324 - DNA, 24 bp, Artificial sequence
  SiRNA target sequence
atcattcttggtctagttcttctt

SEQ ID NO: 218325 - DNA, 24 bp, Artificial sequence
  SiRNA target sequence
tcattcttggtctagttcttcttc

SEQ ID NO: 218326 - DNA, 24 bp, Artificial sequence
  SiRNA target sequence
cattcttggtctagttcttcttcc

SEQ ID NO: 218327 - DNA, 24 bp, Artificial sequence
  SiRNA target sequence
attcttggtctagttcttcttcca

SEQ ID NO: 218328 - DNA, 24 bp, Artificial sequence
  SiRNA target sequence
ttcttggtctagttcttcttccat

SEQ ID NO: 218329 - DNA, 24 bp, Artificial sequence
  SiRNA target sequence
tcttggtctagttcttcttccata

SEQ ID NO: 218330 - DNA, 24 bp, Artificial sequence
  SiRNA target sequence
cttggtctagttcttcttccatat

SEQ ID NO: 218331 - DNA, 24 bp, Artificial sequence
  SiRNA target sequence
ttggtctagttcttcttccatatt

SEQ ID NO: 218332 - DNA, 24 bp, Artificial sequence
  SiRNA target sequence
tggtctagttcttcttccatattc

SEQ ID NO: 218333 - DNA, 24 bp, Artificial sequence
  SiRNA target sequence
ggtctagttcttcttccatattct

SEQ ID NO: 218334 - DNA, 24 bp, Artificial sequence
  SiRNA target sequence
gtctagttcttcttccatattctc

SEQ ID NO: 218335 - DNA, 24 bp, Artificial sequence
  SiRNA target sequence
tctagttcttcttccatattctca

SEQ ID NO: 218336 - DNA, 24 bp, Artificial sequence
  SiRNA target sequence
ctagttcttcttccatattctcat

SEQ ID NO: 218337 - DNA, 24 bp, Artificial sequence
  SiRNA target sequence
tagttcttcttccatattctcatc

SEQ ID NO: 218338 - DNA, 24 bp, Artificial sequence
  SiRNA target sequence
agttcttcttccatattctcatct

SEQ ID NO: 218339 - DNA, 24 bp, Artificial sequence
  SiRNA target sequence
gttcttcttccatattctcatctt

SEQ ID NO: 218340 - DNA, 24 bp, Artificial sequence
  SiRNA target sequence
ttcttcttccatattctcatcttt

SEQ ID NO: 218341 - DNA, 24 bp, Artificial sequence
  SiRNA target sequence
tcttcttccatattctcatctttt

SEQ ID NO: 218342 - DNA, 24 bp, Artificial sequence
  SiRNA target sequence
cttcttccatattctcatcttttc

SEQ ID NO: 218343 - DNA, 24 bp, Artificial sequence
  SiRNA target sequence
ttcttccatattctcatcttttcc

SEQ ID NO: 218344 - DNA, 24 bp, Artificial sequence
  SiRNA target sequence
tcttccatattctcatcttttcca

SEQ ID NO: 218345 - DNA, 24 bp, Artificial sequence
  SiRNA target sequence
cttccatattctcatcttttccag

SEQ ID NO: 218346 - DNA, 24 bp, Artificial sequence
  SiRNA target sequence
ttccatattctcatcttttccagc

SEQ ID NO: 218347 - DNA, 24 bp, Artificial sequence
  SiRNA target sequence
tccatattctcatcttttccagct

SEQ ID NO: 218348 - DNA, 24 bp, Artificial sequence
  SiRNA target sequence
ccatattctcatcttttccagctt

SEQ ID NO: 218349 - DNA, 24 bp, Artificial sequence
  SiRNA target sequence
catattctcatcttttccagcttg

SEQ ID NO: 218350 - DNA, 24 bp, Artificial sequence
  SiRNA target sequence
atattctcatcttttccagcttga

SEQ ID NO: 218351 - DNA, 24 bp, Artificial sequence
  SiRNA target sequence
tattctcatcttttccagcttgat

SEQ ID NO: 218352 - DNA, 24 bp, Artificial sequence
  SiRNA target sequence
attctcatcttttccagcttgata

SEQ ID NO: 218353 - DNA, 24 bp, Artificial sequence
  SiRNA target sequence
ttctcatcttttccagcttgatag

SEQ ID NO: 218354 - DNA, 24 bp, Artificial sequence
  SiRNA target sequence
tctcatcttttccagcttgatagt

SEQ ID NO: 218355 - DNA, 24 bp, Artificial sequence
  SiRNA target sequence
ctcatcttttccagcttgatagtt

SEQ ID NO: 218356 - DNA, 24 bp, Artificial sequence
  SiRNA target sequence
tcatcttttccagcttgatagtta

SEQ ID NO: 218357 - DNA, 24 bp, Artificial sequence
  SiRNA target sequence
catcttttccagcttgatagttat

SEQ ID NO: 218358 - DNA, 24 bp, Artificial sequence
  SiRNA target sequence
atcttttccagcttgatagttatt

SEQ ID NO: 218359 - DNA, 24 bp, Artificial sequence
  SiRNA target sequence
tcttttccagcttgatagttattt

SEQ ID NO: 218360 - DNA, 24 bp, Artificial sequence
  SiRNA target sequence
cttttccagcttgatagttatttt

SEQ ID NO: 218361 - DNA, 24 bp, Artificial sequence
  SiRNA target sequence
ttttccagcttgatagttattttt

SEQ ID NO: 218362 - DNA, 24 bp, Artificial sequence
  SiRNA target sequence
tttccagcttgatagttatttttt

SEQ ID NO: 218363 - DNA, 24 bp, Artificial sequence
  SiRNA target sequence
ttccagcttgatagttattttttt

SEQ ID NO: 218364 - DNA, 24 bp, Artificial sequence
  SiRNA target sequence
tccagcttgatagttattttttta

SEQ ID NO: 218365 - DNA, 24 bp, Artificial sequence
  SiRNA target sequence
ccagcttgatagttatttttttag

SEQ ID NO: 218366 - DNA, 24 bp, Artificial sequence
  SiRNA target sequence
cagcttgatagttatttttttaga

SEQ ID NO: 218367 - DNA, 24 bp, Artificial sequence
  SiRNA target sequence
agcttgatagttatttttttagag

SEQ ID NO: 218368 - DNA, 24 bp, Artificial sequence
  SiRNA target sequence
gcttgatagttatttttttagaga

SEQ ID NO: 218369 - DNA, 24 bp, Artificial sequence
  SiRNA target sequence
cttgatagttatttttttagagac

SEQ ID NO: 218370 - DNA, 24 bp, Artificial sequence
  SiRNA target sequence
ttgatagttatttttttagagacc

SEQ ID NO: 218371 - DNA, 24 bp, Artificial sequence
  SiRNA target sequence
tgatagttatttttttagagacct

SEQ ID NO: 218372 - DNA, 24 bp, Artificial sequence
  SiRNA target sequence
gatagttatttttttagagacctt

SEQ ID NO: 218373 - DNA, 24 bp, Artificial sequence
  SiRNA target sequence
atagttatttttttagagaccttt

SEQ ID NO: 218374 - DNA, 24 bp, Artificial sequence
  SiRNA target sequence
tagttatttttttagagacctttt

SEQ ID NO: 218375 - DNA, 24 bp, Artificial sequence
  SiRNA target sequence
agttatttttttagagaccttttt

SEQ ID NO: 218376 - DNA, 24 bp, Artificial sequence
  SiRNA target sequence
gttatttttttagagaccttttta

SEQ ID NO: 218377 - DNA, 24 bp, Artificial sequence
  SiRNA target sequence
ttatttttttagagacctttttag

SEQ ID NO: 218378 - DNA, 24 bp, Artificial sequence
  SiRNA target sequence
tatttttttagagacctttttagt

SEQ ID NO: 218379 - DNA, 24 bp, Artificial sequence
  SiRNA target sequence
atttttttagagacctttttagtg

SEQ ID NO: 218380 - DNA, 24 bp, Artificial sequence
  SiRNA target sequence
tttttttagagacctttttagtga

SEQ ID NO: 218381 - DNA, 24 bp, Artificial sequence
  SiRNA target sequence
ttttttagagacctttttagtgat

SEQ ID NO: 218382 - DNA, 24 bp, Artificial sequence
  SiRNA target sequence
tttttagagacctttttagtgatg

SEQ ID NO: 218383 - DNA, 24 bp, Artificial sequence
  SiRNA target sequence
ttttagagacctttttagtgatgg

SEQ ID NO: 218384 - DNA, 24 bp, Artificial sequence
  SiRNA target sequence
tttagagacctttttagtgatggg

SEQ ID NO: 218385 - DNA, 24 bp, Artificial sequence
  SiRNA target sequence
ttagagacctttttagtgatggga

SEQ ID NO: 218386 - DNA, 24 bp, Artificial sequence
  SiRNA target sequence
tagagacctttttagtgatgggaa

SEQ ID NO: 218387 - DNA, 24 bp, Artificial sequence
  SiRNA target sequence
agagacctttttagtgatgggaaa

SEQ ID NO: 218388 - DNA, 24 bp, Artificial sequence
  SiRNA target sequence
gagacctttttagtgatgggaaat

SEQ ID NO: 218389 - DNA, 24 bp, Artificial sequence
  SiRNA target sequence
agacctttttagtgatgggaaatg

SEQ ID NO: 218390 - DNA, 24 bp, Artificial sequence
  SiRNA target sequence
gacctttttagtgatgggaaatgt

SEQ ID NO: 218391 - DNA, 24 bp, Artificial sequence
  SiRNA target sequence
acctttttagtgatgggaaatgtg

SEQ ID NO: 218392 - DNA, 24 bp, Artificial sequence
  SiRNA target sequence
cctttttagtgatgggaaatgtgt

SEQ ID NO: 218393 - DNA, 24 bp, Artificial sequence
  SiRNA target sequence
ctttttagtgatgggaaatgtgtt

SEQ ID NO: 218394 - DNA, 24 bp, Artificial sequence
  SiRNA target sequence
tttttagtgatgggaaatgtgttg

SEQ ID NO: 218395 - DNA, 24 bp, Artificial sequence
  SiRNA target sequence
ttttagtgatgggaaatgtgttgt

SEQ ID NO: 218396 - DNA, 24 bp, Artificial sequence
  SiRNA target sequence
tttagtgatgggaaatgtgttgta

SEQ ID NO: 218397 - DNA, 24 bp, Artificial sequence
  SiRNA target sequence
ttagtgatgggaaatgtgttgtaa

SEQ ID NO: 218398 - DNA, 24 bp, Artificial sequence
  SiRNA target sequence
tagtgatgggaaatgtgttgtaag

SEQ ID NO: 218399 - DNA, 24 bp, Artificial sequence
  SiRNA target sequence
agtgatgggaaatgtgttgtaaga

SEQ ID NO: 218400 - DNA, 24 bp, Artificial sequence
  SiRNA target sequence
gtgatgggaaatgtgttgtaagag

SEQ ID NO: 218401 - DNA, 24 bp, Artificial sequence
  SiRNA target sequence
tgatgggaaatgtgttgtaagagg

SEQ ID NO: 218402 - DNA, 24 bp, Artificial sequence
  SiRNA target sequence
gatgggaaatgtgttgtaagaggc

SEQ ID NO: 218403 - DNA, 24 bp, Artificial sequence
  SiRNA target sequence
atgggaaatgtgttgtaagaggct

SEQ ID NO: 218404 - DNA, 24 bp, Artificial sequence
  SiRNA target sequence
tgggaaatgtgttgtaagaggcta

SEQ ID NO: 218405 - DNA, 24 bp, Artificial sequence
  SiRNA target sequence
gggaaatgtgttgtaagaggctat

SEQ ID NO: 218406 - DNA, 24 bp, Artificial sequence
  SiRNA target sequence
ggaaatgtgttgtaagaggctatg

SEQ ID NO: 218407 - DNA, 24 bp, Artificial sequence
  SiRNA target sequence
gaaatgtgttgtaagaggctatga

SEQ ID NO: 218408 - DNA, 24 bp, Artificial sequence
  SiRNA target sequence
aaatgtgttgtaagaggctatgat

SEQ ID NO: 218409 - DNA, 24 bp, Artificial sequence
  SiRNA target sequence
aatgtgttgtaagaggctatgatg

SEQ ID NO: 218410 - DNA, 24 bp, Artificial sequence
  SiRNA target sequence
atgtgttgtaagaggctatgatgc

SEQ ID NO: 218411 - DNA, 24 bp, Artificial sequence
  SiRNA target sequence
tgtgttgtaagaggctatgatgct

SEQ ID NO: 218412 - DNA, 24 bp, Artificial sequence
  SiRNA target sequence
gtgttgtaagaggctatgatgctt

SEQ ID NO: 218413 - DNA, 24 bp, Artificial sequence
  SiRNA target sequence
tgttgtaagaggctatgatgcttt

SEQ ID NO: 218414 - DNA, 24 bp, Artificial sequence
  SiRNA target sequence
gttgtaagaggctatgatgcttta

SEQ ID NO: 218415 - DNA, 24 bp, Artificial sequence
  SiRNA target sequence
ttgtaagaggctatgatgctttat

SEQ ID NO: 218416 - DNA, 24 bp, Artificial sequence
  SiRNA target sequence
tgtaagaggctatgatgctttatt

SEQ ID NO: 218417 - DNA, 24 bp, Artificial sequence
  SiRNA target sequence
gtaagaggctatgatgctttatta

SEQ ID NO: 218418 - DNA, 24 bp, Artificial sequence
  SiRNA target sequence
taagaggctatgatgctttattat

SEQ ID NO: 218419 - DNA, 24 bp, Artificial sequence
  SiRNA target sequence
aagaggctatgatgctttattatc

SEQ ID NO: 218420 - DNA, 24 bp, Artificial sequence
  SiRNA target sequence
agaggctatgatgctttattatct

SEQ ID NO: 218421 - DNA, 24 bp, Artificial sequence
  SiRNA target sequence
gaggctatgatgctttattatctt

SEQ ID NO: 218422 - DNA, 24 bp, Artificial sequence
  SiRNA target sequence
aggctatgatgctttattatcttt

SEQ ID NO: 218423 - DNA, 24 bp, Artificial sequence
  SiRNA target sequence
ggctatgatgctttattatctttg

SEQ ID NO: 218424 - DNA, 24 bp, Artificial sequence
  SiRNA target sequence
gctatgatgctttattatctttgg

SEQ ID NO: 218425 - DNA, 24 bp, Artificial sequence
  SiRNA target sequence
ctatgatgctttattatctttggc

SEQ ID NO: 218426 - DNA, 24 bp, Artificial sequence
  SiRNA target sequence
tatgatgctttattatctttggca

SEQ ID NO: 218427 - DNA, 24 bp, Artificial sequence
  SiRNA target sequence
atgatgctttattatctttggcac

SEQ ID NO: 218428 - DNA, 24 bp, Artificial sequence
  SiRNA target sequence
tgatgctttattatctttggcact

SEQ ID NO: 218429 - DNA, 24 bp, Artificial sequence
  SiRNA target sequence
gatgctttattatctttggcactg

SEQ ID NO: 218430 - DNA, 24 bp, Artificial sequence
  SiRNA target sequence
atgctttattatctttggcactgg

SEQ ID NO: 218431 - DNA, 24 bp, Artificial sequence
  SiRNA target sequence
tgctttattatctttggcactggt

SEQ ID NO: 218432 - DNA, 24 bp, Artificial sequence
  SiRNA target sequence
gctttattatctttggcactggtc

SEQ ID NO: 218433 - DNA, 24 bp, Artificial sequence
  SiRNA target sequence
ctttattatctttggcactggtct

SEQ ID NO: 218434 - DNA, 24 bp, Artificial sequence
  SiRNA target sequence
tttattatctttggcactggtctt

SEQ ID NO: 218435 - DNA, 24 bp, Artificial sequence
  SiRNA target sequence
ttattatctttggcactggtcttt

SEQ ID NO: 218436 - DNA, 24 bp, Artificial sequence
  SiRNA target sequence
tattatctttggcactggtcttta

SEQ ID NO: 218437 - DNA, 24 bp, Artificial sequence
  SiRNA target sequence
attatctttggcactggtctttaa

SEQ ID NO: 218438 - DNA, 24 bp, Artificial sequence
  SiRNA target sequence
ttatctttggcactggtctttaac

SEQ ID NO: 218439 - DNA, 24 bp, Artificial sequence
  SiRNA target sequence
tatctttggcactggtctttaacg

SEQ ID NO: 218440 - DNA, 24 bp, Artificial sequence
  SiRNA target sequence
atctttggcactggtctttaacga

SEQ ID NO: 218441 - DNA, 24 bp, Artificial sequence
  SiRNA target sequence
tctttggcactggtctttaacgaa

SEQ ID NO: 218442 - DNA, 24 bp, Artificial sequence
  SiRNA target sequence
ctttggcactggtctttaacgaat

SEQ ID NO: 218443 - DNA, 24 bp, Artificial sequence
  SiRNA target sequence
tttggcactggtctttaacgaatg

SEQ ID NO: 218444 - DNA, 24 bp, Artificial sequence
  SiRNA target sequence
ttggcactggtctttaacgaatgg

SEQ ID NO: 218445 - DNA, 24 bp, Artificial sequence
  SiRNA target sequence
tggcactggtctttaacgaatgga

SEQ ID NO: 218446 - DNA, 24 bp, Artificial sequence
  SiRNA target sequence
ggcactggtctttaacgaatggac

SEQ ID NO: 218447 - DNA, 24 bp, Artificial sequence
  SiRNA target sequence
gcactggtctttaacgaatggaca

SEQ ID NO: 218448 - DNA, 24 bp, Artificial sequence
  SiRNA target sequence
cactggtctttaacgaatggacat

SEQ ID NO: 218449 - DNA, 24 bp, Artificial sequence
  SiRNA target sequence
actggtctttaacgaatggacatc

SEQ ID NO: 218450 - DNA, 24 bp, Artificial sequence
  SiRNA target sequence
ctggtctttaacgaatggacatcc

SEQ ID NO: 218451 - DNA, 24 bp, Artificial sequence
  SiRNA target sequence
tggtctttaacgaatggacatcct

SEQ ID NO: 218452 - DNA, 24 bp, Artificial sequence
  SiRNA target sequence
ggtctttaacgaatggacatcctc

SEQ ID NO: 218453 - DNA, 24 bp, Artificial sequence
  SiRNA target sequence
gtctttaacgaatggacatcctct

SEQ ID NO: 218454 - DNA, 24 bp, Artificial sequence
  SiRNA target sequence
tctttaacgaatggacatcctctc

SEQ ID NO: 218455 - DNA, 24 bp, Artificial sequence
  SiRNA target sequence
ctttaacgaatggacatcctctct

SEQ ID NO: 218456 - DNA, 24 bp, Artificial sequence
  SiRNA target sequence
tttaacgaatggacatcctctcta

SEQ ID NO: 218457 - DNA, 24 bp, Artificial sequence
  SiRNA target sequence
ttaacgaatggacatcctctctag

SEQ ID NO: 218458 - DNA, 24 bp, Artificial sequence
  SiRNA target sequence
taacgaatggacatcctctctagt

SEQ ID NO: 218459 - DNA, 24 bp, Artificial sequence
  SiRNA target sequence
aacgaatggacatcctctctagtt

SEQ ID NO: 218460 - DNA, 24 bp, Artificial sequence
  SiRNA target sequence
acgaatggacatcctctctagttt

SEQ ID NO: 218461 - DNA, 24 bp, Artificial sequence
  SiRNA target sequence
cgaatggacatcctctctagttta

SEQ ID NO: 218462 - DNA, 24 bp, Artificial sequence
  SiRNA target sequence
gaatggacatcctctctagtttac

SEQ ID NO: 218463 - DNA, 24 bp, Artificial sequence
  SiRNA target sequence
aatggacatcctctctagtttaca

SEQ ID NO: 218464 - DNA, 24 bp, Artificial sequence
  SiRNA target sequence
atggacatcctctctagtttacat

SEQ ID NO: 218465 - DNA, 24 bp, Artificial sequence
  SiRNA target sequence
tggacatcctctctagtttacatt

SEQ ID NO: 218466 - DNA, 24 bp, Artificial sequence
  SiRNA target sequence
ggacatcctctctagtttacattg

SEQ ID NO: 218467 - DNA, 24 bp, Artificial sequence
  SiRNA target sequence
gacatcctctctagtttacattgt

SEQ ID NO: 218468 - DNA, 24 bp, Artificial sequence
  SiRNA target sequence
acatcctctctagtttacattgtt

SEQ ID NO: 218469 - DNA, 24 bp, Artificial sequence
  SiRNA target sequence
catcctctctagtttacattgttt

SEQ ID NO: 218470 - DNA, 24 bp, Artificial sequence
  SiRNA target sequence
atcctctctagtttacattgtttc

SEQ ID NO: 218471 - DNA, 24 bp, Artificial sequence
  SiRNA target sequence
tcctctctagtttacattgtttca

SEQ ID NO: 218472 - DNA, 24 bp, Artificial sequence
  SiRNA target sequence
cctctctagtttacattgtttcag

SEQ ID NO: 218473 - DNA, 24 bp, Artificial sequence
  SiRNA target sequence
ctctctagtttacattgtttcaga

SEQ ID NO: 218474 - DNA, 24 bp, Artificial sequence
  SiRNA target sequence
tctctagtttacattgtttcagaa

SEQ ID NO: 218475 - DNA, 24 bp, Artificial sequence
  SiRNA target sequence
ctctagtttacattgtttcagaaa

SEQ ID NO: 218476 - DNA, 24 bp, Artificial sequence
  SiRNA target sequence
tctagtttacattgtttcagaaat

SEQ ID NO: 218477 - DNA, 24 bp, Artificial sequence
  SiRNA target sequence
ctagtttacattgtttcagaaatg

SEQ ID NO: 218478 - DNA, 24 bp, Artificial sequence
  SiRNA target sequence
tagtttacattgtttcagaaatgt

SEQ ID NO: 218479 - DNA, 24 bp, Artificial sequence
  SiRNA target sequence
agtttacattgtttcagaaatgtt

SEQ ID NO: 218480 - DNA, 24 bp, Artificial sequence
  SiRNA target sequence
gtttacattgtttcagaaatgttt

SEQ ID NO: 218481 - DNA, 24 bp, Artificial sequence
  SiRNA target sequence
tttacattgtttcagaaatgtttg

SEQ ID NO: 218482 - DNA, 24 bp, Artificial sequence
  SiRNA target sequence
ttacattgtttcagaaatgtttgg

SEQ ID NO: 218483 - DNA, 24 bp, Artificial sequence
  SiRNA target sequence
tacattgtttcagaaatgtttggt

SEQ ID NO: 218484 - DNA, 24 bp, Artificial sequence
  SiRNA target sequence
acattgtttcagaaatgtttggta

SEQ ID NO: 218485 - DNA, 24 bp, Artificial sequence
  SiRNA target sequence
cattgtttcagaaatgtttggtaa

SEQ ID NO: 218486 - DNA, 24 bp, Artificial sequence
  SiRNA target sequence
attgtttcagaaatgtttggtaat

SEQ ID NO: 218487 - DNA, 24 bp, Artificial sequence
  SiRNA target sequence
ttgtttcagaaatgtttggtaatt

SEQ ID NO: 218488 - DNA, 24 bp, Artificial sequence
  SiRNA target sequence
tgtttcagaaatgtttggtaattt

SEQ ID NO: 218489 - DNA, 24 bp, Artificial sequence
  SiRNA target sequence
gtttcagaaatgtttggtaattta

SEQ ID NO: 218490 - DNA, 24 bp, Artificial sequence
  SiRNA target sequence
tttcagaaatgtttggtaatttag

SEQ ID NO: 218491 - DNA, 24 bp, Artificial sequence
  SiRNA target sequence
ttcagaaatgtttggtaatttagt

SEQ ID NO: 218492 - DNA, 24 bp, Artificial sequence
  SiRNA target sequence
tcagaaatgtttggtaatttagta

SEQ ID NO: 218493 - DNA, 24 bp, Artificial sequence
  SiRNA target sequence
cagaaatgtttggtaatttagtat

SEQ ID NO: 218494 - DNA, 24 bp, Artificial sequence
  SiRNA target sequence
agaaatgtttggtaatttagtatt

SEQ ID NO: 218495 - DNA, 24 bp, Artificial sequence
  SiRNA target sequence
gaaatgtttggtaatttagtattg

SEQ ID NO: 218496 - DNA, 24 bp, Artificial sequence
  SiRNA target sequence
aaatgtttggtaatttagtattgt

SEQ ID NO: 218497 - DNA, 24 bp, Artificial sequence
  SiRNA target sequence
aatgtttggtaatttagtattgtc

SEQ ID NO: 218498 - DNA, 24 bp, Artificial sequence
  SiRNA target sequence
atgtttggtaatttagtattgtct

SEQ ID NO: 218499 - DNA, 24 bp, Artificial sequence
  SiRNA target sequence
tgtttggtaatttagtattgtctt

SEQ ID NO: 218500 - DNA, 24 bp, Artificial sequence
  SiRNA target sequence
gtttggtaatttagtattgtctta

SEQ ID NO: 218501 - DNA, 24 bp, Artificial sequence
  SiRNA target sequence
tttggtaatttagtattgtcttat

SEQ ID NO: 218502 - DNA, 24 bp, Artificial sequence
  SiRNA target sequence
ttggtaatttagtattgtcttatt

SEQ ID NO: 218503 - DNA, 24 bp, Artificial sequence
  SiRNA target sequence
tggtaatttagtattgtcttattt

SEQ ID NO: 218504 - DNA, 24 bp, Artificial sequence
  SiRNA target sequence
ggtaatttagtattgtcttatttc

SEQ ID NO: 218505 - DNA, 24 bp, Artificial sequence
  SiRNA target sequence
gtaatttagtattgtcttatttct

SEQ ID NO: 218506 - DNA, 24 bp, Artificial sequence
  SiRNA target sequence
taatttagtattgtcttatttctt

SEQ ID NO: 218507 - DNA, 24 bp, Artificial sequence
  SiRNA target sequence
aatttagtattgtcttatttcttc

SEQ ID NO: 218508 - DNA, 24 bp, Artificial sequence
  SiRNA target sequence
atttagtattgtcttatttcttct

SEQ ID NO: 218509 - DNA, 24 bp, Artificial sequence
  SiRNA target sequence
tttagtattgtcttatttcttctt

SEQ ID NO: 218510 - DNA, 24 bp, Artificial sequence
  SiRNA target sequence
ttagtattgtcttatttcttcttg

SEQ ID NO: 218511 - DNA, 24 bp, Artificial sequence
  SiRNA target sequence
tagtattgtcttatttcttcttga

SEQ ID NO: 218512 - DNA, 24 bp, Artificial sequence
  SiRNA target sequence
agtattgtcttatttcttcttgac

SEQ ID NO: 218513 - DNA, 24 bp, Artificial sequence
  SiRNA target sequence
gtattgtcttatttcttcttgacg

SEQ ID NO: 218514 - DNA, 24 bp, Artificial sequence
  SiRNA target sequence
tattgtcttatttcttcttgacgt

SEQ ID NO: 218515 - DNA, 24 bp, Artificial sequence
  SiRNA target sequence
attgtcttatttcttcttgacgtt

SEQ ID NO: 218516 - DNA, 24 bp, Artificial sequence
  SiRNA target sequence
ttgtcttatttcttcttgacgttt

SEQ ID NO: 218517 - DNA, 24 bp, Artificial sequence
  SiRNA target sequence
tgtcttatttcttcttgacgtttg

SEQ ID NO: 218518 - DNA, 24 bp, Artificial sequence
  SiRNA target sequence
gtcttatttcttcttgacgtttgc

SEQ ID NO: 218519 - DNA, 24 bp, Artificial sequence
  SiRNA target sequence
tcttatttcttcttgacgtttgct

SEQ ID NO: 218520 - DNA, 24 bp, Artificial sequence
  SiRNA target sequence
cttatttcttcttgacgtttgcta

SEQ ID NO: 218521 - DNA, 24 bp, Artificial sequence
  SiRNA target sequence
ttatttcttcttgacgtttgctaa

SEQ ID NO: 218522 - DNA, 24 bp, Artificial sequence
  SiRNA target sequence
tatttcttcttgacgtttgctaat

SEQ ID NO: 218523 - DNA, 24 bp, Artificial sequence
  SiRNA target sequence
atttcttcttgacgtttgctaatt

SEQ ID NO: 218524 - DNA, 24 bp, Artificial sequence
  SiRNA target sequence
tttcttcttgacgtttgctaattc

SEQ ID NO: 218525 - DNA, 24 bp, Artificial sequence
  SiRNA target sequence
ttcttcttgacgtttgctaattct

SEQ ID NO: 218526 - DNA, 24 bp, Artificial sequence
  SiRNA target sequence
tcttcttgacgtttgctaattctt

SEQ ID NO: 218527 - DNA, 24 bp, Artificial sequence
  SiRNA target sequence
cttcttgacgtttgctaattcttt

SEQ ID NO: 218528 - DNA, 24 bp, Artificial sequence
  SiRNA target sequence
ttcttgacgtttgctaattcttta

SEQ ID NO: 218529 - DNA, 24 bp, Artificial sequence
  SiRNA target sequence
tcttgacgtttgctaattctttaa

SEQ ID NO: 218530 - DNA, 24 bp, Artificial sequence
  SiRNA target sequence
cttgacgtttgctaattctttaac

SEQ ID NO: 218531 - DNA, 24 bp, Artificial sequence
  SiRNA target sequence
ttgacgtttgctaattctttaaca

SEQ ID NO: 218532 - DNA, 24 bp, Artificial sequence
  SiRNA target sequence
tgacgtttgctaattctttaacaa

SEQ ID NO: 218533 - DNA, 24 bp, Artificial sequence
  SiRNA target sequence
gacgtttgctaattctttaacaac

SEQ ID NO: 218534 - DNA, 24 bp, Artificial sequence
  SiRNA target sequence
acgtttgctaattctttaacaact

SEQ ID NO: 218535 - DNA, 24 bp, Artificial sequence
  SiRNA target sequence
cgtttgctaattctttaacaactc

SEQ ID NO: 218536 - DNA, 24 bp, Artificial sequence
  SiRNA target sequence
gtttgctaattctttaacaactcc

SEQ ID NO: 218537 - DNA, 24 bp, Artificial sequence
  SiRNA target sequence
tttgctaattctttaacaactcca

SEQ ID NO: 218538 - DNA, 24 bp, Artificial sequence
  SiRNA target sequence
ttgctaattctttaacaactccag

SEQ ID NO: 218539 - DNA, 24 bp, Artificial sequence
  SiRNA target sequence
tgctaattctttaacaactccagg

SEQ ID NO: 218540 - DNA, 24 bp, Artificial sequence
  SiRNA target sequence
gctaattctttaacaactccagga

SEQ ID NO: 218541 - DNA, 24 bp, Artificial sequence
  SiRNA target sequence
ctaattctttaacaactccaggac

SEQ ID NO: 218542 - DNA, 24 bp, Artificial sequence
  SiRNA target sequence
taattctttaacaactccaggaca

SEQ ID NO: 218543 - DNA, 24 bp, Artificial sequence
  SiRNA target sequence
aattctttaacaactccaggacaa

SEQ ID NO: 218544 - DNA, 24 bp, Artificial sequence
  SiRNA target sequence
attctttaacaactccaggacaaa

SEQ ID NO: 218545 - DNA, 24 bp, Artificial sequence
  SiRNA target sequence
ttctttaacaactccaggacaaag

SEQ ID NO: 218546 - DNA, 24 bp, Artificial sequence
  SiRNA target sequence
tctttaacaactccaggacaaagt

SEQ ID NO: 218547 - DNA, 24 bp, Artificial sequence
  SiRNA target sequence
ctttaacaactccaggacaaagtg

SEQ ID NO: 218548 - DNA, 24 bp, Artificial sequence
  SiRNA target sequence
tttaacaactccaggacaaagtgc

SEQ ID NO: 218549 - DNA, 24 bp, Artificial sequence
  SiRNA target sequence
ttaacaactccaggacaaagtgca

SEQ ID NO: 218550 - DNA, 24 bp, Artificial sequence
  SiRNA target sequence
taacaactccaggacaaagtgcaa

SEQ ID NO: 218551 - DNA, 24 bp, Artificial sequence
  SiRNA target sequence
aacaactccaggacaaagtgcaag

SEQ ID NO: 218552 - DNA, 24 bp, Artificial sequence
  SiRNA target sequence
acaactccaggacaaagtgcaaga

SEQ ID NO: 218553 - DNA, 24 bp, Artificial sequence
  SiRNA target sequence
caactccaggacaaagtgcaagat

SEQ ID NO: 218554 - DNA, 24 bp, Artificial sequence
  SiRNA target sequence
aactccaggacaaagtgcaagatt

SEQ ID NO: 218555 - DNA, 24 bp, Artificial sequence
  SiRNA target sequence
actccaggacaaagtgcaagattc

SEQ ID NO: 218556 - DNA, 24 bp, Artificial sequence
  SiRNA target sequence
ctccaggacaaagtgcaagattca

SEQ ID NO: 218557 - DNA, 24 bp, Artificial sequence
  SiRNA target sequence
tccaggacaaagtgcaagattcat

SEQ ID NO: 218558 - DNA, 24 bp, Artificial sequence
  SiRNA target sequence
ccaggacaaagtgcaagattcata

SEQ ID NO: 218559 - DNA, 24 bp, Artificial sequence
  SiRNA target sequence
caggacaaagtgcaagattcatac

SEQ ID NO: 218560 - DNA, 24 bp, Artificial sequence
  SiRNA target sequence
aggacaaagtgcaagattcatacc

SEQ ID NO: 218561 - DNA, 24 bp, Artificial sequence
  SiRNA target sequence
ggacaaagtgcaagattcatacct

SEQ ID NO: 218562 - DNA, 24 bp, Artificial sequence
  SiRNA target sequence
gacaaagtgcaagattcatacctt

SEQ ID NO: 218563 - DNA, 24 bp, Artificial sequence
  SiRNA target sequence
acaaagtgcaagattcataccttt

SEQ ID NO: 218564 - DNA, 24 bp, Artificial sequence
  SiRNA target sequence
caaagtgcaagattcataccttta

SEQ ID NO: 218565 - DNA, 24 bp, Artificial sequence
  SiRNA target sequence
aaagtgcaagattcatacctttat

SEQ ID NO: 218566 - DNA, 24 bp, Artificial sequence
  SiRNA target sequence
aagtgcaagattcatacctttatt

SEQ ID NO: 218567 - DNA, 24 bp, Artificial sequence
  SiRNA target sequence
agtgcaagattcatacctttattt

SEQ ID NO: 218568 - DNA, 24 bp, Artificial sequence
  SiRNA target sequence
gtgcaagattcatacctttatttt

SEQ ID NO: 218569 - DNA, 24 bp, Artificial sequence
  SiRNA target sequence
tgcaagattcatacctttatttta

SEQ ID NO: 218570 - DNA, 24 bp, Artificial sequence
  SiRNA target sequence
gcaagattcatacctttattttat

SEQ ID NO: 218571 - DNA, 24 bp, Artificial sequence
  SiRNA target sequence
caagattcatacctttattttatg

SEQ ID NO: 218572 - DNA, 24 bp, Artificial sequence
  SiRNA target sequence
aagattcatacctttattttatgt

SEQ ID NO: 218573 - DNA, 24 bp, Artificial sequence
  SiRNA target sequence
agattcatacctttattttatgtt

SEQ ID NO: 218574 - DNA, 24 bp, Artificial sequence
  SiRNA target sequence
gattcatacctttattttatgttt

SEQ ID NO: 218575 - DNA, 24 bp, Artificial sequence
  SiRNA target sequence
attcatacctttattttatgtttt

SEQ ID NO: 218576 - DNA, 24 bp, Artificial sequence
  SiRNA target sequence
ttcatacctttattttatgttttc

SEQ ID NO: 218577 - DNA, 24 bp, Artificial sequence
  SiRNA target sequence
tcatacctttattttatgttttct

SEQ ID NO: 218578 - DNA, 24 bp, Artificial sequence
  SiRNA target sequence
catacctttattttatgttttctc

SEQ ID NO: 218579 - DNA, 24 bp, Artificial sequence
  SiRNA target sequence
atacctttattttatgttttctcg

SEQ ID NO: 218580 - DNA, 24 bp, Artificial sequence
  SiRNA target sequence
tacctttattttatgttttctcga

SEQ ID NO: 218581 - DNA, 24 bp, Artificial sequence
  SiRNA target sequence
acctttattttatgttttctcgaa

SEQ ID NO: 218582 - DNA, 24 bp, Artificial sequence
  SiRNA target sequence
cctttattttatgttttctcgaat

SEQ ID NO: 218583 - DNA, 24 bp, Artificial sequence
  SiRNA target sequence
ctttattttatgttttctcgaata

SEQ ID NO: 218584 - DNA, 24 bp, Artificial sequence
  SiRNA target sequence
tttattttatgttttctcgaatat

SEQ ID NO: 218585 - DNA, 24 bp, Artificial sequence
  SiRNA target sequence
ttattttatgttttctcgaatatt

SEQ ID NO: 218586 - DNA, 24 bp, Artificial sequence
  SiRNA target sequence
tattttatgttttctcgaatattt

SEQ ID NO: 218587 - DNA, 24 bp, Artificial sequence
  SiRNA target sequence
attttatgttttctcgaatatttc

SEQ ID NO: 218588 - DNA, 24 bp, Artificial sequence
  SiRNA target sequence
ttttatgttttctcgaatatttct

SEQ ID NO: 218589 - DNA, 24 bp, Artificial sequence
  SiRNA target sequence
tttatgttttctcgaatatttctc

SEQ ID NO: 218590 - DNA, 24 bp, Artificial sequence
  SiRNA target sequence
ttatgttttctcgaatatttctct

SEQ ID NO: 218591 - DNA, 24 bp, Artificial sequence
  SiRNA target sequence
tatgttttctcgaatatttctctt

SEQ ID NO: 218592 - DNA, 24 bp, Artificial sequence
  SiRNA target sequence
atgttttctcgaatatttctcttt

SEQ ID NO: 218593 - DNA, 24 bp, Artificial sequence
  SiRNA target sequence
tgttttctcgaatatttctctttt

SEQ ID NO: 218594 - DNA, 24 bp, Artificial sequence
  SiRNA target sequence
gttttctcgaatatttctcttttc

SEQ ID NO: 218595 - DNA, 24 bp, Artificial sequence
  SiRNA target sequence
ttttctcgaatatttctcttttct

SEQ ID NO: 218596 - DNA, 24 bp, Artificial sequence
  SiRNA target sequence
tttctcgaatatttctcttttctt

SEQ ID NO: 218597 - DNA, 24 bp, Artificial sequence
  SiRNA target sequence
ttctcgaatatttctcttttctta

SEQ ID NO: 218598 - DNA, 24 bp, Artificial sequence
  SiRNA target sequence
tctcgaatatttctcttttcttat

SEQ ID NO: 218599 - DNA, 24 bp, Artificial sequence
  SiRNA target sequence
ctcgaatatttctcttttcttatc

SEQ ID NO: 218600 - DNA, 24 bp, Artificial sequence
  SiRNA target sequence
tcgaatatttctcttttcttatct

SEQ ID NO: 218601 - DNA, 24 bp, Artificial sequence
  SiRNA target sequence
cgaatatttctcttttcttatctt

SEQ ID NO: 218602 - DNA, 24 bp, Artificial sequence
  SiRNA target sequence
gaatatttctcttttcttatcttc

SEQ ID NO: 218603 - DNA, 24 bp, Artificial sequence
  SiRNA target sequence
aatatttctcttttcttatcttct

SEQ ID NO: 218604 - DNA, 24 bp, Artificial sequence
  SiRNA target sequence
atatttctcttttcttatcttctc

SEQ ID NO: 218605 - DNA, 24 bp, Artificial sequence
  SiRNA target sequence
tatttctcttttcttatcttctca

SEQ ID NO: 218606 - DNA, 24 bp, Artificial sequence
  SiRNA target sequence
atttctcttttcttatcttctcaa

SEQ ID NO: 218607 - DNA, 24 bp, Artificial sequence
  SiRNA target sequence
tttctcttttcttatcttctcaag

SEQ ID NO: 218608 - DNA, 24 bp, Artificial sequence
  SiRNA target sequence
ttctcttttcttatcttctcaagt

SEQ ID NO: 218609 - DNA, 24 bp, Artificial sequence
  SiRNA target sequence
tctcttttcttatcttctcaagtg

SEQ ID NO: 218610 - DNA, 24 bp, Artificial sequence
  SiRNA target sequence
ctcttttcttatcttctcaagtga

SEQ ID NO: 218611 - DNA, 24 bp, Artificial sequence
  SiRNA target sequence
tcttttcttatcttctcaagtgac

SEQ ID NO: 218612 - DNA, 24 bp, Artificial sequence
  SiRNA target sequence
cttttcttatcttctcaagtgaca

SEQ ID NO: 218613 - DNA, 24 bp, Artificial sequence
  SiRNA target sequence
ttttcttatcttctcaagtgacag

SEQ ID NO: 218614 - DNA, 24 bp, Artificial sequence
  SiRNA target sequence
tttcttatcttctcaagtgacaga

SEQ ID NO: 218615 - DNA, 24 bp, Artificial sequence
  SiRNA target sequence
ttcttatcttctcaagtgacagaa

SEQ ID NO: 218616 - DNA, 24 bp, Artificial sequence
  SiRNA target sequence
tcttatcttctcaagtgacagaac

SEQ ID NO: 218617 - DNA, 24 bp, Artificial sequence
  SiRNA target sequence
cttatcttctcaagtgacagaact

SEQ ID NO: 218618 - DNA, 24 bp, Artificial sequence
  SiRNA target sequence
ttatcttctcaagtgacagaactt

SEQ ID NO: 218619 - DNA, 24 bp, Artificial sequence
  SiRNA target sequence
tatcttctcaagtgacagaacttt

SEQ ID NO: 218620 - DNA, 24 bp, Artificial sequence
  SiRNA target sequence
atcttctcaagtgacagaactttt

SEQ ID NO: 218621 - DNA, 24 bp, Artificial sequence
  SiRNA target sequence
tcttctcaagtgacagaacttttt

SEQ ID NO: 218622 - DNA, 24 bp, Artificial sequence
  SiRNA target sequence
cttctcaagtgacagaacttttta

SEQ ID NO: 218623 - DNA, 24 bp, Artificial sequence
  SiRNA target sequence
ttctcaagtgacagaactttttac

SEQ ID NO: 218624 - DNA, 24 bp, Artificial sequence
  SiRNA target sequence
tctcaagtgacagaactttttaca

SEQ ID NO: 218625 - DNA, 24 bp, Artificial sequence
  SiRNA target sequence
ctcaagtgacagaactttttacaa

SEQ ID NO: 218626 - DNA, 24 bp, Artificial sequence
  SiRNA target sequence
tcaagtgacagaactttttacaag

SEQ ID NO: 218627 - DNA, 24 bp, Artificial sequence
  SiRNA target sequence
caagtgacagaactttttacaaga

SEQ ID NO: 218628 - DNA, 24 bp, Artificial sequence
  SiRNA target sequence
aagtgacagaactttttacaagat

SEQ ID NO: 218629 - DNA, 24 bp, Artificial sequence
  SiRNA target sequence
agtgacagaactttttacaagata

SEQ ID NO: 218630 - DNA, 24 bp, Artificial sequence
  SiRNA target sequence
gtgacagaactttttacaagatat

SEQ ID NO: 218631 - DNA, 24 bp, Artificial sequence
  SiRNA target sequence
tgacagaactttttacaagatata

SEQ ID NO: 218632 - DNA, 24 bp, Artificial sequence
  SiRNA target sequence
gacagaactttttacaagatatag

SEQ ID NO: 218633 - DNA, 24 bp, Artificial sequence
  SiRNA target sequence
acagaactttttacaagatataga

SEQ ID NO: 218634 - DNA, 24 bp, Artificial sequence
  SiRNA target sequence
cagaactttttacaagatatagat

SEQ ID NO: 218635 - DNA, 24 bp, Artificial sequence
  SiRNA target sequence
agaactttttacaagatatagatc

SEQ ID NO: 218636 - DNA, 24 bp, Artificial sequence
  SiRNA target sequence
gaactttttacaagatatagatca

SEQ ID NO: 218637 - DNA, 24 bp, Artificial sequence
  SiRNA target sequence
aactttttacaagatatagatcaa

SEQ ID NO: 218638 - DNA, 24 bp, Artificial sequence
  SiRNA target sequence
actttttacaagatatagatcaaa

SEQ ID NO: 218639 - DNA, 24 bp, Artificial sequence
  SiRNA target sequence
ctttttacaagatatagatcaaag

SEQ ID NO: 218640 - DNA, 24 bp, Artificial sequence
  SiRNA target sequence
tttttacaagatatagatcaaagc

SEQ ID NO: 218641 - DNA, 24 bp, Artificial sequence
  SiRNA target sequence
ttttacaagatatagatcaaagct

SEQ ID NO: 218642 - DNA, 24 bp, Artificial sequence
  SiRNA target sequence
tttacaagatatagatcaaagctc

SEQ ID NO: 218643 - DNA, 24 bp, Artificial sequence
  SiRNA target sequence
ttacaagatatagatcaaagctca

SEQ ID NO: 218644 - DNA, 24 bp, Artificial sequence
  SiRNA target sequence
tacaagatatagatcaaagctcac

SEQ ID NO: 218645 - DNA, 24 bp, Artificial sequence
  SiRNA target sequence
acaagatatagatcaaagctcact

SEQ ID NO: 218646 - DNA, 24 bp, Artificial sequence
  SiRNA target sequence
caagatatagatcaaagctcactt

SEQ ID NO: 218647 - DNA, 24 bp, Artificial sequence
  SiRNA target sequence
aagatatagatcaaagctcacttt

SEQ ID NO: 218648 - DNA, 24 bp, Artificial sequence
  SiRNA target sequence
agatatagatcaaagctcactttc

SEQ ID NO: 218649 - DNA, 24 bp, Artificial sequence
  SiRNA target sequence
gatatagatcaaagctcactttct

SEQ ID NO: 218650 - DNA, 24 bp, Artificial sequence
  SiRNA target sequence
atatagatcaaagctcactttctc

SEQ ID NO: 218651 - DNA, 24 bp, Artificial sequence
  SiRNA target sequence
tatagatcaaagctcactttctca

SEQ ID NO: 218652 - DNA, 24 bp, Artificial sequence
  SiRNA target sequence
atagatcaaagctcactttctcag

SEQ ID NO: 218653 - DNA, 24 bp, Artificial sequence
  SiRNA target sequence
tagatcaaagctcactttctcaga

SEQ ID NO: 218654 - DNA, 24 bp, Artificial sequence
  SiRNA target sequence
agatcaaagctcactttctcagag

SEQ ID NO: 218655 - DNA, 24 bp, Artificial sequence
  SiRNA target sequence
gatcaaagctcactttctcagagg

SEQ ID NO: 218656 - DNA, 24 bp, Artificial sequence
  SiRNA target sequence
atcaaagctcactttctcagaggc

SEQ ID NO: 218657 - DNA, 24 bp, Artificial sequence
  SiRNA target sequence
tcaaagctcactttctcagaggcg

SEQ ID NO: 218658 - DNA, 24 bp, Artificial sequence
  SiRNA target sequence
caaagctcactttctcagaggcgg

SEQ ID NO: 218659 - DNA, 24 bp, Artificial sequence
  SiRNA target sequence
aaagctcactttctcagaggcgga

SEQ ID NO: 218660 - DNA, 24 bp, Artificial sequence
  SiRNA target sequence
aagctcactttctcagaggcggaa

SEQ ID NO: 218661 - DNA, 24 bp, Artificial sequence
  SiRNA target sequence
agctcactttctcagaggcggaat

SEQ ID NO: 218662 - DNA, 24 bp, Artificial sequence
  SiRNA target sequence
gctcactttctcagaggcggaatt

SEQ ID NO: 218663 - DNA, 24 bp, Artificial sequence
  SiRNA target sequence
ctcactttctcagaggcggaattt

SEQ ID NO: 218664 - DNA, 24 bp, Artificial sequence
  SiRNA target sequence
tcactttctcagaggcggaatttt

SEQ ID NO: 218665 - DNA, 24 bp, Artificial sequence
  SiRNA target sequence
cactttctcagaggcggaattttt

SEQ ID NO: 218666 - DNA, 24 bp, Artificial sequence
  SiRNA target sequence
actttctcagaggcggaattttta

SEQ ID NO: 218667 - DNA, 24 bp, Artificial sequence
  SiRNA target sequence
ctttctcagaggcggaatttttat

SEQ ID NO: 218668 - DNA, 24 bp, Artificial sequence
  SiRNA target sequence
tttctcagaggcggaatttttata

SEQ ID NO: 218669 - DNA, 24 bp, Artificial sequence
  SiRNA target sequence
ttctcagaggcggaatttttatat

SEQ ID NO: 218670 - DNA, 24 bp, Artificial sequence
  SiRNA target sequence
tctcagaggcggaatttttatata

SEQ ID NO: 218671 - DNA, 24 bp, Artificial sequence
  SiRNA target sequence
ctcagaggcggaatttttatataa

SEQ ID NO: 218672 - DNA, 24 bp, Artificial sequence
  SiRNA target sequence
tcagaggcggaatttttatataat

SEQ ID NO: 218673 - DNA, 24 bp, Artificial sequence
  SiRNA target sequence
cagaggcggaatttttatataatg

SEQ ID NO: 218674 - DNA, 24 bp, Artificial sequence
  SiRNA target sequence
agaggcggaatttttatataatgg

SEQ ID NO: 218675 - DNA, 24 bp, Artificial sequence
  SiRNA target sequence
gaggcggaatttttatataatggc

SEQ ID NO: 218676 - DNA, 24 bp, Artificial sequence
  SiRNA target sequence
aggcggaatttttatataatggct

SEQ ID NO: 218677 - DNA, 24 bp, Artificial sequence
  SiRNA target sequence
ggcggaatttttatataatggctt

SEQ ID NO: 218678 - DNA, 24 bp, Artificial sequence
  SiRNA target sequence
gcggaatttttatataatggcttt

SEQ ID NO: 218679 - DNA, 24 bp, Artificial sequence
  SiRNA target sequence
cggaatttttatataatggctttt

SEQ ID NO: 218680 - DNA, 24 bp, Artificial sequence
  SiRNA target sequence
ggaatttttatataatggcttttt

SEQ ID NO: 218681 - DNA, 24 bp, Artificial sequence
  SiRNA target sequence
gaatttttatataatggctttttt

SEQ ID NO: 218682 - DNA, 24 bp, Artificial sequence
  SiRNA target sequence
aatttttatataatggcttttttg

SEQ ID NO: 218683 - DNA, 24 bp, Artificial sequence
  SiRNA target sequence
atttttatataatggcttttttgt

SEQ ID NO: 218684 - DNA, 24 bp, Artificial sequence
  SiRNA target sequence
tttttatataatggcttttttgta

SEQ ID NO: 218685 - DNA, 24 bp, Artificial sequence
  SiRNA target sequence
ttttatataatggcttttttgtat

SEQ ID NO: 218686 - DNA, 24 bp, Artificial sequence
  SiRNA target sequence
tttatataatggcttttttgtatt

SEQ ID NO: 218687 - DNA, 24 bp, Artificial sequence
  SiRNA target sequence
ttatataatggcttttttgtattt

SEQ ID NO: 218688 - DNA, 24 bp, Artificial sequence
  SiRNA target sequence
tatataatggcttttttgtatttt

SEQ ID NO: 218689 - DNA, 24 bp, Artificial sequence
  SiRNA target sequence
atataatggcttttttgtattttc

SEQ ID NO: 218690 - DNA, 24 bp, Artificial sequence
  SiRNA target sequence
tataatggcttttttgtattttct

SEQ ID NO: 218691 - DNA, 24 bp, Artificial sequence
  SiRNA target sequence
ataatggcttttttgtattttctg

SEQ ID NO: 218692 - DNA, 24 bp, Artificial sequence
  SiRNA target sequence
taatggcttttttgtattttctgg

SEQ ID NO: 218693 - DNA, 24 bp, Artificial sequence
  SiRNA target sequence
aatggcttttttgtattttctgga

SEQ ID NO: 218694 - DNA, 24 bp, Artificial sequence
  SiRNA target sequence
atggcttttttgtattttctggag

SEQ ID NO: 218695 - DNA, 24 bp, Artificial sequence
  SiRNA target sequence
tggcttttttgtattttctggagt

SEQ ID NO: 218696 - DNA, 24 bp, Artificial sequence
  SiRNA target sequence
ggcttttttgtattttctggagtt

SEQ ID NO: 218697 - DNA, 24 bp, Artificial sequence
  SiRNA target sequence
gcttttttgtattttctggagttc

SEQ ID NO: 218698 - DNA, 24 bp, Artificial sequence
  SiRNA target sequence
cttttttgtattttctggagttct

SEQ ID NO: 218699 - DNA, 24 bp, Artificial sequence
  SiRNA target sequence
ttttttgtattttctggagttcta

SEQ ID NO: 218700 - DNA, 24 bp, Artificial sequence
  SiRNA target sequence
tttttgtattttctggagttctag

SEQ ID NO: 218701 - DNA, 24 bp, Artificial sequence
  SiRNA target sequence
ttttgtattttctggagttctagt

SEQ ID NO: 218702 - DNA, 24 bp, Artificial sequence
  SiRNA target sequence
tttgtattttctggagttctagta

SEQ ID NO: 218703 - DNA, 24 bp, Artificial sequence
  SiRNA target sequence
ttgtattttctggagttctagtaa

SEQ ID NO: 218704 - DNA, 24 bp, Artificial sequence
  SiRNA target sequence
tgtattttctggagttctagtaat

SEQ ID NO: 218705 - DNA, 24 bp, Artificial sequence
  SiRNA target sequence
gtattttctggagttctagtaata

SEQ ID NO: 218706 - DNA, 24 bp, Artificial sequence
  SiRNA target sequence
tattttctggagttctagtaatag

SEQ ID NO: 218707 - DNA, 24 bp, Artificial sequence
  SiRNA target sequence
attttctggagttctagtaatagt

SEQ ID NO: 218708 - DNA, 24 bp, Artificial sequence
  SiRNA target sequence
ttttctggagttctagtaatagtt

SEQ ID NO: 218709 - DNA, 24 bp, Artificial sequence
  SiRNA target sequence
tttctggagttctagtaatagtta

SEQ ID NO: 218710 - DNA, 24 bp, Artificial sequence
  SiRNA target sequence
ttctggagttctagtaatagttat

SEQ ID NO: 218711 - DNA, 24 bp, Artificial sequence
  SiRNA target sequence
tctggagttctagtaatagttata

SEQ ID NO: 218712 - DNA, 24 bp, Artificial sequence
  SiRNA target sequence
ctggagttctagtaatagttatat

SEQ ID NO: 218713 - DNA, 24 bp, Artificial sequence
  SiRNA target sequence
tggagttctagtaatagttatatt

SEQ ID NO: 218714 - DNA, 24 bp, Artificial sequence
  SiRNA target sequence
ggagttctagtaatagttatattt

SEQ ID NO: 218715 - DNA, 24 bp, Artificial sequence
  SiRNA target sequence
gagttctagtaatagttatatttt

SEQ ID NO: 218716 - DNA, 24 bp, Artificial sequence
  SiRNA target sequence
agttctagtaatagttatattttt

SEQ ID NO: 218717 - DNA, 24 bp, Artificial sequence
  SiRNA target sequence
gttctagtaatagttatattttta

SEQ ID NO: 218718 - DNA, 24 bp, Artificial sequence
  SiRNA target sequence
ttctagtaatagttatatttttaa

SEQ ID NO: 218719 - DNA, 24 bp, Artificial sequence
  SiRNA target sequence
tctagtaatagttatatttttaat

SEQ ID NO: 218720 - DNA, 24 bp, Artificial sequence
  SiRNA target sequence
ctagtaatagttatatttttaatt

SEQ ID NO: 218721 - DNA, 24 bp, Artificial sequence
  SiRNA target sequence
tagtaatagttatatttttaatta

SEQ ID NO: 218722 - DNA, 24 bp, Artificial sequence
  SiRNA target sequence
agtaatagttatatttttaattaa

SEQ ID NO: 218723 - DNA, 24 bp, Artificial sequence
  SiRNA target sequence
gtaatagttatatttttaattaaa

SEQ ID NO: 218724 - DNA, 24 bp, Artificial sequence
  SiRNA target sequence
taatagttatatttttaattaaaa

SEQ ID NO: 218725 - DNA, 24 bp, Artificial sequence
  SiRNA target sequence
aatagttatatttttaattaaaaa

SEQ ID NO: 218726 - DNA, 24 bp, Artificial sequence
  SiRNA target sequence
atagttatatttttaattaaaaaa

SEQ ID NO: 218727 - DNA, 24 bp, Artificial sequence
  SiRNA target sequence
tagttatatttttaattaaaaaat

SEQ ID NO: 218728 - DNA, 24 bp, Artificial sequence
  SiRNA target sequence
agttatatttttaattaaaaaata

SEQ ID NO: 218729 - DNA, 24 bp, Artificial sequence
  SiRNA target sequence
gttatatttttaattaaaaaatat

SEQ ID NO: 218730 - DNA, 24 bp, Artificial sequence
  SiRNA target sequence
ttatatttttaattaaaaaatatt

SEQ ID NO: 218731 - DNA, 24 bp, Artificial sequence
  SiRNA target sequence
tatatttttaattaaaaaatattt

SEQ ID NO: 218732 - DNA, 24 bp, Artificial sequence
  SiRNA target sequence
atatttttaattaaaaaatatttg

SEQ ID NO: 218733 - DNA, 24 bp, Artificial sequence
  SiRNA target sequence
tatttttaattaaaaaatatttgg

SEQ ID NO: 218734 - DNA, 24 bp, Artificial sequence
  SiRNA target sequence
atttttaattaaaaaatatttgga

SEQ ID NO: 218735 - DNA, 24 bp, Artificial sequence
  SiRNA target sequence
tttttaattaaaaaatatttggag

SEQ ID NO: 218736 - DNA, 24 bp, Artificial sequence
  SiRNA target sequence
ttttaattaaaaaatatttggaga

SEQ ID NO: 218737 - DNA, 24 bp, Artificial sequence
  SiRNA target sequence
tttaattaaaaaatatttggagag

SEQ ID NO: 218738 - DNA, 24 bp, Artificial sequence
  SiRNA target sequence
ttaattaaaaaatatttggagagg

SEQ ID NO: 218739 - DNA, 24 bp, Artificial sequence
  SiRNA target sequence
taattaaaaaatatttggagagga

SEQ ID NO: 218740 - DNA, 24 bp, Artificial sequence
  SiRNA target sequence
aattaaaaaatatttggagaggaa

SEQ ID NO: 218741 - DNA, 24 bp, Artificial sequence
  SiRNA target sequence
attaaaaaatatttggagaggaat

SEQ ID NO: 218742 - DNA, 24 bp, Artificial sequence
  SiRNA target sequence
ttaaaaaatatttggagaggaatg

SEQ ID NO: 218743 - DNA, 24 bp, Artificial sequence
  SiRNA target sequence
taaaaaatatttggagaggaatgt

SEQ ID NO: 218744 - DNA, 24 bp, Artificial sequence
  SiRNA target sequence
aaaaaatatttggagaggaatgtg

SEQ ID NO: 218745 - DNA, 24 bp, Artificial sequence
  SiRNA target sequence
aaaaatatttggagaggaatgtga

SEQ ID NO: 218746 - DNA, 24 bp, Artificial sequence
  SiRNA target sequence
aaaatatttggagaggaatgtgac

SEQ ID NO: 218747 - DNA, 24 bp, Artificial sequence
  SiRNA target sequence
aaatatttggagaggaatgtgact

SEQ ID NO: 218748 - DNA, 24 bp, Artificial sequence
  SiRNA target sequence
aatatttggagaggaatgtgacta

SEQ ID NO: 218749 - DNA, 24 bp, Artificial sequence
  SiRNA target sequence
atatttggagaggaatgtgactaa

SEQ ID NO: 218750 - DNA, 24 bp, Artificial sequence
  SiRNA target sequence
tatttggagaggaatgtgactaac

SEQ ID NO: 218751 - DNA, 24 bp, Artificial sequence
  SiRNA target sequence
atttggagaggaatgtgactaaca

SEQ ID NO: 218752 - DNA, 24 bp, Artificial sequence
  SiRNA target sequence
tttggagaggaatgtgactaacaa

SEQ ID NO: 218753 - DNA, 24 bp, Artificial sequence
  SiRNA target sequence
ttggagaggaatgtgactaacaaa

SEQ ID NO: 218754 - DNA, 24 bp, Artificial sequence
  SiRNA target sequence
tggagaggaatgtgactaacaaac

SEQ ID NO: 218755 - DNA, 24 bp, Artificial sequence
  SiRNA target sequence
ggagaggaatgtgactaacaaacc

SEQ ID NO: 218756 - DNA, 24 bp, Artificial sequence
  SiRNA target sequence
gagaggaatgtgactaacaaacct

SEQ ID NO: 218757 - DNA, 24 bp, Artificial sequence
  SiRNA target sequence
agaggaatgtgactaacaaacctt

SEQ ID NO: 218758 - DNA, 24 bp, Artificial sequence
  SiRNA target sequence
gaggaatgtgactaacaaaccttt

SEQ ID NO: 218759 - DNA, 24 bp, Artificial sequence
  SiRNA target sequence
aggaatgtgactaacaaacctttg

SEQ ID NO: 218760 - DNA, 24 bp, Artificial sequence
  SiRNA target sequence
ggaatgtgactaacaaacctttgt

SEQ ID NO: 218761 - DNA, 24 bp, Artificial sequence
  SiRNA target sequence
gaatgtgactaacaaacctttgtt

SEQ ID NO: 218762 - DNA, 24 bp, Artificial sequence
  SiRNA target sequence
aatgtgactaacaaacctttgttt

SEQ ID NO: 218763 - DNA, 24 bp, Artificial sequence
  SiRNA target sequence
atgtgactaacaaacctttgtttg

SEQ ID NO: 218764 - DNA, 24 bp, Artificial sequence
  SiRNA target sequence
tgtgactaacaaacctttgtttgt

SEQ ID NO: 218765 - DNA, 24 bp, Artificial sequence
  SiRNA target sequence
gtgactaacaaacctttgtttgtt

SEQ ID NO: 218766 - DNA, 24 bp, Artificial sequence
  SiRNA target sequence
tgactaacaaacctttgtttgttg

SEQ ID NO: 218767 - DNA, 24 bp, Artificial sequence
  SiRNA target sequence
gactaacaaacctttgtttgttgt

SEQ ID NO: 218768 - DNA, 24 bp, Artificial sequence
  SiRNA target sequence
actaacaaacctttgtttgttgta

SEQ ID NO: 218769 - DNA, 24 bp, Artificial sequence
  SiRNA target sequence
ctaacaaacctttgtttgttgtaa

SEQ ID NO: 218770 - DNA, 24 bp, Artificial sequence
  SiRNA target sequence
taacaaacctttgtttgttgtaaa

SEQ ID NO: 218771 - DNA, 24 bp, Artificial sequence
  SiRNA target sequence
aacaaacctttgtttgttgtaaaa

SEQ ID NO: 218772 - DNA, 24 bp, Artificial sequence
  SiRNA target sequence
acaaacctttgtttgttgtaaaat

SEQ ID NO: 218773 - DNA, 24 bp, Artificial sequence
  SiRNA target sequence
caaacctttgtttgttgtaaaatc

SEQ ID NO: 218774 - DNA, 24 bp, Artificial sequence
  SiRNA target sequence
aaacctttgtttgttgtaaaatct

SEQ ID NO: 218775 - DNA, 24 bp, Artificial sequence
  SiRNA target sequence
aacctttgtttgttgtaaaatctg

SEQ ID NO: 218776 - DNA, 24 bp, Artificial sequence
  SiRNA target sequence
acctttgtttgttgtaaaatctgt

SEQ ID NO: 218777 - DNA, 24 bp, Artificial sequence
  SiRNA target sequence
cctttgtttgttgtaaaatctgtt

SEQ ID NO: 218778 - DNA, 24 bp, Artificial sequence
  SiRNA target sequence
ctttgtttgttgtaaaatctgtta

SEQ ID NO: 218779 - DNA, 24 bp, Artificial sequence
  SiRNA target sequence
tttgtttgttgtaaaatctgttaa

SEQ ID NO: 218780 - DNA, 24 bp, Artificial sequence
  SiRNA target sequence
ttgtttgttgtaaaatctgttaaa

SEQ ID NO: 218781 - DNA, 24 bp, Artificial sequence
  SiRNA target sequence
tgtttgttgtaaaatctgttaaaa

SEQ ID NO: 218782 - DNA, 24 bp, Artificial sequence
  SiRNA target sequence
gtttgttgtaaaatctgttaaaaa

SEQ ID NO: 218783 - DNA, 24 bp, Artificial sequence
  SiRNA target sequence
tttgttgtaaaatctgttaaaaag

SEQ ID NO: 218784 - DNA, 24 bp, Artificial sequence
  SiRNA target sequence
ttgttgtaaaatctgttaaaaaga

SEQ ID NO: 218785 - DNA, 24 bp, Artificial sequence
  SiRNA target sequence
tgttgtaaaatctgttaaaaagaa

SEQ ID NO: 218786 - DNA, 24 bp, Artificial sequence
  SiRNA target sequence
gttgtaaaatctgttaaaaagaag

SEQ ID NO: 218787 - DNA, 24 bp, Artificial sequence
  SiRNA target sequence
ttgtaaaatctgttaaaaagaagg

SEQ ID NO: 218788 - DNA, 24 bp, Artificial sequence
  SiRNA target sequence
tgtaaaatctgttaaaaagaaggg

SEQ ID NO: 218789 - DNA, 24 bp, Artificial sequence
  SiRNA target sequence
gtaaaatctgttaaaaagaaggga

SEQ ID NO: 218790 - DNA, 24 bp, Artificial sequence
  SiRNA target sequence
taaaatctgttaaaaagaagggac

SEQ ID NO: 218791 - DNA, 24 bp, Artificial sequence
  SiRNA target sequence
aaaatctgttaaaaagaagggacc

SEQ ID NO: 218792 - DNA, 24 bp, Artificial sequence
  SiRNA target sequence
aaatctgttaaaaagaagggacca

SEQ ID NO: 218793 - DNA, 24 bp, Artificial sequence
  SiRNA target sequence
aatctgttaaaaagaagggaccaa

SEQ ID NO: 218794 - DNA, 24 bp, Artificial sequence
  SiRNA target sequence
atctgttaaaaagaagggaccaaa

SEQ ID NO: 218795 - DNA, 24 bp, Artificial sequence
  SiRNA target sequence
tctgttaaaaagaagggaccaaaa

SEQ ID NO: 218796 - DNA, 24 bp, Artificial sequence
  SiRNA target sequence
ctgttaaaaagaagggaccaaaag

SEQ ID NO: 218797 - DNA, 24 bp, Artificial sequence
  SiRNA target sequence
tgttaaaaagaagggaccaaaagt

SEQ ID NO: 218798 - DNA, 24 bp, Artificial sequence
  SiRNA target sequence
gttaaaaagaagggaccaaaagtt

SEQ ID NO: 218799 - DNA, 24 bp, Artificial sequence
  SiRNA target sequence
ttaaaaagaagggaccaaaagtta

SEQ ID NO: 218800 - DNA, 24 bp, Artificial sequence
  SiRNA target sequence
taaaaagaagggaccaaaagttaa

SEQ ID NO: 218801 - DNA, 24 bp, Artificial sequence
  SiRNA target sequence
aaaaagaagggaccaaaagttaaa

SEQ ID NO: 218802 - DNA, 24 bp, Artificial sequence
  SiRNA target sequence
aaaagaagggaccaaaagttaaag

SEQ ID NO: 218803 - DNA, 24 bp, Artificial sequence
  SiRNA target sequence
aaagaagggaccaaaagttaaagt

SEQ ID NO: 218804 - DNA, 24 bp, Artificial sequence
  SiRNA target sequence
aagaagggaccaaaagttaaagta

SEQ ID NO: 218805 - DNA, 24 bp, Artificial sequence
  SiRNA target sequence
agaagggaccaaaagttaaagtag

SEQ ID NO: 218806 - DNA, 24 bp, Artificial sequence
  SiRNA target sequence
gaagggaccaaaagttaaagtagg

SEQ ID NO: 218807 - DNA, 24 bp, Artificial sequence
  SiRNA target sequence
aagggaccaaaagttaaagtagga

SEQ ID NO: 218808 - DNA, 24 bp, Artificial sequence
  SiRNA target sequence
agggaccaaaagttaaagtaggat

SEQ ID NO: 218809 - DNA, 24 bp, Artificial sequence
  SiRNA target sequence
gggaccaaaagttaaagtaggatt

SEQ ID NO: 218810 - DNA, 24 bp, Artificial sequence
  SiRNA target sequence
ggaccaaaagttaaagtaggattt

SEQ ID NO: 218811 - DNA, 24 bp, Artificial sequence
  SiRNA target sequence
gaccaaaagttaaagtaggatttg

SEQ ID NO: 218812 - DNA, 24 bp, Artificial sequence
  SiRNA target sequence
accaaaagttaaagtaggatttgc

SEQ ID NO: 218813 - DNA, 24 bp, Artificial sequence
  SiRNA target sequence
ccaaaagttaaagtaggatttgcg

SEQ ID NO: 218814 - DNA, 24 bp, Artificial sequence
  SiRNA target sequence
caaaagttaaagtaggatttgcgg

SEQ ID NO: 218815 - DNA, 24 bp, Artificial sequence
  SiRNA target sequence
aaaagttaaagtaggatttgcgga

SEQ ID NO: 218816 - DNA, 24 bp, Artificial sequence
  SiRNA target sequence
aaagttaaagtaggatttgcggag

SEQ ID NO: 218817 - DNA, 24 bp, Artificial sequence
  SiRNA target sequence
aagttaaagtaggatttgcggagg

SEQ ID NO: 218818 - DNA, 24 bp, Artificial sequence
  SiRNA target sequence
agttaaagtaggatttgcggaggg

SEQ ID NO: 218819 - DNA, 24 bp, Artificial sequence
  SiRNA target sequence
gttaaagtaggatttgcggagggc

SEQ ID NO: 218820 - DNA, 24 bp, Artificial sequence
  SiRNA target sequence
ttaaagtaggatttgcggagggcc

SEQ ID NO: 218821 - DNA, 24 bp, Artificial sequence
  SiRNA target sequence
taaagtaggatttgcggagggcct

SEQ ID NO: 218822 - DNA, 24 bp, Artificial sequence
  SiRNA target sequence
aaagtaggatttgcggagggcctt

SEQ ID NO: 218823 - DNA, 24 bp, Artificial sequence
  SiRNA target sequence
aagtaggatttgcggagggcctta

SEQ ID NO: 218824 - DNA, 24 bp, Artificial sequence
  SiRNA target sequence
agtaggatttgcggagggccttaa

SEQ ID NO: 218825 - DNA, 24 bp, Artificial sequence
  SiRNA target sequence
gtaggatttgcggagggccttaaa

SEQ ID NO: 218826 - DNA, 24 bp, Artificial sequence
  SiRNA target sequence
taggatttgcggagggccttaaag

SEQ ID NO: 218827 - DNA, 24 bp, Artificial sequence
  SiRNA target sequence
aggatttgcggagggccttaaaga

SEQ ID NO: 218828 - DNA, 24 bp, Artificial sequence
  SiRNA target sequence
ggatttgcggagggccttaaagaa

SEQ ID NO: 218829 - DNA, 24 bp, Artificial sequence
  SiRNA target sequence
gatttgcggagggccttaaagaaa

SEQ ID NO: 218830 - DNA, 24 bp, Artificial sequence
  SiRNA target sequence
atttgcggagggccttaaagaaat

SEQ ID NO: 218831 - DNA, 24 bp, Artificial sequence
  SiRNA target sequence
tttgcggagggccttaaagaaatg

SEQ ID NO: 218832 - DNA, 24 bp, Artificial sequence
  SiRNA target sequence
ttgcggagggccttaaagaaatga

SEQ ID NO: 218833 - DNA, 24 bp, Artificial sequence
  SiRNA target sequence
tgcggagggccttaaagaaatgat

SEQ ID NO: 218834 - DNA, 24 bp, Artificial sequence
  SiRNA target sequence
gcggagggccttaaagaaatgatg

SEQ ID NO: 218835 - DNA, 24 bp, Artificial sequence
  SiRNA target sequence
cggagggccttaaagaaatgatgg

SEQ ID NO: 218836 - DNA, 24 bp, Artificial sequence
  SiRNA target sequence
ggagggccttaaagaaatgatggc

SEQ ID NO: 218837 - DNA, 24 bp, Artificial sequence
  SiRNA target sequence
gagggccttaaagaaatgatggca

SEQ ID NO: 218838 - DNA, 24 bp, Artificial sequence
  SiRNA target sequence
agggccttaaagaaatgatggcat

SEQ ID NO: 218839 - DNA, 24 bp, Artificial sequence
  SiRNA target sequence
gggccttaaagaaatgatggcatc

SEQ ID NO: 218840 - DNA, 24 bp, Artificial sequence
  SiRNA target sequence
ggccttaaagaaatgatggcatca

SEQ ID NO: 218841 - DNA, 24 bp, Artificial sequence
  SiRNA target sequence
gccttaaagaaatgatggcatcaa

SEQ ID NO: 218842 - DNA, 24 bp, Artificial sequence
  SiRNA target sequence
ccttaaagaaatgatggcatcaaa

SEQ ID NO: 218843 - DNA, 24 bp, Artificial sequence
  SiRNA target sequence
cttaaagaaatgatggcatcaaag

SEQ ID NO: 218844 - DNA, 24 bp, Artificial sequence
  SiRNA target sequence
ttaaagaaatgatggcatcaaagt

SEQ ID NO: 218845 - DNA, 24 bp, Artificial sequence
  SiRNA target sequence
taaagaaatgatggcatcaaagtt

SEQ ID NO: 218846 - DNA, 24 bp, Artificial sequence
  SiRNA target sequence
aaagaaatgatggcatcaaagtta

SEQ ID NO: 218847 - DNA, 24 bp, Artificial sequence
  SiRNA target sequence
aagaaatgatggcatcaaagttat

SEQ ID NO: 218848 - DNA, 24 bp, Artificial sequence
  SiRNA target sequence
agaaatgatggcatcaaagttatt

SEQ ID NO: 218849 - DNA, 24 bp, Artificial sequence
  SiRNA target sequence
gaaatgatggcatcaaagttatta

SEQ ID NO: 218850 - DNA, 24 bp, Artificial sequence
  SiRNA target sequence
aaatgatggcatcaaagttattac

SEQ ID NO: 218851 - DNA, 24 bp, Artificial sequence
  SiRNA target sequence
aatgatggcatcaaagttattact

SEQ ID NO: 218852 - DNA, 24 bp, Artificial sequence
  SiRNA target sequence
atgatggcatcaaagttattactt

SEQ ID NO: 218853 - DNA, 24 bp, Artificial sequence
  SiRNA target sequence
tgatggcatcaaagttattactta

SEQ ID NO: 218854 - DNA, 24 bp, Artificial sequence
  SiRNA target sequence
gatggcatcaaagttattacttaa

SEQ ID NO: 218855 - DNA, 24 bp, Artificial sequence
  SiRNA target sequence
atggcatcaaagttattacttaac

SEQ ID NO: 218856 - DNA, 24 bp, Artificial sequence
  SiRNA target sequence
tggcatcaaagttattacttaaca

SEQ ID NO: 218857 - DNA, 24 bp, Artificial sequence
  SiRNA target sequence
ggcatcaaagttattacttaacat

SEQ ID NO: 218858 - DNA, 24 bp, Artificial sequence
  SiRNA target sequence
gcatcaaagttattacttaacatt

SEQ ID NO: 218859 - DNA, 24 bp, Artificial sequence
  SiRNA target sequence
catcaaagttattacttaacattt

SEQ ID NO: 218860 - DNA, 24 bp, Artificial sequence
  SiRNA target sequence
atcaaagttattacttaacatttc

SEQ ID NO: 218861 - DNA, 24 bp, Artificial sequence
  SiRNA target sequence
tcaaagttattacttaacatttca

SEQ ID NO: 218862 - DNA, 24 bp, Artificial sequence
  SiRNA target sequence
caaagttattacttaacatttcat

SEQ ID NO: 218863 - DNA, 24 bp, Artificial sequence
  SiRNA target sequence
aaagttattacttaacatttcatt

SEQ ID NO: 218864 - DNA, 24 bp, Artificial sequence
  SiRNA target sequence
aagttattacttaacatttcatta

SEQ ID NO: 218865 - DNA, 24 bp, Artificial sequence
  SiRNA target sequence
agttattacttaacatttcattaa

SEQ ID NO: 218866 - DNA, 24 bp, Artificial sequence
  SiRNA target sequence
gttattacttaacatttcattaac

SEQ ID NO: 218867 - DNA, 24 bp, Artificial sequence
  SiRNA target sequence
ttattacttaacatttcattaact

SEQ ID NO: 218868 - DNA, 24 bp, Artificial sequence
  SiRNA target sequence
tattacttaacatttcattaactg

SEQ ID NO: 218869 - DNA, 24 bp, Artificial sequence
  SiRNA target sequence
attacttaacatttcattaactgt

SEQ ID NO: 218870 - DNA, 24 bp, Artificial sequence
  SiRNA target sequence
ttacttaacatttcattaactgtt

SEQ ID NO: 218871 - DNA, 24 bp, Artificial sequence
  SiRNA target sequence
tacttaacatttcattaactgtta

SEQ ID NO: 218872 - DNA, 24 bp, Artificial sequence
  SiRNA target sequence
acttaacatttcattaactgttat

SEQ ID NO: 218873 - DNA, 24 bp, Artificial sequence
  SiRNA target sequence
cttaacatttcattaactgttatg

SEQ ID NO: 218874 - DNA, 24 bp, Artificial sequence
  SiRNA target sequence
ttaacatttcattaactgttatgt

SEQ ID NO: 218875 - DNA, 24 bp, Artificial sequence
  SiRNA target sequence
taacatttcattaactgttatgtt

SEQ ID NO: 218876 - DNA, 24 bp, Artificial sequence
  SiRNA target sequence
aacatttcattaactgttatgttc

SEQ ID NO: 218877 - DNA, 24 bp, Artificial sequence
  SiRNA target sequence
acatttcattaactgttatgttct

SEQ ID NO: 218878 - DNA, 24 bp, Artificial sequence
  SiRNA target sequence
catttcattaactgttatgttcta

SEQ ID NO: 218879 - DNA, 24 bp, Artificial sequence
  SiRNA target sequence
atttcattaactgttatgttctat

SEQ ID NO: 218880 - DNA, 24 bp, Artificial sequence
  SiRNA target sequence
tttcattaactgttatgttctatg

SEQ ID NO: 218881 - DNA, 24 bp, Artificial sequence
  SiRNA target sequence
ttcattaactgttatgttctatgg

SEQ ID NO: 218882 - DNA, 24 bp, Artificial sequence
  SiRNA target sequence
tcattaactgttatgttctatggt

SEQ ID NO: 218883 - DNA, 24 bp, Artificial sequence
  SiRNA target sequence
cattaactgttatgttctatggta

SEQ ID NO: 218884 - DNA, 24 bp, Artificial sequence
  SiRNA target sequence
attaactgttatgttctatggtat

SEQ ID NO: 218885 - DNA, 24 bp, Artificial sequence
  SiRNA target sequence
ttaactgttatgttctatggtata

SEQ ID NO: 218886 - DNA, 24 bp, Artificial sequence
  SiRNA target sequence
taactgttatgttctatggtatat

SEQ ID NO: 218887 - DNA, 24 bp, Artificial sequence
  SiRNA target sequence
aactgttatgttctatggtatatc

SEQ ID NO: 218888 - DNA, 24 bp, Artificial sequence
  SiRNA target sequence
actgttatgttctatggtatatca

SEQ ID NO: 218889 - DNA, 24 bp, Artificial sequence
  SiRNA target sequence
ctgttatgttctatggtatatcaa

SEQ ID NO: 218890 - DNA, 24 bp, Artificial sequence
  SiRNA target sequence
tgttatgttctatggtatatcaac

SEQ ID NO: 218891 - DNA, 24 bp, Artificial sequence
  SiRNA target sequence
gttatgttctatggtatatcaact

SEQ ID NO: 218892 - DNA, 24 bp, Artificial sequence
  SiRNA target sequence
ttatgttctatggtatatcaacta

SEQ ID NO: 218893 - DNA, 24 bp, Artificial sequence
  SiRNA target sequence
tatgttctatggtatatcaactaa

SEQ ID NO: 218894 - DNA, 24 bp, Artificial sequence
  SiRNA target sequence
atgttctatggtatatcaactaat

SEQ ID NO: 218895 - DNA, 24 bp, Artificial sequence
  SiRNA target sequence
tgttctatggtatatcaactaatt

SEQ ID NO: 218896 - DNA, 24 bp, Artificial sequence
  SiRNA target sequence
gttctatggtatatcaactaattt

SEQ ID NO: 218897 - DNA, 24 bp, Artificial sequence
  SiRNA target sequence
ttctatggtatatcaactaattta

SEQ ID NO: 218898 - DNA, 24 bp, Artificial sequence
  SiRNA target sequence
tctatggtatatcaactaatttaa

SEQ ID NO: 218899 - DNA, 24 bp, Artificial sequence
  SiRNA target sequence
ctatggtatatcaactaatttaat

SEQ ID NO: 218900 - DNA, 24 bp, Artificial sequence
  SiRNA target sequence
tatggtatatcaactaatttaata

SEQ ID NO: 218901 - DNA, 24 bp, Artificial sequence
  SiRNA target sequence
atggtatatcaactaatttaatag

SEQ ID NO: 218902 - DNA, 24 bp, Artificial sequence
  SiRNA target sequence
tggtatatcaactaatttaataga

SEQ ID NO: 218903 - DNA, 24 bp, Artificial sequence
  SiRNA target sequence
ggtatatcaactaatttaatagaa

SEQ ID NO: 218904 - DNA, 24 bp, Artificial sequence
  SiRNA target sequence
gtatatcaactaatttaatagaat

SEQ ID NO: 218905 - DNA, 24 bp, Artificial sequence
  SiRNA target sequence
tatatcaactaatttaatagaatc

SEQ ID NO: 218906 - DNA, 24 bp, Artificial sequence
  SiRNA target sequence
atatcaactaatttaatagaatca

SEQ ID NO: 218907 - DNA, 24 bp, Artificial sequence
  SiRNA target sequence
tatcaactaatttaatagaatcaa

SEQ ID NO: 218908 - DNA, 24 bp, Artificial sequence
  SiRNA target sequence
atcaactaatttaatagaatcaac

SEQ ID NO: 218909 - DNA, 24 bp, Artificial sequence
  SiRNA target sequence
tcaactaatttaatagaatcaaca

SEQ ID NO: 218910 - DNA, 24 bp, Artificial sequence
  SiRNA target sequence
caactaatttaatagaatcaacat

SEQ ID NO: 218911 - DNA, 24 bp, Artificial sequence
  SiRNA target sequence
aactaatttaatagaatcaacatt

SEQ ID NO: 218912 - DNA, 24 bp, Artificial sequence
  SiRNA target sequence
actaatttaatagaatcaacattt

SEQ ID NO: 218913 - DNA, 24 bp, Artificial sequence
  SiRNA target sequence
ctaatttaatagaatcaacattta

SEQ ID NO: 218914 - DNA, 24 bp, Artificial sequence
  SiRNA target sequence
taatttaatagaatcaacatttaa

SEQ ID NO: 218915 - DNA, 24 bp, Artificial sequence
  SiRNA target sequence
aatttaatagaatcaacatttaaa

SEQ ID NO: 218916 - DNA, 24 bp, Artificial sequence
  SiRNA target sequence
atttaatagaatcaacatttaaaa

SEQ ID NO: 218917 - DNA, 24 bp, Artificial sequence
  SiRNA target sequence
tttaatagaatcaacatttaaaag

SEQ ID NO: 218918 - DNA, 24 bp, Artificial sequence
  SiRNA target sequence
ttaatagaatcaacatttaaaagt

SEQ ID NO: 218919 - DNA, 24 bp, Artificial sequence
  SiRNA target sequence
taatagaatcaacatttaaaagtg

SEQ ID NO: 218920 - DNA, 24 bp, Artificial sequence
  SiRNA target sequence
aatagaatcaacatttaaaagtgg

SEQ ID NO: 218921 - DNA, 24 bp, Artificial sequence
  SiRNA target sequence
atagaatcaacatttaaaagtgga

SEQ ID NO: 218922 - DNA, 24 bp, Artificial sequence
  SiRNA target sequence
tagaatcaacatttaaaagtggac

SEQ ID NO: 218923 - DNA, 24 bp, Artificial sequence
  SiRNA target sequence
agaatcaacatttaaaagtggact

SEQ ID NO: 218924 - DNA, 24 bp, Artificial sequence
  SiRNA target sequence
gaatcaacatttaaaagtggactt

SEQ ID NO: 218925 - DNA, 24 bp, Artificial sequence
  SiRNA target sequence
aatcaacatttaaaagtggacttg

SEQ ID NO: 218926 - DNA, 24 bp, Artificial sequence
  SiRNA target sequence
atcaacatttaaaagtggacttgt

SEQ ID NO: 218927 - DNA, 24 bp, Artificial sequence
  SiRNA target sequence
tcaacatttaaaagtggacttgtg

SEQ ID NO: 218928 - DNA, 24 bp, Artificial sequence
  SiRNA target sequence
caacatttaaaagtggacttgtga

SEQ ID NO: 218929 - DNA, 24 bp, Artificial sequence
  SiRNA target sequence
aacatttaaaagtggacttgtgaa

SEQ ID NO: 218930 - DNA, 24 bp, Artificial sequence
  SiRNA target sequence
acatttaaaagtggacttgtgaaa

SEQ ID NO: 218931 - DNA, 24 bp, Artificial sequence
  SiRNA target sequence
catttaaaagtggacttgtgaaag

SEQ ID NO: 218932 - DNA, 24 bp, Artificial sequence
  SiRNA target sequence
atttaaaagtggacttgtgaaagg

SEQ ID NO: 218933 - DNA, 24 bp, Artificial sequence
  SiRNA target sequence
tttaaaagtggacttgtgaaaggt

SEQ ID NO: 218934 - DNA, 24 bp, Artificial sequence
  SiRNA target sequence
ttaaaagtggacttgtgaaaggtg

SEQ ID NO: 218935 - DNA, 24 bp, Artificial sequence
  SiRNA target sequence
taaaagtggacttgtgaaaggtgc

SEQ ID NO: 218936 - DNA, 24 bp, Artificial sequence
  SiRNA target sequence
aaaagtggacttgtgaaaggtgca

SEQ ID NO: 218937 - DNA, 24 bp, Artificial sequence
  SiRNA target sequence
aaagtggacttgtgaaaggtgcag

SEQ ID NO: 218938 - DNA, 24 bp, Artificial sequence
  SiRNA target sequence
aagtggacttgtgaaaggtgcaga

SEQ ID NO: 218939 - DNA, 24 bp, Artificial sequence
  SiRNA target sequence
agtggacttgtgaaaggtgcagaa

SEQ ID NO: 218940 - DNA, 24 bp, Artificial sequence
  SiRNA target sequence
gtggacttgtgaaaggtgcagaag

SEQ ID NO: 218941 - DNA, 24 bp, Artificial sequence
  SiRNA target sequence
tggacttgtgaaaggtgcagaaga

SEQ ID NO: 218942 - DNA, 24 bp, Artificial sequence
  SiRNA target sequence
ggacttgtgaaaggtgcagaagaa

SEQ ID NO: 218943 - DNA, 24 bp, Artificial sequence
  SiRNA target sequence
gacttgtgaaaggtgcagaagaat

SEQ ID NO: 218944 - DNA, 24 bp, Artificial sequence
  SiRNA target sequence
acttgtgaaaggtgcagaagaatt

SEQ ID NO: 218945 - DNA, 24 bp, Artificial sequence
  SiRNA target sequence
cttgtgaaaggtgcagaagaatta

SEQ ID NO: 218946 - DNA, 24 bp, Artificial sequence
  SiRNA target sequence
ttgtgaaaggtgcagaagaattaa

SEQ ID NO: 218947 - DNA, 24 bp, Artificial sequence
  SiRNA target sequence
tgtgaaaggtgcagaagaattaaa

SEQ ID NO: 218948 - DNA, 24 bp, Artificial sequence
  SiRNA target sequence
gtgaaaggtgcagaagaattaaac

SEQ ID NO: 218949 - DNA, 24 bp, Artificial sequence
  SiRNA target sequence
tgaaaggtgcagaagaattaaacg

SEQ ID NO: 218950 - DNA, 24 bp, Artificial sequence
  SiRNA target sequence
gaaaggtgcagaagaattaaacga

SEQ ID NO: 218951 - DNA, 24 bp, Artificial sequence
  SiRNA target sequence
aaaggtgcagaagaattaaacgag

SEQ ID NO: 218952 - DNA, 24 bp, Artificial sequence
  SiRNA target sequence
aaggtgcagaagaattaaacgaga

SEQ ID NO: 218953 - DNA, 24 bp, Artificial sequence
  SiRNA target sequence
aggtgcagaagaattaaacgagaa

SEQ ID NO: 218954 - DNA, 24 bp, Artificial sequence
  SiRNA target sequence
ggtgcagaagaattaaacgagaat

SEQ ID NO: 218955 - DNA, 24 bp, Artificial sequence
  SiRNA target sequence
gtgcagaagaattaaacgagaata

SEQ ID NO: 218956 - DNA, 24 bp, Artificial sequence
  SiRNA target sequence
tgcagaagaattaaacgagaatac

SEQ ID NO: 218957 - DNA, 24 bp, Artificial sequence
  SiRNA target sequence
gcagaagaattaaacgagaatact

SEQ ID NO: 218958 - DNA, 24 bp, Artificial sequence
  SiRNA target sequence
cagaagaattaaacgagaatacta

SEQ ID NO: 218959 - DNA, 24 bp, Artificial sequence
  SiRNA target sequence
agaagaattaaacgagaatactaa

SEQ ID NO: 218960 - DNA, 24 bp, Artificial sequence
  SiRNA target sequence
gaagaattaaacgagaatactaaa

SEQ ID NO: 218961 - DNA, 24 bp, Artificial sequence
  SiRNA target sequence
aagaattaaacgagaatactaaaa

SEQ ID NO: 218962 - DNA, 24 bp, Artificial sequence
  SiRNA target sequence
agaattaaacgagaatactaaaag

SEQ ID NO: 218963 - DNA, 24 bp, Artificial sequence
  SiRNA target sequence
gaattaaacgagaatactaaaagt

SEQ ID NO: 218964 - DNA, 24 bp, Artificial sequence
  SiRNA target sequence
aattaaacgagaatactaaaagtt

SEQ ID NO: 218965 - DNA, 24 bp, Artificial sequence
  SiRNA target sequence
attaaacgagaatactaaaagtta

SEQ ID NO: 218966 - DNA, 24 bp, Artificial sequence
  SiRNA target sequence
ttaaacgagaatactaaaagttat

SEQ ID NO: 218967 - DNA, 24 bp, Artificial sequence
  SiRNA target sequence
taaacgagaatactaaaagttatt

SEQ ID NO: 218968 - DNA, 24 bp, Artificial sequence
  SiRNA target sequence
aaacgagaatactaaaagttattc

SEQ ID NO: 218969 - DNA, 24 bp, Artificial sequence
  SiRNA target sequence
aacgagaatactaaaagttattct

SEQ ID NO: 218970 - DNA, 24 bp, Artificial sequence
  SiRNA target sequence
acgagaatactaaaagttattcta

SEQ ID NO: 218971 - DNA, 24 bp, Artificial sequence
  SiRNA target sequence
cgagaatactaaaagttattctat

SEQ ID NO: 218972 - DNA, 24 bp, Artificial sequence
  SiRNA target sequence
gagaatactaaaagttattctatg

SEQ ID NO: 218973 - DNA, 24 bp, Artificial sequence
  SiRNA target sequence
agaatactaaaagttattctatgg

SEQ ID NO: 218974 - DNA, 24 bp, Artificial sequence
  SiRNA target sequence
gaatactaaaagttattctatggg

SEQ ID NO: 218975 - DNA, 24 bp, Artificial sequence
  SiRNA target sequence
aatactaaaagttattctatggga

SEQ ID NO: 218976 - DNA, 24 bp, Artificial sequence
  SiRNA target sequence
atactaaaagttattctatgggat

SEQ ID NO: 218977 - DNA, 24 bp, Artificial sequence
  SiRNA target sequence
tactaaaagttattctatgggata

SEQ ID NO: 218978 - DNA, 24 bp, Artificial sequence
  SiRNA target sequence
actaaaagttattctatgggatat

SEQ ID NO: 218979 - DNA, 24 bp, Artificial sequence
  SiRNA target sequence
ctaaaagttattctatgggatata

SEQ ID NO: 218980 - DNA, 24 bp, Artificial sequence
  SiRNA target sequence
taaaagttattctatgggatataa

SEQ ID NO: 218981 - DNA, 24 bp, Artificial sequence
  SiRNA target sequence
aaaagttattctatgggatataat

SEQ ID NO: 218982 - DNA, 24 bp, Artificial sequence
  SiRNA target sequence
aaagttattctatgggatataatt

SEQ ID NO: 218983 - DNA, 24 bp, Artificial sequence
  SiRNA target sequence
aagttattctatgggatataattc

SEQ ID NO: 218984 - DNA, 24 bp, Artificial sequence
  SiRNA target sequence
agttattctatgggatataattca

SEQ ID NO: 218985 - DNA, 24 bp, Artificial sequence
  SiRNA target sequence
gttattctatgggatataattcat

SEQ ID NO: 218986 - DNA, 24 bp, Artificial sequence
  SiRNA target sequence
ttattctatgggatataattcatt

SEQ ID NO: 218987 - DNA, 24 bp, Artificial sequence
  SiRNA target sequence
tattctatgggatataattcattt

SEQ ID NO: 218988 - DNA, 24 bp, Artificial sequence
  SiRNA target sequence
attctatgggatataattcatttg

SEQ ID NO: 218989 - DNA, 24 bp, Artificial sequence
  SiRNA target sequence
ttctatgggatataattcatttga

SEQ ID NO: 218990 - DNA, 24 bp, Artificial sequence
  SiRNA target sequence
tctatgggatataattcatttgaa

SEQ ID NO: 218991 - DNA, 24 bp, Artificial sequence
  SiRNA target sequence
ctatgggatataattcatttgaac

SEQ ID NO: 218992 - DNA, 24 bp, Artificial sequence
  SiRNA target sequence
tatgggatataattcatttgaaca

SEQ ID NO: 218993 - DNA, 24 bp, Artificial sequence
  SiRNA target sequence
atgggatataattcatttgaacaa

SEQ ID NO: 218994 - DNA, 24 bp, Artificial sequence
  SiRNA target sequence
tgggatataattcatttgaacaaa

SEQ ID NO: 218995 - DNA, 24 bp, Artificial sequence
  SiRNA target sequence
gggatataattcatttgaacaaaa

SEQ ID NO: 218996 - DNA, 24 bp, Artificial sequence
  SiRNA target sequence
ggatataattcatttgaacaaaag

SEQ ID NO: 218997 - DNA, 24 bp, Artificial sequence
  SiRNA target sequence
gatataattcatttgaacaaaaga

SEQ ID NO: 218998 - DNA, 24 bp, Artificial sequence
  SiRNA target sequence
atataattcatttgaacaaaagat

SEQ ID NO: 218999 - DNA, 24 bp, Artificial sequence
  SiRNA target sequence
tataattcatttgaacaaaagata

SEQ ID NO: 219000 - DNA, 24 bp, Artificial sequence
  SiRNA target sequence
ataattcatttgaacaaaagatag

SEQ ID NO: 219001 - DNA, 24 bp, Artificial sequence
  SiRNA target sequence
taattcatttgaacaaaagatagc

SEQ ID NO: 219002 - DNA, 24 bp, Artificial sequence
  SiRNA target sequence
aattcatttgaacaaaagatagca

SEQ ID NO: 219003 - DNA, 24 bp, Artificial sequence
  SiRNA target sequence
attcatttgaacaaaagatagcat

SEQ ID NO: 219004 - DNA, 24 bp, Artificial sequence
  SiRNA target sequence
ttcatttgaacaaaagatagcatc

SEQ ID NO: 219005 - DNA, 24 bp, Artificial sequence
  SiRNA target sequence
tcatttgaacaaaagatagcatca

SEQ ID NO: 219006 - DNA, 24 bp, Artificial sequence
  SiRNA target sequence
catttgaacaaaagatagcatcaa

SEQ ID NO: 219007 - DNA, 24 bp, Artificial sequence
  SiRNA target sequence
atttgaacaaaagatagcatcaat

SEQ ID NO: 219008 - DNA, 24 bp, Artificial sequence
  SiRNA target sequence
tttgaacaaaagatagcatcaata

SEQ ID NO: 219009 - DNA, 24 bp, Artificial sequence
  SiRNA target sequence
ttgaacaaaagatagcatcaataa

SEQ ID NO: 219010 - DNA, 24 bp, Artificial sequence
  SiRNA target sequence
tgaacaaaagatagcatcaataac

SEQ ID NO: 219011 - DNA, 24 bp, Artificial sequence
  SiRNA target sequence
gaacaaaagatagcatcaataact

SEQ ID NO: 219012 - DNA, 24 bp, Artificial sequence
  SiRNA target sequence
aacaaaagatagcatcaataactg

SEQ ID NO: 219013 - DNA, 24 bp, Artificial sequence
  SiRNA target sequence
acaaaagatagcatcaataactgt

SEQ ID NO: 219014 - DNA, 24 bp, Artificial sequence
  SiRNA target sequence
caaaagatagcatcaataactgtt

SEQ ID NO: 219015 - DNA, 24 bp, Artificial sequence
  SiRNA target sequence
aaaagatagcatcaataactgtta

SEQ ID NO: 219016 - DNA, 24 bp, Artificial sequence
  SiRNA target sequence
aaagatagcatcaataactgttat

SEQ ID NO: 219017 - DNA, 24 bp, Artificial sequence
  SiRNA target sequence
aagatagcatcaataactgttatt

SEQ ID NO: 219018 - DNA, 24 bp, Artificial sequence
  SiRNA target sequence
agatagcatcaataactgttatta

SEQ ID NO: 219019 - DNA, 24 bp, Artificial sequence
  SiRNA target sequence
gatagcatcaataactgttattat

SEQ ID NO: 219020 - DNA, 24 bp, Artificial sequence
  SiRNA target sequence
atagcatcaataactgttattatc

SEQ ID NO: 219021 - DNA, 24 bp, Artificial sequence
  SiRNA target sequence
tagcatcaataactgttattatcc

SEQ ID NO: 219022 - DNA, 24 bp, Artificial sequence
  SiRNA target sequence
agcatcaataactgttattatcct

SEQ ID NO: 219023 - DNA, 24 bp, Artificial sequence
  SiRNA target sequence
gcatcaataactgttattatcctg

SEQ ID NO: 219024 - DNA, 24 bp, Artificial sequence
  SiRNA target sequence
catcaataactgttattatcctgc

SEQ ID NO: 219025 - DNA, 24 bp, Artificial sequence
  SiRNA target sequence
atcaataactgttattatcctgct

SEQ ID NO: 219026 - DNA, 24 bp, Artificial sequence
  SiRNA target sequence
tcaataactgttattatcctgctt

SEQ ID NO: 219027 - DNA, 24 bp, Artificial sequence
  SiRNA target sequence
caataactgttattatcctgcttt

SEQ ID NO: 219028 - DNA, 24 bp, Artificial sequence
  SiRNA target sequence
aataactgttattatcctgctttt

SEQ ID NO: 219029 - DNA, 24 bp, Artificial sequence
  SiRNA target sequence
ataactgttattatcctgctttta

SEQ ID NO: 219030 - DNA, 24 bp, Artificial sequence
  SiRNA target sequence
taactgttattatcctgcttttat

SEQ ID NO: 219031 - DNA, 24 bp, Artificial sequence
  SiRNA target sequence
aactgttattatcctgcttttatc

SEQ ID NO: 219032 - DNA, 24 bp, Artificial sequence
  SiRNA target sequence
actgttattatcctgcttttatca

SEQ ID NO: 219033 - DNA, 24 bp, Artificial sequence
  SiRNA target sequence
ctgttattatcctgcttttatcac

SEQ ID NO: 219034 - DNA, 24 bp, Artificial sequence
  SiRNA target sequence
tgttattatcctgcttttatcacc

SEQ ID NO: 219035 - DNA, 24 bp, Artificial sequence
  SiRNA target sequence
gttattatcctgcttttatcacca

SEQ ID NO: 219036 - DNA, 24 bp, Artificial sequence
  SiRNA target sequence
ttattatcctgcttttatcaccat

SEQ ID NO: 219037 - DNA, 24 bp, Artificial sequence
  SiRNA target sequence
tattatcctgcttttatcaccatt

SEQ ID NO: 219038 - DNA, 24 bp, Artificial sequence
  SiRNA target sequence
attatcctgcttttatcaccattt

SEQ ID NO: 219039 - DNA, 24 bp, Artificial sequence
  SiRNA target sequence
ttatcctgcttttatcaccatttc

SEQ ID NO: 219040 - DNA, 24 bp, Artificial sequence
  SiRNA target sequence
tatcctgcttttatcaccatttcc

SEQ ID NO: 219041 - DNA, 24 bp, Artificial sequence
  SiRNA target sequence
atcctgcttttatcaccatttcca

SEQ ID NO: 219042 - DNA, 24 bp, Artificial sequence
  SiRNA target sequence
tcctgcttttatcaccatttccaa

SEQ ID NO: 219043 - DNA, 24 bp, Artificial sequence
  SiRNA target sequence
cctgcttttatcaccatttccaaa

SEQ ID NO: 219044 - DNA, 24 bp, Artificial sequence
  SiRNA target sequence
ctgcttttatcaccatttccaaaa

SEQ ID NO: 219045 - DNA, 24 bp, Artificial sequence
  SiRNA target sequence
tgcttttatcaccatttccaaaat

SEQ ID NO: 219046 - DNA, 24 bp, Artificial sequence
  SiRNA target sequence
gcttttatcaccatttccaaaatt

SEQ ID NO: 219047 - DNA, 24 bp, Artificial sequence
  SiRNA target sequence
cttttatcaccatttccaaaatta

SEQ ID NO: 219048 - DNA, 24 bp, Artificial sequence
  SiRNA target sequence
ttttatcaccatttccaaaattaa

SEQ ID NO: 219049 - DNA, 24 bp, Artificial sequence
  SiRNA target sequence
tttatcaccatttccaaaattaat

SEQ ID NO: 219050 - DNA, 24 bp, Artificial sequence
  SiRNA target sequence
ttatcaccatttccaaaattaata

SEQ ID NO: 219051 - DNA, 24 bp, Artificial sequence
  SiRNA target sequence
tatcaccatttccaaaattaatac

SEQ ID NO: 219052 - DNA, 24 bp, Artificial sequence
  SiRNA target sequence
atcaccatttccaaaattaataca

SEQ ID NO: 219053 - DNA, 24 bp, Artificial sequence
  SiRNA target sequence
tcaccatttccaaaattaatacaa

SEQ ID NO: 219054 - DNA, 24 bp, Artificial sequence
  SiRNA target sequence
caccatttccaaaattaatacaaa

SEQ ID NO: 219055 - DNA, 24 bp, Artificial sequence
  SiRNA target sequence
accatttccaaaattaatacaaac

SEQ ID NO: 219056 - DNA, 24 bp, Artificial sequence
  SiRNA target sequence
ccatttccaaaattaatacaaacc

SEQ ID NO: 219057 - DNA, 24 bp, Artificial sequence
  SiRNA target sequence
catttccaaaattaatacaaacca

SEQ ID NO: 219058 - DNA, 24 bp, Artificial sequence
  SiRNA target sequence
atttccaaaattaatacaaaccaa

SEQ ID NO: 219059 - DNA, 24 bp, Artificial sequence
  SiRNA target sequence
tttccaaaattaatacaaaccaaa

SEQ ID NO: 219060 - DNA, 24 bp, Artificial sequence
  SiRNA target sequence
ttccaaaattaatacaaaccaaag

SEQ ID NO: 219061 - DNA, 24 bp, Artificial sequence
  SiRNA target sequence
tccaaaattaatacaaaccaaagg

SEQ ID NO: 219062 - DNA, 24 bp, Artificial sequence
  SiRNA target sequence
ccaaaattaatacaaaccaaagga

SEQ ID NO: 219063 - DNA, 24 bp, Artificial sequence
  SiRNA target sequence
caaaattaatacaaaccaaaggat

SEQ ID NO: 219064 - DNA, 24 bp, Artificial sequence
  SiRNA target sequence
aaaattaatacaaaccaaaggatg

SEQ ID NO: 219065 - DNA, 24 bp, Artificial sequence
  SiRNA target sequence
aaattaatacaaaccaaaggatgg

SEQ ID NO: 219066 - DNA, 24 bp, Artificial sequence
  SiRNA target sequence
aattaatacaaaccaaaggatgga

SEQ ID NO: 219067 - DNA, 24 bp, Artificial sequence
  SiRNA target sequence
attaatacaaaccaaaggatggat

SEQ ID NO: 219068 - DNA, 24 bp, Artificial sequence
  SiRNA target sequence
ttaatacaaaccaaaggatggata

SEQ ID NO: 219069 - DNA, 24 bp, Artificial sequence
  SiRNA target sequence
taatacaaaccaaaggatggatat

SEQ ID NO: 219070 - DNA, 24 bp, Artificial sequence
  SiRNA target sequence
aatacaaaccaaaggatggatatt

SEQ ID NO: 219071 - DNA, 24 bp, Artificial sequence
  SiRNA target sequence
atacaaaccaaaggatggatattt

SEQ ID NO: 219072 - DNA, 24 bp, Artificial sequence
  SiRNA target sequence
tacaaaccaaaggatggatatttg

SEQ ID NO: 219073 - DNA, 24 bp, Artificial sequence
  SiRNA target sequence
acaaaccaaaggatggatatttgt

SEQ ID NO: 219074 - DNA, 24 bp, Artificial sequence
  SiRNA target sequence
caaaccaaaggatggatatttgtt

SEQ ID NO: 219075 - DNA, 24 bp, Artificial sequence
  SiRNA target sequence
aaaccaaaggatggatatttgttg

SEQ ID NO: 219076 - DNA, 24 bp, Artificial sequence
  SiRNA target sequence
aaccaaaggatggatatttgttgc

SEQ ID NO: 219077 - DNA, 24 bp, Artificial sequence
  SiRNA target sequence
accaaaggatggatatttgttgcc

SEQ ID NO: 219078 - DNA, 24 bp, Artificial sequence
  SiRNA target sequence
ccaaaggatggatatttgttgcca

SEQ ID NO: 219079 - DNA, 24 bp, Artificial sequence
  SiRNA target sequence
caaaggatggatatttgttgccat

SEQ ID NO: 219080 - DNA, 24 bp, Artificial sequence
  SiRNA target sequence
aaaggatggatatttgttgccata

SEQ ID NO: 219081 - DNA, 24 bp, Artificial sequence
  SiRNA target sequence
aaggatggatatttgttgccatag

SEQ ID NO: 219082 - DNA, 24 bp, Artificial sequence
  SiRNA target sequence
aggatggatatttgttgccatagc

SEQ ID NO: 219083 - DNA, 24 bp, Artificial sequence
  SiRNA target sequence
ggatggatatttgttgccatagcg

SEQ ID NO: 219084 - DNA, 24 bp, Artificial sequence
  SiRNA target sequence
gatggatatttgttgccatagcgt

SEQ ID NO: 219085 - DNA, 24 bp, Artificial sequence
  SiRNA target sequence
atggatatttgttgccatagcgtg

SEQ ID NO: 219086 - DNA, 24 bp, Artificial sequence
  SiRNA target sequence
tggatatttgttgccatagcgtgc

SEQ ID NO: 219087 - DNA, 24 bp, Artificial sequence
  SiRNA target sequence
ggatatttgttgccatagcgtgcc

SEQ ID NO: 219088 - DNA, 24 bp, Artificial sequence
  SiRNA target sequence
gatatttgttgccatagcgtgccc

SEQ ID NO: 219089 - DNA, 24 bp, Artificial sequence
  SiRNA target sequence
atatttgttgccatagcgtgccca

SEQ ID NO: 219090 - DNA, 24 bp, Artificial sequence
  SiRNA target sequence
tatttgttgccatagcgtgcccac

SEQ ID NO: 219091 - DNA, 24 bp, Artificial sequence
  SiRNA target sequence
atttgttgccatagcgtgcccact

SEQ ID NO: 219092 - DNA, 24 bp, Artificial sequence
  SiRNA target sequence
tttgttgccatagcgtgcccactt

SEQ ID NO: 219093 - DNA, 24 bp, Artificial sequence
  SiRNA target sequence
ttgttgccatagcgtgcccactta

SEQ ID NO: 219094 - DNA, 24 bp, Artificial sequence
  SiRNA target sequence
tgttgccatagcgtgcccacttat

SEQ ID NO: 219095 - DNA, 24 bp, Artificial sequence
  SiRNA target sequence
gttgccatagcgtgcccacttatt

SEQ ID NO: 219096 - DNA, 24 bp, Artificial sequence
  SiRNA target sequence
ttgccatagcgtgcccacttatta

SEQ ID NO: 219097 - DNA, 24 bp, Artificial sequence
  SiRNA target sequence
tgccatagcgtgcccacttattac

SEQ ID NO: 219098 - DNA, 24 bp, Artificial sequence
  SiRNA target sequence
gccatagcgtgcccacttattacc

SEQ ID NO: 219099 - DNA, 24 bp, Artificial sequence
  SiRNA target sequence
ccatagcgtgcccacttattaccc

SEQ ID NO: 219100 - DNA, 24 bp, Artificial sequence
  SiRNA target sequence
catagcgtgcccacttattaccct

SEQ ID NO: 219101 - DNA, 24 bp, Artificial sequence
  SiRNA target sequence
atagcgtgcccacttattaccctt

SEQ ID NO: 219102 - DNA, 24 bp, Artificial sequence
  SiRNA target sequence
tagcgtgcccacttattacccttt

SEQ ID NO: 219103 - DNA, 24 bp, Artificial sequence
  SiRNA target sequence
agcgtgcccacttattaccctttt

SEQ ID NO: 219104 - DNA, 24 bp, Artificial sequence
  SiRNA target sequence
gcgtgcccacttattacccttttt

SEQ ID NO: 219105 - DNA, 24 bp, Artificial sequence
  SiRNA target sequence
cgtgcccacttattaccctttttg

SEQ ID NO: 219106 - DNA, 24 bp, Artificial sequence
  SiRNA target sequence
gtgcccacttattaccctttttgc

SEQ ID NO: 219107 - DNA, 24 bp, Artificial sequence
  SiRNA target sequence
tgcccacttattaccctttttgct

SEQ ID NO: 219108 - DNA, 24 bp, Artificial sequence
  SiRNA target sequence
gcccacttattaccctttttgctg

SEQ ID NO: 219109 - DNA, 24 bp, Artificial sequence
  SiRNA target sequence
cccacttattaccctttttgctgt

SEQ ID NO: 219110 - DNA, 24 bp, Artificial sequence
  SiRNA target sequence
ccacttattaccctttttgctgta

SEQ ID NO: 219111 - DNA, 24 bp, Artificial sequence
  SiRNA target sequence
cacttattaccctttttgctgtag

SEQ ID NO: 219112 - DNA, 24 bp, Artificial sequence
  SiRNA target sequence
acttattaccctttttgctgtagt

SEQ ID NO: 219113 - DNA, 24 bp, Artificial sequence
  SiRNA target sequence
cttattaccctttttgctgtagtt

SEQ ID NO: 219114 - DNA, 24 bp, Artificial sequence
  SiRNA target sequence
ttattaccctttttgctgtagttt

SEQ ID NO: 219115 - DNA, 24 bp, Artificial sequence
  SiRNA target sequence
tattaccctttttgctgtagtttc

SEQ ID NO: 219116 - DNA, 24 bp, Artificial sequence
  SiRNA target sequence
attaccctttttgctgtagtttct

SEQ ID NO: 219117 - DNA, 24 bp, Artificial sequence
  SiRNA target sequence
ttaccctttttgctgtagtttctg

SEQ ID NO: 219118 - DNA, 24 bp, Artificial sequence
  SiRNA target sequence
taccctttttgctgtagtttctgt

SEQ ID NO: 219119 - DNA, 24 bp, Artificial sequence
  SiRNA target sequence
accctttttgctgtagtttctgtg

SEQ ID NO: 219120 - DNA, 24 bp, Artificial sequence
  SiRNA target sequence
ccctttttgctgtagtttctgtgt

SEQ ID NO: 219121 - DNA, 24 bp, Artificial sequence
  SiRNA target sequence
cctttttgctgtagtttctgtgtg

SEQ ID NO: 219122 - DNA, 24 bp, Artificial sequence
  SiRNA target sequence
ctttttgctgtagtttctgtgtgt

SEQ ID NO: 219123 - DNA, 24 bp, Artificial sequence
  SiRNA target sequence
tttttgctgtagtttctgtgtgtg

SEQ ID NO: 219124 - DNA, 24 bp, Artificial sequence
  SiRNA target sequence
ttttgctgtagtttctgtgtgtgg

SEQ ID NO: 219125 - DNA, 24 bp, Artificial sequence
  SiRNA target sequence
tttgctgtagtttctgtgtgtggt

SEQ ID NO: 219126 - DNA, 24 bp, Artificial sequence
  SiRNA target sequence
ttgctgtagtttctgtgtgtggtc

SEQ ID NO: 219127 - DNA, 24 bp, Artificial sequence
  SiRNA target sequence
tgctgtagtttctgtgtgtggtct

SEQ ID NO: 219128 - DNA, 24 bp, Artificial sequence
  SiRNA target sequence
gctgtagtttctgtgtgtggtctt

SEQ ID NO: 219129 - DNA, 24 bp, Artificial sequence
  SiRNA target sequence
ctgtagtttctgtgtgtggtcttg

SEQ ID NO: 219130 - DNA, 24 bp, Artificial sequence
  SiRNA target sequence
tgtagtttctgtgtgtggtcttgc

SEQ ID NO: 219131 - DNA, 24 bp, Artificial sequence
  SiRNA target sequence
gtagtttctgtgtgtggtcttgct

SEQ ID NO: 219132 - DNA, 24 bp, Artificial sequence
  SiRNA target sequence
tagtttctgtgtgtggtcttgctt

SEQ ID NO: 219133 - DNA, 24 bp, Artificial sequence
  SiRNA target sequence
agtttctgtgtgtggtcttgcttt

SEQ ID NO: 219134 - DNA, 24 bp, Artificial sequence
  SiRNA target sequence
gtttctgtgtgtggtcttgctttt

SEQ ID NO: 219135 - DNA, 24 bp, Artificial sequence
  SiRNA target sequence
tttctgtgtgtggtcttgcttttt

SEQ ID NO: 219136 - DNA, 24 bp, Artificial sequence
  SiRNA target sequence
ttctgtgtgtggtcttgcttttta

SEQ ID NO: 219137 - DNA, 24 bp, Artificial sequence
  SiRNA target sequence
tctgtgtgtggtcttgctttttac

SEQ ID NO: 219138 - DNA, 24 bp, Artificial sequence
  SiRNA target sequence
ctgtgtgtggtcttgctttttaca

SEQ ID NO: 219139 - DNA, 24 bp, Artificial sequence
  SiRNA target sequence
tgtgtgtggtcttgctttttacaa

SEQ ID NO: 219140 - DNA, 24 bp, Artificial sequence
  SiRNA target sequence
gtgtgtggtcttgctttttacaat

SEQ ID NO: 219141 - DNA, 24 bp, Artificial sequence
  SiRNA target sequence
tgtgtggtcttgctttttacaatt

SEQ ID NO: 219142 - DNA, 24 bp, Artificial sequence
  SiRNA target sequence
gtgtggtcttgctttttacaatta

SEQ ID NO: 219143 - DNA, 24 bp, Artificial sequence
  SiRNA target sequence
tgtggtcttgctttttacaattat

SEQ ID NO: 219144 - DNA, 24 bp, Artificial sequence
  SiRNA target sequence
gtggtcttgctttttacaattatc

SEQ ID NO: 219145 - DNA, 24 bp, Artificial sequence
  SiRNA target sequence
tggtcttgctttttacaattatcc

SEQ ID NO: 219146 - DNA, 24 bp, Artificial sequence
  SiRNA target sequence
ggtcttgctttttacaattatccg

SEQ ID NO: 219147 - DNA, 24 bp, Artificial sequence
  SiRNA target sequence
gtcttgctttttacaattatccgg

SEQ ID NO: 219148 - DNA, 24 bp, Artificial sequence
  SiRNA target sequence
tcttgctttttacaattatccggc

SEQ ID NO: 219149 - DNA, 24 bp, Artificial sequence
  SiRNA target sequence
cttgctttttacaattatccggca

SEQ ID NO: 219150 - DNA, 24 bp, Artificial sequence
  SiRNA target sequence
ttgctttttacaattatccggcaa

SEQ ID NO: 219151 - DNA, 24 bp, Artificial sequence
  SiRNA target sequence
tgctttttacaattatccggcaac

SEQ ID NO: 219152 - DNA, 24 bp, Artificial sequence
  SiRNA target sequence
gctttttacaattatccggcaaca

SEQ ID NO: 219153 - DNA, 24 bp, Artificial sequence
  SiRNA target sequence
ctttttacaattatccggcaacaa

SEQ ID NO: 219154 - DNA, 24 bp, Artificial sequence
  SiRNA target sequence
tttttacaattatccggcaacaaa

SEQ ID NO: 219155 - DNA, 24 bp, Artificial sequence
  SiRNA target sequence
ttttacaattatccggcaacaaat

SEQ ID NO: 219156 - DNA, 24 bp, Artificial sequence
  SiRNA target sequence
tttacaattatccggcaacaaata

SEQ ID NO: 219157 - DNA, 24 bp, Artificial sequence
  SiRNA target sequence
ttacaattatccggcaacaaataa

SEQ ID NO: 219158 - DNA, 24 bp, Artificial sequence
  SiRNA target sequence
tacaattatccggcaacaaataat

SEQ ID NO: 219159 - DNA, 24 bp, Artificial sequence
  SiRNA target sequence
acaattatccggcaacaaataatg

SEQ ID NO: 219160 - DNA, 24 bp, Artificial sequence
  SiRNA target sequence
caattatccggcaacaaataatga

SEQ ID NO: 219161 - DNA, 24 bp, Artificial sequence
  SiRNA target sequence
aattatccggcaacaaataatgac

SEQ ID NO: 219162 - DNA, 24 bp, Artificial sequence
  SiRNA target sequence
attatccggcaacaaataatgaca

SEQ ID NO: 219163 - DNA, 24 bp, Artificial sequence
  SiRNA target sequence
ttatccggcaacaaataatgacac

SEQ ID NO: 219164 - DNA, 24 bp, Artificial sequence
  SiRNA target sequence
tatccggcaacaaataatgacaca

SEQ ID NO: 219165 - DNA, 24 bp, Artificial sequence
  SiRNA target sequence
atccggcaacaaataatgacacaa

SEQ ID NO: 219166 - DNA, 24 bp, Artificial sequence
  SiRNA target sequence
tccggcaacaaataatgacacaaa

SEQ ID NO: 219167 - DNA, 24 bp, Artificial sequence
  SiRNA target sequence
ccggcaacaaataatgacacaaat

SEQ ID NO: 219168 - DNA, 24 bp, Artificial sequence
  SiRNA target sequence
cggcaacaaataatgacacaaatt

SEQ ID NO: 219169 - DNA, 24 bp, Artificial sequence
  SiRNA target sequence
ggcaacaaataatgacacaaattt

SEQ ID NO: 219170 - DNA, 24 bp, Artificial sequence
  SiRNA target sequence
gcaacaaataatgacacaaatttt

SEQ ID NO: 219171 - DNA, 24 bp, Artificial sequence
  SiRNA target sequence
caacaaataatgacacaaattttt

SEQ ID NO: 219172 - DNA, 24 bp, Artificial sequence
  SiRNA target sequence
aacaaataatgacacaaatttttt

SEQ ID NO: 219173 - DNA, 24 bp, Artificial sequence
  SiRNA target sequence
acaaataatgacacaaattttttt

SEQ ID NO: 219174 - DNA, 24 bp, Artificial sequence
  SiRNA target sequence
caaataatgacacaaatttttttc

SEQ ID NO: 219175 - DNA, 24 bp, Artificial sequence
  SiRNA target sequence
aaataatgacacaaatttttttct

SEQ ID NO: 219176 - DNA, 24 bp, Artificial sequence
  SiRNA target sequence
aataatgacacaaatttttttcta

SEQ ID NO: 219177 - DNA, 24 bp, Artificial sequence
  SiRNA target sequence
ataatgacacaaatttttttctaa

SEQ ID NO: 219178 - DNA, 24 bp, Artificial sequence
  SiRNA target sequence
taatgacacaaatttttttctaaa

SEQ ID NO: 219179 - DNA, 24 bp, Artificial sequence
  SiRNA target sequence
aatgacacaaatttttttctaaat

SEQ ID NO: 219180 - DNA, 24 bp, Artificial sequence
  SiRNA target sequence
atgacacaaatttttttctaaatt

SEQ ID NO: 219181 - DNA, 24 bp, Artificial sequence
  SiRNA target sequence
tgacacaaatttttttctaaattc

SEQ ID NO: 219182 - DNA, 24 bp, Artificial sequence
  SiRNA target sequence
gacacaaatttttttctaaattca

SEQ ID NO: 219183 - DNA, 24 bp, Artificial sequence
  SiRNA target sequence
acacaaatttttttctaaattcat

SEQ ID NO: 219184 - DNA, 24 bp, Artificial sequence
  SiRNA target sequence
cacaaatttttttctaaattcatt

SEQ ID NO: 219185 - DNA, 24 bp, Artificial sequence
  SiRNA target sequence
acaaatttttttctaaattcatta

SEQ ID NO: 219186 - DNA, 24 bp, Artificial sequence
  SiRNA target sequence
caaatttttttctaaattcattat

SEQ ID NO: 219187 - DNA, 24 bp, Artificial sequence
  SiRNA target sequence
aaatttttttctaaattcattatg

SEQ ID NO: 219188 - DNA, 24 bp, Artificial sequence
  SiRNA target sequence
aatttttttctaaattcattatgt

SEQ ID NO: 219189 - DNA, 24 bp, Artificial sequence
  SiRNA target sequence
atttttttctaaattcattatgtg

SEQ ID NO: 219190 - DNA, 24 bp, Artificial sequence
  SiRNA target sequence
tttttttctaaattcattatgtgc

SEQ ID NO: 219191 - DNA, 24 bp, Artificial sequence
  SiRNA target sequence
ttttttctaaattcattatgtgct

SEQ ID NO: 219192 - DNA, 24 bp, Artificial sequence
  SiRNA target sequence
tttttctaaattcattatgtgcta

SEQ ID NO: 219193 - DNA, 24 bp, Artificial sequence
  SiRNA target sequence
ttttctaaattcattatgtgctac

SEQ ID NO: 219194 - DNA, 24 bp, Artificial sequence
  SiRNA target sequence
tttctaaattcattatgtgctacg

SEQ ID NO: 219195 - DNA, 24 bp, Artificial sequence
  SiRNA target sequence
ttctaaattcattatgtgctacgc

SEQ ID NO: 219196 - DNA, 24 bp, Artificial sequence
  SiRNA target sequence
tctaaattcattatgtgctacgcc

SEQ ID NO: 219197 - DNA, 24 bp, Artificial sequence
  SiRNA target sequence
ctaaattcattatgtgctacgccc

SEQ ID NO: 219198 - DNA, 24 bp, Artificial sequence
  SiRNA target sequence
taaattcattatgtgctacgcccg

SEQ ID NO: 219199 - DNA, 24 bp, Artificial sequence
  SiRNA target sequence
aaattcattatgtgctacgcccgg

SEQ ID NO: 219200 - DNA, 24 bp, Artificial sequence
  SiRNA target sequence
aattcattatgtgctacgcccggt

SEQ ID NO: 219201 - DNA, 24 bp, Artificial sequence
  SiRNA target sequence
attcattatgtgctacgcccggta

SEQ ID NO: 219202 - DNA, 24 bp, Artificial sequence
  SiRNA target sequence
ttcattatgtgctacgcccggtaa

SEQ ID NO: 219203 - DNA, 24 bp, Artificial sequence
  SiRNA target sequence
tcattatgtgctacgcccggtaaa

SEQ ID NO: 219204 - DNA, 24 bp, Artificial sequence
  SiRNA target sequence
cattatgtgctacgcccggtaaat

SEQ ID NO: 219205 - DNA, 24 bp, Artificial sequence
  SiRNA target sequence
attatgtgctacgcccggtaaatc

SEQ ID NO: 219206 - DNA, 24 bp, Artificial sequence
  SiRNA target sequence
ttatgtgctacgcccggtaaatcg

SEQ ID NO: 219207 - DNA, 24 bp, Artificial sequence
  SiRNA target sequence
tatgtgctacgcccggtaaatcgt

SEQ ID NO: 219208 - DNA, 24 bp, Artificial sequence
  SiRNA target sequence
atgtgctacgcccggtaaatcgtt

SEQ ID NO: 219209 - DNA, 24 bp, Artificial sequence
  SiRNA target sequence
tgtgctacgcccggtaaatcgttt

SEQ ID NO: 219210 - DNA, 24 bp, Artificial sequence
  SiRNA target sequence
gtgctacgcccggtaaatcgttta

SEQ ID NO: 219211 - DNA, 24 bp, Artificial sequence
  SiRNA target sequence
tgctacgcccggtaaatcgtttat

SEQ ID NO: 219212 - DNA, 24 bp, Artificial sequence
  SiRNA target sequence
gctacgcccggtaaatcgtttata

SEQ ID NO: 219213 - DNA, 24 bp, Artificial sequence
  SiRNA target sequence
ctacgcccggtaaatcgtttataa

SEQ ID NO: 219214 - DNA, 24 bp, Artificial sequence
  SiRNA target sequence
tacgcccggtaaatcgtttataaa

SEQ ID NO: 219215 - DNA, 24 bp, Artificial sequence
  SiRNA target sequence
acgcccggtaaatcgtttataaaa

SEQ ID NO: 219216 - DNA, 24 bp, Artificial sequence
  SiRNA target sequence
cgcccggtaaatcgtttataaaat

SEQ ID NO: 219217 - DNA, 24 bp, Artificial sequence
  SiRNA target sequence
gcccggtaaatcgtttataaaatt

SEQ ID NO: 219218 - DNA, 24 bp, Artificial sequence
  SiRNA target sequence
cccggtaaatcgtttataaaatta

SEQ ID NO: 219219 - DNA, 24 bp, Artificial sequence
  SiRNA target sequence
ccggtaaatcgtttataaaattag

SEQ ID NO: 219220 - DNA, 24 bp, Artificial sequence
  SiRNA target sequence
cggtaaatcgtttataaaattaga

SEQ ID NO: 219221 - DNA, 24 bp, Artificial sequence
  SiRNA target sequence
ggtaaatcgtttataaaattagaa

SEQ ID NO: 219222 - DNA, 24 bp, Artificial sequence
  SiRNA target sequence
gtaaatcgtttataaaattagaaa

SEQ ID NO: 219223 - DNA, 24 bp, Artificial sequence
  SiRNA target sequence
taaatcgtttataaaattagaaaa

SEQ ID NO: 219224 - DNA, 24 bp, Artificial sequence
  SiRNA target sequence
aaatcgtttataaaattagaaaat

SEQ ID NO: 219225 - DNA, 24 bp, Artificial sequence
  SiRNA target sequence
aatcgtttataaaattagaaaatg

SEQ ID NO: 219226 - DNA, 24 bp, Artificial sequence
  SiRNA target sequence
atcgtttataaaattagaaaatgt

SEQ ID NO: 219227 - DNA, 24 bp, Artificial sequence
  SiRNA target sequence
tcgtttataaaattagaaaatgtt

SEQ ID NO: 219228 - DNA, 24 bp, Artificial sequence
  SiRNA target sequence
cgtttataaaattagaaaatgttt

SEQ ID NO: 219229 - DNA, 24 bp, Artificial sequence
  SiRNA target sequence
gtttataaaattagaaaatgtttt

SEQ ID NO: 219230 - DNA, 24 bp, Artificial sequence
  SiRNA target sequence
tttataaaattagaaaatgtttta

SEQ ID NO: 219231 - DNA, 24 bp, Artificial sequence
  SiRNA target sequence
ttataaaattagaaaatgttttag

SEQ ID NO: 219232 - DNA, 24 bp, Artificial sequence
  SiRNA target sequence
tataaaattagaaaatgttttagg

SEQ ID NO: 219233 - DNA, 24 bp, Artificial sequence
  SiRNA target sequence
ataaaattagaaaatgttttagga

SEQ ID NO: 219234 - DNA, 24 bp, Artificial sequence
  SiRNA target sequence
taaaattagaaaatgttttaggat

SEQ ID NO: 219235 - DNA, 24 bp, Artificial sequence
  SiRNA target sequence
aaaattagaaaatgttttaggatg

SEQ ID NO: 219236 - DNA, 24 bp, Artificial sequence
  SiRNA target sequence
aaattagaaaatgttttaggatgt

SEQ ID NO: 219237 - DNA, 24 bp, Artificial sequence
  SiRNA target sequence
aattagaaaatgttttaggatgtg

SEQ ID NO: 219238 - DNA, 24 bp, Artificial sequence
  SiRNA target sequence
attagaaaatgttttaggatgtgt

SEQ ID NO: 219239 - DNA, 24 bp, Artificial sequence
  SiRNA target sequence
ttagaaaatgttttaggatgtgta

SEQ ID NO: 219240 - DNA, 24 bp, Artificial sequence
  SiRNA target sequence
tagaaaatgttttaggatgtgtag

SEQ ID NO: 219241 - DNA, 24 bp, Artificial sequence
  SiRNA target sequence
agaaaatgttttaggatgtgtagc

SEQ ID NO: 219242 - DNA, 24 bp, Artificial sequence
  SiRNA target sequence
gaaaatgttttaggatgtgtagct

SEQ ID NO: 219243 - DNA, 24 bp, Artificial sequence
  SiRNA target sequence
aaaatgttttaggatgtgtagctg

SEQ ID NO: 219244 - DNA, 24 bp, Artificial sequence
  SiRNA target sequence
aaatgttttaggatgtgtagctgt

SEQ ID NO: 219245 - DNA, 24 bp, Artificial sequence
  SiRNA target sequence
aatgttttaggatgtgtagctgta

SEQ ID NO: 219246 - DNA, 24 bp, Artificial sequence
  SiRNA target sequence
atgttttaggatgtgtagctgtag

SEQ ID NO: 219247 - DNA, 24 bp, Artificial sequence
  SiRNA target sequence
tgttttaggatgtgtagctgtagc

SEQ ID NO: 219248 - DNA, 24 bp, Artificial sequence
  SiRNA target sequence
gttttaggatgtgtagctgtagct

SEQ ID NO: 219249 - DNA, 24 bp, Artificial sequence
  SiRNA target sequence
ttttaggatgtgtagctgtagctc

SEQ ID NO: 219250 - DNA, 24 bp, Artificial sequence
  SiRNA target sequence
tttaggatgtgtagctgtagctct

SEQ ID NO: 219251 - DNA, 24 bp, Artificial sequence
  SiRNA target sequence
ttaggatgtgtagctgtagctctt

SEQ ID NO: 219252 - DNA, 24 bp, Artificial sequence
  SiRNA target sequence
taggatgtgtagctgtagctctta

SEQ ID NO: 219253 - DNA, 24 bp, Artificial sequence
  SiRNA target sequence
aggatgtgtagctgtagctcttat

SEQ ID NO: 219254 - DNA, 24 bp, Artificial sequence
  SiRNA target sequence
ggatgtgtagctgtagctcttatg

SEQ ID NO: 219255 - DNA, 24 bp, Artificial sequence
  SiRNA target sequence
gatgtgtagctgtagctcttatga

SEQ ID NO: 219256 - DNA, 24 bp, Artificial sequence
  SiRNA target sequence
atgtgtagctgtagctcttatgaa

SEQ ID NO: 219257 - DNA, 24 bp, Artificial sequence
  SiRNA target sequence
tgtgtagctgtagctcttatgaaa

SEQ ID NO: 219258 - DNA, 24 bp, Artificial sequence
  SiRNA target sequence
gtgtagctgtagctcttatgaaag

SEQ ID NO: 219259 - DNA, 24 bp, Artificial sequence
  SiRNA target sequence
tgtagctgtagctcttatgaaagt

SEQ ID NO: 219260 - DNA, 24 bp, Artificial sequence
  SiRNA target sequence
gtagctgtagctcttatgaaagta

SEQ ID NO: 219261 - DNA, 24 bp, Artificial sequence
  SiRNA target sequence
tagctgtagctcttatgaaagtag

SEQ ID NO: 219262 - DNA, 24 bp, Artificial sequence
  SiRNA target sequence
agctgtagctcttatgaaagtagc

SEQ ID NO: 219263 - DNA, 24 bp, Artificial sequence
  SiRNA target sequence
gctgtagctcttatgaaagtagca

SEQ ID NO: 219264 - DNA, 24 bp, Artificial sequence
  SiRNA target sequence
ctgtagctcttatgaaagtagcaa

SEQ ID NO: 219265 - DNA, 24 bp, Artificial sequence
  SiRNA target sequence
tgtagctcttatgaaagtagcaaa

SEQ ID NO: 219266 - DNA, 24 bp, Artificial sequence
  SiRNA target sequence
gtagctcttatgaaagtagcaaaa

SEQ ID NO: 219267 - DNA, 24 bp, Artificial sequence
  SiRNA target sequence
tagctcttatgaaagtagcaaaat

SEQ ID NO: 219268 - DNA, 24 bp, Artificial sequence
  SiRNA target sequence
agctcttatgaaagtagcaaaata

SEQ ID NO: 219269 - DNA, 24 bp, Artificial sequence
  SiRNA target sequence
gctcttatgaaagtagcaaaatat

SEQ ID NO: 219270 - DNA, 24 bp, Artificial sequence
  SiRNA target sequence
ctcttatgaaagtagcaaaatatg

SEQ ID NO: 219271 - DNA, 24 bp, Artificial sequence
  SiRNA target sequence
tcttatgaaagtagcaaaatatgg

SEQ ID NO: 219272 - DNA, 24 bp, Artificial sequence
  SiRNA target sequence
cttatgaaagtagcaaaatatggc

SEQ ID NO: 219273 - DNA, 24 bp, Artificial sequence
  SiRNA target sequence
ttatgaaagtagcaaaatatggct

SEQ ID NO: 219274 - DNA, 24 bp, Artificial sequence
  SiRNA target sequence
tatgaaagtagcaaaatatggctc

SEQ ID NO: 219275 - DNA, 24 bp, Artificial sequence
  SiRNA target sequence
atgaaagtagcaaaatatggctct

SEQ ID NO: 219276 - DNA, 24 bp, Artificial sequence
  SiRNA target sequence
tgaaagtagcaaaatatggctctt

SEQ ID NO: 219277 - DNA, 24 bp, Artificial sequence
  SiRNA target sequence
gaaagtagcaaaatatggctcttt

SEQ ID NO: 219278 - DNA, 24 bp, Artificial sequence
  SiRNA target sequence
aaagtagcaaaatatggctctttt

SEQ ID NO: 219279 - DNA, 24 bp, Artificial sequence
  SiRNA target sequence
aagtagcaaaatatggctcttttg

SEQ ID NO: 219280 - DNA, 24 bp, Artificial sequence
  SiRNA target sequence
agtagcaaaatatggctcttttga

SEQ ID NO: 219281 - DNA, 24 bp, Artificial sequence
  SiRNA target sequence
gtagcaaaatatggctcttttgat

SEQ ID NO: 219282 - DNA, 24 bp, Artificial sequence
  SiRNA target sequence
tagcaaaatatggctcttttgata

SEQ ID NO: 219283 - DNA, 24 bp, Artificial sequence
  SiRNA target sequence
agcaaaatatggctcttttgatat

SEQ ID NO: 219284 - DNA, 24 bp, Artificial sequence
  SiRNA target sequence
gcaaaatatggctcttttgatatt

SEQ ID NO: 219285 - DNA, 24 bp, Artificial sequence
  SiRNA target sequence
caaaatatggctcttttgatattt

SEQ ID NO: 219286 - DNA, 24 bp, Artificial sequence
  SiRNA target sequence
aaaatatggctcttttgatatttc

SEQ ID NO: 219287 - DNA, 24 bp, Artificial sequence
  SiRNA target sequence
aaatatggctcttttgatatttcc

SEQ ID NO: 219288 - DNA, 24 bp, Artificial sequence
  SiRNA target sequence
aatatggctcttttgatatttcca

SEQ ID NO: 219289 - DNA, 24 bp, Artificial sequence
  SiRNA target sequence
atatggctcttttgatatttccaa

SEQ ID NO: 219290 - DNA, 24 bp, Artificial sequence
  SiRNA target sequence
tatggctcttttgatatttccaaa

SEQ ID NO: 219291 - DNA, 24 bp, Artificial sequence
  SiRNA target sequence
atggctcttttgatatttccaaag

SEQ ID NO: 219292 - DNA, 24 bp, Artificial sequence
  SiRNA target sequence
tggctcttttgatatttccaaaga

SEQ ID NO: 219293 - DNA, 24 bp, Artificial sequence
  SiRNA target sequence
ggctcttttgatatttccaaagaa

SEQ ID NO: 219294 - DNA, 24 bp, Artificial sequence
  SiRNA target sequence
gctcttttgatatttccaaagaag

SEQ ID NO: 219295 - DNA, 24 bp, Artificial sequence
  SiRNA target sequence
ctcttttgatatttccaaagaagc

SEQ ID NO: 219296 - DNA, 24 bp, Artificial sequence
  SiRNA target sequence
tcttttgatatttccaaagaagcc

SEQ ID NO: 219297 - DNA, 24 bp, Artificial sequence
  SiRNA target sequence
cttttgatatttccaaagaagcca

SEQ ID NO: 219298 - DNA, 24 bp, Artificial sequence
  SiRNA target sequence
ttttgatatttccaaagaagccat

SEQ ID NO: 219299 - DNA, 24 bp, Artificial sequence
  SiRNA target sequence
tttgatatttccaaagaagccatt

SEQ ID NO: 219300 - DNA, 24 bp, Artificial sequence
  SiRNA target sequence
ttgatatttccaaagaagccattt

SEQ ID NO: 219301 - DNA, 24 bp, Artificial sequence
  SiRNA target sequence
tgatatttccaaagaagccatttc

SEQ ID NO: 219302 - DNA, 24 bp, Artificial sequence
  SiRNA target sequence
gatatttccaaagaagccatttca

SEQ ID NO: 219303 - DNA, 24 bp, Artificial sequence
  SiRNA target sequence
atatttccaaagaagccatttcaa

SEQ ID NO: 219304 - DNA, 24 bp, Artificial sequence
  SiRNA target sequence
tatttccaaagaagccatttcaat

SEQ ID NO: 219305 - DNA, 24 bp, Artificial sequence
  SiRNA target sequence
atttccaaagaagccatttcaatg

SEQ ID NO: 219306 - DNA, 24 bp, Artificial sequence
  SiRNA target sequence
tttccaaagaagccatttcaatgc

SEQ ID NO: 219307 - DNA, 24 bp, Artificial sequence
  SiRNA target sequence
ttccaaagaagccatttcaatgca

SEQ ID NO: 219308 - DNA, 24 bp, Artificial sequence
  SiRNA target sequence
tccaaagaagccatttcaatgcag

SEQ ID NO: 219309 - DNA, 24 bp, Artificial sequence
  SiRNA target sequence
ccaaagaagccatttcaatgcaga

SEQ ID NO: 219310 - DNA, 24 bp, Artificial sequence
  SiRNA target sequence
caaagaagccatttcaatgcagat

SEQ ID NO: 219311 - DNA, 24 bp, Artificial sequence
  SiRNA target sequence
aaagaagccatttcaatgcagatt

SEQ ID NO: 219312 - DNA, 24 bp, Artificial sequence
  SiRNA target sequence
aagaagccatttcaatgcagattg

SEQ ID NO: 219313 - DNA, 24 bp, Artificial sequence
  SiRNA target sequence
agaagccatttcaatgcagattga

SEQ ID NO: 219314 - DNA, 24 bp, Artificial sequence
  SiRNA target sequence
gaagccatttcaatgcagattgat

SEQ ID NO: 219315 - DNA, 24 bp, Artificial sequence
  SiRNA target sequence
aagccatttcaatgcagattgatt

SEQ ID NO: 219316 - DNA, 24 bp, Artificial sequence
  SiRNA target sequence
agccatttcaatgcagattgattc

SEQ ID NO: 219317 - DNA, 24 bp, Artificial sequence
  SiRNA target sequence
gccatttcaatgcagattgattcg

SEQ ID NO: 219318 - DNA, 24 bp, Artificial sequence
  SiRNA target sequence
ccatttcaatgcagattgattcgt

SEQ ID NO: 219319 - DNA, 24 bp, Artificial sequence
  SiRNA target sequence
catttcaatgcagattgattcgtc

SEQ ID NO: 219320 - DNA, 24 bp, Artificial sequence
  SiRNA target sequence
atttcaatgcagattgattcgtca

SEQ ID NO: 219321 - DNA, 24 bp, Artificial sequence
  SiRNA target sequence
tttcaatgcagattgattcgtcat

SEQ ID NO: 219322 - DNA, 24 bp, Artificial sequence
  SiRNA target sequence
ttcaatgcagattgattcgtcatt

SEQ ID NO: 219323 - DNA, 24 bp, Artificial sequence
  SiRNA target sequence
tcaatgcagattgattcgtcattg

SEQ ID NO: 219324 - DNA, 24 bp, Artificial sequence
  SiRNA target sequence
caatgcagattgattcgtcattgc

SEQ ID NO: 219325 - DNA, 24 bp, Artificial sequence
  SiRNA target sequence
aatgcagattgattcgtcattgcg

SEQ ID NO: 219326 - DNA, 24 bp, Artificial sequence
  SiRNA target sequence
atgcagattgattcgtcattgcgt

SEQ ID NO: 219327 - DNA, 24 bp, Artificial sequence
  SiRNA target sequence
tgcagattgattcgtcattgcgtg

SEQ ID NO: 219328 - DNA, 24 bp, Artificial sequence
  SiRNA target sequence
gcagattgattcgtcattgcgtgc

SEQ ID NO: 219329 - DNA, 24 bp, Artificial sequence
  SiRNA target sequence
cagattgattcgtcattgcgtgca

SEQ ID NO: 219330 - DNA, 24 bp, Artificial sequence
  SiRNA target sequence
agattgattcgtcattgcgtgcac

SEQ ID NO: 219331 - DNA, 24 bp, Artificial sequence
  SiRNA target sequence
gattgattcgtcattgcgtgcacg

SEQ ID NO: 219332 - DNA, 24 bp, Artificial sequence
  SiRNA target sequence
attgattcgtcattgcgtgcacgt

SEQ ID NO: 219333 - DNA, 24 bp, Artificial sequence
  SiRNA target sequence
ttgattcgtcattgcgtgcacgtt

SEQ ID NO: 219334 - DNA, 24 bp, Artificial sequence
  SiRNA target sequence
tgattcgtcattgcgtgcacgtta

SEQ ID NO: 219335 - DNA, 24 bp, Artificial sequence
  SiRNA target sequence
gattcgtcattgcgtgcacgttat

SEQ ID NO: 219336 - DNA, 24 bp, Artificial sequence
  SiRNA target sequence
attcgtcattgcgtgcacgttata

SEQ ID NO: 219337 - DNA, 24 bp, Artificial sequence
  SiRNA target sequence
ttcgtcattgcgtgcacgttataa

SEQ ID NO: 219338 - DNA, 24 bp, Artificial sequence
  SiRNA target sequence
tcgtcattgcgtgcacgttataaa

SEQ ID NO: 219339 - DNA, 24 bp, Artificial sequence
  SiRNA target sequence
cgtcattgcgtgcacgttataaag

SEQ ID NO: 219340 - DNA, 24 bp, Artificial sequence
  SiRNA target sequence
gtcattgcgtgcacgttataaagg

SEQ ID NO: 219341 - DNA, 24 bp, Artificial sequence
  SiRNA target sequence
tcattgcgtgcacgttataaagga

SEQ ID NO: 219342 - DNA, 24 bp, Artificial sequence
  SiRNA target sequence
cattgcgtgcacgttataaaggaa

SEQ ID NO: 219343 - DNA, 24 bp, Artificial sequence
  SiRNA target sequence
attgcgtgcacgttataaaggaat

SEQ ID NO: 219344 - DNA, 24 bp, Artificial sequence
  SiRNA target sequence
ttgcgtgcacgttataaaggaatt

SEQ ID NO: 219345 - DNA, 24 bp, Artificial sequence
  SiRNA target sequence
tgcgtgcacgttataaaggaattt

SEQ ID NO: 219346 - DNA, 24 bp, Artificial sequence
  SiRNA target sequence
gcgtgcacgttataaaggaatttt

SEQ ID NO: 219347 - DNA, 24 bp, Artificial sequence
  SiRNA target sequence
cgtgcacgttataaaggaattttt

SEQ ID NO: 219348 - DNA, 24 bp, Artificial sequence
  SiRNA target sequence
gtgcacgttataaaggaatttttg

SEQ ID NO: 219349 - DNA, 24 bp, Artificial sequence
  SiRNA target sequence
tgcacgttataaaggaatttttga

SEQ ID NO: 219350 - DNA, 24 bp, Artificial sequence
  SiRNA target sequence
gcacgttataaaggaatttttgac

SEQ ID NO: 219351 - DNA, 24 bp, Artificial sequence
  SiRNA target sequence
cacgttataaaggaatttttgacg

SEQ ID NO: 219352 - DNA, 24 bp, Artificial sequence
  SiRNA target sequence
acgttataaaggaatttttgacgg

SEQ ID NO: 219353 - DNA, 24 bp, Artificial sequence
  SiRNA target sequence
cgttataaaggaatttttgacggt

SEQ ID NO: 219354 - DNA, 24 bp, Artificial sequence
  SiRNA target sequence
gttataaaggaatttttgacggtg

SEQ ID NO: 219355 - DNA, 24 bp, Artificial sequence
  SiRNA target sequence
ttataaaggaatttttgacggtgt

SEQ ID NO: 219356 - DNA, 24 bp, Artificial sequence
  SiRNA target sequence
tataaaggaatttttgacggtgtt

SEQ ID NO: 219357 - DNA, 24 bp, Artificial sequence
  SiRNA target sequence
ataaaggaatttttgacggtgttt

SEQ ID NO: 219358 - DNA, 24 bp, Artificial sequence
  SiRNA target sequence
taaaggaatttttgacggtgtttt

SEQ ID NO: 219359 - DNA, 24 bp, Artificial sequence
  SiRNA target sequence
aaaggaatttttgacggtgttttt

SEQ ID NO: 219360 - DNA, 24 bp, Artificial sequence
  SiRNA target sequence
aaggaatttttgacggtgtttttg

SEQ ID NO: 219361 - DNA, 24 bp, Artificial sequence
  SiRNA target sequence
aggaatttttgacggtgtttttgg

SEQ ID NO: 219362 - DNA, 24 bp, Artificial sequence
  SiRNA target sequence
ggaatttttgacggtgtttttggt

SEQ ID NO: 219363 - DNA, 24 bp, Artificial sequence
  SiRNA target sequence
gaatttttgacggtgtttttggta

SEQ ID NO: 219364 - DNA, 24 bp, Artificial sequence
  SiRNA target sequence
aatttttgacggtgtttttggtaa

SEQ ID NO: 219365 - DNA, 24 bp, Artificial sequence
  SiRNA target sequence
atttttgacggtgtttttggtaag

SEQ ID NO: 219366 - DNA, 24 bp, Artificial sequence
  SiRNA target sequence
tttttgacggtgtttttggtaagt

SEQ ID NO: 219367 - DNA, 24 bp, Artificial sequence
  SiRNA target sequence
ttttgacggtgtttttggtaagtt

SEQ ID NO: 219368 - DNA, 24 bp, Artificial sequence
  SiRNA target sequence
tttgacggtgtttttggtaagtta

SEQ ID NO: 219369 - DNA, 24 bp, Artificial sequence
  SiRNA target sequence
ttgacggtgtttttggtaagttag

SEQ ID NO: 219370 - DNA, 24 bp, Artificial sequence
  SiRNA target sequence
tgacggtgtttttggtaagttagg

SEQ ID NO: 219371 - DNA, 24 bp, Artificial sequence
  SiRNA target sequence
gacggtgtttttggtaagttagga

SEQ ID NO: 219372 - DNA, 24 bp, Artificial sequence
  SiRNA target sequence
acggtgtttttggtaagttaggaa

SEQ ID NO: 219373 - DNA, 24 bp, Artificial sequence
  SiRNA target sequence
cggtgtttttggtaagttaggaaa

SEQ ID NO: 219374 - DNA, 24 bp, Artificial sequence
  SiRNA target sequence
ggtgtttttggtaagttaggaaaa

SEQ ID NO: 219375 - DNA, 24 bp, Artificial sequence
  SiRNA target sequence
gtgtttttggtaagttaggaaaat

SEQ ID NO: 219376 - DNA, 24 bp, Artificial sequence
  SiRNA target sequence
tgtttttggtaagttaggaaaatc

SEQ ID NO: 219377 - DNA, 24 bp, Artificial sequence
  SiRNA target sequence
gtttttggtaagttaggaaaatct

SEQ ID NO: 219378 - DNA, 24 bp, Artificial sequence
  SiRNA target sequence
tttttggtaagttaggaaaatctc

SEQ ID NO: 219379 - DNA, 24 bp, Artificial sequence
  SiRNA target sequence
ttttggtaagttaggaaaatctct

SEQ ID NO: 219380 - DNA, 24 bp, Artificial sequence
  SiRNA target sequence
tttggtaagttaggaaaatctctt

SEQ ID NO: 219381 - DNA, 24 bp, Artificial sequence
  SiRNA target sequence
ttggtaagttaggaaaatctcttg

SEQ ID NO: 219382 - DNA, 24 bp, Artificial sequence
  SiRNA target sequence
tggtaagttaggaaaatctcttgg

SEQ ID NO: 219383 - DNA, 24 bp, Artificial sequence
  SiRNA target sequence
ggtaagttaggaaaatctcttgga

SEQ ID NO: 219384 - DNA, 24 bp, Artificial sequence
  SiRNA target sequence
gtaagttaggaaaatctcttggat

SEQ ID NO: 219385 - DNA, 24 bp, Artificial sequence
  SiRNA target sequence
taagttaggaaaatctcttggatc

SEQ ID NO: 219386 - DNA, 24 bp, Artificial sequence
  SiRNA target sequence
aagttaggaaaatctcttggatcg

SEQ ID NO: 219387 - DNA, 24 bp, Artificial sequence
  SiRNA target sequence
agttaggaaaatctcttggatcgt

SEQ ID NO: 219388 - DNA, 24 bp, Artificial sequence
  SiRNA target sequence
gttaggaaaatctcttggatcgtt

SEQ ID NO: 219389 - DNA, 24 bp, Artificial sequence
  SiRNA target sequence
ttaggaaaatctcttggatcgtta

SEQ ID NO: 219390 - DNA, 24 bp, Artificial sequence
  SiRNA target sequence
taggaaaatctcttggatcgttat

SEQ ID NO: 219391 - DNA, 24 bp, Artificial sequence
  SiRNA target sequence
aggaaaatctcttggatcgttatt

SEQ ID NO: 219392 - DNA, 24 bp, Artificial sequence
  SiRNA target sequence
ggaaaatctcttggatcgttattt

SEQ ID NO: 219393 - DNA, 24 bp, Artificial sequence
  SiRNA target sequence
gaaaatctcttggatcgttatttg

SEQ ID NO: 219394 - DNA, 24 bp, Artificial sequence
  SiRNA target sequence
aaaatctcttggatcgttatttgt

SEQ ID NO: 219395 - DNA, 24 bp, Artificial sequence
  SiRNA target sequence
aaatctcttggatcgttatttgtg

SEQ ID NO: 219396 - DNA, 24 bp, Artificial sequence
  SiRNA target sequence
aatctcttggatcgttatttgtgt

SEQ ID NO: 219397 - DNA, 24 bp, Artificial sequence
  SiRNA target sequence
atctcttggatcgttatttgtgtg

SEQ ID NO: 219398 - DNA, 24 bp, Artificial sequence
  SiRNA target sequence
tctcttggatcgttatttgtgtgg

SEQ ID NO: 219399 - DNA, 24 bp, Artificial sequence
  SiRNA target sequence
ctcttggatcgttatttgtgtgga

SEQ ID NO: 219400 - DNA, 24 bp, Artificial sequence
  SiRNA target sequence
tcttggatcgttatttgtgtggat

SEQ ID NO: 219401 - DNA, 24 bp, Artificial sequence
  SiRNA target sequence
cttggatcgttatttgtgtggatt

SEQ ID NO: 219402 - DNA, 24 bp, Artificial sequence
  SiRNA target sequence
ttggatcgttatttgtgtggatta

SEQ ID NO: 219403 - DNA, 24 bp, Artificial sequence
  SiRNA target sequence
tggatcgttatttgtgtggattat

SEQ ID NO: 219404 - DNA, 24 bp, Artificial sequence
  SiRNA target sequence
ggatcgttatttgtgtggattatg

SEQ ID NO: 219405 - DNA, 24 bp, Artificial sequence
  SiRNA target sequence
gatcgttatttgtgtggattatgg

SEQ ID NO: 219406 - DNA, 24 bp, Artificial sequence
  SiRNA target sequence
atcgttatttgtgtggattatggg

SEQ ID NO: 219407 - DNA, 24 bp, Artificial sequence
  SiRNA target sequence
tcgttatttgtgtggattatggga

SEQ ID NO: 219408 - DNA, 24 bp, Artificial sequence
  SiRNA target sequence
cgttatttgtgtggattatgggat

SEQ ID NO: 219409 - DNA, 24 bp, Artificial sequence
  SiRNA target sequence
gttatttgtgtggattatgggata

SEQ ID NO: 219410 - DNA, 24 bp, Artificial sequence
  SiRNA target sequence
ttatttgtgtggattatgggatat

SEQ ID NO: 219411 - DNA, 24 bp, Artificial sequence
  SiRNA target sequence
tatttgtgtggattatgggatatg

SEQ ID NO: 219412 - DNA, 24 bp, Artificial sequence
  SiRNA target sequence
atttgtgtggattatgggatatgc

SEQ ID NO: 219413 - DNA, 24 bp, Artificial sequence
  SiRNA target sequence
tttgtgtggattatgggatatgca

SEQ ID NO: 219414 - DNA, 24 bp, Artificial sequence
  SiRNA target sequence
ttgtgtggattatgggatatgcat

SEQ ID NO: 219415 - DNA, 24 bp, Artificial sequence
  SiRNA target sequence
tgtgtggattatgggatatgcatt

SEQ ID NO: 219416 - DNA, 24 bp, Artificial sequence
  SiRNA target sequence
gtgtggattatgggatatgcattt

SEQ ID NO: 219417 - DNA, 24 bp, Artificial sequence
  SiRNA target sequence
tgtggattatgggatatgcatttc

SEQ ID NO: 219418 - DNA, 24 bp, Artificial sequence
  SiRNA target sequence
gtggattatgggatatgcatttca

SEQ ID NO: 219419 - DNA, 24 bp, Artificial sequence
  SiRNA target sequence
tggattatgggatatgcatttcaa

SEQ ID NO: 219420 - DNA, 24 bp, Artificial sequence
  SiRNA target sequence
ggattatgggatatgcatttcaaa

SEQ ID NO: 219421 - DNA, 24 bp, Artificial sequence
  SiRNA target sequence
gattatgggatatgcatttcaaac

SEQ ID NO: 219422 - DNA, 24 bp, Artificial sequence
  SiRNA target sequence
attatgggatatgcatttcaaaca

SEQ ID NO: 219423 - DNA, 24 bp, Artificial sequence
  SiRNA target sequence
ttatgggatatgcatttcaaacaa

SEQ ID NO: 219424 - DNA, 24 bp, Artificial sequence
  SiRNA target sequence
tatgggatatgcatttcaaacaag

SEQ ID NO: 219425 - DNA, 24 bp, Artificial sequence
  SiRNA target sequence
atgggatatgcatttcaaacaaga

SEQ ID NO: 219426 - DNA, 24 bp, Artificial sequence
  SiRNA target sequence
tgggatatgcatttcaaacaagag

SEQ ID NO: 219427 - DNA, 24 bp, Artificial sequence
  SiRNA target sequence
gggatatgcatttcaaacaagaga

SEQ ID NO: 219428 - DNA, 24 bp, Artificial sequence
  SiRNA target sequence
ggatatgcatttcaaacaagagat

SEQ ID NO: 219429 - DNA, 24 bp, Artificial sequence
  SiRNA target sequence
gatatgcatttcaaacaagagatt

SEQ ID NO: 219430 - DNA, 24 bp, Artificial sequence
  SiRNA target sequence
atatgcatttcaaacaagagattt

SEQ ID NO: 219431 - DNA, 24 bp, Artificial sequence
  SiRNA target sequence
tatgcatttcaaacaagagatttt

SEQ ID NO: 219432 - DNA, 24 bp, Artificial sequence
  SiRNA target sequence
atgcatttcaaacaagagatttta

SEQ ID NO: 219433 - DNA, 24 bp, Artificial sequence
  SiRNA target sequence
tgcatttcaaacaagagattttag

SEQ ID NO: 219434 - DNA, 24 bp, Artificial sequence
  SiRNA target sequence
gcatttcaaacaagagattttaga

SEQ ID NO: 219435 - DNA, 24 bp, Artificial sequence
  SiRNA target sequence
catttcaaacaagagattttagaa

SEQ ID NO: 219436 - DNA, 24 bp, Artificial sequence
  SiRNA target sequence
atttcaaacaagagattttagaaa

SEQ ID NO: 219437 - DNA, 24 bp, Artificial sequence
  SiRNA target sequence
tttcaaacaagagattttagaaaa

SEQ ID NO: 219438 - DNA, 24 bp, Artificial sequence
  SiRNA target sequence
ttcaaacaagagattttagaaaat

SEQ ID NO: 219439 - DNA, 24 bp, Artificial sequence
  SiRNA target sequence
tcaaacaagagattttagaaaatt

SEQ ID NO: 219440 - DNA, 24 bp, Artificial sequence
  SiRNA target sequence
caaacaagagattttagaaaatta

SEQ ID NO: 219441 - DNA, 24 bp, Artificial sequence
  SiRNA target sequence
aaacaagagattttagaaaattag

SEQ ID NO: 219442 - DNA, 24 bp, Artificial sequence
  SiRNA target sequence
aacaagagattttagaaaattagc

SEQ ID NO: 219443 - DNA, 24 bp, Artificial sequence
  SiRNA target sequence
acaagagattttagaaaattagct

SEQ ID NO: 219444 - DNA, 24 bp, Artificial sequence
  SiRNA target sequence
caagagattttagaaaattagctc

SEQ ID NO: 219445 - DNA, 24 bp, Artificial sequence
  SiRNA target sequence
aagagattttagaaaattagctcc

SEQ ID NO: 219446 - DNA, 24 bp, Artificial sequence
  SiRNA target sequence
agagattttagaaaattagctccc

SEQ ID NO: 219447 - DNA, 24 bp, Artificial sequence
  SiRNA target sequence
gagattttagaaaattagctccct

SEQ ID NO: 219448 - DNA, 24 bp, Artificial sequence
  SiRNA target sequence
agattttagaaaattagctccctt

SEQ ID NO: 219449 - DNA, 24 bp, Artificial sequence
  SiRNA target sequence
gattttagaaaattagctccctta

SEQ ID NO: 219450 - DNA, 24 bp, Artificial sequence
  SiRNA target sequence
attttagaaaattagctcccttat

SEQ ID NO: 219451 - DNA, 24 bp, Artificial sequence
  SiRNA target sequence
ttttagaaaattagctcccttatg

SEQ ID NO: 219452 - DNA, 24 bp, Artificial sequence
  SiRNA target sequence
tttagaaaattagctcccttatgt

SEQ ID NO: 219453 - DNA, 24 bp, Artificial sequence
  SiRNA target sequence
ttagaaaattagctcccttatgta

SEQ ID NO: 219454 - DNA, 24 bp, Artificial sequence
  SiRNA target sequence
tagaaaattagctcccttatgtat

SEQ ID NO: 219455 - DNA, 24 bp, Artificial sequence
  SiRNA target sequence
agaaaattagctcccttatgtatc

SEQ ID NO: 219456 - DNA, 24 bp, Artificial sequence
  SiRNA target sequence
gaaaattagctcccttatgtatca

SEQ ID NO: 219457 - DNA, 24 bp, Artificial sequence
  SiRNA target sequence
aaaattagctcccttatgtatcag

SEQ ID NO: 219458 - DNA, 24 bp, Artificial sequence
  SiRNA target sequence
aaattagctcccttatgtatcagc

SEQ ID NO: 219459 - DNA, 24 bp, Artificial sequence
  SiRNA target sequence
aattagctcccttatgtatcagcg

SEQ ID NO: 219460 - DNA, 24 bp, Artificial sequence
  SiRNA target sequence
attagctcccttatgtatcagcgt

SEQ ID NO: 219461 - DNA, 24 bp, Artificial sequence
  SiRNA target sequence
ttagctcccttatgtatcagcgta

SEQ ID NO: 219462 - DNA, 24 bp, Artificial sequence
  SiRNA target sequence
tagctcccttatgtatcagcgtaa

SEQ ID NO: 219463 - DNA, 24 bp, Artificial sequence
  SiRNA target sequence
agctcccttatgtatcagcgtaat

SEQ ID NO: 219464 - DNA, 24 bp, Artificial sequence
  SiRNA target sequence
gctcccttatgtatcagcgtaatt

SEQ ID NO: 219465 - DNA, 24 bp, Artificial sequence
  SiRNA target sequence
ctcccttatgtatcagcgtaattg

SEQ ID NO: 219466 - DNA, 24 bp, Artificial sequence
  SiRNA target sequence
tcccttatgtatcagcgtaattgt

SEQ ID NO: 219467 - DNA, 24 bp, Artificial sequence
  SiRNA target sequence
cccttatgtatcagcgtaattgtc

SEQ ID NO: 219468 - DNA, 24 bp, Artificial sequence
  SiRNA target sequence
ccttatgtatcagcgtaattgtct

SEQ ID NO: 219469 - DNA, 24 bp, Artificial sequence
  SiRNA target sequence
cttatgtatcagcgtaattgtctt

SEQ ID NO: 219470 - DNA, 24 bp, Artificial sequence
  SiRNA target sequence
ttatgtatcagcgtaattgtcttt

SEQ ID NO: 219471 - DNA, 24 bp, Artificial sequence
  SiRNA target sequence
tatgtatcagcgtaattgtctttt

SEQ ID NO: 219472 - DNA, 24 bp, Artificial sequence
  SiRNA target sequence
atgtatcagcgtaattgtcttttt

SEQ ID NO: 219473 - DNA, 24 bp, Artificial sequence
  SiRNA target sequence
tgtatcagcgtaattgtctttttt

SEQ ID NO: 219474 - DNA, 24 bp, Artificial sequence
  SiRNA target sequence
gtatcagcgtaattgtcttttttg

SEQ ID NO: 219475 - DNA, 24 bp, Artificial sequence
  SiRNA target sequence
tatcagcgtaattgtcttttttgt

SEQ ID NO: 219476 - DNA, 24 bp, Artificial sequence
  SiRNA target sequence
atcagcgtaattgtcttttttgtt

SEQ ID NO: 219477 - DNA, 24 bp, Artificial sequence
  SiRNA target sequence
tcagcgtaattgtcttttttgtta

SEQ ID NO: 219478 - DNA, 24 bp, Artificial sequence
  SiRNA target sequence
cagcgtaattgtcttttttgttat

SEQ ID NO: 219479 - DNA, 24 bp, Artificial sequence
  SiRNA target sequence
agcgtaattgtcttttttgttatt

SEQ ID NO: 219480 - DNA, 24 bp, Artificial sequence
  SiRNA target sequence
gcgtaattgtcttttttgttatta

SEQ ID NO: 219481 - DNA, 24 bp, Artificial sequence
  SiRNA target sequence
cgtaattgtcttttttgttattat

SEQ ID NO: 219482 - DNA, 24 bp, Artificial sequence
  SiRNA target sequence
gtaattgtcttttttgttattatt

SEQ ID NO: 219483 - DNA, 24 bp, Artificial sequence
  SiRNA target sequence
taattgtcttttttgttattattt

SEQ ID NO: 219484 - DNA, 24 bp, Artificial sequence
  SiRNA target sequence
aattgtcttttttgttattatttg

SEQ ID NO: 219485 - DNA, 24 bp, Artificial sequence
  SiRNA target sequence
attgtcttttttgttattatttgg

SEQ ID NO: 219486 - DNA, 24 bp, Artificial sequence
  SiRNA target sequence
ttgtcttttttgttattatttgga

SEQ ID NO: 219487 - DNA, 24 bp, Artificial sequence
  SiRNA target sequence
tgtcttttttgttattatttggat

SEQ ID NO: 219488 - DNA, 24 bp, Artificial sequence
  SiRNA target sequence
gtcttttttgttattatttggatt

SEQ ID NO: 219489 - DNA, 24 bp, Artificial sequence
  SiRNA target sequence
tcttttttgttattatttggattt

SEQ ID NO: 219490 - DNA, 24 bp, Artificial sequence
  SiRNA target sequence
cttttttgttattatttggattta

SEQ ID NO: 219491 - DNA, 24 bp, Artificial sequence
  SiRNA target sequence
ttttttgttattatttggatttat

SEQ ID NO: 219492 - DNA, 24 bp, Artificial sequence
  SiRNA target sequence
tttttgttattatttggatttatt

SEQ ID NO: 219493 - DNA, 24 bp, Artificial sequence
  SiRNA target sequence
ttttgttattatttggatttattc

SEQ ID NO: 219494 - DNA, 24 bp, Artificial sequence
  SiRNA target sequence
tttgttattatttggatttattca

SEQ ID NO: 219495 - DNA, 24 bp, Artificial sequence
  SiRNA target sequence
ttgttattatttggatttattcag

SEQ ID NO: 219496 - DNA, 24 bp, Artificial sequence
  SiRNA target sequence
tgttattatttggatttattcagt

SEQ ID NO: 219497 - DNA, 24 bp, Artificial sequence
  SiRNA target sequence
gttattatttggatttattcagtt

SEQ ID NO: 219498 - DNA, 24 bp, Artificial sequence
  SiRNA target sequence
ttattatttggatttattcagtta

SEQ ID NO: 219499 - DNA, 24 bp, Artificial sequence
  SiRNA target sequence
tattatttggatttattcagttat

SEQ ID NO: 219500 - DNA, 24 bp, Artificial sequence
  SiRNA target sequence
attatttggatttattcagttatt

SEQ ID NO: 219501 - DNA, 24 bp, Artificial sequence
  SiRNA target sequence
ttatttggatttattcagttattt

SEQ ID NO: 219502 - DNA, 24 bp, Artificial sequence
  SiRNA target sequence
tatttggatttattcagttattta

SEQ ID NO: 219503 - DNA, 24 bp, Artificial sequence
  SiRNA target sequence
atttggatttattcagttatttat

SEQ ID NO: 219504 - DNA, 24 bp, Artificial sequence
  SiRNA target sequence
tttggatttattcagttatttatt

SEQ ID NO: 219505 - DNA, 24 bp, Artificial sequence
  SiRNA target sequence
ttggatttattcagttatttattt

SEQ ID NO: 219506 - DNA, 24 bp, Artificial sequence
  SiRNA target sequence
tggatttattcagttatttattta

SEQ ID NO: 219507 - DNA, 24 bp, Artificial sequence
  SiRNA target sequence
ggatttattcagttatttatttaa

SEQ ID NO: 219508 - DNA, 24 bp, Artificial sequence
  SiRNA target sequence
gatttattcagttatttatttaaa

SEQ ID NO: 219509 - DNA, 24 bp, Artificial sequence
  SiRNA target sequence
atttattcagttatttatttaaat

SEQ ID NO: 219510 - DNA, 24 bp, Artificial sequence
  SiRNA target sequence
tttattcagttatttatttaaata

SEQ ID NO: 219511 - DNA, 24 bp, Artificial sequence
  SiRNA target sequence
ttattcagttatttatttaaataa

SEQ ID NO: 219512 - DNA, 24 bp, Artificial sequence
  SiRNA target sequence
tattcagttatttatttaaataag

SEQ ID NO: 219513 - DNA, 24 bp, Artificial sequence
  SiRNA target sequence
attcagttatttatttaaataaga

SEQ ID NO: 219514 - DNA, 24 bp, Artificial sequence
  SiRNA target sequence
ttcagttatttatttaaataagaa

SEQ ID NO: 219515 - DNA, 24 bp, Artificial sequence
  SiRNA target sequence
tcagttatttatttaaataagaaa

SEQ ID NO: 219516 - DNA, 24 bp, Artificial sequence
  SiRNA target sequence
cagttatttatttaaataagaaat

SEQ ID NO: 219517 - DNA, 24 bp, Artificial sequence
  SiRNA target sequence
agttatttatttaaataagaaata

SEQ ID NO: 219518 - DNA, 24 bp, Artificial sequence
  SiRNA target sequence
gttatttatttaaataagaaatac

SEQ ID NO: 219519 - DNA, 24 bp, Artificial sequence
  SiRNA target sequence
ttatttatttaaataagaaataca

SEQ ID NO: 219520 - DNA, 24 bp, Artificial sequence
  SiRNA target sequence
tatttatttaaataagaaatacaa

SEQ ID NO: 219521 - DNA, 24 bp, Artificial sequence
  SiRNA target sequence
atttatttaaataagaaatacaaa

SEQ ID NO: 219522 - DNA, 24 bp, Artificial sequence
  SiRNA target sequence
tttatttaaataagaaatacaaag

SEQ ID NO: 219523 - DNA, 24 bp, Artificial sequence
  SiRNA target sequence
ttatttaaataagaaatacaaaga

SEQ ID NO: 219524 - DNA, 24 bp, Artificial sequence
  SiRNA target sequence
tatttaaataagaaatacaaagaa

SEQ ID NO: 219525 - DNA, 24 bp, Artificial sequence
  SiRNA target sequence
atttaaataagaaatacaaagaat

SEQ ID NO: 219526 - DNA, 24 bp, Artificial sequence
  SiRNA target sequence
tttaaataagaaatacaaagaatc

SEQ ID NO: 219527 - DNA, 24 bp, Artificial sequence
  SiRNA target sequence
ttaaataagaaatacaaagaatca

SEQ ID NO: 219528 - DNA, 24 bp, Artificial sequence
  SiRNA target sequence
taaataagaaatacaaagaatcag

SEQ ID NO: 219529 - DNA, 24 bp, Artificial sequence
  SiRNA target sequence
aaataagaaatacaaagaatcagt

SEQ ID NO: 219530 - DNA, 24 bp, Artificial sequence
  SiRNA target sequence
aataagaaatacaaagaatcagtt

SEQ ID NO: 219531 - DNA, 24 bp, Artificial sequence
  SiRNA target sequence
ataagaaatacaaagaatcagttg

SEQ ID NO: 219532 - DNA, 24 bp, Artificial sequence
  SiRNA target sequence
taagaaatacaaagaatcagttgt

SEQ ID NO: 219533 - DNA, 24 bp, Artificial sequence
  SiRNA target sequence
aagaaatacaaagaatcagttgtt

SEQ ID NO: 219534 - DNA, 24 bp, Artificial sequence
  SiRNA target sequence
agaaatacaaagaatcagttgtta

SEQ ID NO: 219535 - DNA, 24 bp, Artificial sequence
  SiRNA target sequence
gaaatacaaagaatcagttgttag

SEQ ID NO: 219536 - DNA, 24 bp, Artificial sequence
  SiRNA target sequence
aaatacaaagaatcagttgttagt

SEQ ID NO: 219537 - DNA, 24 bp, Artificial sequence
  SiRNA target sequence
aatacaaagaatcagttgttagta

SEQ ID NO: 219538 - DNA, 24 bp, Artificial sequence
  SiRNA target sequence
atacaaagaatcagttgttagtaa

SEQ ID NO: 219539 - DNA, 24 bp, Artificial sequence
  SiRNA target sequence
tacaaagaatcagttgttagtaat

SEQ ID NO: 219540 - DNA, 24 bp, Artificial sequence
  SiRNA target sequence
acaaagaatcagttgttagtaatt

SEQ ID NO: 219541 - DNA, 24 bp, Artificial sequence
  SiRNA target sequence
caaagaatcagttgttagtaattt

SEQ ID NO: 219542 - DNA, 24 bp, Artificial sequence
  SiRNA target sequence
aaagaatcagttgttagtaattta

SEQ ID NO: 219543 - DNA, 24 bp, Artificial sequence
  SiRNA target sequence
aagaatcagttgttagtaatttac

SEQ ID NO: 219544 - DNA, 24 bp, Artificial sequence
  SiRNA target sequence
agaatcagttgttagtaatttacc

SEQ ID NO: 219545 - DNA, 24 bp, Artificial sequence
  SiRNA target sequence
gaatcagttgttagtaatttaccc

SEQ ID NO: 219546 - DNA, 24 bp, Artificial sequence
  SiRNA target sequence
aatcagttgttagtaatttaccca

SEQ ID NO: 219547 - DNA, 24 bp, Artificial sequence
  SiRNA target sequence
atcagttgttagtaatttacccat

SEQ ID NO: 219548 - DNA, 24 bp, Artificial sequence
  SiRNA target sequence
tcagttgttagtaatttacccatc

SEQ ID NO: 219549 - DNA, 24 bp, Artificial sequence
  SiRNA target sequence
cagttgttagtaatttacccatcg

SEQ ID NO: 219550 - DNA, 24 bp, Artificial sequence
  SiRNA target sequence
agttgttagtaatttacccatcga

SEQ ID NO: 219551 - DNA, 24 bp, Artificial sequence
  SiRNA target sequence
gttgttagtaatttacccatcgat

SEQ ID NO: 219552 - DNA, 24 bp, Artificial sequence
  SiRNA target sequence
ttgttagtaatttacccatcgatg

SEQ ID NO: 219553 - DNA, 24 bp, Artificial sequence
  SiRNA target sequence
tgttagtaatttacccatcgatgt

SEQ ID NO: 219554 - DNA, 24 bp, Artificial sequence
  SiRNA target sequence
gttagtaatttacccatcgatgtt

SEQ ID NO: 219555 - DNA, 24 bp, Artificial sequence
  SiRNA target sequence
ttagtaatttacccatcgatgttg

SEQ ID NO: 219556 - DNA, 24 bp, Artificial sequence
  SiRNA target sequence
tagtaatttacccatcgatgttga

SEQ ID NO: 219557 - DNA, 24 bp, Artificial sequence
  SiRNA target sequence
agtaatttacccatcgatgttgat

SEQ ID NO: 219558 - DNA, 24 bp, Artificial sequence
  SiRNA target sequence
gtaatttacccatcgatgttgatt

SEQ ID NO: 219559 - DNA, 24 bp, Artificial sequence
  SiRNA target sequence
taatttacccatcgatgttgattt

SEQ ID NO: 219560 - DNA, 24 bp, Artificial sequence
  SiRNA target sequence
aatttacccatcgatgttgatttg

SEQ ID NO: 219561 - DNA, 24 bp, Artificial sequence
  SiRNA target sequence
atttacccatcgatgttgatttgt

SEQ ID NO: 219562 - DNA, 24 bp, Artificial sequence
  SiRNA target sequence
tttacccatcgatgttgatttgtt

SEQ ID NO: 219563 - DNA, 24 bp, Artificial sequence
  SiRNA target sequence
ttacccatcgatgttgatttgttt

SEQ ID NO: 219564 - DNA, 24 bp, Artificial sequence
  SiRNA target sequence
tacccatcgatgttgatttgtttg

SEQ ID NO: 219565 - DNA, 24 bp, Artificial sequence
  SiRNA target sequence
acccatcgatgttgatttgtttgc

SEQ ID NO: 219566 - DNA, 24 bp, Artificial sequence
  SiRNA target sequence
cccatcgatgttgatttgtttgca

SEQ ID NO: 219567 - DNA, 24 bp, Artificial sequence
  SiRNA target sequence
ccatcgatgttgatttgtttgcat

SEQ ID NO: 219568 - DNA, 24 bp, Artificial sequence
  SiRNA target sequence
catcgatgttgatttgtttgcatc

SEQ ID NO: 219569 - DNA, 24 bp, Artificial sequence
  SiRNA target sequence
atcgatgttgatttgtttgcatca

SEQ ID NO: 219570 - DNA, 24 bp, Artificial sequence
  SiRNA target sequence
tcgatgttgatttgtttgcatcaa

SEQ ID NO: 219571 - DNA, 24 bp, Artificial sequence
  SiRNA target sequence
cgatgttgatttgtttgcatcaaa

SEQ ID NO: 219572 - DNA, 24 bp, Artificial sequence
  SiRNA target sequence
gatgttgatttgtttgcatcaaag

SEQ ID NO: 219573 - DNA, 24 bp, Artificial sequence
  SiRNA target sequence
atgttgatttgtttgcatcaaagt

SEQ ID NO: 219574 - DNA, 24 bp, Artificial sequence
  SiRNA target sequence
tgttgatttgtttgcatcaaagtt

SEQ ID NO: 219575 - DNA, 24 bp, Artificial sequence
  SiRNA target sequence
gttgatttgtttgcatcaaagttg

SEQ ID NO: 219576 - DNA, 24 bp, Artificial sequence
  SiRNA target sequence
ttgatttgtttgcatcaaagttgt

SEQ ID NO: 219577 - DNA, 24 bp, Artificial sequence
  SiRNA target sequence
tgatttgtttgcatcaaagttgtt

SEQ ID NO: 219578 - DNA, 24 bp, Artificial sequence
  SiRNA target sequence
gatttgtttgcatcaaagttgtta

SEQ ID NO: 219579 - DNA, 24 bp, Artificial sequence
  SiRNA target sequence
atttgtttgcatcaaagttgttag

SEQ ID NO: 219580 - DNA, 24 bp, Artificial sequence
  SiRNA target sequence
tttgtttgcatcaaagttgttaga

SEQ ID NO: 219581 - DNA, 24 bp, Artificial sequence
  SiRNA target sequence
ttgtttgcatcaaagttgttagat

SEQ ID NO: 219582 - DNA, 24 bp, Artificial sequence
  SiRNA target sequence
tgtttgcatcaaagttgttagata

SEQ ID NO: 219583 - DNA, 24 bp, Artificial sequence
  SiRNA target sequence
gtttgcatcaaagttgttagataa

SEQ ID NO: 219584 - DNA, 24 bp, Artificial sequence
  SiRNA target sequence
tttgcatcaaagttgttagataat

SEQ ID NO: 219585 - DNA, 24 bp, Artificial sequence
  SiRNA target sequence
ttgcatcaaagttgttagataata

SEQ ID NO: 219586 - DNA, 24 bp, Artificial sequence
  SiRNA target sequence
tgcatcaaagttgttagataataa

SEQ ID NO: 219587 - DNA, 24 bp, Artificial sequence
  SiRNA target sequence
gcatcaaagttgttagataataaa

SEQ ID NO: 219588 - DNA, 24 bp, Artificial sequence
  SiRNA target sequence
catcaaagttgttagataataaaa

SEQ ID NO: 219589 - DNA, 24 bp, Artificial sequence
  SiRNA target sequence
atcaaagttgttagataataaaaa

SEQ ID NO: 219590 - DNA, 24 bp, Artificial sequence
  SiRNA target sequence
tcaaagttgttagataataaaaaa

SEQ ID NO: 219591 - DNA, 24 bp, Artificial sequence
  SiRNA target sequence
caaagttgttagataataaaaaag

SEQ ID NO: 219592 - DNA, 24 bp, Artificial sequence
  SiRNA target sequence
aaagttgttagataataaaaaaga

SEQ ID NO: 219593 - DNA, 24 bp, Artificial sequence
  SiRNA target sequence
aagttgttagataataaaaaagaa

SEQ ID NO: 219594 - DNA, 24 bp, Artificial sequence
  SiRNA target sequence
agttgttagataataaaaaagaag

SEQ ID NO: 219595 - DNA, 24 bp, Artificial sequence
  SiRNA target sequence
gttgttagataataaaaaagaaga

SEQ ID NO: 219596 - DNA, 24 bp, Artificial sequence
  SiRNA target sequence
ttgttagataataaaaaagaagag

SEQ ID NO: 219597 - DNA, 24 bp, Artificial sequence
  SiRNA target sequence
tgttagataataaaaaagaagagg

SEQ ID NO: 219598 - DNA, 24 bp, Artificial sequence
  SiRNA target sequence
gttagataataaaaaagaagagga

SEQ ID NO: 219599 - DNA, 24 bp, Artificial sequence
  SiRNA target sequence
ttagataataaaaaagaagaggaa

SEQ ID NO: 219600 - DNA, 24 bp, Artificial sequence
  SiRNA target sequence
tagataataaaaaagaagaggaaa

SEQ ID NO: 219601 - DNA, 24 bp, Artificial sequence
  SiRNA target sequence
agataataaaaaagaagaggaaat

SEQ ID NO: 219602 - DNA, 24 bp, Artificial sequence
  SiRNA target sequence
gataataaaaaagaagaggaaatt

SEQ ID NO: 219603 - DNA, 24 bp, Artificial sequence
  SiRNA target sequence
ataataaaaaagaagaggaaattg

SEQ ID NO: 219604 - DNA, 24 bp, Artificial sequence
  SiRNA target sequence
taataaaaaagaagaggaaattga

SEQ ID NO: 219605 - DNA, 24 bp, Artificial sequence
  SiRNA target sequence
aataaaaaagaagaggaaattgat

SEQ ID NO: 219606 - DNA, 24 bp, Artificial sequence
  SiRNA target sequence
ataaaaaagaagaggaaattgatg

SEQ ID NO: 219607 - DNA, 24 bp, Artificial sequence
  SiRNA target sequence
taaaaaagaagaggaaattgatgt

SEQ ID NO: 219608 - DNA, 24 bp, Artificial sequence
  SiRNA target sequence
aaaaaagaagaggaaattgatgtg

SEQ ID NO: 219609 - DNA, 24 bp, Artificial sequence
  SiRNA target sequence
aaaaagaagaggaaattgatgtgt

SEQ ID NO: 219610 - DNA, 24 bp, Artificial sequence
  SiRNA target sequence
aaaagaagaggaaattgatgtgtc

SEQ ID NO: 219611 - DNA, 24 bp, Artificial sequence
  SiRNA target sequence
aaagaagaggaaattgatgtgtca

SEQ ID NO: 219612 - DNA, 24 bp, Artificial sequence
  SiRNA target sequence
aagaagaggaaattgatgtgtcag

SEQ ID NO: 219613 - DNA, 24 bp, Artificial sequence
  SiRNA target sequence
agaagaggaaattgatgtgtcagt

SEQ ID NO: 219614 - DNA, 24 bp, Artificial sequence
  SiRNA target sequence
gaagaggaaattgatgtgtcagtg

SEQ ID NO: 219615 - DNA, 24 bp, Artificial sequence
  SiRNA target sequence
aagaggaaattgatgtgtcagtgc

SEQ ID NO: 219616 - DNA, 24 bp, Artificial sequence
  SiRNA target sequence
agaggaaattgatgtgtcagtgct

SEQ ID NO: 219617 - DNA, 24 bp, Artificial sequence
  SiRNA target sequence
gaggaaattgatgtgtcagtgctc

SEQ ID NO: 219618 - DNA, 24 bp, Artificial sequence
  SiRNA target sequence
aggaaattgatgtgtcagtgctcg

SEQ ID NO: 219619 - DNA, 24 bp, Artificial sequence
  SiRNA target sequence
ggaaattgatgtgtcagtgctcgt

SEQ ID NO: 219620 - DNA, 24 bp, Artificial sequence
  SiRNA target sequence
gaaattgatgtgtcagtgctcgtt

SEQ ID NO: 219621 - DNA, 24 bp, Artificial sequence
  SiRNA target sequence
aaattgatgtgtcagtgctcgtta

SEQ ID NO: 219622 - DNA, 24 bp, Artificial sequence
  SiRNA target sequence
aattgatgtgtcagtgctcgttaa

SEQ ID NO: 219623 - DNA, 24 bp, Artificial sequence
  SiRNA target sequence
attgatgtgtcagtgctcgttaat

SEQ ID NO: 219624 - DNA, 24 bp, Artificial sequence
  SiRNA target sequence
ttgatgtgtcagtgctcgttaatt

SEQ ID NO: 219625 - DNA, 24 bp, Artificial sequence
  SiRNA target sequence
tgatgtgtcagtgctcgttaatta

SEQ ID NO: 219626 - DNA, 24 bp, Artificial sequence
  SiRNA target sequence
gatgtgtcagtgctcgttaattaa

SEQ ID NO: 219627 - DNA, 25 bp, Artificial sequence
  SiRNA target sequence
atgattgagaggggtattatggaaa

SEQ ID NO: 219628 - DNA, 25 bp, Artificial sequence
  SiRNA target sequence
tgattgagaggggtattatggaaaa

SEQ ID NO: 219629 - DNA, 25 bp, Artificial sequence
  SiRNA target sequence
gattgagaggggtattatggaaaaa

SEQ ID NO: 219630 - DNA, 25 bp, Artificial sequence
  SiRNA target sequence
attgagaggggtattatggaaaaaa

SEQ ID NO: 219631 - DNA, 25 bp, Artificial sequence
  SiRNA target sequence
ttgagaggggtattatggaaaaaat

SEQ ID NO: 219632 - DNA, 25 bp, Artificial sequence
  SiRNA target sequence
tgagaggggtattatggaaaaaata

SEQ ID NO: 219633 - DNA, 25 bp, Artificial sequence
  SiRNA target sequence
gagaggggtattatggaaaaaataa

SEQ ID NO: 219634 - DNA, 25 bp, Artificial sequence
  SiRNA target sequence
agaggggtattatggaaaaaataaa

SEQ ID NO: 219635 - DNA, 25 bp, Artificial sequence
  SiRNA target sequence
gaggggtattatggaaaaaataaaa

SEQ ID NO: 219636 - DNA, 25 bp, Artificial sequence
  SiRNA target sequence
aggggtattatggaaaaaataaaaa

SEQ ID NO: 219637 - DNA, 25 bp, Artificial sequence
  SiRNA target sequence
ggggtattatggaaaaaataaaaaa

SEQ ID NO: 219638 - DNA, 25 bp, Artificial sequence
  SiRNA target sequence
gggtattatggaaaaaataaaaaat

SEQ ID NO: 219639 - DNA, 25 bp, Artificial sequence
  SiRNA target sequence
ggtattatggaaaaaataaaaaatt

SEQ ID NO: 219640 - DNA, 25 bp, Artificial sequence
  SiRNA target sequence
gtattatggaaaaaataaaaaattt

SEQ ID NO: 219641 - DNA, 25 bp, Artificial sequence
  SiRNA target sequence
tattatggaaaaaataaaaaattta

SEQ ID NO: 219642 - DNA, 25 bp, Artificial sequence
  SiRNA target sequence
attatggaaaaaataaaaaatttat

SEQ ID NO: 219643 - DNA, 25 bp, Artificial sequence
  SiRNA target sequence
ttatggaaaaaataaaaaatttatt

SEQ ID NO: 219644 - DNA, 25 bp, Artificial sequence
  SiRNA target sequence
tatggaaaaaataaaaaatttatta

SEQ ID NO: 219645 - DNA, 25 bp, Artificial sequence
  SiRNA target sequence
atggaaaaaataaaaaatttattaa

SEQ ID NO: 219646 - DNA, 25 bp, Artificial sequence
  SiRNA target sequence
tggaaaaaataaaaaatttattaac

SEQ ID NO: 219647 - DNA, 25 bp, Artificial sequence
  SiRNA target sequence
ggaaaaaataaaaaatttattaaca

SEQ ID NO: 219648 - DNA, 25 bp, Artificial sequence
  SiRNA target sequence
gaaaaaataaaaaatttattaacag

SEQ ID NO: 219649 - DNA, 25 bp, Artificial sequence
  SiRNA target sequence
aaaaaataaaaaatttattaacaga

SEQ ID NO: 219650 - DNA, 25 bp, Artificial sequence
  SiRNA target sequence
aaaaataaaaaatttattaacagag

SEQ ID NO: 219651 - DNA, 25 bp, Artificial sequence
  SiRNA target sequence
aaaataaaaaatttattaacagagg

SEQ ID NO: 219652 - DNA, 25 bp, Artificial sequence
  SiRNA target sequence
aaataaaaaatttattaacagagga

SEQ ID NO: 219653 - DNA, 25 bp, Artificial sequence
  SiRNA target sequence
aataaaaaatttattaacagaggat

SEQ ID NO: 219654 - DNA, 25 bp, Artificial sequence
  SiRNA target sequence
ataaaaaatttattaacagaggatg

SEQ ID NO: 219655 - DNA, 25 bp, Artificial sequence
  SiRNA target sequence
taaaaaatttattaacagaggatga

SEQ ID NO: 219656 - DNA, 25 bp, Artificial sequence
  SiRNA target sequence
aaaaaatttattaacagaggatgaa

SEQ ID NO: 219657 - DNA, 25 bp, Artificial sequence
  SiRNA target sequence
aaaaatttattaacagaggatgaag

SEQ ID NO: 219658 - DNA, 25 bp, Artificial sequence
  SiRNA target sequence
aaaatttattaacagaggatgaagt

SEQ ID NO: 219659 - DNA, 25 bp, Artificial sequence
  SiRNA target sequence
aaatttattaacagaggatgaagta

SEQ ID NO: 219660 - DNA, 25 bp, Artificial sequence
  SiRNA target sequence
aatttattaacagaggatgaagtag

SEQ ID NO: 219661 - DNA, 25 bp, Artificial sequence
  SiRNA target sequence
atttattaacagaggatgaagtaga

SEQ ID NO: 219662 - DNA, 25 bp, Artificial sequence
  SiRNA target sequence
tttattaacagaggatgaagtagaa

SEQ ID NO: 219663 - DNA, 25 bp, Artificial sequence
  SiRNA target sequence
ttattaacagaggatgaagtagaag

SEQ ID NO: 219664 - DNA, 25 bp, Artificial sequence
  SiRNA target sequence
tattaacagaggatgaagtagaagc

SEQ ID NO: 219665 - DNA, 25 bp, Artificial sequence
  SiRNA target sequence
attaacagaggatgaagtagaagca

SEQ ID NO: 219666 - DNA, 25 bp, Artificial sequence
  SiRNA target sequence
ttaacagaggatgaagtagaagcag

SEQ ID NO: 219667 - DNA, 25 bp, Artificial sequence
  SiRNA target sequence
taacagaggatgaagtagaagcaga

SEQ ID NO: 219668 - DNA, 25 bp, Artificial sequence
  SiRNA target sequence
aacagaggatgaagtagaagcagaa

SEQ ID NO: 219669 - DNA, 25 bp, Artificial sequence
  SiRNA target sequence
acagaggatgaagtagaagcagaag

SEQ ID NO: 219670 - DNA, 25 bp, Artificial sequence
  SiRNA target sequence
cagaggatgaagtagaagcagaagc

SEQ ID NO: 219671 - DNA, 25 bp, Artificial sequence
  SiRNA target sequence
agaggatgaagtagaagcagaagca

SEQ ID NO: 219672 - DNA, 25 bp, Artificial sequence
  SiRNA target sequence
gaggatgaagtagaagcagaagcaa

SEQ ID NO: 219673 - DNA, 25 bp, Artificial sequence
  SiRNA target sequence
aggatgaagtagaagcagaagcaaa

SEQ ID NO: 219674 - DNA, 25 bp, Artificial sequence
  SiRNA target sequence
ggatgaagtagaagcagaagcaaat

SEQ ID NO: 219675 - DNA, 25 bp, Artificial sequence
  SiRNA target sequence
gatgaagtagaagcagaagcaaatt

SEQ ID NO: 219676 - DNA, 25 bp, Artificial sequence
  SiRNA target sequence
atgaagtagaagcagaagcaaattc

SEQ ID NO: 219677 - DNA, 25 bp, Artificial sequence
  SiRNA target sequence
tgaagtagaagcagaagcaaattct

SEQ ID NO: 219678 - DNA, 25 bp, Artificial sequence
  SiRNA target sequence
gaagtagaagcagaagcaaattctg

SEQ ID NO: 219679 - DNA, 25 bp, Artificial sequence
  SiRNA target sequence
aagtagaagcagaagcaaattctgg

SEQ ID NO: 219680 - DNA, 25 bp, Artificial sequence
  SiRNA target sequence
agtagaagcagaagcaaattctgga

SEQ ID NO: 219681 - DNA, 25 bp, Artificial sequence
  SiRNA target sequence
gtagaagcagaagcaaattctggaa

SEQ ID NO: 219682 - DNA, 25 bp, Artificial sequence
  SiRNA target sequence
tagaagcagaagcaaattctggaag

SEQ ID NO: 219683 - DNA, 25 bp, Artificial sequence
  SiRNA target sequence
agaagcagaagcaaattctggaagg

SEQ ID NO: 219684 - DNA, 25 bp, Artificial sequence
  SiRNA target sequence
gaagcagaagcaaattctggaaggg

SEQ ID NO: 219685 - DNA, 25 bp, Artificial sequence
  SiRNA target sequence
aagcagaagcaaattctggaagggg

SEQ ID NO: 219686 - DNA, 25 bp, Artificial sequence
  SiRNA target sequence
agcagaagcaaattctggaaggggc

SEQ ID NO: 219687 - DNA, 25 bp, Artificial sequence
  SiRNA target sequence
gcagaagcaaattctggaaggggca

SEQ ID NO: 219688 - DNA, 25 bp, Artificial sequence
  SiRNA target sequence
cagaagcaaattctggaaggggcat

SEQ ID NO: 219689 - DNA, 25 bp, Artificial sequence
  SiRNA target sequence
agaagcaaattctggaaggggcatt

SEQ ID NO: 219690 - DNA, 25 bp, Artificial sequence
  SiRNA target sequence
gaagcaaattctggaaggggcattt

SEQ ID NO: 219691 - DNA, 25 bp, Artificial sequence
  SiRNA target sequence
aagcaaattctggaaggggcatttt

SEQ ID NO: 219692 - DNA, 25 bp, Artificial sequence
  SiRNA target sequence
agcaaattctggaaggggcatttta

SEQ ID NO: 219693 - DNA, 25 bp, Artificial sequence
  SiRNA target sequence
gcaaattctggaaggggcattttat

SEQ ID NO: 219694 - DNA, 25 bp, Artificial sequence
  SiRNA target sequence
caaattctggaaggggcattttatc

SEQ ID NO: 219695 - DNA, 25 bp, Artificial sequence
  SiRNA target sequence
aaattctggaaggggcattttatca

SEQ ID NO: 219696 - DNA, 25 bp, Artificial sequence
  SiRNA target sequence
aattctggaaggggcattttatcaa

SEQ ID NO: 219697 - DNA, 25 bp, Artificial sequence
  SiRNA target sequence
attctggaaggggcattttatcaat

SEQ ID NO: 219698 - DNA, 25 bp, Artificial sequence
  SiRNA target sequence
ttctggaaggggcattttatcaata

SEQ ID NO: 219699 - DNA, 25 bp, Artificial sequence
  SiRNA target sequence
tctggaaggggcattttatcaatat

SEQ ID NO: 219700 - DNA, 25 bp, Artificial sequence
  SiRNA target sequence
ctggaaggggcattttatcaatatt

SEQ ID NO: 219701 - DNA, 25 bp, Artificial sequence
  SiRNA target sequence
tggaaggggcattttatcaatattt

SEQ ID NO: 219702 - DNA, 25 bp, Artificial sequence
  SiRNA target sequence
ggaaggggcattttatcaatattta

SEQ ID NO: 219703 - DNA, 25 bp, Artificial sequence
  SiRNA target sequence
gaaggggcattttatcaatatttag

SEQ ID NO: 219704 - DNA, 25 bp, Artificial sequence
  SiRNA target sequence
aaggggcattttatcaatatttaga

SEQ ID NO: 219705 - DNA, 25 bp, Artificial sequence
  SiRNA target sequence
aggggcattttatcaatatttagaa

SEQ ID NO: 219706 - DNA, 25 bp, Artificial sequence
  SiRNA target sequence
ggggcattttatcaatatttagaat

SEQ ID NO: 219707 - DNA, 25 bp, Artificial sequence
  SiRNA target sequence
gggcattttatcaatatttagaatt

SEQ ID NO: 219708 - DNA, 25 bp, Artificial sequence
  SiRNA target sequence
ggcattttatcaatatttagaattg

SEQ ID NO: 219709 - DNA, 25 bp, Artificial sequence
  SiRNA target sequence
gcattttatcaatatttagaattgc

SEQ ID NO: 219710 - DNA, 25 bp, Artificial sequence
  SiRNA target sequence
cattttatcaatatttagaattgct

SEQ ID NO: 219711 - DNA, 25 bp, Artificial sequence
  SiRNA target sequence
attttatcaatatttagaattgcta

SEQ ID NO: 219712 - DNA, 25 bp, Artificial sequence
  SiRNA target sequence
ttttatcaatatttagaattgctaa

SEQ ID NO: 219713 - DNA, 25 bp, Artificial sequence
  SiRNA target sequence
tttatcaatatttagaattgctaag

SEQ ID NO: 219714 - DNA, 25 bp, Artificial sequence
  SiRNA target sequence
ttatcaatatttagaattgctaagg

SEQ ID NO: 219715 - DNA, 25 bp, Artificial sequence
  SiRNA target sequence
tatcaatatttagaattgctaaggt

SEQ ID NO: 219716 - DNA, 25 bp, Artificial sequence
  SiRNA target sequence
atcaatatttagaattgctaaggta

SEQ ID NO: 219717 - DNA, 25 bp, Artificial sequence
  SiRNA target sequence
tcaatatttagaattgctaaggtag

SEQ ID NO: 219718 - DNA, 25 bp, Artificial sequence
  SiRNA target sequence
caatatttagaattgctaaggtaga

SEQ ID NO: 219719 - DNA, 25 bp, Artificial sequence
  SiRNA target sequence
aatatttagaattgctaaggtagaa

SEQ ID NO: 219720 - DNA, 25 bp, Artificial sequence
  SiRNA target sequence
atatttagaattgctaaggtagaaa

SEQ ID NO: 219721 - DNA, 25 bp, Artificial sequence
  SiRNA target sequence
tatttagaattgctaaggtagaaag

SEQ ID NO: 219722 - DNA, 25 bp, Artificial sequence
  SiRNA target sequence
atttagaattgctaaggtagaaaga

SEQ ID NO: 219723 - DNA, 25 bp, Artificial sequence
  SiRNA target sequence
tttagaattgctaaggtagaaagaa

SEQ ID NO: 219724 - DNA, 25 bp, Artificial sequence
  SiRNA target sequence
ttagaattgctaaggtagaaagaag

SEQ ID NO: 219725 - DNA, 25 bp, Artificial sequence
  SiRNA target sequence
tagaattgctaaggtagaaagaaga

SEQ ID NO: 219726 - DNA, 25 bp, Artificial sequence
  SiRNA target sequence
agaattgctaaggtagaaagaagaa

SEQ ID NO: 219727 - DNA, 25 bp, Artificial sequence
  SiRNA target sequence
gaattgctaaggtagaaagaagaat

SEQ ID NO: 219728 - DNA, 25 bp, Artificial sequence
  SiRNA target sequence
aattgctaaggtagaaagaagaatg

SEQ ID NO: 219729 - DNA, 25 bp, Artificial sequence
  SiRNA target sequence
attgctaaggtagaaagaagaatgt

SEQ ID NO: 219730 - DNA, 25 bp, Artificial sequence
  SiRNA target sequence
ttgctaaggtagaaagaagaatgtt

SEQ ID NO: 219731 - DNA, 25 bp, Artificial sequence
  SiRNA target sequence
tgctaaggtagaaagaagaatgttt

SEQ ID NO: 219732 - DNA, 25 bp, Artificial sequence
  SiRNA target sequence
gctaaggtagaaagaagaatgtttt

SEQ ID NO: 219733 - DNA, 25 bp, Artificial sequence
  SiRNA target sequence
ctaaggtagaaagaagaatgttttg

SEQ ID NO: 219734 - DNA, 25 bp, Artificial sequence
  SiRNA target sequence
taaggtagaaagaagaatgttttgg

SEQ ID NO: 219735 - DNA, 25 bp, Artificial sequence
  SiRNA target sequence
aaggtagaaagaagaatgttttggc

SEQ ID NO: 219736 - DNA, 25 bp, Artificial sequence
  SiRNA target sequence
aggtagaaagaagaatgttttggct

SEQ ID NO: 219737 - DNA, 25 bp, Artificial sequence
  SiRNA target sequence
ggtagaaagaagaatgttttggctt

SEQ ID NO: 219738 - DNA, 25 bp, Artificial sequence
  SiRNA target sequence
gtagaaagaagaatgttttggctta

SEQ ID NO: 219739 - DNA, 25 bp, Artificial sequence
  SiRNA target sequence
tagaaagaagaatgttttggcttat

SEQ ID NO: 219740 - DNA, 25 bp, Artificial sequence
  SiRNA target sequence
agaaagaagaatgttttggcttatg

SEQ ID NO: 219741 - DNA, 25 bp, Artificial sequence
  SiRNA target sequence
gaaagaagaatgttttggcttatga

SEQ ID NO: 219742 - DNA, 25 bp, Artificial sequence
  SiRNA target sequence
aaagaagaatgttttggcttatgac

SEQ ID NO: 219743 - DNA, 25 bp, Artificial sequence
  SiRNA target sequence
aagaagaatgttttggcttatgacg

SEQ ID NO: 219744 - DNA, 25 bp, Artificial sequence
  SiRNA target sequence
agaagaatgttttggcttatgacgc

SEQ ID NO: 219745 - DNA, 25 bp, Artificial sequence
  SiRNA target sequence
gaagaatgttttggcttatgacgct

SEQ ID NO: 219746 - DNA, 25 bp, Artificial sequence
  SiRNA target sequence
aagaatgttttggcttatgacgctt

SEQ ID NO: 219747 - DNA, 25 bp, Artificial sequence
  SiRNA target sequence
agaatgttttggcttatgacgctta

SEQ ID NO: 219748 - DNA, 25 bp, Artificial sequence
  SiRNA target sequence
gaatgttttggcttatgacgcttat

SEQ ID NO: 219749 - DNA, 25 bp, Artificial sequence
  SiRNA target sequence
aatgttttggcttatgacgcttatg

SEQ ID NO: 219750 - DNA, 25 bp, Artificial sequence
  SiRNA target sequence
atgttttggcttatgacgcttatgt

SEQ ID NO: 219751 - DNA, 25 bp, Artificial sequence
  SiRNA target sequence
tgttttggcttatgacgcttatgtt

SEQ ID NO: 219752 - DNA, 25 bp, Artificial sequence
  SiRNA target sequence
gttttggcttatgacgcttatgttt

SEQ ID NO: 219753 - DNA, 25 bp, Artificial sequence
  SiRNA target sequence
ttttggcttatgacgcttatgtttt

SEQ ID NO: 219754 - DNA, 25 bp, Artificial sequence
  SiRNA target sequence
tttggcttatgacgcttatgttttc

SEQ ID NO: 219755 - DNA, 25 bp, Artificial sequence
  SiRNA target sequence
ttggcttatgacgcttatgttttcg

SEQ ID NO: 219756 - DNA, 25 bp, Artificial sequence
  SiRNA target sequence
tggcttatgacgcttatgttttcgc

SEQ ID NO: 219757 - DNA, 25 bp, Artificial sequence
  SiRNA target sequence
ggcttatgacgcttatgttttcgct

SEQ ID NO: 219758 - DNA, 25 bp, Artificial sequence
  SiRNA target sequence
gcttatgacgcttatgttttcgctt

SEQ ID NO: 219759 - DNA, 25 bp, Artificial sequence
  SiRNA target sequence
cttatgacgcttatgttttcgctta

SEQ ID NO: 219760 - DNA, 25 bp, Artificial sequence
  SiRNA target sequence
ttatgacgcttatgttttcgcttat

SEQ ID NO: 219761 - DNA, 25 bp, Artificial sequence
  SiRNA target sequence
tatgacgcttatgttttcgcttatt

SEQ ID NO: 219762 - DNA, 25 bp, Artificial sequence
  SiRNA target sequence
atgacgcttatgttttcgcttattt

SEQ ID NO: 219763 - DNA, 25 bp, Artificial sequence
  SiRNA target sequence
tgacgcttatgttttcgcttatttc

SEQ ID NO: 219764 - DNA, 25 bp, Artificial sequence
  SiRNA target sequence
gacgcttatgttttcgcttatttcc

SEQ ID NO: 219765 - DNA, 25 bp, Artificial sequence
  SiRNA target sequence
acgcttatgttttcgcttatttcct

SEQ ID NO: 219766 - DNA, 25 bp, Artificial sequence
  SiRNA target sequence
cgcttatgttttcgcttatttcctt

SEQ ID NO: 219767 - DNA, 25 bp, Artificial sequence
  SiRNA target sequence
gcttatgttttcgcttatttccttt

SEQ ID NO: 219768 - DNA, 25 bp, Artificial sequence
  SiRNA target sequence
cttatgttttcgcttatttccttta

SEQ ID NO: 219769 - DNA, 25 bp, Artificial sequence
  SiRNA target sequence
ttatgttttcgcttatttcctttat

SEQ ID NO: 219770 - DNA, 25 bp, Artificial sequence
  SiRNA target sequence
tatgttttcgcttatttcctttatt

SEQ ID NO: 219771 - DNA, 25 bp, Artificial sequence
  SiRNA target sequence
atgttttcgcttatttcctttattt

SEQ ID NO: 219772 - DNA, 25 bp, Artificial sequence
  SiRNA target sequence
tgttttcgcttatttcctttattta

SEQ ID NO: 219773 - DNA, 25 bp, Artificial sequence
  SiRNA target sequence
gttttcgcttatttcctttatttac

SEQ ID NO: 219774 - DNA, 25 bp, Artificial sequence
  SiRNA target sequence
ttttcgcttatttcctttatttact

SEQ ID NO: 219775 - DNA, 25 bp, Artificial sequence
  SiRNA target sequence
tttcgcttatttcctttatttactc

SEQ ID NO: 219776 - DNA, 25 bp, Artificial sequence
  SiRNA target sequence
ttcgcttatttcctttatttactca

SEQ ID NO: 219777 - DNA, 25 bp, Artificial sequence
  SiRNA target sequence
tcgcttatttcctttatttactcag

SEQ ID NO: 219778 - DNA, 25 bp, Artificial sequence
  SiRNA target sequence
cgcttatttcctttatttactcagt

SEQ ID NO: 219779 - DNA, 25 bp, Artificial sequence
  SiRNA target sequence
gcttatttcctttatttactcagta

SEQ ID NO: 219780 - DNA, 25 bp, Artificial sequence
  SiRNA target sequence
cttatttcctttatttactcagtag

SEQ ID NO: 219781 - DNA, 25 bp, Artificial sequence
  SiRNA target sequence
ttatttcctttatttactcagtagg

SEQ ID NO: 219782 - DNA, 25 bp, Artificial sequence
  SiRNA target sequence
tatttcctttatttactcagtagga

SEQ ID NO: 219783 - DNA, 25 bp, Artificial sequence
  SiRNA target sequence
atttcctttatttactcagtaggac

SEQ ID NO: 219784 - DNA, 25 bp, Artificial sequence
  SiRNA target sequence
tttcctttatttactcagtaggacg

SEQ ID NO: 219785 - DNA, 25 bp, Artificial sequence
  SiRNA target sequence
ttcctttatttactcagtaggacga

SEQ ID NO: 219786 - DNA, 25 bp, Artificial sequence
  SiRNA target sequence
tcctttatttactcagtaggacgag

SEQ ID NO: 219787 - DNA, 25 bp, Artificial sequence
  SiRNA target sequence
cctttatttactcagtaggacgagt

SEQ ID NO: 219788 - DNA, 25 bp, Artificial sequence
  SiRNA target sequence
ctttatttactcagtaggacgagtg

SEQ ID NO: 219789 - DNA, 25 bp, Artificial sequence
  SiRNA target sequence
tttatttactcagtaggacgagtgt

SEQ ID NO: 219790 - DNA, 25 bp, Artificial sequence
  SiRNA target sequence
ttatttactcagtaggacgagtgtt

SEQ ID NO: 219791 - DNA, 25 bp, Artificial sequence
  SiRNA target sequence
tatttactcagtaggacgagtgtta

SEQ ID NO: 219792 - DNA, 25 bp, Artificial sequence
  SiRNA target sequence
atttactcagtaggacgagtgttaa

SEQ ID NO: 219793 - DNA, 25 bp, Artificial sequence
  SiRNA target sequence
tttactcagtaggacgagtgttaaa

SEQ ID NO: 219794 - DNA, 25 bp, Artificial sequence
  SiRNA target sequence
ttactcagtaggacgagtgttaaaa

SEQ ID NO: 219795 - DNA, 25 bp, Artificial sequence
  SiRNA target sequence
tactcagtaggacgagtgttaaaag

SEQ ID NO: 219796 - DNA, 25 bp, Artificial sequence
  SiRNA target sequence
actcagtaggacgagtgttaaaaga

SEQ ID NO: 219797 - DNA, 25 bp, Artificial sequence
  SiRNA target sequence
ctcagtaggacgagtgttaaaagat

SEQ ID NO: 219798 - DNA, 25 bp, Artificial sequence
  SiRNA target sequence
tcagtaggacgagtgttaaaagatg

SEQ ID NO: 219799 - DNA, 25 bp, Artificial sequence
  SiRNA target sequence
cagtaggacgagtgttaaaagatgc

SEQ ID NO: 219800 - DNA, 25 bp, Artificial sequence
  SiRNA target sequence
agtaggacgagtgttaaaagatgca

SEQ ID NO: 219801 - DNA, 25 bp, Artificial sequence
  SiRNA target sequence
gtaggacgagtgttaaaagatgcag

SEQ ID NO: 219802 - DNA, 25 bp, Artificial sequence
  SiRNA target sequence
taggacgagtgttaaaagatgcagc

SEQ ID NO: 219803 - DNA, 25 bp, Artificial sequence
  SiRNA target sequence
aggacgagtgttaaaagatgcagca

SEQ ID NO: 219804 - DNA, 25 bp, Artificial sequence
  SiRNA target sequence
ggacgagtgttaaaagatgcagcag

SEQ ID NO: 219805 - DNA, 25 bp, Artificial sequence
  SiRNA target sequence
gacgagtgttaaaagatgcagcagt

SEQ ID NO: 219806 - DNA, 25 bp, Artificial sequence
  SiRNA target sequence
acgagtgttaaaagatgcagcagtt

SEQ ID NO: 219807 - DNA, 25 bp, Artificial sequence
  SiRNA target sequence
cgagtgttaaaagatgcagcagttc

SEQ ID NO: 219808 - DNA, 25 bp, Artificial sequence
  SiRNA target sequence
gagtgttaaaagatgcagcagttct

SEQ ID NO: 219809 - DNA, 25 bp, Artificial sequence
  SiRNA target sequence
agtgttaaaagatgcagcagttctt

SEQ ID NO: 219810 - DNA, 25 bp, Artificial sequence
  SiRNA target sequence
gtgttaaaagatgcagcagttctta

SEQ ID NO: 219811 - DNA, 25 bp, Artificial sequence
  SiRNA target sequence
tgttaaaagatgcagcagttcttag

SEQ ID NO: 219812 - DNA, 25 bp, Artificial sequence
  SiRNA target sequence
gttaaaagatgcagcagttcttagt

SEQ ID NO: 219813 - DNA, 25 bp, Artificial sequence
  SiRNA target sequence
ttaaaagatgcagcagttcttagta

SEQ ID NO: 219814 - DNA, 25 bp, Artificial sequence
  SiRNA target sequence
taaaagatgcagcagttcttagtag

SEQ ID NO: 219815 - DNA, 25 bp, Artificial sequence
  SiRNA target sequence
aaaagatgcagcagttcttagtaga

SEQ ID NO: 219816 - DNA, 25 bp, Artificial sequence
  SiRNA target sequence
aaagatgcagcagttcttagtagac

SEQ ID NO: 219817 - DNA, 25 bp, Artificial sequence
  SiRNA target sequence
aagatgcagcagttcttagtagaca

SEQ ID NO: 219818 - DNA, 25 bp, Artificial sequence
  SiRNA target sequence
agatgcagcagttcttagtagacag

SEQ ID NO: 219819 - DNA, 25 bp, Artificial sequence
  SiRNA target sequence
gatgcagcagttcttagtagacaga

SEQ ID NO: 219820 - DNA, 25 bp, Artificial sequence
  SiRNA target sequence
atgcagcagttcttagtagacagat

SEQ ID NO: 219821 - DNA, 25 bp, Artificial sequence
  SiRNA target sequence
tgcagcagttcttagtagacagatg

SEQ ID NO: 219822 - DNA, 25 bp, Artificial sequence
  SiRNA target sequence
gcagcagttcttagtagacagatgc

SEQ ID NO: 219823 - DNA, 25 bp, Artificial sequence
  SiRNA target sequence
cagcagttcttagtagacagatgcc

SEQ ID NO: 219824 - DNA, 25 bp, Artificial sequence
  SiRNA target sequence
agcagttcttagtagacagatgcca

SEQ ID NO: 219825 - DNA, 25 bp, Artificial sequence
  SiRNA target sequence
gcagttcttagtagacagatgccac

SEQ ID NO: 219826 - DNA, 25 bp, Artificial sequence
  SiRNA target sequence
cagttcttagtagacagatgccact

SEQ ID NO: 219827 - DNA, 25 bp, Artificial sequence
  SiRNA target sequence
agttcttagtagacagatgccacta

SEQ ID NO: 219828 - DNA, 25 bp, Artificial sequence
  SiRNA target sequence
gttcttagtagacagatgccactat

SEQ ID NO: 219829 - DNA, 25 bp, Artificial sequence
  SiRNA target sequence
ttcttagtagacagatgccactatc

SEQ ID NO: 219830 - DNA, 25 bp, Artificial sequence
  SiRNA target sequence
tcttagtagacagatgccactatcc

SEQ ID NO: 219831 - DNA, 25 bp, Artificial sequence
  SiRNA target sequence
cttagtagacagatgccactatcca

SEQ ID NO: 219832 - DNA, 25 bp, Artificial sequence
  SiRNA target sequence
ttagtagacagatgccactatccat

SEQ ID NO: 219833 - DNA, 25 bp, Artificial sequence
  SiRNA target sequence
tagtagacagatgccactatccatt

SEQ ID NO: 219834 - DNA, 25 bp, Artificial sequence
  SiRNA target sequence
agtagacagatgccactatccatta

SEQ ID NO: 219835 - DNA, 25 bp, Artificial sequence
  SiRNA target sequence
gtagacagatgccactatccattaa

SEQ ID NO: 219836 - DNA, 25 bp, Artificial sequence
  SiRNA target sequence
tagacagatgccactatccattaat

SEQ ID NO: 219837 - DNA, 25 bp, Artificial sequence
  SiRNA target sequence
agacagatgccactatccattaatt

SEQ ID NO: 219838 - DNA, 25 bp, Artificial sequence
  SiRNA target sequence
gacagatgccactatccattaattg

SEQ ID NO: 219839 - DNA, 25 bp, Artificial sequence
  SiRNA target sequence
acagatgccactatccattaattgt

SEQ ID NO: 219840 - DNA, 25 bp, Artificial sequence
  SiRNA target sequence
cagatgccactatccattaattgtc

SEQ ID NO: 219841 - DNA, 25 bp, Artificial sequence
  SiRNA target sequence
agatgccactatccattaattgtct

SEQ ID NO: 219842 - DNA, 25 bp, Artificial sequence
  SiRNA target sequence
gatgccactatccattaattgtctt

SEQ ID NO: 219843 - DNA, 25 bp, Artificial sequence
  SiRNA target sequence
atgccactatccattaattgtctta

SEQ ID NO: 219844 - DNA, 25 bp, Artificial sequence
  SiRNA target sequence
tgccactatccattaattgtcttaa

SEQ ID NO: 219845 - DNA, 25 bp, Artificial sequence
  SiRNA target sequence
gccactatccattaattgtcttaaa

SEQ ID NO: 219846 - DNA, 25 bp, Artificial sequence
  SiRNA target sequence
ccactatccattaattgtcttaaaa

SEQ ID NO: 219847 - DNA, 25 bp, Artificial sequence
  SiRNA target sequence
cactatccattaattgtcttaaaag

SEQ ID NO: 219848 - DNA, 25 bp, Artificial sequence
  SiRNA target sequence
actatccattaattgtcttaaaagc

SEQ ID NO: 219849 - DNA, 25 bp, Artificial sequence
  SiRNA target sequence
ctatccattaattgtcttaaaagct

SEQ ID NO: 219850 - DNA, 25 bp, Artificial sequence
  SiRNA target sequence
tatccattaattgtcttaaaagctt

SEQ ID NO: 219851 - DNA, 25 bp, Artificial sequence
  SiRNA target sequence
atccattaattgtcttaaaagcttt

SEQ ID NO: 219852 - DNA, 25 bp, Artificial sequence
  SiRNA target sequence
tccattaattgtcttaaaagctttg

SEQ ID NO: 219853 - DNA, 25 bp, Artificial sequence
  SiRNA target sequence
ccattaattgtcttaaaagctttgt

SEQ ID NO: 219854 - DNA, 25 bp, Artificial sequence
  SiRNA target sequence
cattaattgtcttaaaagctttgta

SEQ ID NO: 219855 - DNA, 25 bp, Artificial sequence
  SiRNA target sequence
attaattgtcttaaaagctttgtaa

SEQ ID NO: 219856 - DNA, 25 bp, Artificial sequence
  SiRNA target sequence
ttaattgtcttaaaagctttgtaat

SEQ ID NO: 219857 - DNA, 25 bp, Artificial sequence
  SiRNA target sequence
taattgtcttaaaagctttgtaatt

SEQ ID NO: 219858 - DNA, 25 bp, Artificial sequence
  SiRNA target sequence
aattgtcttaaaagctttgtaattt

SEQ ID NO: 219859 - DNA, 25 bp, Artificial sequence
  SiRNA target sequence
attgtcttaaaagctttgtaatttt

SEQ ID NO: 219860 - DNA, 25 bp, Artificial sequence
  SiRNA target sequence
ttgtcttaaaagctttgtaatttta

SEQ ID NO: 219861 - DNA, 25 bp, Artificial sequence
  SiRNA target sequence
tgtcttaaaagctttgtaattttac

SEQ ID NO: 219862 - DNA, 25 bp, Artificial sequence
  SiRNA target sequence
gtcttaaaagctttgtaattttacc

SEQ ID NO: 219863 - DNA, 25 bp, Artificial sequence
  SiRNA target sequence
tcttaaaagctttgtaattttacca

SEQ ID NO: 219864 - DNA, 25 bp, Artificial sequence
  SiRNA target sequence
cttaaaagctttgtaattttaccag

SEQ ID NO: 219865 - DNA, 25 bp, Artificial sequence
  SiRNA target sequence
ttaaaagctttgtaattttaccagt

SEQ ID NO: 219866 - DNA, 25 bp, Artificial sequence
  SiRNA target sequence
taaaagctttgtaattttaccagtt

SEQ ID NO: 219867 - DNA, 25 bp, Artificial sequence
  SiRNA target sequence
aaaagctttgtaattttaccagtta

SEQ ID NO: 219868 - DNA, 25 bp, Artificial sequence
  SiRNA target sequence
aaagctttgtaattttaccagttac

SEQ ID NO: 219869 - DNA, 25 bp, Artificial sequence
  SiRNA target sequence
aagctttgtaattttaccagttact

SEQ ID NO: 219870 - DNA, 25 bp, Artificial sequence
  SiRNA target sequence
agctttgtaattttaccagttactc

SEQ ID NO: 219871 - DNA, 25 bp, Artificial sequence
  SiRNA target sequence
gctttgtaattttaccagttactct

SEQ ID NO: 219872 - DNA, 25 bp, Artificial sequence
  SiRNA target sequence
ctttgtaattttaccagttactctt

SEQ ID NO: 219873 - DNA, 25 bp, Artificial sequence
  SiRNA target sequence
tttgtaattttaccagttactcttg

SEQ ID NO: 219874 - DNA, 25 bp, Artificial sequence
  SiRNA target sequence
ttgtaattttaccagttactcttgt

SEQ ID NO: 219875 - DNA, 25 bp, Artificial sequence
  SiRNA target sequence
tgtaattttaccagttactcttgtt

SEQ ID NO: 219876 - DNA, 25 bp, Artificial sequence
  SiRNA target sequence
gtaattttaccagttactcttgttt

SEQ ID NO: 219877 - DNA, 25 bp, Artificial sequence
  SiRNA target sequence
taattttaccagttactcttgtttg

SEQ ID NO: 219878 - DNA, 25 bp, Artificial sequence
  SiRNA target sequence
aattttaccagttactcttgtttgt

SEQ ID NO: 219879 - DNA, 25 bp, Artificial sequence
  SiRNA target sequence
attttaccagttactcttgtttgtg

SEQ ID NO: 219880 - DNA, 25 bp, Artificial sequence
  SiRNA target sequence
ttttaccagttactcttgtttgtgt

SEQ ID NO: 219881 - DNA, 25 bp, Artificial sequence
  SiRNA target sequence
tttaccagttactcttgtttgtgta

SEQ ID NO: 219882 - DNA, 25 bp, Artificial sequence
  SiRNA target sequence
ttaccagttactcttgtttgtgtag

SEQ ID NO: 219883 - DNA, 25 bp, Artificial sequence
  SiRNA target sequence
taccagttactcttgtttgtgtagg

SEQ ID NO: 219884 - DNA, 25 bp, Artificial sequence
  SiRNA target sequence
accagttactcttgtttgtgtagga

SEQ ID NO: 219885 - DNA, 25 bp, Artificial sequence
  SiRNA target sequence
ccagttactcttgtttgtgtaggat

SEQ ID NO: 219886 - DNA, 25 bp, Artificial sequence
  SiRNA target sequence
cagttactcttgtttgtgtaggatt

SEQ ID NO: 219887 - DNA, 25 bp, Artificial sequence
  SiRNA target sequence
agttactcttgtttgtgtaggatta

SEQ ID NO: 219888 - DNA, 25 bp, Artificial sequence
  SiRNA target sequence
gttactcttgtttgtgtaggattaa

SEQ ID NO: 219889 - DNA, 25 bp, Artificial sequence
  SiRNA target sequence
ttactcttgtttgtgtaggattaat

SEQ ID NO: 219890 - DNA, 25 bp, Artificial sequence
  SiRNA target sequence
tactcttgtttgtgtaggattaatt

SEQ ID NO: 219891 - DNA, 25 bp, Artificial sequence
  SiRNA target sequence
actcttgtttgtgtaggattaattc

SEQ ID NO: 219892 - DNA, 25 bp, Artificial sequence
  SiRNA target sequence
ctcttgtttgtgtaggattaattca

SEQ ID NO: 219893 - DNA, 25 bp, Artificial sequence
  SiRNA target sequence
tcttgtttgtgtaggattaattcag

SEQ ID NO: 219894 - DNA, 25 bp, Artificial sequence
  SiRNA target sequence
cttgtttgtgtaggattaattcaga

SEQ ID NO: 219895 - DNA, 25 bp, Artificial sequence
  SiRNA target sequence
ttgtttgtgtaggattaattcagaa

SEQ ID NO: 219896 - DNA, 25 bp, Artificial sequence
  SiRNA target sequence
tgtttgtgtaggattaattcagaag

SEQ ID NO: 219897 - DNA, 25 bp, Artificial sequence
  SiRNA target sequence
gtttgtgtaggattaattcagaagt

SEQ ID NO: 219898 - DNA, 25 bp, Artificial sequence
  SiRNA target sequence
tttgtgtaggattaattcagaagtc

SEQ ID NO: 219899 - DNA, 25 bp, Artificial sequence
  SiRNA target sequence
ttgtgtaggattaattcagaagtct

SEQ ID NO: 219900 - DNA, 25 bp, Artificial sequence
  SiRNA target sequence
tgtgtaggattaattcagaagtcta

SEQ ID NO: 219901 - DNA, 25 bp, Artificial sequence
  SiRNA target sequence
gtgtaggattaattcagaagtctac

SEQ ID NO: 219902 - DNA, 25 bp, Artificial sequence
  SiRNA target sequence
tgtaggattaattcagaagtctaca

SEQ ID NO: 219903 - DNA, 25 bp, Artificial sequence
  SiRNA target sequence
gtaggattaattcagaagtctacac

SEQ ID NO: 219904 - DNA, 25 bp, Artificial sequence
  SiRNA target sequence
taggattaattcagaagtctacact

SEQ ID NO: 219905 - DNA, 25 bp, Artificial sequence
  SiRNA target sequence
aggattaattcagaagtctacactc

SEQ ID NO: 219906 - DNA, 25 bp, Artificial sequence
  SiRNA target sequence
ggattaattcagaagtctacactct

SEQ ID NO: 219907 - DNA, 25 bp, Artificial sequence
  SiRNA target sequence
gattaattcagaagtctacactctc

SEQ ID NO: 219908 - DNA, 25 bp, Artificial sequence
  SiRNA target sequence
attaattcagaagtctacactctct

SEQ ID NO: 219909 - DNA, 25 bp, Artificial sequence
  SiRNA target sequence
ttaattcagaagtctacactctctt

SEQ ID NO: 219910 - DNA, 25 bp, Artificial sequence
  SiRNA target sequence
taattcagaagtctacactctctta

SEQ ID NO: 219911 - DNA, 25 bp, Artificial sequence
  SiRNA target sequence
aattcagaagtctacactctcttat

SEQ ID NO: 219912 - DNA, 25 bp, Artificial sequence
  SiRNA target sequence
attcagaagtctacactctcttatt

SEQ ID NO: 219913 - DNA, 25 bp, Artificial sequence
  SiRNA target sequence
ttcagaagtctacactctcttattc

SEQ ID NO: 219914 - DNA, 25 bp, Artificial sequence
  SiRNA target sequence
tcagaagtctacactctcttattct

SEQ ID NO: 219915 - DNA, 25 bp, Artificial sequence
  SiRNA target sequence
cagaagtctacactctcttattctt

SEQ ID NO: 219916 - DNA, 25 bp, Artificial sequence
  SiRNA target sequence
agaagtctacactctcttattcttt

SEQ ID NO: 219917 - DNA, 25 bp, Artificial sequence
  SiRNA target sequence
gaagtctacactctcttattctttt

SEQ ID NO: 219918 - DNA, 25 bp, Artificial sequence
  SiRNA target sequence
aagtctacactctcttattctttta

SEQ ID NO: 219919 - DNA, 25 bp, Artificial sequence
  SiRNA target sequence
agtctacactctcttattcttttac

SEQ ID NO: 219920 - DNA, 25 bp, Artificial sequence
  SiRNA target sequence
gtctacactctcttattcttttaca

SEQ ID NO: 219921 - DNA, 25 bp, Artificial sequence
  SiRNA target sequence
tctacactctcttattcttttacaa

SEQ ID NO: 219922 - DNA, 25 bp, Artificial sequence
  SiRNA target sequence
ctacactctcttattcttttacaaa

SEQ ID NO: 219923 - DNA, 25 bp, Artificial sequence
  SiRNA target sequence
tacactctcttattcttttacaaaa

SEQ ID NO: 219924 - DNA, 25 bp, Artificial sequence
  SiRNA target sequence
acactctcttattcttttacaaaaa

SEQ ID NO: 219925 - DNA, 25 bp, Artificial sequence
  SiRNA target sequence
cactctcttattcttttacaaaaat

SEQ ID NO: 219926 - DNA, 25 bp, Artificial sequence
  SiRNA target sequence
actctcttattcttttacaaaaata

SEQ ID NO: 219927 - DNA, 25 bp, Artificial sequence
  SiRNA target sequence
ctctcttattcttttacaaaaatat

SEQ ID NO: 219928 - DNA, 25 bp, Artificial sequence
  SiRNA target sequence
tctcttattcttttacaaaaatatt

SEQ ID NO: 219929 - DNA, 25 bp, Artificial sequence
  SiRNA target sequence
ctcttattcttttacaaaaatattt

SEQ ID NO: 219930 - DNA, 25 bp, Artificial sequence
  SiRNA target sequence
tcttattcttttacaaaaatatttg

SEQ ID NO: 219931 - DNA, 25 bp, Artificial sequence
  SiRNA target sequence
cttattcttttacaaaaatatttga

SEQ ID NO: 219932 - DNA, 25 bp, Artificial sequence
  SiRNA target sequence
ttattcttttacaaaaatatttgat

SEQ ID NO: 219933 - DNA, 25 bp, Artificial sequence
  SiRNA target sequence
tattcttttacaaaaatatttgatg

SEQ ID NO: 219934 - DNA, 25 bp, Artificial sequence
  SiRNA target sequence
attcttttacaaaaatatttgatgg

SEQ ID NO: 219935 - DNA, 25 bp, Artificial sequence
  SiRNA target sequence
ttcttttacaaaaatatttgatggt

SEQ ID NO: 219936 - DNA, 25 bp, Artificial sequence
  SiRNA target sequence
tcttttacaaaaatatttgatggtg

SEQ ID NO: 219937 - DNA, 25 bp, Artificial sequence
  SiRNA target sequence
cttttacaaaaatatttgatggtgc

SEQ ID NO: 219938 - DNA, 25 bp, Artificial sequence
  SiRNA target sequence
ttttacaaaaatatttgatggtgca

SEQ ID NO: 219939 - DNA, 25 bp, Artificial sequence
  SiRNA target sequence
tttacaaaaatatttgatggtgcat

SEQ ID NO: 219940 - DNA, 25 bp, Artificial sequence
  SiRNA target sequence
ttacaaaaatatttgatggtgcatt

SEQ ID NO: 219941 - DNA, 25 bp, Artificial sequence
  SiRNA target sequence
tacaaaaatatttgatggtgcattg

SEQ ID NO: 219942 - DNA, 25 bp, Artificial sequence
  SiRNA target sequence
acaaaaatatttgatggtgcattgt

SEQ ID NO: 219943 - DNA, 25 bp, Artificial sequence
  SiRNA target sequence
caaaaatatttgatggtgcattgtt

SEQ ID NO: 219944 - DNA, 25 bp, Artificial sequence
  SiRNA target sequence
aaaaatatttgatggtgcattgtta

SEQ ID NO: 219945 - DNA, 25 bp, Artificial sequence
  SiRNA target sequence
aaaatatttgatggtgcattgttaa

SEQ ID NO: 219946 - DNA, 25 bp, Artificial sequence
  SiRNA target sequence
aaatatttgatggtgcattgttaat

SEQ ID NO: 219947 - DNA, 25 bp, Artificial sequence
  SiRNA target sequence
aatatttgatggtgcattgttaata

SEQ ID NO: 219948 - DNA, 25 bp, Artificial sequence
  SiRNA target sequence
atatttgatggtgcattgttaatat

SEQ ID NO: 219949 - DNA, 25 bp, Artificial sequence
  SiRNA target sequence
tatttgatggtgcattgttaatatt

SEQ ID NO: 219950 - DNA, 25 bp, Artificial sequence
  SiRNA target sequence
atttgatggtgcattgttaatattt

SEQ ID NO: 219951 - DNA, 25 bp, Artificial sequence
  SiRNA target sequence
tttgatggtgcattgttaatatttg

SEQ ID NO: 219952 - DNA, 25 bp, Artificial sequence
  SiRNA target sequence
ttgatggtgcattgttaatatttgc

SEQ ID NO: 219953 - DNA, 25 bp, Artificial sequence
  SiRNA target sequence
tgatggtgcattgttaatatttgct

SEQ ID NO: 219954 - DNA, 25 bp, Artificial sequence
  SiRNA target sequence
gatggtgcattgttaatatttgctt

SEQ ID NO: 219955 - DNA, 25 bp, Artificial sequence
  SiRNA target sequence
atggtgcattgttaatatttgcttt

SEQ ID NO: 219956 - DNA, 25 bp, Artificial sequence
  SiRNA target sequence
tggtgcattgttaatatttgctttt

SEQ ID NO: 219957 - DNA, 25 bp, Artificial sequence
  SiRNA target sequence
ggtgcattgttaatatttgcttttc

SEQ ID NO: 219958 - DNA, 25 bp, Artificial sequence
  SiRNA target sequence
gtgcattgttaatatttgcttttct

SEQ ID NO: 219959 - DNA, 25 bp, Artificial sequence
  SiRNA target sequence
tgcattgttaatatttgcttttctt

SEQ ID NO: 219960 - DNA, 25 bp, Artificial sequence
  SiRNA target sequence
gcattgttaatatttgcttttcttt

SEQ ID NO: 219961 - DNA, 25 bp, Artificial sequence
  SiRNA target sequence
cattgttaatatttgcttttcttta

SEQ ID NO: 219962 - DNA, 25 bp, Artificial sequence
  SiRNA target sequence
attgttaatatttgcttttctttat

SEQ ID NO: 219963 - DNA, 25 bp, Artificial sequence
  SiRNA target sequence
ttgttaatatttgcttttctttata

SEQ ID NO: 219964 - DNA, 25 bp, Artificial sequence
  SiRNA target sequence
tgttaatatttgcttttctttatat

SEQ ID NO: 219965 - DNA, 25 bp, Artificial sequence
  SiRNA target sequence
gttaatatttgcttttctttatatc

SEQ ID NO: 219966 - DNA, 25 bp, Artificial sequence
  SiRNA target sequence
ttaatatttgcttttctttatatca

SEQ ID NO: 219967 - DNA, 25 bp, Artificial sequence
  SiRNA target sequence
taatatttgcttttctttatatcat

SEQ ID NO: 219968 - DNA, 25 bp, Artificial sequence
  SiRNA target sequence
aatatttgcttttctttatatcatt

SEQ ID NO: 219969 - DNA, 25 bp, Artificial sequence
  SiRNA target sequence
atatttgcttttctttatatcattc

SEQ ID NO: 219970 - DNA, 25 bp, Artificial sequence
  SiRNA target sequence
tatttgcttttctttatatcattct

SEQ ID NO: 219971 - DNA, 25 bp, Artificial sequence
  SiRNA target sequence
atttgcttttctttatatcattctt

SEQ ID NO: 219972 - DNA, 25 bp, Artificial sequence
  SiRNA target sequence
tttgcttttctttatatcattcttg

SEQ ID NO: 219973 - DNA, 25 bp, Artificial sequence
  SiRNA target sequence
ttgcttttctttatatcattcttgg

SEQ ID NO: 219974 - DNA, 25 bp, Artificial sequence
  SiRNA target sequence
tgcttttctttatatcattcttggt

SEQ ID NO: 219975 - DNA, 25 bp, Artificial sequence
  SiRNA target sequence
gcttttctttatatcattcttggtc

SEQ ID NO: 219976 - DNA, 25 bp, Artificial sequence
  SiRNA target sequence
cttttctttatatcattcttggtct

SEQ ID NO: 219977 - DNA, 25 bp, Artificial sequence
  SiRNA target sequence
ttttctttatatcattcttggtcta

SEQ ID NO: 219978 - DNA, 25 bp, Artificial sequence
  SiRNA target sequence
tttctttatatcattcttggtctag

SEQ ID NO: 219979 - DNA, 25 bp, Artificial sequence
  SiRNA target sequence
ttctttatatcattcttggtctagt

SEQ ID NO: 219980 - DNA, 25 bp, Artificial sequence
  SiRNA target sequence
tctttatatcattcttggtctagtt

SEQ ID NO: 219981 - DNA, 25 bp, Artificial sequence
  SiRNA target sequence
ctttatatcattcttggtctagttc

SEQ ID NO: 219982 - DNA, 25 bp, Artificial sequence
  SiRNA target sequence
tttatatcattcttggtctagttct

SEQ ID NO: 219983 - DNA, 25 bp, Artificial sequence
  SiRNA target sequence
ttatatcattcttggtctagttctt

SEQ ID NO: 219984 - DNA, 25 bp, Artificial sequence
  SiRNA target sequence
tatatcattcttggtctagttcttc

SEQ ID NO: 219985 - DNA, 25 bp, Artificial sequence
  SiRNA target sequence
atatcattcttggtctagttcttct

SEQ ID NO: 219986 - DNA, 25 bp, Artificial sequence
  SiRNA target sequence
tatcattcttggtctagttcttctt

SEQ ID NO: 219987 - DNA, 25 bp, Artificial sequence
  SiRNA target sequence
atcattcttggtctagttcttcttc

SEQ ID NO: 219988 - DNA, 25 bp, Artificial sequence
  SiRNA target sequence
tcattcttggtctagttcttcttcc

SEQ ID NO: 219989 - DNA, 25 bp, Artificial sequence
  SiRNA target sequence
cattcttggtctagttcttcttcca

SEQ ID NO: 219990 - DNA, 25 bp, Artificial sequence
  SiRNA target sequence
attcttggtctagttcttcttccat

SEQ ID NO: 219991 - DNA, 25 bp, Artificial sequence
  SiRNA target sequence
ttcttggtctagttcttcttccata

SEQ ID NO: 219992 - DNA, 25 bp, Artificial sequence
  SiRNA target sequence
tcttggtctagttcttcttccatat

SEQ ID NO: 219993 - DNA, 25 bp, Artificial sequence
  SiRNA target sequence
cttggtctagttcttcttccatatt

SEQ ID NO: 219994 - DNA, 25 bp, Artificial sequence
  SiRNA target sequence
ttggtctagttcttcttccatattc

SEQ ID NO: 219995 - DNA, 25 bp, Artificial sequence
  SiRNA target sequence
tggtctagttcttcttccatattct

SEQ ID NO: 219996 - DNA, 25 bp, Artificial sequence
  SiRNA target sequence
ggtctagttcttcttccatattctc

SEQ ID NO: 219997 - DNA, 25 bp, Artificial sequence
  SiRNA target sequence
gtctagttcttcttccatattctca

SEQ ID NO: 219998 - DNA, 25 bp, Artificial sequence
  SiRNA target sequence
tctagttcttcttccatattctcat

SEQ ID NO: 219999 - DNA, 25 bp, Artificial sequence
  SiRNA target sequence
ctagttcttcttccatattctcatc

SEQ ID NO: 220000 - DNA, 25 bp, Artificial sequence
  SiRNA target sequence
tagttcttcttccatattctcatct

SEQ ID NO: 220001 - DNA, 25 bp, Artificial sequence
  SiRNA target sequence
agttcttcttccatattctcatctt

SEQ ID NO: 220002 - DNA, 25 bp, Artificial sequence
  SiRNA target sequence
gttcttcttccatattctcatcttt

SEQ ID NO: 220003 - DNA, 25 bp, Artificial sequence
  SiRNA target sequence
ttcttcttccatattctcatctttt

SEQ ID NO: 220004 - DNA, 25 bp, Artificial sequence
  SiRNA target sequence
tcttcttccatattctcatcttttc

SEQ ID NO: 220005 - DNA, 25 bp, Artificial sequence
  SiRNA target sequence
cttcttccatattctcatcttttcc

SEQ ID NO: 220006 - DNA, 25 bp, Artificial sequence
  SiRNA target sequence
ttcttccatattctcatcttttcca

SEQ ID NO: 220007 - DNA, 25 bp, Artificial sequence
  SiRNA target sequence
tcttccatattctcatcttttccag

SEQ ID NO: 220008 - DNA, 25 bp, Artificial sequence
  SiRNA target sequence
cttccatattctcatcttttccagc

SEQ ID NO: 220009 - DNA, 25 bp, Artificial sequence
  SiRNA target sequence
ttccatattctcatcttttccagct

SEQ ID NO: 220010 - DNA, 25 bp, Artificial sequence
  SiRNA target sequence
tccatattctcatcttttccagctt

SEQ ID NO: 220011 - DNA, 25 bp, Artificial sequence
  SiRNA target sequence
ccatattctcatcttttccagcttg

SEQ ID NO: 220012 - DNA, 25 bp, Artificial sequence
  SiRNA target sequence
catattctcatcttttccagcttga

SEQ ID NO: 220013 - DNA, 25 bp, Artificial sequence
  SiRNA target sequence
atattctcatcttttccagcttgat

SEQ ID NO: 220014 - DNA, 25 bp, Artificial sequence
  SiRNA target sequence
tattctcatcttttccagcttgata

SEQ ID NO: 220015 - DNA, 25 bp, Artificial sequence
  SiRNA target sequence
attctcatcttttccagcttgatag

SEQ ID NO: 220016 - DNA, 25 bp, Artificial sequence
  SiRNA target sequence
ttctcatcttttccagcttgatagt

SEQ ID NO: 220017 - DNA, 25 bp, Artificial sequence
  SiRNA target sequence
tctcatcttttccagcttgatagtt

SEQ ID NO: 220018 - DNA, 25 bp, Artificial sequence
  SiRNA target sequence
ctcatcttttccagcttgatagtta

SEQ ID NO: 220019 - DNA, 25 bp, Artificial sequence
  SiRNA target sequence
tcatcttttccagcttgatagttat

SEQ ID NO: 220020 - DNA, 25 bp, Artificial sequence
  SiRNA target sequence
catcttttccagcttgatagttatt

SEQ ID NO: 220021 - DNA, 25 bp, Artificial sequence
  SiRNA target sequence
atcttttccagcttgatagttattt

SEQ ID NO: 220022 - DNA, 25 bp, Artificial sequence
  SiRNA target sequence
tcttttccagcttgatagttatttt

SEQ ID NO: 220023 - DNA, 25 bp, Artificial sequence
  SiRNA target sequence
cttttccagcttgatagttattttt

SEQ ID NO: 220024 - DNA, 25 bp, Artificial sequence
  SiRNA target sequence
ttttccagcttgatagttatttttt

SEQ ID NO: 220025 - DNA, 25 bp, Artificial sequence
  SiRNA target sequence
tttccagcttgatagttattttttt

SEQ ID NO: 220026 - DNA, 25 bp, Artificial sequence
  SiRNA target sequence
ttccagcttgatagttattttttta

SEQ ID NO: 220027 - DNA, 25 bp, Artificial sequence
  SiRNA target sequence
tccagcttgatagttatttttttag

SEQ ID NO: 220028 - DNA, 25 bp, Artificial sequence
  SiRNA target sequence
ccagcttgatagttatttttttaga

SEQ ID NO: 220029 - DNA, 25 bp, Artificial sequence
  SiRNA target sequence
cagcttgatagttatttttttagag

SEQ ID NO: 220030 - DNA, 25 bp, Artificial sequence
  SiRNA target sequence
agcttgatagttatttttttagaga

SEQ ID NO: 220031 - DNA, 25 bp, Artificial sequence
  SiRNA target sequence
gcttgatagttatttttttagagac

SEQ ID NO: 220032 - DNA, 25 bp, Artificial sequence
  SiRNA target sequence
cttgatagttatttttttagagacc

SEQ ID NO: 220033 - DNA, 25 bp, Artificial sequence
  SiRNA target sequence
ttgatagttatttttttagagacct

SEQ ID NO: 220034 - DNA, 25 bp, Artificial sequence
  SiRNA target sequence
tgatagttatttttttagagacctt

SEQ ID NO: 220035 - DNA, 25 bp, Artificial sequence
  SiRNA target sequence
gatagttatttttttagagaccttt

SEQ ID NO: 220036 - DNA, 25 bp, Artificial sequence
  SiRNA target sequence
atagttatttttttagagacctttt

SEQ ID NO: 220037 - DNA, 25 bp, Artificial sequence
  SiRNA target sequence
tagttatttttttagagaccttttt

SEQ ID NO: 220038 - DNA, 25 bp, Artificial sequence
  SiRNA target sequence
agttatttttttagagaccttttta

SEQ ID NO: 220039 - DNA, 25 bp, Artificial sequence
  SiRNA target sequence
gttatttttttagagacctttttag

SEQ ID NO: 220040 - DNA, 25 bp, Artificial sequence
  SiRNA target sequence
ttatttttttagagacctttttagt

SEQ ID NO: 220041 - DNA, 25 bp, Artificial sequence
  SiRNA target sequence
tatttttttagagacctttttagtg

SEQ ID NO: 220042 - DNA, 25 bp, Artificial sequence
  SiRNA target sequence
atttttttagagacctttttagtga

SEQ ID NO: 220043 - DNA, 25 bp, Artificial sequence
  SiRNA target sequence
tttttttagagacctttttagtgat

SEQ ID NO: 220044 - DNA, 25 bp, Artificial sequence
  SiRNA target sequence
ttttttagagacctttttagtgatg

SEQ ID NO: 220045 - DNA, 25 bp, Artificial sequence
  SiRNA target sequence
tttttagagacctttttagtgatgg

SEQ ID NO: 220046 - DNA, 25 bp, Artificial sequence
  SiRNA target sequence
ttttagagacctttttagtgatggg

SEQ ID NO: 220047 - DNA, 25 bp, Artificial sequence
  SiRNA target sequence
tttagagacctttttagtgatggga

SEQ ID NO: 220048 - DNA, 25 bp, Artificial sequence
  SiRNA target sequence
ttagagacctttttagtgatgggaa

SEQ ID NO: 220049 - DNA, 25 bp, Artificial sequence
  SiRNA target sequence
tagagacctttttagtgatgggaaa

SEQ ID NO: 220050 - DNA, 25 bp, Artificial sequence
  SiRNA target sequence
agagacctttttagtgatgggaaat

SEQ ID NO: 220051 - DNA, 25 bp, Artificial sequence
  SiRNA target sequence
gagacctttttagtgatgggaaatg

SEQ ID NO: 220052 - DNA, 25 bp, Artificial sequence
  SiRNA target sequence
agacctttttagtgatgggaaatgt

SEQ ID NO: 220053 - DNA, 25 bp, Artificial sequence
  SiRNA target sequence
gacctttttagtgatgggaaatgtg

SEQ ID NO: 220054 - DNA, 25 bp, Artificial sequence
  SiRNA target sequence
acctttttagtgatgggaaatgtgt

SEQ ID NO: 220055 - DNA, 25 bp, Artificial sequence
  SiRNA target sequence
cctttttagtgatgggaaatgtgtt

SEQ ID NO: 220056 - DNA, 25 bp, Artificial sequence
  SiRNA target sequence
ctttttagtgatgggaaatgtgttg

SEQ ID NO: 220057 - DNA, 25 bp, Artificial sequence
  SiRNA target sequence
tttttagtgatgggaaatgtgttgt

SEQ ID NO: 220058 - DNA, 25 bp, Artificial sequence
  SiRNA target sequence
ttttagtgatgggaaatgtgttgta

SEQ ID NO: 220059 - DNA, 25 bp, Artificial sequence
  SiRNA target sequence
tttagtgatgggaaatgtgttgtaa

SEQ ID NO: 220060 - DNA, 25 bp, Artificial sequence
  SiRNA target sequence
ttagtgatgggaaatgtgttgtaag

SEQ ID NO: 220061 - DNA, 25 bp, Artificial sequence
  SiRNA target sequence
tagtgatgggaaatgtgttgtaaga

SEQ ID NO: 220062 - DNA, 25 bp, Artificial sequence
  SiRNA target sequence
agtgatgggaaatgtgttgtaagag

SEQ ID NO: 220063 - DNA, 25 bp, Artificial sequence
  SiRNA target sequence
gtgatgggaaatgtgttgtaagagg

SEQ ID NO: 220064 - DNA, 25 bp, Artificial sequence
  SiRNA target sequence
tgatgggaaatgtgttgtaagaggc

SEQ ID NO: 220065 - DNA, 25 bp, Artificial sequence
  SiRNA target sequence
gatgggaaatgtgttgtaagaggct

SEQ ID NO: 220066 - DNA, 25 bp, Artificial sequence
  SiRNA target sequence
atgggaaatgtgttgtaagaggcta

SEQ ID NO: 220067 - DNA, 25 bp, Artificial sequence
  SiRNA target sequence
tgggaaatgtgttgtaagaggctat

SEQ ID NO: 220068 - DNA, 25 bp, Artificial sequence
  SiRNA target sequence
gggaaatgtgttgtaagaggctatg

SEQ ID NO: 220069 - DNA, 25 bp, Artificial sequence
  SiRNA target sequence
ggaaatgtgttgtaagaggctatga

SEQ ID NO: 220070 - DNA, 25 bp, Artificial sequence
  SiRNA target sequence
gaaatgtgttgtaagaggctatgat

SEQ ID NO: 220071 - DNA, 25 bp, Artificial sequence
  SiRNA target sequence
aaatgtgttgtaagaggctatgatg

SEQ ID NO: 220072 - DNA, 25 bp, Artificial sequence
  SiRNA target sequence
aatgtgttgtaagaggctatgatgc

SEQ ID NO: 220073 - DNA, 25 bp, Artificial sequence
  SiRNA target sequence
atgtgttgtaagaggctatgatgct

SEQ ID NO: 220074 - DNA, 25 bp, Artificial sequence
  SiRNA target sequence
tgtgttgtaagaggctatgatgctt

SEQ ID NO: 220075 - DNA, 25 bp, Artificial sequence
  SiRNA target sequence
gtgttgtaagaggctatgatgcttt

SEQ ID NO: 220076 - DNA, 25 bp, Artificial sequence
  SiRNA target sequence
tgttgtaagaggctatgatgcttta

SEQ ID NO: 220077 - DNA, 25 bp, Artificial sequence
  SiRNA target sequence
gttgtaagaggctatgatgctttat

SEQ ID NO: 220078 - DNA, 25 bp, Artificial sequence
  SiRNA target sequence
ttgtaagaggctatgatgctttatt

SEQ ID NO: 220079 - DNA, 25 bp, Artificial sequence
  SiRNA target sequence
tgtaagaggctatgatgctttatta

SEQ ID NO: 220080 - DNA, 25 bp, Artificial sequence
  SiRNA target sequence
gtaagaggctatgatgctttattat

SEQ ID NO: 220081 - DNA, 25 bp, Artificial sequence
  SiRNA target sequence
taagaggctatgatgctttattatc

SEQ ID NO: 220082 - DNA, 25 bp, Artificial sequence
  SiRNA target sequence
aagaggctatgatgctttattatct

SEQ ID NO: 220083 - DNA, 25 bp, Artificial sequence
  SiRNA target sequence
agaggctatgatgctttattatctt

SEQ ID NO: 220084 - DNA, 25 bp, Artificial sequence
  SiRNA target sequence
gaggctatgatgctttattatcttt

SEQ ID NO: 220085 - DNA, 25 bp, Artificial sequence
  SiRNA target sequence
aggctatgatgctttattatctttg

SEQ ID NO: 220086 - DNA, 25 bp, Artificial sequence
  SiRNA target sequence
ggctatgatgctttattatctttgg

SEQ ID NO: 220087 - DNA, 25 bp, Artificial sequence
  SiRNA target sequence
gctatgatgctttattatctttggc

SEQ ID NO: 220088 - DNA, 25 bp, Artificial sequence
  SiRNA target sequence
ctatgatgctttattatctttggca

SEQ ID NO: 220089 - DNA, 25 bp, Artificial sequence
  SiRNA target sequence
tatgatgctttattatctttggcac

SEQ ID NO: 220090 - DNA, 25 bp, Artificial sequence
  SiRNA target sequence
atgatgctttattatctttggcact

SEQ ID NO: 220091 - DNA, 25 bp, Artificial sequence
  SiRNA target sequence
tgatgctttattatctttggcactg

SEQ ID NO: 220092 - DNA, 25 bp, Artificial sequence
  SiRNA target sequence
gatgctttattatctttggcactgg

SEQ ID NO: 220093 - DNA, 25 bp, Artificial sequence
  SiRNA target sequence
atgctttattatctttggcactggt

SEQ ID NO: 220094 - DNA, 25 bp, Artificial sequence
  SiRNA target sequence
tgctttattatctttggcactggtc

SEQ ID NO: 220095 - DNA, 25 bp, Artificial sequence
  SiRNA target sequence
gctttattatctttggcactggtct

SEQ ID NO: 220096 - DNA, 25 bp, Artificial sequence
  SiRNA target sequence
ctttattatctttggcactggtctt

SEQ ID NO: 220097 - DNA, 25 bp, Artificial sequence
  SiRNA target sequence
tttattatctttggcactggtcttt

SEQ ID NO: 220098 - DNA, 25 bp, Artificial sequence
  SiRNA target sequence
ttattatctttggcactggtcttta

SEQ ID NO: 220099 - DNA, 25 bp, Artificial sequence
  SiRNA target sequence
tattatctttggcactggtctttaa

SEQ ID NO: 220100 - DNA, 25 bp, Artificial sequence
  SiRNA target sequence
attatctttggcactggtctttaac

SEQ ID NO: 220101 - DNA, 25 bp, Artificial sequence
  SiRNA target sequence
ttatctttggcactggtctttaacg

SEQ ID NO: 220102 - DNA, 25 bp, Artificial sequence
  SiRNA target sequence
tatctttggcactggtctttaacga

SEQ ID NO: 220103 - DNA, 25 bp, Artificial sequence
  SiRNA target sequence
atctttggcactggtctttaacgaa

SEQ ID NO: 220104 - DNA, 25 bp, Artificial sequence
  SiRNA target sequence
tctttggcactggtctttaacgaat

SEQ ID NO: 220105 - DNA, 25 bp, Artificial sequence
  SiRNA target sequence
ctttggcactggtctttaacgaatg

SEQ ID NO: 220106 - DNA, 25 bp, Artificial sequence
  SiRNA target sequence
tttggcactggtctttaacgaatgg

SEQ ID NO: 220107 - DNA, 25 bp, Artificial sequence
  SiRNA target sequence
ttggcactggtctttaacgaatgga

SEQ ID NO: 220108 - DNA, 25 bp, Artificial sequence
  SiRNA target sequence
tggcactggtctttaacgaatggac

SEQ ID NO: 220109 - DNA, 25 bp, Artificial sequence
  SiRNA target sequence
ggcactggtctttaacgaatggaca

SEQ ID NO: 220110 - DNA, 25 bp, Artificial sequence
  SiRNA target sequence
gcactggtctttaacgaatggacat

SEQ ID NO: 220111 - DNA, 25 bp, Artificial sequence
  SiRNA target sequence
cactggtctttaacgaatggacatc

SEQ ID NO: 220112 - DNA, 25 bp, Artificial sequence
  SiRNA target sequence
actggtctttaacgaatggacatcc

SEQ ID NO: 220113 - DNA, 25 bp, Artificial sequence
  SiRNA target sequence
ctggtctttaacgaatggacatcct

SEQ ID NO: 220114 - DNA, 25 bp, Artificial sequence
  SiRNA target sequence
tggtctttaacgaatggacatcctc

SEQ ID NO: 220115 - DNA, 25 bp, Artificial sequence
  SiRNA target sequence
ggtctttaacgaatggacatcctct

SEQ ID NO: 220116 - DNA, 25 bp, Artificial sequence
  SiRNA target sequence
gtctttaacgaatggacatcctctc

SEQ ID NO: 220117 - DNA, 25 bp, Artificial sequence
  SiRNA target sequence
tctttaacgaatggacatcctctct

SEQ ID NO: 220118 - DNA, 25 bp, Artificial sequence
  SiRNA target sequence
ctttaacgaatggacatcctctcta

SEQ ID NO: 220119 - DNA, 25 bp, Artificial sequence
  SiRNA target sequence
tttaacgaatggacatcctctctag

SEQ ID NO: 220120 - DNA, 25 bp, Artificial sequence
  SiRNA target sequence
ttaacgaatggacatcctctctagt

SEQ ID NO: 220121 - DNA, 25 bp, Artificial sequence
  SiRNA target sequence
taacgaatggacatcctctctagtt

SEQ ID NO: 220122 - DNA, 25 bp, Artificial sequence
  SiRNA target sequence
aacgaatggacatcctctctagttt

SEQ ID NO: 220123 - DNA, 25 bp, Artificial sequence
  SiRNA target sequence
acgaatggacatcctctctagttta

SEQ ID NO: 220124 - DNA, 25 bp, Artificial sequence
  SiRNA target sequence
cgaatggacatcctctctagtttac

SEQ ID NO: 220125 - DNA, 25 bp, Artificial sequence
  SiRNA target sequence
gaatggacatcctctctagtttaca

SEQ ID NO: 220126 - DNA, 25 bp, Artificial sequence
  SiRNA target sequence
aatggacatcctctctagtttacat

SEQ ID NO: 220127 - DNA, 25 bp, Artificial sequence
  SiRNA target sequence
atggacatcctctctagtttacatt

SEQ ID NO: 220128 - DNA, 25 bp, Artificial sequence
  SiRNA target sequence
tggacatcctctctagtttacattg

SEQ ID NO: 220129 - DNA, 25 bp, Artificial sequence
  SiRNA target sequence
ggacatcctctctagtttacattgt

SEQ ID NO: 220130 - DNA, 25 bp, Artificial sequence
  SiRNA target sequence
gacatcctctctagtttacattgtt

SEQ ID NO: 220131 - DNA, 25 bp, Artificial sequence
  SiRNA target sequence
acatcctctctagtttacattgttt

SEQ ID NO: 220132 - DNA, 25 bp, Artificial sequence
  SiRNA target sequence
catcctctctagtttacattgtttc

SEQ ID NO: 220133 - DNA, 25 bp, Artificial sequence
  SiRNA target sequence
atcctctctagtttacattgtttca

SEQ ID NO: 220134 - DNA, 25 bp, Artificial sequence
  SiRNA target sequence
tcctctctagtttacattgtttcag

SEQ ID NO: 220135 - DNA, 25 bp, Artificial sequence
  SiRNA target sequence
cctctctagtttacattgtttcaga

SEQ ID NO: 220136 - DNA, 25 bp, Artificial sequence
  SiRNA target sequence
ctctctagtttacattgtttcagaa

SEQ ID NO: 220137 - DNA, 25 bp, Artificial sequence
  SiRNA target sequence
tctctagtttacattgtttcagaaa

SEQ ID NO: 220138 - DNA, 25 bp, Artificial sequence
  SiRNA target sequence
ctctagtttacattgtttcagaaat

SEQ ID NO: 220139 - DNA, 25 bp, Artificial sequence
  SiRNA target sequence
tctagtttacattgtttcagaaatg

SEQ ID NO: 220140 - DNA, 25 bp, Artificial sequence
  SiRNA target sequence
ctagtttacattgtttcagaaatgt

SEQ ID NO: 220141 - DNA, 25 bp, Artificial sequence
  SiRNA target sequence
tagtttacattgtttcagaaatgtt

SEQ ID NO: 220142 - DNA, 25 bp, Artificial sequence
  SiRNA target sequence
agtttacattgtttcagaaatgttt

SEQ ID NO: 220143 - DNA, 25 bp, Artificial sequence
  SiRNA target sequence
gtttacattgtttcagaaatgtttg

SEQ ID NO: 220144 - DNA, 25 bp, Artificial sequence
  SiRNA target sequence
tttacattgtttcagaaatgtttgg

SEQ ID NO: 220145 - DNA, 25 bp, Artificial sequence
  SiRNA target sequence
ttacattgtttcagaaatgtttggt

SEQ ID NO: 220146 - DNA, 25 bp, Artificial sequence
  SiRNA target sequence
tacattgtttcagaaatgtttggta

SEQ ID NO: 220147 - DNA, 25 bp, Artificial sequence
  SiRNA target sequence
acattgtttcagaaatgtttggtaa

SEQ ID NO: 220148 - DNA, 25 bp, Artificial sequence
  SiRNA target sequence
cattgtttcagaaatgtttggtaat

SEQ ID NO: 220149 - DNA, 25 bp, Artificial sequence
  SiRNA target sequence
attgtttcagaaatgtttggtaatt

SEQ ID NO: 220150 - DNA, 25 bp, Artificial sequence
  SiRNA target sequence
ttgtttcagaaatgtttggtaattt

SEQ ID NO: 220151 - DNA, 25 bp, Artificial sequence
  SiRNA target sequence
tgtttcagaaatgtttggtaattta

SEQ ID NO: 220152 - DNA, 25 bp, Artificial sequence
  SiRNA target sequence
gtttcagaaatgtttggtaatttag

SEQ ID NO: 220153 - DNA, 25 bp, Artificial sequence
  SiRNA target sequence
tttcagaaatgtttggtaatttagt

SEQ ID NO: 220154 - DNA, 25 bp, Artificial sequence
  SiRNA target sequence
ttcagaaatgtttggtaatttagta

SEQ ID NO: 220155 - DNA, 25 bp, Artificial sequence
  SiRNA target sequence
tcagaaatgtttggtaatttagtat

SEQ ID NO: 220156 - DNA, 25 bp, Artificial sequence
  SiRNA target sequence
cagaaatgtttggtaatttagtatt

SEQ ID NO: 220157 - DNA, 25 bp, Artificial sequence
  SiRNA target sequence
agaaatgtttggtaatttagtattg

SEQ ID NO: 220158 - DNA, 25 bp, Artificial sequence
  SiRNA target sequence
gaaatgtttggtaatttagtattgt

SEQ ID NO: 220159 - DNA, 25 bp, Artificial sequence
  SiRNA target sequence
aaatgtttggtaatttagtattgtc

SEQ ID NO: 220160 - DNA, 25 bp, Artificial sequence
  SiRNA target sequence
aatgtttggtaatttagtattgtct

SEQ ID NO: 220161 - DNA, 25 bp, Artificial sequence
  SiRNA target sequence
atgtttggtaatttagtattgtctt

SEQ ID NO: 220162 - DNA, 25 bp, Artificial sequence
  SiRNA target sequence
tgtttggtaatttagtattgtctta

SEQ ID NO: 220163 - DNA, 25 bp, Artificial sequence
  SiRNA target sequence
gtttggtaatttagtattgtcttat

SEQ ID NO: 220164 - DNA, 25 bp, Artificial sequence
  SiRNA target sequence
tttggtaatttagtattgtcttatt

SEQ ID NO: 220165 - DNA, 25 bp, Artificial sequence
  SiRNA target sequence
ttggtaatttagtattgtcttattt

SEQ ID NO: 220166 - DNA, 25 bp, Artificial sequence
  SiRNA target sequence
tggtaatttagtattgtcttatttc

SEQ ID NO: 220167 - DNA, 25 bp, Artificial sequence
  SiRNA target sequence
ggtaatttagtattgtcttatttct

SEQ ID NO: 220168 - DNA, 25 bp, Artificial sequence
  SiRNA target sequence
gtaatttagtattgtcttatttctt

SEQ ID NO: 220169 - DNA, 25 bp, Artificial sequence
  SiRNA target sequence
taatttagtattgtcttatttcttc

SEQ ID NO: 220170 - DNA, 25 bp, Artificial sequence
  SiRNA target sequence
aatttagtattgtcttatttcttct

SEQ ID NO: 220171 - DNA, 25 bp, Artificial sequence
  SiRNA target sequence
atttagtattgtcttatttcttctt

SEQ ID NO: 220172 - DNA, 25 bp, Artificial sequence
  SiRNA target sequence
tttagtattgtcttatttcttcttg

SEQ ID NO: 220173 - DNA, 25 bp, Artificial sequence
  SiRNA target sequence
ttagtattgtcttatttcttcttga

SEQ ID NO: 220174 - DNA, 25 bp, Artificial sequence
  SiRNA target sequence
tagtattgtcttatttcttcttgac

SEQ ID NO: 220175 - DNA, 25 bp, Artificial sequence
  SiRNA target sequence
agtattgtcttatttcttcttgacg

SEQ ID NO: 220176 - DNA, 25 bp, Artificial sequence
  SiRNA target sequence
gtattgtcttatttcttcttgacgt

SEQ ID NO: 220177 - DNA, 25 bp, Artificial sequence
  SiRNA target sequence
tattgtcttatttcttcttgacgtt

SEQ ID NO: 220178 - DNA, 25 bp, Artificial sequence
  SiRNA target sequence
attgtcttatttcttcttgacgttt

SEQ ID NO: 220179 - DNA, 25 bp, Artificial sequence
  SiRNA target sequence
ttgtcttatttcttcttgacgtttg

SEQ ID NO: 220180 - DNA, 25 bp, Artificial sequence
  SiRNA target sequence
tgtcttatttcttcttgacgtttgc

SEQ ID NO: 220181 - DNA, 25 bp, Artificial sequence
  SiRNA target sequence
gtcttatttcttcttgacgtttgct

SEQ ID NO: 220182 - DNA, 25 bp, Artificial sequence
  SiRNA target sequence
tcttatttcttcttgacgtttgcta

SEQ ID NO: 220183 - DNA, 25 bp, Artificial sequence
  SiRNA target sequence
cttatttcttcttgacgtttgctaa

SEQ ID NO: 220184 - DNA, 25 bp, Artificial sequence
  SiRNA target sequence
ttatttcttcttgacgtttgctaat

SEQ ID NO: 220185 - DNA, 25 bp, Artificial sequence
  SiRNA target sequence
tatttcttcttgacgtttgctaatt

SEQ ID NO: 220186 - DNA, 25 bp, Artificial sequence
  SiRNA target sequence
atttcttcttgacgtttgctaattc

SEQ ID NO: 220187 - DNA, 25 bp, Artificial sequence
  SiRNA target sequence
tttcttcttgacgtttgctaattct

SEQ ID NO: 220188 - DNA, 25 bp, Artificial sequence
  SiRNA target sequence
ttcttcttgacgtttgctaattctt

SEQ ID NO: 220189 - DNA, 25 bp, Artificial sequence
  SiRNA target sequence
tcttcttgacgtttgctaattcttt

SEQ ID NO: 220190 - DNA, 25 bp, Artificial sequence
  SiRNA target sequence
cttcttgacgtttgctaattcttta

SEQ ID NO: 220191 - DNA, 25 bp, Artificial sequence
  SiRNA target sequence
ttcttgacgtttgctaattctttaa

SEQ ID NO: 220192 - DNA, 25 bp, Artificial sequence
  SiRNA target sequence
tcttgacgtttgctaattctttaac

SEQ ID NO: 220193 - DNA, 25 bp, Artificial sequence
  SiRNA target sequence
cttgacgtttgctaattctttaaca

SEQ ID NO: 220194 - DNA, 25 bp, Artificial sequence
  SiRNA target sequence
ttgacgtttgctaattctttaacaa

SEQ ID NO: 220195 - DNA, 25 bp, Artificial sequence
  SiRNA target sequence
tgacgtttgctaattctttaacaac

SEQ ID NO: 220196 - DNA, 25 bp, Artificial sequence
  SiRNA target sequence
gacgtttgctaattctttaacaact

SEQ ID NO: 220197 - DNA, 25 bp, Artificial sequence
  SiRNA target sequence
acgtttgctaattctttaacaactc

SEQ ID NO: 220198 - DNA, 25 bp, Artificial sequence
  SiRNA target sequence
cgtttgctaattctttaacaactcc

SEQ ID NO: 220199 - DNA, 25 bp, Artificial sequence
  SiRNA target sequence
gtttgctaattctttaacaactcca

SEQ ID NO: 220200 - DNA, 25 bp, Artificial sequence
  SiRNA target sequence
tttgctaattctttaacaactccag

SEQ ID NO: 220201 - DNA, 25 bp, Artificial sequence
  SiRNA target sequence
ttgctaattctttaacaactccagg

SEQ ID NO: 220202 - DNA, 25 bp, Artificial sequence
  SiRNA target sequence
tgctaattctttaacaactccagga

SEQ ID NO: 220203 - DNA, 25 bp, Artificial sequence
  SiRNA target sequence
gctaattctttaacaactccaggac

SEQ ID NO: 220204 - DNA, 25 bp, Artificial sequence
  SiRNA target sequence
ctaattctttaacaactccaggaca

SEQ ID NO: 220205 - DNA, 25 bp, Artificial sequence
  SiRNA target sequence
taattctttaacaactccaggacaa

SEQ ID NO: 220206 - DNA, 25 bp, Artificial sequence
  SiRNA target sequence
aattctttaacaactccaggacaaa

SEQ ID NO: 220207 - DNA, 25 bp, Artificial sequence
  SiRNA target sequence
attctttaacaactccaggacaaag

SEQ ID NO: 220208 - DNA, 25 bp, Artificial sequence
  SiRNA target sequence
ttctttaacaactccaggacaaagt

SEQ ID NO: 220209 - DNA, 25 bp, Artificial sequence
  SiRNA target sequence
tctttaacaactccaggacaaagtg

SEQ ID NO: 220210 - DNA, 25 bp, Artificial sequence
  SiRNA target sequence
ctttaacaactccaggacaaagtgc

SEQ ID NO: 220211 - DNA, 25 bp, Artificial sequence
  SiRNA target sequence
tttaacaactccaggacaaagtgca

SEQ ID NO: 220212 - DNA, 25 bp, Artificial sequence
  SiRNA target sequence
ttaacaactccaggacaaagtgcaa

SEQ ID NO: 220213 - DNA, 25 bp, Artificial sequence
  SiRNA target sequence
taacaactccaggacaaagtgcaag

SEQ ID NO: 220214 - DNA, 25 bp, Artificial sequence
  SiRNA target sequence
aacaactccaggacaaagtgcaaga

SEQ ID NO: 220215 - DNA, 25 bp, Artificial sequence
  SiRNA target sequence
acaactccaggacaaagtgcaagat

SEQ ID NO: 220216 - DNA, 25 bp, Artificial sequence
  SiRNA target sequence
caactccaggacaaagtgcaagatt

SEQ ID NO: 220217 - DNA, 25 bp, Artificial sequence
  SiRNA target sequence
aactccaggacaaagtgcaagattc

SEQ ID NO: 220218 - DNA, 25 bp, Artificial sequence
  SiRNA target sequence
actccaggacaaagtgcaagattca

SEQ ID NO: 220219 - DNA, 25 bp, Artificial sequence
  SiRNA target sequence
ctccaggacaaagtgcaagattcat

SEQ ID NO: 220220 - DNA, 25 bp, Artificial sequence
  SiRNA target sequence
tccaggacaaagtgcaagattcata

SEQ ID NO: 220221 - DNA, 25 bp, Artificial sequence
  SiRNA target sequence
ccaggacaaagtgcaagattcatac

SEQ ID NO: 220222 - DNA, 25 bp, Artificial sequence
  SiRNA target sequence
caggacaaagtgcaagattcatacc

SEQ ID NO: 220223 - DNA, 25 bp, Artificial sequence
  SiRNA target sequence
aggacaaagtgcaagattcatacct

SEQ ID NO: 220224 - DNA, 25 bp, Artificial sequence
  SiRNA target sequence
ggacaaagtgcaagattcatacctt

SEQ ID NO: 220225 - DNA, 25 bp, Artificial sequence
  SiRNA target sequence
gacaaagtgcaagattcataccttt

SEQ ID NO: 220226 - DNA, 25 bp, Artificial sequence
  SiRNA target sequence
acaaagtgcaagattcataccttta

SEQ ID NO: 220227 - DNA, 25 bp, Artificial sequence
  SiRNA target sequence
caaagtgcaagattcatacctttat

SEQ ID NO: 220228 - DNA, 25 bp, Artificial sequence
  SiRNA target sequence
aaagtgcaagattcatacctttatt

SEQ ID NO: 220229 - DNA, 25 bp, Artificial sequence
  SiRNA target sequence
aagtgcaagattcatacctttattt

SEQ ID NO: 220230 - DNA, 25 bp, Artificial sequence
  SiRNA target sequence
agtgcaagattcatacctttatttt

SEQ ID NO: 220231 - DNA, 25 bp, Artificial sequence
  SiRNA target sequence
gtgcaagattcatacctttatttta

SEQ ID NO: 220232 - DNA, 25 bp, Artificial sequence
  SiRNA target sequence
tgcaagattcatacctttattttat

SEQ ID NO: 220233 - DNA, 25 bp, Artificial sequence
  SiRNA target sequence
gcaagattcatacctttattttatg

SEQ ID NO: 220234 - DNA, 25 bp, Artificial sequence
  SiRNA target sequence
caagattcatacctttattttatgt

SEQ ID NO: 220235 - DNA, 25 bp, Artificial sequence
  SiRNA target sequence
aagattcatacctttattttatgtt

SEQ ID NO: 220236 - DNA, 25 bp, Artificial sequence
  SiRNA target sequence
agattcatacctttattttatgttt

SEQ ID NO: 220237 - DNA, 25 bp, Artificial sequence
  SiRNA target sequence
gattcatacctttattttatgtttt

SEQ ID NO: 220238 - DNA, 25 bp, Artificial sequence
  SiRNA target sequence
attcatacctttattttatgttttc

SEQ ID NO: 220239 - DNA, 25 bp, Artificial sequence
  SiRNA target sequence
ttcatacctttattttatgttttct

SEQ ID NO: 220240 - DNA, 25 bp, Artificial sequence
  SiRNA target sequence
tcatacctttattttatgttttctc

SEQ ID NO: 220241 - DNA, 25 bp, Artificial sequence
  SiRNA target sequence
catacctttattttatgttttctcg

SEQ ID NO: 220242 - DNA, 25 bp, Artificial sequence
  SiRNA target sequence
atacctttattttatgttttctcga

SEQ ID NO: 220243 - DNA, 25 bp, Artificial sequence
  SiRNA target sequence
tacctttattttatgttttctcgaa

SEQ ID NO: 220244 - DNA, 25 bp, Artificial sequence
  SiRNA target sequence
acctttattttatgttttctcgaat

SEQ ID NO: 220245 - DNA, 25 bp, Artificial sequence
  SiRNA target sequence
cctttattttatgttttctcgaata

SEQ ID NO: 220246 - DNA, 25 bp, Artificial sequence
  SiRNA target sequence
ctttattttatgttttctcgaatat

SEQ ID NO: 220247 - DNA, 25 bp, Artificial sequence
  SiRNA target sequence
tttattttatgttttctcgaatatt

SEQ ID NO: 220248 - DNA, 25 bp, Artificial sequence
  SiRNA target sequence
ttattttatgttttctcgaatattt

SEQ ID NO: 220249 - DNA, 25 bp, Artificial sequence
  SiRNA target sequence
tattttatgttttctcgaatatttc

SEQ ID NO: 220250 - DNA, 25 bp, Artificial sequence
  SiRNA target sequence
attttatgttttctcgaatatttct

SEQ ID NO: 220251 - DNA, 25 bp, Artificial sequence
  SiRNA target sequence
ttttatgttttctcgaatatttctc

SEQ ID NO: 220252 - DNA, 25 bp, Artificial sequence
  SiRNA target sequence
tttatgttttctcgaatatttctct

SEQ ID NO: 220253 - DNA, 25 bp, Artificial sequence
  SiRNA target sequence
ttatgttttctcgaatatttctctt

SEQ ID NO: 220254 - DNA, 25 bp, Artificial sequence
  SiRNA target sequence
tatgttttctcgaatatttctcttt

SEQ ID NO: 220255 - DNA, 25 bp, Artificial sequence
  SiRNA target sequence
atgttttctcgaatatttctctttt

SEQ ID NO: 220256 - DNA, 25 bp, Artificial sequence
  SiRNA target sequence
tgttttctcgaatatttctcttttc

SEQ ID NO: 220257 - DNA, 25 bp, Artificial sequence
  SiRNA target sequence
gttttctcgaatatttctcttttct

SEQ ID NO: 220258 - DNA, 25 bp, Artificial sequence
  SiRNA target sequence
ttttctcgaatatttctcttttctt

SEQ ID NO: 220259 - DNA, 25 bp, Artificial sequence
  SiRNA target sequence
tttctcgaatatttctcttttctta

SEQ ID NO: 220260 - DNA, 25 bp, Artificial sequence
  SiRNA target sequence
ttctcgaatatttctcttttcttat

SEQ ID NO: 220261 - DNA, 25 bp, Artificial sequence
  SiRNA target sequence
tctcgaatatttctcttttcttatc

SEQ ID NO: 220262 - DNA, 25 bp, Artificial sequence
  SiRNA target sequence
ctcgaatatttctcttttcttatct

SEQ ID NO: 220263 - DNA, 25 bp, Artificial sequence
  SiRNA target sequence
tcgaatatttctcttttcttatctt

SEQ ID NO: 220264 - DNA, 25 bp, Artificial sequence
  SiRNA target sequence
cgaatatttctcttttcttatcttc

SEQ ID NO: 220265 - DNA, 25 bp, Artificial sequence
  SiRNA target sequence
gaatatttctcttttcttatcttct

SEQ ID NO: 220266 - DNA, 25 bp, Artificial sequence
  SiRNA target sequence
aatatttctcttttcttatcttctc

SEQ ID NO: 220267 - DNA, 25 bp, Artificial sequence
  SiRNA target sequence
atatttctcttttcttatcttctca

SEQ ID NO: 220268 - DNA, 25 bp, Artificial sequence
  SiRNA target sequence
tatttctcttttcttatcttctcaa

SEQ ID NO: 220269 - DNA, 25 bp, Artificial sequence
  SiRNA target sequence
atttctcttttcttatcttctcaag

SEQ ID NO: 220270 - DNA, 25 bp, Artificial sequence
  SiRNA target sequence
tttctcttttcttatcttctcaagt

SEQ ID NO: 220271 - DNA, 25 bp, Artificial sequence
  SiRNA target sequence
ttctcttttcttatcttctcaagtg

SEQ ID NO: 220272 - DNA, 25 bp, Artificial sequence
  SiRNA target sequence
tctcttttcttatcttctcaagtga

SEQ ID NO: 220273 - DNA, 25 bp, Artificial sequence
  SiRNA target sequence
ctcttttcttatcttctcaagtgac

SEQ ID NO: 220274 - DNA, 25 bp, Artificial sequence
  SiRNA target sequence
tcttttcttatcttctcaagtgaca

SEQ ID NO: 220275 - DNA, 25 bp, Artificial sequence
  SiRNA target sequence
cttttcttatcttctcaagtgacag

SEQ ID NO: 220276 - DNA, 25 bp, Artificial sequence
  SiRNA target sequence
ttttcttatcttctcaagtgacaga

SEQ ID NO: 220277 - DNA, 25 bp, Artificial sequence
  SiRNA target sequence
tttcttatcttctcaagtgacagaa

SEQ ID NO: 220278 - DNA, 25 bp, Artificial sequence
  SiRNA target sequence
ttcttatcttctcaagtgacagaac

SEQ ID NO: 220279 - DNA, 25 bp, Artificial sequence
  SiRNA target sequence
tcttatcttctcaagtgacagaact

SEQ ID NO: 220280 - DNA, 25 bp, Artificial sequence
  SiRNA target sequence
cttatcttctcaagtgacagaactt

SEQ ID NO: 220281 - DNA, 25 bp, Artificial sequence
  SiRNA target sequence
ttatcttctcaagtgacagaacttt

SEQ ID NO: 220282 - DNA, 25 bp, Artificial sequence
  SiRNA target sequence
tatcttctcaagtgacagaactttt

SEQ ID NO: 220283 - DNA, 25 bp, Artificial sequence
  SiRNA target sequence
atcttctcaagtgacagaacttttt

SEQ ID NO: 220284 - DNA, 25 bp, Artificial sequence
  SiRNA target sequence
tcttctcaagtgacagaacttttta

SEQ ID NO: 220285 - DNA, 25 bp, Artificial sequence
  SiRNA target sequence
cttctcaagtgacagaactttttac

SEQ ID NO: 220286 - DNA, 25 bp, Artificial sequence
  SiRNA target sequence
ttctcaagtgacagaactttttaca

SEQ ID NO: 220287 - DNA, 25 bp, Artificial sequence
  SiRNA target sequence
tctcaagtgacagaactttttacaa

SEQ ID NO: 220288 - DNA, 25 bp, Artificial sequence
  SiRNA target sequence
ctcaagtgacagaactttttacaag

SEQ ID NO: 220289 - DNA, 25 bp, Artificial sequence
  SiRNA target sequence
tcaagtgacagaactttttacaaga

SEQ ID NO: 220290 - DNA, 25 bp, Artificial sequence
  SiRNA target sequence
caagtgacagaactttttacaagat

SEQ ID NO: 220291 - DNA, 25 bp, Artificial sequence
  SiRNA target sequence
aagtgacagaactttttacaagata

SEQ ID NO: 220292 - DNA, 25 bp, Artificial sequence
  SiRNA target sequence
agtgacagaactttttacaagatat

SEQ ID NO: 220293 - DNA, 25 bp, Artificial sequence
  SiRNA target sequence
gtgacagaactttttacaagatata

SEQ ID NO: 220294 - DNA, 25 bp, Artificial sequence
  SiRNA target sequence
tgacagaactttttacaagatatag

SEQ ID NO: 220295 - DNA, 25 bp, Artificial sequence
  SiRNA target sequence
gacagaactttttacaagatataga

SEQ ID NO: 220296 - DNA, 25 bp, Artificial sequence
  SiRNA target sequence
acagaactttttacaagatatagat

SEQ ID NO: 220297 - DNA, 25 bp, Artificial sequence
  SiRNA target sequence
cagaactttttacaagatatagatc

SEQ ID NO: 220298 - DNA, 25 bp, Artificial sequence
  SiRNA target sequence
agaactttttacaagatatagatca

SEQ ID NO: 220299 - DNA, 25 bp, Artificial sequence
  SiRNA target sequence
gaactttttacaagatatagatcaa

SEQ ID NO: 220300 - DNA, 25 bp, Artificial sequence
  SiRNA target sequence
aactttttacaagatatagatcaaa

SEQ ID NO: 220301 - DNA, 25 bp, Artificial sequence
  SiRNA target sequence
actttttacaagatatagatcaaag

SEQ ID NO: 220302 - DNA, 25 bp, Artificial sequence
  SiRNA target sequence
ctttttacaagatatagatcaaagc

SEQ ID NO: 220303 - DNA, 25 bp, Artificial sequence
  SiRNA target sequence
tttttacaagatatagatcaaagct

SEQ ID NO: 220304 - DNA, 25 bp, Artificial sequence
  SiRNA target sequence
ttttacaagatatagatcaaagctc

SEQ ID NO: 220305 - DNA, 25 bp, Artificial sequence
  SiRNA target sequence
tttacaagatatagatcaaagctca

SEQ ID NO: 220306 - DNA, 25 bp, Artificial sequence
  SiRNA target sequence
ttacaagatatagatcaaagctcac

SEQ ID NO: 220307 - DNA, 25 bp, Artificial sequence
  SiRNA target sequence
tacaagatatagatcaaagctcact

SEQ ID NO: 220308 - DNA, 25 bp, Artificial sequence
  SiRNA target sequence
acaagatatagatcaaagctcactt

SEQ ID NO: 220309 - DNA, 25 bp, Artificial sequence
  SiRNA target sequence
caagatatagatcaaagctcacttt

SEQ ID NO: 220310 - DNA, 25 bp, Artificial sequence
  SiRNA target sequence
aagatatagatcaaagctcactttc

SEQ ID NO: 220311 - DNA, 25 bp, Artificial sequence
  SiRNA target sequence
agatatagatcaaagctcactttct

SEQ ID NO: 220312 - DNA, 25 bp, Artificial sequence
  SiRNA target sequence
gatatagatcaaagctcactttctc

SEQ ID NO: 220313 - DNA, 25 bp, Artificial sequence
  SiRNA target sequence
atatagatcaaagctcactttctca

SEQ ID NO: 220314 - DNA, 25 bp, Artificial sequence
  SiRNA target sequence
tatagatcaaagctcactttctcag

SEQ ID NO: 220315 - DNA, 25 bp, Artificial sequence
  SiRNA target sequence
atagatcaaagctcactttctcaga

SEQ ID NO: 220316 - DNA, 25 bp, Artificial sequence
  SiRNA target sequence
tagatcaaagctcactttctcagag

SEQ ID NO: 220317 - DNA, 25 bp, Artificial sequence
  SiRNA target sequence
agatcaaagctcactttctcagagg

SEQ ID NO: 220318 - DNA, 25 bp, Artificial sequence
  SiRNA target sequence
gatcaaagctcactttctcagaggc

SEQ ID NO: 220319 - DNA, 25 bp, Artificial sequence
  SiRNA target sequence
atcaaagctcactttctcagaggcg

SEQ ID NO: 220320 - DNA, 25 bp, Artificial sequence
  SiRNA target sequence
tcaaagctcactttctcagaggcgg

SEQ ID NO: 220321 - DNA, 25 bp, Artificial sequence
  SiRNA target sequence
caaagctcactttctcagaggcgga

SEQ ID NO: 220322 - DNA, 25 bp, Artificial sequence
  SiRNA target sequence
aaagctcactttctcagaggcggaa

SEQ ID NO: 220323 - DNA, 25 bp, Artificial sequence
  SiRNA target sequence
aagctcactttctcagaggcggaat

SEQ ID NO: 220324 - DNA, 25 bp, Artificial sequence
  SiRNA target sequence
agctcactttctcagaggcggaatt

SEQ ID NO: 220325 - DNA, 25 bp, Artificial sequence
  SiRNA target sequence
gctcactttctcagaggcggaattt

SEQ ID NO: 220326 - DNA, 25 bp, Artificial sequence
  SiRNA target sequence
ctcactttctcagaggcggaatttt

SEQ ID NO: 220327 - DNA, 25 bp, Artificial sequence
  SiRNA target sequence
tcactttctcagaggcggaattttt

SEQ ID NO: 220328 - DNA, 25 bp, Artificial sequence
  SiRNA target sequence
cactttctcagaggcggaattttta

SEQ ID NO: 220329 - DNA, 25 bp, Artificial sequence
  SiRNA target sequence
actttctcagaggcggaatttttat

SEQ ID NO: 220330 - DNA, 25 bp, Artificial sequence
  SiRNA target sequence
ctttctcagaggcggaatttttata

SEQ ID NO: 220331 - DNA, 25 bp, Artificial sequence
  SiRNA target sequence
tttctcagaggcggaatttttatat

SEQ ID NO: 220332 - DNA, 25 bp, Artificial sequence
  SiRNA target sequence
ttctcagaggcggaatttttatata

SEQ ID NO: 220333 - DNA, 25 bp, Artificial sequence
  SiRNA target sequence
tctcagaggcggaatttttatataa

SEQ ID NO: 220334 - DNA, 25 bp, Artificial sequence
  SiRNA target sequence
ctcagaggcggaatttttatataat

SEQ ID NO: 220335 - DNA, 25 bp, Artificial sequence
  SiRNA target sequence
tcagaggcggaatttttatataatg

SEQ ID NO: 220336 - DNA, 25 bp, Artificial sequence
  SiRNA target sequence
cagaggcggaatttttatataatgg

SEQ ID NO: 220337 - DNA, 25 bp, Artificial sequence
  SiRNA target sequence
agaggcggaatttttatataatggc

SEQ ID NO: 220338 - DNA, 25 bp, Artificial sequence
  SiRNA target sequence
gaggcggaatttttatataatggct

SEQ ID NO: 220339 - DNA, 25 bp, Artificial sequence
  SiRNA target sequence
aggcggaatttttatataatggctt

SEQ ID NO: 220340 - DNA, 25 bp, Artificial sequence
  SiRNA target sequence
ggcggaatttttatataatggcttt

SEQ ID NO: 220341 - DNA, 25 bp, Artificial sequence
  SiRNA target sequence
gcggaatttttatataatggctttt

SEQ ID NO: 220342 - DNA, 25 bp, Artificial sequence
  SiRNA target sequence
cggaatttttatataatggcttttt

SEQ ID NO: 220343 - DNA, 25 bp, Artificial sequence
  SiRNA target sequence
ggaatttttatataatggctttttt

SEQ ID NO: 220344 - DNA, 25 bp, Artificial sequence
  SiRNA target sequence
gaatttttatataatggcttttttg

SEQ ID NO: 220345 - DNA, 25 bp, Artificial sequence
  SiRNA target sequence
aatttttatataatggcttttttgt

SEQ ID NO: 220346 - DNA, 25 bp, Artificial sequence
  SiRNA target sequence
atttttatataatggcttttttgta

SEQ ID NO: 220347 - DNA, 25 bp, Artificial sequence
  SiRNA target sequence
tttttatataatggcttttttgtat

SEQ ID NO: 220348 - DNA, 25 bp, Artificial sequence
  SiRNA target sequence
ttttatataatggcttttttgtatt

SEQ ID NO: 220349 - DNA, 25 bp, Artificial sequence
  SiRNA target sequence
tttatataatggcttttttgtattt

SEQ ID NO: 220350 - DNA, 25 bp, Artificial sequence
  SiRNA target sequence
ttatataatggcttttttgtatttt

SEQ ID NO: 220351 - DNA, 25 bp, Artificial sequence
  SiRNA target sequence
tatataatggcttttttgtattttc

SEQ ID NO: 220352 - DNA, 25 bp, Artificial sequence
  SiRNA target sequence
atataatggcttttttgtattttct

SEQ ID NO: 220353 - DNA, 25 bp, Artificial sequence
  SiRNA target sequence
tataatggcttttttgtattttctg

SEQ ID NO: 220354 - DNA, 25 bp, Artificial sequence
  SiRNA target sequence
ataatggcttttttgtattttctgg

SEQ ID NO: 220355 - DNA, 25 bp, Artificial sequence
  SiRNA target sequence
taatggcttttttgtattttctgga

SEQ ID NO: 220356 - DNA, 25 bp, Artificial sequence
  SiRNA target sequence
aatggcttttttgtattttctggag

SEQ ID NO: 220357 - DNA, 25 bp, Artificial sequence
  SiRNA target sequence
atggcttttttgtattttctggagt

SEQ ID NO: 220358 - DNA, 25 bp, Artificial sequence
  SiRNA target sequence
tggcttttttgtattttctggagtt

SEQ ID NO: 220359 - DNA, 25 bp, Artificial sequence
  SiRNA target sequence
ggcttttttgtattttctggagttc

SEQ ID NO: 220360 - DNA, 25 bp, Artificial sequence
  SiRNA target sequence
gcttttttgtattttctggagttct

SEQ ID NO: 220361 - DNA, 25 bp, Artificial sequence
  SiRNA target sequence
cttttttgtattttctggagttcta

SEQ ID NO: 220362 - DNA, 25 bp, Artificial sequence
  SiRNA target sequence
ttttttgtattttctggagttctag

SEQ ID NO: 220363 - DNA, 25 bp, Artificial sequence
  SiRNA target sequence
tttttgtattttctggagttctagt

SEQ ID NO: 220364 - DNA, 25 bp, Artificial sequence
  SiRNA target sequence
ttttgtattttctggagttctagta

SEQ ID NO: 220365 - DNA, 25 bp, Artificial sequence
  SiRNA target sequence
tttgtattttctggagttctagtaa

SEQ ID NO: 220366 - DNA, 25 bp, Artificial sequence
  SiRNA target sequence
ttgtattttctggagttctagtaat

SEQ ID NO: 220367 - DNA, 25 bp, Artificial sequence
  SiRNA target sequence
tgtattttctggagttctagtaata

SEQ ID NO: 220368 - DNA, 25 bp, Artificial sequence
  SiRNA target sequence
gtattttctggagttctagtaatag

SEQ ID NO: 220369 - DNA, 25 bp, Artificial sequence
  SiRNA target sequence
tattttctggagttctagtaatagt

SEQ ID NO: 220370 - DNA, 25 bp, Artificial sequence
  SiRNA target sequence
attttctggagttctagtaatagtt

SEQ ID NO: 220371 - DNA, 25 bp, Artificial sequence
  SiRNA target sequence
ttttctggagttctagtaatagtta

SEQ ID NO: 220372 - DNA, 25 bp, Artificial sequence
  SiRNA target sequence
tttctggagttctagtaatagttat

SEQ ID NO: 220373 - DNA, 25 bp, Artificial sequence
  SiRNA target sequence
ttctggagttctagtaatagttata

SEQ ID NO: 220374 - DNA, 25 bp, Artificial sequence
  SiRNA target sequence
tctggagttctagtaatagttatat

SEQ ID NO: 220375 - DNA, 25 bp, Artificial sequence
  SiRNA target sequence
ctggagttctagtaatagttatatt

SEQ ID NO: 220376 - DNA, 25 bp, Artificial sequence
  SiRNA target sequence
tggagttctagtaatagttatattt

SEQ ID NO: 220377 - DNA, 25 bp, Artificial sequence
  SiRNA target sequence
ggagttctagtaatagttatatttt

SEQ ID NO: 220378 - DNA, 25 bp, Artificial sequence
  SiRNA target sequence
gagttctagtaatagttatattttt

SEQ ID NO: 220379 - DNA, 25 bp, Artificial sequence
  SiRNA target sequence
agttctagtaatagttatattttta

SEQ ID NO: 220380 - DNA, 25 bp, Artificial sequence
  SiRNA target sequence
gttctagtaatagttatatttttaa

SEQ ID NO: 220381 - DNA, 25 bp, Artificial sequence
  SiRNA target sequence
ttctagtaatagttatatttttaat

SEQ ID NO: 220382 - DNA, 25 bp, Artificial sequence
  SiRNA target sequence
tctagtaatagttatatttttaatt

SEQ ID NO: 220383 - DNA, 25 bp, Artificial sequence
  SiRNA target sequence
ctagtaatagttatatttttaatta

SEQ ID NO: 220384 - DNA, 25 bp, Artificial sequence
  SiRNA target sequence
tagtaatagttatatttttaattaa

SEQ ID NO: 220385 - DNA, 25 bp, Artificial sequence
  SiRNA target sequence
agtaatagttatatttttaattaaa

SEQ ID NO: 220386 - DNA, 25 bp, Artificial sequence
  SiRNA target sequence
gtaatagttatatttttaattaaaa

SEQ ID NO: 220387 - DNA, 25 bp, Artificial sequence
  SiRNA target sequence
taatagttatatttttaattaaaaa

SEQ ID NO: 220388 - DNA, 25 bp, Artificial sequence
  SiRNA target sequence
aatagttatatttttaattaaaaaa

SEQ ID NO: 220389 - DNA, 25 bp, Artificial sequence
  SiRNA target sequence
atagttatatttttaattaaaaaat

SEQ ID NO: 220390 - DNA, 25 bp, Artificial sequence
  SiRNA target sequence
tagttatatttttaattaaaaaata

SEQ ID NO: 220391 - DNA, 25 bp, Artificial sequence
  SiRNA target sequence
agttatatttttaattaaaaaatat

SEQ ID NO: 220392 - DNA, 25 bp, Artificial sequence
  SiRNA target sequence
gttatatttttaattaaaaaatatt

SEQ ID NO: 220393 - DNA, 25 bp, Artificial sequence
  SiRNA target sequence
ttatatttttaattaaaaaatattt

SEQ ID NO: 220394 - DNA, 25 bp, Artificial sequence
  SiRNA target sequence
tatatttttaattaaaaaatatttg

SEQ ID NO: 220395 - DNA, 25 bp, Artificial sequence
  SiRNA target sequence
atatttttaattaaaaaatatttgg

SEQ ID NO: 220396 - DNA, 25 bp, Artificial sequence
  SiRNA target sequence
tatttttaattaaaaaatatttgga

SEQ ID NO: 220397 - DNA, 25 bp, Artificial sequence
  SiRNA target sequence
atttttaattaaaaaatatttggag

SEQ ID NO: 220398 - DNA, 25 bp, Artificial sequence
  SiRNA target sequence
tttttaattaaaaaatatttggaga

SEQ ID NO: 220399 - DNA, 25 bp, Artificial sequence
  SiRNA target sequence
ttttaattaaaaaatatttggagag

SEQ ID NO: 220400 - DNA, 25 bp, Artificial sequence
  SiRNA target sequence
tttaattaaaaaatatttggagagg

SEQ ID NO: 220401 - DNA, 25 bp, Artificial sequence
  SiRNA target sequence
ttaattaaaaaatatttggagagga

SEQ ID NO: 220402 - DNA, 25 bp, Artificial sequence
  SiRNA target sequence
taattaaaaaatatttggagaggaa

SEQ ID NO: 220403 - DNA, 25 bp, Artificial sequence
  SiRNA target sequence
aattaaaaaatatttggagaggaat

SEQ ID NO: 220404 - DNA, 25 bp, Artificial sequence
  SiRNA target sequence
attaaaaaatatttggagaggaatg

SEQ ID NO: 220405 - DNA, 25 bp, Artificial sequence
  SiRNA target sequence
ttaaaaaatatttggagaggaatgt

SEQ ID NO: 220406 - DNA, 25 bp, Artificial sequence
  SiRNA target sequence
taaaaaatatttggagaggaatgtg

SEQ ID NO: 220407 - DNA, 25 bp, Artificial sequence
  SiRNA target sequence
aaaaaatatttggagaggaatgtga

SEQ ID NO: 220408 - DNA, 25 bp, Artificial sequence
  SiRNA target sequence
aaaaatatttggagaggaatgtgac

SEQ ID NO: 220409 - DNA, 25 bp, Artificial sequence
  SiRNA target sequence
aaaatatttggagaggaatgtgact

SEQ ID NO: 220410 - DNA, 25 bp, Artificial sequence
  SiRNA target sequence
aaatatttggagaggaatgtgacta

SEQ ID NO: 220411 - DNA, 25 bp, Artificial sequence
  SiRNA target sequence
aatatttggagaggaatgtgactaa

SEQ ID NO: 220412 - DNA, 25 bp, Artificial sequence
  SiRNA target sequence
atatttggagaggaatgtgactaac

SEQ ID NO: 220413 - DNA, 25 bp, Artificial sequence
  SiRNA target sequence
tatttggagaggaatgtgactaaca

SEQ ID NO: 220414 - DNA, 25 bp, Artificial sequence
  SiRNA target sequence
atttggagaggaatgtgactaacaa

SEQ ID NO: 220415 - DNA, 25 bp, Artificial sequence
  SiRNA target sequence
tttggagaggaatgtgactaacaaa

SEQ ID NO: 220416 - DNA, 25 bp, Artificial sequence
  SiRNA target sequence
ttggagaggaatgtgactaacaaac

SEQ ID NO: 220417 - DNA, 25 bp, Artificial sequence
  SiRNA target sequence
tggagaggaatgtgactaacaaacc

SEQ ID NO: 220418 - DNA, 25 bp, Artificial sequence
  SiRNA target sequence
ggagaggaatgtgactaacaaacct

SEQ ID NO: 220419 - DNA, 25 bp, Artificial sequence
  SiRNA target sequence
gagaggaatgtgactaacaaacctt

SEQ ID NO: 220420 - DNA, 25 bp, Artificial sequence
  SiRNA target sequence
agaggaatgtgactaacaaaccttt

SEQ ID NO: 220421 - DNA, 25 bp, Artificial sequence
  SiRNA target sequence
gaggaatgtgactaacaaacctttg

SEQ ID NO: 220422 - DNA, 25 bp, Artificial sequence
  SiRNA target sequence
aggaatgtgactaacaaacctttgt

SEQ ID NO: 220423 - DNA, 25 bp, Artificial sequence
  SiRNA target sequence
ggaatgtgactaacaaacctttgtt

SEQ ID NO: 220424 - DNA, 25 bp, Artificial sequence
  SiRNA target sequence
gaatgtgactaacaaacctttgttt

SEQ ID NO: 220425 - DNA, 25 bp, Artificial sequence
  SiRNA target sequence
aatgtgactaacaaacctttgtttg

SEQ ID NO: 220426 - DNA, 25 bp, Artificial sequence
  SiRNA target sequence
atgtgactaacaaacctttgtttgt

SEQ ID NO: 220427 - DNA, 25 bp, Artificial sequence
  SiRNA target sequence
tgtgactaacaaacctttgtttgtt

SEQ ID NO: 220428 - DNA, 25 bp, Artificial sequence
  SiRNA target sequence
gtgactaacaaacctttgtttgttg

SEQ ID NO: 220429 - DNA, 25 bp, Artificial sequence
  SiRNA target sequence
tgactaacaaacctttgtttgttgt

SEQ ID NO: 220430 - DNA, 25 bp, Artificial sequence
  SiRNA target sequence
gactaacaaacctttgtttgttgta

SEQ ID NO: 220431 - DNA, 25 bp, Artificial sequence
  SiRNA target sequence
actaacaaacctttgtttgttgtaa

SEQ ID NO: 220432 - DNA, 25 bp, Artificial sequence
  SiRNA target sequence
ctaacaaacctttgtttgttgtaaa

SEQ ID NO: 220433 - DNA, 25 bp, Artificial sequence
  SiRNA target sequence
taacaaacctttgtttgttgtaaaa

SEQ ID NO: 220434 - DNA, 25 bp, Artificial sequence
  SiRNA target sequence
aacaaacctttgtttgttgtaaaat

SEQ ID NO: 220435 - DNA, 25 bp, Artificial sequence
  SiRNA target sequence
acaaacctttgtttgttgtaaaatc

SEQ ID NO: 220436 - DNA, 25 bp, Artificial sequence
  SiRNA target sequence
caaacctttgtttgttgtaaaatct

SEQ ID NO: 220437 - DNA, 25 bp, Artificial sequence
  SiRNA target sequence
aaacctttgtttgttgtaaaatctg

SEQ ID NO: 220438 - DNA, 25 bp, Artificial sequence
  SiRNA target sequence
aacctttgtttgttgtaaaatctgt

SEQ ID NO: 220439 - DNA, 25 bp, Artificial sequence
  SiRNA target sequence
acctttgtttgttgtaaaatctgtt

SEQ ID NO: 220440 - DNA, 25 bp, Artificial sequence
  SiRNA target sequence
cctttgtttgttgtaaaatctgtta

SEQ ID NO: 220441 - DNA, 25 bp, Artificial sequence
  SiRNA target sequence
ctttgtttgttgtaaaatctgttaa

SEQ ID NO: 220442 - DNA, 25 bp, Artificial sequence
  SiRNA target sequence
tttgtttgttgtaaaatctgttaaa

SEQ ID NO: 220443 - DNA, 25 bp, Artificial sequence
  SiRNA target sequence
ttgtttgttgtaaaatctgttaaaa

SEQ ID NO: 220444 - DNA, 25 bp, Artificial sequence
  SiRNA target sequence
tgtttgttgtaaaatctgttaaaaa

SEQ ID NO: 220445 - DNA, 25 bp, Artificial sequence
  SiRNA target sequence
gtttgttgtaaaatctgttaaaaag

SEQ ID NO: 220446 - DNA, 25 bp, Artificial sequence
  SiRNA target sequence
tttgttgtaaaatctgttaaaaaga

SEQ ID NO: 220447 - DNA, 25 bp, Artificial sequence
  SiRNA target sequence
ttgttgtaaaatctgttaaaaagaa

SEQ ID NO: 220448 - DNA, 25 bp, Artificial sequence
  SiRNA target sequence
tgttgtaaaatctgttaaaaagaag

SEQ ID NO: 220449 - DNA, 25 bp, Artificial sequence
  SiRNA target sequence
gttgtaaaatctgttaaaaagaagg

SEQ ID NO: 220450 - DNA, 25 bp, Artificial sequence
  SiRNA target sequence
ttgtaaaatctgttaaaaagaaggg

SEQ ID NO: 220451 - DNA, 25 bp, Artificial sequence
  SiRNA target sequence
tgtaaaatctgttaaaaagaaggga

SEQ ID NO: 220452 - DNA, 25 bp, Artificial sequence
  SiRNA target sequence
gtaaaatctgttaaaaagaagggac

SEQ ID NO: 220453 - DNA, 25 bp, Artificial sequence
  SiRNA target sequence
taaaatctgttaaaaagaagggacc

SEQ ID NO: 220454 - DNA, 25 bp, Artificial sequence
  SiRNA target sequence
aaaatctgttaaaaagaagggacca

SEQ ID NO: 220455 - DNA, 25 bp, Artificial sequence
  SiRNA target sequence
aaatctgttaaaaagaagggaccaa

SEQ ID NO: 220456 - DNA, 25 bp, Artificial sequence
  SiRNA target sequence
aatctgttaaaaagaagggaccaaa

SEQ ID NO: 220457 - DNA, 25 bp, Artificial sequence
  SiRNA target sequence
atctgttaaaaagaagggaccaaaa

SEQ ID NO: 220458 - DNA, 25 bp, Artificial sequence
  SiRNA target sequence
tctgttaaaaagaagggaccaaaag

SEQ ID NO: 220459 - DNA, 25 bp, Artificial sequence
  SiRNA target sequence
ctgttaaaaagaagggaccaaaagt

SEQ ID NO: 220460 - DNA, 25 bp, Artificial sequence
  SiRNA target sequence
tgttaaaaagaagggaccaaaagtt

SEQ ID NO: 220461 - DNA, 25 bp, Artificial sequence
  SiRNA target sequence
gttaaaaagaagggaccaaaagtta

SEQ ID NO: 220462 - DNA, 25 bp, Artificial sequence
  SiRNA target sequence
ttaaaaagaagggaccaaaagttaa

SEQ ID NO: 220463 - DNA, 25 bp, Artificial sequence
  SiRNA target sequence
taaaaagaagggaccaaaagttaaa

SEQ ID NO: 220464 - DNA, 25 bp, Artificial sequence
  SiRNA target sequence
aaaaagaagggaccaaaagttaaag

SEQ ID NO: 220465 - DNA, 25 bp, Artificial sequence
  SiRNA target sequence
aaaagaagggaccaaaagttaaagt

SEQ ID NO: 220466 - DNA, 25 bp, Artificial sequence
  SiRNA target sequence
aaagaagggaccaaaagttaaagta

SEQ ID NO: 220467 - DNA, 25 bp, Artificial sequence
  SiRNA target sequence
aagaagggaccaaaagttaaagtag

SEQ ID NO: 220468 - DNA, 25 bp, Artificial sequence
  SiRNA target sequence
agaagggaccaaaagttaaagtagg

SEQ ID NO: 220469 - DNA, 25 bp, Artificial sequence
  SiRNA target sequence
gaagggaccaaaagttaaagtagga

SEQ ID NO: 220470 - DNA, 25 bp, Artificial sequence
  SiRNA target sequence
aagggaccaaaagttaaagtaggat

SEQ ID NO: 220471 - DNA, 25 bp, Artificial sequence
  SiRNA target sequence
agggaccaaaagttaaagtaggatt

SEQ ID NO: 220472 - DNA, 25 bp, Artificial sequence
  SiRNA target sequence
gggaccaaaagttaaagtaggattt

SEQ ID NO: 220473 - DNA, 25 bp, Artificial sequence
  SiRNA target sequence
ggaccaaaagttaaagtaggatttg

SEQ ID NO: 220474 - DNA, 25 bp, Artificial sequence
  SiRNA target sequence
gaccaaaagttaaagtaggatttgc

SEQ ID NO: 220475 - DNA, 25 bp, Artificial sequence
  SiRNA target sequence
accaaaagttaaagtaggatttgcg

SEQ ID NO: 220476 - DNA, 25 bp, Artificial sequence
  SiRNA target sequence
ccaaaagttaaagtaggatttgcgg

SEQ ID NO: 220477 - DNA, 25 bp, Artificial sequence
  SiRNA target sequence
caaaagttaaagtaggatttgcgga

SEQ ID NO: 220478 - DNA, 25 bp, Artificial sequence
  SiRNA target sequence
aaaagttaaagtaggatttgcggag

SEQ ID NO: 220479 - DNA, 25 bp, Artificial sequence
  SiRNA target sequence
aaagttaaagtaggatttgcggagg

SEQ ID NO: 220480 - DNA, 25 bp, Artificial sequence
  SiRNA target sequence
aagttaaagtaggatttgcggaggg

SEQ ID NO: 220481 - DNA, 25 bp, Artificial sequence
  SiRNA target sequence
agttaaagtaggatttgcggagggc

SEQ ID NO: 220482 - DNA, 25 bp, Artificial sequence
  SiRNA target sequence
gttaaagtaggatttgcggagggcc

SEQ ID NO: 220483 - DNA, 25 bp, Artificial sequence
  SiRNA target sequence
ttaaagtaggatttgcggagggcct

SEQ ID NO: 220484 - DNA, 25 bp, Artificial sequence
  SiRNA target sequence
taaagtaggatttgcggagggcctt

SEQ ID NO: 220485 - DNA, 25 bp, Artificial sequence
  SiRNA target sequence
aaagtaggatttgcggagggcctta

SEQ ID NO: 220486 - DNA, 25 bp, Artificial sequence
  SiRNA target sequence
aagtaggatttgcggagggccttaa

SEQ ID NO: 220487 - DNA, 25 bp, Artificial sequence
  SiRNA target sequence
agtaggatttgcggagggccttaaa

SEQ ID NO: 220488 - DNA, 25 bp, Artificial sequence
  SiRNA target sequence
gtaggatttgcggagggccttaaag

SEQ ID NO: 220489 - DNA, 25 bp, Artificial sequence
  SiRNA target sequence
taggatttgcggagggccttaaaga

SEQ ID NO: 220490 - DNA, 25 bp, Artificial sequence
  SiRNA target sequence
aggatttgcggagggccttaaagaa

SEQ ID NO: 220491 - DNA, 25 bp, Artificial sequence
  SiRNA target sequence
ggatttgcggagggccttaaagaaa

SEQ ID NO: 220492 - DNA, 25 bp, Artificial sequence
  SiRNA target sequence
gatttgcggagggccttaaagaaat

SEQ ID NO: 220493 - DNA, 25 bp, Artificial sequence
  SiRNA target sequence
atttgcggagggccttaaagaaatg

SEQ ID NO: 220494 - DNA, 25 bp, Artificial sequence
  SiRNA target sequence
tttgcggagggccttaaagaaatga

SEQ ID NO: 220495 - DNA, 25 bp, Artificial sequence
  SiRNA target sequence
ttgcggagggccttaaagaaatgat

SEQ ID NO: 220496 - DNA, 25 bp, Artificial sequence
  SiRNA target sequence
tgcggagggccttaaagaaatgatg

SEQ ID NO: 220497 - DNA, 25 bp, Artificial sequence
  SiRNA target sequence
gcggagggccttaaagaaatgatgg

SEQ ID NO: 220498 - DNA, 25 bp, Artificial sequence
  SiRNA target sequence
cggagggccttaaagaaatgatggc

SEQ ID NO: 220499 - DNA, 25 bp, Artificial sequence
  SiRNA target sequence
ggagggccttaaagaaatgatggca

SEQ ID NO: 220500 - DNA, 25 bp, Artificial sequence
  SiRNA target sequence
gagggccttaaagaaatgatggcat

SEQ ID NO: 220501 - DNA, 25 bp, Artificial sequence
  SiRNA target sequence
agggccttaaagaaatgatggcatc

SEQ ID NO: 220502 - DNA, 25 bp, Artificial sequence
  SiRNA target sequence
gggccttaaagaaatgatggcatca

SEQ ID NO: 220503 - DNA, 25 bp, Artificial sequence
  SiRNA target sequence
ggccttaaagaaatgatggcatcaa

SEQ ID NO: 220504 - DNA, 25 bp, Artificial sequence
  SiRNA target sequence
gccttaaagaaatgatggcatcaaa

SEQ ID NO: 220505 - DNA, 25 bp, Artificial sequence
  SiRNA target sequence
ccttaaagaaatgatggcatcaaag

SEQ ID NO: 220506 - DNA, 25 bp, Artificial sequence
  SiRNA target sequence
cttaaagaaatgatggcatcaaagt

SEQ ID NO: 220507 - DNA, 25 bp, Artificial sequence
  SiRNA target sequence
ttaaagaaatgatggcatcaaagtt

SEQ ID NO: 220508 - DNA, 25 bp, Artificial sequence
  SiRNA target sequence
taaagaaatgatggcatcaaagtta

SEQ ID NO: 220509 - DNA, 25 bp, Artificial sequence
  SiRNA target sequence
aaagaaatgatggcatcaaagttat

SEQ ID NO: 220510 - DNA, 25 bp, Artificial sequence
  SiRNA target sequence
aagaaatgatggcatcaaagttatt

SEQ ID NO: 220511 - DNA, 25 bp, Artificial sequence
  SiRNA target sequence
agaaatgatggcatcaaagttatta

SEQ ID NO: 220512 - DNA, 25 bp, Artificial sequence
  SiRNA target sequence
gaaatgatggcatcaaagttattac

SEQ ID NO: 220513 - DNA, 25 bp, Artificial sequence
  SiRNA target sequence
aaatgatggcatcaaagttattact

SEQ ID NO: 220514 - DNA, 25 bp, Artificial sequence
  SiRNA target sequence
aatgatggcatcaaagttattactt

SEQ ID NO: 220515 - DNA, 25 bp, Artificial sequence
  SiRNA target sequence
atgatggcatcaaagttattactta

SEQ ID NO: 220516 - DNA, 25 bp, Artificial sequence
  SiRNA target sequence
tgatggcatcaaagttattacttaa

SEQ ID NO: 220517 - DNA, 25 bp, Artificial sequence
  SiRNA target sequence
gatggcatcaaagttattacttaac

SEQ ID NO: 220518 - DNA, 25 bp, Artificial sequence
  SiRNA target sequence
atggcatcaaagttattacttaaca

SEQ ID NO: 220519 - DNA, 25 bp, Artificial sequence
  SiRNA target sequence
tggcatcaaagttattacttaacat

SEQ ID NO: 220520 - DNA, 25 bp, Artificial sequence
  SiRNA target sequence
ggcatcaaagttattacttaacatt

SEQ ID NO: 220521 - DNA, 25 bp, Artificial sequence
  SiRNA target sequence
gcatcaaagttattacttaacattt

SEQ ID NO: 220522 - DNA, 25 bp, Artificial sequence
  SiRNA target sequence
catcaaagttattacttaacatttc

SEQ ID NO: 220523 - DNA, 25 bp, Artificial sequence
  SiRNA target sequence
atcaaagttattacttaacatttca

SEQ ID NO: 220524 - DNA, 25 bp, Artificial sequence
  SiRNA target sequence
tcaaagttattacttaacatttcat

SEQ ID NO: 220525 - DNA, 25 bp, Artificial sequence
  SiRNA target sequence
caaagttattacttaacatttcatt

SEQ ID NO: 220526 - DNA, 25 bp, Artificial sequence
  SiRNA target sequence
aaagttattacttaacatttcatta

SEQ ID NO: 220527 - DNA, 25 bp, Artificial sequence
  SiRNA target sequence
aagttattacttaacatttcattaa

SEQ ID NO: 220528 - DNA, 25 bp, Artificial sequence
  SiRNA target sequence
agttattacttaacatttcattaac

SEQ ID NO: 220529 - DNA, 25 bp, Artificial sequence
  SiRNA target sequence
gttattacttaacatttcattaact

SEQ ID NO: 220530 - DNA, 25 bp, Artificial sequence
  SiRNA target sequence
ttattacttaacatttcattaactg

SEQ ID NO: 220531 - DNA, 25 bp, Artificial sequence
  SiRNA target sequence
tattacttaacatttcattaactgt

SEQ ID NO: 220532 - DNA, 25 bp, Artificial sequence
  SiRNA target sequence
attacttaacatttcattaactgtt

SEQ ID NO: 220533 - DNA, 25 bp, Artificial sequence
  SiRNA target sequence
ttacttaacatttcattaactgtta

SEQ ID NO: 220534 - DNA, 25 bp, Artificial sequence
  SiRNA target sequence
tacttaacatttcattaactgttat

SEQ ID NO: 220535 - DNA, 25 bp, Artificial sequence
  SiRNA target sequence
acttaacatttcattaactgttatg

SEQ ID NO: 220536 - DNA, 25 bp, Artificial sequence
  SiRNA target sequence
cttaacatttcattaactgttatgt

SEQ ID NO: 220537 - DNA, 25 bp, Artificial sequence
  SiRNA target sequence
ttaacatttcattaactgttatgtt

SEQ ID NO: 220538 - DNA, 25 bp, Artificial sequence
  SiRNA target sequence
taacatttcattaactgttatgttc

SEQ ID NO: 220539 - DNA, 25 bp, Artificial sequence
  SiRNA target sequence
aacatttcattaactgttatgttct

SEQ ID NO: 220540 - DNA, 25 bp, Artificial sequence
  SiRNA target sequence
acatttcattaactgttatgttcta

SEQ ID NO: 220541 - DNA, 25 bp, Artificial sequence
  SiRNA target sequence
catttcattaactgttatgttctat

SEQ ID NO: 220542 - DNA, 25 bp, Artificial sequence
  SiRNA target sequence
atttcattaactgttatgttctatg

SEQ ID NO: 220543 - DNA, 25 bp, Artificial sequence
  SiRNA target sequence
tttcattaactgttatgttctatgg

SEQ ID NO: 220544 - DNA, 25 bp, Artificial sequence
  SiRNA target sequence
ttcattaactgttatgttctatggt

SEQ ID NO: 220545 - DNA, 25 bp, Artificial sequence
  SiRNA target sequence
tcattaactgttatgttctatggta

SEQ ID NO: 220546 - DNA, 25 bp, Artificial sequence
  SiRNA target sequence
cattaactgttatgttctatggtat

SEQ ID NO: 220547 - DNA, 25 bp, Artificial sequence
  SiRNA target sequence
attaactgttatgttctatggtata

SEQ ID NO: 220548 - DNA, 25 bp, Artificial sequence
  SiRNA target sequence
ttaactgttatgttctatggtatat

SEQ ID NO: 220549 - DNA, 25 bp, Artificial sequence
  SiRNA target sequence
taactgttatgttctatggtatatc

SEQ ID NO: 220550 - DNA, 25 bp, Artificial sequence
  SiRNA target sequence
aactgttatgttctatggtatatca

SEQ ID NO: 220551 - DNA, 25 bp, Artificial sequence
  SiRNA target sequence
actgttatgttctatggtatatcaa

SEQ ID NO: 220552 - DNA, 25 bp, Artificial sequence
  SiRNA target sequence
ctgttatgttctatggtatatcaac

SEQ ID NO: 220553 - DNA, 25 bp, Artificial sequence
  SiRNA target sequence
tgttatgttctatggtatatcaact

SEQ ID NO: 220554 - DNA, 25 bp, Artificial sequence
  SiRNA target sequence
gttatgttctatggtatatcaacta

SEQ ID NO: 220555 - DNA, 25 bp, Artificial sequence
  SiRNA target sequence
ttatgttctatggtatatcaactaa

SEQ ID NO: 220556 - DNA, 25 bp, Artificial sequence
  SiRNA target sequence
tatgttctatggtatatcaactaat

SEQ ID NO: 220557 - DNA, 25 bp, Artificial sequence
  SiRNA target sequence
atgttctatggtatatcaactaatt

SEQ ID NO: 220558 - DNA, 25 bp, Artificial sequence
  SiRNA target sequence
tgttctatggtatatcaactaattt

SEQ ID NO: 220559 - DNA, 25 bp, Artificial sequence
  SiRNA target sequence
gttctatggtatatcaactaattta

SEQ ID NO: 220560 - DNA, 25 bp, Artificial sequence
  SiRNA target sequence
ttctatggtatatcaactaatttaa

SEQ ID NO: 220561 - DNA, 25 bp, Artificial sequence
  SiRNA target sequence
tctatggtatatcaactaatttaat

SEQ ID NO: 220562 - DNA, 25 bp, Artificial sequence
  SiRNA target sequence
ctatggtatatcaactaatttaata

SEQ ID NO: 220563 - DNA, 25 bp, Artificial sequence
  SiRNA target sequence
tatggtatatcaactaatttaatag

SEQ ID NO: 220564 - DNA, 25 bp, Artificial sequence
  SiRNA target sequence
atggtatatcaactaatttaataga

SEQ ID NO: 220565 - DNA, 25 bp, Artificial sequence
  SiRNA target sequence
tggtatatcaactaatttaatagaa

SEQ ID NO: 220566 - DNA, 25 bp, Artificial sequence
  SiRNA target sequence
ggtatatcaactaatttaatagaat

SEQ ID NO: 220567 - DNA, 25 bp, Artificial sequence
  SiRNA target sequence
gtatatcaactaatttaatagaatc

SEQ ID NO: 220568 - DNA, 25 bp, Artificial sequence
  SiRNA target sequence
tatatcaactaatttaatagaatca

SEQ ID NO: 220569 - DNA, 25 bp, Artificial sequence
  SiRNA target sequence
atatcaactaatttaatagaatcaa

SEQ ID NO: 220570 - DNA, 25 bp, Artificial sequence
  SiRNA target sequence
tatcaactaatttaatagaatcaac

SEQ ID NO: 220571 - DNA, 25 bp, Artificial sequence
  SiRNA target sequence
atcaactaatttaatagaatcaaca

SEQ ID NO: 220572 - DNA, 25 bp, Artificial sequence
  SiRNA target sequence
tcaactaatttaatagaatcaacat

SEQ ID NO: 220573 - DNA, 25 bp, Artificial sequence
  SiRNA target sequence
caactaatttaatagaatcaacatt

SEQ ID NO: 220574 - DNA, 25 bp, Artificial sequence
  SiRNA target sequence
aactaatttaatagaatcaacattt

SEQ ID NO: 220575 - DNA, 25 bp, Artificial sequence
  SiRNA target sequence
actaatttaatagaatcaacattta

SEQ ID NO: 220576 - DNA, 25 bp, Artificial sequence
  SiRNA target sequence
ctaatttaatagaatcaacatttaa

SEQ ID NO: 220577 - DNA, 25 bp, Artificial sequence
  SiRNA target sequence
taatttaatagaatcaacatttaaa

SEQ ID NO: 220578 - DNA, 25 bp, Artificial sequence
  SiRNA target sequence
aatttaatagaatcaacatttaaaa

SEQ ID NO: 220579 - DNA, 25 bp, Artificial sequence
  SiRNA target sequence
atttaatagaatcaacatttaaaag

SEQ ID NO: 220580 - DNA, 25 bp, Artificial sequence
  SiRNA target sequence
tttaatagaatcaacatttaaaagt

SEQ ID NO: 220581 - DNA, 25 bp, Artificial sequence
  SiRNA target sequence
ttaatagaatcaacatttaaaagtg

SEQ ID NO: 220582 - DNA, 25 bp, Artificial sequence
  SiRNA target sequence
taatagaatcaacatttaaaagtgg

SEQ ID NO: 220583 - DNA, 25 bp, Artificial sequence
  SiRNA target sequence
aatagaatcaacatttaaaagtgga

SEQ ID NO: 220584 - DNA, 25 bp, Artificial sequence
  SiRNA target sequence
atagaatcaacatttaaaagtggac

SEQ ID NO: 220585 - DNA, 25 bp, Artificial sequence
  SiRNA target sequence
tagaatcaacatttaaaagtggact

SEQ ID NO: 220586 - DNA, 25 bp, Artificial sequence
  SiRNA target sequence
agaatcaacatttaaaagtggactt

SEQ ID NO: 220587 - DNA, 25 bp, Artificial sequence
  SiRNA target sequence
gaatcaacatttaaaagtggacttg

SEQ ID NO: 220588 - DNA, 25 bp, Artificial sequence
  SiRNA target sequence
aatcaacatttaaaagtggacttgt

SEQ ID NO: 220589 - DNA, 25 bp, Artificial sequence
  SiRNA target sequence
atcaacatttaaaagtggacttgtg

SEQ ID NO: 220590 - DNA, 25 bp, Artificial sequence
  SiRNA target sequence
tcaacatttaaaagtggacttgtga

SEQ ID NO: 220591 - DNA, 25 bp, Artificial sequence
  SiRNA target sequence
caacatttaaaagtggacttgtgaa

SEQ ID NO: 220592 - DNA, 25 bp, Artificial sequence
  SiRNA target sequence
aacatttaaaagtggacttgtgaaa

SEQ ID NO: 220593 - DNA, 25 bp, Artificial sequence
  SiRNA target sequence
acatttaaaagtggacttgtgaaag

SEQ ID NO: 220594 - DNA, 25 bp, Artificial sequence
  SiRNA target sequence
catttaaaagtggacttgtgaaagg

SEQ ID NO: 220595 - DNA, 25 bp, Artificial sequence
  SiRNA target sequence
atttaaaagtggacttgtgaaaggt

SEQ ID NO: 220596 - DNA, 25 bp, Artificial sequence
  SiRNA target sequence
tttaaaagtggacttgtgaaaggtg

SEQ ID NO: 220597 - DNA, 25 bp, Artificial sequence
  SiRNA target sequence
ttaaaagtggacttgtgaaaggtgc

SEQ ID NO: 220598 - DNA, 25 bp, Artificial sequence
  SiRNA target sequence
taaaagtggacttgtgaaaggtgca

SEQ ID NO: 220599 - DNA, 25 bp, Artificial sequence
  SiRNA target sequence
aaaagtggacttgtgaaaggtgcag

SEQ ID NO: 220600 - DNA, 25 bp, Artificial sequence
  SiRNA target sequence
aaagtggacttgtgaaaggtgcaga

SEQ ID NO: 220601 - DNA, 25 bp, Artificial sequence
  SiRNA target sequence
aagtggacttgtgaaaggtgcagaa

SEQ ID NO: 220602 - DNA, 25 bp, Artificial sequence
  SiRNA target sequence
agtggacttgtgaaaggtgcagaag

SEQ ID NO: 220603 - DNA, 25 bp, Artificial sequence
  SiRNA target sequence
gtggacttgtgaaaggtgcagaaga

SEQ ID NO: 220604 - DNA, 25 bp, Artificial sequence
  SiRNA target sequence
tggacttgtgaaaggtgcagaagaa

SEQ ID NO: 220605 - DNA, 25 bp, Artificial sequence
  SiRNA target sequence
ggacttgtgaaaggtgcagaagaat

SEQ ID NO: 220606 - DNA, 25 bp, Artificial sequence
  SiRNA target sequence
gacttgtgaaaggtgcagaagaatt

SEQ ID NO: 220607 - DNA, 25 bp, Artificial sequence
  SiRNA target sequence
acttgtgaaaggtgcagaagaatta

SEQ ID NO: 220608 - DNA, 25 bp, Artificial sequence
  SiRNA target sequence
cttgtgaaaggtgcagaagaattaa

SEQ ID NO: 220609 - DNA, 25 bp, Artificial sequence
  SiRNA target sequence
ttgtgaaaggtgcagaagaattaaa

SEQ ID NO: 220610 - DNA, 25 bp, Artificial sequence
  SiRNA target sequence
tgtgaaaggtgcagaagaattaaac

SEQ ID NO: 220611 - DNA, 25 bp, Artificial sequence
  SiRNA target sequence
gtgaaaggtgcagaagaattaaacg

SEQ ID NO: 220612 - DNA, 25 bp, Artificial sequence
  SiRNA target sequence
tgaaaggtgcagaagaattaaacga

SEQ ID NO: 220613 - DNA, 25 bp, Artificial sequence
  SiRNA target sequence
gaaaggtgcagaagaattaaacgag

SEQ ID NO: 220614 - DNA, 25 bp, Artificial sequence
  SiRNA target sequence
aaaggtgcagaagaattaaacgaga

SEQ ID NO: 220615 - DNA, 25 bp, Artificial sequence
  SiRNA target sequence
aaggtgcagaagaattaaacgagaa

SEQ ID NO: 220616 - DNA, 25 bp, Artificial sequence
  SiRNA target sequence
aggtgcagaagaattaaacgagaat

SEQ ID NO: 220617 - DNA, 25 bp, Artificial sequence
  SiRNA target sequence
ggtgcagaagaattaaacgagaata

SEQ ID NO: 220618 - DNA, 25 bp, Artificial sequence
  SiRNA target sequence
gtgcagaagaattaaacgagaatac

SEQ ID NO: 220619 - DNA, 25 bp, Artificial sequence
  SiRNA target sequence
tgcagaagaattaaacgagaatact

SEQ ID NO: 220620 - DNA, 25 bp, Artificial sequence
  SiRNA target sequence
gcagaagaattaaacgagaatacta

SEQ ID NO: 220621 - DNA, 25 bp, Artificial sequence
  SiRNA target sequence
cagaagaattaaacgagaatactaa

SEQ ID NO: 220622 - DNA, 25 bp, Artificial sequence
  SiRNA target sequence
agaagaattaaacgagaatactaaa

SEQ ID NO: 220623 - DNA, 25 bp, Artificial sequence
  SiRNA target sequence
gaagaattaaacgagaatactaaaa

SEQ ID NO: 220624 - DNA, 25 bp, Artificial sequence
  SiRNA target sequence
aagaattaaacgagaatactaaaag

SEQ ID NO: 220625 - DNA, 25 bp, Artificial sequence
  SiRNA target sequence
agaattaaacgagaatactaaaagt

SEQ ID NO: 220626 - DNA, 25 bp, Artificial sequence
  SiRNA target sequence
gaattaaacgagaatactaaaagtt

SEQ ID NO: 220627 - DNA, 25 bp, Artificial sequence
  SiRNA target sequence
aattaaacgagaatactaaaagtta

SEQ ID NO: 220628 - DNA, 25 bp, Artificial sequence
  SiRNA target sequence
attaaacgagaatactaaaagttat

SEQ ID NO: 220629 - DNA, 25 bp, Artificial sequence
  SiRNA target sequence
ttaaacgagaatactaaaagttatt

SEQ ID NO: 220630 - DNA, 25 bp, Artificial sequence
  SiRNA target sequence
taaacgagaatactaaaagttattc

SEQ ID NO: 220631 - DNA, 25 bp, Artificial sequence
  SiRNA target sequence
aaacgagaatactaaaagttattct

SEQ ID NO: 220632 - DNA, 25 bp, Artificial sequence
  SiRNA target sequence
aacgagaatactaaaagttattcta

SEQ ID NO: 220633 - DNA, 25 bp, Artificial sequence
  SiRNA target sequence
acgagaatactaaaagttattctat

SEQ ID NO: 220634 - DNA, 25 bp, Artificial sequence
  SiRNA target sequence
cgagaatactaaaagttattctatg

SEQ ID NO: 220635 - DNA, 25 bp, Artificial sequence
  SiRNA target sequence
gagaatactaaaagttattctatgg

SEQ ID NO: 220636 - DNA, 25 bp, Artificial sequence
  SiRNA target sequence
agaatactaaaagttattctatggg

SEQ ID NO: 220637 - DNA, 25 bp, Artificial sequence
  SiRNA target sequence
gaatactaaaagttattctatggga

SEQ ID NO: 220638 - DNA, 25 bp, Artificial sequence
  SiRNA target sequence
aatactaaaagttattctatgggat

SEQ ID NO: 220639 - DNA, 25 bp, Artificial sequence
  SiRNA target sequence
atactaaaagttattctatgggata

SEQ ID NO: 220640 - DNA, 25 bp, Artificial sequence
  SiRNA target sequence
tactaaaagttattctatgggatat

SEQ ID NO: 220641 - DNA, 25 bp, Artificial sequence
  SiRNA target sequence
actaaaagttattctatgggatata

SEQ ID NO: 220642 - DNA, 25 bp, Artificial sequence
  SiRNA target sequence
ctaaaagttattctatgggatataa

SEQ ID NO: 220643 - DNA, 25 bp, Artificial sequence
  SiRNA target sequence
taaaagttattctatgggatataat

SEQ ID NO: 220644 - DNA, 25 bp, Artificial sequence
  SiRNA target sequence
aaaagttattctatgggatataatt

SEQ ID NO: 220645 - DNA, 25 bp, Artificial sequence
  SiRNA target sequence
aaagttattctatgggatataattc

SEQ ID NO: 220646 - DNA, 25 bp, Artificial sequence
  SiRNA target sequence
aagttattctatgggatataattca

SEQ ID NO: 220647 - DNA, 25 bp, Artificial sequence
  SiRNA target sequence
agttattctatgggatataattcat

SEQ ID NO: 220648 - DNA, 25 bp, Artificial sequence
  SiRNA target sequence
gttattctatgggatataattcatt

SEQ ID NO: 220649 - DNA, 25 bp, Artificial sequence
  SiRNA target sequence
ttattctatgggatataattcattt

SEQ ID NO: 220650 - DNA, 25 bp, Artificial sequence
  SiRNA target sequence
tattctatgggatataattcatttg

SEQ ID NO: 220651 - DNA, 25 bp, Artificial sequence
  SiRNA target sequence
attctatgggatataattcatttga

SEQ ID NO: 220652 - DNA, 25 bp, Artificial sequence
  SiRNA target sequence
ttctatgggatataattcatttgaa

SEQ ID NO: 220653 - DNA, 25 bp, Artificial sequence
  SiRNA target sequence
tctatgggatataattcatttgaac

SEQ ID NO: 220654 - DNA, 25 bp, Artificial sequence
  SiRNA target sequence
ctatgggatataattcatttgaaca

SEQ ID NO: 220655 - DNA, 25 bp, Artificial sequence
  SiRNA target sequence
tatgggatataattcatttgaacaa

SEQ ID NO: 220656 - DNA, 25 bp, Artificial sequence
  SiRNA target sequence
atgggatataattcatttgaacaaa

SEQ ID NO: 220657 - DNA, 25 bp, Artificial sequence
  SiRNA target sequence
tgggatataattcatttgaacaaaa

SEQ ID NO: 220658 - DNA, 25 bp, Artificial sequence
  SiRNA target sequence
gggatataattcatttgaacaaaag

SEQ ID NO: 220659 - DNA, 25 bp, Artificial sequence
  SiRNA target sequence
ggatataattcatttgaacaaaaga

SEQ ID NO: 220660 - DNA, 25 bp, Artificial sequence
  SiRNA target sequence
gatataattcatttgaacaaaagat

SEQ ID NO: 220661 - DNA, 25 bp, Artificial sequence
  SiRNA target sequence
atataattcatttgaacaaaagata

SEQ ID NO: 220662 - DNA, 25 bp, Artificial sequence
  SiRNA target sequence
tataattcatttgaacaaaagatag

SEQ ID NO: 220663 - DNA, 25 bp, Artificial sequence
  SiRNA target sequence
ataattcatttgaacaaaagatagc

SEQ ID NO: 220664 - DNA, 25 bp, Artificial sequence
  SiRNA target sequence
taattcatttgaacaaaagatagca

SEQ ID NO: 220665 - DNA, 25 bp, Artificial sequence
  SiRNA target sequence
aattcatttgaacaaaagatagcat

SEQ ID NO: 220666 - DNA, 25 bp, Artificial sequence
  SiRNA target sequence
attcatttgaacaaaagatagcatc

SEQ ID NO: 220667 - DNA, 25 bp, Artificial sequence
  SiRNA target sequence
ttcatttgaacaaaagatagcatca

SEQ ID NO: 220668 - DNA, 25 bp, Artificial sequence
  SiRNA target sequence
tcatttgaacaaaagatagcatcaa

SEQ ID NO: 220669 - DNA, 25 bp, Artificial sequence
  SiRNA target sequence
catttgaacaaaagatagcatcaat

SEQ ID NO: 220670 - DNA, 25 bp, Artificial sequence
  SiRNA target sequence
atttgaacaaaagatagcatcaata

SEQ ID NO: 220671 - DNA, 25 bp, Artificial sequence
  SiRNA target sequence
tttgaacaaaagatagcatcaataa

SEQ ID NO: 220672 - DNA, 25 bp, Artificial sequence
  SiRNA target sequence
ttgaacaaaagatagcatcaataac

SEQ ID NO: 220673 - DNA, 25 bp, Artificial sequence
  SiRNA target sequence
tgaacaaaagatagcatcaataact

SEQ ID NO: 220674 - DNA, 25 bp, Artificial sequence
  SiRNA target sequence
gaacaaaagatagcatcaataactg

SEQ ID NO: 220675 - DNA, 25 bp, Artificial sequence
  SiRNA target sequence
aacaaaagatagcatcaataactgt

SEQ ID NO: 220676 - DNA, 25 bp, Artificial sequence
  SiRNA target sequence
acaaaagatagcatcaataactgtt

SEQ ID NO: 220677 - DNA, 25 bp, Artificial sequence
  SiRNA target sequence
caaaagatagcatcaataactgtta

SEQ ID NO: 220678 - DNA, 25 bp, Artificial sequence
  SiRNA target sequence
aaaagatagcatcaataactgttat

SEQ ID NO: 220679 - DNA, 25 bp, Artificial sequence
  SiRNA target sequence
aaagatagcatcaataactgttatt

SEQ ID NO: 220680 - DNA, 25 bp, Artificial sequence
  SiRNA target sequence
aagatagcatcaataactgttatta

SEQ ID NO: 220681 - DNA, 25 bp, Artificial sequence
  SiRNA target sequence
agatagcatcaataactgttattat

SEQ ID NO: 220682 - DNA, 25 bp, Artificial sequence
  SiRNA target sequence
gatagcatcaataactgttattatc

SEQ ID NO: 220683 - DNA, 25 bp, Artificial sequence
  SiRNA target sequence
atagcatcaataactgttattatcc

SEQ ID NO: 220684 - DNA, 25 bp, Artificial sequence
  SiRNA target sequence
tagcatcaataactgttattatcct

SEQ ID NO: 220685 - DNA, 25 bp, Artificial sequence
  SiRNA target sequence
agcatcaataactgttattatcctg

SEQ ID NO: 220686 - DNA, 25 bp, Artificial sequence
  SiRNA target sequence
gcatcaataactgttattatcctgc

SEQ ID NO: 220687 - DNA, 25 bp, Artificial sequence
  SiRNA target sequence
catcaataactgttattatcctgct

SEQ ID NO: 220688 - DNA, 25 bp, Artificial sequence
  SiRNA target sequence
atcaataactgttattatcctgctt

SEQ ID NO: 220689 - DNA, 25 bp, Artificial sequence
  SiRNA target sequence
tcaataactgttattatcctgcttt

SEQ ID NO: 220690 - DNA, 25 bp, Artificial sequence
  SiRNA target sequence
caataactgttattatcctgctttt

SEQ ID NO: 220691 - DNA, 25 bp, Artificial sequence
  SiRNA target sequence
aataactgttattatcctgctttta

SEQ ID NO: 220692 - DNA, 25 bp, Artificial sequence
  SiRNA target sequence
ataactgttattatcctgcttttat

SEQ ID NO: 220693 - DNA, 25 bp, Artificial sequence
  SiRNA target sequence
taactgttattatcctgcttttatc

SEQ ID NO: 220694 - DNA, 25 bp, Artificial sequence
  SiRNA target sequence
aactgttattatcctgcttttatca

SEQ ID NO: 220695 - DNA, 25 bp, Artificial sequence
  SiRNA target sequence
actgttattatcctgcttttatcac

SEQ ID NO: 220696 - DNA, 25 bp, Artificial sequence
  SiRNA target sequence
ctgttattatcctgcttttatcacc

SEQ ID NO: 220697 - DNA, 25 bp, Artificial sequence
  SiRNA target sequence
tgttattatcctgcttttatcacca

SEQ ID NO: 220698 - DNA, 25 bp, Artificial sequence
  SiRNA target sequence
gttattatcctgcttttatcaccat

SEQ ID NO: 220699 - DNA, 25 bp, Artificial sequence
  SiRNA target sequence
ttattatcctgcttttatcaccatt

SEQ ID NO: 220700 - DNA, 25 bp, Artificial sequence
  SiRNA target sequence
tattatcctgcttttatcaccattt

SEQ ID NO: 220701 - DNA, 25 bp, Artificial sequence
  SiRNA target sequence
attatcctgcttttatcaccatttc

SEQ ID NO: 220702 - DNA, 25 bp, Artificial sequence
  SiRNA target sequence
ttatcctgcttttatcaccatttcc

SEQ ID NO: 220703 - DNA, 25 bp, Artificial sequence
  SiRNA target sequence
tatcctgcttttatcaccatttcca

SEQ ID NO: 220704 - DNA, 25 bp, Artificial sequence
  SiRNA target sequence
atcctgcttttatcaccatttccaa

SEQ ID NO: 220705 - DNA, 25 bp, Artificial sequence
  SiRNA target sequence
tcctgcttttatcaccatttccaaa

SEQ ID NO: 220706 - DNA, 25 bp, Artificial sequence
  SiRNA target sequence
cctgcttttatcaccatttccaaaa

SEQ ID NO: 220707 - DNA, 25 bp, Artificial sequence
  SiRNA target sequence
ctgcttttatcaccatttccaaaat

SEQ ID NO: 220708 - DNA, 25 bp, Artificial sequence
  SiRNA target sequence
tgcttttatcaccatttccaaaatt

SEQ ID NO: 220709 - DNA, 25 bp, Artificial sequence
  SiRNA target sequence
gcttttatcaccatttccaaaatta

SEQ ID NO: 220710 - DNA, 25 bp, Artificial sequence
  SiRNA target sequence
cttttatcaccatttccaaaattaa

SEQ ID NO: 220711 - DNA, 25 bp, Artificial sequence
  SiRNA target sequence
ttttatcaccatttccaaaattaat

SEQ ID NO: 220712 - DNA, 25 bp, Artificial sequence
  SiRNA target sequence
tttatcaccatttccaaaattaata

SEQ ID NO: 220713 - DNA, 25 bp, Artificial sequence
  SiRNA target sequence
ttatcaccatttccaaaattaatac

SEQ ID NO: 220714 - DNA, 25 bp, Artificial sequence
  SiRNA target sequence
tatcaccatttccaaaattaataca

SEQ ID NO: 220715 - DNA, 25 bp, Artificial sequence
  SiRNA target sequence
atcaccatttccaaaattaatacaa

SEQ ID NO: 220716 - DNA, 25 bp, Artificial sequence
  SiRNA target sequence
tcaccatttccaaaattaatacaaa

SEQ ID NO: 220717 - DNA, 25 bp, Artificial sequence
  SiRNA target sequence
caccatttccaaaattaatacaaac

SEQ ID NO: 220718 - DNA, 25 bp, Artificial sequence
  SiRNA target sequence
accatttccaaaattaatacaaacc

SEQ ID NO: 220719 - DNA, 25 bp, Artificial sequence
  SiRNA target sequence
ccatttccaaaattaatacaaacca

SEQ ID NO: 220720 - DNA, 25 bp, Artificial sequence
  SiRNA target sequence
catttccaaaattaatacaaaccaa

SEQ ID NO: 220721 - DNA, 25 bp, Artificial sequence
  SiRNA target sequence
atttccaaaattaatacaaaccaaa

SEQ ID NO: 220722 - DNA, 25 bp, Artificial sequence
  SiRNA target sequence
tttccaaaattaatacaaaccaaag

SEQ ID NO: 220723 - DNA, 25 bp, Artificial sequence
  SiRNA target sequence
ttccaaaattaatacaaaccaaagg

SEQ ID NO: 220724 - DNA, 25 bp, Artificial sequence
  SiRNA target sequence
tccaaaattaatacaaaccaaagga

SEQ ID NO: 220725 - DNA, 25 bp, Artificial sequence
  SiRNA target sequence
ccaaaattaatacaaaccaaaggat

SEQ ID NO: 220726 - DNA, 25 bp, Artificial sequence
  SiRNA target sequence
caaaattaatacaaaccaaaggatg

SEQ ID NO: 220727 - DNA, 25 bp, Artificial sequence
  SiRNA target sequence
aaaattaatacaaaccaaaggatgg

SEQ ID NO: 220728 - DNA, 25 bp, Artificial sequence
  SiRNA target sequence
aaattaatacaaaccaaaggatgga

SEQ ID NO: 220729 - DNA, 25 bp, Artificial sequence
  SiRNA target sequence
aattaatacaaaccaaaggatggat

SEQ ID NO: 220730 - DNA, 25 bp, Artificial sequence
  SiRNA target sequence
attaatacaaaccaaaggatggata

SEQ ID NO: 220731 - DNA, 25 bp, Artificial sequence
  SiRNA target sequence
ttaatacaaaccaaaggatggatat

SEQ ID NO: 220732 - DNA, 25 bp, Artificial sequence
  SiRNA target sequence
taatacaaaccaaaggatggatatt

SEQ ID NO: 220733 - DNA, 25 bp, Artificial sequence
  SiRNA target sequence
aatacaaaccaaaggatggatattt

SEQ ID NO: 220734 - DNA, 25 bp, Artificial sequence
  SiRNA target sequence
atacaaaccaaaggatggatatttg

SEQ ID NO: 220735 - DNA, 25 bp, Artificial sequence
  SiRNA target sequence
tacaaaccaaaggatggatatttgt

SEQ ID NO: 220736 - DNA, 25 bp, Artificial sequence
  SiRNA target sequence
acaaaccaaaggatggatatttgtt

SEQ ID NO: 220737 - DNA, 25 bp, Artificial sequence
  SiRNA target sequence
caaaccaaaggatggatatttgttg

SEQ ID NO: 220738 - DNA, 25 bp, Artificial sequence
  SiRNA target sequence
aaaccaaaggatggatatttgttgc

SEQ ID NO: 220739 - DNA, 25 bp, Artificial sequence
  SiRNA target sequence
aaccaaaggatggatatttgttgcc

SEQ ID NO: 220740 - DNA, 25 bp, Artificial sequence
  SiRNA target sequence
accaaaggatggatatttgttgcca

SEQ ID NO: 220741 - DNA, 25 bp, Artificial sequence
  SiRNA target sequence
ccaaaggatggatatttgttgccat

SEQ ID NO: 220742 - DNA, 25 bp, Artificial sequence
  SiRNA target sequence
caaaggatggatatttgttgccata

SEQ ID NO: 220743 - DNA, 25 bp, Artificial sequence
  SiRNA target sequence
aaaggatggatatttgttgccatag

SEQ ID NO: 220744 - DNA, 25 bp, Artificial sequence
  SiRNA target sequence
aaggatggatatttgttgccatagc

SEQ ID NO: 220745 - DNA, 25 bp, Artificial sequence
  SiRNA target sequence
aggatggatatttgttgccatagcg

SEQ ID NO: 220746 - DNA, 25 bp, Artificial sequence
  SiRNA target sequence
ggatggatatttgttgccatagcgt

SEQ ID NO: 220747 - DNA, 25 bp, Artificial sequence
  SiRNA target sequence
gatggatatttgttgccatagcgtg

SEQ ID NO: 220748 - DNA, 25 bp, Artificial sequence
  SiRNA target sequence
atggatatttgttgccatagcgtgc

SEQ ID NO: 220749 - DNA, 25 bp, Artificial sequence
  SiRNA target sequence
tggatatttgttgccatagcgtgcc

SEQ ID NO: 220750 - DNA, 25 bp, Artificial sequence
  SiRNA target sequence
ggatatttgttgccatagcgtgccc

SEQ ID NO: 220751 - DNA, 25 bp, Artificial sequence
  SiRNA target sequence
gatatttgttgccatagcgtgccca

SEQ ID NO: 220752 - DNA, 25 bp, Artificial sequence
  SiRNA target sequence
atatttgttgccatagcgtgcccac

SEQ ID NO: 220753 - DNA, 25 bp, Artificial sequence
  SiRNA target sequence
tatttgttgccatagcgtgcccact

SEQ ID NO: 220754 - DNA, 25 bp, Artificial sequence
  SiRNA target sequence
atttgttgccatagcgtgcccactt

SEQ ID NO: 220755 - DNA, 25 bp, Artificial sequence
  SiRNA target sequence
tttgttgccatagcgtgcccactta

SEQ ID NO: 220756 - DNA, 25 bp, Artificial sequence
  SiRNA target sequence
ttgttgccatagcgtgcccacttat

SEQ ID NO: 220757 - DNA, 25 bp, Artificial sequence
  SiRNA target sequence
tgttgccatagcgtgcccacttatt

SEQ ID NO: 220758 - DNA, 25 bp, Artificial sequence
  SiRNA target sequence
gttgccatagcgtgcccacttatta

SEQ ID NO: 220759 - DNA, 25 bp, Artificial sequence
  SiRNA target sequence
ttgccatagcgtgcccacttattac

SEQ ID NO: 220760 - DNA, 25 bp, Artificial sequence
  SiRNA target sequence
tgccatagcgtgcccacttattacc

SEQ ID NO: 220761 - DNA, 25 bp, Artificial sequence
  SiRNA target sequence
gccatagcgtgcccacttattaccc

SEQ ID NO: 220762 - DNA, 25 bp, Artificial sequence
  SiRNA target sequence
ccatagcgtgcccacttattaccct

SEQ ID NO: 220763 - DNA, 25 bp, Artificial sequence
  SiRNA target sequence
catagcgtgcccacttattaccctt

SEQ ID NO: 220764 - DNA, 25 bp, Artificial sequence
  SiRNA target sequence
atagcgtgcccacttattacccttt

SEQ ID NO: 220765 - DNA, 25 bp, Artificial sequence
  SiRNA target sequence
tagcgtgcccacttattaccctttt

SEQ ID NO: 220766 - DNA, 25 bp, Artificial sequence
  SiRNA target sequence
agcgtgcccacttattacccttttt

SEQ ID NO: 220767 - DNA, 25 bp, Artificial sequence
  SiRNA target sequence
gcgtgcccacttattaccctttttg

SEQ ID NO: 220768 - DNA, 25 bp, Artificial sequence
  SiRNA target sequence
cgtgcccacttattaccctttttgc

SEQ ID NO: 220769 - DNA, 25 bp, Artificial sequence
  SiRNA target sequence
gtgcccacttattaccctttttgct

SEQ ID NO: 220770 - DNA, 25 bp, Artificial sequence
  SiRNA target sequence
tgcccacttattaccctttttgctg

SEQ ID NO: 220771 - DNA, 25 bp, Artificial sequence
  SiRNA target sequence
gcccacttattaccctttttgctgt

SEQ ID NO: 220772 - DNA, 25 bp, Artificial sequence
  SiRNA target sequence
cccacttattaccctttttgctgta

SEQ ID NO: 220773 - DNA, 25 bp, Artificial sequence
  SiRNA target sequence
ccacttattaccctttttgctgtag

SEQ ID NO: 220774 - DNA, 25 bp, Artificial sequence
  SiRNA target sequence
cacttattaccctttttgctgtagt

SEQ ID NO: 220775 - DNA, 25 bp, Artificial sequence
  SiRNA target sequence
acttattaccctttttgctgtagtt

SEQ ID NO: 220776 - DNA, 25 bp, Artificial sequence
  SiRNA target sequence
cttattaccctttttgctgtagttt

SEQ ID NO: 220777 - DNA, 25 bp, Artificial sequence
  SiRNA target sequence
ttattaccctttttgctgtagtttc

SEQ ID NO: 220778 - DNA, 25 bp, Artificial sequence
  SiRNA target sequence
tattaccctttttgctgtagtttct

SEQ ID NO: 220779 - DNA, 25 bp, Artificial sequence
  SiRNA target sequence
attaccctttttgctgtagtttctg

SEQ ID NO: 220780 - DNA, 25 bp, Artificial sequence
  SiRNA target sequence
ttaccctttttgctgtagtttctgt

SEQ ID NO: 220781 - DNA, 25 bp, Artificial sequence
  SiRNA target sequence
taccctttttgctgtagtttctgtg

SEQ ID NO: 220782 - DNA, 25 bp, Artificial sequence
  SiRNA target sequence
accctttttgctgtagtttctgtgt

SEQ ID NO: 220783 - DNA, 25 bp, Artificial sequence
  SiRNA target sequence
ccctttttgctgtagtttctgtgtg

SEQ ID NO: 220784 - DNA, 25 bp, Artificial sequence
  SiRNA target sequence
cctttttgctgtagtttctgtgtgt

SEQ ID NO: 220785 - DNA, 25 bp, Artificial sequence
  SiRNA target sequence
ctttttgctgtagtttctgtgtgtg

SEQ ID NO: 220786 - DNA, 25 bp, Artificial sequence
  SiRNA target sequence
tttttgctgtagtttctgtgtgtgg

SEQ ID NO: 220787 - DNA, 25 bp, Artificial sequence
  SiRNA target sequence
ttttgctgtagtttctgtgtgtggt

SEQ ID NO: 220788 - DNA, 25 bp, Artificial sequence
  SiRNA target sequence
tttgctgtagtttctgtgtgtggtc

SEQ ID NO: 220789 - DNA, 25 bp, Artificial sequence
  SiRNA target sequence
ttgctgtagtttctgtgtgtggtct

SEQ ID NO: 220790 - DNA, 25 bp, Artificial sequence
  SiRNA target sequence
tgctgtagtttctgtgtgtggtctt

SEQ ID NO: 220791 - DNA, 25 bp, Artificial sequence
  SiRNA target sequence
gctgtagtttctgtgtgtggtcttg

SEQ ID NO: 220792 - DNA, 25 bp, Artificial sequence
  SiRNA target sequence
ctgtagtttctgtgtgtggtcttgc

SEQ ID NO: 220793 - DNA, 25 bp, Artificial sequence
  SiRNA target sequence
tgtagtttctgtgtgtggtcttgct

SEQ ID NO: 220794 - DNA, 25 bp, Artificial sequence
  SiRNA target sequence
gtagtttctgtgtgtggtcttgctt

SEQ ID NO: 220795 - DNA, 25 bp, Artificial sequence
  SiRNA target sequence
tagtttctgtgtgtggtcttgcttt

SEQ ID NO: 220796 - DNA, 25 bp, Artificial sequence
  SiRNA target sequence
agtttctgtgtgtggtcttgctttt

SEQ ID NO: 220797 - DNA, 25 bp, Artificial sequence
  SiRNA target sequence
gtttctgtgtgtggtcttgcttttt

SEQ ID NO: 220798 - DNA, 25 bp, Artificial sequence
  SiRNA target sequence
tttctgtgtgtggtcttgcttttta

SEQ ID NO: 220799 - DNA, 25 bp, Artificial sequence
  SiRNA target sequence
ttctgtgtgtggtcttgctttttac

SEQ ID NO: 220800 - DNA, 25 bp, Artificial sequence
  SiRNA target sequence
tctgtgtgtggtcttgctttttaca

SEQ ID NO: 220801 - DNA, 25 bp, Artificial sequence
  SiRNA target sequence
ctgtgtgtggtcttgctttttacaa

SEQ ID NO: 220802 - DNA, 25 bp, Artificial sequence
  SiRNA target sequence
tgtgtgtggtcttgctttttacaat

SEQ ID NO: 220803 - DNA, 25 bp, Artificial sequence
  SiRNA target sequence
gtgtgtggtcttgctttttacaatt

SEQ ID NO: 220804 - DNA, 25 bp, Artificial sequence
  SiRNA target sequence
tgtgtggtcttgctttttacaatta

SEQ ID NO: 220805 - DNA, 25 bp, Artificial sequence
  SiRNA target sequence
gtgtggtcttgctttttacaattat

SEQ ID NO: 220806 - DNA, 25 bp, Artificial sequence
  SiRNA target sequence
tgtggtcttgctttttacaattatc

SEQ ID NO: 220807 - DNA, 25 bp, Artificial sequence
  SiRNA target sequence
gtggtcttgctttttacaattatcc

SEQ ID NO: 220808 - DNA, 25 bp, Artificial sequence
  SiRNA target sequence
tggtcttgctttttacaattatccg

SEQ ID NO: 220809 - DNA, 25 bp, Artificial sequence
  SiRNA target sequence
ggtcttgctttttacaattatccgg

SEQ ID NO: 220810 - DNA, 25 bp, Artificial sequence
  SiRNA target sequence
gtcttgctttttacaattatccggc

SEQ ID NO: 220811 - DNA, 25 bp, Artificial sequence
  SiRNA target sequence
tcttgctttttacaattatccggca

SEQ ID NO: 220812 - DNA, 25 bp, Artificial sequence
  SiRNA target sequence
cttgctttttacaattatccggcaa

SEQ ID NO: 220813 - DNA, 25 bp, Artificial sequence
  SiRNA target sequence
ttgctttttacaattatccggcaac

SEQ ID NO: 220814 - DNA, 25 bp, Artificial sequence
  SiRNA target sequence
tgctttttacaattatccggcaaca

SEQ ID NO: 220815 - DNA, 25 bp, Artificial sequence
  SiRNA target sequence
gctttttacaattatccggcaacaa

SEQ ID NO: 220816 - DNA, 25 bp, Artificial sequence
  SiRNA target sequence
ctttttacaattatccggcaacaaa

SEQ ID NO: 220817 - DNA, 25 bp, Artificial sequence
  SiRNA target sequence
tttttacaattatccggcaacaaat

SEQ ID NO: 220818 - DNA, 25 bp, Artificial sequence
  SiRNA target sequence
ttttacaattatccggcaacaaata

SEQ ID NO: 220819 - DNA, 25 bp, Artificial sequence
  SiRNA target sequence
tttacaattatccggcaacaaataa

SEQ ID NO: 220820 - DNA, 25 bp, Artificial sequence
  SiRNA target sequence
ttacaattatccggcaacaaataat

SEQ ID NO: 220821 - DNA, 25 bp, Artificial sequence
  SiRNA target sequence
tacaattatccggcaacaaataatg

SEQ ID NO: 220822 - DNA, 25 bp, Artificial sequence
  SiRNA target sequence
acaattatccggcaacaaataatga

SEQ ID NO: 220823 - DNA, 25 bp, Artificial sequence
  SiRNA target sequence
caattatccggcaacaaataatgac

SEQ ID NO: 220824 - DNA, 25 bp, Artificial sequence
  SiRNA target sequence
aattatccggcaacaaataatgaca

SEQ ID NO: 220825 - DNA, 25 bp, Artificial sequence
  SiRNA target sequence
attatccggcaacaaataatgacac

SEQ ID NO: 220826 - DNA, 25 bp, Artificial sequence
  SiRNA target sequence
ttatccggcaacaaataatgacaca

SEQ ID NO: 220827 - DNA, 25 bp, Artificial sequence
  SiRNA target sequence
tatccggcaacaaataatgacacaa

SEQ ID NO: 220828 - DNA, 25 bp, Artificial sequence
  SiRNA target sequence
atccggcaacaaataatgacacaaa

SEQ ID NO: 220829 - DNA, 25 bp, Artificial sequence
  SiRNA target sequence
tccggcaacaaataatgacacaaat

SEQ ID NO: 220830 - DNA, 25 bp, Artificial sequence
  SiRNA target sequence
ccggcaacaaataatgacacaaatt

SEQ ID NO: 220831 - DNA, 25 bp, Artificial sequence
  SiRNA target sequence
cggcaacaaataatgacacaaattt

SEQ ID NO: 220832 - DNA, 25 bp, Artificial sequence
  SiRNA target sequence
ggcaacaaataatgacacaaatttt

SEQ ID NO: 220833 - DNA, 25 bp, Artificial sequence
  SiRNA target sequence
gcaacaaataatgacacaaattttt

SEQ ID NO: 220834 - DNA, 25 bp, Artificial sequence
  SiRNA target sequence
caacaaataatgacacaaatttttt

SEQ ID NO: 220835 - DNA, 25 bp, Artificial sequence
  SiRNA target sequence
aacaaataatgacacaaattttttt

SEQ ID NO: 220836 - DNA, 25 bp, Artificial sequence
  SiRNA target sequence
acaaataatgacacaaatttttttc

SEQ ID NO: 220837 - DNA, 25 bp, Artificial sequence
  SiRNA target sequence
caaataatgacacaaatttttttct

SEQ ID NO: 220838 - DNA, 25 bp, Artificial sequence
  SiRNA target sequence
aaataatgacacaaatttttttcta

SEQ ID NO: 220839 - DNA, 25 bp, Artificial sequence
  SiRNA target sequence
aataatgacacaaatttttttctaa

SEQ ID NO: 220840 - DNA, 25 bp, Artificial sequence
  SiRNA target sequence
ataatgacacaaatttttttctaaa

SEQ ID NO: 220841 - DNA, 25 bp, Artificial sequence
  SiRNA target sequence
taatgacacaaatttttttctaaat

SEQ ID NO: 220842 - DNA, 25 bp, Artificial sequence
  SiRNA target sequence
aatgacacaaatttttttctaaatt

SEQ ID NO: 220843 - DNA, 25 bp, Artificial sequence
  SiRNA target sequence
atgacacaaatttttttctaaattc

SEQ ID NO: 220844 - DNA, 25 bp, Artificial sequence
  SiRNA target sequence
tgacacaaatttttttctaaattca

SEQ ID NO: 220845 - DNA, 25 bp, Artificial sequence
  SiRNA target sequence
gacacaaatttttttctaaattcat

SEQ ID NO: 220846 - DNA, 25 bp, Artificial sequence
  SiRNA target sequence
acacaaatttttttctaaattcatt

SEQ ID NO: 220847 - DNA, 25 bp, Artificial sequence
  SiRNA target sequence
cacaaatttttttctaaattcatta

SEQ ID NO: 220848 - DNA, 25 bp, Artificial sequence
  SiRNA target sequence
acaaatttttttctaaattcattat

SEQ ID NO: 220849 - DNA, 25 bp, Artificial sequence
  SiRNA target sequence
caaatttttttctaaattcattatg

SEQ ID NO: 220850 - DNA, 25 bp, Artificial sequence
  SiRNA target sequence
aaatttttttctaaattcattatgt

SEQ ID NO: 220851 - DNA, 25 bp, Artificial sequence
  SiRNA target sequence
aatttttttctaaattcattatgtg

SEQ ID NO: 220852 - DNA, 25 bp, Artificial sequence
  SiRNA target sequence
atttttttctaaattcattatgtgc

SEQ ID NO: 220853 - DNA, 25 bp, Artificial sequence
  SiRNA target sequence
tttttttctaaattcattatgtgct

SEQ ID NO: 220854 - DNA, 25 bp, Artificial sequence
  SiRNA target sequence
ttttttctaaattcattatgtgcta

SEQ ID NO: 220855 - DNA, 25 bp, Artificial sequence
  SiRNA target sequence
tttttctaaattcattatgtgctac

SEQ ID NO: 220856 - DNA, 25 bp, Artificial sequence
  SiRNA target sequence
ttttctaaattcattatgtgctacg

SEQ ID NO: 220857 - DNA, 25 bp, Artificial sequence
  SiRNA target sequence
tttctaaattcattatgtgctacgc

SEQ ID NO: 220858 - DNA, 25 bp, Artificial sequence
  SiRNA target sequence
ttctaaattcattatgtgctacgcc

SEQ ID NO: 220859 - DNA, 25 bp, Artificial sequence
  SiRNA target sequence
tctaaattcattatgtgctacgccc

SEQ ID NO: 220860 - DNA, 25 bp, Artificial sequence
  SiRNA target sequence
ctaaattcattatgtgctacgcccg

SEQ ID NO: 220861 - DNA, 25 bp, Artificial sequence
  SiRNA target sequence
taaattcattatgtgctacgcccgg

SEQ ID NO: 220862 - DNA, 25 bp, Artificial sequence
  SiRNA target sequence
aaattcattatgtgctacgcccggt

SEQ ID NO: 220863 - DNA, 25 bp, Artificial sequence
  SiRNA target sequence
aattcattatgtgctacgcccggta

SEQ ID NO: 220864 - DNA, 25 bp, Artificial sequence
  SiRNA target sequence
attcattatgtgctacgcccggtaa

SEQ ID NO: 220865 - DNA, 25 bp, Artificial sequence
  SiRNA target sequence
ttcattatgtgctacgcccggtaaa

SEQ ID NO: 220866 - DNA, 25 bp, Artificial sequence
  SiRNA target sequence
tcattatgtgctacgcccggtaaat

SEQ ID NO: 220867 - DNA, 25 bp, Artificial sequence
  SiRNA target sequence
cattatgtgctacgcccggtaaatc

SEQ ID NO: 220868 - DNA, 25 bp, Artificial sequence
  SiRNA target sequence
attatgtgctacgcccggtaaatcg

SEQ ID NO: 220869 - DNA, 25 bp, Artificial sequence
  SiRNA target sequence
ttatgtgctacgcccggtaaatcgt

SEQ ID NO: 220870 - DNA, 25 bp, Artificial sequence
  SiRNA target sequence
tatgtgctacgcccggtaaatcgtt

SEQ ID NO: 220871 - DNA, 25 bp, Artificial sequence
  SiRNA target sequence
atgtgctacgcccggtaaatcgttt

SEQ ID NO: 220872 - DNA, 25 bp, Artificial sequence
  SiRNA target sequence
tgtgctacgcccggtaaatcgttta

SEQ ID NO: 220873 - DNA, 25 bp, Artificial sequence
  SiRNA target sequence
gtgctacgcccggtaaatcgtttat

SEQ ID NO: 220874 - DNA, 25 bp, Artificial sequence
  SiRNA target sequence
tgctacgcccggtaaatcgtttata

SEQ ID NO: 220875 - DNA, 25 bp, Artificial sequence
  SiRNA target sequence
gctacgcccggtaaatcgtttataa

SEQ ID NO: 220876 - DNA, 25 bp, Artificial sequence
  SiRNA target sequence
ctacgcccggtaaatcgtttataaa

SEQ ID NO: 220877 - DNA, 25 bp, Artificial sequence
  SiRNA target sequence
tacgcccggtaaatcgtttataaaa

SEQ ID NO: 220878 - DNA, 25 bp, Artificial sequence
  SiRNA target sequence
acgcccggtaaatcgtttataaaat

SEQ ID NO: 220879 - DNA, 25 bp, Artificial sequence
  SiRNA target sequence
cgcccggtaaatcgtttataaaatt

SEQ ID NO: 220880 - DNA, 25 bp, Artificial sequence
  SiRNA target sequence
gcccggtaaatcgtttataaaatta

SEQ ID NO: 220881 - DNA, 25 bp, Artificial sequence
  SiRNA target sequence
cccggtaaatcgtttataaaattag

SEQ ID NO: 220882 - DNA, 25 bp, Artificial sequence
  SiRNA target sequence
ccggtaaatcgtttataaaattaga

SEQ ID NO: 220883 - DNA, 25 bp, Artificial sequence
  SiRNA target sequence
cggtaaatcgtttataaaattagaa

SEQ ID NO: 220884 - DNA, 25 bp, Artificial sequence
  SiRNA target sequence
ggtaaatcgtttataaaattagaaa

SEQ ID NO: 220885 - DNA, 25 bp, Artificial sequence
  SiRNA target sequence
gtaaatcgtttataaaattagaaaa

SEQ ID NO: 220886 - DNA, 25 bp, Artificial sequence
  SiRNA target sequence
taaatcgtttataaaattagaaaat

SEQ ID NO: 220887 - DNA, 25 bp, Artificial sequence
  SiRNA target sequence
aaatcgtttataaaattagaaaatg

SEQ ID NO: 220888 - DNA, 25 bp, Artificial sequence
  SiRNA target sequence
aatcgtttataaaattagaaaatgt

SEQ ID NO: 220889 - DNA, 25 bp, Artificial sequence
  SiRNA target sequence
atcgtttataaaattagaaaatgtt

SEQ ID NO: 220890 - DNA, 25 bp, Artificial sequence
  SiRNA target sequence
tcgtttataaaattagaaaatgttt

SEQ ID NO: 220891 - DNA, 25 bp, Artificial sequence
  SiRNA target sequence
cgtttataaaattagaaaatgtttt

SEQ ID NO: 220892 - DNA, 25 bp, Artificial sequence
  SiRNA target sequence
gtttataaaattagaaaatgtttta

SEQ ID NO: 220893 - DNA, 25 bp, Artificial sequence
  SiRNA target sequence
tttataaaattagaaaatgttttag

SEQ ID NO: 220894 - DNA, 25 bp, Artificial sequence
  SiRNA target sequence
ttataaaattagaaaatgttttagg

SEQ ID NO: 220895 - DNA, 25 bp, Artificial sequence
  SiRNA target sequence
tataaaattagaaaatgttttagga

SEQ ID NO: 220896 - DNA, 25 bp, Artificial sequence
  SiRNA target sequence
ataaaattagaaaatgttttaggat

SEQ ID NO: 220897 - DNA, 25 bp, Artificial sequence
  SiRNA target sequence
taaaattagaaaatgttttaggatg

SEQ ID NO: 220898 - DNA, 25 bp, Artificial sequence
  SiRNA target sequence
aaaattagaaaatgttttaggatgt

SEQ ID NO: 220899 - DNA, 25 bp, Artificial sequence
  SiRNA target sequence
aaattagaaaatgttttaggatgtg

SEQ ID NO: 220900 - DNA, 25 bp, Artificial sequence
  SiRNA target sequence
aattagaaaatgttttaggatgtgt

SEQ ID NO: 220901 - DNA, 25 bp, Artificial sequence
  SiRNA target sequence
attagaaaatgttttaggatgtgta

SEQ ID NO: 220902 - DNA, 25 bp, Artificial sequence
  SiRNA target sequence
ttagaaaatgttttaggatgtgtag

SEQ ID NO: 220903 - DNA, 25 bp, Artificial sequence
  SiRNA target sequence
tagaaaatgttttaggatgtgtagc

SEQ ID NO: 220904 - DNA, 25 bp, Artificial sequence
  SiRNA target sequence
agaaaatgttttaggatgtgtagct

SEQ ID NO: 220905 - DNA, 25 bp, Artificial sequence
  SiRNA target sequence
gaaaatgttttaggatgtgtagctg

SEQ ID NO: 220906 - DNA, 25 bp, Artificial sequence
  SiRNA target sequence
aaaatgttttaggatgtgtagctgt

SEQ ID NO: 220907 - DNA, 25 bp, Artificial sequence
  SiRNA target sequence
aaatgttttaggatgtgtagctgta

SEQ ID NO: 220908 - DNA, 25 bp, Artificial sequence
  SiRNA target sequence
aatgttttaggatgtgtagctgtag

SEQ ID NO: 220909 - DNA, 25 bp, Artificial sequence
  SiRNA target sequence
atgttttaggatgtgtagctgtagc

SEQ ID NO: 220910 - DNA, 25 bp, Artificial sequence
  SiRNA target sequence
tgttttaggatgtgtagctgtagct

SEQ ID NO: 220911 - DNA, 25 bp, Artificial sequence
  SiRNA target sequence
gttttaggatgtgtagctgtagctc

SEQ ID NO: 220912 - DNA, 25 bp, Artificial sequence
  SiRNA target sequence
ttttaggatgtgtagctgtagctct

SEQ ID NO: 220913 - DNA, 25 bp, Artificial sequence
  SiRNA target sequence
tttaggatgtgtagctgtagctctt

SEQ ID NO: 220914 - DNA, 25 bp, Artificial sequence
  SiRNA target sequence
ttaggatgtgtagctgtagctctta

SEQ ID NO: 220915 - DNA, 25 bp, Artificial sequence
  SiRNA target sequence
taggatgtgtagctgtagctcttat

SEQ ID NO: 220916 - DNA, 25 bp, Artificial sequence
  SiRNA target sequence
aggatgtgtagctgtagctcttatg

SEQ ID NO: 220917 - DNA, 25 bp, Artificial sequence
  SiRNA target sequence
ggatgtgtagctgtagctcttatga

SEQ ID NO: 220918 - DNA, 25 bp, Artificial sequence
  SiRNA target sequence
gatgtgtagctgtagctcttatgaa

SEQ ID NO: 220919 - DNA, 25 bp, Artificial sequence
  SiRNA target sequence
atgtgtagctgtagctcttatgaaa

SEQ ID NO: 220920 - DNA, 25 bp, Artificial sequence
  SiRNA target sequence
tgtgtagctgtagctcttatgaaag

SEQ ID NO: 220921 - DNA, 25 bp, Artificial sequence
  SiRNA target sequence
gtgtagctgtagctcttatgaaagt

SEQ ID NO: 220922 - DNA, 25 bp, Artificial sequence
  SiRNA target sequence
tgtagctgtagctcttatgaaagta

SEQ ID NO: 220923 - DNA, 25 bp, Artificial sequence
  SiRNA target sequence
gtagctgtagctcttatgaaagtag

SEQ ID NO: 220924 - DNA, 25 bp, Artificial sequence
  SiRNA target sequence
tagctgtagctcttatgaaagtagc

SEQ ID NO: 220925 - DNA, 25 bp, Artificial sequence
  SiRNA target sequence
agctgtagctcttatgaaagtagca

SEQ ID NO: 220926 - DNA, 25 bp, Artificial sequence
  SiRNA target sequence
gctgtagctcttatgaaagtagcaa

SEQ ID NO: 220927 - DNA, 25 bp, Artificial sequence
  SiRNA target sequence
ctgtagctcttatgaaagtagcaaa

SEQ ID NO: 220928 - DNA, 25 bp, Artificial sequence
  SiRNA target sequence
tgtagctcttatgaaagtagcaaaa

SEQ ID NO: 220929 - DNA, 25 bp, Artificial sequence
  SiRNA target sequence
gtagctcttatgaaagtagcaaaat

SEQ ID NO: 220930 - DNA, 25 bp, Artificial sequence
  SiRNA target sequence
tagctcttatgaaagtagcaaaata

SEQ ID NO: 220931 - DNA, 25 bp, Artificial sequence
  SiRNA target sequence
agctcttatgaaagtagcaaaatat

SEQ ID NO: 220932 - DNA, 25 bp, Artificial sequence
  SiRNA target sequence
gctcttatgaaagtagcaaaatatg

SEQ ID NO: 220933 - DNA, 25 bp, Artificial sequence
  SiRNA target sequence
ctcttatgaaagtagcaaaatatgg

SEQ ID NO: 220934 - DNA, 25 bp, Artificial sequence
  SiRNA target sequence
tcttatgaaagtagcaaaatatggc

SEQ ID NO: 220935 - DNA, 25 bp, Artificial sequence
  SiRNA target sequence
cttatgaaagtagcaaaatatggct

SEQ ID NO: 220936 - DNA, 25 bp, Artificial sequence
  SiRNA target sequence
ttatgaaagtagcaaaatatggctc

SEQ ID NO: 220937 - DNA, 25 bp, Artificial sequence
  SiRNA target sequence
tatgaaagtagcaaaatatggctct

SEQ ID NO: 220938 - DNA, 25 bp, Artificial sequence
  SiRNA target sequence
atgaaagtagcaaaatatggctctt

SEQ ID NO: 220939 - DNA, 25 bp, Artificial sequence
  SiRNA target sequence
tgaaagtagcaaaatatggctcttt

SEQ ID NO: 220940 - DNA, 25 bp, Artificial sequence
  SiRNA target sequence
gaaagtagcaaaatatggctctttt

SEQ ID NO: 220941 - DNA, 25 bp, Artificial sequence
  SiRNA target sequence
aaagtagcaaaatatggctcttttg

SEQ ID NO: 220942 - DNA, 25 bp, Artificial sequence
  SiRNA target sequence
aagtagcaaaatatggctcttttga

SEQ ID NO: 220943 - DNA, 25 bp, Artificial sequence
  SiRNA target sequence
agtagcaaaatatggctcttttgat

SEQ ID NO: 220944 - DNA, 25 bp, Artificial sequence
  SiRNA target sequence
gtagcaaaatatggctcttttgata

SEQ ID NO: 220945 - DNA, 25 bp, Artificial sequence
  SiRNA target sequence
tagcaaaatatggctcttttgatat

SEQ ID NO: 220946 - DNA, 25 bp, Artificial sequence
  SiRNA target sequence
agcaaaatatggctcttttgatatt

SEQ ID NO: 220947 - DNA, 25 bp, Artificial sequence
  SiRNA target sequence
gcaaaatatggctcttttgatattt

SEQ ID NO: 220948 - DNA, 25 bp, Artificial sequence
  SiRNA target sequence
caaaatatggctcttttgatatttc

SEQ ID NO: 220949 - DNA, 25 bp, Artificial sequence
  SiRNA target sequence
aaaatatggctcttttgatatttcc

SEQ ID NO: 220950 - DNA, 25 bp, Artificial sequence
  SiRNA target sequence
aaatatggctcttttgatatttcca

SEQ ID NO: 220951 - DNA, 25 bp, Artificial sequence
  SiRNA target sequence
aatatggctcttttgatatttccaa

SEQ ID NO: 220952 - DNA, 25 bp, Artificial sequence
  SiRNA target sequence
atatggctcttttgatatttccaaa

SEQ ID NO: 220953 - DNA, 25 bp, Artificial sequence
  SiRNA target sequence
tatggctcttttgatatttccaaag

SEQ ID NO: 220954 - DNA, 25 bp, Artificial sequence
  SiRNA target sequence
atggctcttttgatatttccaaaga

SEQ ID NO: 220955 - DNA, 25 bp, Artificial sequence
  SiRNA target sequence
tggctcttttgatatttccaaagaa

SEQ ID NO: 220956 - DNA, 25 bp, Artificial sequence
  SiRNA target sequence
ggctcttttgatatttccaaagaag

SEQ ID NO: 220957 - DNA, 25 bp, Artificial sequence
  SiRNA target sequence
gctcttttgatatttccaaagaagc

SEQ ID NO: 220958 - DNA, 25 bp, Artificial sequence
  SiRNA target sequence
ctcttttgatatttccaaagaagcc

SEQ ID NO: 220959 - DNA, 25 bp, Artificial sequence
  SiRNA target sequence
tcttttgatatttccaaagaagcca

SEQ ID NO: 220960 - DNA, 25 bp, Artificial sequence
  SiRNA target sequence
cttttgatatttccaaagaagccat

SEQ ID NO: 220961 - DNA, 25 bp, Artificial sequence
  SiRNA target sequence
ttttgatatttccaaagaagccatt

SEQ ID NO: 220962 - DNA, 25 bp, Artificial sequence
  SiRNA target sequence
tttgatatttccaaagaagccattt

SEQ ID NO: 220963 - DNA, 25 bp, Artificial sequence
  SiRNA target sequence
ttgatatttccaaagaagccatttc

SEQ ID NO: 220964 - DNA, 25 bp, Artificial sequence
  SiRNA target sequence
tgatatttccaaagaagccatttca

SEQ ID NO: 220965 - DNA, 25 bp, Artificial sequence
  SiRNA target sequence
gatatttccaaagaagccatttcaa

SEQ ID NO: 220966 - DNA, 25 bp, Artificial sequence
  SiRNA target sequence
atatttccaaagaagccatttcaat

SEQ ID NO: 220967 - DNA, 25 bp, Artificial sequence
  SiRNA target sequence
tatttccaaagaagccatttcaatg

SEQ ID NO: 220968 - DNA, 25 bp, Artificial sequence
  SiRNA target sequence
atttccaaagaagccatttcaatgc

SEQ ID NO: 220969 - DNA, 25 bp, Artificial sequence
  SiRNA target sequence
tttccaaagaagccatttcaatgca

SEQ ID NO: 220970 - DNA, 25 bp, Artificial sequence
  SiRNA target sequence
ttccaaagaagccatttcaatgcag

SEQ ID NO: 220971 - DNA, 25 bp, Artificial sequence
  SiRNA target sequence
tccaaagaagccatttcaatgcaga

SEQ ID NO: 220972 - DNA, 25 bp, Artificial sequence
  SiRNA target sequence
ccaaagaagccatttcaatgcagat

SEQ ID NO: 220973 - DNA, 25 bp, Artificial sequence
  SiRNA target sequence
caaagaagccatttcaatgcagatt

SEQ ID NO: 220974 - DNA, 25 bp, Artificial sequence
  SiRNA target sequence
aaagaagccatttcaatgcagattg

SEQ ID NO: 220975 - DNA, 25 bp, Artificial sequence
  SiRNA target sequence
aagaagccatttcaatgcagattga

SEQ ID NO: 220976 - DNA, 25 bp, Artificial sequence
  SiRNA target sequence
agaagccatttcaatgcagattgat

SEQ ID NO: 220977 - DNA, 25 bp, Artificial sequence
  SiRNA target sequence
gaagccatttcaatgcagattgatt

SEQ ID NO: 220978 - DNA, 25 bp, Artificial sequence
  SiRNA target sequence
aagccatttcaatgcagattgattc

SEQ ID NO: 220979 - DNA, 25 bp, Artificial sequence
  SiRNA target sequence
agccatttcaatgcagattgattcg

SEQ ID NO: 220980 - DNA, 25 bp, Artificial sequence
  SiRNA target sequence
gccatttcaatgcagattgattcgt

SEQ ID NO: 220981 - DNA, 25 bp, Artificial sequence
  SiRNA target sequence
ccatttcaatgcagattgattcgtc

SEQ ID NO: 220982 - DNA, 25 bp, Artificial sequence
  SiRNA target sequence
catttcaatgcagattgattcgtca

SEQ ID NO: 220983 - DNA, 25 bp, Artificial sequence
  SiRNA target sequence
atttcaatgcagattgattcgtcat

SEQ ID NO: 220984 - DNA, 25 bp, Artificial sequence
  SiRNA target sequence
tttcaatgcagattgattcgtcatt

SEQ ID NO: 220985 - DNA, 25 bp, Artificial sequence
  SiRNA target sequence
ttcaatgcagattgattcgtcattg

SEQ ID NO: 220986 - DNA, 25 bp, Artificial sequence
  SiRNA target sequence
tcaatgcagattgattcgtcattgc

SEQ ID NO: 220987 - DNA, 25 bp, Artificial sequence
  SiRNA target sequence
caatgcagattgattcgtcattgcg

SEQ ID NO: 220988 - DNA, 25 bp, Artificial sequence
  SiRNA target sequence
aatgcagattgattcgtcattgcgt

SEQ ID NO: 220989 - DNA, 25 bp, Artificial sequence
  SiRNA target sequence
atgcagattgattcgtcattgcgtg

SEQ ID NO: 220990 - DNA, 25 bp, Artificial sequence
  SiRNA target sequence
tgcagattgattcgtcattgcgtgc

SEQ ID NO: 220991 - DNA, 25 bp, Artificial sequence
  SiRNA target sequence
gcagattgattcgtcattgcgtgca

SEQ ID NO: 220992 - DNA, 25 bp, Artificial sequence
  SiRNA target sequence
cagattgattcgtcattgcgtgcac

SEQ ID NO: 220993 - DNA, 25 bp, Artificial sequence
  SiRNA target sequence
agattgattcgtcattgcgtgcacg

SEQ ID NO: 220994 - DNA, 25 bp, Artificial sequence
  SiRNA target sequence
gattgattcgtcattgcgtgcacgt

SEQ ID NO: 220995 - DNA, 25 bp, Artificial sequence
  SiRNA target sequence
attgattcgtcattgcgtgcacgtt

SEQ ID NO: 220996 - DNA, 25 bp, Artificial sequence
  SiRNA target sequence
ttgattcgtcattgcgtgcacgtta

SEQ ID NO: 220997 - DNA, 25 bp, Artificial sequence
  SiRNA target sequence
tgattcgtcattgcgtgcacgttat

SEQ ID NO: 220998 - DNA, 25 bp, Artificial sequence
  SiRNA target sequence
gattcgtcattgcgtgcacgttata

SEQ ID NO: 220999 - DNA, 25 bp, Artificial sequence
  SiRNA target sequence
attcgtcattgcgtgcacgttataa

SEQ ID NO: 221000 - DNA, 25 bp, Artificial sequence
  SiRNA target sequence
ttcgtcattgcgtgcacgttataaa

SEQ ID NO: 221001 - DNA, 25 bp, Artificial sequence
  SiRNA target sequence
tcgtcattgcgtgcacgttataaag

SEQ ID NO: 221002 - DNA, 25 bp, Artificial sequence
  SiRNA target sequence
cgtcattgcgtgcacgttataaagg

SEQ ID NO: 221003 - DNA, 25 bp, Artificial sequence
  SiRNA target sequence
gtcattgcgtgcacgttataaagga

SEQ ID NO: 221004 - DNA, 25 bp, Artificial sequence
  SiRNA target sequence
tcattgcgtgcacgttataaaggaa

SEQ ID NO: 221005 - DNA, 25 bp, Artificial sequence
  SiRNA target sequence
cattgcgtgcacgttataaaggaat

SEQ ID NO: 221006 - DNA, 25 bp, Artificial sequence
  SiRNA target sequence
attgcgtgcacgttataaaggaatt

SEQ ID NO: 221007 - DNA, 25 bp, Artificial sequence
  SiRNA target sequence
ttgcgtgcacgttataaaggaattt

SEQ ID NO: 221008 - DNA, 25 bp, Artificial sequence
  SiRNA target sequence
tgcgtgcacgttataaaggaatttt

SEQ ID NO: 221009 - DNA, 25 bp, Artificial sequence
  SiRNA target sequence
gcgtgcacgttataaaggaattttt

SEQ ID NO: 221010 - DNA, 25 bp, Artificial sequence
  SiRNA target sequence
cgtgcacgttataaaggaatttttg

SEQ ID NO: 221011 - DNA, 25 bp, Artificial sequence
  SiRNA target sequence
gtgcacgttataaaggaatttttga

SEQ ID NO: 221012 - DNA, 25 bp, Artificial sequence
  SiRNA target sequence
tgcacgttataaaggaatttttgac

SEQ ID NO: 221013 - DNA, 25 bp, Artificial sequence
  SiRNA target sequence
gcacgttataaaggaatttttgacg

SEQ ID NO: 221014 - DNA, 25 bp, Artificial sequence
  SiRNA target sequence
cacgttataaaggaatttttgacgg

SEQ ID NO: 221015 - DNA, 25 bp, Artificial sequence
  SiRNA target sequence
acgttataaaggaatttttgacggt

SEQ ID NO: 221016 - DNA, 25 bp, Artificial sequence
  SiRNA target sequence
cgttataaaggaatttttgacggtg

SEQ ID NO: 221017 - DNA, 25 bp, Artificial sequence
  SiRNA target sequence
gttataaaggaatttttgacggtgt

SEQ ID NO: 221018 - DNA, 25 bp, Artificial sequence
  SiRNA target sequence
ttataaaggaatttttgacggtgtt

SEQ ID NO: 221019 - DNA, 25 bp, Artificial sequence
  SiRNA target sequence
tataaaggaatttttgacggtgttt

SEQ ID NO: 221020 - DNA, 25 bp, Artificial sequence
  SiRNA target sequence
ataaaggaatttttgacggtgtttt

SEQ ID NO: 221021 - DNA, 25 bp, Artificial sequence
  SiRNA target sequence
taaaggaatttttgacggtgttttt

SEQ ID NO: 221022 - DNA, 25 bp, Artificial sequence
  SiRNA target sequence
aaaggaatttttgacggtgtttttg

SEQ ID NO: 221023 - DNA, 25 bp, Artificial sequence
  SiRNA target sequence
aaggaatttttgacggtgtttttgg

SEQ ID NO: 221024 - DNA, 25 bp, Artificial sequence
  SiRNA target sequence
aggaatttttgacggtgtttttggt

SEQ ID NO: 221025 - DNA, 25 bp, Artificial sequence
  SiRNA target sequence
ggaatttttgacggtgtttttggta

SEQ ID NO: 221026 - DNA, 25 bp, Artificial sequence
  SiRNA target sequence
gaatttttgacggtgtttttggtaa

SEQ ID NO: 221027 - DNA, 25 bp, Artificial sequence
  SiRNA target sequence
aatttttgacggtgtttttggtaag

SEQ ID NO: 221028 - DNA, 25 bp, Artificial sequence
  SiRNA target sequence
atttttgacggtgtttttggtaagt

SEQ ID NO: 221029 - DNA, 25 bp, Artificial sequence
  SiRNA target sequence
tttttgacggtgtttttggtaagtt

SEQ ID NO: 221030 - DNA, 25 bp, Artificial sequence
  SiRNA target sequence
ttttgacggtgtttttggtaagtta

SEQ ID NO: 221031 - DNA, 25 bp, Artificial sequence
  SiRNA target sequence
tttgacggtgtttttggtaagttag

SEQ ID NO: 221032 - DNA, 25 bp, Artificial sequence
  SiRNA target sequence
ttgacggtgtttttggtaagttagg

SEQ ID NO: 221033 - DNA, 25 bp, Artificial sequence
  SiRNA target sequence
tgacggtgtttttggtaagttagga

SEQ ID NO: 221034 - DNA, 25 bp, Artificial sequence
  SiRNA target sequence
gacggtgtttttggtaagttaggaa

SEQ ID NO: 221035 - DNA, 25 bp, Artificial sequence
  SiRNA target sequence
acggtgtttttggtaagttaggaaa

SEQ ID NO: 221036 - DNA, 25 bp, Artificial sequence
  SiRNA target sequence
cggtgtttttggtaagttaggaaaa

SEQ ID NO: 221037 - DNA, 25 bp, Artificial sequence
  SiRNA target sequence
ggtgtttttggtaagttaggaaaat

SEQ ID NO: 221038 - DNA, 25 bp, Artificial sequence
  SiRNA target sequence
gtgtttttggtaagttaggaaaatc

SEQ ID NO: 221039 - DNA, 25 bp, Artificial sequence
  SiRNA target sequence
tgtttttggtaagttaggaaaatct

SEQ ID NO: 221040 - DNA, 25 bp, Artificial sequence
  SiRNA target sequence
gtttttggtaagttaggaaaatctc

SEQ ID NO: 221041 - DNA, 25 bp, Artificial sequence
  SiRNA target sequence
tttttggtaagttaggaaaatctct

SEQ ID NO: 221042 - DNA, 25 bp, Artificial sequence
  SiRNA target sequence
ttttggtaagttaggaaaatctctt

SEQ ID NO: 221043 - DNA, 25 bp, Artificial sequence
  SiRNA target sequence
tttggtaagttaggaaaatctcttg

SEQ ID NO: 221044 - DNA, 25 bp, Artificial sequence
  SiRNA target sequence
ttggtaagttaggaaaatctcttgg

SEQ ID NO: 221045 - DNA, 25 bp, Artificial sequence
  SiRNA target sequence
tggtaagttaggaaaatctcttgga

SEQ ID NO: 221046 - DNA, 25 bp, Artificial sequence
  SiRNA target sequence
ggtaagttaggaaaatctcttggat

SEQ ID NO: 221047 - DNA, 25 bp, Artificial sequence
  SiRNA target sequence
gtaagttaggaaaatctcttggatc

SEQ ID NO: 221048 - DNA, 25 bp, Artificial sequence
  SiRNA target sequence
taagttaggaaaatctcttggatcg

SEQ ID NO: 221049 - DNA, 25 bp, Artificial sequence
  SiRNA target sequence
aagttaggaaaatctcttggatcgt

SEQ ID NO: 221050 - DNA, 25 bp, Artificial sequence
  SiRNA target sequence
agttaggaaaatctcttggatcgtt

SEQ ID NO: 221051 - DNA, 25 bp, Artificial sequence
  SiRNA target sequence
gttaggaaaatctcttggatcgtta

SEQ ID NO: 221052 - DNA, 25 bp, Artificial sequence
  SiRNA target sequence
ttaggaaaatctcttggatcgttat

SEQ ID NO: 221053 - DNA, 25 bp, Artificial sequence
  SiRNA target sequence
taggaaaatctcttggatcgttatt

SEQ ID NO: 221054 - DNA, 25 bp, Artificial sequence
  SiRNA target sequence
aggaaaatctcttggatcgttattt

SEQ ID NO: 221055 - DNA, 25 bp, Artificial sequence
  SiRNA target sequence
ggaaaatctcttggatcgttatttg

SEQ ID NO: 221056 - DNA, 25 bp, Artificial sequence
  SiRNA target sequence
gaaaatctcttggatcgttatttgt

SEQ ID NO: 221057 - DNA, 25 bp, Artificial sequence
  SiRNA target sequence
aaaatctcttggatcgttatttgtg

SEQ ID NO: 221058 - DNA, 25 bp, Artificial sequence
  SiRNA target sequence
aaatctcttggatcgttatttgtgt

SEQ ID NO: 221059 - DNA, 25 bp, Artificial sequence
  SiRNA target sequence
aatctcttggatcgttatttgtgtg

SEQ ID NO: 221060 - DNA, 25 bp, Artificial sequence
  SiRNA target sequence
atctcttggatcgttatttgtgtgg

SEQ ID NO: 221061 - DNA, 25 bp, Artificial sequence
  SiRNA target sequence
tctcttggatcgttatttgtgtgga

SEQ ID NO: 221062 - DNA, 25 bp, Artificial sequence
  SiRNA target sequence
ctcttggatcgttatttgtgtggat

SEQ ID NO: 221063 - DNA, 25 bp, Artificial sequence
  SiRNA target sequence
tcttggatcgttatttgtgtggatt

SEQ ID NO: 221064 - DNA, 25 bp, Artificial sequence
  SiRNA target sequence
cttggatcgttatttgtgtggatta

SEQ ID NO: 221065 - DNA, 25 bp, Artificial sequence
  SiRNA target sequence
ttggatcgttatttgtgtggattat

SEQ ID NO: 221066 - DNA, 25 bp, Artificial sequence
  SiRNA target sequence
tggatcgttatttgtgtggattatg

SEQ ID NO: 221067 - DNA, 25 bp, Artificial sequence
  SiRNA target sequence
ggatcgttatttgtgtggattatgg

SEQ ID NO: 221068 - DNA, 25 bp, Artificial sequence
  SiRNA target sequence
gatcgttatttgtgtggattatggg

SEQ ID NO: 221069 - DNA, 25 bp, Artificial sequence
  SiRNA target sequence
atcgttatttgtgtggattatggga

SEQ ID NO: 221070 - DNA, 25 bp, Artificial sequence
  SiRNA target sequence
tcgttatttgtgtggattatgggat

SEQ ID NO: 221071 - DNA, 25 bp, Artificial sequence
  SiRNA target sequence
cgttatttgtgtggattatgggata

SEQ ID NO: 221072 - DNA, 25 bp, Artificial sequence
  SiRNA target sequence
gttatttgtgtggattatgggatat

SEQ ID NO: 221073 - DNA, 25 bp, Artificial sequence
  SiRNA target sequence
ttatttgtgtggattatgggatatg

SEQ ID NO: 221074 - DNA, 25 bp, Artificial sequence
  SiRNA target sequence
tatttgtgtggattatgggatatgc

SEQ ID NO: 221075 - DNA, 25 bp, Artificial sequence
  SiRNA target sequence
atttgtgtggattatgggatatgca

SEQ ID NO: 221076 - DNA, 25 bp, Artificial sequence
  SiRNA target sequence
tttgtgtggattatgggatatgcat

SEQ ID NO: 221077 - DNA, 25 bp, Artificial sequence
  SiRNA target sequence
ttgtgtggattatgggatatgcatt

SEQ ID NO: 221078 - DNA, 25 bp, Artificial sequence
  SiRNA target sequence
tgtgtggattatgggatatgcattt

SEQ ID NO: 221079 - DNA, 25 bp, Artificial sequence
  SiRNA target sequence
gtgtggattatgggatatgcatttc

SEQ ID NO: 221080 - DNA, 25 bp, Artificial sequence
  SiRNA target sequence
tgtggattatgggatatgcatttca

SEQ ID NO: 221081 - DNA, 25 bp, Artificial sequence
  SiRNA target sequence
gtggattatgggatatgcatttcaa

SEQ ID NO: 221082 - DNA, 25 bp, Artificial sequence
  SiRNA target sequence
tggattatgggatatgcatttcaaa

SEQ ID NO: 221083 - DNA, 25 bp, Artificial sequence
  SiRNA target sequence
ggattatgggatatgcatttcaaac

SEQ ID NO: 221084 - DNA, 25 bp, Artificial sequence
  SiRNA target sequence
gattatgggatatgcatttcaaaca

SEQ ID NO: 221085 - DNA, 25 bp, Artificial sequence
  SiRNA target sequence
attatgggatatgcatttcaaacaa

SEQ ID NO: 221086 - DNA, 25 bp, Artificial sequence
  SiRNA target sequence
ttatgggatatgcatttcaaacaag

SEQ ID NO: 221087 - DNA, 25 bp, Artificial sequence
  SiRNA target sequence
tatgggatatgcatttcaaacaaga

SEQ ID NO: 221088 - DNA, 25 bp, Artificial sequence
  SiRNA target sequence
atgggatatgcatttcaaacaagag

SEQ ID NO: 221089 - DNA, 25 bp, Artificial sequence
  SiRNA target sequence
tgggatatgcatttcaaacaagaga

SEQ ID NO: 221090 - DNA, 25 bp, Artificial sequence
  SiRNA target sequence
gggatatgcatttcaaacaagagat

SEQ ID NO: 221091 - DNA, 25 bp, Artificial sequence
  SiRNA target sequence
ggatatgcatttcaaacaagagatt

SEQ ID NO: 221092 - DNA, 25 bp, Artificial sequence
  SiRNA target sequence
gatatgcatttcaaacaagagattt

SEQ ID NO: 221093 - DNA, 25 bp, Artificial sequence
  SiRNA target sequence
atatgcatttcaaacaagagatttt

SEQ ID NO: 221094 - DNA, 25 bp, Artificial sequence
  SiRNA target sequence
tatgcatttcaaacaagagatttta

SEQ ID NO: 221095 - DNA, 25 bp, Artificial sequence
  SiRNA target sequence
atgcatttcaaacaagagattttag

SEQ ID NO: 221096 - DNA, 25 bp, Artificial sequence
  SiRNA target sequence
tgcatttcaaacaagagattttaga

SEQ ID NO: 221097 - DNA, 25 bp, Artificial sequence
  SiRNA target sequence
gcatttcaaacaagagattttagaa

SEQ ID NO: 221098 - DNA, 25 bp, Artificial sequence
  SiRNA target sequence
catttcaaacaagagattttagaaa

SEQ ID NO: 221099 - DNA, 25 bp, Artificial sequence
  SiRNA target sequence
atttcaaacaagagattttagaaaa

SEQ ID NO: 221100 - DNA, 25 bp, Artificial sequence
  SiRNA target sequence
tttcaaacaagagattttagaaaat

SEQ ID NO: 221101 - DNA, 25 bp, Artificial sequence
  SiRNA target sequence
ttcaaacaagagattttagaaaatt

SEQ ID NO: 221102 - DNA, 25 bp, Artificial sequence
  SiRNA target sequence
tcaaacaagagattttagaaaatta

SEQ ID NO: 221103 - DNA, 25 bp, Artificial sequence
  SiRNA target sequence
caaacaagagattttagaaaattag

SEQ ID NO: 221104 - DNA, 25 bp, Artificial sequence
  SiRNA target sequence
aaacaagagattttagaaaattagc

SEQ ID NO: 221105 - DNA, 25 bp, Artificial sequence
  SiRNA target sequence
aacaagagattttagaaaattagct

SEQ ID NO: 221106 - DNA, 25 bp, Artificial sequence
  SiRNA target sequence
acaagagattttagaaaattagctc

SEQ ID NO: 221107 - DNA, 25 bp, Artificial sequence
  SiRNA target sequence
caagagattttagaaaattagctcc

SEQ ID NO: 221108 - DNA, 25 bp, Artificial sequence
  SiRNA target sequence
aagagattttagaaaattagctccc

SEQ ID NO: 221109 - DNA, 25 bp, Artificial sequence
  SiRNA target sequence
agagattttagaaaattagctccct

SEQ ID NO: 221110 - DNA, 25 bp, Artificial sequence
  SiRNA target sequence
gagattttagaaaattagctccctt

SEQ ID NO: 221111 - DNA, 25 bp, Artificial sequence
  SiRNA target sequence
agattttagaaaattagctccctta

SEQ ID NO: 221112 - DNA, 25 bp, Artificial sequence
  SiRNA target sequence
gattttagaaaattagctcccttat

SEQ ID NO: 221113 - DNA, 25 bp, Artificial sequence
  SiRNA target sequence
attttagaaaattagctcccttatg

SEQ ID NO: 221114 - DNA, 25 bp, Artificial sequence
  SiRNA target sequence
ttttagaaaattagctcccttatgt

SEQ ID NO: 221115 - DNA, 25 bp, Artificial sequence
  SiRNA target sequence
tttagaaaattagctcccttatgta

SEQ ID NO: 221116 - DNA, 25 bp, Artificial sequence
  SiRNA target sequence
ttagaaaattagctcccttatgtat

SEQ ID NO: 221117 - DNA, 25 bp, Artificial sequence
  SiRNA target sequence
tagaaaattagctcccttatgtatc

SEQ ID NO: 221118 - DNA, 25 bp, Artificial sequence
  SiRNA target sequence
agaaaattagctcccttatgtatca

SEQ ID NO: 221119 - DNA, 25 bp, Artificial sequence
  SiRNA target sequence
gaaaattagctcccttatgtatcag

SEQ ID NO: 221120 - DNA, 25 bp, Artificial sequence
  SiRNA target sequence
aaaattagctcccttatgtatcagc

SEQ ID NO: 221121 - DNA, 25 bp, Artificial sequence
  SiRNA target sequence
aaattagctcccttatgtatcagcg

SEQ ID NO: 221122 - DNA, 25 bp, Artificial sequence
  SiRNA target sequence
aattagctcccttatgtatcagcgt

SEQ ID NO: 221123 - DNA, 25 bp, Artificial sequence
  SiRNA target sequence
attagctcccttatgtatcagcgta

SEQ ID NO: 221124 - DNA, 25 bp, Artificial sequence
  SiRNA target sequence
ttagctcccttatgtatcagcgtaa

SEQ ID NO: 221125 - DNA, 25 bp, Artificial sequence
  SiRNA target sequence
tagctcccttatgtatcagcgtaat

SEQ ID NO: 221126 - DNA, 25 bp, Artificial sequence
  SiRNA target sequence
agctcccttatgtatcagcgtaatt

SEQ ID NO: 221127 - DNA, 25 bp, Artificial sequence
  SiRNA target sequence
gctcccttatgtatcagcgtaattg

SEQ ID NO: 221128 - DNA, 25 bp, Artificial sequence
  SiRNA target sequence
ctcccttatgtatcagcgtaattgt

SEQ ID NO: 221129 - DNA, 25 bp, Artificial sequence
  SiRNA target sequence
tcccttatgtatcagcgtaattgtc

SEQ ID NO: 221130 - DNA, 25 bp, Artificial sequence
  SiRNA target sequence
cccttatgtatcagcgtaattgtct

SEQ ID NO: 221131 - DNA, 25 bp, Artificial sequence
  SiRNA target sequence
ccttatgtatcagcgtaattgtctt

SEQ ID NO: 221132 - DNA, 25 bp, Artificial sequence
  SiRNA target sequence
cttatgtatcagcgtaattgtcttt

SEQ ID NO: 221133 - DNA, 25 bp, Artificial sequence
  SiRNA target sequence
ttatgtatcagcgtaattgtctttt

SEQ ID NO: 221134 - DNA, 25 bp, Artificial sequence
  SiRNA target sequence
tatgtatcagcgtaattgtcttttt

SEQ ID NO: 221135 - DNA, 25 bp, Artificial sequence
  SiRNA target sequence
atgtatcagcgtaattgtctttttt

SEQ ID NO: 221136 - DNA, 25 bp, Artificial sequence
  SiRNA target sequence
tgtatcagcgtaattgtcttttttg

SEQ ID NO: 221137 - DNA, 25 bp, Artificial sequence
  SiRNA target sequence
gtatcagcgtaattgtcttttttgt

SEQ ID NO: 221138 - DNA, 25 bp, Artificial sequence
  SiRNA target sequence
tatcagcgtaattgtcttttttgtt

SEQ ID NO: 221139 - DNA, 25 bp, Artificial sequence
  SiRNA target sequence
atcagcgtaattgtcttttttgtta

SEQ ID NO: 221140 - DNA, 25 bp, Artificial sequence
  SiRNA target sequence
tcagcgtaattgtcttttttgttat

SEQ ID NO: 221141 - DNA, 25 bp, Artificial sequence
  SiRNA target sequence
cagcgtaattgtcttttttgttatt

SEQ ID NO: 221142 - DNA, 25 bp, Artificial sequence
  SiRNA target sequence
agcgtaattgtcttttttgttatta

SEQ ID NO: 221143 - DNA, 25 bp, Artificial sequence
  SiRNA target sequence
gcgtaattgtcttttttgttattat

SEQ ID NO: 221144 - DNA, 25 bp, Artificial sequence
  SiRNA target sequence
cgtaattgtcttttttgttattatt

SEQ ID NO: 221145 - DNA, 25 bp, Artificial sequence
  SiRNA target sequence
gtaattgtcttttttgttattattt

SEQ ID NO: 221146 - DNA, 25 bp, Artificial sequence
  SiRNA target sequence
taattgtcttttttgttattatttg

SEQ ID NO: 221147 - DNA, 25 bp, Artificial sequence
  SiRNA target sequence
aattgtcttttttgttattatttgg

SEQ ID NO: 221148 - DNA, 25 bp, Artificial sequence
  SiRNA target sequence
attgtcttttttgttattatttgga

SEQ ID NO: 221149 - DNA, 25 bp, Artificial sequence
  SiRNA target sequence
ttgtcttttttgttattatttggat

SEQ ID NO: 221150 - DNA, 25 bp, Artificial sequence
  SiRNA target sequence
tgtcttttttgttattatttggatt

SEQ ID NO: 221151 - DNA, 25 bp, Artificial sequence
  SiRNA target sequence
gtcttttttgttattatttggattt

SEQ ID NO: 221152 - DNA, 25 bp, Artificial sequence
  SiRNA target sequence
tcttttttgttattatttggattta

SEQ ID NO: 221153 - DNA, 25 bp, Artificial sequence
  SiRNA target sequence
cttttttgttattatttggatttat

SEQ ID NO: 221154 - DNA, 25 bp, Artificial sequence
  SiRNA target sequence
ttttttgttattatttggatttatt

SEQ ID NO: 221155 - DNA, 25 bp, Artificial sequence
  SiRNA target sequence
tttttgttattatttggatttattc

SEQ ID NO: 221156 - DNA, 25 bp, Artificial sequence
  SiRNA target sequence
ttttgttattatttggatttattca

SEQ ID NO: 221157 - DNA, 25 bp, Artificial sequence
  SiRNA target sequence
tttgttattatttggatttattcag

SEQ ID NO: 221158 - DNA, 25 bp, Artificial sequence
  SiRNA target sequence
ttgttattatttggatttattcagt

SEQ ID NO: 221159 - DNA, 25 bp, Artificial sequence
  SiRNA target sequence
tgttattatttggatttattcagtt

SEQ ID NO: 221160 - DNA, 25 bp, Artificial sequence
  SiRNA target sequence
gttattatttggatttattcagtta

SEQ ID NO: 221161 - DNA, 25 bp, Artificial sequence
  SiRNA target sequence
ttattatttggatttattcagttat

SEQ ID NO: 221162 - DNA, 25 bp, Artificial sequence
  SiRNA target sequence
tattatttggatttattcagttatt

SEQ ID NO: 221163 - DNA, 25 bp, Artificial sequence
  SiRNA target sequence
attatttggatttattcagttattt

SEQ ID NO: 221164 - DNA, 25 bp, Artificial sequence
  SiRNA target sequence
ttatttggatttattcagttattta

SEQ ID NO: 221165 - DNA, 25 bp, Artificial sequence
  SiRNA target sequence
tatttggatttattcagttatttat

SEQ ID NO: 221166 - DNA, 25 bp, Artificial sequence
  SiRNA target sequence
atttggatttattcagttatttatt

SEQ ID NO: 221167 - DNA, 25 bp, Artificial sequence
  SiRNA target sequence
tttggatttattcagttatttattt

SEQ ID NO: 221168 - DNA, 25 bp, Artificial sequence
  SiRNA target sequence
ttggatttattcagttatttattta

SEQ ID NO: 221169 - DNA, 25 bp, Artificial sequence
  SiRNA target sequence
tggatttattcagttatttatttaa

SEQ ID NO: 221170 - DNA, 25 bp, Artificial sequence
  SiRNA target sequence
ggatttattcagttatttatttaaa

SEQ ID NO: 221171 - DNA, 25 bp, Artificial sequence
  SiRNA target sequence
gatttattcagttatttatttaaat

SEQ ID NO: 221172 - DNA, 25 bp, Artificial sequence
  SiRNA target sequence
atttattcagttatttatttaaata

SEQ ID NO: 221173 - DNA, 25 bp, Artificial sequence
  SiRNA target sequence
tttattcagttatttatttaaataa

SEQ ID NO: 221174 - DNA, 25 bp, Artificial sequence
  SiRNA target sequence
ttattcagttatttatttaaataag

SEQ ID NO: 221175 - DNA, 25 bp, Artificial sequence
  SiRNA target sequence
tattcagttatttatttaaataaga

SEQ ID NO: 221176 - DNA, 25 bp, Artificial sequence
  SiRNA target sequence
attcagttatttatttaaataagaa

SEQ ID NO: 221177 - DNA, 25 bp, Artificial sequence
  SiRNA target sequence
ttcagttatttatttaaataagaaa

SEQ ID NO: 221178 - DNA, 25 bp, Artificial sequence
  SiRNA target sequence
tcagttatttatttaaataagaaat

SEQ ID NO: 221179 - DNA, 25 bp, Artificial sequence
  SiRNA target sequence
cagttatttatttaaataagaaata

SEQ ID NO: 221180 - DNA, 25 bp, Artificial sequence
  SiRNA target sequence
agttatttatttaaataagaaatac

SEQ ID NO: 221181 - DNA, 25 bp, Artificial sequence
  SiRNA target sequence
gttatttatttaaataagaaataca

SEQ ID NO: 221182 - DNA, 25 bp, Artificial sequence
  SiRNA target sequence
ttatttatttaaataagaaatacaa

SEQ ID NO: 221183 - DNA, 25 bp, Artificial sequence
  SiRNA target sequence
tatttatttaaataagaaatacaaa

SEQ ID NO: 221184 - DNA, 25 bp, Artificial sequence
  SiRNA target sequence
atttatttaaataagaaatacaaag

SEQ ID NO: 221185 - DNA, 25 bp, Artificial sequence
  SiRNA target sequence
tttatttaaataagaaatacaaaga

SEQ ID NO: 221186 - DNA, 25 bp, Artificial sequence
  SiRNA target sequence
ttatttaaataagaaatacaaagaa

SEQ ID NO: 221187 - DNA, 25 bp, Artificial sequence
  SiRNA target sequence
tatttaaataagaaatacaaagaat

SEQ ID NO: 221188 - DNA, 25 bp, Artificial sequence
  SiRNA target sequence
atttaaataagaaatacaaagaatc

SEQ ID NO: 221189 - DNA, 25 bp, Artificial sequence
  SiRNA target sequence
tttaaataagaaatacaaagaatca

SEQ ID NO: 221190 - DNA, 25 bp, Artificial sequence
  SiRNA target sequence
ttaaataagaaatacaaagaatcag

SEQ ID NO: 221191 - DNA, 25 bp, Artificial sequence
  SiRNA target sequence
taaataagaaatacaaagaatcagt

SEQ ID NO: 221192 - DNA, 25 bp, Artificial sequence
  SiRNA target sequence
aaataagaaatacaaagaatcagtt

SEQ ID NO: 221193 - DNA, 25 bp, Artificial sequence
  SiRNA target sequence
aataagaaatacaaagaatcagttg

SEQ ID NO: 221194 - DNA, 25 bp, Artificial sequence
  SiRNA target sequence
ataagaaatacaaagaatcagttgt

SEQ ID NO: 221195 - DNA, 25 bp, Artificial sequence
  SiRNA target sequence
taagaaatacaaagaatcagttgtt

SEQ ID NO: 221196 - DNA, 25 bp, Artificial sequence
  SiRNA target sequence
aagaaatacaaagaatcagttgtta

SEQ ID NO: 221197 - DNA, 25 bp, Artificial sequence
  SiRNA target sequence
agaaatacaaagaatcagttgttag

SEQ ID NO: 221198 - DNA, 25 bp, Artificial sequence
  SiRNA target sequence
gaaatacaaagaatcagttgttagt

SEQ ID NO: 221199 - DNA, 25 bp, Artificial sequence
  SiRNA target sequence
aaatacaaagaatcagttgttagta

SEQ ID NO: 221200 - DNA, 25 bp, Artificial sequence
  SiRNA target sequence
aatacaaagaatcagttgttagtaa

SEQ ID NO: 221201 - DNA, 25 bp, Artificial sequence
  SiRNA target sequence
atacaaagaatcagttgttagtaat

SEQ ID NO: 221202 - DNA, 25 bp, Artificial sequence
  SiRNA target sequence
tacaaagaatcagttgttagtaatt

SEQ ID NO: 221203 - DNA, 25 bp, Artificial sequence
  SiRNA target sequence
acaaagaatcagttgttagtaattt

SEQ ID NO: 221204 - DNA, 25 bp, Artificial sequence
  SiRNA target sequence
caaagaatcagttgttagtaattta

SEQ ID NO: 221205 - DNA, 25 bp, Artificial sequence
  SiRNA target sequence
aaagaatcagttgttagtaatttac

SEQ ID NO: 221206 - DNA, 25 bp, Artificial sequence
  SiRNA target sequence
aagaatcagttgttagtaatttacc

SEQ ID NO: 221207 - DNA, 25 bp, Artificial sequence
  SiRNA target sequence
agaatcagttgttagtaatttaccc

SEQ ID NO: 221208 - DNA, 25 bp, Artificial sequence
  SiRNA target sequence
gaatcagttgttagtaatttaccca

SEQ ID NO: 221209 - DNA, 25 bp, Artificial sequence
  SiRNA target sequence
aatcagttgttagtaatttacccat

SEQ ID NO: 221210 - DNA, 25 bp, Artificial sequence
  SiRNA target sequence
atcagttgttagtaatttacccatc

SEQ ID NO: 221211 - DNA, 25 bp, Artificial sequence
  SiRNA target sequence
tcagttgttagtaatttacccatcg

SEQ ID NO: 221212 - DNA, 25 bp, Artificial sequence
  SiRNA target sequence
cagttgttagtaatttacccatcga

SEQ ID NO: 221213 - DNA, 25 bp, Artificial sequence
  SiRNA target sequence
agttgttagtaatttacccatcgat

SEQ ID NO: 221214 - DNA, 25 bp, Artificial sequence
  SiRNA target sequence
gttgttagtaatttacccatcgatg

SEQ ID NO: 221215 - DNA, 25 bp, Artificial sequence
  SiRNA target sequence
ttgttagtaatttacccatcgatgt

SEQ ID NO: 221216 - DNA, 25 bp, Artificial sequence
  SiRNA target sequence
tgttagtaatttacccatcgatgtt

SEQ ID NO: 221217 - DNA, 25 bp, Artificial sequence
  SiRNA target sequence
gttagtaatttacccatcgatgttg

SEQ ID NO: 221218 - DNA, 25 bp, Artificial sequence
  SiRNA target sequence
ttagtaatttacccatcgatgttga

SEQ ID NO: 221219 - DNA, 25 bp, Artificial sequence
  SiRNA target sequence
tagtaatttacccatcgatgttgat

SEQ ID NO: 221220 - DNA, 25 bp, Artificial sequence
  SiRNA target sequence
agtaatttacccatcgatgttgatt

SEQ ID NO: 221221 - DNA, 25 bp, Artificial sequence
  SiRNA target sequence
gtaatttacccatcgatgttgattt

SEQ ID NO: 221222 - DNA, 25 bp, Artificial sequence
  SiRNA target sequence
taatttacccatcgatgttgatttg

SEQ ID NO: 221223 - DNA, 25 bp, Artificial sequence
  SiRNA target sequence
aatttacccatcgatgttgatttgt

SEQ ID NO: 221224 - DNA, 25 bp, Artificial sequence
  SiRNA target sequence
atttacccatcgatgttgatttgtt

SEQ ID NO: 221225 - DNA, 25 bp, Artificial sequence
  SiRNA target sequence
tttacccatcgatgttgatttgttt

SEQ ID NO: 221226 - DNA, 25 bp, Artificial sequence
  SiRNA target sequence
ttacccatcgatgttgatttgtttg

SEQ ID NO: 221227 - DNA, 25 bp, Artificial sequence
  SiRNA target sequence
tacccatcgatgttgatttgtttgc

SEQ ID NO: 221228 - DNA, 25 bp, Artificial sequence
  SiRNA target sequence
acccatcgatgttgatttgtttgca

SEQ ID NO: 221229 - DNA, 25 bp, Artificial sequence
  SiRNA target sequence
cccatcgatgttgatttgtttgcat

SEQ ID NO: 221230 - DNA, 25 bp, Artificial sequence
  SiRNA target sequence
ccatcgatgttgatttgtttgcatc

SEQ ID NO: 221231 - DNA, 25 bp, Artificial sequence
  SiRNA target sequence
catcgatgttgatttgtttgcatca

SEQ ID NO: 221232 - DNA, 25 bp, Artificial sequence
  SiRNA target sequence
atcgatgttgatttgtttgcatcaa

SEQ ID NO: 221233 - DNA, 25 bp, Artificial sequence
  SiRNA target sequence
tcgatgttgatttgtttgcatcaaa

SEQ ID NO: 221234 - DNA, 25 bp, Artificial sequence
  SiRNA target sequence
cgatgttgatttgtttgcatcaaag

SEQ ID NO: 221235 - DNA, 25 bp, Artificial sequence
  SiRNA target sequence
gatgttgatttgtttgcatcaaagt

SEQ ID NO: 221236 - DNA, 25 bp, Artificial sequence
  SiRNA target sequence
atgttgatttgtttgcatcaaagtt

SEQ ID NO: 221237 - DNA, 25 bp, Artificial sequence
  SiRNA target sequence
tgttgatttgtttgcatcaaagttg

SEQ ID NO: 221238 - DNA, 25 bp, Artificial sequence
  SiRNA target sequence
gttgatttgtttgcatcaaagttgt

SEQ ID NO: 221239 - DNA, 25 bp, Artificial sequence
  SiRNA target sequence
ttgatttgtttgcatcaaagttgtt

SEQ ID NO: 221240 - DNA, 25 bp, Artificial sequence
  SiRNA target sequence
tgatttgtttgcatcaaagttgtta

SEQ ID NO: 221241 - DNA, 25 bp, Artificial sequence
  SiRNA target sequence
gatttgtttgcatcaaagttgttag

SEQ ID NO: 221242 - DNA, 25 bp, Artificial sequence
  SiRNA target sequence
atttgtttgcatcaaagttgttaga

SEQ ID NO: 221243 - DNA, 25 bp, Artificial sequence
  SiRNA target sequence
tttgtttgcatcaaagttgttagat

SEQ ID NO: 221244 - DNA, 25 bp, Artificial sequence
  SiRNA target sequence
ttgtttgcatcaaagttgttagata

SEQ ID NO: 221245 - DNA, 25 bp, Artificial sequence
  SiRNA target sequence
tgtttgcatcaaagttgttagataa

SEQ ID NO: 221246 - DNA, 25 bp, Artificial sequence
  SiRNA target sequence
gtttgcatcaaagttgttagataat

SEQ ID NO: 221247 - DNA, 25 bp, Artificial sequence
  SiRNA target sequence
tttgcatcaaagttgttagataata

SEQ ID NO: 221248 - DNA, 25 bp, Artificial sequence
  SiRNA target sequence
ttgcatcaaagttgttagataataa

SEQ ID NO: 221249 - DNA, 25 bp, Artificial sequence
  SiRNA target sequence
tgcatcaaagttgttagataataaa

SEQ ID NO: 221250 - DNA, 25 bp, Artificial sequence
  SiRNA target sequence
gcatcaaagttgttagataataaaa

SEQ ID NO: 221251 - DNA, 25 bp, Artificial sequence
  SiRNA target sequence
catcaaagttgttagataataaaaa

SEQ ID NO: 221252 - DNA, 25 bp, Artificial sequence
  SiRNA target sequence
atcaaagttgttagataataaaaaa

SEQ ID NO: 221253 - DNA, 25 bp, Artificial sequence
  SiRNA target sequence
tcaaagttgttagataataaaaaag

SEQ ID NO: 221254 - DNA, 25 bp, Artificial sequence
  SiRNA target sequence
caaagttgttagataataaaaaaga

SEQ ID NO: 221255 - DNA, 25 bp, Artificial sequence
  SiRNA target sequence
aaagttgttagataataaaaaagaa

SEQ ID NO: 221256 - DNA, 25 bp, Artificial sequence
  SiRNA target sequence
aagttgttagataataaaaaagaag

SEQ ID NO: 221257 - DNA, 25 bp, Artificial sequence
  SiRNA target sequence
agttgttagataataaaaaagaaga

SEQ ID NO: 221258 - DNA, 25 bp, Artificial sequence
  SiRNA target sequence
gttgttagataataaaaaagaagag

SEQ ID NO: 221259 - DNA, 25 bp, Artificial sequence
  SiRNA target sequence
ttgttagataataaaaaagaagagg

SEQ ID NO: 221260 - DNA, 25 bp, Artificial sequence
  SiRNA target sequence
tgttagataataaaaaagaagagga

SEQ ID NO: 221261 - DNA, 25 bp, Artificial sequence
  SiRNA target sequence
gttagataataaaaaagaagaggaa

SEQ ID NO: 221262 - DNA, 25 bp, Artificial sequence
  SiRNA target sequence
ttagataataaaaaagaagaggaaa

SEQ ID NO: 221263 - DNA, 25 bp, Artificial sequence
  SiRNA target sequence
tagataataaaaaagaagaggaaat

SEQ ID NO: 221264 - DNA, 25 bp, Artificial sequence
  SiRNA target sequence
agataataaaaaagaagaggaaatt

SEQ ID NO: 221265 - DNA, 25 bp, Artificial sequence
  SiRNA target sequence
gataataaaaaagaagaggaaattg

SEQ ID NO: 221266 - DNA, 25 bp, Artificial sequence
  SiRNA target sequence
ataataaaaaagaagaggaaattga

SEQ ID NO: 221267 - DNA, 25 bp, Artificial sequence
  SiRNA target sequence
taataaaaaagaagaggaaattgat

SEQ ID NO: 221268 - DNA, 25 bp, Artificial sequence
  SiRNA target sequence
aataaaaaagaagaggaaattgatg

SEQ ID NO: 221269 - DNA, 25 bp, Artificial sequence
  SiRNA target sequence
ataaaaaagaagaggaaattgatgt

SEQ ID NO: 221270 - DNA, 25 bp, Artificial sequence
  SiRNA target sequence
taaaaaagaagaggaaattgatgtg

SEQ ID NO: 221271 - DNA, 25 bp, Artificial sequence
  SiRNA target sequence
aaaaaagaagaggaaattgatgtgt

SEQ ID NO: 221272 - DNA, 25 bp, Artificial sequence
  SiRNA target sequence
aaaaagaagaggaaattgatgtgtc

SEQ ID NO: 221273 - DNA, 25 bp, Artificial sequence
  SiRNA target sequence
aaaagaagaggaaattgatgtgtca

SEQ ID NO: 221274 - DNA, 25 bp, Artificial sequence
  SiRNA target sequence
aaagaagaggaaattgatgtgtcag

SEQ ID NO: 221275 - DNA, 25 bp, Artificial sequence
  SiRNA target sequence
aagaagaggaaattgatgtgtcagt

SEQ ID NO: 221276 - DNA, 25 bp, Artificial sequence
  SiRNA target sequence
agaagaggaaattgatgtgtcagtg

SEQ ID NO: 221277 - DNA, 25 bp, Artificial sequence
  SiRNA target sequence
gaagaggaaattgatgtgtcagtgc

SEQ ID NO: 221278 - DNA, 25 bp, Artificial sequence
  SiRNA target sequence
aagaggaaattgatgtgtcagtgct

SEQ ID NO: 221279 - DNA, 25 bp, Artificial sequence
  SiRNA target sequence
agaggaaattgatgtgtcagtgctc

SEQ ID NO: 221280 - DNA, 25 bp, Artificial sequence
  SiRNA target sequence
gaggaaattgatgtgtcagtgctcg

SEQ ID NO: 221281 - DNA, 25 bp, Artificial sequence
  SiRNA target sequence
aggaaattgatgtgtcagtgctcgt

SEQ ID NO: 221282 - DNA, 25 bp, Artificial sequence
  SiRNA target sequence
ggaaattgatgtgtcagtgctcgtt

SEQ ID NO: 221283 - DNA, 25 bp, Artificial sequence
  SiRNA target sequence
gaaattgatgtgtcagtgctcgtta

SEQ ID NO: 221284 - DNA, 25 bp, Artificial sequence
  SiRNA target sequence
aaattgatgtgtcagtgctcgttaa

SEQ ID NO: 221285 - DNA, 25 bp, Artificial sequence
  SiRNA target sequence
aattgatgtgtcagtgctcgttaat

SEQ ID NO: 221286 - DNA, 25 bp, Artificial sequence
  SiRNA target sequence
attgatgtgtcagtgctcgttaatt

SEQ ID NO: 221287 - DNA, 25 bp, Artificial sequence
  SiRNA target sequence
ttgatgtgtcagtgctcgttaatta

SEQ ID NO: 221288 - DNA, 25 bp, Artificial sequence
  SiRNA target sequence
tgatgtgtcagtgctcgttaattaa

SEQ ID NO: 221289 - DNA, 26 bp, Artificial sequence
  SiRNA target sequence
atgattgagaggggtattatggaaaa

SEQ ID NO: 221290 - DNA, 26 bp, Artificial sequence
  SiRNA target sequence
tgattgagaggggtattatggaaaaa

SEQ ID NO: 221291 - DNA, 26 bp, Artificial sequence
  SiRNA target sequence
gattgagaggggtattatggaaaaaa

SEQ ID NO: 221292 - DNA, 26 bp, Artificial sequence
  SiRNA target sequence
attgagaggggtattatggaaaaaat

SEQ ID NO: 221293 - DNA, 26 bp, Artificial sequence
  SiRNA target sequence
ttgagaggggtattatggaaaaaata

SEQ ID NO: 221294 - DNA, 26 bp, Artificial sequence
  SiRNA target sequence
tgagaggggtattatggaaaaaataa

SEQ ID NO: 221295 - DNA, 26 bp, Artificial sequence
  SiRNA target sequence
gagaggggtattatggaaaaaataaa

SEQ ID NO: 221296 - DNA, 26 bp, Artificial sequence
  SiRNA target sequence
agaggggtattatggaaaaaataaaa

SEQ ID NO: 221297 - DNA, 26 bp, Artificial sequence
  SiRNA target sequence
gaggggtattatggaaaaaataaaaa

SEQ ID NO: 221298 - DNA, 26 bp, Artificial sequence
  SiRNA target sequence
aggggtattatggaaaaaataaaaaa

SEQ ID NO: 221299 - DNA, 26 bp, Artificial sequence
  SiRNA target sequence
ggggtattatggaaaaaataaaaaat

SEQ ID NO: 221300 - DNA, 26 bp, Artificial sequence
  SiRNA target sequence
gggtattatggaaaaaataaaaaatt

SEQ ID NO: 221301 - DNA, 26 bp, Artificial sequence
  SiRNA target sequence
ggtattatggaaaaaataaaaaattt

SEQ ID NO: 221302 - DNA, 26 bp, Artificial sequence
  SiRNA target sequence
gtattatggaaaaaataaaaaattta

SEQ ID NO: 221303 - DNA, 26 bp, Artificial sequence
  SiRNA target sequence
tattatggaaaaaataaaaaatttat

SEQ ID NO: 221304 - DNA, 26 bp, Artificial sequence
  SiRNA target sequence
attatggaaaaaataaaaaatttatt

SEQ ID NO: 221305 - DNA, 26 bp, Artificial sequence
  SiRNA target sequence
ttatggaaaaaataaaaaatttatta

SEQ ID NO: 221306 - DNA, 26 bp, Artificial sequence
  SiRNA target sequence
tatggaaaaaataaaaaatttattaa

SEQ ID NO: 221307 - DNA, 26 bp, Artificial sequence
  SiRNA target sequence
atggaaaaaataaaaaatttattaac

SEQ ID NO: 221308 - DNA, 26 bp, Artificial sequence
  SiRNA target sequence
tggaaaaaataaaaaatttattaaca

SEQ ID NO: 221309 - DNA, 26 bp, Artificial sequence
  SiRNA target sequence
ggaaaaaataaaaaatttattaacag

SEQ ID NO: 221310 - DNA, 26 bp, Artificial sequence
  SiRNA target sequence
gaaaaaataaaaaatttattaacaga

SEQ ID NO: 221311 - DNA, 26 bp, Artificial sequence
  SiRNA target sequence
aaaaaataaaaaatttattaacagag

SEQ ID NO: 221312 - DNA, 26 bp, Artificial sequence
  SiRNA target sequence
aaaaataaaaaatttattaacagagg

SEQ ID NO: 221313 - DNA, 26 bp, Artificial sequence
  SiRNA target sequence
aaaataaaaaatttattaacagagga

SEQ ID NO: 221314 - DNA, 26 bp, Artificial sequence
  SiRNA target sequence
aaataaaaaatttattaacagaggat

SEQ ID NO: 221315 - DNA, 26 bp, Artificial sequence
  SiRNA target sequence
aataaaaaatttattaacagaggatg

SEQ ID NO: 221316 - DNA, 26 bp, Artificial sequence
  SiRNA target sequence
ataaaaaatttattaacagaggatga

SEQ ID NO: 221317 - DNA, 26 bp, Artificial sequence
  SiRNA target sequence
taaaaaatttattaacagaggatgaa

SEQ ID NO: 221318 - DNA, 26 bp, Artificial sequence
  SiRNA target sequence
aaaaaatttattaacagaggatgaag

SEQ ID NO: 221319 - DNA, 26 bp, Artificial sequence
  SiRNA target sequence
aaaaatttattaacagaggatgaagt

SEQ ID NO: 221320 - DNA, 26 bp, Artificial sequence
  SiRNA target sequence
aaaatttattaacagaggatgaagta

SEQ ID NO: 221321 - DNA, 26 bp, Artificial sequence
  SiRNA target sequence
aaatttattaacagaggatgaagtag

SEQ ID NO: 221322 - DNA, 26 bp, Artificial sequence
  SiRNA target sequence
aatttattaacagaggatgaagtaga

SEQ ID NO: 221323 - DNA, 26 bp, Artificial sequence
  SiRNA target sequence
atttattaacagaggatgaagtagaa

SEQ ID NO: 221324 - DNA, 26 bp, Artificial sequence
  SiRNA target sequence
tttattaacagaggatgaagtagaag

SEQ ID NO: 221325 - DNA, 26 bp, Artificial sequence
  SiRNA target sequence
ttattaacagaggatgaagtagaagc

SEQ ID NO: 221326 - DNA, 26 bp, Artificial sequence
  SiRNA target sequence
tattaacagaggatgaagtagaagca

SEQ ID NO: 221327 - DNA, 26 bp, Artificial sequence
  SiRNA target sequence
attaacagaggatgaagtagaagcag

SEQ ID NO: 221328 - DNA, 26 bp, Artificial sequence
  SiRNA target sequence
ttaacagaggatgaagtagaagcaga

SEQ ID NO: 221329 - DNA, 26 bp, Artificial sequence
  SiRNA target sequence
taacagaggatgaagtagaagcagaa

SEQ ID NO: 221330 - DNA, 26 bp, Artificial sequence
  SiRNA target sequence
aacagaggatgaagtagaagcagaag

SEQ ID NO: 221331 - DNA, 26 bp, Artificial sequence
  SiRNA target sequence
acagaggatgaagtagaagcagaagc

SEQ ID NO: 221332 - DNA, 26 bp, Artificial sequence
  SiRNA target sequence
cagaggatgaagtagaagcagaagca

SEQ ID NO: 221333 - DNA, 26 bp, Artificial sequence
  SiRNA target sequence
agaggatgaagtagaagcagaagcaa

SEQ ID NO: 221334 - DNA, 26 bp, Artificial sequence
  SiRNA target sequence
gaggatgaagtagaagcagaagcaaa

SEQ ID NO: 221335 - DNA, 26 bp, Artificial sequence
  SiRNA target sequence
aggatgaagtagaagcagaagcaaat

SEQ ID NO: 221336 - DNA, 26 bp, Artificial sequence
  SiRNA target sequence
ggatgaagtagaagcagaagcaaatt

SEQ ID NO: 221337 - DNA, 26 bp, Artificial sequence
  SiRNA target sequence
gatgaagtagaagcagaagcaaattc

SEQ ID NO: 221338 - DNA, 26 bp, Artificial sequence
  SiRNA target sequence
atgaagtagaagcagaagcaaattct

SEQ ID NO: 221339 - DNA, 26 bp, Artificial sequence
  SiRNA target sequence
tgaagtagaagcagaagcaaattctg

SEQ ID NO: 221340 - DNA, 26 bp, Artificial sequence
  SiRNA target sequence
gaagtagaagcagaagcaaattctgg

SEQ ID NO: 221341 - DNA, 26 bp, Artificial sequence
  SiRNA target sequence
aagtagaagcagaagcaaattctgga

SEQ ID NO: 221342 - DNA, 26 bp, Artificial sequence
  SiRNA target sequence
agtagaagcagaagcaaattctggaa

SEQ ID NO: 221343 - DNA, 26 bp, Artificial sequence
  SiRNA target sequence
gtagaagcagaagcaaattctggaag

SEQ ID NO: 221344 - DNA, 26 bp, Artificial sequence
  SiRNA target sequence
tagaagcagaagcaaattctggaagg

SEQ ID NO: 221345 - DNA, 26 bp, Artificial sequence
  SiRNA target sequence
agaagcagaagcaaattctggaaggg

SEQ ID NO: 221346 - DNA, 26 bp, Artificial sequence
  SiRNA target sequence
gaagcagaagcaaattctggaagggg

SEQ ID NO: 221347 - DNA, 26 bp, Artificial sequence
  SiRNA target sequence
aagcagaagcaaattctggaaggggc

SEQ ID NO: 221348 - DNA, 26 bp, Artificial sequence
  SiRNA target sequence
agcagaagcaaattctggaaggggca

SEQ ID NO: 221349 - DNA, 26 bp, Artificial sequence
  SiRNA target sequence
gcagaagcaaattctggaaggggcat

SEQ ID NO: 221350 - DNA, 26 bp, Artificial sequence
  SiRNA target sequence
cagaagcaaattctggaaggggcatt

SEQ ID NO: 221351 - DNA, 26 bp, Artificial sequence
  SiRNA target sequence
agaagcaaattctggaaggggcattt

SEQ ID NO: 221352 - DNA, 26 bp, Artificial sequence
  SiRNA target sequence
gaagcaaattctggaaggggcatttt

SEQ ID NO: 221353 - DNA, 26 bp, Artificial sequence
  SiRNA target sequence
aagcaaattctggaaggggcatttta

SEQ ID NO: 221354 - DNA, 26 bp, Artificial sequence
  SiRNA target sequence
agcaaattctggaaggggcattttat

SEQ ID NO: 221355 - DNA, 26 bp, Artificial sequence
  SiRNA target sequence
gcaaattctggaaggggcattttatc

SEQ ID NO: 221356 - DNA, 26 bp, Artificial sequence
  SiRNA target sequence
caaattctggaaggggcattttatca

SEQ ID NO: 221357 - DNA, 26 bp, Artificial sequence
  SiRNA target sequence
aaattctggaaggggcattttatcaa

SEQ ID NO: 221358 - DNA, 26 bp, Artificial sequence
  SiRNA target sequence
aattctggaaggggcattttatcaat

SEQ ID NO: 221359 - DNA, 26 bp, Artificial sequence
  SiRNA target sequence
attctggaaggggcattttatcaata

SEQ ID NO: 221360 - DNA, 26 bp, Artificial sequence
  SiRNA target sequence
ttctggaaggggcattttatcaatat

SEQ ID NO: 221361 - DNA, 26 bp, Artificial sequence
  SiRNA target sequence
tctggaaggggcattttatcaatatt

SEQ ID NO: 221362 - DNA, 26 bp, Artificial sequence
  SiRNA target sequence
ctggaaggggcattttatcaatattt

SEQ ID NO: 221363 - DNA, 26 bp, Artificial sequence
  SiRNA target sequence
tggaaggggcattttatcaatattta

SEQ ID NO: 221364 - DNA, 26 bp, Artificial sequence
  SiRNA target sequence
ggaaggggcattttatcaatatttag

SEQ ID NO: 221365 - DNA, 26 bp, Artificial sequence
  SiRNA target sequence
gaaggggcattttatcaatatttaga

SEQ ID NO: 221366 - DNA, 26 bp, Artificial sequence
  SiRNA target sequence
aaggggcattttatcaatatttagaa

SEQ ID NO: 221367 - DNA, 26 bp, Artificial sequence
  SiRNA target sequence
aggggcattttatcaatatttagaat

SEQ ID NO: 221368 - DNA, 26 bp, Artificial sequence
  SiRNA target sequence
ggggcattttatcaatatttagaatt

SEQ ID NO: 221369 - DNA, 26 bp, Artificial sequence
  SiRNA target sequence
gggcattttatcaatatttagaattg

SEQ ID NO: 221370 - DNA, 26 bp, Artificial sequence
  SiRNA target sequence
ggcattttatcaatatttagaattgc

SEQ ID NO: 221371 - DNA, 26 bp, Artificial sequence
  SiRNA target sequence
gcattttatcaatatttagaattgct

SEQ ID NO: 221372 - DNA, 26 bp, Artificial sequence
  SiRNA target sequence
cattttatcaatatttagaattgcta

SEQ ID NO: 221373 - DNA, 26 bp, Artificial sequence
  SiRNA target sequence
attttatcaatatttagaattgctaa

SEQ ID NO: 221374 - DNA, 26 bp, Artificial sequence
  SiRNA target sequence
ttttatcaatatttagaattgctaag

SEQ ID NO: 221375 - DNA, 26 bp, Artificial sequence
  SiRNA target sequence
tttatcaatatttagaattgctaagg

SEQ ID NO: 221376 - DNA, 26 bp, Artificial sequence
  SiRNA target sequence
ttatcaatatttagaattgctaaggt

SEQ ID NO: 221377 - DNA, 26 bp, Artificial sequence
  SiRNA target sequence
tatcaatatttagaattgctaaggta

SEQ ID NO: 221378 - DNA, 26 bp, Artificial sequence
  SiRNA target sequence
atcaatatttagaattgctaaggtag

SEQ ID NO: 221379 - DNA, 26 bp, Artificial sequence
  SiRNA target sequence
tcaatatttagaattgctaaggtaga

SEQ ID NO: 221380 - DNA, 26 bp, Artificial sequence
  SiRNA target sequence
caatatttagaattgctaaggtagaa

SEQ ID NO: 221381 - DNA, 26 bp, Artificial sequence
  SiRNA target sequence
aatatttagaattgctaaggtagaaa

SEQ ID NO: 221382 - DNA, 26 bp, Artificial sequence
  SiRNA target sequence
atatttagaattgctaaggtagaaag

SEQ ID NO: 221383 - DNA, 26 bp, Artificial sequence
  SiRNA target sequence
tatttagaattgctaaggtagaaaga

SEQ ID NO: 221384 - DNA, 26 bp, Artificial sequence
  SiRNA target sequence
atttagaattgctaaggtagaaagaa

SEQ ID NO: 221385 - DNA, 26 bp, Artificial sequence
  SiRNA target sequence
tttagaattgctaaggtagaaagaag

SEQ ID NO: 221386 - DNA, 26 bp, Artificial sequence
  SiRNA target sequence
ttagaattgctaaggtagaaagaaga

SEQ ID NO: 221387 - DNA, 26 bp, Artificial sequence
  SiRNA target sequence
tagaattgctaaggtagaaagaagaa

SEQ ID NO: 221388 - DNA, 26 bp, Artificial sequence
  SiRNA target sequence
agaattgctaaggtagaaagaagaat

SEQ ID NO: 221389 - DNA, 26 bp, Artificial sequence
  SiRNA target sequence
gaattgctaaggtagaaagaagaatg

SEQ ID NO: 221390 - DNA, 26 bp, Artificial sequence
  SiRNA target sequence
aattgctaaggtagaaagaagaatgt

SEQ ID NO: 221391 - DNA, 26 bp, Artificial sequence
  SiRNA target sequence
attgctaaggtagaaagaagaatgtt

SEQ ID NO: 221392 - DNA, 26 bp, Artificial sequence
  SiRNA target sequence
ttgctaaggtagaaagaagaatgttt

SEQ ID NO: 221393 - DNA, 26 bp, Artificial sequence
  SiRNA target sequence
tgctaaggtagaaagaagaatgtttt

SEQ ID NO: 221394 - DNA, 26 bp, Artificial sequence
  SiRNA target sequence
gctaaggtagaaagaagaatgttttg

SEQ ID NO: 221395 - DNA, 26 bp, Artificial sequence
  SiRNA target sequence
ctaaggtagaaagaagaatgttttgg

SEQ ID NO: 221396 - DNA, 26 bp, Artificial sequence
  SiRNA target sequence
taaggtagaaagaagaatgttttggc

SEQ ID NO: 221397 - DNA, 26 bp, Artificial sequence
  SiRNA target sequence
aaggtagaaagaagaatgttttggct

SEQ ID NO: 221398 - DNA, 26 bp, Artificial sequence
  SiRNA target sequence
aggtagaaagaagaatgttttggctt

SEQ ID NO: 221399 - DNA, 26 bp, Artificial sequence
  SiRNA target sequence
ggtagaaagaagaatgttttggctta

SEQ ID NO: 221400 - DNA, 26 bp, Artificial sequence
  SiRNA target sequence
gtagaaagaagaatgttttggcttat

SEQ ID NO: 221401 - DNA, 26 bp, Artificial sequence
  SiRNA target sequence
tagaaagaagaatgttttggcttatg

SEQ ID NO: 221402 - DNA, 26 bp, Artificial sequence
  SiRNA target sequence
agaaagaagaatgttttggcttatga

SEQ ID NO: 221403 - DNA, 26 bp, Artificial sequence
  SiRNA target sequence
gaaagaagaatgttttggcttatgac

SEQ ID NO: 221404 - DNA, 26 bp, Artificial sequence
  SiRNA target sequence
aaagaagaatgttttggcttatgacg

SEQ ID NO: 221405 - DNA, 26 bp, Artificial sequence
  SiRNA target sequence
aagaagaatgttttggcttatgacgc

SEQ ID NO: 221406 - DNA, 26 bp, Artificial sequence
  SiRNA target sequence
agaagaatgttttggcttatgacgct

SEQ ID NO: 221407 - DNA, 26 bp, Artificial sequence
  SiRNA target sequence
gaagaatgttttggcttatgacgctt

SEQ ID NO: 221408 - DNA, 26 bp, Artificial sequence
  SiRNA target sequence
aagaatgttttggcttatgacgctta

SEQ ID NO: 221409 - DNA, 26 bp, Artificial sequence
  SiRNA target sequence
agaatgttttggcttatgacgcttat

SEQ ID NO: 221410 - DNA, 26 bp, Artificial sequence
  SiRNA target sequence
gaatgttttggcttatgacgcttatg

SEQ ID NO: 221411 - DNA, 26 bp, Artificial sequence
  SiRNA target sequence
aatgttttggcttatgacgcttatgt

SEQ ID NO: 221412 - DNA, 26 bp, Artificial sequence
  SiRNA target sequence
atgttttggcttatgacgcttatgtt

SEQ ID NO: 221413 - DNA, 26 bp, Artificial sequence
  SiRNA target sequence
tgttttggcttatgacgcttatgttt

SEQ ID NO: 221414 - DNA, 26 bp, Artificial sequence
  SiRNA target sequence
gttttggcttatgacgcttatgtttt

SEQ ID NO: 221415 - DNA, 26 bp, Artificial sequence
  SiRNA target sequence
ttttggcttatgacgcttatgttttc

SEQ ID NO: 221416 - DNA, 26 bp, Artificial sequence
  SiRNA target sequence
tttggcttatgacgcttatgttttcg

SEQ ID NO: 221417 - DNA, 26 bp, Artificial sequence
  SiRNA target sequence
ttggcttatgacgcttatgttttcgc

SEQ ID NO: 221418 - DNA, 26 bp, Artificial sequence
  SiRNA target sequence
tggcttatgacgcttatgttttcgct

SEQ ID NO: 221419 - DNA, 26 bp, Artificial sequence
  SiRNA target sequence
ggcttatgacgcttatgttttcgctt

SEQ ID NO: 221420 - DNA, 26 bp, Artificial sequence
  SiRNA target sequence
gcttatgacgcttatgttttcgctta

SEQ ID NO: 221421 - DNA, 26 bp, Artificial sequence
  SiRNA target sequence
cttatgacgcttatgttttcgcttat

SEQ ID NO: 221422 - DNA, 26 bp, Artificial sequence
  SiRNA target sequence
ttatgacgcttatgttttcgcttatt

SEQ ID NO: 221423 - DNA, 26 bp, Artificial sequence
  SiRNA target sequence
tatgacgcttatgttttcgcttattt

SEQ ID NO: 221424 - DNA, 26 bp, Artificial sequence
  SiRNA target sequence
atgacgcttatgttttcgcttatttc

SEQ ID NO: 221425 - DNA, 26 bp, Artificial sequence
  SiRNA target sequence
tgacgcttatgttttcgcttatttcc

SEQ ID NO: 221426 - DNA, 26 bp, Artificial sequence
  SiRNA target sequence
gacgcttatgttttcgcttatttcct

SEQ ID NO: 221427 - DNA, 26 bp, Artificial sequence
  SiRNA target sequence
acgcttatgttttcgcttatttcctt

SEQ ID NO: 221428 - DNA, 26 bp, Artificial sequence
  SiRNA target sequence
cgcttatgttttcgcttatttccttt

SEQ ID NO: 221429 - DNA, 26 bp, Artificial sequence
  SiRNA target sequence
gcttatgttttcgcttatttccttta

SEQ ID NO: 221430 - DNA, 26 bp, Artificial sequence
  SiRNA target sequence
cttatgttttcgcttatttcctttat

SEQ ID NO: 221431 - DNA, 26 bp, Artificial sequence
  SiRNA target sequence
ttatgttttcgcttatttcctttatt

SEQ ID NO: 221432 - DNA, 26 bp, Artificial sequence
  SiRNA target sequence
tatgttttcgcttatttcctttattt

SEQ ID NO: 221433 - DNA, 26 bp, Artificial sequence
  SiRNA target sequence
atgttttcgcttatttcctttattta

SEQ ID NO: 221434 - DNA, 26 bp, Artificial sequence
  SiRNA target sequence
tgttttcgcttatttcctttatttac

SEQ ID NO: 221435 - DNA, 26 bp, Artificial sequence
  SiRNA target sequence
gttttcgcttatttcctttatttact

SEQ ID NO: 221436 - DNA, 26 bp, Artificial sequence
  SiRNA target sequence
ttttcgcttatttcctttatttactc

SEQ ID NO: 221437 - DNA, 26 bp, Artificial sequence
  SiRNA target sequence
tttcgcttatttcctttatttactca

SEQ ID NO: 221438 - DNA, 26 bp, Artificial sequence
  SiRNA target sequence
ttcgcttatttcctttatttactcag

SEQ ID NO: 221439 - DNA, 26 bp, Artificial sequence
  SiRNA target sequence
tcgcttatttcctttatttactcagt

SEQ ID NO: 221440 - DNA, 26 bp, Artificial sequence
  SiRNA target sequence
cgcttatttcctttatttactcagta

SEQ ID NO: 221441 - DNA, 26 bp, Artificial sequence
  SiRNA target sequence
gcttatttcctttatttactcagtag

SEQ ID NO: 221442 - DNA, 26 bp, Artificial sequence
  SiRNA target sequence
cttatttcctttatttactcagtagg

SEQ ID NO: 221443 - DNA, 26 bp, Artificial sequence
  SiRNA target sequence
ttatttcctttatttactcagtagga

SEQ ID NO: 221444 - DNA, 26 bp, Artificial sequence
  SiRNA target sequence
tatttcctttatttactcagtaggac

SEQ ID NO: 221445 - DNA, 26 bp, Artificial sequence
  SiRNA target sequence
atttcctttatttactcagtaggacg

SEQ ID NO: 221446 - DNA, 26 bp, Artificial sequence
  SiRNA target sequence
tttcctttatttactcagtaggacga

SEQ ID NO: 221447 - DNA, 26 bp, Artificial sequence
  SiRNA target sequence
ttcctttatttactcagtaggacgag

SEQ ID NO: 221448 - DNA, 26 bp, Artificial sequence
  SiRNA target sequence
tcctttatttactcagtaggacgagt

SEQ ID NO: 221449 - DNA, 26 bp, Artificial sequence
  SiRNA target sequence
cctttatttactcagtaggacgagtg

SEQ ID NO: 221450 - DNA, 26 bp, Artificial sequence
  SiRNA target sequence
ctttatttactcagtaggacgagtgt

SEQ ID NO: 221451 - DNA, 26 bp, Artificial sequence
  SiRNA target sequence
tttatttactcagtaggacgagtgtt

SEQ ID NO: 221452 - DNA, 26 bp, Artificial sequence
  SiRNA target sequence
ttatttactcagtaggacgagtgtta

SEQ ID NO: 221453 - DNA, 26 bp, Artificial sequence
  SiRNA target sequence
tatttactcagtaggacgagtgttaa

SEQ ID NO: 221454 - DNA, 26 bp, Artificial sequence
  SiRNA target sequence
atttactcagtaggacgagtgttaaa

SEQ ID NO: 221455 - DNA, 26 bp, Artificial sequence
  SiRNA target sequence
tttactcagtaggacgagtgttaaaa

SEQ ID NO: 221456 - DNA, 26 bp, Artificial sequence
  SiRNA target sequence
ttactcagtaggacgagtgttaaaag

SEQ ID NO: 221457 - DNA, 26 bp, Artificial sequence
  SiRNA target sequence
tactcagtaggacgagtgttaaaaga

SEQ ID NO: 221458 - DNA, 26 bp, Artificial sequence
  SiRNA target sequence
actcagtaggacgagtgttaaaagat

SEQ ID NO: 221459 - DNA, 26 bp, Artificial sequence
  SiRNA target sequence
ctcagtaggacgagtgttaaaagatg

SEQ ID NO: 221460 - DNA, 26 bp, Artificial sequence
  SiRNA target sequence
tcagtaggacgagtgttaaaagatgc

SEQ ID NO: 221461 - DNA, 26 bp, Artificial sequence
  SiRNA target sequence
cagtaggacgagtgttaaaagatgca

SEQ ID NO: 221462 - DNA, 26 bp, Artificial sequence
  SiRNA target sequence
agtaggacgagtgttaaaagatgcag

SEQ ID NO: 221463 - DNA, 26 bp, Artificial sequence
  SiRNA target sequence
gtaggacgagtgttaaaagatgcagc

SEQ ID NO: 221464 - DNA, 26 bp, Artificial sequence
  SiRNA target sequence
taggacgagtgttaaaagatgcagca

SEQ ID NO: 221465 - DNA, 26 bp, Artificial sequence
  SiRNA target sequence
aggacgagtgttaaaagatgcagcag

SEQ ID NO: 221466 - DNA, 26 bp, Artificial sequence
  SiRNA target sequence
ggacgagtgttaaaagatgcagcagt

SEQ ID NO: 221467 - DNA, 26 bp, Artificial sequence
  SiRNA target sequence
gacgagtgttaaaagatgcagcagtt

SEQ ID NO: 221468 - DNA, 26 bp, Artificial sequence
  SiRNA target sequence
acgagtgttaaaagatgcagcagttc

SEQ ID NO: 221469 - DNA, 26 bp, Artificial sequence
  SiRNA target sequence
cgagtgttaaaagatgcagcagttct

SEQ ID NO: 221470 - DNA, 26 bp, Artificial sequence
  SiRNA target sequence
gagtgttaaaagatgcagcagttctt

SEQ ID NO: 221471 - DNA, 26 bp, Artificial sequence
  SiRNA target sequence
agtgttaaaagatgcagcagttctta

SEQ ID NO: 221472 - DNA, 26 bp, Artificial sequence
  SiRNA target sequence
gtgttaaaagatgcagcagttcttag

SEQ ID NO: 221473 - DNA, 26 bp, Artificial sequence
  SiRNA target sequence
tgttaaaagatgcagcagttcttagt

SEQ ID NO: 221474 - DNA, 26 bp, Artificial sequence
  SiRNA target sequence
gttaaaagatgcagcagttcttagta

SEQ ID NO: 221475 - DNA, 26 bp, Artificial sequence
  SiRNA target sequence
ttaaaagatgcagcagttcttagtag

SEQ ID NO: 221476 - DNA, 26 bp, Artificial sequence
  SiRNA target sequence
taaaagatgcagcagttcttagtaga

SEQ ID NO: 221477 - DNA, 26 bp, Artificial sequence
  SiRNA target sequence
aaaagatgcagcagttcttagtagac

SEQ ID NO: 221478 - DNA, 26 bp, Artificial sequence
  SiRNA target sequence
aaagatgcagcagttcttagtagaca

SEQ ID NO: 221479 - DNA, 26 bp, Artificial sequence
  SiRNA target sequence
aagatgcagcagttcttagtagacag

SEQ ID NO: 221480 - DNA, 26 bp, Artificial sequence
  SiRNA target sequence
agatgcagcagttcttagtagacaga

SEQ ID NO: 221481 - DNA, 26 bp, Artificial sequence
  SiRNA target sequence
gatgcagcagttcttagtagacagat

SEQ ID NO: 221482 - DNA, 26 bp, Artificial sequence
  SiRNA target sequence
atgcagcagttcttagtagacagatg

SEQ ID NO: 221483 - DNA, 26 bp, Artificial sequence
  SiRNA target sequence
tgcagcagttcttagtagacagatgc

SEQ ID NO: 221484 - DNA, 26 bp, Artificial sequence
  SiRNA target sequence
gcagcagttcttagtagacagatgcc

SEQ ID NO: 221485 - DNA, 26 bp, Artificial sequence
  SiRNA target sequence
cagcagttcttagtagacagatgcca

SEQ ID NO: 221486 - DNA, 26 bp, Artificial sequence
  SiRNA target sequence
agcagttcttagtagacagatgccac

SEQ ID NO: 221487 - DNA, 26 bp, Artificial sequence
  SiRNA target sequence
gcagttcttagtagacagatgccact

SEQ ID NO: 221488 - DNA, 26 bp, Artificial sequence
  SiRNA target sequence
cagttcttagtagacagatgccacta

SEQ ID NO: 221489 - DNA, 26 bp, Artificial sequence
  SiRNA target sequence
agttcttagtagacagatgccactat

SEQ ID NO: 221490 - DNA, 26 bp, Artificial sequence
  SiRNA target sequence
gttcttagtagacagatgccactatc

SEQ ID NO: 221491 - DNA, 26 bp, Artificial sequence
  SiRNA target sequence
ttcttagtagacagatgccactatcc

SEQ ID NO: 221492 - DNA, 26 bp, Artificial sequence
  SiRNA target sequence
tcttagtagacagatgccactatcca

SEQ ID NO: 221493 - DNA, 26 bp, Artificial sequence
  SiRNA target sequence
cttagtagacagatgccactatccat

SEQ ID NO: 221494 - DNA, 26 bp, Artificial sequence
  SiRNA target sequence
ttagtagacagatgccactatccatt

SEQ ID NO: 221495 - DNA, 26 bp, Artificial sequence
  SiRNA target sequence
tagtagacagatgccactatccatta

SEQ ID NO: 221496 - DNA, 26 bp, Artificial sequence
  SiRNA target sequence
agtagacagatgccactatccattaa

SEQ ID NO: 221497 - DNA, 26 bp, Artificial sequence
  SiRNA target sequence
gtagacagatgccactatccattaat

SEQ ID NO: 221498 - DNA, 26 bp, Artificial sequence
  SiRNA target sequence
tagacagatgccactatccattaatt

SEQ ID NO: 221499 - DNA, 26 bp, Artificial sequence
  SiRNA target sequence
agacagatgccactatccattaattg

SEQ ID NO: 221500 - DNA, 26 bp, Artificial sequence
  SiRNA target sequence
gacagatgccactatccattaattgt

SEQ ID NO: 221501 - DNA, 26 bp, Artificial sequence
  SiRNA target sequence
acagatgccactatccattaattgtc

SEQ ID NO: 221502 - DNA, 26 bp, Artificial sequence
  SiRNA target sequence
cagatgccactatccattaattgtct

SEQ ID NO: 221503 - DNA, 26 bp, Artificial sequence
  SiRNA target sequence
agatgccactatccattaattgtctt

SEQ ID NO: 221504 - DNA, 26 bp, Artificial sequence
  SiRNA target sequence
gatgccactatccattaattgtctta

SEQ ID NO: 221505 - DNA, 26 bp, Artificial sequence
  SiRNA target sequence
atgccactatccattaattgtcttaa

SEQ ID NO: 221506 - DNA, 26 bp, Artificial sequence
  SiRNA target sequence
tgccactatccattaattgtcttaaa

SEQ ID NO: 221507 - DNA, 26 bp, Artificial sequence
  SiRNA target sequence
gccactatccattaattgtcttaaaa

SEQ ID NO: 221508 - DNA, 26 bp, Artificial sequence
  SiRNA target sequence
ccactatccattaattgtcttaaaag

SEQ ID NO: 221509 - DNA, 26 bp, Artificial sequence
  SiRNA target sequence
cactatccattaattgtcttaaaagc

SEQ ID NO: 221510 - DNA, 26 bp, Artificial sequence
  SiRNA target sequence
actatccattaattgtcttaaaagct

SEQ ID NO: 221511 - DNA, 26 bp, Artificial sequence
  SiRNA target sequence
ctatccattaattgtcttaaaagctt

SEQ ID NO: 221512 - DNA, 26 bp, Artificial sequence
  SiRNA target sequence
tatccattaattgtcttaaaagcttt

SEQ ID NO: 221513 - DNA, 26 bp, Artificial sequence
  SiRNA target sequence
atccattaattgtcttaaaagctttg

SEQ ID NO: 221514 - DNA, 26 bp, Artificial sequence
  SiRNA target sequence
tccattaattgtcttaaaagctttgt

SEQ ID NO: 221515 - DNA, 26 bp, Artificial sequence
  SiRNA target sequence
ccattaattgtcttaaaagctttgta

SEQ ID NO: 221516 - DNA, 26 bp, Artificial sequence
  SiRNA target sequence
cattaattgtcttaaaagctttgtaa

SEQ ID NO: 221517 - DNA, 26 bp, Artificial sequence
  SiRNA target sequence
attaattgtcttaaaagctttgtaat

SEQ ID NO: 221518 - DNA, 26 bp, Artificial sequence
  SiRNA target sequence
ttaattgtcttaaaagctttgtaatt

SEQ ID NO: 221519 - DNA, 26 bp, Artificial sequence
  SiRNA target sequence
taattgtcttaaaagctttgtaattt

SEQ ID NO: 221520 - DNA, 26 bp, Artificial sequence
  SiRNA target sequence
aattgtcttaaaagctttgtaatttt

SEQ ID NO: 221521 - DNA, 26 bp, Artificial sequence
  SiRNA target sequence
attgtcttaaaagctttgtaatttta

SEQ ID NO: 221522 - DNA, 26 bp, Artificial sequence
  SiRNA target sequence
ttgtcttaaaagctttgtaattttac

SEQ ID NO: 221523 - DNA, 26 bp, Artificial sequence
  SiRNA target sequence
tgtcttaaaagctttgtaattttacc

SEQ ID NO: 221524 - DNA, 26 bp, Artificial sequence
  SiRNA target sequence
gtcttaaaagctttgtaattttacca

SEQ ID NO: 221525 - DNA, 26 bp, Artificial sequence
  SiRNA target sequence
tcttaaaagctttgtaattttaccag

SEQ ID NO: 221526 - DNA, 26 bp, Artificial sequence
  SiRNA target sequence
cttaaaagctttgtaattttaccagt

SEQ ID NO: 221527 - DNA, 26 bp, Artificial sequence
  SiRNA target sequence
ttaaaagctttgtaattttaccagtt

SEQ ID NO: 221528 - DNA, 26 bp, Artificial sequence
  SiRNA target sequence
taaaagctttgtaattttaccagtta

SEQ ID NO: 221529 - DNA, 26 bp, Artificial sequence
  SiRNA target sequence
aaaagctttgtaattttaccagttac

SEQ ID NO: 221530 - DNA, 26 bp, Artificial sequence
  SiRNA target sequence
aaagctttgtaattttaccagttact

SEQ ID NO: 221531 - DNA, 26 bp, Artificial sequence
  SiRNA target sequence
aagctttgtaattttaccagttactc

SEQ ID NO: 221532 - DNA, 26 bp, Artificial sequence
  SiRNA target sequence
agctttgtaattttaccagttactct

SEQ ID NO: 221533 - DNA, 26 bp, Artificial sequence
  SiRNA target sequence
gctttgtaattttaccagttactctt

SEQ ID NO: 221534 - DNA, 26 bp, Artificial sequence
  SiRNA target sequence
ctttgtaattttaccagttactcttg

SEQ ID NO: 221535 - DNA, 26 bp, Artificial sequence
  SiRNA target sequence
tttgtaattttaccagttactcttgt

SEQ ID NO: 221536 - DNA, 26 bp, Artificial sequence
  SiRNA target sequence
ttgtaattttaccagttactcttgtt

SEQ ID NO: 221537 - DNA, 26 bp, Artificial sequence
  SiRNA target sequence
tgtaattttaccagttactcttgttt

SEQ ID NO: 221538 - DNA, 26 bp, Artificial sequence
  SiRNA target sequence
gtaattttaccagttactcttgtttg

SEQ ID NO: 221539 - DNA, 26 bp, Artificial sequence
  SiRNA target sequence
taattttaccagttactcttgtttgt

SEQ ID NO: 221540 - DNA, 26 bp, Artificial sequence
  SiRNA target sequence
aattttaccagttactcttgtttgtg

SEQ ID NO: 221541 - DNA, 26 bp, Artificial sequence
  SiRNA target sequence
attttaccagttactcttgtttgtgt

SEQ ID NO: 221542 - DNA, 26 bp, Artificial sequence
  SiRNA target sequence
ttttaccagttactcttgtttgtgta

SEQ ID NO: 221543 - DNA, 26 bp, Artificial sequence
  SiRNA target sequence
tttaccagttactcttgtttgtgtag

SEQ ID NO: 221544 - DNA, 26 bp, Artificial sequence
  SiRNA target sequence
ttaccagttactcttgtttgtgtagg

SEQ ID NO: 221545 - DNA, 26 bp, Artificial sequence
  SiRNA target sequence
taccagttactcttgtttgtgtagga

SEQ ID NO: 221546 - DNA, 26 bp, Artificial sequence
  SiRNA target sequence
accagttactcttgtttgtgtaggat

SEQ ID NO: 221547 - DNA, 26 bp, Artificial sequence
  SiRNA target sequence
ccagttactcttgtttgtgtaggatt

SEQ ID NO: 221548 - DNA, 26 bp, Artificial sequence
  SiRNA target sequence
cagttactcttgtttgtgtaggatta

SEQ ID NO: 221549 - DNA, 26 bp, Artificial sequence
  SiRNA target sequence
agttactcttgtttgtgtaggattaa

SEQ ID NO: 221550 - DNA, 26 bp, Artificial sequence
  SiRNA target sequence
gttactcttgtttgtgtaggattaat

SEQ ID NO: 221551 - DNA, 26 bp, Artificial sequence
  SiRNA target sequence
ttactcttgtttgtgtaggattaatt

SEQ ID NO: 221552 - DNA, 26 bp, Artificial sequence
  SiRNA target sequence
tactcttgtttgtgtaggattaattc

SEQ ID NO: 221553 - DNA, 26 bp, Artificial sequence
  SiRNA target sequence
actcttgtttgtgtaggattaattca

SEQ ID NO: 221554 - DNA, 26 bp, Artificial sequence
  SiRNA target sequence
ctcttgtttgtgtaggattaattcag

SEQ ID NO: 221555 - DNA, 26 bp, Artificial sequence
  SiRNA target sequence
tcttgtttgtgtaggattaattcaga

SEQ ID NO: 221556 - DNA, 26 bp, Artificial sequence
  SiRNA target sequence
cttgtttgtgtaggattaattcagaa

SEQ ID NO: 221557 - DNA, 26 bp, Artificial sequence
  SiRNA target sequence
ttgtttgtgtaggattaattcagaag

SEQ ID NO: 221558 - DNA, 26 bp, Artificial sequence
  SiRNA target sequence
tgtttgtgtaggattaattcagaagt

SEQ ID NO: 221559 - DNA, 26 bp, Artificial sequence
  SiRNA target sequence
gtttgtgtaggattaattcagaagtc

SEQ ID NO: 221560 - DNA, 26 bp, Artificial sequence
  SiRNA target sequence
tttgtgtaggattaattcagaagtct

SEQ ID NO: 221561 - DNA, 26 bp, Artificial sequence
  SiRNA target sequence
ttgtgtaggattaattcagaagtcta

SEQ ID NO: 221562 - DNA, 26 bp, Artificial sequence
  SiRNA target sequence
tgtgtaggattaattcagaagtctac

SEQ ID NO: 221563 - DNA, 26 bp, Artificial sequence
  SiRNA target sequence
gtgtaggattaattcagaagtctaca

SEQ ID NO: 221564 - DNA, 26 bp, Artificial sequence
  SiRNA target sequence
tgtaggattaattcagaagtctacac

SEQ ID NO: 221565 - DNA, 26 bp, Artificial sequence
  SiRNA target sequence
gtaggattaattcagaagtctacact

SEQ ID NO: 221566 - DNA, 26 bp, Artificial sequence
  SiRNA target sequence
taggattaattcagaagtctacactc

SEQ ID NO: 221567 - DNA, 26 bp, Artificial sequence
  SiRNA target sequence
aggattaattcagaagtctacactct

SEQ ID NO: 221568 - DNA, 26 bp, Artificial sequence
  SiRNA target sequence
ggattaattcagaagtctacactctc

SEQ ID NO: 221569 - DNA, 26 bp, Artificial sequence
  SiRNA target sequence
gattaattcagaagtctacactctct

SEQ ID NO: 221570 - DNA, 26 bp, Artificial sequence
  SiRNA target sequence
attaattcagaagtctacactctctt

SEQ ID NO: 221571 - DNA, 26 bp, Artificial sequence
  SiRNA target sequence
ttaattcagaagtctacactctctta

SEQ ID NO: 221572 - DNA, 26 bp, Artificial sequence
  SiRNA target sequence
taattcagaagtctacactctcttat

SEQ ID NO: 221573 - DNA, 26 bp, Artificial sequence
  SiRNA target sequence
aattcagaagtctacactctcttatt

SEQ ID NO: 221574 - DNA, 26 bp, Artificial sequence
  SiRNA target sequence
attcagaagtctacactctcttattc

SEQ ID NO: 221575 - DNA, 26 bp, Artificial sequence
  SiRNA target sequence
ttcagaagtctacactctcttattct

SEQ ID NO: 221576 - DNA, 26 bp, Artificial sequence
  SiRNA target sequence
tcagaagtctacactctcttattctt

SEQ ID NO: 221577 - DNA, 26 bp, Artificial sequence
  SiRNA target sequence
cagaagtctacactctcttattcttt

SEQ ID NO: 221578 - DNA, 26 bp, Artificial sequence
  SiRNA target sequence
agaagtctacactctcttattctttt

SEQ ID NO: 221579 - DNA, 26 bp, Artificial sequence
  SiRNA target sequence
gaagtctacactctcttattctttta

SEQ ID NO: 221580 - DNA, 26 bp, Artificial sequence
  SiRNA target sequence
aagtctacactctcttattcttttac

SEQ ID NO: 221581 - DNA, 26 bp, Artificial sequence
  SiRNA target sequence
agtctacactctcttattcttttaca

SEQ ID NO: 221582 - DNA, 26 bp, Artificial sequence
  SiRNA target sequence
gtctacactctcttattcttttacaa

SEQ ID NO: 221583 - DNA, 26 bp, Artificial sequence
  SiRNA target sequence
tctacactctcttattcttttacaaa

SEQ ID NO: 221584 - DNA, 26 bp, Artificial sequence
  SiRNA target sequence
ctacactctcttattcttttacaaaa

SEQ ID NO: 221585 - DNA, 26 bp, Artificial sequence
  SiRNA target sequence
tacactctcttattcttttacaaaaa

SEQ ID NO: 221586 - DNA, 26 bp, Artificial sequence
  SiRNA target sequence
acactctcttattcttttacaaaaat

SEQ ID NO: 221587 - DNA, 26 bp, Artificial sequence
  SiRNA target sequence
cactctcttattcttttacaaaaata

SEQ ID NO: 221588 - DNA, 26 bp, Artificial sequence
  SiRNA target sequence
actctcttattcttttacaaaaatat

SEQ ID NO: 221589 - DNA, 26 bp, Artificial sequence
  SiRNA target sequence
ctctcttattcttttacaaaaatatt

SEQ ID NO: 221590 - DNA, 26 bp, Artificial sequence
  SiRNA target sequence
tctcttattcttttacaaaaatattt

SEQ ID NO: 221591 - DNA, 26 bp, Artificial sequence
  SiRNA target sequence
ctcttattcttttacaaaaatatttg

SEQ ID NO: 221592 - DNA, 26 bp, Artificial sequence
  SiRNA target sequence
tcttattcttttacaaaaatatttga

SEQ ID NO: 221593 - DNA, 26 bp, Artificial sequence
  SiRNA target sequence
cttattcttttacaaaaatatttgat

SEQ ID NO: 221594 - DNA, 26 bp, Artificial sequence
  SiRNA target sequence
ttattcttttacaaaaatatttgatg

SEQ ID NO: 221595 - DNA, 26 bp, Artificial sequence
  SiRNA target sequence
tattcttttacaaaaatatttgatgg

SEQ ID NO: 221596 - DNA, 26 bp, Artificial sequence
  SiRNA target sequence
attcttttacaaaaatatttgatggt

SEQ ID NO: 221597 - DNA, 26 bp, Artificial sequence
  SiRNA target sequence
ttcttttacaaaaatatttgatggtg

SEQ ID NO: 221598 - DNA, 26 bp, Artificial sequence
  SiRNA target sequence
tcttttacaaaaatatttgatggtgc

SEQ ID NO: 221599 - DNA, 26 bp, Artificial sequence
  SiRNA target sequence
cttttacaaaaatatttgatggtgca

SEQ ID NO: 221600 - DNA, 26 bp, Artificial sequence
  SiRNA target sequence
ttttacaaaaatatttgatggtgcat

SEQ ID NO: 221601 - DNA, 26 bp, Artificial sequence
  SiRNA target sequence
tttacaaaaatatttgatggtgcatt

SEQ ID NO: 221602 - DNA, 26 bp, Artificial sequence
  SiRNA target sequence
ttacaaaaatatttgatggtgcattg

SEQ ID NO: 221603 - DNA, 26 bp, Artificial sequence
  SiRNA target sequence
tacaaaaatatttgatggtgcattgt

SEQ ID NO: 221604 - DNA, 26 bp, Artificial sequence
  SiRNA target sequence
acaaaaatatttgatggtgcattgtt

SEQ ID NO: 221605 - DNA, 26 bp, Artificial sequence
  SiRNA target sequence
caaaaatatttgatggtgcattgtta

SEQ ID NO: 221606 - DNA, 26 bp, Artificial sequence
  SiRNA target sequence
aaaaatatttgatggtgcattgttaa

SEQ ID NO: 221607 - DNA, 26 bp, Artificial sequence
  SiRNA target sequence
aaaatatttgatggtgcattgttaat

SEQ ID NO: 221608 - DNA, 26 bp, Artificial sequence
  SiRNA target sequence
aaatatttgatggtgcattgttaata

SEQ ID NO: 221609 - DNA, 26 bp, Artificial sequence
  SiRNA target sequence
aatatttgatggtgcattgttaatat

SEQ ID NO: 221610 - DNA, 26 bp, Artificial sequence
  SiRNA target sequence
atatttgatggtgcattgttaatatt

SEQ ID NO: 221611 - DNA, 26 bp, Artificial sequence
  SiRNA target sequence
tatttgatggtgcattgttaatattt

SEQ ID NO: 221612 - DNA, 26 bp, Artificial sequence
  SiRNA target sequence
atttgatggtgcattgttaatatttg

SEQ ID NO: 221613 - DNA, 26 bp, Artificial sequence
  SiRNA target sequence
tttgatggtgcattgttaatatttgc

SEQ ID NO: 221614 - DNA, 26 bp, Artificial sequence
  SiRNA target sequence
ttgatggtgcattgttaatatttgct

SEQ ID NO: 221615 - DNA, 26 bp, Artificial sequence
  SiRNA target sequence
tgatggtgcattgttaatatttgctt

SEQ ID NO: 221616 - DNA, 26 bp, Artificial sequence
  SiRNA target sequence
gatggtgcattgttaatatttgcttt

SEQ ID NO: 221617 - DNA, 26 bp, Artificial sequence
  SiRNA target sequence
atggtgcattgttaatatttgctttt

SEQ ID NO: 221618 - DNA, 26 bp, Artificial sequence
  SiRNA target sequence
tggtgcattgttaatatttgcttttc

SEQ ID NO: 221619 - DNA, 26 bp, Artificial sequence
  SiRNA target sequence
ggtgcattgttaatatttgcttttct

SEQ ID NO: 221620 - DNA, 26 bp, Artificial sequence
  SiRNA target sequence
gtgcattgttaatatttgcttttctt

SEQ ID NO: 221621 - DNA, 26 bp, Artificial sequence
  SiRNA target sequence
tgcattgttaatatttgcttttcttt

SEQ ID NO: 221622 - DNA, 26 bp, Artificial sequence
  SiRNA target sequence
gcattgttaatatttgcttttcttta

SEQ ID NO: 221623 - DNA, 26 bp, Artificial sequence
  SiRNA target sequence
cattgttaatatttgcttttctttat

SEQ ID NO: 221624 - DNA, 26 bp, Artificial sequence
  SiRNA target sequence
attgttaatatttgcttttctttata

SEQ ID NO: 221625 - DNA, 26 bp, Artificial sequence
  SiRNA target sequence
ttgttaatatttgcttttctttatat

SEQ ID NO: 221626 - DNA, 26 bp, Artificial sequence
  SiRNA target sequence
tgttaatatttgcttttctttatatc

SEQ ID NO: 221627 - DNA, 26 bp, Artificial sequence
  SiRNA target sequence
gttaatatttgcttttctttatatca

SEQ ID NO: 221628 - DNA, 26 bp, Artificial sequence
  SiRNA target sequence
ttaatatttgcttttctttatatcat

SEQ ID NO: 221629 - DNA, 26 bp, Artificial sequence
  SiRNA target sequence
taatatttgcttttctttatatcatt

SEQ ID NO: 221630 - DNA, 26 bp, Artificial sequence
  SiRNA target sequence
aatatttgcttttctttatatcattc

SEQ ID NO: 221631 - DNA, 26 bp, Artificial sequence
  SiRNA target sequence
atatttgcttttctttatatcattct

SEQ ID NO: 221632 - DNA, 26 bp, Artificial sequence
  SiRNA target sequence
tatttgcttttctttatatcattctt

SEQ ID NO: 221633 - DNA, 26 bp, Artificial sequence
  SiRNA target sequence
atttgcttttctttatatcattcttg

SEQ ID NO: 221634 - DNA, 26 bp, Artificial sequence
  SiRNA target sequence
tttgcttttctttatatcattcttgg

SEQ ID NO: 221635 - DNA, 26 bp, Artificial sequence
  SiRNA target sequence
ttgcttttctttatatcattcttggt

SEQ ID NO: 221636 - DNA, 26 bp, Artificial sequence
  SiRNA target sequence
tgcttttctttatatcattcttggtc

SEQ ID NO: 221637 - DNA, 26 bp, Artificial sequence
  SiRNA target sequence
gcttttctttatatcattcttggtct

SEQ ID NO: 221638 - DNA, 26 bp, Artificial sequence
  SiRNA target sequence
cttttctttatatcattcttggtcta

SEQ ID NO: 221639 - DNA, 26 bp, Artificial sequence
  SiRNA target sequence
ttttctttatatcattcttggtctag

SEQ ID NO: 221640 - DNA, 26 bp, Artificial sequence
  SiRNA target sequence
tttctttatatcattcttggtctagt

SEQ ID NO: 221641 - DNA, 26 bp, Artificial sequence
  SiRNA target sequence
ttctttatatcattcttggtctagtt

SEQ ID NO: 221642 - DNA, 26 bp, Artificial sequence
  SiRNA target sequence
tctttatatcattcttggtctagttc

SEQ ID NO: 221643 - DNA, 26 bp, Artificial sequence
  SiRNA target sequence
ctttatatcattcttggtctagttct

SEQ ID NO: 221644 - DNA, 26 bp, Artificial sequence
  SiRNA target sequence
tttatatcattcttggtctagttctt

SEQ ID NO: 221645 - DNA, 26 bp, Artificial sequence
  SiRNA target sequence
ttatatcattcttggtctagttcttc

SEQ ID NO: 221646 - DNA, 26 bp, Artificial sequence
  SiRNA target sequence
tatatcattcttggtctagttcttct

SEQ ID NO: 221647 - DNA, 26 bp, Artificial sequence
  SiRNA target sequence
atatcattcttggtctagttcttctt

SEQ ID NO: 221648 - DNA, 26 bp, Artificial sequence
  SiRNA target sequence
tatcattcttggtctagttcttcttc

SEQ ID NO: 221649 - DNA, 26 bp, Artificial sequence
  SiRNA target sequence
atcattcttggtctagttcttcttcc

SEQ ID NO: 221650 - DNA, 26 bp, Artificial sequence
  SiRNA target sequence
tcattcttggtctagttcttcttcca

SEQ ID NO: 221651 - DNA, 26 bp, Artificial sequence
  SiRNA target sequence
cattcttggtctagttcttcttccat

SEQ ID NO: 221652 - DNA, 26 bp, Artificial sequence
  SiRNA target sequence
attcttggtctagttcttcttccata

SEQ ID NO: 221653 - DNA, 26 bp, Artificial sequence
  SiRNA target sequence
ttcttggtctagttcttcttccatat

SEQ ID NO: 221654 - DNA, 26 bp, Artificial sequence
  SiRNA target sequence
tcttggtctagttcttcttccatatt

SEQ ID NO: 221655 - DNA, 26 bp, Artificial sequence
  SiRNA target sequence
cttggtctagttcttcttccatattc

SEQ ID NO: 221656 - DNA, 26 bp, Artificial sequence
  SiRNA target sequence
ttggtctagttcttcttccatattct

SEQ ID NO: 221657 - DNA, 26 bp, Artificial sequence
  SiRNA target sequence
tggtctagttcttcttccatattctc

SEQ ID NO: 221658 - DNA, 26 bp, Artificial sequence
  SiRNA target sequence
ggtctagttcttcttccatattctca

SEQ ID NO: 221659 - DNA, 26 bp, Artificial sequence
  SiRNA target sequence
gtctagttcttcttccatattctcat

SEQ ID NO: 221660 - DNA, 26 bp, Artificial sequence
  SiRNA target sequence
tctagttcttcttccatattctcatc

SEQ ID NO: 221661 - DNA, 26 bp, Artificial sequence
  SiRNA target sequence
ctagttcttcttccatattctcatct

SEQ ID NO: 221662 - DNA, 26 bp, Artificial sequence
  SiRNA target sequence
tagttcttcttccatattctcatctt

SEQ ID NO: 221663 - DNA, 26 bp, Artificial sequence
  SiRNA target sequence
agttcttcttccatattctcatcttt

SEQ ID NO: 221664 - DNA, 26 bp, Artificial sequence
  SiRNA target sequence
gttcttcttccatattctcatctttt

SEQ ID NO: 221665 - DNA, 26 bp, Artificial sequence
  SiRNA target sequence
ttcttcttccatattctcatcttttc

SEQ ID NO: 221666 - DNA, 26 bp, Artificial sequence
  SiRNA target sequence
tcttcttccatattctcatcttttcc

SEQ ID NO: 221667 - DNA, 26 bp, Artificial sequence
  SiRNA target sequence
cttcttccatattctcatcttttcca

SEQ ID NO: 221668 - DNA, 26 bp, Artificial sequence
  SiRNA target sequence
ttcttccatattctcatcttttccag

SEQ ID NO: 221669 - DNA, 26 bp, Artificial sequence
  SiRNA target sequence
tcttccatattctcatcttttccagc

SEQ ID NO: 221670 - DNA, 26 bp, Artificial sequence
  SiRNA target sequence
cttccatattctcatcttttccagct

SEQ ID NO: 221671 - DNA, 26 bp, Artificial sequence
  SiRNA target sequence
ttccatattctcatcttttccagctt

SEQ ID NO: 221672 - DNA, 26 bp, Artificial sequence
  SiRNA target sequence
tccatattctcatcttttccagcttg

SEQ ID NO: 221673 - DNA, 26 bp, Artificial sequence
  SiRNA target sequence
ccatattctcatcttttccagcttga

SEQ ID NO: 221674 - DNA, 26 bp, Artificial sequence
  SiRNA target sequence
catattctcatcttttccagcttgat

SEQ ID NO: 221675 - DNA, 26 bp, Artificial sequence
  SiRNA target sequence
atattctcatcttttccagcttgata

SEQ ID NO: 221676 - DNA, 26 bp, Artificial sequence
  SiRNA target sequence
tattctcatcttttccagcttgatag

SEQ ID NO: 221677 - DNA, 26 bp, Artificial sequence
  SiRNA target sequence
attctcatcttttccagcttgatagt

SEQ ID NO: 221678 - DNA, 26 bp, Artificial sequence
  SiRNA target sequence
ttctcatcttttccagcttgatagtt

SEQ ID NO: 221679 - DNA, 26 bp, Artificial sequence
  SiRNA target sequence
tctcatcttttccagcttgatagtta

SEQ ID NO: 221680 - DNA, 26 bp, Artificial sequence
  SiRNA target sequence
ctcatcttttccagcttgatagttat

SEQ ID NO: 221681 - DNA, 26 bp, Artificial sequence
  SiRNA target sequence
tcatcttttccagcttgatagttatt

SEQ ID NO: 221682 - DNA, 26 bp, Artificial sequence
  SiRNA target sequence
catcttttccagcttgatagttattt

SEQ ID NO: 221683 - DNA, 26 bp, Artificial sequence
  SiRNA target sequence
atcttttccagcttgatagttatttt

SEQ ID NO: 221684 - DNA, 26 bp, Artificial sequence
  SiRNA target sequence
tcttttccagcttgatagttattttt

SEQ ID NO: 221685 - DNA, 26 bp, Artificial sequence
  SiRNA target sequence
cttttccagcttgatagttatttttt

SEQ ID NO: 221686 - DNA, 26 bp, Artificial sequence
  SiRNA target sequence
ttttccagcttgatagttattttttt

SEQ ID NO: 221687 - DNA, 26 bp, Artificial sequence
  SiRNA target sequence
tttccagcttgatagttattttttta

SEQ ID NO: 221688 - DNA, 26 bp, Artificial sequence
  SiRNA target sequence
ttccagcttgatagttatttttttag

SEQ ID NO: 221689 - DNA, 26 bp, Artificial sequence
  SiRNA target sequence
tccagcttgatagttatttttttaga

SEQ ID NO: 221690 - DNA, 26 bp, Artificial sequence
  SiRNA target sequence
ccagcttgatagttatttttttagag

SEQ ID NO: 221691 - DNA, 26 bp, Artificial sequence
  SiRNA target sequence
cagcttgatagttatttttttagaga

SEQ ID NO: 221692 - DNA, 26 bp, Artificial sequence
  SiRNA target sequence
agcttgatagttatttttttagagac

SEQ ID NO: 221693 - DNA, 26 bp, Artificial sequence
  SiRNA target sequence
gcttgatagttatttttttagagacc

SEQ ID NO: 221694 - DNA, 26 bp, Artificial sequence
  SiRNA target sequence
cttgatagttatttttttagagacct

SEQ ID NO: 221695 - DNA, 26 bp, Artificial sequence
  SiRNA target sequence
ttgatagttatttttttagagacctt

SEQ ID NO: 221696 - DNA, 26 bp, Artificial sequence
  SiRNA target sequence
tgatagttatttttttagagaccttt

SEQ ID NO: 221697 - DNA, 26 bp, Artificial sequence
  SiRNA target sequence
gatagttatttttttagagacctttt

SEQ ID NO: 221698 - DNA, 26 bp, Artificial sequence
  SiRNA target sequence
atagttatttttttagagaccttttt

SEQ ID NO: 221699 - DNA, 26 bp, Artificial sequence
  SiRNA target sequence
tagttatttttttagagaccttttta

SEQ ID NO: 221700 - DNA, 26 bp, Artificial sequence
  SiRNA target sequence
agttatttttttagagacctttttag

SEQ ID NO: 221701 - DNA, 26 bp, Artificial sequence
  SiRNA target sequence
gttatttttttagagacctttttagt

SEQ ID NO: 221702 - DNA, 26 bp, Artificial sequence
  SiRNA target sequence
ttatttttttagagacctttttagtg

SEQ ID NO: 221703 - DNA, 26 bp, Artificial sequence
  SiRNA target sequence
tatttttttagagacctttttagtga

SEQ ID NO: 221704 - DNA, 26 bp, Artificial sequence
  SiRNA target sequence
atttttttagagacctttttagtgat

SEQ ID NO: 221705 - DNA, 26 bp, Artificial sequence
  SiRNA target sequence
tttttttagagacctttttagtgatg

SEQ ID NO: 221706 - DNA, 26 bp, Artificial sequence
  SiRNA target sequence
ttttttagagacctttttagtgatgg

SEQ ID NO: 221707 - DNA, 26 bp, Artificial sequence
  SiRNA target sequence
tttttagagacctttttagtgatggg

SEQ ID NO: 221708 - DNA, 26 bp, Artificial sequence
  SiRNA target sequence
ttttagagacctttttagtgatggga

SEQ ID NO: 221709 - DNA, 26 bp, Artificial sequence
  SiRNA target sequence
tttagagacctttttagtgatgggaa

SEQ ID NO: 221710 - DNA, 26 bp, Artificial sequence
  SiRNA target sequence
ttagagacctttttagtgatgggaaa

SEQ ID NO: 221711 - DNA, 26 bp, Artificial sequence
  SiRNA target sequence
tagagacctttttagtgatgggaaat

SEQ ID NO: 221712 - DNA, 26 bp, Artificial sequence
  SiRNA target sequence
agagacctttttagtgatgggaaatg

SEQ ID NO: 221713 - DNA, 26 bp, Artificial sequence
  SiRNA target sequence
gagacctttttagtgatgggaaatgt

SEQ ID NO: 221714 - DNA, 26 bp, Artificial sequence
  SiRNA target sequence
agacctttttagtgatgggaaatgtg

SEQ ID NO: 221715 - DNA, 26 bp, Artificial sequence
  SiRNA target sequence
gacctttttagtgatgggaaatgtgt

SEQ ID NO: 221716 - DNA, 26 bp, Artificial sequence
  SiRNA target sequence
acctttttagtgatgggaaatgtgtt

SEQ ID NO: 221717 - DNA, 26 bp, Artificial sequence
  SiRNA target sequence
cctttttagtgatgggaaatgtgttg

SEQ ID NO: 221718 - DNA, 26 bp, Artificial sequence
  SiRNA target sequence
ctttttagtgatgggaaatgtgttgt

SEQ ID NO: 221719 - DNA, 26 bp, Artificial sequence
  SiRNA target sequence
tttttagtgatgggaaatgtgttgta

SEQ ID NO: 221720 - DNA, 26 bp, Artificial sequence
  SiRNA target sequence
ttttagtgatgggaaatgtgttgtaa

SEQ ID NO: 221721 - DNA, 26 bp, Artificial sequence
  SiRNA target sequence
tttagtgatgggaaatgtgttgtaag

SEQ ID NO: 221722 - DNA, 26 bp, Artificial sequence
  SiRNA target sequence
ttagtgatgggaaatgtgttgtaaga

SEQ ID NO: 221723 - DNA, 26 bp, Artificial sequence
  SiRNA target sequence
tagtgatgggaaatgtgttgtaagag

SEQ ID NO: 221724 - DNA, 26 bp, Artificial sequence
  SiRNA target sequence
agtgatgggaaatgtgttgtaagagg

SEQ ID NO: 221725 - DNA, 26 bp, Artificial sequence
  SiRNA target sequence
gtgatgggaaatgtgttgtaagaggc

SEQ ID NO: 221726 - DNA, 26 bp, Artificial sequence
  SiRNA target sequence
tgatgggaaatgtgttgtaagaggct

SEQ ID NO: 221727 - DNA, 26 bp, Artificial sequence
  SiRNA target sequence
gatgggaaatgtgttgtaagaggcta

SEQ ID NO: 221728 - DNA, 26 bp, Artificial sequence
  SiRNA target sequence
atgggaaatgtgttgtaagaggctat

SEQ ID NO: 221729 - DNA, 26 bp, Artificial sequence
  SiRNA target sequence
tgggaaatgtgttgtaagaggctatg

SEQ ID NO: 221730 - DNA, 26 bp, Artificial sequence
  SiRNA target sequence
gggaaatgtgttgtaagaggctatga

SEQ ID NO: 221731 - DNA, 26 bp, Artificial sequence
  SiRNA target sequence
ggaaatgtgttgtaagaggctatgat

SEQ ID NO: 221732 - DNA, 26 bp, Artificial sequence
  SiRNA target sequence
gaaatgtgttgtaagaggctatgatg

SEQ ID NO: 221733 - DNA, 26 bp, Artificial sequence
  SiRNA target sequence
aaatgtgttgtaagaggctatgatgc

SEQ ID NO: 221734 - DNA, 26 bp, Artificial sequence
  SiRNA target sequence
aatgtgttgtaagaggctatgatgct

SEQ ID NO: 221735 - DNA, 26 bp, Artificial sequence
  SiRNA target sequence
atgtgttgtaagaggctatgatgctt

SEQ ID NO: 221736 - DNA, 26 bp, Artificial sequence
  SiRNA target sequence
tgtgttgtaagaggctatgatgcttt

SEQ ID NO: 221737 - DNA, 26 bp, Artificial sequence
  SiRNA target sequence
gtgttgtaagaggctatgatgcttta

SEQ ID NO: 221738 - DNA, 26 bp, Artificial sequence
  SiRNA target sequence
tgttgtaagaggctatgatgctttat

SEQ ID NO: 221739 - DNA, 26 bp, Artificial sequence
  SiRNA target sequence
gttgtaagaggctatgatgctttatt

SEQ ID NO: 221740 - DNA, 26 bp, Artificial sequence
  SiRNA target sequence
ttgtaagaggctatgatgctttatta

SEQ ID NO: 221741 - DNA, 26 bp, Artificial sequence
  SiRNA target sequence
tgtaagaggctatgatgctttattat

SEQ ID NO: 221742 - DNA, 26 bp, Artificial sequence
  SiRNA target sequence
gtaagaggctatgatgctttattatc

SEQ ID NO: 221743 - DNA, 26 bp, Artificial sequence
  SiRNA target sequence
taagaggctatgatgctttattatct

SEQ ID NO: 221744 - DNA, 26 bp, Artificial sequence
  SiRNA target sequence
aagaggctatgatgctttattatctt

SEQ ID NO: 221745 - DNA, 26 bp, Artificial sequence
  SiRNA target sequence
agaggctatgatgctttattatcttt

SEQ ID NO: 221746 - DNA, 26 bp, Artificial sequence
  SiRNA target sequence
gaggctatgatgctttattatctttg

SEQ ID NO: 221747 - DNA, 26 bp, Artificial sequence
  SiRNA target sequence
aggctatgatgctttattatctttgg

SEQ ID NO: 221748 - DNA, 26 bp, Artificial sequence
  SiRNA target sequence
ggctatgatgctttattatctttggc

SEQ ID NO: 221749 - DNA, 26 bp, Artificial sequence
  SiRNA target sequence
gctatgatgctttattatctttggca

SEQ ID NO: 221750 - DNA, 26 bp, Artificial sequence
  SiRNA target sequence
ctatgatgctttattatctttggcac

SEQ ID NO: 221751 - DNA, 26 bp, Artificial sequence
  SiRNA target sequence
tatgatgctttattatctttggcact

SEQ ID NO: 221752 - DNA, 26 bp, Artificial sequence
  SiRNA target sequence
atgatgctttattatctttggcactg

SEQ ID NO: 221753 - DNA, 26 bp, Artificial sequence
  SiRNA target sequence
tgatgctttattatctttggcactgg

SEQ ID NO: 221754 - DNA, 26 bp, Artificial sequence
  SiRNA target sequence
gatgctttattatctttggcactggt

SEQ ID NO: 221755 - DNA, 26 bp, Artificial sequence
  SiRNA target sequence
atgctttattatctttggcactggtc

SEQ ID NO: 221756 - DNA, 26 bp, Artificial sequence
  SiRNA target sequence
tgctttattatctttggcactggtct

SEQ ID NO: 221757 - DNA, 26 bp, Artificial sequence
  SiRNA target sequence
gctttattatctttggcactggtctt

SEQ ID NO: 221758 - DNA, 26 bp, Artificial sequence
  SiRNA target sequence
ctttattatctttggcactggtcttt

SEQ ID NO: 221759 - DNA, 26 bp, Artificial sequence
  SiRNA target sequence
tttattatctttggcactggtcttta

SEQ ID NO: 221760 - DNA, 26 bp, Artificial sequence
  SiRNA target sequence
ttattatctttggcactggtctttaa

SEQ ID NO: 221761 - DNA, 26 bp, Artificial sequence
  SiRNA target sequence
tattatctttggcactggtctttaac

SEQ ID NO: 221762 - DNA, 26 bp, Artificial sequence
  SiRNA target sequence
attatctttggcactggtctttaacg

SEQ ID NO: 221763 - DNA, 26 bp, Artificial sequence
  SiRNA target sequence
ttatctttggcactggtctttaacga

SEQ ID NO: 221764 - DNA, 26 bp, Artificial sequence
  SiRNA target sequence
tatctttggcactggtctttaacgaa

SEQ ID NO: 221765 - DNA, 26 bp, Artificial sequence
  SiRNA target sequence
atctttggcactggtctttaacgaat

SEQ ID NO: 221766 - DNA, 26 bp, Artificial sequence
  SiRNA target sequence
tctttggcactggtctttaacgaatg

SEQ ID NO: 221767 - DNA, 26 bp, Artificial sequence
  SiRNA target sequence
ctttggcactggtctttaacgaatgg

SEQ ID NO: 221768 - DNA, 26 bp, Artificial sequence
  SiRNA target sequence
tttggcactggtctttaacgaatgga

SEQ ID NO: 221769 - DNA, 26 bp, Artificial sequence
  SiRNA target sequence
ttggcactggtctttaacgaatggac

SEQ ID NO: 221770 - DNA, 26 bp, Artificial sequence
  SiRNA target sequence
tggcactggtctttaacgaatggaca

SEQ ID NO: 221771 - DNA, 26 bp, Artificial sequence
  SiRNA target sequence
ggcactggtctttaacgaatggacat

SEQ ID NO: 221772 - DNA, 26 bp, Artificial sequence
  SiRNA target sequence
gcactggtctttaacgaatggacatc

SEQ ID NO: 221773 - DNA, 26 bp, Artificial sequence
  SiRNA target sequence
cactggtctttaacgaatggacatcc

SEQ ID NO: 221774 - DNA, 26 bp, Artificial sequence
  SiRNA target sequence
actggtctttaacgaatggacatcct

SEQ ID NO: 221775 - DNA, 26 bp, Artificial sequence
  SiRNA target sequence
ctggtctttaacgaatggacatcctc

SEQ ID NO: 221776 - DNA, 26 bp, Artificial sequence
  SiRNA target sequence
tggtctttaacgaatggacatcctct

SEQ ID NO: 221777 - DNA, 26 bp, Artificial sequence
  SiRNA target sequence
ggtctttaacgaatggacatcctctc

SEQ ID NO: 221778 - DNA, 26 bp, Artificial sequence
  SiRNA target sequence
gtctttaacgaatggacatcctctct

SEQ ID NO: 221779 - DNA, 26 bp, Artificial sequence
  SiRNA target sequence
tctttaacgaatggacatcctctcta

SEQ ID NO: 221780 - DNA, 26 bp, Artificial sequence
  SiRNA target sequence
ctttaacgaatggacatcctctctag

SEQ ID NO: 221781 - DNA, 26 bp, Artificial sequence
  SiRNA target sequence
tttaacgaatggacatcctctctagt

SEQ ID NO: 221782 - DNA, 26 bp, Artificial sequence
  SiRNA target sequence
ttaacgaatggacatcctctctagtt

SEQ ID NO: 221783 - DNA, 26 bp, Artificial sequence
  SiRNA target sequence
taacgaatggacatcctctctagttt

SEQ ID NO: 221784 - DNA, 26 bp, Artificial sequence
  SiRNA target sequence
aacgaatggacatcctctctagttta

SEQ ID NO: 221785 - DNA, 26 bp, Artificial sequence
  SiRNA target sequence
acgaatggacatcctctctagtttac

SEQ ID NO: 221786 - DNA, 26 bp, Artificial sequence
  SiRNA target sequence
cgaatggacatcctctctagtttaca

SEQ ID NO: 221787 - DNA, 26 bp, Artificial sequence
  SiRNA target sequence
gaatggacatcctctctagtttacat

SEQ ID NO: 221788 - DNA, 26 bp, Artificial sequence
  SiRNA target sequence
aatggacatcctctctagtttacatt

SEQ ID NO: 221789 - DNA, 26 bp, Artificial sequence
  SiRNA target sequence
atggacatcctctctagtttacattg

SEQ ID NO: 221790 - DNA, 26 bp, Artificial sequence
  SiRNA target sequence
tggacatcctctctagtttacattgt

SEQ ID NO: 221791 - DNA, 26 bp, Artificial sequence
  SiRNA target sequence
ggacatcctctctagtttacattgtt

SEQ ID NO: 221792 - DNA, 26 bp, Artificial sequence
  SiRNA target sequence
gacatcctctctagtttacattgttt

SEQ ID NO: 221793 - DNA, 26 bp, Artificial sequence
  SiRNA target sequence
acatcctctctagtttacattgtttc

SEQ ID NO: 221794 - DNA, 26 bp, Artificial sequence
  SiRNA target sequence
catcctctctagtttacattgtttca

SEQ ID NO: 221795 - DNA, 26 bp, Artificial sequence
  SiRNA target sequence
atcctctctagtttacattgtttcag

SEQ ID NO: 221796 - DNA, 26 bp, Artificial sequence
  SiRNA target sequence
tcctctctagtttacattgtttcaga

SEQ ID NO: 221797 - DNA, 26 bp, Artificial sequence
  SiRNA target sequence
cctctctagtttacattgtttcagaa

SEQ ID NO: 221798 - DNA, 26 bp, Artificial sequence
  SiRNA target sequence
ctctctagtttacattgtttcagaaa

SEQ ID NO: 221799 - DNA, 26 bp, Artificial sequence
  SiRNA target sequence
tctctagtttacattgtttcagaaat

SEQ ID NO: 221800 - DNA, 26 bp, Artificial sequence
  SiRNA target sequence
ctctagtttacattgtttcagaaatg

SEQ ID NO: 221801 - DNA, 26 bp, Artificial sequence
  SiRNA target sequence
tctagtttacattgtttcagaaatgt

SEQ ID NO: 221802 - DNA, 26 bp, Artificial sequence
  SiRNA target sequence
ctagtttacattgtttcagaaatgtt

SEQ ID NO: 221803 - DNA, 26 bp, Artificial sequence
  SiRNA target sequence
tagtttacattgtttcagaaatgttt

SEQ ID NO: 221804 - DNA, 26 bp, Artificial sequence
  SiRNA target sequence
agtttacattgtttcagaaatgtttg

SEQ ID NO: 221805 - DNA, 26 bp, Artificial sequence
  SiRNA target sequence
gtttacattgtttcagaaatgtttgg

SEQ ID NO: 221806 - DNA, 26 bp, Artificial sequence
  SiRNA target sequence
tttacattgtttcagaaatgtttggt

SEQ ID NO: 221807 - DNA, 26 bp, Artificial sequence
  SiRNA target sequence
ttacattgtttcagaaatgtttggta

SEQ ID NO: 221808 - DNA, 26 bp, Artificial sequence
  SiRNA target sequence
tacattgtttcagaaatgtttggtaa

SEQ ID NO: 221809 - DNA, 26 bp, Artificial sequence
  SiRNA target sequence
acattgtttcagaaatgtttggtaat

SEQ ID NO: 221810 - DNA, 26 bp, Artificial sequence
  SiRNA target sequence
cattgtttcagaaatgtttggtaatt

SEQ ID NO: 221811 - DNA, 26 bp, Artificial sequence
  SiRNA target sequence
attgtttcagaaatgtttggtaattt

SEQ ID NO: 221812 - DNA, 26 bp, Artificial sequence
  SiRNA target sequence
ttgtttcagaaatgtttggtaattta

SEQ ID NO: 221813 - DNA, 26 bp, Artificial sequence
  SiRNA target sequence
tgtttcagaaatgtttggtaatttag

SEQ ID NO: 221814 - DNA, 26 bp, Artificial sequence
  SiRNA target sequence
gtttcagaaatgtttggtaatttagt

SEQ ID NO: 221815 - DNA, 26 bp, Artificial sequence
  SiRNA target sequence
tttcagaaatgtttggtaatttagta

SEQ ID NO: 221816 - DNA, 26 bp, Artificial sequence
  SiRNA target sequence
ttcagaaatgtttggtaatttagtat

SEQ ID NO: 221817 - DNA, 26 bp, Artificial sequence
  SiRNA target sequence
tcagaaatgtttggtaatttagtatt

SEQ ID NO: 221818 - DNA, 26 bp, Artificial sequence
  SiRNA target sequence
cagaaatgtttggtaatttagtattg

SEQ ID NO: 221819 - DNA, 26 bp, Artificial sequence
  SiRNA target sequence
agaaatgtttggtaatttagtattgt

SEQ ID NO: 221820 - DNA, 26 bp, Artificial sequence
  SiRNA target sequence
gaaatgtttggtaatttagtattgtc

SEQ ID NO: 221821 - DNA, 26 bp, Artificial sequence
  SiRNA target sequence
aaatgtttggtaatttagtattgtct

SEQ ID NO: 221822 - DNA, 26 bp, Artificial sequence
  SiRNA target sequence
aatgtttggtaatttagtattgtctt

SEQ ID NO: 221823 - DNA, 26 bp, Artificial sequence
  SiRNA target sequence
atgtttggtaatttagtattgtctta

SEQ ID NO: 221824 - DNA, 26 bp, Artificial sequence
  SiRNA target sequence
tgtttggtaatttagtattgtcttat

SEQ ID NO: 221825 - DNA, 26 bp, Artificial sequence
  SiRNA target sequence
gtttggtaatttagtattgtcttatt

SEQ ID NO: 221826 - DNA, 26 bp, Artificial sequence
  SiRNA target sequence
tttggtaatttagtattgtcttattt

SEQ ID NO: 221827 - DNA, 26 bp, Artificial sequence
  SiRNA target sequence
ttggtaatttagtattgtcttatttc

SEQ ID NO: 221828 - DNA, 26 bp, Artificial sequence
  SiRNA target sequence
tggtaatttagtattgtcttatttct

SEQ ID NO: 221829 - DNA, 26 bp, Artificial sequence
  SiRNA target sequence
ggtaatttagtattgtcttatttctt

SEQ ID NO: 221830 - DNA, 26 bp, Artificial sequence
  SiRNA target sequence
gtaatttagtattgtcttatttcttc

SEQ ID NO: 221831 - DNA, 26 bp, Artificial sequence
  SiRNA target sequence
taatttagtattgtcttatttcttct

SEQ ID NO: 221832 - DNA, 26 bp, Artificial sequence
  SiRNA target sequence
aatttagtattgtcttatttcttctt

SEQ ID NO: 221833 - DNA, 26 bp, Artificial sequence
  SiRNA target sequence
atttagtattgtcttatttcttcttg

SEQ ID NO: 221834 - DNA, 26 bp, Artificial sequence
  SiRNA target sequence
tttagtattgtcttatttcttcttga

SEQ ID NO: 221835 - DNA, 26 bp, Artificial sequence
  SiRNA target sequence
ttagtattgtcttatttcttcttgac

SEQ ID NO: 221836 - DNA, 26 bp, Artificial sequence
  SiRNA target sequence
tagtattgtcttatttcttcttgacg

SEQ ID NO: 221837 - DNA, 26 bp, Artificial sequence
  SiRNA target sequence
agtattgtcttatttcttcttgacgt

SEQ ID NO: 221838 - DNA, 26 bp, Artificial sequence
  SiRNA target sequence
gtattgtcttatttcttcttgacgtt

SEQ ID NO: 221839 - DNA, 26 bp, Artificial sequence
  SiRNA target sequence
tattgtcttatttcttcttgacgttt

SEQ ID NO: 221840 - DNA, 26 bp, Artificial sequence
  SiRNA target sequence
attgtcttatttcttcttgacgtttg

SEQ ID NO: 221841 - DNA, 26 bp, Artificial sequence
  SiRNA target sequence
ttgtcttatttcttcttgacgtttgc

SEQ ID NO: 221842 - DNA, 26 bp, Artificial sequence
  SiRNA target sequence
tgtcttatttcttcttgacgtttgct

SEQ ID NO: 221843 - DNA, 26 bp, Artificial sequence
  SiRNA target sequence
gtcttatttcttcttgacgtttgcta

SEQ ID NO: 221844 - DNA, 26 bp, Artificial sequence
  SiRNA target sequence
tcttatttcttcttgacgtttgctaa

SEQ ID NO: 221845 - DNA, 26 bp, Artificial sequence
  SiRNA target sequence
cttatttcttcttgacgtttgctaat

SEQ ID NO: 221846 - DNA, 26 bp, Artificial sequence
  SiRNA target sequence
ttatttcttcttgacgtttgctaatt

SEQ ID NO: 221847 - DNA, 26 bp, Artificial sequence
  SiRNA target sequence
tatttcttcttgacgtttgctaattc

SEQ ID NO: 221848 - DNA, 26 bp, Artificial sequence
  SiRNA target sequence
atttcttcttgacgtttgctaattct

SEQ ID NO: 221849 - DNA, 26 bp, Artificial sequence
  SiRNA target sequence
tttcttcttgacgtttgctaattctt

SEQ ID NO: 221850 - DNA, 26 bp, Artificial sequence
  SiRNA target sequence
ttcttcttgacgtttgctaattcttt

SEQ ID NO: 221851 - DNA, 26 bp, Artificial sequence
  SiRNA target sequence
tcttcttgacgtttgctaattcttta

SEQ ID NO: 221852 - DNA, 26 bp, Artificial sequence
  SiRNA target sequence
cttcttgacgtttgctaattctttaa

SEQ ID NO: 221853 - DNA, 26 bp, Artificial sequence
  SiRNA target sequence
ttcttgacgtttgctaattctttaac

SEQ ID NO: 221854 - DNA, 26 bp, Artificial sequence
  SiRNA target sequence
tcttgacgtttgctaattctttaaca

SEQ ID NO: 221855 - DNA, 26 bp, Artificial sequence
  SiRNA target sequence
cttgacgtttgctaattctttaacaa

SEQ ID NO: 221856 - DNA, 26 bp, Artificial sequence
  SiRNA target sequence
ttgacgtttgctaattctttaacaac

SEQ ID NO: 221857 - DNA, 26 bp, Artificial sequence
  SiRNA target sequence
tgacgtttgctaattctttaacaact

SEQ ID NO: 221858 - DNA, 26 bp, Artificial sequence
  SiRNA target sequence
gacgtttgctaattctttaacaactc

SEQ ID NO: 221859 - DNA, 26 bp, Artificial sequence
  SiRNA target sequence
acgtttgctaattctttaacaactcc

SEQ ID NO: 221860 - DNA, 26 bp, Artificial sequence
  SiRNA target sequence
cgtttgctaattctttaacaactcca

SEQ ID NO: 221861 - DNA, 26 bp, Artificial sequence
  SiRNA target sequence
gtttgctaattctttaacaactccag

SEQ ID NO: 221862 - DNA, 26 bp, Artificial sequence
  SiRNA target sequence
tttgctaattctttaacaactccagg

SEQ ID NO: 221863 - DNA, 26 bp, Artificial sequence
  SiRNA target sequence
ttgctaattctttaacaactccagga

SEQ ID NO: 221864 - DNA, 26 bp, Artificial sequence
  SiRNA target sequence
tgctaattctttaacaactccaggac

SEQ ID NO: 221865 - DNA, 26 bp, Artificial sequence
  SiRNA target sequence
gctaattctttaacaactccaggaca

SEQ ID NO: 221866 - DNA, 26 bp, Artificial sequence
  SiRNA target sequence
ctaattctttaacaactccaggacaa

SEQ ID NO: 221867 - DNA, 26 bp, Artificial sequence
  SiRNA target sequence
taattctttaacaactccaggacaaa

SEQ ID NO: 221868 - DNA, 26 bp, Artificial sequence
  SiRNA target sequence
aattctttaacaactccaggacaaag

SEQ ID NO: 221869 - DNA, 26 bp, Artificial sequence
  SiRNA target sequence
attctttaacaactccaggacaaagt

SEQ ID NO: 221870 - DNA, 26 bp, Artificial sequence
  SiRNA target sequence
ttctttaacaactccaggacaaagtg

SEQ ID NO: 221871 - DNA, 26 bp, Artificial sequence
  SiRNA target sequence
tctttaacaactccaggacaaagtgc

SEQ ID NO: 221872 - DNA, 26 bp, Artificial sequence
  SiRNA target sequence
ctttaacaactccaggacaaagtgca

SEQ ID NO: 221873 - DNA, 26 bp, Artificial sequence
  SiRNA target sequence
tttaacaactccaggacaaagtgcaa

SEQ ID NO: 221874 - DNA, 26 bp, Artificial sequence
  SiRNA target sequence
ttaacaactccaggacaaagtgcaag

SEQ ID NO: 221875 - DNA, 26 bp, Artificial sequence
  SiRNA target sequence
taacaactccaggacaaagtgcaaga

SEQ ID NO: 221876 - DNA, 26 bp, Artificial sequence
  SiRNA target sequence
aacaactccaggacaaagtgcaagat

SEQ ID NO: 221877 - DNA, 26 bp, Artificial sequence
  SiRNA target sequence
acaactccaggacaaagtgcaagatt

SEQ ID NO: 221878 - DNA, 26 bp, Artificial sequence
  SiRNA target sequence
caactccaggacaaagtgcaagattc

SEQ ID NO: 221879 - DNA, 26 bp, Artificial sequence
  SiRNA target sequence
aactccaggacaaagtgcaagattca

SEQ ID NO: 221880 - DNA, 26 bp, Artificial sequence
  SiRNA target sequence
actccaggacaaagtgcaagattcat

SEQ ID NO: 221881 - DNA, 26 bp, Artificial sequence
  SiRNA target sequence
ctccaggacaaagtgcaagattcata

SEQ ID NO: 221882 - DNA, 26 bp, Artificial sequence
  SiRNA target sequence
tccaggacaaagtgcaagattcatac

SEQ ID NO: 221883 - DNA, 26 bp, Artificial sequence
  SiRNA target sequence
ccaggacaaagtgcaagattcatacc

SEQ ID NO: 221884 - DNA, 26 bp, Artificial sequence
  SiRNA target sequence
caggacaaagtgcaagattcatacct

SEQ ID NO: 221885 - DNA, 26 bp, Artificial sequence
  SiRNA target sequence
aggacaaagtgcaagattcatacctt

SEQ ID NO: 221886 - DNA, 26 bp, Artificial sequence
  SiRNA target sequence
ggacaaagtgcaagattcataccttt

SEQ ID NO: 221887 - DNA, 26 bp, Artificial sequence
  SiRNA target sequence
gacaaagtgcaagattcataccttta

SEQ ID NO: 221888 - DNA, 26 bp, Artificial sequence
  SiRNA target sequence
acaaagtgcaagattcatacctttat

SEQ ID NO: 221889 - DNA, 26 bp, Artificial sequence
  SiRNA target sequence
caaagtgcaagattcatacctttatt

SEQ ID NO: 221890 - DNA, 26 bp, Artificial sequence
  SiRNA target sequence
aaagtgcaagattcatacctttattt

SEQ ID NO: 221891 - DNA, 26 bp, Artificial sequence
  SiRNA target sequence
aagtgcaagattcatacctttatttt

SEQ ID NO: 221892 - DNA, 26 bp, Artificial sequence
  SiRNA target sequence
agtgcaagattcatacctttatttta

SEQ ID NO: 221893 - DNA, 26 bp, Artificial sequence
  SiRNA target sequence
gtgcaagattcatacctttattttat

SEQ ID NO: 221894 - DNA, 26 bp, Artificial sequence
  SiRNA target sequence
tgcaagattcatacctttattttatg

SEQ ID NO: 221895 - DNA, 26 bp, Artificial sequence
  SiRNA target sequence
gcaagattcatacctttattttatgt

SEQ ID NO: 221896 - DNA, 26 bp, Artificial sequence
  SiRNA target sequence
caagattcatacctttattttatgtt

SEQ ID NO: 221897 - DNA, 26 bp, Artificial sequence
  SiRNA target sequence
aagattcatacctttattttatgttt

SEQ ID NO: 221898 - DNA, 26 bp, Artificial sequence
  SiRNA target sequence
agattcatacctttattttatgtttt

SEQ ID NO: 221899 - DNA, 26 bp, Artificial sequence
  SiRNA target sequence
gattcatacctttattttatgttttc

SEQ ID NO: 221900 - DNA, 26 bp, Artificial sequence
  SiRNA target sequence
attcatacctttattttatgttttct

SEQ ID NO: 221901 - DNA, 26 bp, Artificial sequence
  SiRNA target sequence
ttcatacctttattttatgttttctc

SEQ ID NO: 221902 - DNA, 26 bp, Artificial sequence
  SiRNA target sequence
tcatacctttattttatgttttctcg

SEQ ID NO: 221903 - DNA, 26 bp, Artificial sequence
  SiRNA target sequence
catacctttattttatgttttctcga

SEQ ID NO: 221904 - DNA, 26 bp, Artificial sequence
  SiRNA target sequence
atacctttattttatgttttctcgaa

SEQ ID NO: 221905 - DNA, 26 bp, Artificial sequence
  SiRNA target sequence
tacctttattttatgttttctcgaat

SEQ ID NO: 221906 - DNA, 26 bp, Artificial sequence
  SiRNA target sequence
acctttattttatgttttctcgaata

SEQ ID NO: 221907 - DNA, 26 bp, Artificial sequence
  SiRNA target sequence
cctttattttatgttttctcgaatat

SEQ ID NO: 221908 - DNA, 26 bp, Artificial sequence
  SiRNA target sequence
ctttattttatgttttctcgaatatt

SEQ ID NO: 221909 - DNA, 26 bp, Artificial sequence
  SiRNA target sequence
tttattttatgttttctcgaatattt

SEQ ID NO: 221910 - DNA, 26 bp, Artificial sequence
  SiRNA target sequence
ttattttatgttttctcgaatatttc

SEQ ID NO: 221911 - DNA, 26 bp, Artificial sequence
  SiRNA target sequence
tattttatgttttctcgaatatttct

SEQ ID NO: 221912 - DNA, 26 bp, Artificial sequence
  SiRNA target sequence
attttatgttttctcgaatatttctc

SEQ ID NO: 221913 - DNA, 26 bp, Artificial sequence
  SiRNA target sequence
ttttatgttttctcgaatatttctct

SEQ ID NO: 221914 - DNA, 26 bp, Artificial sequence
  SiRNA target sequence
tttatgttttctcgaatatttctctt

SEQ ID NO: 221915 - DNA, 26 bp, Artificial sequence
  SiRNA target sequence
ttatgttttctcgaatatttctcttt

SEQ ID NO: 221916 - DNA, 26 bp, Artificial sequence
  SiRNA target sequence
tatgttttctcgaatatttctctttt

SEQ ID NO: 221917 - DNA, 26 bp, Artificial sequence
  SiRNA target sequence
atgttttctcgaatatttctcttttc

SEQ ID NO: 221918 - DNA, 26 bp, Artificial sequence
  SiRNA target sequence
tgttttctcgaatatttctcttttct

SEQ ID NO: 221919 - DNA, 26 bp, Artificial sequence
  SiRNA target sequence
gttttctcgaatatttctcttttctt

SEQ ID NO: 221920 - DNA, 26 bp, Artificial sequence
  SiRNA target sequence
ttttctcgaatatttctcttttctta

SEQ ID NO: 221921 - DNA, 26 bp, Artificial sequence
  SiRNA target sequence
tttctcgaatatttctcttttcttat

SEQ ID NO: 221922 - DNA, 26 bp, Artificial sequence
  SiRNA target sequence
ttctcgaatatttctcttttcttatc

SEQ ID NO: 221923 - DNA, 26 bp, Artificial sequence
  SiRNA target sequence
tctcgaatatttctcttttcttatct

SEQ ID NO: 221924 - DNA, 26 bp, Artificial sequence
  SiRNA target sequence
ctcgaatatttctcttttcttatctt

SEQ ID NO: 221925 - DNA, 26 bp, Artificial sequence
  SiRNA target sequence
tcgaatatttctcttttcttatcttc

SEQ ID NO: 221926 - DNA, 26 bp, Artificial sequence
  SiRNA target sequence
cgaatatttctcttttcttatcttct

SEQ ID NO: 221927 - DNA, 26 bp, Artificial sequence
  SiRNA target sequence
gaatatttctcttttcttatcttctc

SEQ ID NO: 221928 - DNA, 26 bp, Artificial sequence
  SiRNA target sequence
aatatttctcttttcttatcttctca

SEQ ID NO: 221929 - DNA, 26 bp, Artificial sequence
  SiRNA target sequence
atatttctcttttcttatcttctcaa

SEQ ID NO: 221930 - DNA, 26 bp, Artificial sequence
  SiRNA target sequence
tatttctcttttcttatcttctcaag

SEQ ID NO: 221931 - DNA, 26 bp, Artificial sequence
  SiRNA target sequence
atttctcttttcttatcttctcaagt

SEQ ID NO: 221932 - DNA, 26 bp, Artificial sequence
  SiRNA target sequence
tttctcttttcttatcttctcaagtg

SEQ ID NO: 221933 - DNA, 26 bp, Artificial sequence
  SiRNA target sequence
ttctcttttcttatcttctcaagtga

SEQ ID NO: 221934 - DNA, 26 bp, Artificial sequence
  SiRNA target sequence
tctcttttcttatcttctcaagtgac

SEQ ID NO: 221935 - DNA, 26 bp, Artificial sequence
  SiRNA target sequence
ctcttttcttatcttctcaagtgaca

SEQ ID NO: 221936 - DNA, 26 bp, Artificial sequence
  SiRNA target sequence
tcttttcttatcttctcaagtgacag

SEQ ID NO: 221937 - DNA, 26 bp, Artificial sequence
  SiRNA target sequence
cttttcttatcttctcaagtgacaga

SEQ ID NO: 221938 - DNA, 26 bp, Artificial sequence
  SiRNA target sequence
ttttcttatcttctcaagtgacagaa

SEQ ID NO: 221939 - DNA, 26 bp, Artificial sequence
  SiRNA target sequence
tttcttatcttctcaagtgacagaac

SEQ ID NO: 221940 - DNA, 26 bp, Artificial sequence
  SiRNA target sequence
ttcttatcttctcaagtgacagaact

SEQ ID NO: 221941 - DNA, 26 bp, Artificial sequence
  SiRNA target sequence
tcttatcttctcaagtgacagaactt

SEQ ID NO: 221942 - DNA, 26 bp, Artificial sequence
  SiRNA target sequence
cttatcttctcaagtgacagaacttt

SEQ ID NO: 221943 - DNA, 26 bp, Artificial sequence
  SiRNA target sequence
ttatcttctcaagtgacagaactttt

SEQ ID NO: 221944 - DNA, 26 bp, Artificial sequence
  SiRNA target sequence
tatcttctcaagtgacagaacttttt

SEQ ID NO: 221945 - DNA, 26 bp, Artificial sequence
  SiRNA target sequence
atcttctcaagtgacagaacttttta

SEQ ID NO: 221946 - DNA, 26 bp, Artificial sequence
  SiRNA target sequence
tcttctcaagtgacagaactttttac

SEQ ID NO: 221947 - DNA, 26 bp, Artificial sequence
  SiRNA target sequence
cttctcaagtgacagaactttttaca

SEQ ID NO: 221948 - DNA, 26 bp, Artificial sequence
  SiRNA target sequence
ttctcaagtgacagaactttttacaa

SEQ ID NO: 221949 - DNA, 26 bp, Artificial sequence
  SiRNA target sequence
tctcaagtgacagaactttttacaag

SEQ ID NO: 221950 - DNA, 26 bp, Artificial sequence
  SiRNA target sequence
ctcaagtgacagaactttttacaaga

SEQ ID NO: 221951 - DNA, 26 bp, Artificial sequence
  SiRNA target sequence
tcaagtgacagaactttttacaagat

SEQ ID NO: 221952 - DNA, 26 bp, Artificial sequence
  SiRNA target sequence
caagtgacagaactttttacaagata

SEQ ID NO: 221953 - DNA, 26 bp, Artificial sequence
  SiRNA target sequence
aagtgacagaactttttacaagatat

SEQ ID NO: 221954 - DNA, 26 bp, Artificial sequence
  SiRNA target sequence
agtgacagaactttttacaagatata

SEQ ID NO: 221955 - DNA, 26 bp, Artificial sequence
  SiRNA target sequence
gtgacagaactttttacaagatatag

SEQ ID NO: 221956 - DNA, 26 bp, Artificial sequence
  SiRNA target sequence
tgacagaactttttacaagatataga

SEQ ID NO: 221957 - DNA, 26 bp, Artificial sequence
  SiRNA target sequence
gacagaactttttacaagatatagat

SEQ ID NO: 221958 - DNA, 26 bp, Artificial sequence
  SiRNA target sequence
acagaactttttacaagatatagatc

SEQ ID NO: 221959 - DNA, 26 bp, Artificial sequence
  SiRNA target sequence
cagaactttttacaagatatagatca

SEQ ID NO: 221960 - DNA, 26 bp, Artificial sequence
  SiRNA target sequence
agaactttttacaagatatagatcaa

SEQ ID NO: 221961 - DNA, 26 bp, Artificial sequence
  SiRNA target sequence
gaactttttacaagatatagatcaaa

SEQ ID NO: 221962 - DNA, 26 bp, Artificial sequence
  SiRNA target sequence
aactttttacaagatatagatcaaag

SEQ ID NO: 221963 - DNA, 26 bp, Artificial sequence
  SiRNA target sequence
actttttacaagatatagatcaaagc

SEQ ID NO: 221964 - DNA, 26 bp, Artificial sequence
  SiRNA target sequence
ctttttacaagatatagatcaaagct

SEQ ID NO: 221965 - DNA, 26 bp, Artificial sequence
  SiRNA target sequence
tttttacaagatatagatcaaagctc

SEQ ID NO: 221966 - DNA, 26 bp, Artificial sequence
  SiRNA target sequence
ttttacaagatatagatcaaagctca

SEQ ID NO: 221967 - DNA, 26 bp, Artificial sequence
  SiRNA target sequence
tttacaagatatagatcaaagctcac

SEQ ID NO: 221968 - DNA, 26 bp, Artificial sequence
  SiRNA target sequence
ttacaagatatagatcaaagctcact

SEQ ID NO: 221969 - DNA, 26 bp, Artificial sequence
  SiRNA target sequence
tacaagatatagatcaaagctcactt

SEQ ID NO: 221970 - DNA, 26 bp, Artificial sequence
  SiRNA target sequence
acaagatatagatcaaagctcacttt

SEQ ID NO: 221971 - DNA, 26 bp, Artificial sequence
  SiRNA target sequence
caagatatagatcaaagctcactttc

SEQ ID NO: 221972 - DNA, 26 bp, Artificial sequence
  SiRNA target sequence
aagatatagatcaaagctcactttct

SEQ ID NO: 221973 - DNA, 26 bp, Artificial sequence
  SiRNA target sequence
agatatagatcaaagctcactttctc

SEQ ID NO: 221974 - DNA, 26 bp, Artificial sequence
  SiRNA target sequence
gatatagatcaaagctcactttctca

SEQ ID NO: 221975 - DNA, 26 bp, Artificial sequence
  SiRNA target sequence
atatagatcaaagctcactttctcag

SEQ ID NO: 221976 - DNA, 26 bp, Artificial sequence
  SiRNA target sequence
tatagatcaaagctcactttctcaga

SEQ ID NO: 221977 - DNA, 26 bp, Artificial sequence
  SiRNA target sequence
atagatcaaagctcactttctcagag

SEQ ID NO: 221978 - DNA, 26 bp, Artificial sequence
  SiRNA target sequence
tagatcaaagctcactttctcagagg

SEQ ID NO: 221979 - DNA, 26 bp, Artificial sequence
  SiRNA target sequence
agatcaaagctcactttctcagaggc

SEQ ID NO: 221980 - DNA, 26 bp, Artificial sequence
  SiRNA target sequence
gatcaaagctcactttctcagaggcg

SEQ ID NO: 221981 - DNA, 26 bp, Artificial sequence
  SiRNA target sequence
atcaaagctcactttctcagaggcgg

SEQ ID NO: 221982 - DNA, 26 bp, Artificial sequence
  SiRNA target sequence
tcaaagctcactttctcagaggcgga

SEQ ID NO: 221983 - DNA, 26 bp, Artificial sequence
  SiRNA target sequence
caaagctcactttctcagaggcggaa

SEQ ID NO: 221984 - DNA, 26 bp, Artificial sequence
  SiRNA target sequence
aaagctcactttctcagaggcggaat

SEQ ID NO: 221985 - DNA, 26 bp, Artificial sequence
  SiRNA target sequence
aagctcactttctcagaggcggaatt

SEQ ID NO: 221986 - DNA, 26 bp, Artificial sequence
  SiRNA target sequence
agctcactttctcagaggcggaattt

SEQ ID NO: 221987 - DNA, 26 bp, Artificial sequence
  SiRNA target sequence
gctcactttctcagaggcggaatttt

SEQ ID NO: 221988 - DNA, 26 bp, Artificial sequence
  SiRNA target sequence
ctcactttctcagaggcggaattttt

SEQ ID NO: 221989 - DNA, 26 bp, Artificial sequence
  SiRNA target sequence
tcactttctcagaggcggaattttta

SEQ ID NO: 221990 - DNA, 26 bp, Artificial sequence
  SiRNA target sequence
cactttctcagaggcggaatttttat

SEQ ID NO: 221991 - DNA, 26 bp, Artificial sequence
  SiRNA target sequence
actttctcagaggcggaatttttata

SEQ ID NO: 221992 - DNA, 26 bp, Artificial sequence
  SiRNA target sequence
ctttctcagaggcggaatttttatat

SEQ ID NO: 221993 - DNA, 26 bp, Artificial sequence
  SiRNA target sequence
tttctcagaggcggaatttttatata

SEQ ID NO: 221994 - DNA, 26 bp, Artificial sequence
  SiRNA target sequence
ttctcagaggcggaatttttatataa

SEQ ID NO: 221995 - DNA, 26 bp, Artificial sequence
  SiRNA target sequence
tctcagaggcggaatttttatataat

SEQ ID NO: 221996 - DNA, 26 bp, Artificial sequence
  SiRNA target sequence
ctcagaggcggaatttttatataatg

SEQ ID NO: 221997 - DNA, 26 bp, Artificial sequence
  SiRNA target sequence
tcagaggcggaatttttatataatgg

SEQ ID NO: 221998 - DNA, 26 bp, Artificial sequence
  SiRNA target sequence
cagaggcggaatttttatataatggc

SEQ ID NO: 221999 - DNA, 26 bp, Artificial sequence
  SiRNA target sequence
agaggcggaatttttatataatggct

SEQ ID NO: 222000 - DNA, 26 bp, Artificial sequence
  SiRNA target sequence
gaggcggaatttttatataatggctt

SEQ ID NO: 222001 - DNA, 26 bp, Artificial sequence
  SiRNA target sequence
aggcggaatttttatataatggcttt

SEQ ID NO: 222002 - DNA, 26 bp, Artificial sequence
  SiRNA target sequence
ggcggaatttttatataatggctttt

SEQ ID NO: 222003 - DNA, 26 bp, Artificial sequence
  SiRNA target sequence
gcggaatttttatataatggcttttt

SEQ ID NO: 222004 - DNA, 26 bp, Artificial sequence
  SiRNA target sequence
cggaatttttatataatggctttttt

SEQ ID NO: 222005 - DNA, 26 bp, Artificial sequence
  SiRNA target sequence
ggaatttttatataatggcttttttg

SEQ ID NO: 222006 - DNA, 26 bp, Artificial sequence
  SiRNA target sequence
gaatttttatataatggcttttttgt

SEQ ID NO: 222007 - DNA, 26 bp, Artificial sequence
  SiRNA target sequence
aatttttatataatggcttttttgta

SEQ ID NO: 222008 - DNA, 26 bp, Artificial sequence
  SiRNA target sequence
atttttatataatggcttttttgtat

SEQ ID NO: 222009 - DNA, 26 bp, Artificial sequence
  SiRNA target sequence
tttttatataatggcttttttgtatt

SEQ ID NO: 222010 - DNA, 26 bp, Artificial sequence
  SiRNA target sequence
ttttatataatggcttttttgtattt

SEQ ID NO: 222011 - DNA, 26 bp, Artificial sequence
  SiRNA target sequence
tttatataatggcttttttgtatttt

SEQ ID NO: 222012 - DNA, 26 bp, Artificial sequence
  SiRNA target sequence
ttatataatggcttttttgtattttc

SEQ ID NO: 222013 - DNA, 26 bp, Artificial sequence
  SiRNA target sequence
tatataatggcttttttgtattttct

SEQ ID NO: 222014 - DNA, 26 bp, Artificial sequence
  SiRNA target sequence
atataatggcttttttgtattttctg

SEQ ID NO: 222015 - DNA, 26 bp, Artificial sequence
  SiRNA target sequence
tataatggcttttttgtattttctgg

SEQ ID NO: 222016 - DNA, 26 bp, Artificial sequence
  SiRNA target sequence
ataatggcttttttgtattttctgga

SEQ ID NO: 222017 - DNA, 26 bp, Artificial sequence
  SiRNA target sequence
taatggcttttttgtattttctggag

SEQ ID NO: 222018 - DNA, 26 bp, Artificial sequence
  SiRNA target sequence
aatggcttttttgtattttctggagt

SEQ ID NO: 222019 - DNA, 26 bp, Artificial sequence
  SiRNA target sequence
atggcttttttgtattttctggagtt

SEQ ID NO: 222020 - DNA, 26 bp, Artificial sequence
  SiRNA target sequence
tggcttttttgtattttctggagttc

SEQ ID NO: 222021 - DNA, 26 bp, Artificial sequence
  SiRNA target sequence
ggcttttttgtattttctggagttct

SEQ ID NO: 222022 - DNA, 26 bp, Artificial sequence
  SiRNA target sequence
gcttttttgtattttctggagttcta

SEQ ID NO: 222023 - DNA, 26 bp, Artificial sequence
  SiRNA target sequence
cttttttgtattttctggagttctag

SEQ ID NO: 222024 - DNA, 26 bp, Artificial sequence
  SiRNA target sequence
ttttttgtattttctggagttctagt

SEQ ID NO: 222025 - DNA, 26 bp, Artificial sequence
  SiRNA target sequence
tttttgtattttctggagttctagta

SEQ ID NO: 222026 - DNA, 26 bp, Artificial sequence
  SiRNA target sequence
ttttgtattttctggagttctagtaa

SEQ ID NO: 222027 - DNA, 26 bp, Artificial sequence
  SiRNA target sequence
tttgtattttctggagttctagtaat

SEQ ID NO: 222028 - DNA, 26 bp, Artificial sequence
  SiRNA target sequence
ttgtattttctggagttctagtaata

SEQ ID NO: 222029 - DNA, 26 bp, Artificial sequence
  SiRNA target sequence
tgtattttctggagttctagtaatag

SEQ ID NO: 222030 - DNA, 26 bp, Artificial sequence
  SiRNA target sequence
gtattttctggagttctagtaatagt

SEQ ID NO: 222031 - DNA, 26 bp, Artificial sequence
  SiRNA target sequence
tattttctggagttctagtaatagtt

SEQ ID NO: 222032 - DNA, 26 bp, Artificial sequence
  SiRNA target sequence
attttctggagttctagtaatagtta

SEQ ID NO: 222033 - DNA, 26 bp, Artificial sequence
  SiRNA target sequence
ttttctggagttctagtaatagttat

SEQ ID NO: 222034 - DNA, 26 bp, Artificial sequence
  SiRNA target sequence
tttctggagttctagtaatagttata

SEQ ID NO: 222035 - DNA, 26 bp, Artificial sequence
  SiRNA target sequence
ttctggagttctagtaatagttatat

SEQ ID NO: 222036 - DNA, 26 bp, Artificial sequence
  SiRNA target sequence
tctggagttctagtaatagttatatt

SEQ ID NO: 222037 - DNA, 26 bp, Artificial sequence
  SiRNA target sequence
ctggagttctagtaatagttatattt

SEQ ID NO: 222038 - DNA, 26 bp, Artificial sequence
  SiRNA target sequence
tggagttctagtaatagttatatttt

SEQ ID NO: 222039 - DNA, 26 bp, Artificial sequence
  SiRNA target sequence
ggagttctagtaatagttatattttt

SEQ ID NO: 222040 - DNA, 26 bp, Artificial sequence
  SiRNA target sequence
gagttctagtaatagttatattttta

SEQ ID NO: 222041 - DNA, 26 bp, Artificial sequence
  SiRNA target sequence
agttctagtaatagttatatttttaa

SEQ ID NO: 222042 - DNA, 26 bp, Artificial sequence
  SiRNA target sequence
gttctagtaatagttatatttttaat

SEQ ID NO: 222043 - DNA, 26 bp, Artificial sequence
  SiRNA target sequence
ttctagtaatagttatatttttaatt

SEQ ID NO: 222044 - DNA, 26 bp, Artificial sequence
  SiRNA target sequence
tctagtaatagttatatttttaatta

SEQ ID NO: 222045 - DNA, 26 bp, Artificial sequence
  SiRNA target sequence
ctagtaatagttatatttttaattaa

SEQ ID NO: 222046 - DNA, 26 bp, Artificial sequence
  SiRNA target sequence
tagtaatagttatatttttaattaaa

SEQ ID NO: 222047 - DNA, 26 bp, Artificial sequence
  SiRNA target sequence
agtaatagttatatttttaattaaaa

SEQ ID NO: 222048 - DNA, 26 bp, Artificial sequence
  SiRNA target sequence
gtaatagttatatttttaattaaaaa

SEQ ID NO: 222049 - DNA, 26 bp, Artificial sequence
  SiRNA target sequence
taatagttatatttttaattaaaaaa

SEQ ID NO: 222050 - DNA, 26 bp, Artificial sequence
  SiRNA target sequence
aatagttatatttttaattaaaaaat

SEQ ID NO: 222051 - DNA, 26 bp, Artificial sequence
  SiRNA target sequence
atagttatatttttaattaaaaaata

SEQ ID NO: 222052 - DNA, 26 bp, Artificial sequence
  SiRNA target sequence
tagttatatttttaattaaaaaatat

SEQ ID NO: 222053 - DNA, 26 bp, Artificial sequence
  SiRNA target sequence
agttatatttttaattaaaaaatatt

SEQ ID NO: 222054 - DNA, 26 bp, Artificial sequence
  SiRNA target sequence
gttatatttttaattaaaaaatattt

SEQ ID NO: 222055 - DNA, 26 bp, Artificial sequence
  SiRNA target sequence
ttatatttttaattaaaaaatatttg

SEQ ID NO: 222056 - DNA, 26 bp, Artificial sequence
  SiRNA target sequence
tatatttttaattaaaaaatatttgg

SEQ ID NO: 222057 - DNA, 26 bp, Artificial sequence
  SiRNA target sequence
atatttttaattaaaaaatatttgga

SEQ ID NO: 222058 - DNA, 26 bp, Artificial sequence
  SiRNA target sequence
tatttttaattaaaaaatatttggag

SEQ ID NO: 222059 - DNA, 26 bp, Artificial sequence
  SiRNA target sequence
atttttaattaaaaaatatttggaga

SEQ ID NO: 222060 - DNA, 26 bp, Artificial sequence
  SiRNA target sequence
tttttaattaaaaaatatttggagag

SEQ ID NO: 222061 - DNA, 26 bp, Artificial sequence
  SiRNA target sequence
ttttaattaaaaaatatttggagagg

SEQ ID NO: 222062 - DNA, 26 bp, Artificial sequence
  SiRNA target sequence
tttaattaaaaaatatttggagagga

SEQ ID NO: 222063 - DNA, 26 bp, Artificial sequence
  SiRNA target sequence
ttaattaaaaaatatttggagaggaa

SEQ ID NO: 222064 - DNA, 26 bp, Artificial sequence
  SiRNA target sequence
taattaaaaaatatttggagaggaat

SEQ ID NO: 222065 - DNA, 26 bp, Artificial sequence
  SiRNA target sequence
aattaaaaaatatttggagaggaatg

SEQ ID NO: 222066 - DNA, 26 bp, Artificial sequence
  SiRNA target sequence
attaaaaaatatttggagaggaatgt

SEQ ID NO: 222067 - DNA, 26 bp, Artificial sequence
  SiRNA target sequence
ttaaaaaatatttggagaggaatgtg

SEQ ID NO: 222068 - DNA, 26 bp, Artificial sequence
  SiRNA target sequence
taaaaaatatttggagaggaatgtga

SEQ ID NO: 222069 - DNA, 26 bp, Artificial sequence
  SiRNA target sequence
aaaaaatatttggagaggaatgtgac

SEQ ID NO: 222070 - DNA, 26 bp, Artificial sequence
  SiRNA target sequence
aaaaatatttggagaggaatgtgact

SEQ ID NO: 222071 - DNA, 26 bp, Artificial sequence
  SiRNA target sequence
aaaatatttggagaggaatgtgacta

SEQ ID NO: 222072 - DNA, 26 bp, Artificial sequence
  SiRNA target sequence
aaatatttggagaggaatgtgactaa

SEQ ID NO: 222073 - DNA, 26 bp, Artificial sequence
  SiRNA target sequence
aatatttggagaggaatgtgactaac

SEQ ID NO: 222074 - DNA, 26 bp, Artificial sequence
  SiRNA target sequence
atatttggagaggaatgtgactaaca

SEQ ID NO: 222075 - DNA, 26 bp, Artificial sequence
  SiRNA target sequence
tatttggagaggaatgtgactaacaa

SEQ ID NO: 222076 - DNA, 26 bp, Artificial sequence
  SiRNA target sequence
atttggagaggaatgtgactaacaaa

SEQ ID NO: 222077 - DNA, 26 bp, Artificial sequence
  SiRNA target sequence
tttggagaggaatgtgactaacaaac

SEQ ID NO: 222078 - DNA, 26 bp, Artificial sequence
  SiRNA target sequence
ttggagaggaatgtgactaacaaacc

SEQ ID NO: 222079 - DNA, 26 bp, Artificial sequence
  SiRNA target sequence
tggagaggaatgtgactaacaaacct

SEQ ID NO: 222080 - DNA, 26 bp, Artificial sequence
  SiRNA target sequence
ggagaggaatgtgactaacaaacctt

SEQ ID NO: 222081 - DNA, 26 bp, Artificial sequence
  SiRNA target sequence
gagaggaatgtgactaacaaaccttt

SEQ ID NO: 222082 - DNA, 26 bp, Artificial sequence
  SiRNA target sequence
agaggaatgtgactaacaaacctttg

SEQ ID NO: 222083 - DNA, 26 bp, Artificial sequence
  SiRNA target sequence
gaggaatgtgactaacaaacctttgt

SEQ ID NO: 222084 - DNA, 26 bp, Artificial sequence
  SiRNA target sequence
aggaatgtgactaacaaacctttgtt

SEQ ID NO: 222085 - DNA, 26 bp, Artificial sequence
  SiRNA target sequence
ggaatgtgactaacaaacctttgttt

SEQ ID NO: 222086 - DNA, 26 bp, Artificial sequence
  SiRNA target sequence
gaatgtgactaacaaacctttgtttg

SEQ ID NO: 222087 - DNA, 26 bp, Artificial sequence
  SiRNA target sequence
aatgtgactaacaaacctttgtttgt

SEQ ID NO: 222088 - DNA, 26 bp, Artificial sequence
  SiRNA target sequence
atgtgactaacaaacctttgtttgtt

SEQ ID NO: 222089 - DNA, 26 bp, Artificial sequence
  SiRNA target sequence
tgtgactaacaaacctttgtttgttg

SEQ ID NO: 222090 - DNA, 26 bp, Artificial sequence
  SiRNA target sequence
gtgactaacaaacctttgtttgttgt

SEQ ID NO: 222091 - DNA, 26 bp, Artificial sequence
  SiRNA target sequence
tgactaacaaacctttgtttgttgta

SEQ ID NO: 222092 - DNA, 26 bp, Artificial sequence
  SiRNA target sequence
gactaacaaacctttgtttgttgtaa

SEQ ID NO: 222093 - DNA, 26 bp, Artificial sequence
  SiRNA target sequence
actaacaaacctttgtttgttgtaaa

SEQ ID NO: 222094 - DNA, 26 bp, Artificial sequence
  SiRNA target sequence
ctaacaaacctttgtttgttgtaaaa

SEQ ID NO: 222095 - DNA, 26 bp, Artificial sequence
  SiRNA target sequence
taacaaacctttgtttgttgtaaaat

SEQ ID NO: 222096 - DNA, 26 bp, Artificial sequence
  SiRNA target sequence
aacaaacctttgtttgttgtaaaatc

SEQ ID NO: 222097 - DNA, 26 bp, Artificial sequence
  SiRNA target sequence
acaaacctttgtttgttgtaaaatct

SEQ ID NO: 222098 - DNA, 26 bp, Artificial sequence
  SiRNA target sequence
caaacctttgtttgttgtaaaatctg

SEQ ID NO: 222099 - DNA, 26 bp, Artificial sequence
  SiRNA target sequence
aaacctttgtttgttgtaaaatctgt

SEQ ID NO: 222100 - DNA, 26 bp, Artificial sequence
  SiRNA target sequence
aacctttgtttgttgtaaaatctgtt

SEQ ID NO: 222101 - DNA, 26 bp, Artificial sequence
  SiRNA target sequence
acctttgtttgttgtaaaatctgtta

SEQ ID NO: 222102 - DNA, 26 bp, Artificial sequence
  SiRNA target sequence
cctttgtttgttgtaaaatctgttaa

SEQ ID NO: 222103 - DNA, 26 bp, Artificial sequence
  SiRNA target sequence
ctttgtttgttgtaaaatctgttaaa

SEQ ID NO: 222104 - DNA, 26 bp, Artificial sequence
  SiRNA target sequence
tttgtttgttgtaaaatctgttaaaa

SEQ ID NO: 222105 - DNA, 26 bp, Artificial sequence
  SiRNA target sequence
ttgtttgttgtaaaatctgttaaaaa

SEQ ID NO: 222106 - DNA, 26 bp, Artificial sequence
  SiRNA target sequence
tgtttgttgtaaaatctgttaaaaag

SEQ ID NO: 222107 - DNA, 26 bp, Artificial sequence
  SiRNA target sequence
gtttgttgtaaaatctgttaaaaaga

SEQ ID NO: 222108 - DNA, 26 bp, Artificial sequence
  SiRNA target sequence
tttgttgtaaaatctgttaaaaagaa

SEQ ID NO: 222109 - DNA, 26 bp, Artificial sequence
  SiRNA target sequence
ttgttgtaaaatctgttaaaaagaag

SEQ ID NO: 222110 - DNA, 26 bp, Artificial sequence
  SiRNA target sequence
tgttgtaaaatctgttaaaaagaagg

SEQ ID NO: 222111 - DNA, 26 bp, Artificial sequence
  SiRNA target sequence
gttgtaaaatctgttaaaaagaaggg

SEQ ID NO: 222112 - DNA, 26 bp, Artificial sequence
  SiRNA target sequence
ttgtaaaatctgttaaaaagaaggga

SEQ ID NO: 222113 - DNA, 26 bp, Artificial sequence
  SiRNA target sequence
tgtaaaatctgttaaaaagaagggac

SEQ ID NO: 222114 - DNA, 26 bp, Artificial sequence
  SiRNA target sequence
gtaaaatctgttaaaaagaagggacc

SEQ ID NO: 222115 - DNA, 26 bp, Artificial sequence
  SiRNA target sequence
taaaatctgttaaaaagaagggacca

SEQ ID NO: 222116 - DNA, 26 bp, Artificial sequence
  SiRNA target sequence
aaaatctgttaaaaagaagggaccaa

SEQ ID NO: 222117 - DNA, 26 bp, Artificial sequence
  SiRNA target sequence
aaatctgttaaaaagaagggaccaaa

SEQ ID NO: 222118 - DNA, 26 bp, Artificial sequence
  SiRNA target sequence
aatctgttaaaaagaagggaccaaaa

SEQ ID NO: 222119 - DNA, 26 bp, Artificial sequence
  SiRNA target sequence
atctgttaaaaagaagggaccaaaag

SEQ ID NO: 222120 - DNA, 26 bp, Artificial sequence
  SiRNA target sequence
tctgttaaaaagaagggaccaaaagt

SEQ ID NO: 222121 - DNA, 26 bp, Artificial sequence
  SiRNA target sequence
ctgttaaaaagaagggaccaaaagtt

SEQ ID NO: 222122 - DNA, 26 bp, Artificial sequence
  SiRNA target sequence
tgttaaaaagaagggaccaaaagtta

SEQ ID NO: 222123 - DNA, 26 bp, Artificial sequence
  SiRNA target sequence
gttaaaaagaagggaccaaaagttaa

SEQ ID NO: 222124 - DNA, 26 bp, Artificial sequence
  SiRNA target sequence
ttaaaaagaagggaccaaaagttaaa

SEQ ID NO: 222125 - DNA, 26 bp, Artificial sequence
  SiRNA target sequence
taaaaagaagggaccaaaagttaaag

SEQ ID NO: 222126 - DNA, 26 bp, Artificial sequence
  SiRNA target sequence
aaaaagaagggaccaaaagttaaagt

SEQ ID NO: 222127 - DNA, 26 bp, Artificial sequence
  SiRNA target sequence
aaaagaagggaccaaaagttaaagta

SEQ ID NO: 222128 - DNA, 26 bp, Artificial sequence
  SiRNA target sequence
aaagaagggaccaaaagttaaagtag

SEQ ID NO: 222129 - DNA, 26 bp, Artificial sequence
  SiRNA target sequence
aagaagggaccaaaagttaaagtagg

SEQ ID NO: 222130 - DNA, 26 bp, Artificial sequence
  SiRNA target sequence
agaagggaccaaaagttaaagtagga

SEQ ID NO: 222131 - DNA, 26 bp, Artificial sequence
  SiRNA target sequence
gaagggaccaaaagttaaagtaggat

SEQ ID NO: 222132 - DNA, 26 bp, Artificial sequence
  SiRNA target sequence
aagggaccaaaagttaaagtaggatt

SEQ ID NO: 222133 - DNA, 26 bp, Artificial sequence
  SiRNA target sequence
agggaccaaaagttaaagtaggattt

SEQ ID NO: 222134 - DNA, 26 bp, Artificial sequence
  SiRNA target sequence
gggaccaaaagttaaagtaggatttg

SEQ ID NO: 222135 - DNA, 26 bp, Artificial sequence
  SiRNA target sequence
ggaccaaaagttaaagtaggatttgc

SEQ ID NO: 222136 - DNA, 26 bp, Artificial sequence
  SiRNA target sequence
gaccaaaagttaaagtaggatttgcg

SEQ ID NO: 222137 - DNA, 26 bp, Artificial sequence
  SiRNA target sequence
accaaaagttaaagtaggatttgcgg

SEQ ID NO: 222138 - DNA, 26 bp, Artificial sequence
  SiRNA target sequence
ccaaaagttaaagtaggatttgcgga

SEQ ID NO: 222139 - DNA, 26 bp, Artificial sequence
  SiRNA target sequence
caaaagttaaagtaggatttgcggag

SEQ ID NO: 222140 - DNA, 26 bp, Artificial sequence
  SiRNA target sequence
aaaagttaaagtaggatttgcggagg

SEQ ID NO: 222141 - DNA, 26 bp, Artificial sequence
  SiRNA target sequence
aaagttaaagtaggatttgcggaggg

SEQ ID NO: 222142 - DNA, 26 bp, Artificial sequence
  SiRNA target sequence
aagttaaagtaggatttgcggagggc

SEQ ID NO: 222143 - DNA, 26 bp, Artificial sequence
  SiRNA target sequence
agttaaagtaggatttgcggagggcc

SEQ ID NO: 222144 - DNA, 26 bp, Artificial sequence
  SiRNA target sequence
gttaaagtaggatttgcggagggcct

SEQ ID NO: 222145 - DNA, 26 bp, Artificial sequence
  SiRNA target sequence
ttaaagtaggatttgcggagggcctt

SEQ ID NO: 222146 - DNA, 26 bp, Artificial sequence
  SiRNA target sequence
taaagtaggatttgcggagggcctta

SEQ ID NO: 222147 - DNA, 26 bp, Artificial sequence
  SiRNA target sequence
aaagtaggatttgcggagggccttaa

SEQ ID NO: 222148 - DNA, 26 bp, Artificial sequence
  SiRNA target sequence
aagtaggatttgcggagggccttaaa

SEQ ID NO: 222149 - DNA, 26 bp, Artificial sequence
  SiRNA target sequence
agtaggatttgcggagggccttaaag

SEQ ID NO: 222150 - DNA, 26 bp, Artificial sequence
  SiRNA target sequence
gtaggatttgcggagggccttaaaga

SEQ ID NO: 222151 - DNA, 26 bp, Artificial sequence
  SiRNA target sequence
taggatttgcggagggccttaaagaa

SEQ ID NO: 222152 - DNA, 26 bp, Artificial sequence
  SiRNA target sequence
aggatttgcggagggccttaaagaaa

SEQ ID NO: 222153 - DNA, 26 bp, Artificial sequence
  SiRNA target sequence
ggatttgcggagggccttaaagaaat

SEQ ID NO: 222154 - DNA, 26 bp, Artificial sequence
  SiRNA target sequence
gatttgcggagggccttaaagaaatg

SEQ ID NO: 222155 - DNA, 26 bp, Artificial sequence
  SiRNA target sequence
atttgcggagggccttaaagaaatga

SEQ ID NO: 222156 - DNA, 26 bp, Artificial sequence
  SiRNA target sequence
tttgcggagggccttaaagaaatgat

SEQ ID NO: 222157 - DNA, 26 bp, Artificial sequence
  SiRNA target sequence
ttgcggagggccttaaagaaatgatg

SEQ ID NO: 222158 - DNA, 26 bp, Artificial sequence
  SiRNA target sequence
tgcggagggccttaaagaaatgatgg

SEQ ID NO: 222159 - DNA, 26 bp, Artificial sequence
  SiRNA target sequence
gcggagggccttaaagaaatgatggc

SEQ ID NO: 222160 - DNA, 26 bp, Artificial sequence
  SiRNA target sequence
cggagggccttaaagaaatgatggca

SEQ ID NO: 222161 - DNA, 26 bp, Artificial sequence
  SiRNA target sequence
ggagggccttaaagaaatgatggcat

SEQ ID NO: 222162 - DNA, 26 bp, Artificial sequence
  SiRNA target sequence
gagggccttaaagaaatgatggcatc

SEQ ID NO: 222163 - DNA, 26 bp, Artificial sequence
  SiRNA target sequence
agggccttaaagaaatgatggcatca

SEQ ID NO: 222164 - DNA, 26 bp, Artificial sequence
  SiRNA target sequence
gggccttaaagaaatgatggcatcaa

SEQ ID NO: 222165 - DNA, 26 bp, Artificial sequence
  SiRNA target sequence
ggccttaaagaaatgatggcatcaaa

SEQ ID NO: 222166 - DNA, 26 bp, Artificial sequence
  SiRNA target sequence
gccttaaagaaatgatggcatcaaag

SEQ ID NO: 222167 - DNA, 26 bp, Artificial sequence
  SiRNA target sequence
ccttaaagaaatgatggcatcaaagt

SEQ ID NO: 222168 - DNA, 26 bp, Artificial sequence
  SiRNA target sequence
cttaaagaaatgatggcatcaaagtt

SEQ ID NO: 222169 - DNA, 26 bp, Artificial sequence
  SiRNA target sequence
ttaaagaaatgatggcatcaaagtta

SEQ ID NO: 222170 - DNA, 26 bp, Artificial sequence
  SiRNA target sequence
taaagaaatgatggcatcaaagttat

SEQ ID NO: 222171 - DNA, 26 bp, Artificial sequence
  SiRNA target sequence
aaagaaatgatggcatcaaagttatt

SEQ ID NO: 222172 - DNA, 26 bp, Artificial sequence
  SiRNA target sequence
aagaaatgatggcatcaaagttatta

SEQ ID NO: 222173 - DNA, 26 bp, Artificial sequence
  SiRNA target sequence
agaaatgatggcatcaaagttattac

SEQ ID NO: 222174 - DNA, 26 bp, Artificial sequence
  SiRNA target sequence
gaaatgatggcatcaaagttattact

SEQ ID NO: 222175 - DNA, 26 bp, Artificial sequence
  SiRNA target sequence
aaatgatggcatcaaagttattactt

SEQ ID NO: 222176 - DNA, 26 bp, Artificial sequence
  SiRNA target sequence
aatgatggcatcaaagttattactta

SEQ ID NO: 222177 - DNA, 26 bp, Artificial sequence
  SiRNA target sequence
atgatggcatcaaagttattacttaa

SEQ ID NO: 222178 - DNA, 26 bp, Artificial sequence
  SiRNA target sequence
tgatggcatcaaagttattacttaac

SEQ ID NO: 222179 - DNA, 26 bp, Artificial sequence
  SiRNA target sequence
gatggcatcaaagttattacttaaca

SEQ ID NO: 222180 - DNA, 26 bp, Artificial sequence
  SiRNA target sequence
atggcatcaaagttattacttaacat

SEQ ID NO: 222181 - DNA, 26 bp, Artificial sequence
  SiRNA target sequence
tggcatcaaagttattacttaacatt

SEQ ID NO: 222182 - DNA, 26 bp, Artificial sequence
  SiRNA target sequence
ggcatcaaagttattacttaacattt

SEQ ID NO: 222183 - DNA, 26 bp, Artificial sequence
  SiRNA target sequence
gcatcaaagttattacttaacatttc

SEQ ID NO: 222184 - DNA, 26 bp, Artificial sequence
  SiRNA target sequence
catcaaagttattacttaacatttca

SEQ ID NO: 222185 - DNA, 26 bp, Artificial sequence
  SiRNA target sequence
atcaaagttattacttaacatttcat

SEQ ID NO: 222186 - DNA, 26 bp, Artificial sequence
  SiRNA target sequence
tcaaagttattacttaacatttcatt

SEQ ID NO: 222187 - DNA, 26 bp, Artificial sequence
  SiRNA target sequence
caaagttattacttaacatttcatta

SEQ ID NO: 222188 - DNA, 26 bp, Artificial sequence
  SiRNA target sequence
aaagttattacttaacatttcattaa

SEQ ID NO: 222189 - DNA, 26 bp, Artificial sequence
  SiRNA target sequence
aagttattacttaacatttcattaac

SEQ ID NO: 222190 - DNA, 26 bp, Artificial sequence
  SiRNA target sequence
agttattacttaacatttcattaact

SEQ ID NO: 222191 - DNA, 26 bp, Artificial sequence
  SiRNA target sequence
gttattacttaacatttcattaactg

SEQ ID NO: 222192 - DNA, 26 bp, Artificial sequence
  SiRNA target sequence
ttattacttaacatttcattaactgt

SEQ ID NO: 222193 - DNA, 26 bp, Artificial sequence
  SiRNA target sequence
tattacttaacatttcattaactgtt

SEQ ID NO: 222194 - DNA, 26 bp, Artificial sequence
  SiRNA target sequence
attacttaacatttcattaactgtta

SEQ ID NO: 222195 - DNA, 26 bp, Artificial sequence
  SiRNA target sequence
ttacttaacatttcattaactgttat

SEQ ID NO: 222196 - DNA, 26 bp, Artificial sequence
  SiRNA target sequence
tacttaacatttcattaactgttatg

SEQ ID NO: 222197 - DNA, 26 bp, Artificial sequence
  SiRNA target sequence
acttaacatttcattaactgttatgt

SEQ ID NO: 222198 - DNA, 26 bp, Artificial sequence
  SiRNA target sequence
cttaacatttcattaactgttatgtt

SEQ ID NO: 222199 - DNA, 26 bp, Artificial sequence
  SiRNA target sequence
ttaacatttcattaactgttatgttc

SEQ ID NO: 222200 - DNA, 26 bp, Artificial sequence
  SiRNA target sequence
taacatttcattaactgttatgttct

SEQ ID NO: 222201 - DNA, 26 bp, Artificial sequence
  SiRNA target sequence
aacatttcattaactgttatgttcta

SEQ ID NO: 222202 - DNA, 26 bp, Artificial sequence
  SiRNA target sequence
acatttcattaactgttatgttctat

SEQ ID NO: 222203 - DNA, 26 bp, Artificial sequence
  SiRNA target sequence
catttcattaactgttatgttctatg

SEQ ID NO: 222204 - DNA, 26 bp, Artificial sequence
  SiRNA target sequence
atttcattaactgttatgttctatgg

SEQ ID NO: 222205 - DNA, 26 bp, Artificial sequence
  SiRNA target sequence
tttcattaactgttatgttctatggt

SEQ ID NO: 222206 - DNA, 26 bp, Artificial sequence
  SiRNA target sequence
ttcattaactgttatgttctatggta

SEQ ID NO: 222207 - DNA, 26 bp, Artificial sequence
  SiRNA target sequence
tcattaactgttatgttctatggtat

SEQ ID NO: 222208 - DNA, 26 bp, Artificial sequence
  SiRNA target sequence
cattaactgttatgttctatggtata

SEQ ID NO: 222209 - DNA, 26 bp, Artificial sequence
  SiRNA target sequence
attaactgttatgttctatggtatat

SEQ ID NO: 222210 - DNA, 26 bp, Artificial sequence
  SiRNA target sequence
ttaactgttatgttctatggtatatc

SEQ ID NO: 222211 - DNA, 26 bp, Artificial sequence
  SiRNA target sequence
taactgttatgttctatggtatatca

SEQ ID NO: 222212 - DNA, 26 bp, Artificial sequence
  SiRNA target sequence
aactgttatgttctatggtatatcaa

SEQ ID NO: 222213 - DNA, 26 bp, Artificial sequence
  SiRNA target sequence
actgttatgttctatggtatatcaac

SEQ ID NO: 222214 - DNA, 26 bp, Artificial sequence
  SiRNA target sequence
ctgttatgttctatggtatatcaact

SEQ ID NO: 222215 - DNA, 26 bp, Artificial sequence
  SiRNA target sequence
tgttatgttctatggtatatcaacta

SEQ ID NO: 222216 - DNA, 26 bp, Artificial sequence
  SiRNA target sequence
gttatgttctatggtatatcaactaa

SEQ ID NO: 222217 - DNA, 26 bp, Artificial sequence
  SiRNA target sequence
ttatgttctatggtatatcaactaat

SEQ ID NO: 222218 - DNA, 26 bp, Artificial sequence
  SiRNA target sequence
tatgttctatggtatatcaactaatt

SEQ ID NO: 222219 - DNA, 26 bp, Artificial sequence
  SiRNA target sequence
atgttctatggtatatcaactaattt

SEQ ID NO: 222220 - DNA, 26 bp, Artificial sequence
  SiRNA target sequence
tgttctatggtatatcaactaattta

SEQ ID NO: 222221 - DNA, 26 bp, Artificial sequence
  SiRNA target sequence
gttctatggtatatcaactaatttaa

SEQ ID NO: 222222 - DNA, 26 bp, Artificial sequence
  SiRNA target sequence
ttctatggtatatcaactaatttaat

SEQ ID NO: 222223 - DNA, 26 bp, Artificial sequence
  SiRNA target sequence
tctatggtatatcaactaatttaata

SEQ ID NO: 222224 - DNA, 26 bp, Artificial sequence
  SiRNA target sequence
ctatggtatatcaactaatttaatag

SEQ ID NO: 222225 - DNA, 26 bp, Artificial sequence
  SiRNA target sequence
tatggtatatcaactaatttaataga

SEQ ID NO: 222226 - DNA, 26 bp, Artificial sequence
  SiRNA target sequence
atggtatatcaactaatttaatagaa

SEQ ID NO: 222227 - DNA, 26 bp, Artificial sequence
  SiRNA target sequence
tggtatatcaactaatttaatagaat

SEQ ID NO: 222228 - DNA, 26 bp, Artificial sequence
  SiRNA target sequence
ggtatatcaactaatttaatagaatc

SEQ ID NO: 222229 - DNA, 26 bp, Artificial sequence
  SiRNA target sequence
gtatatcaactaatttaatagaatca

SEQ ID NO: 222230 - DNA, 26 bp, Artificial sequence
  SiRNA target sequence
tatatcaactaatttaatagaatcaa

SEQ ID NO: 222231 - DNA, 26 bp, Artificial sequence
  SiRNA target sequence
atatcaactaatttaatagaatcaac

SEQ ID NO: 222232 - DNA, 26 bp, Artificial sequence
  SiRNA target sequence
tatcaactaatttaatagaatcaaca

SEQ ID NO: 222233 - DNA, 26 bp, Artificial sequence
  SiRNA target sequence
atcaactaatttaatagaatcaacat

SEQ ID NO: 222234 - DNA, 26 bp, Artificial sequence
  SiRNA target sequence
tcaactaatttaatagaatcaacatt

SEQ ID NO: 222235 - DNA, 26 bp, Artificial sequence
  SiRNA target sequence
caactaatttaatagaatcaacattt

SEQ ID NO: 222236 - DNA, 26 bp, Artificial sequence
  SiRNA target sequence
aactaatttaatagaatcaacattta

SEQ ID NO: 222237 - DNA, 26 bp, Artificial sequence
  SiRNA target sequence
actaatttaatagaatcaacatttaa

SEQ ID NO: 222238 - DNA, 26 bp, Artificial sequence
  SiRNA target sequence
ctaatttaatagaatcaacatttaaa

SEQ ID NO: 222239 - DNA, 26 bp, Artificial sequence
  SiRNA target sequence
taatttaatagaatcaacatttaaaa

SEQ ID NO: 222240 - DNA, 26 bp, Artificial sequence
  SiRNA target sequence
aatttaatagaatcaacatttaaaag

SEQ ID NO: 222241 - DNA, 26 bp, Artificial sequence
  SiRNA target sequence
atttaatagaatcaacatttaaaagt

SEQ ID NO: 222242 - DNA, 26 bp, Artificial sequence
  SiRNA target sequence
tttaatagaatcaacatttaaaagtg

SEQ ID NO: 222243 - DNA, 26 bp, Artificial sequence
  SiRNA target sequence
ttaatagaatcaacatttaaaagtgg

SEQ ID NO: 222244 - DNA, 26 bp, Artificial sequence
  SiRNA target sequence
taatagaatcaacatttaaaagtgga

SEQ ID NO: 222245 - DNA, 26 bp, Artificial sequence
  SiRNA target sequence
aatagaatcaacatttaaaagtggac

SEQ ID NO: 222246 - DNA, 26 bp, Artificial sequence
  SiRNA target sequence
atagaatcaacatttaaaagtggact

SEQ ID NO: 222247 - DNA, 26 bp, Artificial sequence
  SiRNA target sequence
tagaatcaacatttaaaagtggactt

SEQ ID NO: 222248 - DNA, 26 bp, Artificial sequence
  SiRNA target sequence
agaatcaacatttaaaagtggacttg

SEQ ID NO: 222249 - DNA, 26 bp, Artificial sequence
  SiRNA target sequence
gaatcaacatttaaaagtggacttgt

SEQ ID NO: 222250 - DNA, 26 bp, Artificial sequence
  SiRNA target sequence
aatcaacatttaaaagtggacttgtg

SEQ ID NO: 222251 - DNA, 26 bp, Artificial sequence
  SiRNA target sequence
atcaacatttaaaagtggacttgtga

SEQ ID NO: 222252 - DNA, 26 bp, Artificial sequence
  SiRNA target sequence
tcaacatttaaaagtggacttgtgaa

SEQ ID NO: 222253 - DNA, 26 bp, Artificial sequence
  SiRNA target sequence
caacatttaaaagtggacttgtgaaa

SEQ ID NO: 222254 - DNA, 26 bp, Artificial sequence
  SiRNA target sequence
aacatttaaaagtggacttgtgaaag

SEQ ID NO: 222255 - DNA, 26 bp, Artificial sequence
  SiRNA target sequence
acatttaaaagtggacttgtgaaagg

SEQ ID NO: 222256 - DNA, 26 bp, Artificial sequence
  SiRNA target sequence
catttaaaagtggacttgtgaaaggt

SEQ ID NO: 222257 - DNA, 26 bp, Artificial sequence
  SiRNA target sequence
atttaaaagtggacttgtgaaaggtg

SEQ ID NO: 222258 - DNA, 26 bp, Artificial sequence
  SiRNA target sequence
tttaaaagtggacttgtgaaaggtgc

SEQ ID NO: 222259 - DNA, 26 bp, Artificial sequence
  SiRNA target sequence
ttaaaagtggacttgtgaaaggtgca

SEQ ID NO: 222260 - DNA, 26 bp, Artificial sequence
  SiRNA target sequence
taaaagtggacttgtgaaaggtgcag

SEQ ID NO: 222261 - DNA, 26 bp, Artificial sequence
  SiRNA target sequence
aaaagtggacttgtgaaaggtgcaga

SEQ ID NO: 222262 - DNA, 26 bp, Artificial sequence
  SiRNA target sequence
aaagtggacttgtgaaaggtgcagaa

SEQ ID NO: 222263 - DNA, 26 bp, Artificial sequence
  SiRNA target sequence
aagtggacttgtgaaaggtgcagaag

SEQ ID NO: 222264 - DNA, 26 bp, Artificial sequence
  SiRNA target sequence
agtggacttgtgaaaggtgcagaaga

SEQ ID NO: 222265 - DNA, 26 bp, Artificial sequence
  SiRNA target sequence
gtggacttgtgaaaggtgcagaagaa

SEQ ID NO: 222266 - DNA, 26 bp, Artificial sequence
  SiRNA target sequence
tggacttgtgaaaggtgcagaagaat

SEQ ID NO: 222267 - DNA, 26 bp, Artificial sequence
  SiRNA target sequence
ggacttgtgaaaggtgcagaagaatt

SEQ ID NO: 222268 - DNA, 26 bp, Artificial sequence
  SiRNA target sequence
gacttgtgaaaggtgcagaagaatta

SEQ ID NO: 222269 - DNA, 26 bp, Artificial sequence
  SiRNA target sequence
acttgtgaaaggtgcagaagaattaa

SEQ ID NO: 222270 - DNA, 26 bp, Artificial sequence
  SiRNA target sequence
cttgtgaaaggtgcagaagaattaaa

SEQ ID NO: 222271 - DNA, 26 bp, Artificial sequence
  SiRNA target sequence
ttgtgaaaggtgcagaagaattaaac

SEQ ID NO: 222272 - DNA, 26 bp, Artificial sequence
  SiRNA target sequence
tgtgaaaggtgcagaagaattaaacg

SEQ ID NO: 222273 - DNA, 26 bp, Artificial sequence
  SiRNA target sequence
gtgaaaggtgcagaagaattaaacga

SEQ ID NO: 222274 - DNA, 26 bp, Artificial sequence
  SiRNA target sequence
tgaaaggtgcagaagaattaaacgag

SEQ ID NO: 222275 - DNA, 26 bp, Artificial sequence
  SiRNA target sequence
gaaaggtgcagaagaattaaacgaga

SEQ ID NO: 222276 - DNA, 26 bp, Artificial sequence
  SiRNA target sequence
aaaggtgcagaagaattaaacgagaa

SEQ ID NO: 222277 - DNA, 26 bp, Artificial sequence
  SiRNA target sequence
aaggtgcagaagaattaaacgagaat

SEQ ID NO: 222278 - DNA, 26 bp, Artificial sequence
  SiRNA target sequence
aggtgcagaagaattaaacgagaata

SEQ ID NO: 222279 - DNA, 26 bp, Artificial sequence
  SiRNA target sequence
ggtgcagaagaattaaacgagaatac

SEQ ID NO: 222280 - DNA, 26 bp, Artificial sequence
  SiRNA target sequence
gtgcagaagaattaaacgagaatact

SEQ ID NO: 222281 - DNA, 26 bp, Artificial sequence
  SiRNA target sequence
tgcagaagaattaaacgagaatacta

SEQ ID NO: 222282 - DNA, 26 bp, Artificial sequence
  SiRNA target sequence
gcagaagaattaaacgagaatactaa

SEQ ID NO: 222283 - DNA, 26 bp, Artificial sequence
  SiRNA target sequence
cagaagaattaaacgagaatactaaa

SEQ ID NO: 222284 - DNA, 26 bp, Artificial sequence
  SiRNA target sequence
agaagaattaaacgagaatactaaaa

SEQ ID NO: 222285 - DNA, 26 bp, Artificial sequence
  SiRNA target sequence
gaagaattaaacgagaatactaaaag

SEQ ID NO: 222286 - DNA, 26 bp, Artificial sequence
  SiRNA target sequence
aagaattaaacgagaatactaaaagt

SEQ ID NO: 222287 - DNA, 26 bp, Artificial sequence
  SiRNA target sequence
agaattaaacgagaatactaaaagtt

SEQ ID NO: 222288 - DNA, 26 bp, Artificial sequence
  SiRNA target sequence
gaattaaacgagaatactaaaagtta

SEQ ID NO: 222289 - DNA, 26 bp, Artificial sequence
  SiRNA target sequence
aattaaacgagaatactaaaagttat

SEQ ID NO: 222290 - DNA, 26 bp, Artificial sequence
  SiRNA target sequence
attaaacgagaatactaaaagttatt

SEQ ID NO: 222291 - DNA, 26 bp, Artificial sequence
  SiRNA target sequence
ttaaacgagaatactaaaagttattc

SEQ ID NO: 222292 - DNA, 26 bp, Artificial sequence
  SiRNA target sequence
taaacgagaatactaaaagttattct

SEQ ID NO: 222293 - DNA, 26 bp, Artificial sequence
  SiRNA target sequence
aaacgagaatactaaaagttattcta

SEQ ID NO: 222294 - DNA, 26 bp, Artificial sequence
  SiRNA target sequence
aacgagaatactaaaagttattctat

SEQ ID NO: 222295 - DNA, 26 bp, Artificial sequence
  SiRNA target sequence
acgagaatactaaaagttattctatg

SEQ ID NO: 222296 - DNA, 26 bp, Artificial sequence
  SiRNA target sequence
cgagaatactaaaagttattctatgg

SEQ ID NO: 222297 - DNA, 26 bp, Artificial sequence
  SiRNA target sequence
gagaatactaaaagttattctatggg

SEQ ID NO: 222298 - DNA, 26 bp, Artificial sequence
  SiRNA target sequence
agaatactaaaagttattctatggga

SEQ ID NO: 222299 - DNA, 26 bp, Artificial sequence
  SiRNA target sequence
gaatactaaaagttattctatgggat

SEQ ID NO: 222300 - DNA, 26 bp, Artificial sequence
  SiRNA target sequence
aatactaaaagttattctatgggata

SEQ ID NO: 222301 - DNA, 26 bp, Artificial sequence
  SiRNA target sequence
atactaaaagttattctatgggatat

SEQ ID NO: 222302 - DNA, 26 bp, Artificial sequence
  SiRNA target sequence
tactaaaagttattctatgggatata

SEQ ID NO: 222303 - DNA, 26 bp, Artificial sequence
  SiRNA target sequence
actaaaagttattctatgggatataa

SEQ ID NO: 222304 - DNA, 26 bp, Artificial sequence
  SiRNA target sequence
ctaaaagttattctatgggatataat

SEQ ID NO: 222305 - DNA, 26 bp, Artificial sequence
  SiRNA target sequence
taaaagttattctatgggatataatt

SEQ ID NO: 222306 - DNA, 26 bp, Artificial sequence
  SiRNA target sequence
aaaagttattctatgggatataattc

SEQ ID NO: 222307 - DNA, 26 bp, Artificial sequence
  SiRNA target sequence
aaagttattctatgggatataattca

SEQ ID NO: 222308 - DNA, 26 bp, Artificial sequence
  SiRNA target sequence
aagttattctatgggatataattcat

SEQ ID NO: 222309 - DNA, 26 bp, Artificial sequence
  SiRNA target sequence
agttattctatgggatataattcatt

SEQ ID NO: 222310 - DNA, 26 bp, Artificial sequence
  SiRNA target sequence
gttattctatgggatataattcattt

SEQ ID NO: 222311 - DNA, 26 bp, Artificial sequence
  SiRNA target sequence
ttattctatgggatataattcatttg

SEQ ID NO: 222312 - DNA, 26 bp, Artificial sequence
  SiRNA target sequence
tattctatgggatataattcatttga

SEQ ID NO: 222313 - DNA, 26 bp, Artificial sequence
  SiRNA target sequence
attctatgggatataattcatttgaa

SEQ ID NO: 222314 - DNA, 26 bp, Artificial sequence
  SiRNA target sequence
ttctatgggatataattcatttgaac

SEQ ID NO: 222315 - DNA, 26 bp, Artificial sequence
  SiRNA target sequence
tctatgggatataattcatttgaaca

SEQ ID NO: 222316 - DNA, 26 bp, Artificial sequence
  SiRNA target sequence
ctatgggatataattcatttgaacaa

SEQ ID NO: 222317 - DNA, 26 bp, Artificial sequence
  SiRNA target sequence
tatgggatataattcatttgaacaaa

SEQ ID NO: 222318 - DNA, 26 bp, Artificial sequence
  SiRNA target sequence
atgggatataattcatttgaacaaaa

SEQ ID NO: 222319 - DNA, 26 bp, Artificial sequence
  SiRNA target sequence
tgggatataattcatttgaacaaaag

SEQ ID NO: 222320 - DNA, 26 bp, Artificial sequence
  SiRNA target sequence
gggatataattcatttgaacaaaaga

SEQ ID NO: 222321 - DNA, 26 bp, Artificial sequence
  SiRNA target sequence
ggatataattcatttgaacaaaagat

SEQ ID NO: 222322 - DNA, 26 bp, Artificial sequence
  SiRNA target sequence
gatataattcatttgaacaaaagata

SEQ ID NO: 222323 - DNA, 26 bp, Artificial sequence
  SiRNA target sequence
atataattcatttgaacaaaagatag

SEQ ID NO: 222324 - DNA, 26 bp, Artificial sequence
  SiRNA target sequence
tataattcatttgaacaaaagatagc

SEQ ID NO: 222325 - DNA, 26 bp, Artificial sequence
  SiRNA target sequence
ataattcatttgaacaaaagatagca

SEQ ID NO: 222326 - DNA, 26 bp, Artificial sequence
  SiRNA target sequence
taattcatttgaacaaaagatagcat

SEQ ID NO: 222327 - DNA, 26 bp, Artificial sequence
  SiRNA target sequence
aattcatttgaacaaaagatagcatc

SEQ ID NO: 222328 - DNA, 26 bp, Artificial sequence
  SiRNA target sequence
attcatttgaacaaaagatagcatca

SEQ ID NO: 222329 - DNA, 26 bp, Artificial sequence
  SiRNA target sequence
ttcatttgaacaaaagatagcatcaa

SEQ ID NO: 222330 - DNA, 26 bp, Artificial sequence
  SiRNA target sequence
tcatttgaacaaaagatagcatcaat

SEQ ID NO: 222331 - DNA, 26 bp, Artificial sequence
  SiRNA target sequence
catttgaacaaaagatagcatcaata

SEQ ID NO: 222332 - DNA, 26 bp, Artificial sequence
  SiRNA target sequence
atttgaacaaaagatagcatcaataa

SEQ ID NO: 222333 - DNA, 26 bp, Artificial sequence
  SiRNA target sequence
tttgaacaaaagatagcatcaataac

SEQ ID NO: 222334 - DNA, 26 bp, Artificial sequence
  SiRNA target sequence
ttgaacaaaagatagcatcaataact

SEQ ID NO: 222335 - DNA, 26 bp, Artificial sequence
  SiRNA target sequence
tgaacaaaagatagcatcaataactg

SEQ ID NO: 222336 - DNA, 26 bp, Artificial sequence
  SiRNA target sequence
gaacaaaagatagcatcaataactgt

SEQ ID NO: 222337 - DNA, 26 bp, Artificial sequence
  SiRNA target sequence
aacaaaagatagcatcaataactgtt

SEQ ID NO: 222338 - DNA, 26 bp, Artificial sequence
  SiRNA target sequence
acaaaagatagcatcaataactgtta

SEQ ID NO: 222339 - DNA, 26 bp, Artificial sequence
  SiRNA target sequence
caaaagatagcatcaataactgttat

SEQ ID NO: 222340 - DNA, 26 bp, Artificial sequence
  SiRNA target sequence
aaaagatagcatcaataactgttatt

SEQ ID NO: 222341 - DNA, 26 bp, Artificial sequence
  SiRNA target sequence
aaagatagcatcaataactgttatta

SEQ ID NO: 222342 - DNA, 26 bp, Artificial sequence
  SiRNA target sequence
aagatagcatcaataactgttattat

SEQ ID NO: 222343 - DNA, 26 bp, Artificial sequence
  SiRNA target sequence
agatagcatcaataactgttattatc

SEQ ID NO: 222344 - DNA, 26 bp, Artificial sequence
  SiRNA target sequence
gatagcatcaataactgttattatcc

SEQ ID NO: 222345 - DNA, 26 bp, Artificial sequence
  SiRNA target sequence
atagcatcaataactgttattatcct

SEQ ID NO: 222346 - DNA, 26 bp, Artificial sequence
  SiRNA target sequence
tagcatcaataactgttattatcctg

SEQ ID NO: 222347 - DNA, 26 bp, Artificial sequence
  SiRNA target sequence
agcatcaataactgttattatcctgc

SEQ ID NO: 222348 - DNA, 26 bp, Artificial sequence
  SiRNA target sequence
gcatcaataactgttattatcctgct

SEQ ID NO: 222349 - DNA, 26 bp, Artificial sequence
  SiRNA target sequence
catcaataactgttattatcctgctt

SEQ ID NO: 222350 - DNA, 26 bp, Artificial sequence
  SiRNA target sequence
atcaataactgttattatcctgcttt

SEQ ID NO: 222351 - DNA, 26 bp, Artificial sequence
  SiRNA target sequence
tcaataactgttattatcctgctttt

SEQ ID NO: 222352 - DNA, 26 bp, Artificial sequence
  SiRNA target sequence
caataactgttattatcctgctttta

SEQ ID NO: 222353 - DNA, 26 bp, Artificial sequence
  SiRNA target sequence
aataactgttattatcctgcttttat

SEQ ID NO: 222354 - DNA, 26 bp, Artificial sequence
  SiRNA target sequence
ataactgttattatcctgcttttatc

SEQ ID NO: 222355 - DNA, 26 bp, Artificial sequence
  SiRNA target sequence
taactgttattatcctgcttttatca

SEQ ID NO: 222356 - DNA, 26 bp, Artificial sequence
  SiRNA target sequence
aactgttattatcctgcttttatcac

SEQ ID NO: 222357 - DNA, 26 bp, Artificial sequence
  SiRNA target sequence
actgttattatcctgcttttatcacc

SEQ ID NO: 222358 - DNA, 26 bp, Artificial sequence
  SiRNA target sequence
ctgttattatcctgcttttatcacca

SEQ ID NO: 222359 - DNA, 26 bp, Artificial sequence
  SiRNA target sequence
tgttattatcctgcttttatcaccat

SEQ ID NO: 222360 - DNA, 26 bp, Artificial sequence
  SiRNA target sequence
gttattatcctgcttttatcaccatt

SEQ ID NO: 222361 - DNA, 26 bp, Artificial sequence
  SiRNA target sequence
ttattatcctgcttttatcaccattt

SEQ ID NO: 222362 - DNA, 26 bp, Artificial sequence
  SiRNA target sequence
tattatcctgcttttatcaccatttc

SEQ ID NO: 222363 - DNA, 26 bp, Artificial sequence
  SiRNA target sequence
attatcctgcttttatcaccatttcc

SEQ ID NO: 222364 - DNA, 26 bp, Artificial sequence
  SiRNA target sequence
ttatcctgcttttatcaccatttcca

SEQ ID NO: 222365 - DNA, 26 bp, Artificial sequence
  SiRNA target sequence
tatcctgcttttatcaccatttccaa

SEQ ID NO: 222366 - DNA, 26 bp, Artificial sequence
  SiRNA target sequence
atcctgcttttatcaccatttccaaa

SEQ ID NO: 222367 - DNA, 26 bp, Artificial sequence
  SiRNA target sequence
tcctgcttttatcaccatttccaaaa

SEQ ID NO: 222368 - DNA, 26 bp, Artificial sequence
  SiRNA target sequence
cctgcttttatcaccatttccaaaat

SEQ ID NO: 222369 - DNA, 26 bp, Artificial sequence
  SiRNA target sequence
ctgcttttatcaccatttccaaaatt

SEQ ID NO: 222370 - DNA, 26 bp, Artificial sequence
  SiRNA target sequence
tgcttttatcaccatttccaaaatta

SEQ ID NO: 222371 - DNA, 26 bp, Artificial sequence
  SiRNA target sequence
gcttttatcaccatttccaaaattaa

SEQ ID NO: 222372 - DNA, 26 bp, Artificial sequence
  SiRNA target sequence
cttttatcaccatttccaaaattaat

SEQ ID NO: 222373 - DNA, 26 bp, Artificial sequence
  SiRNA target sequence
ttttatcaccatttccaaaattaata

SEQ ID NO: 222374 - DNA, 26 bp, Artificial sequence
  SiRNA target sequence
tttatcaccatttccaaaattaatac

SEQ ID NO: 222375 - DNA, 26 bp, Artificial sequence
  SiRNA target sequence
ttatcaccatttccaaaattaataca

SEQ ID NO: 222376 - DNA, 26 bp, Artificial sequence
  SiRNA target sequence
tatcaccatttccaaaattaatacaa

SEQ ID NO: 222377 - DNA, 26 bp, Artificial sequence
  SiRNA target sequence
atcaccatttccaaaattaatacaaa

SEQ ID NO: 222378 - DNA, 26 bp, Artificial sequence
  SiRNA target sequence
tcaccatttccaaaattaatacaaac

SEQ ID NO: 222379 - DNA, 26 bp, Artificial sequence
  SiRNA target sequence
caccatttccaaaattaatacaaacc

SEQ ID NO: 222380 - DNA, 26 bp, Artificial sequence
  SiRNA target sequence
accatttccaaaattaatacaaacca

SEQ ID NO: 222381 - DNA, 26 bp, Artificial sequence
  SiRNA target sequence
ccatttccaaaattaatacaaaccaa

SEQ ID NO: 222382 - DNA, 26 bp, Artificial sequence
  SiRNA target sequence
catttccaaaattaatacaaaccaaa

SEQ ID NO: 222383 - DNA, 26 bp, Artificial sequence
  SiRNA target sequence
atttccaaaattaatacaaaccaaag

SEQ ID NO: 222384 - DNA, 26 bp, Artificial sequence
  SiRNA target sequence
tttccaaaattaatacaaaccaaagg

SEQ ID NO: 222385 - DNA, 26 bp, Artificial sequence
  SiRNA target sequence
ttccaaaattaatacaaaccaaagga

SEQ ID NO: 222386 - DNA, 26 bp, Artificial sequence
  SiRNA target sequence
tccaaaattaatacaaaccaaaggat

SEQ ID NO: 222387 - DNA, 26 bp, Artificial sequence
  SiRNA target sequence
ccaaaattaatacaaaccaaaggatg

SEQ ID NO: 222388 - DNA, 26 bp, Artificial sequence
  SiRNA target sequence
caaaattaatacaaaccaaaggatgg

SEQ ID NO: 222389 - DNA, 26 bp, Artificial sequence
  SiRNA target sequence
aaaattaatacaaaccaaaggatgga

SEQ ID NO: 222390 - DNA, 26 bp, Artificial sequence
  SiRNA target sequence
aaattaatacaaaccaaaggatggat

SEQ ID NO: 222391 - DNA, 26 bp, Artificial sequence
  SiRNA target sequence
aattaatacaaaccaaaggatggata

SEQ ID NO: 222392 - DNA, 26 bp, Artificial sequence
  SiRNA target sequence
attaatacaaaccaaaggatggatat

SEQ ID NO: 222393 - DNA, 26 bp, Artificial sequence
  SiRNA target sequence
ttaatacaaaccaaaggatggatatt

SEQ ID NO: 222394 - DNA, 26 bp, Artificial sequence
  SiRNA target sequence
taatacaaaccaaaggatggatattt

SEQ ID NO: 222395 - DNA, 26 bp, Artificial sequence
  SiRNA target sequence
aatacaaaccaaaggatggatatttg

SEQ ID NO: 222396 - DNA, 26 bp, Artificial sequence
  SiRNA target sequence
atacaaaccaaaggatggatatttgt

SEQ ID NO: 222397 - DNA, 26 bp, Artificial sequence
  SiRNA target sequence
tacaaaccaaaggatggatatttgtt

SEQ ID NO: 222398 - DNA, 26 bp, Artificial sequence
  SiRNA target sequence
acaaaccaaaggatggatatttgttg

SEQ ID NO: 222399 - DNA, 26 bp, Artificial sequence
  SiRNA target sequence
caaaccaaaggatggatatttgttgc

SEQ ID NO: 222400 - DNA, 26 bp, Artificial sequence
  SiRNA target sequence
aaaccaaaggatggatatttgttgcc

SEQ ID NO: 222401 - DNA, 26 bp, Artificial sequence
  SiRNA target sequence
aaccaaaggatggatatttgttgcca

SEQ ID NO: 222402 - DNA, 26 bp, Artificial sequence
  SiRNA target sequence
accaaaggatggatatttgttgccat

SEQ ID NO: 222403 - DNA, 26 bp, Artificial sequence
  SiRNA target sequence
ccaaaggatggatatttgttgccata

SEQ ID NO: 222404 - DNA, 26 bp, Artificial sequence
  SiRNA target sequence
caaaggatggatatttgttgccatag

SEQ ID NO: 222405 - DNA, 26 bp, Artificial sequence
  SiRNA target sequence
aaaggatggatatttgttgccatagc

SEQ ID NO: 222406 - DNA, 26 bp, Artificial sequence
  SiRNA target sequence
aaggatggatatttgttgccatagcg

SEQ ID NO: 222407 - DNA, 26 bp, Artificial sequence
  SiRNA target sequence
aggatggatatttgttgccatagcgt

SEQ ID NO: 222408 - DNA, 26 bp, Artificial sequence
  SiRNA target sequence
ggatggatatttgttgccatagcgtg

SEQ ID NO: 222409 - DNA, 26 bp, Artificial sequence
  SiRNA target sequence
gatggatatttgttgccatagcgtgc

SEQ ID NO: 222410 - DNA, 26 bp, Artificial sequence
  SiRNA target sequence
atggatatttgttgccatagcgtgcc

SEQ ID NO: 222411 - DNA, 26 bp, Artificial sequence
  SiRNA target sequence
tggatatttgttgccatagcgtgccc

SEQ ID NO: 222412 - DNA, 26 bp, Artificial sequence
  SiRNA target sequence
ggatatttgttgccatagcgtgccca

SEQ ID NO: 222413 - DNA, 26 bp, Artificial sequence
  SiRNA target sequence
gatatttgttgccatagcgtgcccac

SEQ ID NO: 222414 - DNA, 26 bp, Artificial sequence
  SiRNA target sequence
atatttgttgccatagcgtgcccact

SEQ ID NO: 222415 - DNA, 26 bp, Artificial sequence
  SiRNA target sequence
tatttgttgccatagcgtgcccactt

SEQ ID NO: 222416 - DNA, 26 bp, Artificial sequence
  SiRNA target sequence
atttgttgccatagcgtgcccactta

SEQ ID NO: 222417 - DNA, 26 bp, Artificial sequence
  SiRNA target sequence
tttgttgccatagcgtgcccacttat

SEQ ID NO: 222418 - DNA, 26 bp, Artificial sequence
  SiRNA target sequence
ttgttgccatagcgtgcccacttatt

SEQ ID NO: 222419 - DNA, 26 bp, Artificial sequence
  SiRNA target sequence
tgttgccatagcgtgcccacttatta

SEQ ID NO: 222420 - DNA, 26 bp, Artificial sequence
  SiRNA target sequence
gttgccatagcgtgcccacttattac

SEQ ID NO: 222421 - DNA, 26 bp, Artificial sequence
  SiRNA target sequence
ttgccatagcgtgcccacttattacc

SEQ ID NO: 222422 - DNA, 26 bp, Artificial sequence
  SiRNA target sequence
tgccatagcgtgcccacttattaccc

SEQ ID NO: 222423 - DNA, 26 bp, Artificial sequence
  SiRNA target sequence
gccatagcgtgcccacttattaccct

SEQ ID NO: 222424 - DNA, 26 bp, Artificial sequence
  SiRNA target sequence
ccatagcgtgcccacttattaccctt

SEQ ID NO: 222425 - DNA, 26 bp, Artificial sequence
  SiRNA target sequence
catagcgtgcccacttattacccttt

SEQ ID NO: 222426 - DNA, 26 bp, Artificial sequence
  SiRNA target sequence
atagcgtgcccacttattaccctttt

SEQ ID NO: 222427 - DNA, 26 bp, Artificial sequence
  SiRNA target sequence
tagcgtgcccacttattacccttttt

SEQ ID NO: 222428 - DNA, 26 bp, Artificial sequence
  SiRNA target sequence
agcgtgcccacttattaccctttttg

SEQ ID NO: 222429 - DNA, 26 bp, Artificial sequence
  SiRNA target sequence
gcgtgcccacttattaccctttttgc

SEQ ID NO: 222430 - DNA, 26 bp, Artificial sequence
  SiRNA target sequence
cgtgcccacttattaccctttttgct

SEQ ID NO: 222431 - DNA, 26 bp, Artificial sequence
  SiRNA target sequence
gtgcccacttattaccctttttgctg

SEQ ID NO: 222432 - DNA, 26 bp, Artificial sequence
  SiRNA target sequence
tgcccacttattaccctttttgctgt

SEQ ID NO: 222433 - DNA, 26 bp, Artificial sequence
  SiRNA target sequence
gcccacttattaccctttttgctgta

SEQ ID NO: 222434 - DNA, 26 bp, Artificial sequence
  SiRNA target sequence
cccacttattaccctttttgctgtag

SEQ ID NO: 222435 - DNA, 26 bp, Artificial sequence
  SiRNA target sequence
ccacttattaccctttttgctgtagt

SEQ ID NO: 222436 - DNA, 26 bp, Artificial sequence
  SiRNA target sequence
cacttattaccctttttgctgtagtt

SEQ ID NO: 222437 - DNA, 26 bp, Artificial sequence
  SiRNA target sequence
acttattaccctttttgctgtagttt

SEQ ID NO: 222438 - DNA, 26 bp, Artificial sequence
  SiRNA target sequence
cttattaccctttttgctgtagtttc

SEQ ID NO: 222439 - DNA, 26 bp, Artificial sequence
  SiRNA target sequence
ttattaccctttttgctgtagtttct

SEQ ID NO: 222440 - DNA, 26 bp, Artificial sequence
  SiRNA target sequence
tattaccctttttgctgtagtttctg

SEQ ID NO: 222441 - DNA, 26 bp, Artificial sequence
  SiRNA target sequence
attaccctttttgctgtagtttctgt

SEQ ID NO: 222442 - DNA, 26 bp, Artificial sequence
  SiRNA target sequence
ttaccctttttgctgtagtttctgtg

SEQ ID NO: 222443 - DNA, 26 bp, Artificial sequence
  SiRNA target sequence
taccctttttgctgtagtttctgtgt

SEQ ID NO: 222444 - DNA, 26 bp, Artificial sequence
  SiRNA target sequence
accctttttgctgtagtttctgtgtg

SEQ ID NO: 222445 - DNA, 26 bp, Artificial sequence
  SiRNA target sequence
ccctttttgctgtagtttctgtgtgt

SEQ ID NO: 222446 - DNA, 26 bp, Artificial sequence
  SiRNA target sequence
cctttttgctgtagtttctgtgtgtg

SEQ ID NO: 222447 - DNA, 26 bp, Artificial sequence
  SiRNA target sequence
ctttttgctgtagtttctgtgtgtgg

SEQ ID NO: 222448 - DNA, 26 bp, Artificial sequence
  SiRNA target sequence
tttttgctgtagtttctgtgtgtggt

SEQ ID NO: 222449 - DNA, 26 bp, Artificial sequence
  SiRNA target sequence
ttttgctgtagtttctgtgtgtggtc

SEQ ID NO: 222450 - DNA, 26 bp, Artificial sequence
  SiRNA target sequence
tttgctgtagtttctgtgtgtggtct

SEQ ID NO: 222451 - DNA, 26 bp, Artificial sequence
  SiRNA target sequence
ttgctgtagtttctgtgtgtggtctt

SEQ ID NO: 222452 - DNA, 26 bp, Artificial sequence
  SiRNA target sequence
tgctgtagtttctgtgtgtggtcttg

SEQ ID NO: 222453 - DNA, 26 bp, Artificial sequence
  SiRNA target sequence
gctgtagtttctgtgtgtggtcttgc

SEQ ID NO: 222454 - DNA, 26 bp, Artificial sequence
  SiRNA target sequence
ctgtagtttctgtgtgtggtcttgct

SEQ ID NO: 222455 - DNA, 26 bp, Artificial sequence
  SiRNA target sequence
tgtagtttctgtgtgtggtcttgctt

SEQ ID NO: 222456 - DNA, 26 bp, Artificial sequence
  SiRNA target sequence
gtagtttctgtgtgtggtcttgcttt

SEQ ID NO: 222457 - DNA, 26 bp, Artificial sequence
  SiRNA target sequence
tagtttctgtgtgtggtcttgctttt

SEQ ID NO: 222458 - DNA, 26 bp, Artificial sequence
  SiRNA target sequence
agtttctgtgtgtggtcttgcttttt

SEQ ID NO: 222459 - DNA, 26 bp, Artificial sequence
  SiRNA target sequence
gtttctgtgtgtggtcttgcttttta

SEQ ID NO: 222460 - DNA, 26 bp, Artificial sequence
  SiRNA target sequence
tttctgtgtgtggtcttgctttttac

SEQ ID NO: 222461 - DNA, 26 bp, Artificial sequence
  SiRNA target sequence
ttctgtgtgtggtcttgctttttaca

SEQ ID NO: 222462 - DNA, 26 bp, Artificial sequence
  SiRNA target sequence
tctgtgtgtggtcttgctttttacaa

SEQ ID NO: 222463 - DNA, 26 bp, Artificial sequence
  SiRNA target sequence
ctgtgtgtggtcttgctttttacaat

SEQ ID NO: 222464 - DNA, 26 bp, Artificial sequence
  SiRNA target sequence
tgtgtgtggtcttgctttttacaatt

SEQ ID NO: 222465 - DNA, 26 bp, Artificial sequence
  SiRNA target sequence
gtgtgtggtcttgctttttacaatta

SEQ ID NO: 222466 - DNA, 26 bp, Artificial sequence
  SiRNA target sequence
tgtgtggtcttgctttttacaattat

SEQ ID NO: 222467 - DNA, 26 bp, Artificial sequence
  SiRNA target sequence
gtgtggtcttgctttttacaattatc

SEQ ID NO: 222468 - DNA, 26 bp, Artificial sequence
  SiRNA target sequence
tgtggtcttgctttttacaattatcc

SEQ ID NO: 222469 - DNA, 26 bp, Artificial sequence
  SiRNA target sequence
gtggtcttgctttttacaattatccg

SEQ ID NO: 222470 - DNA, 26 bp, Artificial sequence
  SiRNA target sequence
tggtcttgctttttacaattatccgg

SEQ ID NO: 222471 - DNA, 26 bp, Artificial sequence
  SiRNA target sequence
ggtcttgctttttacaattatccggc

SEQ ID NO: 222472 - DNA, 26 bp, Artificial sequence
  SiRNA target sequence
gtcttgctttttacaattatccggca

SEQ ID NO: 222473 - DNA, 26 bp, Artificial sequence
  SiRNA target sequence
tcttgctttttacaattatccggcaa

SEQ ID NO: 222474 - DNA, 26 bp, Artificial sequence
  SiRNA target sequence
cttgctttttacaattatccggcaac

SEQ ID NO: 222475 - DNA, 26 bp, Artificial sequence
  SiRNA target sequence
ttgctttttacaattatccggcaaca

SEQ ID NO: 222476 - DNA, 26 bp, Artificial sequence
  SiRNA target sequence
tgctttttacaattatccggcaacaa

SEQ ID NO: 222477 - DNA, 26 bp, Artificial sequence
  SiRNA target sequence
gctttttacaattatccggcaacaaa

SEQ ID NO: 222478 - DNA, 26 bp, Artificial sequence
  SiRNA target sequence
ctttttacaattatccggcaacaaat

SEQ ID NO: 222479 - DNA, 26 bp, Artificial sequence
  SiRNA target sequence
tttttacaattatccggcaacaaata

SEQ ID NO: 222480 - DNA, 26 bp, Artificial sequence
  SiRNA target sequence
ttttacaattatccggcaacaaataa

SEQ ID NO: 222481 - DNA, 26 bp, Artificial sequence
  SiRNA target sequence
tttacaattatccggcaacaaataat

SEQ ID NO: 222482 - DNA, 26 bp, Artificial sequence
  SiRNA target sequence
ttacaattatccggcaacaaataatg

SEQ ID NO: 222483 - DNA, 26 bp, Artificial sequence
  SiRNA target sequence
tacaattatccggcaacaaataatga

SEQ ID NO: 222484 - DNA, 26 bp, Artificial sequence
  SiRNA target sequence
acaattatccggcaacaaataatgac

SEQ ID NO: 222485 - DNA, 26 bp, Artificial sequence
  SiRNA target sequence
caattatccggcaacaaataatgaca

SEQ ID NO: 222486 - DNA, 26 bp, Artificial sequence
  SiRNA target sequence
aattatccggcaacaaataatgacac

SEQ ID NO: 222487 - DNA, 26 bp, Artificial sequence
  SiRNA target sequence
attatccggcaacaaataatgacaca

SEQ ID NO: 222488 - DNA, 26 bp, Artificial sequence
  SiRNA target sequence
ttatccggcaacaaataatgacacaa

SEQ ID NO: 222489 - DNA, 26 bp, Artificial sequence
  SiRNA target sequence
tatccggcaacaaataatgacacaaa

SEQ ID NO: 222490 - DNA, 26 bp, Artificial sequence
  SiRNA target sequence
atccggcaacaaataatgacacaaat

SEQ ID NO: 222491 - DNA, 26 bp, Artificial sequence
  SiRNA target sequence
tccggcaacaaataatgacacaaatt

SEQ ID NO: 222492 - DNA, 26 bp, Artificial sequence
  SiRNA target sequence
ccggcaacaaataatgacacaaattt

SEQ ID NO: 222493 - DNA, 26 bp, Artificial sequence
  SiRNA target sequence
cggcaacaaataatgacacaaatttt

SEQ ID NO: 222494 - DNA, 26 bp, Artificial sequence
  SiRNA target sequence
ggcaacaaataatgacacaaattttt

SEQ ID NO: 222495 - DNA, 26 bp, Artificial sequence
  SiRNA target sequence
gcaacaaataatgacacaaatttttt

SEQ ID NO: 222496 - DNA, 26 bp, Artificial sequence
  SiRNA target sequence
caacaaataatgacacaaattttttt

SEQ ID NO: 222497 - DNA, 26 bp, Artificial sequence
  SiRNA target sequence
aacaaataatgacacaaatttttttc

SEQ ID NO: 222498 - DNA, 26 bp, Artificial sequence
  SiRNA target sequence
acaaataatgacacaaatttttttct

SEQ ID NO: 222499 - DNA, 26 bp, Artificial sequence
  SiRNA target sequence
caaataatgacacaaatttttttcta

SEQ ID NO: 222500 - DNA, 26 bp, Artificial sequence
  SiRNA target sequence
aaataatgacacaaatttttttctaa

SEQ ID NO: 222501 - DNA, 26 bp, Artificial sequence
  SiRNA target sequence
aataatgacacaaatttttttctaaa

SEQ ID NO: 222502 - DNA, 26 bp, Artificial sequence
  SiRNA target sequence
ataatgacacaaatttttttctaaat

SEQ ID NO: 222503 - DNA, 26 bp, Artificial sequence
  SiRNA target sequence
taatgacacaaatttttttctaaatt

SEQ ID NO: 222504 - DNA, 26 bp, Artificial sequence
  SiRNA target sequence
aatgacacaaatttttttctaaattc

SEQ ID NO: 222505 - DNA, 26 bp, Artificial sequence
  SiRNA target sequence
atgacacaaatttttttctaaattca

SEQ ID NO: 222506 - DNA, 26 bp, Artificial sequence
  SiRNA target sequence
tgacacaaatttttttctaaattcat

SEQ ID NO: 222507 - DNA, 26 bp, Artificial sequence
  SiRNA target sequence
gacacaaatttttttctaaattcatt

SEQ ID NO: 222508 - DNA, 26 bp, Artificial sequence
  SiRNA target sequence
acacaaatttttttctaaattcatta

SEQ ID NO: 222509 - DNA, 26 bp, Artificial sequence
  SiRNA target sequence
cacaaatttttttctaaattcattat

SEQ ID NO: 222510 - DNA, 26 bp, Artificial sequence
  SiRNA target sequence
acaaatttttttctaaattcattatg

SEQ ID NO: 222511 - DNA, 26 bp, Artificial sequence
  SiRNA target sequence
caaatttttttctaaattcattatgt

SEQ ID NO: 222512 - DNA, 26 bp, Artificial sequence
  SiRNA target sequence
aaatttttttctaaattcattatgtg

SEQ ID NO: 222513 - DNA, 26 bp, Artificial sequence
  SiRNA target sequence
aatttttttctaaattcattatgtgc

SEQ ID NO: 222514 - DNA, 26 bp, Artificial sequence
  SiRNA target sequence
atttttttctaaattcattatgtgct

SEQ ID NO: 222515 - DNA, 26 bp, Artificial sequence
  SiRNA target sequence
tttttttctaaattcattatgtgcta

SEQ ID NO: 222516 - DNA, 26 bp, Artificial sequence
  SiRNA target sequence
ttttttctaaattcattatgtgctac

SEQ ID NO: 222517 - DNA, 26 bp, Artificial sequence
  SiRNA target sequence
tttttctaaattcattatgtgctacg

SEQ ID NO: 222518 - DNA, 26 bp, Artificial sequence
  SiRNA target sequence
ttttctaaattcattatgtgctacgc

SEQ ID NO: 222519 - DNA, 26 bp, Artificial sequence
  SiRNA target sequence
tttctaaattcattatgtgctacgcc

SEQ ID NO: 222520 - DNA, 26 bp, Artificial sequence
  SiRNA target sequence
ttctaaattcattatgtgctacgccc

SEQ ID NO: 222521 - DNA, 26 bp, Artificial sequence
  SiRNA target sequence
tctaaattcattatgtgctacgcccg

SEQ ID NO: 222522 - DNA, 26 bp, Artificial sequence
  SiRNA target sequence
ctaaattcattatgtgctacgcccgg

SEQ ID NO: 222523 - DNA, 26 bp, Artificial sequence
  SiRNA target sequence
taaattcattatgtgctacgcccggt

SEQ ID NO: 222524 - DNA, 26 bp, Artificial sequence
  SiRNA target sequence
aaattcattatgtgctacgcccggta

SEQ ID NO: 222525 - DNA, 26 bp, Artificial sequence
  SiRNA target sequence
aattcattatgtgctacgcccggtaa

SEQ ID NO: 222526 - DNA, 26 bp, Artificial sequence
  SiRNA target sequence
attcattatgtgctacgcccggtaaa

SEQ ID NO: 222527 - DNA, 26 bp, Artificial sequence
  SiRNA target sequence
ttcattatgtgctacgcccggtaaat

SEQ ID NO: 222528 - DNA, 26 bp, Artificial sequence
  SiRNA target sequence
tcattatgtgctacgcccggtaaatc

SEQ ID NO: 222529 - DNA, 26 bp, Artificial sequence
  SiRNA target sequence
cattatgtgctacgcccggtaaatcg

SEQ ID NO: 222530 - DNA, 26 bp, Artificial sequence
  SiRNA target sequence
attatgtgctacgcccggtaaatcgt

SEQ ID NO: 222531 - DNA, 26 bp, Artificial sequence
  SiRNA target sequence
ttatgtgctacgcccggtaaatcgtt

SEQ ID NO: 222532 - DNA, 26 bp, Artificial sequence
  SiRNA target sequence
tatgtgctacgcccggtaaatcgttt

SEQ ID NO: 222533 - DNA, 26 bp, Artificial sequence
  SiRNA target sequence
atgtgctacgcccggtaaatcgttta

SEQ ID NO: 222534 - DNA, 26 bp, Artificial sequence
  SiRNA target sequence
tgtgctacgcccggtaaatcgtttat

SEQ ID NO: 222535 - DNA, 26 bp, Artificial sequence
  SiRNA target sequence
gtgctacgcccggtaaatcgtttata

SEQ ID NO: 222536 - DNA, 26 bp, Artificial sequence
  SiRNA target sequence
tgctacgcccggtaaatcgtttataa

SEQ ID NO: 222537 - DNA, 26 bp, Artificial sequence
  SiRNA target sequence
gctacgcccggtaaatcgtttataaa

SEQ ID NO: 222538 - DNA, 26 bp, Artificial sequence
  SiRNA target sequence
ctacgcccggtaaatcgtttataaaa

SEQ ID NO: 222539 - DNA, 26 bp, Artificial sequence
  SiRNA target sequence
tacgcccggtaaatcgtttataaaat

SEQ ID NO: 222540 - DNA, 26 bp, Artificial sequence
  SiRNA target sequence
acgcccggtaaatcgtttataaaatt

SEQ ID NO: 222541 - DNA, 26 bp, Artificial sequence
  SiRNA target sequence
cgcccggtaaatcgtttataaaatta

SEQ ID NO: 222542 - DNA, 26 bp, Artificial sequence
  SiRNA target sequence
gcccggtaaatcgtttataaaattag

SEQ ID NO: 222543 - DNA, 26 bp, Artificial sequence
  SiRNA target sequence
cccggtaaatcgtttataaaattaga

SEQ ID NO: 222544 - DNA, 26 bp, Artificial sequence
  SiRNA target sequence
ccggtaaatcgtttataaaattagaa

SEQ ID NO: 222545 - DNA, 26 bp, Artificial sequence
  SiRNA target sequence
cggtaaatcgtttataaaattagaaa

SEQ ID NO: 222546 - DNA, 26 bp, Artificial sequence
  SiRNA target sequence
ggtaaatcgtttataaaattagaaaa

SEQ ID NO: 222547 - DNA, 26 bp, Artificial sequence
  SiRNA target sequence
gtaaatcgtttataaaattagaaaat

SEQ ID NO: 222548 - DNA, 26 bp, Artificial sequence
  SiRNA target sequence
taaatcgtttataaaattagaaaatg

SEQ ID NO: 222549 - DNA, 26 bp, Artificial sequence
  SiRNA target sequence
aaatcgtttataaaattagaaaatgt

SEQ ID NO: 222550 - DNA, 26 bp, Artificial sequence
  SiRNA target sequence
aatcgtttataaaattagaaaatgtt

SEQ ID NO: 222551 - DNA, 26 bp, Artificial sequence
  SiRNA target sequence
atcgtttataaaattagaaaatgttt

SEQ ID NO: 222552 - DNA, 26 bp, Artificial sequence
  SiRNA target sequence
tcgtttataaaattagaaaatgtttt

SEQ ID NO: 222553 - DNA, 26 bp, Artificial sequence
  SiRNA target sequence
cgtttataaaattagaaaatgtttta

SEQ ID NO: 222554 - DNA, 26 bp, Artificial sequence
  SiRNA target sequence
gtttataaaattagaaaatgttttag

SEQ ID NO: 222555 - DNA, 26 bp, Artificial sequence
  SiRNA target sequence
tttataaaattagaaaatgttttagg

SEQ ID NO: 222556 - DNA, 26 bp, Artificial sequence
  SiRNA target sequence
ttataaaattagaaaatgttttagga

SEQ ID NO: 222557 - DNA, 26 bp, Artificial sequence
  SiRNA target sequence
tataaaattagaaaatgttttaggat

SEQ ID NO: 222558 - DNA, 26 bp, Artificial sequence
  SiRNA target sequence
ataaaattagaaaatgttttaggatg

SEQ ID NO: 222559 - DNA, 26 bp, Artificial sequence
  SiRNA target sequence
taaaattagaaaatgttttaggatgt

SEQ ID NO: 222560 - DNA, 26 bp, Artificial sequence
  SiRNA target sequence
aaaattagaaaatgttttaggatgtg

SEQ ID NO: 222561 - DNA, 26 bp, Artificial sequence
  SiRNA target sequence
aaattagaaaatgttttaggatgtgt

SEQ ID NO: 222562 - DNA, 26 bp, Artificial sequence
  SiRNA target sequence
aattagaaaatgttttaggatgtgta

SEQ ID NO: 222563 - DNA, 26 bp, Artificial sequence
  SiRNA target sequence
attagaaaatgttttaggatgtgtag

SEQ ID NO: 222564 - DNA, 26 bp, Artificial sequence
  SiRNA target sequence
ttagaaaatgttttaggatgtgtagc

SEQ ID NO: 222565 - DNA, 26 bp, Artificial sequence
  SiRNA target sequence
tagaaaatgttttaggatgtgtagct

SEQ ID NO: 222566 - DNA, 26 bp, Artificial sequence
  SiRNA target sequence
agaaaatgttttaggatgtgtagctg

SEQ ID NO: 222567 - DNA, 26 bp, Artificial sequence
  SiRNA target sequence
gaaaatgttttaggatgtgtagctgt

SEQ ID NO: 222568 - DNA, 26 bp, Artificial sequence
  SiRNA target sequence
aaaatgttttaggatgtgtagctgta

SEQ ID NO: 222569 - DNA, 26 bp, Artificial sequence
  SiRNA target sequence
aaatgttttaggatgtgtagctgtag

SEQ ID NO: 222570 - DNA, 26 bp, Artificial sequence
  SiRNA target sequence
aatgttttaggatgtgtagctgtagc

SEQ ID NO: 222571 - DNA, 26 bp, Artificial sequence
  SiRNA target sequence
atgttttaggatgtgtagctgtagct

SEQ ID NO: 222572 - DNA, 26 bp, Artificial sequence
  SiRNA target sequence
tgttttaggatgtgtagctgtagctc

SEQ ID NO: 222573 - DNA, 26 bp, Artificial sequence
  SiRNA target sequence
gttttaggatgtgtagctgtagctct

SEQ ID NO: 222574 - DNA, 26 bp, Artificial sequence
  SiRNA target sequence
ttttaggatgtgtagctgtagctctt

SEQ ID NO: 222575 - DNA, 26 bp, Artificial sequence
  SiRNA target sequence
tttaggatgtgtagctgtagctctta

SEQ ID NO: 222576 - DNA, 26 bp, Artificial sequence
  SiRNA target sequence
ttaggatgtgtagctgtagctcttat

SEQ ID NO: 222577 - DNA, 26 bp, Artificial sequence
  SiRNA target sequence
taggatgtgtagctgtagctcttatg

SEQ ID NO: 222578 - DNA, 26 bp, Artificial sequence
  SiRNA target sequence
aggatgtgtagctgtagctcttatga

SEQ ID NO: 222579 - DNA, 26 bp, Artificial sequence
  SiRNA target sequence
ggatgtgtagctgtagctcttatgaa

SEQ ID NO: 222580 - DNA, 26 bp, Artificial sequence
  SiRNA target sequence
gatgtgtagctgtagctcttatgaaa

SEQ ID NO: 222581 - DNA, 26 bp, Artificial sequence
  SiRNA target sequence
atgtgtagctgtagctcttatgaaag

SEQ ID NO: 222582 - DNA, 26 bp, Artificial sequence
  SiRNA target sequence
tgtgtagctgtagctcttatgaaagt

SEQ ID NO: 222583 - DNA, 26 bp, Artificial sequence
  SiRNA target sequence
gtgtagctgtagctcttatgaaagta

SEQ ID NO: 222584 - DNA, 26 bp, Artificial sequence
  SiRNA target sequence
tgtagctgtagctcttatgaaagtag

SEQ ID NO: 222585 - DNA, 26 bp, Artificial sequence
  SiRNA target sequence
gtagctgtagctcttatgaaagtagc

SEQ ID NO: 222586 - DNA, 26 bp, Artificial sequence
  SiRNA target sequence
tagctgtagctcttatgaaagtagca

SEQ ID NO: 222587 - DNA, 26 bp, Artificial sequence
  SiRNA target sequence
agctgtagctcttatgaaagtagcaa

SEQ ID NO: 222588 - DNA, 26 bp, Artificial sequence
  SiRNA target sequence
gctgtagctcttatgaaagtagcaaa

SEQ ID NO: 222589 - DNA, 26 bp, Artificial sequence
  SiRNA target sequence
ctgtagctcttatgaaagtagcaaaa

SEQ ID NO: 222590 - DNA, 26 bp, Artificial sequence
  SiRNA target sequence
tgtagctcttatgaaagtagcaaaat

SEQ ID NO: 222591 - DNA, 26 bp, Artificial sequence
  SiRNA target sequence
gtagctcttatgaaagtagcaaaata

SEQ ID NO: 222592 - DNA, 26 bp, Artificial sequence
  SiRNA target sequence
tagctcttatgaaagtagcaaaatat

SEQ ID NO: 222593 - DNA, 26 bp, Artificial sequence
  SiRNA target sequence
agctcttatgaaagtagcaaaatatg

SEQ ID NO: 222594 - DNA, 26 bp, Artificial sequence
  SiRNA target sequence
gctcttatgaaagtagcaaaatatgg

SEQ ID NO: 222595 - DNA, 26 bp, Artificial sequence
  SiRNA target sequence
ctcttatgaaagtagcaaaatatggc

SEQ ID NO: 222596 - DNA, 26 bp, Artificial sequence
  SiRNA target sequence
tcttatgaaagtagcaaaatatggct

SEQ ID NO: 222597 - DNA, 26 bp, Artificial sequence
  SiRNA target sequence
cttatgaaagtagcaaaatatggctc

SEQ ID NO: 222598 - DNA, 26 bp, Artificial sequence
  SiRNA target sequence
ttatgaaagtagcaaaatatggctct

SEQ ID NO: 222599 - DNA, 26 bp, Artificial sequence
  SiRNA target sequence
tatgaaagtagcaaaatatggctctt

SEQ ID NO: 222600 - DNA, 26 bp, Artificial sequence
  SiRNA target sequence
atgaaagtagcaaaatatggctcttt

SEQ ID NO: 222601 - DNA, 26 bp, Artificial sequence
  SiRNA target sequence
tgaaagtagcaaaatatggctctttt

SEQ ID NO: 222602 - DNA, 26 bp, Artificial sequence
  SiRNA target sequence
gaaagtagcaaaatatggctcttttg

SEQ ID NO: 222603 - DNA, 26 bp, Artificial sequence
  SiRNA target sequence
aaagtagcaaaatatggctcttttga

SEQ ID NO: 222604 - DNA, 26 bp, Artificial sequence
  SiRNA target sequence
aagtagcaaaatatggctcttttgat

SEQ ID NO: 222605 - DNA, 26 bp, Artificial sequence
  SiRNA target sequence
agtagcaaaatatggctcttttgata

SEQ ID NO: 222606 - DNA, 26 bp, Artificial sequence
  SiRNA target sequence
gtagcaaaatatggctcttttgatat

SEQ ID NO: 222607 - DNA, 26 bp, Artificial sequence
  SiRNA target sequence
tagcaaaatatggctcttttgatatt

SEQ ID NO: 222608 - DNA, 26 bp, Artificial sequence
  SiRNA target sequence
agcaaaatatggctcttttgatattt

SEQ ID NO: 222609 - DNA, 26 bp, Artificial sequence
  SiRNA target sequence
gcaaaatatggctcttttgatatttc

SEQ ID NO: 222610 - DNA, 26 bp, Artificial sequence
  SiRNA target sequence
caaaatatggctcttttgatatttcc

SEQ ID NO: 222611 - DNA, 26 bp, Artificial sequence
  SiRNA target sequence
aaaatatggctcttttgatatttcca

SEQ ID NO: 222612 - DNA, 26 bp, Artificial sequence
  SiRNA target sequence
aaatatggctcttttgatatttccaa

SEQ ID NO: 222613 - DNA, 26 bp, Artificial sequence
  SiRNA target sequence
aatatggctcttttgatatttccaaa

SEQ ID NO: 222614 - DNA, 26 bp, Artificial sequence
  SiRNA target sequence
atatggctcttttgatatttccaaag

SEQ ID NO: 222615 - DNA, 26 bp, Artificial sequence
  SiRNA target sequence
tatggctcttttgatatttccaaaga

SEQ ID NO: 222616 - DNA, 26 bp, Artificial sequence
  SiRNA target sequence
atggctcttttgatatttccaaagaa

SEQ ID NO: 222617 - DNA, 26 bp, Artificial sequence
  SiRNA target sequence
tggctcttttgatatttccaaagaag

SEQ ID NO: 222618 - DNA, 26 bp, Artificial sequence
  SiRNA target sequence
ggctcttttgatatttccaaagaagc

SEQ ID NO: 222619 - DNA, 26 bp, Artificial sequence
  SiRNA target sequence
gctcttttgatatttccaaagaagcc

SEQ ID NO: 222620 - DNA, 26 bp, Artificial sequence
  SiRNA target sequence
ctcttttgatatttccaaagaagcca

SEQ ID NO: 222621 - DNA, 26 bp, Artificial sequence
  SiRNA target sequence
tcttttgatatttccaaagaagccat

SEQ ID NO: 222622 - DNA, 26 bp, Artificial sequence
  SiRNA target sequence
cttttgatatttccaaagaagccatt

SEQ ID NO: 222623 - DNA, 26 bp, Artificial sequence
  SiRNA target sequence
ttttgatatttccaaagaagccattt

SEQ ID NO: 222624 - DNA, 26 bp, Artificial sequence
  SiRNA target sequence
tttgatatttccaaagaagccatttc

SEQ ID NO: 222625 - DNA, 26 bp, Artificial sequence
  SiRNA target sequence
ttgatatttccaaagaagccatttca

SEQ ID NO: 222626 - DNA, 26 bp, Artificial sequence
  SiRNA target sequence
tgatatttccaaagaagccatttcaa

SEQ ID NO: 222627 - DNA, 26 bp, Artificial sequence
  SiRNA target sequence
gatatttccaaagaagccatttcaat

SEQ ID NO: 222628 - DNA, 26 bp, Artificial sequence
  SiRNA target sequence
atatttccaaagaagccatttcaatg

SEQ ID NO: 222629 - DNA, 26 bp, Artificial sequence
  SiRNA target sequence
tatttccaaagaagccatttcaatgc

SEQ ID NO: 222630 - DNA, 26 bp, Artificial sequence
  SiRNA target sequence
atttccaaagaagccatttcaatgca

SEQ ID NO: 222631 - DNA, 26 bp, Artificial sequence
  SiRNA target sequence
tttccaaagaagccatttcaatgcag

SEQ ID NO: 222632 - DNA, 26 bp, Artificial sequence
  SiRNA target sequence
ttccaaagaagccatttcaatgcaga

SEQ ID NO: 222633 - DNA, 26 bp, Artificial sequence
  SiRNA target sequence
tccaaagaagccatttcaatgcagat

SEQ ID NO: 222634 - DNA, 26 bp, Artificial sequence
  SiRNA target sequence
ccaaagaagccatttcaatgcagatt

SEQ ID NO: 222635 - DNA, 26 bp, Artificial sequence
  SiRNA target sequence
caaagaagccatttcaatgcagattg

SEQ ID NO: 222636 - DNA, 26 bp, Artificial sequence
  SiRNA target sequence
aaagaagccatttcaatgcagattga

SEQ ID NO: 222637 - DNA, 26 bp, Artificial sequence
  SiRNA target sequence
aagaagccatttcaatgcagattgat

SEQ ID NO: 222638 - DNA, 26 bp, Artificial sequence
  SiRNA target sequence
agaagccatttcaatgcagattgatt

SEQ ID NO: 222639 - DNA, 26 bp, Artificial sequence
  SiRNA target sequence
gaagccatttcaatgcagattgattc

SEQ ID NO: 222640 - DNA, 26 bp, Artificial sequence
  SiRNA target sequence
aagccatttcaatgcagattgattcg

SEQ ID NO: 222641 - DNA, 26 bp, Artificial sequence
  SiRNA target sequence
agccatttcaatgcagattgattcgt

SEQ ID NO: 222642 - DNA, 26 bp, Artificial sequence
  SiRNA target sequence
gccatttcaatgcagattgattcgtc

SEQ ID NO: 222643 - DNA, 26 bp, Artificial sequence
  SiRNA target sequence
ccatttcaatgcagattgattcgtca

SEQ ID NO: 222644 - DNA, 26 bp, Artificial sequence
  SiRNA target sequence
catttcaatgcagattgattcgtcat

SEQ ID NO: 222645 - DNA, 26 bp, Artificial sequence
  SiRNA target sequence
atttcaatgcagattgattcgtcatt

SEQ ID NO: 222646 - DNA, 26 bp, Artificial sequence
  SiRNA target sequence
tttcaatgcagattgattcgtcattg

SEQ ID NO: 222647 - DNA, 26 bp, Artificial sequence
  SiRNA target sequence
ttcaatgcagattgattcgtcattgc

SEQ ID NO: 222648 - DNA, 26 bp, Artificial sequence
  SiRNA target sequence
tcaatgcagattgattcgtcattgcg

SEQ ID NO: 222649 - DNA, 26 bp, Artificial sequence
  SiRNA target sequence
caatgcagattgattcgtcattgcgt

SEQ ID NO: 222650 - DNA, 26 bp, Artificial sequence
  SiRNA target sequence
aatgcagattgattcgtcattgcgtg

SEQ ID NO: 222651 - DNA, 26 bp, Artificial sequence
  SiRNA target sequence
atgcagattgattcgtcattgcgtgc

SEQ ID NO: 222652 - DNA, 26 bp, Artificial sequence
  SiRNA target sequence
tgcagattgattcgtcattgcgtgca

SEQ ID NO: 222653 - DNA, 26 bp, Artificial sequence
  SiRNA target sequence
gcagattgattcgtcattgcgtgcac

SEQ ID NO: 222654 - DNA, 26 bp, Artificial sequence
  SiRNA target sequence
cagattgattcgtcattgcgtgcacg

SEQ ID NO: 222655 - DNA, 26 bp, Artificial sequence
  SiRNA target sequence
agattgattcgtcattgcgtgcacgt

SEQ ID NO: 222656 - DNA, 26 bp, Artificial sequence
  SiRNA target sequence
gattgattcgtcattgcgtgcacgtt

SEQ ID NO: 222657 - DNA, 26 bp, Artificial sequence
  SiRNA target sequence
attgattcgtcattgcgtgcacgtta

SEQ ID NO: 222658 - DNA, 26 bp, Artificial sequence
  SiRNA target sequence
ttgattcgtcattgcgtgcacgttat

SEQ ID NO: 222659 - DNA, 26 bp, Artificial sequence
  SiRNA target sequence
tgattcgtcattgcgtgcacgttata

SEQ ID NO: 222660 - DNA, 26 bp, Artificial sequence
  SiRNA target sequence
gattcgtcattgcgtgcacgttataa

SEQ ID NO: 222661 - DNA, 26 bp, Artificial sequence
  SiRNA target sequence
attcgtcattgcgtgcacgttataaa

SEQ ID NO: 222662 - DNA, 26 bp, Artificial sequence
  SiRNA target sequence
ttcgtcattgcgtgcacgttataaag

SEQ ID NO: 222663 - DNA, 26 bp, Artificial sequence
  SiRNA target sequence
tcgtcattgcgtgcacgttataaagg

SEQ ID NO: 222664 - DNA, 26 bp, Artificial sequence
  SiRNA target sequence
cgtcattgcgtgcacgttataaagga

SEQ ID NO: 222665 - DNA, 26 bp, Artificial sequence
  SiRNA target sequence
gtcattgcgtgcacgttataaaggaa

SEQ ID NO: 222666 - DNA, 26 bp, Artificial sequence
  SiRNA target sequence
tcattgcgtgcacgttataaaggaat

SEQ ID NO: 222667 - DNA, 26 bp, Artificial sequence
  SiRNA target sequence
cattgcgtgcacgttataaaggaatt

SEQ ID NO: 222668 - DNA, 26 bp, Artificial sequence
  SiRNA target sequence
attgcgtgcacgttataaaggaattt

SEQ ID NO: 222669 - DNA, 26 bp, Artificial sequence
  SiRNA target sequence
ttgcgtgcacgttataaaggaatttt

SEQ ID NO: 222670 - DNA, 26 bp, Artificial sequence
  SiRNA target sequence
tgcgtgcacgttataaaggaattttt

SEQ ID NO: 222671 - DNA, 26 bp, Artificial sequence
  SiRNA target sequence
gcgtgcacgttataaaggaatttttg

SEQ ID NO: 222672 - DNA, 26 bp, Artificial sequence
  SiRNA target sequence
cgtgcacgttataaaggaatttttga

SEQ ID NO: 222673 - DNA, 26 bp, Artificial sequence
  SiRNA target sequence
gtgcacgttataaaggaatttttgac

SEQ ID NO: 222674 - DNA, 26 bp, Artificial sequence
  SiRNA target sequence
tgcacgttataaaggaatttttgacg

SEQ ID NO: 222675 - DNA, 26 bp, Artificial sequence
  SiRNA target sequence
gcacgttataaaggaatttttgacgg

SEQ ID NO: 222676 - DNA, 26 bp, Artificial sequence
  SiRNA target sequence
cacgttataaaggaatttttgacggt

SEQ ID NO: 222677 - DNA, 26 bp, Artificial sequence
  SiRNA target sequence
acgttataaaggaatttttgacggtg

SEQ ID NO: 222678 - DNA, 26 bp, Artificial sequence
  SiRNA target sequence
cgttataaaggaatttttgacggtgt

SEQ ID NO: 222679 - DNA, 26 bp, Artificial sequence
  SiRNA target sequence
gttataaaggaatttttgacggtgtt

SEQ ID NO: 222680 - DNA, 26 bp, Artificial sequence
  SiRNA target sequence
ttataaaggaatttttgacggtgttt

SEQ ID NO: 222681 - DNA, 26 bp, Artificial sequence
  SiRNA target sequence
tataaaggaatttttgacggtgtttt

SEQ ID NO: 222682 - DNA, 26 bp, Artificial sequence
  SiRNA target sequence
ataaaggaatttttgacggtgttttt

SEQ ID NO: 222683 - DNA, 26 bp, Artificial sequence
  SiRNA target sequence
taaaggaatttttgacggtgtttttg

SEQ ID NO: 222684 - DNA, 26 bp, Artificial sequence
  SiRNA target sequence
aaaggaatttttgacggtgtttttgg

SEQ ID NO: 222685 - DNA, 26 bp, Artificial sequence
  SiRNA target sequence
aaggaatttttgacggtgtttttggt

SEQ ID NO: 222686 - DNA, 26 bp, Artificial sequence
  SiRNA target sequence
aggaatttttgacggtgtttttggta

SEQ ID NO: 222687 - DNA, 26 bp, Artificial sequence
  SiRNA target sequence
ggaatttttgacggtgtttttggtaa

SEQ ID NO: 222688 - DNA, 26 bp, Artificial sequence
  SiRNA target sequence
gaatttttgacggtgtttttggtaag

SEQ ID NO: 222689 - DNA, 26 bp, Artificial sequence
  SiRNA target sequence
aatttttgacggtgtttttggtaagt

SEQ ID NO: 222690 - DNA, 26 bp, Artificial sequence
  SiRNA target sequence
atttttgacggtgtttttggtaagtt

SEQ ID NO: 222691 - DNA, 26 bp, Artificial sequence
  SiRNA target sequence
tttttgacggtgtttttggtaagtta

SEQ ID NO: 222692 - DNA, 26 bp, Artificial sequence
  SiRNA target sequence
ttttgacggtgtttttggtaagttag

SEQ ID NO: 222693 - DNA, 26 bp, Artificial sequence
  SiRNA target sequence
tttgacggtgtttttggtaagttagg

SEQ ID NO: 222694 - DNA, 26 bp, Artificial sequence
  SiRNA target sequence
ttgacggtgtttttggtaagttagga

SEQ ID NO: 222695 - DNA, 26 bp, Artificial sequence
  SiRNA target sequence
tgacggtgtttttggtaagttaggaa

SEQ ID NO: 222696 - DNA, 26 bp, Artificial sequence
  SiRNA target sequence
gacggtgtttttggtaagttaggaaa

SEQ ID NO: 222697 - DNA, 26 bp, Artificial sequence
  SiRNA target sequence
acggtgtttttggtaagttaggaaaa

SEQ ID NO: 222698 - DNA, 26 bp, Artificial sequence
  SiRNA target sequence
cggtgtttttggtaagttaggaaaat

SEQ ID NO: 222699 - DNA, 26 bp, Artificial sequence
  SiRNA target sequence
ggtgtttttggtaagttaggaaaatc

SEQ ID NO: 222700 - DNA, 26 bp, Artificial sequence
  SiRNA target sequence
gtgtttttggtaagttaggaaaatct

SEQ ID NO: 222701 - DNA, 26 bp, Artificial sequence
  SiRNA target sequence
tgtttttggtaagttaggaaaatctc

SEQ ID NO: 222702 - DNA, 26 bp, Artificial sequence
  SiRNA target sequence
gtttttggtaagttaggaaaatctct

SEQ ID NO: 222703 - DNA, 26 bp, Artificial sequence
  SiRNA target sequence
tttttggtaagttaggaaaatctctt

SEQ ID NO: 222704 - DNA, 26 bp, Artificial sequence
  SiRNA target sequence
ttttggtaagttaggaaaatctcttg

SEQ ID NO: 222705 - DNA, 26 bp, Artificial sequence
  SiRNA target sequence
tttggtaagttaggaaaatctcttgg

SEQ ID NO: 222706 - DNA, 26 bp, Artificial sequence
  SiRNA target sequence
ttggtaagttaggaaaatctcttgga

SEQ ID NO: 222707 - DNA, 26 bp, Artificial sequence
  SiRNA target sequence
tggtaagttaggaaaatctcttggat

SEQ ID NO: 222708 - DNA, 26 bp, Artificial sequence
  SiRNA target sequence
ggtaagttaggaaaatctcttggatc

SEQ ID NO: 222709 - DNA, 26 bp, Artificial sequence
  SiRNA target sequence
gtaagttaggaaaatctcttggatcg

SEQ ID NO: 222710 - DNA, 26 bp, Artificial sequence
  SiRNA target sequence
taagttaggaaaatctcttggatcgt

SEQ ID NO: 222711 - DNA, 26 bp, Artificial sequence
  SiRNA target sequence
aagttaggaaaatctcttggatcgtt

SEQ ID NO: 222712 - DNA, 26 bp, Artificial sequence
  SiRNA target sequence
agttaggaaaatctcttggatcgtta

SEQ ID NO: 222713 - DNA, 26 bp, Artificial sequence
  SiRNA target sequence
gttaggaaaatctcttggatcgttat

SEQ ID NO: 222714 - DNA, 26 bp, Artificial sequence
  SiRNA target sequence
ttaggaaaatctcttggatcgttatt

SEQ ID NO: 222715 - DNA, 26 bp, Artificial sequence
  SiRNA target sequence
taggaaaatctcttggatcgttattt

SEQ ID NO: 222716 - DNA, 26 bp, Artificial sequence
  SiRNA target sequence
aggaaaatctcttggatcgttatttg

SEQ ID NO: 222717 - DNA, 26 bp, Artificial sequence
  SiRNA target sequence
ggaaaatctcttggatcgttatttgt

SEQ ID NO: 222718 - DNA, 26 bp, Artificial sequence
  SiRNA target sequence
gaaaatctcttggatcgttatttgtg

SEQ ID NO: 222719 - DNA, 26 bp, Artificial sequence
  SiRNA target sequence
aaaatctcttggatcgttatttgtgt

SEQ ID NO: 222720 - DNA, 26 bp, Artificial sequence
  SiRNA target sequence
aaatctcttggatcgttatttgtgtg

SEQ ID NO: 222721 - DNA, 26 bp, Artificial sequence
  SiRNA target sequence
aatctcttggatcgttatttgtgtgg

SEQ ID NO: 222722 - DNA, 26 bp, Artificial sequence
  SiRNA target sequence
atctcttggatcgttatttgtgtgga

SEQ ID NO: 222723 - DNA, 26 bp, Artificial sequence
  SiRNA target sequence
tctcttggatcgttatttgtgtggat

SEQ ID NO: 222724 - DNA, 26 bp, Artificial sequence
  SiRNA target sequence
ctcttggatcgttatttgtgtggatt

SEQ ID NO: 222725 - DNA, 26 bp, Artificial sequence
  SiRNA target sequence
tcttggatcgttatttgtgtggatta

SEQ ID NO: 222726 - DNA, 26 bp, Artificial sequence
  SiRNA target sequence
cttggatcgttatttgtgtggattat

SEQ ID NO: 222727 - DNA, 26 bp, Artificial sequence
  SiRNA target sequence
ttggatcgttatttgtgtggattatg

SEQ ID NO: 222728 - DNA, 26 bp, Artificial sequence
  SiRNA target sequence
tggatcgttatttgtgtggattatgg

SEQ ID NO: 222729 - DNA, 26 bp, Artificial sequence
  SiRNA target sequence
ggatcgttatttgtgtggattatggg

SEQ ID NO: 222730 - DNA, 26 bp, Artificial sequence
  SiRNA target sequence
gatcgttatttgtgtggattatggga

SEQ ID NO: 222731 - DNA, 26 bp, Artificial sequence
  SiRNA target sequence
atcgttatttgtgtggattatgggat

SEQ ID NO: 222732 - DNA, 26 bp, Artificial sequence
  SiRNA target sequence
tcgttatttgtgtggattatgggata

SEQ ID NO: 222733 - DNA, 26 bp, Artificial sequence
  SiRNA target sequence
cgttatttgtgtggattatgggatat

SEQ ID NO: 222734 - DNA, 26 bp, Artificial sequence
  SiRNA target sequence
gttatttgtgtggattatgggatatg

SEQ ID NO: 222735 - DNA, 26 bp, Artificial sequence
  SiRNA target sequence
ttatttgtgtggattatgggatatgc

SEQ ID NO: 222736 - DNA, 26 bp, Artificial sequence
  SiRNA target sequence
tatttgtgtggattatgggatatgca

SEQ ID NO: 222737 - DNA, 26 bp, Artificial sequence
  SiRNA target sequence
atttgtgtggattatgggatatgcat

SEQ ID NO: 222738 - DNA, 26 bp, Artificial sequence
  SiRNA target sequence
tttgtgtggattatgggatatgcatt

SEQ ID NO: 222739 - DNA, 26 bp, Artificial sequence
  SiRNA target sequence
ttgtgtggattatgggatatgcattt

SEQ ID NO: 222740 - DNA, 26 bp, Artificial sequence
  SiRNA target sequence
tgtgtggattatgggatatgcatttc

SEQ ID NO: 222741 - DNA, 26 bp, Artificial sequence
  SiRNA target sequence
gtgtggattatgggatatgcatttca

SEQ ID NO: 222742 - DNA, 26 bp, Artificial sequence
  SiRNA target sequence
tgtggattatgggatatgcatttcaa

SEQ ID NO: 222743 - DNA, 26 bp, Artificial sequence
  SiRNA target sequence
gtggattatgggatatgcatttcaaa

SEQ ID NO: 222744 - DNA, 26 bp, Artificial sequence
  SiRNA target sequence
tggattatgggatatgcatttcaaac

SEQ ID NO: 222745 - DNA, 26 bp, Artificial sequence
  SiRNA target sequence
ggattatgggatatgcatttcaaaca

SEQ ID NO: 222746 - DNA, 26 bp, Artificial sequence
  SiRNA target sequence
gattatgggatatgcatttcaaacaa

SEQ ID NO: 222747 - DNA, 26 bp, Artificial sequence
  SiRNA target sequence
attatgggatatgcatttcaaacaag

SEQ ID NO: 222748 - DNA, 26 bp, Artificial sequence
  SiRNA target sequence
ttatgggatatgcatttcaaacaaga

SEQ ID NO: 222749 - DNA, 26 bp, Artificial sequence
  SiRNA target sequence
tatgggatatgcatttcaaacaagag

SEQ ID NO: 222750 - DNA, 26 bp, Artificial sequence
  SiRNA target sequence
atgggatatgcatttcaaacaagaga

SEQ ID NO: 222751 - DNA, 26 bp, Artificial sequence
  SiRNA target sequence
tgggatatgcatttcaaacaagagat

SEQ ID NO: 222752 - DNA, 26 bp, Artificial sequence
  SiRNA target sequence
gggatatgcatttcaaacaagagatt

SEQ ID NO: 222753 - DNA, 26 bp, Artificial sequence
  SiRNA target sequence
ggatatgcatttcaaacaagagattt

SEQ ID NO: 222754 - DNA, 26 bp, Artificial sequence
  SiRNA target sequence
gatatgcatttcaaacaagagatttt

SEQ ID NO: 222755 - DNA, 26 bp, Artificial sequence
  SiRNA target sequence
atatgcatttcaaacaagagatttta

SEQ ID NO: 222756 - DNA, 26 bp, Artificial sequence
  SiRNA target sequence
tatgcatttcaaacaagagattttag

SEQ ID NO: 222757 - DNA, 26 bp, Artificial sequence
  SiRNA target sequence
atgcatttcaaacaagagattttaga

SEQ ID NO: 222758 - DNA, 26 bp, Artificial sequence
  SiRNA target sequence
tgcatttcaaacaagagattttagaa

SEQ ID NO: 222759 - DNA, 26 bp, Artificial sequence
  SiRNA target sequence
gcatttcaaacaagagattttagaaa

SEQ ID NO: 222760 - DNA, 26 bp, Artificial sequence
  SiRNA target sequence
catttcaaacaagagattttagaaaa

SEQ ID NO: 222761 - DNA, 26 bp, Artificial sequence
  SiRNA target sequence
atttcaaacaagagattttagaaaat

SEQ ID NO: 222762 - DNA, 26 bp, Artificial sequence
  SiRNA target sequence
tttcaaacaagagattttagaaaatt

SEQ ID NO: 222763 - DNA, 26 bp, Artificial sequence
  SiRNA target sequence
ttcaaacaagagattttagaaaatta

SEQ ID NO: 222764 - DNA, 26 bp, Artificial sequence
  SiRNA target sequence
tcaaacaagagattttagaaaattag

SEQ ID NO: 222765 - DNA, 26 bp, Artificial sequence
  SiRNA target sequence
caaacaagagattttagaaaattagc

SEQ ID NO: 222766 - DNA, 26 bp, Artificial sequence
  SiRNA target sequence
aaacaagagattttagaaaattagct

SEQ ID NO: 222767 - DNA, 26 bp, Artificial sequence
  SiRNA target sequence
aacaagagattttagaaaattagctc

SEQ ID NO: 222768 - DNA, 26 bp, Artificial sequence
  SiRNA target sequence
acaagagattttagaaaattagctcc

SEQ ID NO: 222769 - DNA, 26 bp, Artificial sequence
  SiRNA target sequence
caagagattttagaaaattagctccc

SEQ ID NO: 222770 - DNA, 26 bp, Artificial sequence
  SiRNA target sequence
aagagattttagaaaattagctccct

SEQ ID NO: 222771 - DNA, 26 bp, Artificial sequence
  SiRNA target sequence
agagattttagaaaattagctccctt

SEQ ID NO: 222772 - DNA, 26 bp, Artificial sequence
  SiRNA target sequence
gagattttagaaaattagctccctta

SEQ ID NO: 222773 - DNA, 26 bp, Artificial sequence
  SiRNA target sequence
agattttagaaaattagctcccttat

SEQ ID NO: 222774 - DNA, 26 bp, Artificial sequence
  SiRNA target sequence
gattttagaaaattagctcccttatg

SEQ ID NO: 222775 - DNA, 26 bp, Artificial sequence
  SiRNA target sequence
attttagaaaattagctcccttatgt

SEQ ID NO: 222776 - DNA, 26 bp, Artificial sequence
  SiRNA target sequence
ttttagaaaattagctcccttatgta

SEQ ID NO: 222777 - DNA, 26 bp, Artificial sequence
  SiRNA target sequence
tttagaaaattagctcccttatgtat

SEQ ID NO: 222778 - DNA, 26 bp, Artificial sequence
  SiRNA target sequence
ttagaaaattagctcccttatgtatc

SEQ ID NO: 222779 - DNA, 26 bp, Artificial sequence
  SiRNA target sequence
tagaaaattagctcccttatgtatca

SEQ ID NO: 222780 - DNA, 26 bp, Artificial sequence
  SiRNA target sequence
agaaaattagctcccttatgtatcag

SEQ ID NO: 222781 - DNA, 26 bp, Artificial sequence
  SiRNA target sequence
gaaaattagctcccttatgtatcagc

SEQ ID NO: 222782 - DNA, 26 bp, Artificial sequence
  SiRNA target sequence
aaaattagctcccttatgtatcagcg

SEQ ID NO: 222783 - DNA, 26 bp, Artificial sequence
  SiRNA target sequence
aaattagctcccttatgtatcagcgt

SEQ ID NO: 222784 - DNA, 26 bp, Artificial sequence
  SiRNA target sequence
aattagctcccttatgtatcagcgta

SEQ ID NO: 222785 - DNA, 26 bp, Artificial sequence
  SiRNA target sequence
attagctcccttatgtatcagcgtaa

SEQ ID NO: 222786 - DNA, 26 bp, Artificial sequence
  SiRNA target sequence
ttagctcccttatgtatcagcgtaat

SEQ ID NO: 222787 - DNA, 26 bp, Artificial sequence
  SiRNA target sequence
tagctcccttatgtatcagcgtaatt

SEQ ID NO: 222788 - DNA, 26 bp, Artificial sequence
  SiRNA target sequence
agctcccttatgtatcagcgtaattg

SEQ ID NO: 222789 - DNA, 26 bp, Artificial sequence
  SiRNA target sequence
gctcccttatgtatcagcgtaattgt

SEQ ID NO: 222790 - DNA, 26 bp, Artificial sequence
  SiRNA target sequence
ctcccttatgtatcagcgtaattgtc

SEQ ID NO: 222791 - DNA, 26 bp, Artificial sequence
  SiRNA target sequence
tcccttatgtatcagcgtaattgtct

SEQ ID NO: 222792 - DNA, 26 bp, Artificial sequence
  SiRNA target sequence
cccttatgtatcagcgtaattgtctt

SEQ ID NO: 222793 - DNA, 26 bp, Artificial sequence
  SiRNA target sequence
ccttatgtatcagcgtaattgtcttt

SEQ ID NO: 222794 - DNA, 26 bp, Artificial sequence
  SiRNA target sequence
cttatgtatcagcgtaattgtctttt

SEQ ID NO: 222795 - DNA, 26 bp, Artificial sequence
  SiRNA target sequence
ttatgtatcagcgtaattgtcttttt

SEQ ID NO: 222796 - DNA, 26 bp, Artificial sequence
  SiRNA target sequence
tatgtatcagcgtaattgtctttttt

SEQ ID NO: 222797 - DNA, 26 bp, Artificial sequence
  SiRNA target sequence
atgtatcagcgtaattgtcttttttg

SEQ ID NO: 222798 - DNA, 26 bp, Artificial sequence
  SiRNA target sequence
tgtatcagcgtaattgtcttttttgt

SEQ ID NO: 222799 - DNA, 26 bp, Artificial sequence
  SiRNA target sequence
gtatcagcgtaattgtcttttttgtt

SEQ ID NO: 222800 - DNA, 26 bp, Artificial sequence
  SiRNA target sequence
tatcagcgtaattgtcttttttgtta

SEQ ID NO: 222801 - DNA, 26 bp, Artificial sequence
  SiRNA target sequence
atcagcgtaattgtcttttttgttat

SEQ ID NO: 222802 - DNA, 26 bp, Artificial sequence
  SiRNA target sequence
tcagcgtaattgtcttttttgttatt

SEQ ID NO: 222803 - DNA, 26 bp, Artificial sequence
  SiRNA target sequence
cagcgtaattgtcttttttgttatta

SEQ ID NO: 222804 - DNA, 26 bp, Artificial sequence
  SiRNA target sequence
agcgtaattgtcttttttgttattat

SEQ ID NO: 222805 - DNA, 26 bp, Artificial sequence
  SiRNA target sequence
gcgtaattgtcttttttgttattatt

SEQ ID NO: 222806 - DNA, 26 bp, Artificial sequence
  SiRNA target sequence
cgtaattgtcttttttgttattattt

SEQ ID NO: 222807 - DNA, 26 bp, Artificial sequence
  SiRNA target sequence
gtaattgtcttttttgttattatttg

SEQ ID NO: 222808 - DNA, 26 bp, Artificial sequence
  SiRNA target sequence
taattgtcttttttgttattatttgg

SEQ ID NO: 222809 - DNA, 26 bp, Artificial sequence
  SiRNA target sequence
aattgtcttttttgttattatttgga

SEQ ID NO: 222810 - DNA, 26 bp, Artificial sequence
  SiRNA target sequence
attgtcttttttgttattatttggat

SEQ ID NO: 222811 - DNA, 26 bp, Artificial sequence
  SiRNA target sequence
ttgtcttttttgttattatttggatt

SEQ ID NO: 222812 - DNA, 26 bp, Artificial sequence
  SiRNA target sequence
tgtcttttttgttattatttggattt

SEQ ID NO: 222813 - DNA, 26 bp, Artificial sequence
  SiRNA target sequence
gtcttttttgttattatttggattta

SEQ ID NO: 222814 - DNA, 26 bp, Artificial sequence
  SiRNA target sequence
tcttttttgttattatttggatttat

SEQ ID NO: 222815 - DNA, 26 bp, Artificial sequence
  SiRNA target sequence
cttttttgttattatttggatttatt

SEQ ID NO: 222816 - DNA, 26 bp, Artificial sequence
  SiRNA target sequence
ttttttgttattatttggatttattc

SEQ ID NO: 222817 - DNA, 26 bp, Artificial sequence
  SiRNA target sequence
tttttgttattatttggatttattca

SEQ ID NO: 222818 - DNA, 26 bp, Artificial sequence
  SiRNA target sequence
ttttgttattatttggatttattcag

SEQ ID NO: 222819 - DNA, 26 bp, Artificial sequence
  SiRNA target sequence
tttgttattatttggatttattcagt

SEQ ID NO: 222820 - DNA, 26 bp, Artificial sequence
  SiRNA target sequence
ttgttattatttggatttattcagtt

SEQ ID NO: 222821 - DNA, 26 bp, Artificial sequence
  SiRNA target sequence
tgttattatttggatttattcagtta

SEQ ID NO: 222822 - DNA, 26 bp, Artificial sequence
  SiRNA target sequence
gttattatttggatttattcagttat

SEQ ID NO: 222823 - DNA, 26 bp, Artificial sequence
  SiRNA target sequence
ttattatttggatttattcagttatt

SEQ ID NO: 222824 - DNA, 26 bp, Artificial sequence
  SiRNA target sequence
tattatttggatttattcagttattt

SEQ ID NO: 222825 - DNA, 26 bp, Artificial sequence
  SiRNA target sequence
attatttggatttattcagttattta

SEQ ID NO: 222826 - DNA, 26 bp, Artificial sequence
  SiRNA target sequence
ttatttggatttattcagttatttat

SEQ ID NO: 222827 - DNA, 26 bp, Artificial sequence
  SiRNA target sequence
tatttggatttattcagttatttatt

SEQ ID NO: 222828 - DNA, 26 bp, Artificial sequence
  SiRNA target sequence
atttggatttattcagttatttattt

SEQ ID NO: 222829 - DNA, 26 bp, Artificial sequence
  SiRNA target sequence
tttggatttattcagttatttattta

SEQ ID NO: 222830 - DNA, 26 bp, Artificial sequence
  SiRNA target sequence
ttggatttattcagttatttatttaa

SEQ ID NO: 222831 - DNA, 26 bp, Artificial sequence
  SiRNA target sequence
tggatttattcagttatttatttaaa

SEQ ID NO: 222832 - DNA, 26 bp, Artificial sequence
  SiRNA target sequence
ggatttattcagttatttatttaaat

SEQ ID NO: 222833 - DNA, 26 bp, Artificial sequence
  SiRNA target sequence
gatttattcagttatttatttaaata

SEQ ID NO: 222834 - DNA, 26 bp, Artificial sequence
  SiRNA target sequence
atttattcagttatttatttaaataa

SEQ ID NO: 222835 - DNA, 26 bp, Artificial sequence
  SiRNA target sequence
tttattcagttatttatttaaataag

SEQ ID NO: 222836 - DNA, 26 bp, Artificial sequence
  SiRNA target sequence
ttattcagttatttatttaaataaga

SEQ ID NO: 222837 - DNA, 26 bp, Artificial sequence
  SiRNA target sequence
tattcagttatttatttaaataagaa

SEQ ID NO: 222838 - DNA, 26 bp, Artificial sequence
  SiRNA target sequence
attcagttatttatttaaataagaaa

SEQ ID NO: 222839 - DNA, 26 bp, Artificial sequence
  SiRNA target sequence
ttcagttatttatttaaataagaaat

SEQ ID NO: 222840 - DNA, 26 bp, Artificial sequence
  SiRNA target sequence
tcagttatttatttaaataagaaata

SEQ ID NO: 222841 - DNA, 26 bp, Artificial sequence
  SiRNA target sequence
cagttatttatttaaataagaaatac

SEQ ID NO: 222842 - DNA, 26 bp, Artificial sequence
  SiRNA target sequence
agttatttatttaaataagaaataca

SEQ ID NO: 222843 - DNA, 26 bp, Artificial sequence
  SiRNA target sequence
gttatttatttaaataagaaatacaa

SEQ ID NO: 222844 - DNA, 26 bp, Artificial sequence
  SiRNA target sequence
ttatttatttaaataagaaatacaaa

SEQ ID NO: 222845 - DNA, 26 bp, Artificial sequence
  SiRNA target sequence
tatttatttaaataagaaatacaaag

SEQ ID NO: 222846 - DNA, 26 bp, Artificial sequence
  SiRNA target sequence
atttatttaaataagaaatacaaaga

SEQ ID NO: 222847 - DNA, 26 bp, Artificial sequence
  SiRNA target sequence
tttatttaaataagaaatacaaagaa

SEQ ID NO: 222848 - DNA, 26 bp, Artificial sequence
  SiRNA target sequence
ttatttaaataagaaatacaaagaat

SEQ ID NO: 222849 - DNA, 26 bp, Artificial sequence
  SiRNA target sequence
tatttaaataagaaatacaaagaatc

SEQ ID NO: 222850 - DNA, 26 bp, Artificial sequence
  SiRNA target sequence
atttaaataagaaatacaaagaatca

SEQ ID NO: 222851 - DNA, 26 bp, Artificial sequence
  SiRNA target sequence
tttaaataagaaatacaaagaatcag

SEQ ID NO: 222852 - DNA, 26 bp, Artificial sequence
  SiRNA target sequence
ttaaataagaaatacaaagaatcagt

SEQ ID NO: 222853 - DNA, 26 bp, Artificial sequence
  SiRNA target sequence
taaataagaaatacaaagaatcagtt

SEQ ID NO: 222854 - DNA, 26 bp, Artificial sequence
  SiRNA target sequence
aaataagaaatacaaagaatcagttg

SEQ ID NO: 222855 - DNA, 26 bp, Artificial sequence
  SiRNA target sequence
aataagaaatacaaagaatcagttgt

SEQ ID NO: 222856 - DNA, 26 bp, Artificial sequence
  SiRNA target sequence
ataagaaatacaaagaatcagttgtt

SEQ ID NO: 222857 - DNA, 26 bp, Artificial sequence
  SiRNA target sequence
taagaaatacaaagaatcagttgtta

SEQ ID NO: 222858 - DNA, 26 bp, Artificial sequence
  SiRNA target sequence
aagaaatacaaagaatcagttgttag

SEQ ID NO: 222859 - DNA, 26 bp, Artificial sequence
  SiRNA target sequence
agaaatacaaagaatcagttgttagt

SEQ ID NO: 222860 - DNA, 26 bp, Artificial sequence
  SiRNA target sequence
gaaatacaaagaatcagttgttagta

SEQ ID NO: 222861 - DNA, 26 bp, Artificial sequence
  SiRNA target sequence
aaatacaaagaatcagttgttagtaa

SEQ ID NO: 222862 - DNA, 26 bp, Artificial sequence
  SiRNA target sequence
aatacaaagaatcagttgttagtaat

SEQ ID NO: 222863 - DNA, 26 bp, Artificial sequence
  SiRNA target sequence
atacaaagaatcagttgttagtaatt

SEQ ID NO: 222864 - DNA, 26 bp, Artificial sequence
  SiRNA target sequence
tacaaagaatcagttgttagtaattt

SEQ ID NO: 222865 - DNA, 26 bp, Artificial sequence
  SiRNA target sequence
acaaagaatcagttgttagtaattta

SEQ ID NO: 222866 - DNA, 26 bp, Artificial sequence
  SiRNA target sequence
caaagaatcagttgttagtaatttac

SEQ ID NO: 222867 - DNA, 26 bp, Artificial sequence
  SiRNA target sequence
aaagaatcagttgttagtaatttacc

SEQ ID NO: 222868 - DNA, 26 bp, Artificial sequence
  SiRNA target sequence
aagaatcagttgttagtaatttaccc

SEQ ID NO: 222869 - DNA, 26 bp, Artificial sequence
  SiRNA target sequence
agaatcagttgttagtaatttaccca

SEQ ID NO: 222870 - DNA, 26 bp, Artificial sequence
  SiRNA target sequence
gaatcagttgttagtaatttacccat

SEQ ID NO: 222871 - DNA, 26 bp, Artificial sequence
  SiRNA target sequence
aatcagttgttagtaatttacccatc

SEQ ID NO: 222872 - DNA, 26 bp, Artificial sequence
  SiRNA target sequence
atcagttgttagtaatttacccatcg

SEQ ID NO: 222873 - DNA, 26 bp, Artificial sequence
  SiRNA target sequence
tcagttgttagtaatttacccatcga

SEQ ID NO: 222874 - DNA, 26 bp, Artificial sequence
  SiRNA target sequence
cagttgttagtaatttacccatcgat

SEQ ID NO: 222875 - DNA, 26 bp, Artificial sequence
  SiRNA target sequence
agttgttagtaatttacccatcgatg

SEQ ID NO: 222876 - DNA, 26 bp, Artificial sequence
  SiRNA target sequence
gttgttagtaatttacccatcgatgt

SEQ ID NO: 222877 - DNA, 26 bp, Artificial sequence
  SiRNA target sequence
ttgttagtaatttacccatcgatgtt

SEQ ID NO: 222878 - DNA, 26 bp, Artificial sequence
  SiRNA target sequence
tgttagtaatttacccatcgatgttg

SEQ ID NO: 222879 - DNA, 26 bp, Artificial sequence
  SiRNA target sequence
gttagtaatttacccatcgatgttga

SEQ ID NO: 222880 - DNA, 26 bp, Artificial sequence
  SiRNA target sequence
ttagtaatttacccatcgatgttgat

SEQ ID NO: 222881 - DNA, 26 bp, Artificial sequence
  SiRNA target sequence
tagtaatttacccatcgatgttgatt

SEQ ID NO: 222882 - DNA, 26 bp, Artificial sequence
  SiRNA target sequence
agtaatttacccatcgatgttgattt

SEQ ID NO: 222883 - DNA, 26 bp, Artificial sequence
  SiRNA target sequence
gtaatttacccatcgatgttgatttg

SEQ ID NO: 222884 - DNA, 26 bp, Artificial sequence
  SiRNA target sequence
taatttacccatcgatgttgatttgt

SEQ ID NO: 222885 - DNA, 26 bp, Artificial sequence
  SiRNA target sequence
aatttacccatcgatgttgatttgtt

SEQ ID NO: 222886 - DNA, 26 bp, Artificial sequence
  SiRNA target sequence
atttacccatcgatgttgatttgttt

SEQ ID NO: 222887 - DNA, 26 bp, Artificial sequence
  SiRNA target sequence
tttacccatcgatgttgatttgtttg

SEQ ID NO: 222888 - DNA, 26 bp, Artificial sequence
  SiRNA target sequence
ttacccatcgatgttgatttgtttgc

SEQ ID NO: 222889 - DNA, 26 bp, Artificial sequence
  SiRNA target sequence
tacccatcgatgttgatttgtttgca

SEQ ID NO: 222890 - DNA, 26 bp, Artificial sequence
  SiRNA target sequence
acccatcgatgttgatttgtttgcat

SEQ ID NO: 222891 - DNA, 26 bp, Artificial sequence
  SiRNA target sequence
cccatcgatgttgatttgtttgcatc

SEQ ID NO: 222892 - DNA, 26 bp, Artificial sequence
  SiRNA target sequence
ccatcgatgttgatttgtttgcatca

SEQ ID NO: 222893 - DNA, 26 bp, Artificial sequence
  SiRNA target sequence
catcgatgttgatttgtttgcatcaa

SEQ ID NO: 222894 - DNA, 26 bp, Artificial sequence
  SiRNA target sequence
atcgatgttgatttgtttgcatcaaa

SEQ ID NO: 222895 - DNA, 26 bp, Artificial sequence
  SiRNA target sequence
tcgatgttgatttgtttgcatcaaag

SEQ ID NO: 222896 - DNA, 26 bp, Artificial sequence
  SiRNA target sequence
cgatgttgatttgtttgcatcaaagt

SEQ ID NO: 222897 - DNA, 26 bp, Artificial sequence
  SiRNA target sequence
gatgttgatttgtttgcatcaaagtt

SEQ ID NO: 222898 - DNA, 26 bp, Artificial sequence
  SiRNA target sequence
atgttgatttgtttgcatcaaagttg

SEQ ID NO: 222899 - DNA, 26 bp, Artificial sequence
  SiRNA target sequence
tgttgatttgtttgcatcaaagttgt

SEQ ID NO: 222900 - DNA, 26 bp, Artificial sequence
  SiRNA target sequence
gttgatttgtttgcatcaaagttgtt

SEQ ID NO: 222901 - DNA, 26 bp, Artificial sequence
  SiRNA target sequence
ttgatttgtttgcatcaaagttgtta

SEQ ID NO: 222902 - DNA, 26 bp, Artificial sequence
  SiRNA target sequence
tgatttgtttgcatcaaagttgttag

SEQ ID NO: 222903 - DNA, 26 bp, Artificial sequence
  SiRNA target sequence
gatttgtttgcatcaaagttgttaga

SEQ ID NO: 222904 - DNA, 26 bp, Artificial sequence
  SiRNA target sequence
atttgtttgcatcaaagttgttagat

SEQ ID NO: 222905 - DNA, 26 bp, Artificial sequence
  SiRNA target sequence
tttgtttgcatcaaagttgttagata

SEQ ID NO: 222906 - DNA, 26 bp, Artificial sequence
  SiRNA target sequence
ttgtttgcatcaaagttgttagataa

SEQ ID NO: 222907 - DNA, 26 bp, Artificial sequence
  SiRNA target sequence
tgtttgcatcaaagttgttagataat

SEQ ID NO: 222908 - DNA, 26 bp, Artificial sequence
  SiRNA target sequence
gtttgcatcaaagttgttagataata

SEQ ID NO: 222909 - DNA, 26 bp, Artificial sequence
  SiRNA target sequence
tttgcatcaaagttgttagataataa

SEQ ID NO: 222910 - DNA, 26 bp, Artificial sequence
  SiRNA target sequence
ttgcatcaaagttgttagataataaa

SEQ ID NO: 222911 - DNA, 26 bp, Artificial sequence
  SiRNA target sequence
tgcatcaaagttgttagataataaaa

SEQ ID NO: 222912 - DNA, 26 bp, Artificial sequence
  SiRNA target sequence
gcatcaaagttgttagataataaaaa

SEQ ID NO: 222913 - DNA, 26 bp, Artificial sequence
  SiRNA target sequence
catcaaagttgttagataataaaaaa

SEQ ID NO: 222914 - DNA, 26 bp, Artificial sequence
  SiRNA target sequence
atcaaagttgttagataataaaaaag

SEQ ID NO: 222915 - DNA, 26 bp, Artificial sequence
  SiRNA target sequence
tcaaagttgttagataataaaaaaga

SEQ ID NO: 222916 - DNA, 26 bp, Artificial sequence
  SiRNA target sequence
caaagttgttagataataaaaaagaa

SEQ ID NO: 222917 - DNA, 26 bp, Artificial sequence
  SiRNA target sequence
aaagttgttagataataaaaaagaag

SEQ ID NO: 222918 - DNA, 26 bp, Artificial sequence
  SiRNA target sequence
aagttgttagataataaaaaagaaga

SEQ ID NO: 222919 - DNA, 26 bp, Artificial sequence
  SiRNA target sequence
agttgttagataataaaaaagaagag

SEQ ID NO: 222920 - DNA, 26 bp, Artificial sequence
  SiRNA target sequence
gttgttagataataaaaaagaagagg

SEQ ID NO: 222921 - DNA, 26 bp, Artificial sequence
  SiRNA target sequence
ttgttagataataaaaaagaagagga

SEQ ID NO: 222922 - DNA, 26 bp, Artificial sequence
  SiRNA target sequence
tgttagataataaaaaagaagaggaa

SEQ ID NO: 222923 - DNA, 26 bp, Artificial sequence
  SiRNA target sequence
gttagataataaaaaagaagaggaaa

SEQ ID NO: 222924 - DNA, 26 bp, Artificial sequence
  SiRNA target sequence
ttagataataaaaaagaagaggaaat

SEQ ID NO: 222925 - DNA, 26 bp, Artificial sequence
  SiRNA target sequence
tagataataaaaaagaagaggaaatt

SEQ ID NO: 222926 - DNA, 26 bp, Artificial sequence
  SiRNA target sequence
agataataaaaaagaagaggaaattg

SEQ ID NO: 222927 - DNA, 26 bp, Artificial sequence
  SiRNA target sequence
gataataaaaaagaagaggaaattga

SEQ ID NO: 222928 - DNA, 26 bp, Artificial sequence
  SiRNA target sequence
ataataaaaaagaagaggaaattgat

SEQ ID NO: 222929 - DNA, 26 bp, Artificial sequence
  SiRNA target sequence
taataaaaaagaagaggaaattgatg

SEQ ID NO: 222930 - DNA, 26 bp, Artificial sequence
  SiRNA target sequence
aataaaaaagaagaggaaattgatgt

SEQ ID NO: 222931 - DNA, 26 bp, Artificial sequence
  SiRNA target sequence
ataaaaaagaagaggaaattgatgtg

SEQ ID NO: 222932 - DNA, 26 bp, Artificial sequence
  SiRNA target sequence
taaaaaagaagaggaaattgatgtgt

SEQ ID NO: 222933 - DNA, 26 bp, Artificial sequence
  SiRNA target sequence
aaaaaagaagaggaaattgatgtgtc

SEQ ID NO: 222934 - DNA, 26 bp, Artificial sequence
  SiRNA target sequence
aaaaagaagaggaaattgatgtgtca

SEQ ID NO: 222935 - DNA, 26 bp, Artificial sequence
  SiRNA target sequence
aaaagaagaggaaattgatgtgtcag

SEQ ID NO: 222936 - DNA, 26 bp, Artificial sequence
  SiRNA target sequence
aaagaagaggaaattgatgtgtcagt

SEQ ID NO: 222937 - DNA, 26 bp, Artificial sequence
  SiRNA target sequence
aagaagaggaaattgatgtgtcagtg

SEQ ID NO: 222938 - DNA, 26 bp, Artificial sequence
  SiRNA target sequence
agaagaggaaattgatgtgtcagtgc

SEQ ID NO: 222939 - DNA, 26 bp, Artificial sequence
  SiRNA target sequence
gaagaggaaattgatgtgtcagtgct

SEQ ID NO: 222940 - DNA, 26 bp, Artificial sequence
  SiRNA target sequence
aagaggaaattgatgtgtcagtgctc

SEQ ID NO: 222941 - DNA, 26 bp, Artificial sequence
  SiRNA target sequence
agaggaaattgatgtgtcagtgctcg

SEQ ID NO: 222942 - DNA, 26 bp, Artificial sequence
  SiRNA target sequence
gaggaaattgatgtgtcagtgctcgt

SEQ ID NO: 222943 - DNA, 26 bp, Artificial sequence
  SiRNA target sequence
aggaaattgatgtgtcagtgctcgtt

SEQ ID NO: 222944 - DNA, 26 bp, Artificial sequence
  SiRNA target sequence
ggaaattgatgtgtcagtgctcgtta

SEQ ID NO: 222945 - DNA, 26 bp, Artificial sequence
  SiRNA target sequence
gaaattgatgtgtcagtgctcgttaa

SEQ ID NO: 222946 - DNA, 26 bp, Artificial sequence
  SiRNA target sequence
aaattgatgtgtcagtgctcgttaat

SEQ ID NO: 222947 - DNA, 26 bp, Artificial sequence
  SiRNA target sequence
aattgatgtgtcagtgctcgttaatt

SEQ ID NO: 222948 - DNA, 26 bp, Artificial sequence
  SiRNA target sequence
attgatgtgtcagtgctcgttaatta

SEQ ID NO: 222949 - DNA, 26 bp, Artificial sequence
  SiRNA target sequence
ttgatgtgtcagtgctcgttaattaa

SEQ ID NO: 222950 - DNA, 27 bp, Artificial sequence
  SiRNA target sequence
atgattgagaggggtattatggaaaaa

SEQ ID NO: 222951 - DNA, 27 bp, Artificial sequence
  SiRNA target sequence
tgattgagaggggtattatggaaaaaa

SEQ ID NO: 222952 - DNA, 27 bp, Artificial sequence
  SiRNA target sequence
gattgagaggggtattatggaaaaaat

SEQ ID NO: 222953 - DNA, 27 bp, Artificial sequence
  SiRNA target sequence
attgagaggggtattatggaaaaaata

SEQ ID NO: 222954 - DNA, 27 bp, Artificial sequence
  SiRNA target sequence
ttgagaggggtattatggaaaaaataa

SEQ ID NO: 222955 - DNA, 27 bp, Artificial sequence
  SiRNA target sequence
tgagaggggtattatggaaaaaataaa

SEQ ID NO: 222956 - DNA, 27 bp, Artificial sequence
  SiRNA target sequence
gagaggggtattatggaaaaaataaaa

SEQ ID NO: 222957 - DNA, 27 bp, Artificial sequence
  SiRNA target sequence
agaggggtattatggaaaaaataaaaa

SEQ ID NO: 222958 - DNA, 27 bp, Artificial sequence
  SiRNA target sequence
gaggggtattatggaaaaaataaaaaa

SEQ ID NO: 222959 - DNA, 27 bp, Artificial sequence
  SiRNA target sequence
aggggtattatggaaaaaataaaaaat

SEQ ID NO: 222960 - DNA, 27 bp, Artificial sequence
  SiRNA target sequence
ggggtattatggaaaaaataaaaaatt

SEQ ID NO: 222961 - DNA, 27 bp, Artificial sequence
  SiRNA target sequence
gggtattatggaaaaaataaaaaattt

SEQ ID NO: 222962 - DNA, 27 bp, Artificial sequence
  SiRNA target sequence
ggtattatggaaaaaataaaaaattta

SEQ ID NO: 222963 - DNA, 27 bp, Artificial sequence
  SiRNA target sequence
gtattatggaaaaaataaaaaatttat

SEQ ID NO: 222964 - DNA, 27 bp, Artificial sequence
  SiRNA target sequence
tattatggaaaaaataaaaaatttatt

SEQ ID NO: 222965 - DNA, 27 bp, Artificial sequence
  SiRNA target sequence
attatggaaaaaataaaaaatttatta

SEQ ID NO: 222966 - DNA, 27 bp, Artificial sequence
  SiRNA target sequence
ttatggaaaaaataaaaaatttattaa

SEQ ID NO: 222967 - DNA, 27 bp, Artificial sequence
  SiRNA target sequence
tatggaaaaaataaaaaatttattaac

SEQ ID NO: 222968 - DNA, 27 bp, Artificial sequence
  SiRNA target sequence
atggaaaaaataaaaaatttattaaca

SEQ ID NO: 222969 - DNA, 27 bp, Artificial sequence
  SiRNA target sequence
tggaaaaaataaaaaatttattaacag

SEQ ID NO: 222970 - DNA, 27 bp, Artificial sequence
  SiRNA target sequence
ggaaaaaataaaaaatttattaacaga

SEQ ID NO: 222971 - DNA, 27 bp, Artificial sequence
  SiRNA target sequence
gaaaaaataaaaaatttattaacagag

SEQ ID NO: 222972 - DNA, 27 bp, Artificial sequence
  SiRNA target sequence
aaaaaataaaaaatttattaacagagg

SEQ ID NO: 222973 - DNA, 27 bp, Artificial sequence
  SiRNA target sequence
aaaaataaaaaatttattaacagagga

SEQ ID NO: 222974 - DNA, 27 bp, Artificial sequence
  SiRNA target sequence
aaaataaaaaatttattaacagaggat

SEQ ID NO: 222975 - DNA, 27 bp, Artificial sequence
  SiRNA target sequence
aaataaaaaatttattaacagaggatg

SEQ ID NO: 222976 - DNA, 27 bp, Artificial sequence
  SiRNA target sequence
aataaaaaatttattaacagaggatga

SEQ ID NO: 222977 - DNA, 27 bp, Artificial sequence
  SiRNA target sequence
ataaaaaatttattaacagaggatgaa

SEQ ID NO: 222978 - DNA, 27 bp, Artificial sequence
  SiRNA target sequence
taaaaaatttattaacagaggatgaag

SEQ ID NO: 222979 - DNA, 27 bp, Artificial sequence
  SiRNA target sequence
aaaaaatttattaacagaggatgaagt

SEQ ID NO: 222980 - DNA, 27 bp, Artificial sequence
  SiRNA target sequence
aaaaatttattaacagaggatgaagta

SEQ ID NO: 222981 - DNA, 27 bp, Artificial sequence
  SiRNA target sequence
aaaatttattaacagaggatgaagtag

SEQ ID NO: 222982 - DNA, 27 bp, Artificial sequence
  SiRNA target sequence
aaatttattaacagaggatgaagtaga

SEQ ID NO: 222983 - DNA, 27 bp, Artificial sequence
  SiRNA target sequence
aatttattaacagaggatgaagtagaa

SEQ ID NO: 222984 - DNA, 27 bp, Artificial sequence
  SiRNA target sequence
atttattaacagaggatgaagtagaag

SEQ ID NO: 222985 - DNA, 27 bp, Artificial sequence
  SiRNA target sequence
tttattaacagaggatgaagtagaagc

SEQ ID NO: 222986 - DNA, 27 bp, Artificial sequence
  SiRNA target sequence
ttattaacagaggatgaagtagaagca

SEQ ID NO: 222987 - DNA, 27 bp, Artificial sequence
  SiRNA target sequence
tattaacagaggatgaagtagaagcag

SEQ ID NO: 222988 - DNA, 27 bp, Artificial sequence
  SiRNA target sequence
attaacagaggatgaagtagaagcaga

SEQ ID NO: 222989 - DNA, 27 bp, Artificial sequence
  SiRNA target sequence
ttaacagaggatgaagtagaagcagaa

SEQ ID NO: 222990 - DNA, 27 bp, Artificial sequence
  SiRNA target sequence
taacagaggatgaagtagaagcagaag

SEQ ID NO: 222991 - DNA, 27 bp, Artificial sequence
  SiRNA target sequence
aacagaggatgaagtagaagcagaagc

SEQ ID NO: 222992 - DNA, 27 bp, Artificial sequence
  SiRNA target sequence
acagaggatgaagtagaagcagaagca

SEQ ID NO: 222993 - DNA, 27 bp, Artificial sequence
  SiRNA target sequence
cagaggatgaagtagaagcagaagcaa

SEQ ID NO: 222994 - DNA, 27 bp, Artificial sequence
  SiRNA target sequence
agaggatgaagtagaagcagaagcaaa

SEQ ID NO: 222995 - DNA, 27 bp, Artificial sequence
  SiRNA target sequence
gaggatgaagtagaagcagaagcaaat

SEQ ID NO: 222996 - DNA, 27 bp, Artificial sequence
  SiRNA target sequence
aggatgaagtagaagcagaagcaaatt

SEQ ID NO: 222997 - DNA, 27 bp, Artificial sequence
  SiRNA target sequence
ggatgaagtagaagcagaagcaaattc

SEQ ID NO: 222998 - DNA, 27 bp, Artificial sequence
  SiRNA target sequence
gatgaagtagaagcagaagcaaattct

SEQ ID NO: 222999 - DNA, 27 bp, Artificial sequence
  SiRNA target sequence
atgaagtagaagcagaagcaaattctg

SEQ ID NO: 223000 - DNA, 27 bp, Artificial sequence
  SiRNA target sequence
tgaagtagaagcagaagcaaattctgg

SEQ ID NO: 223001 - DNA, 27 bp, Artificial sequence
  SiRNA target sequence
gaagtagaagcagaagcaaattctgga

SEQ ID NO: 223002 - DNA, 27 bp, Artificial sequence
  SiRNA target sequence
aagtagaagcagaagcaaattctggaa

SEQ ID NO: 223003 - DNA, 27 bp, Artificial sequence
  SiRNA target sequence
agtagaagcagaagcaaattctggaag

SEQ ID NO: 223004 - DNA, 27 bp, Artificial sequence
  SiRNA target sequence
gtagaagcagaagcaaattctggaagg

SEQ ID NO: 223005 - DNA, 27 bp, Artificial sequence
  SiRNA target sequence
tagaagcagaagcaaattctggaaggg

SEQ ID NO: 223006 - DNA, 27 bp, Artificial sequence
  SiRNA target sequence
agaagcagaagcaaattctggaagggg

SEQ ID NO: 223007 - DNA, 27 bp, Artificial sequence
  SiRNA target sequence
gaagcagaagcaaattctggaaggggc

SEQ ID NO: 223008 - DNA, 27 bp, Artificial sequence
  SiRNA target sequence
aagcagaagcaaattctggaaggggca

SEQ ID NO: 223009 - DNA, 27 bp, Artificial sequence
  SiRNA target sequence
agcagaagcaaattctggaaggggcat

SEQ ID NO: 223010 - DNA, 27 bp, Artificial sequence
  SiRNA target sequence
gcagaagcaaattctggaaggggcatt

SEQ ID NO: 223011 - DNA, 27 bp, Artificial sequence
  SiRNA target sequence
cagaagcaaattctggaaggggcattt

SEQ ID NO: 223012 - DNA, 27 bp, Artificial sequence
  SiRNA target sequence
agaagcaaattctggaaggggcatttt

SEQ ID NO: 223013 - DNA, 27 bp, Artificial sequence
  SiRNA target sequence
gaagcaaattctggaaggggcatttta

SEQ ID NO: 223014 - DNA, 27 bp, Artificial sequence
  SiRNA target sequence
aagcaaattctggaaggggcattttat

SEQ ID NO: 223015 - DNA, 27 bp, Artificial sequence
  SiRNA target sequence
agcaaattctggaaggggcattttatc

SEQ ID NO: 223016 - DNA, 27 bp, Artificial sequence
  SiRNA target sequence
gcaaattctggaaggggcattttatca

SEQ ID NO: 223017 - DNA, 27 bp, Artificial sequence
  SiRNA target sequence
caaattctggaaggggcattttatcaa

SEQ ID NO: 223018 - DNA, 27 bp, Artificial sequence
  SiRNA target sequence
aaattctggaaggggcattttatcaat

SEQ ID NO: 223019 - DNA, 27 bp, Artificial sequence
  SiRNA target sequence
aattctggaaggggcattttatcaata

SEQ ID NO: 223020 - DNA, 27 bp, Artificial sequence
  SiRNA target sequence
attctggaaggggcattttatcaatat

SEQ ID NO: 223021 - DNA, 27 bp, Artificial sequence
  SiRNA target sequence
ttctggaaggggcattttatcaatatt

SEQ ID NO: 223022 - DNA, 27 bp, Artificial sequence
  SiRNA target sequence
tctggaaggggcattttatcaatattt

SEQ ID NO: 223023 - DNA, 27 bp, Artificial sequence
  SiRNA target sequence
ctggaaggggcattttatcaatattta

SEQ ID NO: 223024 - DNA, 27 bp, Artificial sequence
  SiRNA target sequence
tggaaggggcattttatcaatatttag

SEQ ID NO: 223025 - DNA, 27 bp, Artificial sequence
  SiRNA target sequence
ggaaggggcattttatcaatatttaga

SEQ ID NO: 223026 - DNA, 27 bp, Artificial sequence
  SiRNA target sequence
gaaggggcattttatcaatatttagaa

SEQ ID NO: 223027 - DNA, 27 bp, Artificial sequence
  SiRNA target sequence
aaggggcattttatcaatatttagaat

SEQ ID NO: 223028 - DNA, 27 bp, Artificial sequence
  SiRNA target sequence
aggggcattttatcaatatttagaatt

SEQ ID NO: 223029 - DNA, 27 bp, Artificial sequence
  SiRNA target sequence
ggggcattttatcaatatttagaattg

SEQ ID NO: 223030 - DNA, 27 bp, Artificial sequence
  SiRNA target sequence
gggcattttatcaatatttagaattgc

SEQ ID NO: 223031 - DNA, 27 bp, Artificial sequence
  SiRNA target sequence
ggcattttatcaatatttagaattgct

SEQ ID NO: 223032 - DNA, 27 bp, Artificial sequence
  SiRNA target sequence
gcattttatcaatatttagaattgcta

SEQ ID NO: 223033 - DNA, 27 bp, Artificial sequence
  SiRNA target sequence
cattttatcaatatttagaattgctaa

SEQ ID NO: 223034 - DNA, 27 bp, Artificial sequence
  SiRNA target sequence
attttatcaatatttagaattgctaag

SEQ ID NO: 223035 - DNA, 27 bp, Artificial sequence
  SiRNA target sequence
ttttatcaatatttagaattgctaagg

SEQ ID NO: 223036 - DNA, 27 bp, Artificial sequence
  SiRNA target sequence
tttatcaatatttagaattgctaaggt

SEQ ID NO: 223037 - DNA, 27 bp, Artificial sequence
  SiRNA target sequence
ttatcaatatttagaattgctaaggta

SEQ ID NO: 223038 - DNA, 27 bp, Artificial sequence
  SiRNA target sequence
tatcaatatttagaattgctaaggtag

SEQ ID NO: 223039 - DNA, 27 bp, Artificial sequence
  SiRNA target sequence
atcaatatttagaattgctaaggtaga

SEQ ID NO: 223040 - DNA, 27 bp, Artificial sequence
  SiRNA target sequence
tcaatatttagaattgctaaggtagaa

SEQ ID NO: 223041 - DNA, 27 bp, Artificial sequence
  SiRNA target sequence
caatatttagaattgctaaggtagaaa

SEQ ID NO: 223042 - DNA, 27 bp, Artificial sequence
  SiRNA target sequence
aatatttagaattgctaaggtagaaag

SEQ ID NO: 223043 - DNA, 27 bp, Artificial sequence
  SiRNA target sequence
atatttagaattgctaaggtagaaaga

SEQ ID NO: 223044 - DNA, 27 bp, Artificial sequence
  SiRNA target sequence
tatttagaattgctaaggtagaaagaa

SEQ ID NO: 223045 - DNA, 27 bp, Artificial sequence
  SiRNA target sequence
atttagaattgctaaggtagaaagaag

SEQ ID NO: 223046 - DNA, 27 bp, Artificial sequence
  SiRNA target sequence
tttagaattgctaaggtagaaagaaga

SEQ ID NO: 223047 - DNA, 27 bp, Artificial sequence
  SiRNA target sequence
ttagaattgctaaggtagaaagaagaa

SEQ ID NO: 223048 - DNA, 27 bp, Artificial sequence
  SiRNA target sequence
tagaattgctaaggtagaaagaagaat

SEQ ID NO: 223049 - DNA, 27 bp, Artificial sequence
  SiRNA target sequence
agaattgctaaggtagaaagaagaatg

SEQ ID NO: 223050 - DNA, 27 bp, Artificial sequence
  SiRNA target sequence
gaattgctaaggtagaaagaagaatgt

SEQ ID NO: 223051 - DNA, 27 bp, Artificial sequence
  SiRNA target sequence
aattgctaaggtagaaagaagaatgtt

SEQ ID NO: 223052 - DNA, 27 bp, Artificial sequence
  SiRNA target sequence
attgctaaggtagaaagaagaatgttt

SEQ ID NO: 223053 - DNA, 27 bp, Artificial sequence
  SiRNA target sequence
ttgctaaggtagaaagaagaatgtttt

SEQ ID NO: 223054 - DNA, 27 bp, Artificial sequence
  SiRNA target sequence
tgctaaggtagaaagaagaatgttttg

SEQ ID NO: 223055 - DNA, 27 bp, Artificial sequence
  SiRNA target sequence
gctaaggtagaaagaagaatgttttgg

SEQ ID NO: 223056 - DNA, 27 bp, Artificial sequence
  SiRNA target sequence
ctaaggtagaaagaagaatgttttggc

SEQ ID NO: 223057 - DNA, 27 bp, Artificial sequence
  SiRNA target sequence
taaggtagaaagaagaatgttttggct

SEQ ID NO: 223058 - DNA, 27 bp, Artificial sequence
  SiRNA target sequence
aaggtagaaagaagaatgttttggctt

SEQ ID NO: 223059 - DNA, 27 bp, Artificial sequence
  SiRNA target sequence
aggtagaaagaagaatgttttggctta

SEQ ID NO: 223060 - DNA, 27 bp, Artificial sequence
  SiRNA target sequence
ggtagaaagaagaatgttttggcttat

SEQ ID NO: 223061 - DNA, 27 bp, Artificial sequence
  SiRNA target sequence
gtagaaagaagaatgttttggcttatg

SEQ ID NO: 223062 - DNA, 27 bp, Artificial sequence
  SiRNA target sequence
tagaaagaagaatgttttggcttatga

SEQ ID NO: 223063 - DNA, 27 bp, Artificial sequence
  SiRNA target sequence
agaaagaagaatgttttggcttatgac

SEQ ID NO: 223064 - DNA, 27 bp, Artificial sequence
  SiRNA target sequence
gaaagaagaatgttttggcttatgacg

SEQ ID NO: 223065 - DNA, 27 bp, Artificial sequence
  SiRNA target sequence
aaagaagaatgttttggcttatgacgc

SEQ ID NO: 223066 - DNA, 27 bp, Artificial sequence
  SiRNA target sequence
aagaagaatgttttggcttatgacgct

SEQ ID NO: 223067 - DNA, 27 bp, Artificial sequence
  SiRNA target sequence
agaagaatgttttggcttatgacgctt

SEQ ID NO: 223068 - DNA, 27 bp, Artificial sequence
  SiRNA target sequence
gaagaatgttttggcttatgacgctta

SEQ ID NO: 223069 - DNA, 27 bp, Artificial sequence
  SiRNA target sequence
aagaatgttttggcttatgacgcttat

SEQ ID NO: 223070 - DNA, 27 bp, Artificial sequence
  SiRNA target sequence
agaatgttttggcttatgacgcttatg

SEQ ID NO: 223071 - DNA, 27 bp, Artificial sequence
  SiRNA target sequence
gaatgttttggcttatgacgcttatgt

SEQ ID NO: 223072 - DNA, 27 bp, Artificial sequence
  SiRNA target sequence
aatgttttggcttatgacgcttatgtt

SEQ ID NO: 223073 - DNA, 27 bp, Artificial sequence
  SiRNA target sequence
atgttttggcttatgacgcttatgttt

SEQ ID NO: 223074 - DNA, 27 bp, Artificial sequence
  SiRNA target sequence
tgttttggcttatgacgcttatgtttt

SEQ ID NO: 223075 - DNA, 27 bp, Artificial sequence
  SiRNA target sequence
gttttggcttatgacgcttatgttttc

SEQ ID NO: 223076 - DNA, 27 bp, Artificial sequence
  SiRNA target sequence
ttttggcttatgacgcttatgttttcg

SEQ ID NO: 223077 - DNA, 27 bp, Artificial sequence
  SiRNA target sequence
tttggcttatgacgcttatgttttcgc

SEQ ID NO: 223078 - DNA, 27 bp, Artificial sequence
  SiRNA target sequence
ttggcttatgacgcttatgttttcgct

SEQ ID NO: 223079 - DNA, 27 bp, Artificial sequence
  SiRNA target sequence
tggcttatgacgcttatgttttcgctt

SEQ ID NO: 223080 - DNA, 27 bp, Artificial sequence
  SiRNA target sequence
ggcttatgacgcttatgttttcgctta

SEQ ID NO: 223081 - DNA, 27 bp, Artificial sequence
  SiRNA target sequence
gcttatgacgcttatgttttcgcttat

SEQ ID NO: 223082 - DNA, 27 bp, Artificial sequence
  SiRNA target sequence
cttatgacgcttatgttttcgcttatt

SEQ ID NO: 223083 - DNA, 27 bp, Artificial sequence
  SiRNA target sequence
ttatgacgcttatgttttcgcttattt

SEQ ID NO: 223084 - DNA, 27 bp, Artificial sequence
  SiRNA target sequence
tatgacgcttatgttttcgcttatttc

SEQ ID NO: 223085 - DNA, 27 bp, Artificial sequence
  SiRNA target sequence
atgacgcttatgttttcgcttatttcc

SEQ ID NO: 223086 - DNA, 27 bp, Artificial sequence
  SiRNA target sequence
tgacgcttatgttttcgcttatttcct

SEQ ID NO: 223087 - DNA, 27 bp, Artificial sequence
  SiRNA target sequence
gacgcttatgttttcgcttatttcctt

SEQ ID NO: 223088 - DNA, 27 bp, Artificial sequence
  SiRNA target sequence
acgcttatgttttcgcttatttccttt

SEQ ID NO: 223089 - DNA, 27 bp, Artificial sequence
  SiRNA target sequence
cgcttatgttttcgcttatttccttta

SEQ ID NO: 223090 - DNA, 27 bp, Artificial sequence
  SiRNA target sequence
gcttatgttttcgcttatttcctttat

SEQ ID NO: 223091 - DNA, 27 bp, Artificial sequence
  SiRNA target sequence
cttatgttttcgcttatttcctttatt

SEQ ID NO: 223092 - DNA, 27 bp, Artificial sequence
  SiRNA target sequence
ttatgttttcgcttatttcctttattt

SEQ ID NO: 223093 - DNA, 27 bp, Artificial sequence
  SiRNA target sequence
tatgttttcgcttatttcctttattta

SEQ ID NO: 223094 - DNA, 27 bp, Artificial sequence
  SiRNA target sequence
atgttttcgcttatttcctttatttac

SEQ ID NO: 223095 - DNA, 27 bp, Artificial sequence
  SiRNA target sequence
tgttttcgcttatttcctttatttact

SEQ ID NO: 223096 - DNA, 27 bp, Artificial sequence
  SiRNA target sequence
gttttcgcttatttcctttatttactc

SEQ ID NO: 223097 - DNA, 27 bp, Artificial sequence
  SiRNA target sequence
ttttcgcttatttcctttatttactca

SEQ ID NO: 223098 - DNA, 27 bp, Artificial sequence
  SiRNA target sequence
tttcgcttatttcctttatttactcag

SEQ ID NO: 223099 - DNA, 27 bp, Artificial sequence
  SiRNA target sequence
ttcgcttatttcctttatttactcagt

SEQ ID NO: 223100 - DNA, 27 bp, Artificial sequence
  SiRNA target sequence
tcgcttatttcctttatttactcagta

SEQ ID NO: 223101 - DNA, 27 bp, Artificial sequence
  SiRNA target sequence
cgcttatttcctttatttactcagtag

SEQ ID NO: 223102 - DNA, 27 bp, Artificial sequence
  SiRNA target sequence
gcttatttcctttatttactcagtagg

SEQ ID NO: 223103 - DNA, 27 bp, Artificial sequence
  SiRNA target sequence
cttatttcctttatttactcagtagga

SEQ ID NO: 223104 - DNA, 27 bp, Artificial sequence
  SiRNA target sequence
ttatttcctttatttactcagtaggac

SEQ ID NO: 223105 - DNA, 27 bp, Artificial sequence
  SiRNA target sequence
tatttcctttatttactcagtaggacg

SEQ ID NO: 223106 - DNA, 27 bp, Artificial sequence
  SiRNA target sequence
atttcctttatttactcagtaggacga

SEQ ID NO: 223107 - DNA, 27 bp, Artificial sequence
  SiRNA target sequence
tttcctttatttactcagtaggacgag

SEQ ID NO: 223108 - DNA, 27 bp, Artificial sequence
  SiRNA target sequence
ttcctttatttactcagtaggacgagt

SEQ ID NO: 223109 - DNA, 27 bp, Artificial sequence
  SiRNA target sequence
tcctttatttactcagtaggacgagtg

SEQ ID NO: 223110 - DNA, 27 bp, Artificial sequence
  SiRNA target sequence
cctttatttactcagtaggacgagtgt

SEQ ID NO: 223111 - DNA, 27 bp, Artificial sequence
  SiRNA target sequence
ctttatttactcagtaggacgagtgtt

SEQ ID NO: 223112 - DNA, 27 bp, Artificial sequence
  SiRNA target sequence
tttatttactcagtaggacgagtgtta

SEQ ID NO: 223113 - DNA, 27 bp, Artificial sequence
  SiRNA target sequence
ttatttactcagtaggacgagtgttaa

SEQ ID NO: 223114 - DNA, 27 bp, Artificial sequence
  SiRNA target sequence
tatttactcagtaggacgagtgttaaa

SEQ ID NO: 223115 - DNA, 27 bp, Artificial sequence
  SiRNA target sequence
atttactcagtaggacgagtgttaaaa

SEQ ID NO: 223116 - DNA, 27 bp, Artificial sequence
  SiRNA target sequence
tttactcagtaggacgagtgttaaaag

SEQ ID NO: 223117 - DNA, 27 bp, Artificial sequence
  SiRNA target sequence
ttactcagtaggacgagtgttaaaaga

SEQ ID NO: 223118 - DNA, 27 bp, Artificial sequence
  SiRNA target sequence
tactcagtaggacgagtgttaaaagat

SEQ ID NO: 223119 - DNA, 27 bp, Artificial sequence
  SiRNA target sequence
actcagtaggacgagtgttaaaagatg

SEQ ID NO: 223120 - DNA, 27 bp, Artificial sequence
  SiRNA target sequence
ctcagtaggacgagtgttaaaagatgc

SEQ ID NO: 223121 - DNA, 27 bp, Artificial sequence
  SiRNA target sequence
tcagtaggacgagtgttaaaagatgca

SEQ ID NO: 223122 - DNA, 27 bp, Artificial sequence
  SiRNA target sequence
cagtaggacgagtgttaaaagatgcag

SEQ ID NO: 223123 - DNA, 27 bp, Artificial sequence
  SiRNA target sequence
agtaggacgagtgttaaaagatgcagc

SEQ ID NO: 223124 - DNA, 27 bp, Artificial sequence
  SiRNA target sequence
gtaggacgagtgttaaaagatgcagca

SEQ ID NO: 223125 - DNA, 27 bp, Artificial sequence
  SiRNA target sequence
taggacgagtgttaaaagatgcagcag

SEQ ID NO: 223126 - DNA, 27 bp, Artificial sequence
  SiRNA target sequence
aggacgagtgttaaaagatgcagcagt

SEQ ID NO: 223127 - DNA, 27 bp, Artificial sequence
  SiRNA target sequence
ggacgagtgttaaaagatgcagcagtt

SEQ ID NO: 223128 - DNA, 27 bp, Artificial sequence
  SiRNA target sequence
gacgagtgttaaaagatgcagcagttc

SEQ ID NO: 223129 - DNA, 27 bp, Artificial sequence
  SiRNA target sequence
acgagtgttaaaagatgcagcagttct

SEQ ID NO: 223130 - DNA, 27 bp, Artificial sequence
  SiRNA target sequence
cgagtgttaaaagatgcagcagttctt

SEQ ID NO: 223131 - DNA, 27 bp, Artificial sequence
  SiRNA target sequence
gagtgttaaaagatgcagcagttctta

SEQ ID NO: 223132 - DNA, 27 bp, Artificial sequence
  SiRNA target sequence
agtgttaaaagatgcagcagttcttag

SEQ ID NO: 223133 - DNA, 27 bp, Artificial sequence
  SiRNA target sequence
gtgttaaaagatgcagcagttcttagt

SEQ ID NO: 223134 - DNA, 27 bp, Artificial sequence
  SiRNA target sequence
tgttaaaagatgcagcagttcttagta

SEQ ID NO: 223135 - DNA, 27 bp, Artificial sequence
  SiRNA target sequence
gttaaaagatgcagcagttcttagtag

SEQ ID NO: 223136 - DNA, 27 bp, Artificial sequence
  SiRNA target sequence
ttaaaagatgcagcagttcttagtaga

SEQ ID NO: 223137 - DNA, 27 bp, Artificial sequence
  SiRNA target sequence
taaaagatgcagcagttcttagtagac

SEQ ID NO: 223138 - DNA, 27 bp, Artificial sequence
  SiRNA target sequence
aaaagatgcagcagttcttagtagaca

SEQ ID NO: 223139 - DNA, 27 bp, Artificial sequence
  SiRNA target sequence
aaagatgcagcagttcttagtagacag

SEQ ID NO: 223140 - DNA, 27 bp, Artificial sequence
  SiRNA target sequence
aagatgcagcagttcttagtagacaga

SEQ ID NO: 223141 - DNA, 27 bp, Artificial sequence
  SiRNA target sequence
agatgcagcagttcttagtagacagat

SEQ ID NO: 223142 - DNA, 27 bp, Artificial sequence
  SiRNA target sequence
gatgcagcagttcttagtagacagatg

SEQ ID NO: 223143 - DNA, 27 bp, Artificial sequence
  SiRNA target sequence
atgcagcagttcttagtagacagatgc

SEQ ID NO: 223144 - DNA, 27 bp, Artificial sequence
  SiRNA target sequence
tgcagcagttcttagtagacagatgcc

SEQ ID NO: 223145 - DNA, 27 bp, Artificial sequence
  SiRNA target sequence
gcagcagttcttagtagacagatgcca

SEQ ID NO: 223146 - DNA, 27 bp, Artificial sequence
  SiRNA target sequence
cagcagttcttagtagacagatgccac

SEQ ID NO: 223147 - DNA, 27 bp, Artificial sequence
  SiRNA target sequence
agcagttcttagtagacagatgccact

SEQ ID NO: 223148 - DNA, 27 bp, Artificial sequence
  SiRNA target sequence
gcagttcttagtagacagatgccacta

SEQ ID NO: 223149 - DNA, 27 bp, Artificial sequence
  SiRNA target sequence
cagttcttagtagacagatgccactat

SEQ ID NO: 223150 - DNA, 27 bp, Artificial sequence
  SiRNA target sequence
agttcttagtagacagatgccactatc

SEQ ID NO: 223151 - DNA, 27 bp, Artificial sequence
  SiRNA target sequence
gttcttagtagacagatgccactatcc

SEQ ID NO: 223152 - DNA, 27 bp, Artificial sequence
  SiRNA target sequence
ttcttagtagacagatgccactatcca

SEQ ID NO: 223153 - DNA, 27 bp, Artificial sequence
  SiRNA target sequence
tcttagtagacagatgccactatccat

SEQ ID NO: 223154 - DNA, 27 bp, Artificial sequence
  SiRNA target sequence
cttagtagacagatgccactatccatt

SEQ ID NO: 223155 - DNA, 27 bp, Artificial sequence
  SiRNA target sequence
ttagtagacagatgccactatccatta

SEQ ID NO: 223156 - DNA, 27 bp, Artificial sequence
  SiRNA target sequence
tagtagacagatgccactatccattaa

SEQ ID NO: 223157 - DNA, 27 bp, Artificial sequence
  SiRNA target sequence
agtagacagatgccactatccattaat

SEQ ID NO: 223158 - DNA, 27 bp, Artificial sequence
  SiRNA target sequence
gtagacagatgccactatccattaatt

SEQ ID NO: 223159 - DNA, 27 bp, Artificial sequence
  SiRNA target sequence
tagacagatgccactatccattaattg

SEQ ID NO: 223160 - DNA, 27 bp, Artificial sequence
  SiRNA target sequence
agacagatgccactatccattaattgt

SEQ ID NO: 223161 - DNA, 27 bp, Artificial sequence
  SiRNA target sequence
gacagatgccactatccattaattgtc

SEQ ID NO: 223162 - DNA, 27 bp, Artificial sequence
  SiRNA target sequence
acagatgccactatccattaattgtct

SEQ ID NO: 223163 - DNA, 27 bp, Artificial sequence
  SiRNA target sequence
cagatgccactatccattaattgtctt

SEQ ID NO: 223164 - DNA, 27 bp, Artificial sequence
  SiRNA target sequence
agatgccactatccattaattgtctta

SEQ ID NO: 223165 - DNA, 27 bp, Artificial sequence
  SiRNA target sequence
gatgccactatccattaattgtcttaa

SEQ ID NO: 223166 - DNA, 27 bp, Artificial sequence
  SiRNA target sequence
atgccactatccattaattgtcttaaa

SEQ ID NO: 223167 - DNA, 27 bp, Artificial sequence
  SiRNA target sequence
tgccactatccattaattgtcttaaaa

SEQ ID NO: 223168 - DNA, 27 bp, Artificial sequence
  SiRNA target sequence
gccactatccattaattgtcttaaaag

SEQ ID NO: 223169 - DNA, 27 bp, Artificial sequence
  SiRNA target sequence
ccactatccattaattgtcttaaaagc

SEQ ID NO: 223170 - DNA, 27 bp, Artificial sequence
  SiRNA target sequence
cactatccattaattgtcttaaaagct

SEQ ID NO: 223171 - DNA, 27 bp, Artificial sequence
  SiRNA target sequence
actatccattaattgtcttaaaagctt

SEQ ID NO: 223172 - DNA, 27 bp, Artificial sequence
  SiRNA target sequence
ctatccattaattgtcttaaaagcttt

SEQ ID NO: 223173 - DNA, 27 bp, Artificial sequence
  SiRNA target sequence
tatccattaattgtcttaaaagctttg

SEQ ID NO: 223174 - DNA, 27 bp, Artificial sequence
  SiRNA target sequence
atccattaattgtcttaaaagctttgt

SEQ ID NO: 223175 - DNA, 27 bp, Artificial sequence
  SiRNA target sequence
tccattaattgtcttaaaagctttgta

SEQ ID NO: 223176 - DNA, 27 bp, Artificial sequence
  SiRNA target sequence
ccattaattgtcttaaaagctttgtaa

SEQ ID NO: 223177 - DNA, 27 bp, Artificial sequence
  SiRNA target sequence
cattaattgtcttaaaagctttgtaat

SEQ ID NO: 223178 - DNA, 27 bp, Artificial sequence
  SiRNA target sequence
attaattgtcttaaaagctttgtaatt

SEQ ID NO: 223179 - DNA, 27 bp, Artificial sequence
  SiRNA target sequence
ttaattgtcttaaaagctttgtaattt

SEQ ID NO: 223180 - DNA, 27 bp, Artificial sequence
  SiRNA target sequence
taattgtcttaaaagctttgtaatttt

SEQ ID NO: 223181 - DNA, 27 bp, Artificial sequence
  SiRNA target sequence
aattgtcttaaaagctttgtaatttta

SEQ ID NO: 223182 - DNA, 27 bp, Artificial sequence
  SiRNA target sequence
attgtcttaaaagctttgtaattttac

SEQ ID NO: 223183 - DNA, 27 bp, Artificial sequence
  SiRNA target sequence
ttgtcttaaaagctttgtaattttacc

SEQ ID NO: 223184 - DNA, 27 bp, Artificial sequence
  SiRNA target sequence
tgtcttaaaagctttgtaattttacca

SEQ ID NO: 223185 - DNA, 27 bp, Artificial sequence
  SiRNA target sequence
gtcttaaaagctttgtaattttaccag

SEQ ID NO: 223186 - DNA, 27 bp, Artificial sequence
  SiRNA target sequence
tcttaaaagctttgtaattttaccagt

SEQ ID NO: 223187 - DNA, 27 bp, Artificial sequence
  SiRNA target sequence
cttaaaagctttgtaattttaccagtt

SEQ ID NO: 223188 - DNA, 27 bp, Artificial sequence
  SiRNA target sequence
ttaaaagctttgtaattttaccagtta

SEQ ID NO: 223189 - DNA, 27 bp, Artificial sequence
  SiRNA target sequence
taaaagctttgtaattttaccagttac

SEQ ID NO: 223190 - DNA, 27 bp, Artificial sequence
  SiRNA target sequence
aaaagctttgtaattttaccagttact

SEQ ID NO: 223191 - DNA, 27 bp, Artificial sequence
  SiRNA target sequence
aaagctttgtaattttaccagttactc

SEQ ID NO: 223192 - DNA, 27 bp, Artificial sequence
  SiRNA target sequence
aagctttgtaattttaccagttactct

SEQ ID NO: 223193 - DNA, 27 bp, Artificial sequence
  SiRNA target sequence
agctttgtaattttaccagttactctt

SEQ ID NO: 223194 - DNA, 27 bp, Artificial sequence
  SiRNA target sequence
gctttgtaattttaccagttactcttg

SEQ ID NO: 223195 - DNA, 27 bp, Artificial sequence
  SiRNA target sequence
ctttgtaattttaccagttactcttgt

SEQ ID NO: 223196 - DNA, 27 bp, Artificial sequence
  SiRNA target sequence
tttgtaattttaccagttactcttgtt

SEQ ID NO: 223197 - DNA, 27 bp, Artificial sequence
  SiRNA target sequence
ttgtaattttaccagttactcttgttt

SEQ ID NO: 223198 - DNA, 27 bp, Artificial sequence
  SiRNA target sequence
tgtaattttaccagttactcttgtttg

SEQ ID NO: 223199 - DNA, 27 bp, Artificial sequence
  SiRNA target sequence
gtaattttaccagttactcttgtttgt

SEQ ID NO: 223200 - DNA, 27 bp, Artificial sequence
  SiRNA target sequence
taattttaccagttactcttgtttgtg

SEQ ID NO: 223201 - DNA, 27 bp, Artificial sequence
  SiRNA target sequence
aattttaccagttactcttgtttgtgt

SEQ ID NO: 223202 - DNA, 27 bp, Artificial sequence
  SiRNA target sequence
attttaccagttactcttgtttgtgta

SEQ ID NO: 223203 - DNA, 27 bp, Artificial sequence
  SiRNA target sequence
ttttaccagttactcttgtttgtgtag

SEQ ID NO: 223204 - DNA, 27 bp, Artificial sequence
  SiRNA target sequence
tttaccagttactcttgtttgtgtagg

SEQ ID NO: 223205 - DNA, 27 bp, Artificial sequence
  SiRNA target sequence
ttaccagttactcttgtttgtgtagga

SEQ ID NO: 223206 - DNA, 27 bp, Artificial sequence
  SiRNA target sequence
taccagttactcttgtttgtgtaggat

SEQ ID NO: 223207 - DNA, 27 bp, Artificial sequence
  SiRNA target sequence
accagttactcttgtttgtgtaggatt

SEQ ID NO: 223208 - DNA, 27 bp, Artificial sequence
  SiRNA target sequence
ccagttactcttgtttgtgtaggatta

SEQ ID NO: 223209 - DNA, 27 bp, Artificial sequence
  SiRNA target sequence
cagttactcttgtttgtgtaggattaa

SEQ ID NO: 223210 - DNA, 27 bp, Artificial sequence
  SiRNA target sequence
agttactcttgtttgtgtaggattaat

SEQ ID NO: 223211 - DNA, 27 bp, Artificial sequence
  SiRNA target sequence
gttactcttgtttgtgtaggattaatt

SEQ ID NO: 223212 - DNA, 27 bp, Artificial sequence
  SiRNA target sequence
ttactcttgtttgtgtaggattaattc

SEQ ID NO: 223213 - DNA, 27 bp, Artificial sequence
  SiRNA target sequence
tactcttgtttgtgtaggattaattca

SEQ ID NO: 223214 - DNA, 27 bp, Artificial sequence
  SiRNA target sequence
actcttgtttgtgtaggattaattcag

SEQ ID NO: 223215 - DNA, 27 bp, Artificial sequence
  SiRNA target sequence
ctcttgtttgtgtaggattaattcaga

SEQ ID NO: 223216 - DNA, 27 bp, Artificial sequence
  SiRNA target sequence
tcttgtttgtgtaggattaattcagaa

SEQ ID NO: 223217 - DNA, 27 bp, Artificial sequence
  SiRNA target sequence
cttgtttgtgtaggattaattcagaag

SEQ ID NO: 223218 - DNA, 27 bp, Artificial sequence
  SiRNA target sequence
ttgtttgtgtaggattaattcagaagt

SEQ ID NO: 223219 - DNA, 27 bp, Artificial sequence
  SiRNA target sequence
tgtttgtgtaggattaattcagaagtc

SEQ ID NO: 223220 - DNA, 27 bp, Artificial sequence
  SiRNA target sequence
gtttgtgtaggattaattcagaagtct

SEQ ID NO: 223221 - DNA, 27 bp, Artificial sequence
  SiRNA target sequence
tttgtgtaggattaattcagaagtcta

SEQ ID NO: 223222 - DNA, 27 bp, Artificial sequence
  SiRNA target sequence
ttgtgtaggattaattcagaagtctac

SEQ ID NO: 223223 - DNA, 27 bp, Artificial sequence
  SiRNA target sequence
tgtgtaggattaattcagaagtctaca

SEQ ID NO: 223224 - DNA, 27 bp, Artificial sequence
  SiRNA target sequence
gtgtaggattaattcagaagtctacac

SEQ ID NO: 223225 - DNA, 27 bp, Artificial sequence
  SiRNA target sequence
tgtaggattaattcagaagtctacact

SEQ ID NO: 223226 - DNA, 27 bp, Artificial sequence
  SiRNA target sequence
gtaggattaattcagaagtctacactc

SEQ ID NO: 223227 - DNA, 27 bp, Artificial sequence
  SiRNA target sequence
taggattaattcagaagtctacactct

SEQ ID NO: 223228 - DNA, 27 bp, Artificial sequence
  SiRNA target sequence
aggattaattcagaagtctacactctc

SEQ ID NO: 223229 - DNA, 27 bp, Artificial sequence
  SiRNA target sequence
ggattaattcagaagtctacactctct

SEQ ID NO: 223230 - DNA, 27 bp, Artificial sequence
  SiRNA target sequence
gattaattcagaagtctacactctctt

SEQ ID NO: 223231 - DNA, 27 bp, Artificial sequence
  SiRNA target sequence
attaattcagaagtctacactctctta

SEQ ID NO: 223232 - DNA, 27 bp, Artificial sequence
  SiRNA target sequence
ttaattcagaagtctacactctcttat

SEQ ID NO: 223233 - DNA, 27 bp, Artificial sequence
  SiRNA target sequence
taattcagaagtctacactctcttatt

SEQ ID NO: 223234 - DNA, 27 bp, Artificial sequence
  SiRNA target sequence
aattcagaagtctacactctcttattc

SEQ ID NO: 223235 - DNA, 27 bp, Artificial sequence
  SiRNA target sequence
attcagaagtctacactctcttattct

SEQ ID NO: 223236 - DNA, 27 bp, Artificial sequence
  SiRNA target sequence
ttcagaagtctacactctcttattctt

SEQ ID NO: 223237 - DNA, 27 bp, Artificial sequence
  SiRNA target sequence
tcagaagtctacactctcttattcttt

SEQ ID NO: 223238 - DNA, 27 bp, Artificial sequence
  SiRNA target sequence
cagaagtctacactctcttattctttt

SEQ ID NO: 223239 - DNA, 27 bp, Artificial sequence
  SiRNA target sequence
agaagtctacactctcttattctttta

SEQ ID NO: 223240 - DNA, 27 bp, Artificial sequence
  SiRNA target sequence
gaagtctacactctcttattcttttac

SEQ ID NO: 223241 - DNA, 27 bp, Artificial sequence
  SiRNA target sequence
aagtctacactctcttattcttttaca

SEQ ID NO: 223242 - DNA, 27 bp, Artificial sequence
  SiRNA target sequence
agtctacactctcttattcttttacaa

SEQ ID NO: 223243 - DNA, 27 bp, Artificial sequence
  SiRNA target sequence
gtctacactctcttattcttttacaaa

SEQ ID NO: 223244 - DNA, 27 bp, Artificial sequence
  SiRNA target sequence
tctacactctcttattcttttacaaaa

SEQ ID NO: 223245 - DNA, 27 bp, Artificial sequence
  SiRNA target sequence
ctacactctcttattcttttacaaaaa

SEQ ID NO: 223246 - DNA, 27 bp, Artificial sequence
  SiRNA target sequence
tacactctcttattcttttacaaaaat

SEQ ID NO: 223247 - DNA, 27 bp, Artificial sequence
  SiRNA target sequence
acactctcttattcttttacaaaaata

SEQ ID NO: 223248 - DNA, 27 bp, Artificial sequence
  SiRNA target sequence
cactctcttattcttttacaaaaatat

SEQ ID NO: 223249 - DNA, 27 bp, Artificial sequence
  SiRNA target sequence
actctcttattcttttacaaaaatatt

SEQ ID NO: 223250 - DNA, 27 bp, Artificial sequence
  SiRNA target sequence
ctctcttattcttttacaaaaatattt

SEQ ID NO: 223251 - DNA, 27 bp, Artificial sequence
  SiRNA target sequence
tctcttattcttttacaaaaatatttg

SEQ ID NO: 223252 - DNA, 27 bp, Artificial sequence
  SiRNA target sequence
ctcttattcttttacaaaaatatttga

SEQ ID NO: 223253 - DNA, 27 bp, Artificial sequence
  SiRNA target sequence
tcttattcttttacaaaaatatttgat

SEQ ID NO: 223254 - DNA, 27 bp, Artificial sequence
  SiRNA target sequence
cttattcttttacaaaaatatttgatg

SEQ ID NO: 223255 - DNA, 27 bp, Artificial sequence
  SiRNA target sequence
ttattcttttacaaaaatatttgatgg

SEQ ID NO: 223256 - DNA, 27 bp, Artificial sequence
  SiRNA target sequence
tattcttttacaaaaatatttgatggt

SEQ ID NO: 223257 - DNA, 27 bp, Artificial sequence
  SiRNA target sequence
attcttttacaaaaatatttgatggtg

SEQ ID NO: 223258 - DNA, 27 bp, Artificial sequence
  SiRNA target sequence
ttcttttacaaaaatatttgatggtgc

SEQ ID NO: 223259 - DNA, 27 bp, Artificial sequence
  SiRNA target sequence
tcttttacaaaaatatttgatggtgca

SEQ ID NO: 223260 - DNA, 27 bp, Artificial sequence
  SiRNA target sequence
cttttacaaaaatatttgatggtgcat

SEQ ID NO: 223261 - DNA, 27 bp, Artificial sequence
  SiRNA target sequence
ttttacaaaaatatttgatggtgcatt

SEQ ID NO: 223262 - DNA, 27 bp, Artificial sequence
  SiRNA target sequence
tttacaaaaatatttgatggtgcattg

SEQ ID NO: 223263 - DNA, 27 bp, Artificial sequence
  SiRNA target sequence
ttacaaaaatatttgatggtgcattgt

SEQ ID NO: 223264 - DNA, 27 bp, Artificial sequence
  SiRNA target sequence
tacaaaaatatttgatggtgcattgtt

SEQ ID NO: 223265 - DNA, 27 bp, Artificial sequence
  SiRNA target sequence
acaaaaatatttgatggtgcattgtta

SEQ ID NO: 223266 - DNA, 27 bp, Artificial sequence
  SiRNA target sequence
caaaaatatttgatggtgcattgttaa

SEQ ID NO: 223267 - DNA, 27 bp, Artificial sequence
  SiRNA target sequence
aaaaatatttgatggtgcattgttaat

SEQ ID NO: 223268 - DNA, 27 bp, Artificial sequence
  SiRNA target sequence
aaaatatttgatggtgcattgttaata

SEQ ID NO: 223269 - DNA, 27 bp, Artificial sequence
  SiRNA target sequence
aaatatttgatggtgcattgttaatat

SEQ ID NO: 223270 - DNA, 27 bp, Artificial sequence
  SiRNA target sequence
aatatttgatggtgcattgttaatatt

SEQ ID NO: 223271 - DNA, 27 bp, Artificial sequence
  SiRNA target sequence
atatttgatggtgcattgttaatattt

SEQ ID NO: 223272 - DNA, 27 bp, Artificial sequence
  SiRNA target sequence
tatttgatggtgcattgttaatatttg

SEQ ID NO: 223273 - DNA, 27 bp, Artificial sequence
  SiRNA target sequence
atttgatggtgcattgttaatatttgc

SEQ ID NO: 223274 - DNA, 27 bp, Artificial sequence
  SiRNA target sequence
tttgatggtgcattgttaatatttgct

SEQ ID NO: 223275 - DNA, 27 bp, Artificial sequence
  SiRNA target sequence
ttgatggtgcattgttaatatttgctt

SEQ ID NO: 223276 - DNA, 27 bp, Artificial sequence
  SiRNA target sequence
tgatggtgcattgttaatatttgcttt

SEQ ID NO: 223277 - DNA, 27 bp, Artificial sequence
  SiRNA target sequence
gatggtgcattgttaatatttgctttt

SEQ ID NO: 223278 - DNA, 27 bp, Artificial sequence
  SiRNA target sequence
atggtgcattgttaatatttgcttttc

SEQ ID NO: 223279 - DNA, 27 bp, Artificial sequence
  SiRNA target sequence
tggtgcattgttaatatttgcttttct

SEQ ID NO: 223280 - DNA, 27 bp, Artificial sequence
  SiRNA target sequence
ggtgcattgttaatatttgcttttctt

SEQ ID NO: 223281 - DNA, 27 bp, Artificial sequence
  SiRNA target sequence
gtgcattgttaatatttgcttttcttt

SEQ ID NO: 223282 - DNA, 27 bp, Artificial sequence
  SiRNA target sequence
tgcattgttaatatttgcttttcttta

SEQ ID NO: 223283 - DNA, 27 bp, Artificial sequence
  SiRNA target sequence
gcattgttaatatttgcttttctttat

SEQ ID NO: 223284 - DNA, 27 bp, Artificial sequence
  SiRNA target sequence
cattgttaatatttgcttttctttata

SEQ ID NO: 223285 - DNA, 27 bp, Artificial sequence
  SiRNA target sequence
attgttaatatttgcttttctttatat

SEQ ID NO: 223286 - DNA, 27 bp, Artificial sequence
  SiRNA target sequence
ttgttaatatttgcttttctttatatc

SEQ ID NO: 223287 - DNA, 27 bp, Artificial sequence
  SiRNA target sequence
tgttaatatttgcttttctttatatca

SEQ ID NO: 223288 - DNA, 27 bp, Artificial sequence
  SiRNA target sequence
gttaatatttgcttttctttatatcat

SEQ ID NO: 223289 - DNA, 27 bp, Artificial sequence
  SiRNA target sequence
ttaatatttgcttttctttatatcatt

SEQ ID NO: 223290 - DNA, 27 bp, Artificial sequence
  SiRNA target sequence
taatatttgcttttctttatatcattc

SEQ ID NO: 223291 - DNA, 27 bp, Artificial sequence
  SiRNA target sequence
aatatttgcttttctttatatcattct

SEQ ID NO: 223292 - DNA, 27 bp, Artificial sequence
  SiRNA target sequence
atatttgcttttctttatatcattctt

SEQ ID NO: 223293 - DNA, 27 bp, Artificial sequence
  SiRNA target sequence
tatttgcttttctttatatcattcttg

SEQ ID NO: 223294 - DNA, 27 bp, Artificial sequence
  SiRNA target sequence
atttgcttttctttatatcattcttgg

SEQ ID NO: 223295 - DNA, 27 bp, Artificial sequence
  SiRNA target sequence
tttgcttttctttatatcattcttggt

SEQ ID NO: 223296 - DNA, 27 bp, Artificial sequence
  SiRNA target sequence
ttgcttttctttatatcattcttggtc

SEQ ID NO: 223297 - DNA, 27 bp, Artificial sequence
  SiRNA target sequence
tgcttttctttatatcattcttggtct

SEQ ID NO: 223298 - DNA, 27 bp, Artificial sequence
  SiRNA target sequence
gcttttctttatatcattcttggtcta

SEQ ID NO: 223299 - DNA, 27 bp, Artificial sequence
  SiRNA target sequence
cttttctttatatcattcttggtctag

SEQ ID NO: 223300 - DNA, 27 bp, Artificial sequence
  SiRNA target sequence
ttttctttatatcattcttggtctagt

SEQ ID NO: 223301 - DNA, 27 bp, Artificial sequence
  SiRNA target sequence
tttctttatatcattcttggtctagtt

SEQ ID NO: 223302 - DNA, 27 bp, Artificial sequence
  SiRNA target sequence
ttctttatatcattcttggtctagttc

SEQ ID NO: 223303 - DNA, 27 bp, Artificial sequence
  SiRNA target sequence
tctttatatcattcttggtctagttct

SEQ ID NO: 223304 - DNA, 27 bp, Artificial sequence
  SiRNA target sequence
ctttatatcattcttggtctagttctt

SEQ ID NO: 223305 - DNA, 27 bp, Artificial sequence
  SiRNA target sequence
tttatatcattcttggtctagttcttc

SEQ ID NO: 223306 - DNA, 27 bp, Artificial sequence
  SiRNA target sequence
ttatatcattcttggtctagttcttct

SEQ ID NO: 223307 - DNA, 27 bp, Artificial sequence
  SiRNA target sequence
tatatcattcttggtctagttcttctt

SEQ ID NO: 223308 - DNA, 27 bp, Artificial sequence
  SiRNA target sequence
atatcattcttggtctagttcttcttc

SEQ ID NO: 223309 - DNA, 27 bp, Artificial sequence
  SiRNA target sequence
tatcattcttggtctagttcttcttcc

SEQ ID NO: 223310 - DNA, 27 bp, Artificial sequence
  SiRNA target sequence
atcattcttggtctagttcttcttcca

SEQ ID NO: 223311 - DNA, 27 bp, Artificial sequence
  SiRNA target sequence
tcattcttggtctagttcttcttccat

SEQ ID NO: 223312 - DNA, 27 bp, Artificial sequence
  SiRNA target sequence
cattcttggtctagttcttcttccata

SEQ ID NO: 223313 - DNA, 27 bp, Artificial sequence
  SiRNA target sequence
attcttggtctagttcttcttccatat

SEQ ID NO: 223314 - DNA, 27 bp, Artificial sequence
  SiRNA target sequence
ttcttggtctagttcttcttccatatt

SEQ ID NO: 223315 - DNA, 27 bp, Artificial sequence
  SiRNA target sequence
tcttggtctagttcttcttccatattc

SEQ ID NO: 223316 - DNA, 27 bp, Artificial sequence
  SiRNA target sequence
cttggtctagttcttcttccatattct

SEQ ID NO: 223317 - DNA, 27 bp, Artificial sequence
  SiRNA target sequence
ttggtctagttcttcttccatattctc

SEQ ID NO: 223318 - DNA, 27 bp, Artificial sequence
  SiRNA target sequence
tggtctagttcttcttccatattctca

SEQ ID NO: 223319 - DNA, 27 bp, Artificial sequence
  SiRNA target sequence
ggtctagttcttcttccatattctcat

SEQ ID NO: 223320 - DNA, 27 bp, Artificial sequence
  SiRNA target sequence
gtctagttcttcttccatattctcatc

SEQ ID NO: 223321 - DNA, 27 bp, Artificial sequence
  SiRNA target sequence
tctagttcttcttccatattctcatct

SEQ ID NO: 223322 - DNA, 27 bp, Artificial sequence
  SiRNA target sequence
ctagttcttcttccatattctcatctt

SEQ ID NO: 223323 - DNA, 27 bp, Artificial sequence
  SiRNA target sequence
tagttcttcttccatattctcatcttt

SEQ ID NO: 223324 - DNA, 27 bp, Artificial sequence
  SiRNA target sequence
agttcttcttccatattctcatctttt

SEQ ID NO: 223325 - DNA, 27 bp, Artificial sequence
  SiRNA target sequence
gttcttcttccatattctcatcttttc

SEQ ID NO: 223326 - DNA, 27 bp, Artificial sequence
  SiRNA target sequence
ttcttcttccatattctcatcttttcc

SEQ ID NO: 223327 - DNA, 27 bp, Artificial sequence
  SiRNA target sequence
tcttcttccatattctcatcttttcca

SEQ ID NO: 223328 - DNA, 27 bp, Artificial sequence
  SiRNA target sequence
cttcttccatattctcatcttttccag

SEQ ID NO: 223329 - DNA, 27 bp, Artificial sequence
  SiRNA target sequence
ttcttccatattctcatcttttccagc

SEQ ID NO: 223330 - DNA, 27 bp, Artificial sequence
  SiRNA target sequence
tcttccatattctcatcttttccagct

SEQ ID NO: 223331 - DNA, 27 bp, Artificial sequence
  SiRNA target sequence
cttccatattctcatcttttccagctt

SEQ ID NO: 223332 - DNA, 27 bp, Artificial sequence
  SiRNA target sequence
ttccatattctcatcttttccagcttg

SEQ ID NO: 223333 - DNA, 27 bp, Artificial sequence
  SiRNA target sequence
tccatattctcatcttttccagcttga

SEQ ID NO: 223334 - DNA, 27 bp, Artificial sequence
  SiRNA target sequence
ccatattctcatcttttccagcttgat

SEQ ID NO: 223335 - DNA, 27 bp, Artificial sequence
  SiRNA target sequence
catattctcatcttttccagcttgata

SEQ ID NO: 223336 - DNA, 27 bp, Artificial sequence
  SiRNA target sequence
atattctcatcttttccagcttgatag

SEQ ID NO: 223337 - DNA, 27 bp, Artificial sequence
  SiRNA target sequence
tattctcatcttttccagcttgatagt

SEQ ID NO: 223338 - DNA, 27 bp, Artificial sequence
  SiRNA target sequence
attctcatcttttccagcttgatagtt

SEQ ID NO: 223339 - DNA, 27 bp, Artificial sequence
  SiRNA target sequence
ttctcatcttttccagcttgatagtta

SEQ ID NO: 223340 - DNA, 27 bp, Artificial sequence
  SiRNA target sequence
tctcatcttttccagcttgatagttat

SEQ ID NO: 223341 - DNA, 27 bp, Artificial sequence
  SiRNA target sequence
ctcatcttttccagcttgatagttatt

SEQ ID NO: 223342 - DNA, 27 bp, Artificial sequence
  SiRNA target sequence
tcatcttttccagcttgatagttattt

SEQ ID NO: 223343 - DNA, 27 bp, Artificial sequence
  SiRNA target sequence
catcttttccagcttgatagttatttt

SEQ ID NO: 223344 - DNA, 27 bp, Artificial sequence
  SiRNA target sequence
atcttttccagcttgatagttattttt

SEQ ID NO: 223345 - DNA, 27 bp, Artificial sequence
  SiRNA target sequence
tcttttccagcttgatagttatttttt

SEQ ID NO: 223346 - DNA, 27 bp, Artificial sequence
  SiRNA target sequence
cttttccagcttgatagttattttttt

SEQ ID NO: 223347 - DNA, 27 bp, Artificial sequence
  SiRNA target sequence
ttttccagcttgatagttattttttta

SEQ ID NO: 223348 - DNA, 27 bp, Artificial sequence
  SiRNA target sequence
tttccagcttgatagttatttttttag

SEQ ID NO: 223349 - DNA, 27 bp, Artificial sequence
  SiRNA target sequence
ttccagcttgatagttatttttttaga

SEQ ID NO: 223350 - DNA, 27 bp, Artificial sequence
  SiRNA target sequence
tccagcttgatagttatttttttagag

SEQ ID NO: 223351 - DNA, 27 bp, Artificial sequence
  SiRNA target sequence
ccagcttgatagttatttttttagaga

SEQ ID NO: 223352 - DNA, 27 bp, Artificial sequence
  SiRNA target sequence
cagcttgatagttatttttttagagac

SEQ ID NO: 223353 - DNA, 27 bp, Artificial sequence
  SiRNA target sequence
agcttgatagttatttttttagagacc

SEQ ID NO: 223354 - DNA, 27 bp, Artificial sequence
  SiRNA target sequence
gcttgatagttatttttttagagacct

SEQ ID NO: 223355 - DNA, 27 bp, Artificial sequence
  SiRNA target sequence
cttgatagttatttttttagagacctt

SEQ ID NO: 223356 - DNA, 27 bp, Artificial sequence
  SiRNA target sequence
ttgatagttatttttttagagaccttt

SEQ ID NO: 223357 - DNA, 27 bp, Artificial sequence
  SiRNA target sequence
tgatagttatttttttagagacctttt

SEQ ID NO: 223358 - DNA, 27 bp, Artificial sequence
  SiRNA target sequence
gatagttatttttttagagaccttttt

SEQ ID NO: 223359 - DNA, 27 bp, Artificial sequence
  SiRNA target sequence
atagttatttttttagagaccttttta

SEQ ID NO: 223360 - DNA, 27 bp, Artificial sequence
  SiRNA target sequence
tagttatttttttagagacctttttag

SEQ ID NO: 223361 - DNA, 27 bp, Artificial sequence
  SiRNA target sequence
agttatttttttagagacctttttagt

SEQ ID NO: 223362 - DNA, 27 bp, Artificial sequence
  SiRNA target sequence
gttatttttttagagacctttttagtg

SEQ ID NO: 223363 - DNA, 27 bp, Artificial sequence
  SiRNA target sequence
ttatttttttagagacctttttagtga

SEQ ID NO: 223364 - DNA, 27 bp, Artificial sequence
  SiRNA target sequence
tatttttttagagacctttttagtgat

SEQ ID NO: 223365 - DNA, 27 bp, Artificial sequence
  SiRNA target sequence
atttttttagagacctttttagtgatg

SEQ ID NO: 223366 - DNA, 27 bp, Artificial sequence
  SiRNA target sequence
tttttttagagacctttttagtgatgg

SEQ ID NO: 223367 - DNA, 27 bp, Artificial sequence
  SiRNA target sequence
ttttttagagacctttttagtgatggg

SEQ ID NO: 223368 - DNA, 27 bp, Artificial sequence
  SiRNA target sequence
tttttagagacctttttagtgatggga

SEQ ID NO: 223369 - DNA, 27 bp, Artificial sequence
  SiRNA target sequence
ttttagagacctttttagtgatgggaa

SEQ ID NO: 223370 - DNA, 27 bp, Artificial sequence
  SiRNA target sequence
tttagagacctttttagtgatgggaaa

SEQ ID NO: 223371 - DNA, 27 bp, Artificial sequence
  SiRNA target sequence
ttagagacctttttagtgatgggaaat

SEQ ID NO: 223372 - DNA, 27 bp, Artificial sequence
  SiRNA target sequence
tagagacctttttagtgatgggaaatg

SEQ ID NO: 223373 - DNA, 27 bp, Artificial sequence
  SiRNA target sequence
agagacctttttagtgatgggaaatgt

SEQ ID NO: 223374 - DNA, 27 bp, Artificial sequence
  SiRNA target sequence
gagacctttttagtgatgggaaatgtg

SEQ ID NO: 223375 - DNA, 27 bp, Artificial sequence
  SiRNA target sequence
agacctttttagtgatgggaaatgtgt

SEQ ID NO: 223376 - DNA, 27 bp, Artificial sequence
  SiRNA target sequence
gacctttttagtgatgggaaatgtgtt

SEQ ID NO: 223377 - DNA, 27 bp, Artificial sequence
  SiRNA target sequence
acctttttagtgatgggaaatgtgttg

SEQ ID NO: 223378 - DNA, 27 bp, Artificial sequence
  SiRNA target sequence
cctttttagtgatgggaaatgtgttgt

SEQ ID NO: 223379 - DNA, 27 bp, Artificial sequence
  SiRNA target sequence
ctttttagtgatgggaaatgtgttgta

SEQ ID NO: 223380 - DNA, 27 bp, Artificial sequence
  SiRNA target sequence
tttttagtgatgggaaatgtgttgtaa

SEQ ID NO: 223381 - DNA, 27 bp, Artificial sequence
  SiRNA target sequence
ttttagtgatgggaaatgtgttgtaag

SEQ ID NO: 223382 - DNA, 27 bp, Artificial sequence
  SiRNA target sequence
tttagtgatgggaaatgtgttgtaaga

SEQ ID NO: 223383 - DNA, 27 bp, Artificial sequence
  SiRNA target sequence
ttagtgatgggaaatgtgttgtaagag

SEQ ID NO: 223384 - DNA, 27 bp, Artificial sequence
  SiRNA target sequence
tagtgatgggaaatgtgttgtaagagg

SEQ ID NO: 223385 - DNA, 27 bp, Artificial sequence
  SiRNA target sequence
agtgatgggaaatgtgttgtaagaggc

SEQ ID NO: 223386 - DNA, 27 bp, Artificial sequence
  SiRNA target sequence
gtgatgggaaatgtgttgtaagaggct

SEQ ID NO: 223387 - DNA, 27 bp, Artificial sequence
  SiRNA target sequence
tgatgggaaatgtgttgtaagaggcta

SEQ ID NO: 223388 - DNA, 27 bp, Artificial sequence
  SiRNA target sequence
gatgggaaatgtgttgtaagaggctat

SEQ ID NO: 223389 - DNA, 27 bp, Artificial sequence
  SiRNA target sequence
atgggaaatgtgttgtaagaggctatg

SEQ ID NO: 223390 - DNA, 27 bp, Artificial sequence
  SiRNA target sequence
tgggaaatgtgttgtaagaggctatga

SEQ ID NO: 223391 - DNA, 27 bp, Artificial sequence
  SiRNA target sequence
gggaaatgtgttgtaagaggctatgat

SEQ ID NO: 223392 - DNA, 27 bp, Artificial sequence
  SiRNA target sequence
ggaaatgtgttgtaagaggctatgatg

SEQ ID NO: 223393 - DNA, 27 bp, Artificial sequence
  SiRNA target sequence
gaaatgtgttgtaagaggctatgatgc

SEQ ID NO: 223394 - DNA, 27 bp, Artificial sequence
  SiRNA target sequence
aaatgtgttgtaagaggctatgatgct

SEQ ID NO: 223395 - DNA, 27 bp, Artificial sequence
  SiRNA target sequence
aatgtgttgtaagaggctatgatgctt

SEQ ID NO: 223396 - DNA, 27 bp, Artificial sequence
  SiRNA target sequence
atgtgttgtaagaggctatgatgcttt

SEQ ID NO: 223397 - DNA, 27 bp, Artificial sequence
  SiRNA target sequence
tgtgttgtaagaggctatgatgcttta

SEQ ID NO: 223398 - DNA, 27 bp, Artificial sequence
  SiRNA target sequence
gtgttgtaagaggctatgatgctttat

SEQ ID NO: 223399 - DNA, 27 bp, Artificial sequence
  SiRNA target sequence
tgttgtaagaggctatgatgctttatt

SEQ ID NO: 223400 - DNA, 27 bp, Artificial sequence
  SiRNA target sequence
gttgtaagaggctatgatgctttatta

SEQ ID NO: 223401 - DNA, 27 bp, Artificial sequence
  SiRNA target sequence
ttgtaagaggctatgatgctttattat

SEQ ID NO: 223402 - DNA, 27 bp, Artificial sequence
  SiRNA target sequence
tgtaagaggctatgatgctttattatc

SEQ ID NO: 223403 - DNA, 27 bp, Artificial sequence
  SiRNA target sequence
gtaagaggctatgatgctttattatct

SEQ ID NO: 223404 - DNA, 27 bp, Artificial sequence
  SiRNA target sequence
taagaggctatgatgctttattatctt

SEQ ID NO: 223405 - DNA, 27 bp, Artificial sequence
  SiRNA target sequence
aagaggctatgatgctttattatcttt

SEQ ID NO: 223406 - DNA, 27 bp, Artificial sequence
  SiRNA target sequence
agaggctatgatgctttattatctttg

SEQ ID NO: 223407 - DNA, 27 bp, Artificial sequence
  SiRNA target sequence
gaggctatgatgctttattatctttgg

SEQ ID NO: 223408 - DNA, 27 bp, Artificial sequence
  SiRNA target sequence
aggctatgatgctttattatctttggc

SEQ ID NO: 223409 - DNA, 27 bp, Artificial sequence
  SiRNA target sequence
ggctatgatgctttattatctttggca

SEQ ID NO: 223410 - DNA, 27 bp, Artificial sequence
  SiRNA target sequence
gctatgatgctttattatctttggcac

SEQ ID NO: 223411 - DNA, 27 bp, Artificial sequence
  SiRNA target sequence
ctatgatgctttattatctttggcact

SEQ ID NO: 223412 - DNA, 27 bp, Artificial sequence
  SiRNA target sequence
tatgatgctttattatctttggcactg

SEQ ID NO: 223413 - DNA, 27 bp, Artificial sequence
  SiRNA target sequence
atgatgctttattatctttggcactgg

SEQ ID NO: 223414 - DNA, 27 bp, Artificial sequence
  SiRNA target sequence
tgatgctttattatctttggcactggt

SEQ ID NO: 223415 - DNA, 27 bp, Artificial sequence
  SiRNA target sequence
gatgctttattatctttggcactggtc

SEQ ID NO: 223416 - DNA, 27 bp, Artificial sequence
  SiRNA target sequence
atgctttattatctttggcactggtct

SEQ ID NO: 223417 - DNA, 27 bp, Artificial sequence
  SiRNA target sequence
tgctttattatctttggcactggtctt

SEQ ID NO: 223418 - DNA, 27 bp, Artificial sequence
  SiRNA target sequence
gctttattatctttggcactggtcttt

SEQ ID NO: 223419 - DNA, 27 bp, Artificial sequence
  SiRNA target sequence
ctttattatctttggcactggtcttta

SEQ ID NO: 223420 - DNA, 27 bp, Artificial sequence
  SiRNA target sequence
tttattatctttggcactggtctttaa

SEQ ID NO: 223421 - DNA, 27 bp, Artificial sequence
  SiRNA target sequence
ttattatctttggcactggtctttaac

SEQ ID NO: 223422 - DNA, 27 bp, Artificial sequence
  SiRNA target sequence
tattatctttggcactggtctttaacg

SEQ ID NO: 223423 - DNA, 27 bp, Artificial sequence
  SiRNA target sequence
attatctttggcactggtctttaacga

SEQ ID NO: 223424 - DNA, 27 bp, Artificial sequence
  SiRNA target sequence
ttatctttggcactggtctttaacgaa

SEQ ID NO: 223425 - DNA, 27 bp, Artificial sequence
  SiRNA target sequence
tatctttggcactggtctttaacgaat

SEQ ID NO: 223426 - DNA, 27 bp, Artificial sequence
  SiRNA target sequence
atctttggcactggtctttaacgaatg

SEQ ID NO: 223427 - DNA, 27 bp, Artificial sequence
  SiRNA target sequence
tctttggcactggtctttaacgaatgg

SEQ ID NO: 223428 - DNA, 27 bp, Artificial sequence
  SiRNA target sequence
ctttggcactggtctttaacgaatgga

SEQ ID NO: 223429 - DNA, 27 bp, Artificial sequence
  SiRNA target sequence
tttggcactggtctttaacgaatggac

SEQ ID NO: 223430 - DNA, 27 bp, Artificial sequence
  SiRNA target sequence
ttggcactggtctttaacgaatggaca

SEQ ID NO: 223431 - DNA, 27 bp, Artificial sequence
  SiRNA target sequence
tggcactggtctttaacgaatggacat

SEQ ID NO: 223432 - DNA, 27 bp, Artificial sequence
  SiRNA target sequence
ggcactggtctttaacgaatggacatc

SEQ ID NO: 223433 - DNA, 27 bp, Artificial sequence
  SiRNA target sequence
gcactggtctttaacgaatggacatcc

SEQ ID NO: 223434 - DNA, 27 bp, Artificial sequence
  SiRNA target sequence
cactggtctttaacgaatggacatcct

SEQ ID NO: 223435 - DNA, 27 bp, Artificial sequence
  SiRNA target sequence
actggtctttaacgaatggacatcctc

SEQ ID NO: 223436 - DNA, 27 bp, Artificial sequence
  SiRNA target sequence
ctggtctttaacgaatggacatcctct

SEQ ID NO: 223437 - DNA, 27 bp, Artificial sequence
  SiRNA target sequence
tggtctttaacgaatggacatcctctc

SEQ ID NO: 223438 - DNA, 27 bp, Artificial sequence
  SiRNA target sequence
ggtctttaacgaatggacatcctctct

SEQ ID NO: 223439 - DNA, 27 bp, Artificial sequence
  SiRNA target sequence
gtctttaacgaatggacatcctctcta

SEQ ID NO: 223440 - DNA, 27 bp, Artificial sequence
  SiRNA target sequence
tctttaacgaatggacatcctctctag

SEQ ID NO: 223441 - DNA, 27 bp, Artificial sequence
  SiRNA target sequence
ctttaacgaatggacatcctctctagt

SEQ ID NO: 223442 - DNA, 27 bp, Artificial sequence
  SiRNA target sequence
tttaacgaatggacatcctctctagtt

SEQ ID NO: 223443 - DNA, 27 bp, Artificial sequence
  SiRNA target sequence
ttaacgaatggacatcctctctagttt

SEQ ID NO: 223444 - DNA, 27 bp, Artificial sequence
  SiRNA target sequence
taacgaatggacatcctctctagttta

SEQ ID NO: 223445 - DNA, 27 bp, Artificial sequence
  SiRNA target sequence
aacgaatggacatcctctctagtttac

SEQ ID NO: 223446 - DNA, 27 bp, Artificial sequence
  SiRNA target sequence
acgaatggacatcctctctagtttaca

SEQ ID NO: 223447 - DNA, 27 bp, Artificial sequence
  SiRNA target sequence
cgaatggacatcctctctagtttacat

SEQ ID NO: 223448 - DNA, 27 bp, Artificial sequence
  SiRNA target sequence
gaatggacatcctctctagtttacatt

SEQ ID NO: 223449 - DNA, 27 bp, Artificial sequence
  SiRNA target sequence
aatggacatcctctctagtttacattg

SEQ ID NO: 223450 - DNA, 27 bp, Artificial sequence
  SiRNA target sequence
atggacatcctctctagtttacattgt

SEQ ID NO: 223451 - DNA, 27 bp, Artificial sequence
  SiRNA target sequence
tggacatcctctctagtttacattgtt

SEQ ID NO: 223452 - DNA, 27 bp, Artificial sequence
  SiRNA target sequence
ggacatcctctctagtttacattgttt

SEQ ID NO: 223453 - DNA, 27 bp, Artificial sequence
  SiRNA target sequence
gacatcctctctagtttacattgtttc

SEQ ID NO: 223454 - DNA, 27 bp, Artificial sequence
  SiRNA target sequence
acatcctctctagtttacattgtttca

SEQ ID NO: 223455 - DNA, 27 bp, Artificial sequence
  SiRNA target sequence
catcctctctagtttacattgtttcag

SEQ ID NO: 223456 - DNA, 27 bp, Artificial sequence
  SiRNA target sequence
atcctctctagtttacattgtttcaga

SEQ ID NO: 223457 - DNA, 27 bp, Artificial sequence
  SiRNA target sequence
tcctctctagtttacattgtttcagaa

SEQ ID NO: 223458 - DNA, 27 bp, Artificial sequence
  SiRNA target sequence
cctctctagtttacattgtttcagaaa

SEQ ID NO: 223459 - DNA, 27 bp, Artificial sequence
  SiRNA target sequence
ctctctagtttacattgtttcagaaat

SEQ ID NO: 223460 - DNA, 27 bp, Artificial sequence
  SiRNA target sequence
tctctagtttacattgtttcagaaatg

SEQ ID NO: 223461 - DNA, 27 bp, Artificial sequence
  SiRNA target sequence
ctctagtttacattgtttcagaaatgt

SEQ ID NO: 223462 - DNA, 27 bp, Artificial sequence
  SiRNA target sequence
tctagtttacattgtttcagaaatgtt

SEQ ID NO: 223463 - DNA, 27 bp, Artificial sequence
  SiRNA target sequence
ctagtttacattgtttcagaaatgttt

SEQ ID NO: 223464 - DNA, 27 bp, Artificial sequence
  SiRNA target sequence
tagtttacattgtttcagaaatgtttg

SEQ ID NO: 223465 - DNA, 27 bp, Artificial sequence
  SiRNA target sequence
agtttacattgtttcagaaatgtttgg

SEQ ID NO: 223466 - DNA, 27 bp, Artificial sequence
  SiRNA target sequence
gtttacattgtttcagaaatgtttggt

SEQ ID NO: 223467 - DNA, 27 bp, Artificial sequence
  SiRNA target sequence
tttacattgtttcagaaatgtttggta

SEQ ID NO: 223468 - DNA, 27 bp, Artificial sequence
  SiRNA target sequence
ttacattgtttcagaaatgtttggtaa

SEQ ID NO: 223469 - DNA, 27 bp, Artificial sequence
  SiRNA target sequence
tacattgtttcagaaatgtttggtaat

SEQ ID NO: 223470 - DNA, 27 bp, Artificial sequence
  SiRNA target sequence
acattgtttcagaaatgtttggtaatt

SEQ ID NO: 223471 - DNA, 27 bp, Artificial sequence
  SiRNA target sequence
cattgtttcagaaatgtttggtaattt

SEQ ID NO: 223472 - DNA, 27 bp, Artificial sequence
  SiRNA target sequence
attgtttcagaaatgtttggtaattta

SEQ ID NO: 223473 - DNA, 27 bp, Artificial sequence
  SiRNA target sequence
ttgtttcagaaatgtttggtaatttag

SEQ ID NO: 223474 - DNA, 27 bp, Artificial sequence
  SiRNA target sequence
tgtttcagaaatgtttggtaatttagt

SEQ ID NO: 223475 - DNA, 27 bp, Artificial sequence
  SiRNA target sequence
gtttcagaaatgtttggtaatttagta

SEQ ID NO: 223476 - DNA, 27 bp, Artificial sequence
  SiRNA target sequence
tttcagaaatgtttggtaatttagtat

SEQ ID NO: 223477 - DNA, 27 bp, Artificial sequence
  SiRNA target sequence
ttcagaaatgtttggtaatttagtatt

SEQ ID NO: 223478 - DNA, 27 bp, Artificial sequence
  SiRNA target sequence
tcagaaatgtttggtaatttagtattg

SEQ ID NO: 223479 - DNA, 27 bp, Artificial sequence
  SiRNA target sequence
cagaaatgtttggtaatttagtattgt

SEQ ID NO: 223480 - DNA, 27 bp, Artificial sequence
  SiRNA target sequence
agaaatgtttggtaatttagtattgtc

SEQ ID NO: 223481 - DNA, 27 bp, Artificial sequence
  SiRNA target sequence
gaaatgtttggtaatttagtattgtct

SEQ ID NO: 223482 - DNA, 27 bp, Artificial sequence
  SiRNA target sequence
aaatgtttggtaatttagtattgtctt

SEQ ID NO: 223483 - DNA, 27 bp, Artificial sequence
  SiRNA target sequence
aatgtttggtaatttagtattgtctta

SEQ ID NO: 223484 - DNA, 27 bp, Artificial sequence
  SiRNA target sequence
atgtttggtaatttagtattgtcttat

SEQ ID NO: 223485 - DNA, 27 bp, Artificial sequence
  SiRNA target sequence
tgtttggtaatttagtattgtcttatt

SEQ ID NO: 223486 - DNA, 27 bp, Artificial sequence
  SiRNA target sequence
gtttggtaatttagtattgtcttattt

SEQ ID NO: 223487 - DNA, 27 bp, Artificial sequence
  SiRNA target sequence
tttggtaatttagtattgtcttatttc

SEQ ID NO: 223488 - DNA, 27 bp, Artificial sequence
  SiRNA target sequence
ttggtaatttagtattgtcttatttct

SEQ ID NO: 223489 - DNA, 27 bp, Artificial sequence
  SiRNA target sequence
tggtaatttagtattgtcttatttctt

SEQ ID NO: 223490 - DNA, 27 bp, Artificial sequence
  SiRNA target sequence
ggtaatttagtattgtcttatttcttc

SEQ ID NO: 223491 - DNA, 27 bp, Artificial sequence
  SiRNA target sequence
gtaatttagtattgtcttatttcttct

SEQ ID NO: 223492 - DNA, 27 bp, Artificial sequence
  SiRNA target sequence
taatttagtattgtcttatttcttctt

SEQ ID NO: 223493 - DNA, 27 bp, Artificial sequence
  SiRNA target sequence
aatttagtattgtcttatttcttcttg

SEQ ID NO: 223494 - DNA, 27 bp, Artificial sequence
  SiRNA target sequence
atttagtattgtcttatttcttcttga

SEQ ID NO: 223495 - DNA, 27 bp, Artificial sequence
  SiRNA target sequence
tttagtattgtcttatttcttcttgac

SEQ ID NO: 223496 - DNA, 27 bp, Artificial sequence
  SiRNA target sequence
ttagtattgtcttatttcttcttgacg

SEQ ID NO: 223497 - DNA, 27 bp, Artificial sequence
  SiRNA target sequence
tagtattgtcttatttcttcttgacgt

SEQ ID NO: 223498 - DNA, 27 bp, Artificial sequence
  SiRNA target sequence
agtattgtcttatttcttcttgacgtt

SEQ ID NO: 223499 - DNA, 27 bp, Artificial sequence
  SiRNA target sequence
gtattgtcttatttcttcttgacgttt

SEQ ID NO: 223500 - DNA, 27 bp, Artificial sequence
  SiRNA target sequence
tattgtcttatttcttcttgacgtttg

SEQ ID NO: 223501 - DNA, 27 bp, Artificial sequence
  SiRNA target sequence
attgtcttatttcttcttgacgtttgc

SEQ ID NO: 223502 - DNA, 27 bp, Artificial sequence
  SiRNA target sequence
ttgtcttatttcttcttgacgtttgct

SEQ ID NO: 223503 - DNA, 27 bp, Artificial sequence
  SiRNA target sequence
tgtcttatttcttcttgacgtttgcta

SEQ ID NO: 223504 - DNA, 27 bp, Artificial sequence
  SiRNA target sequence
gtcttatttcttcttgacgtttgctaa

SEQ ID NO: 223505 - DNA, 27 bp, Artificial sequence
  SiRNA target sequence
tcttatttcttcttgacgtttgctaat

SEQ ID NO: 223506 - DNA, 27 bp, Artificial sequence
  SiRNA target sequence
cttatttcttcttgacgtttgctaatt

SEQ ID NO: 223507 - DNA, 27 bp, Artificial sequence
  SiRNA target sequence
ttatttcttcttgacgtttgctaattc

SEQ ID NO: 223508 - DNA, 27 bp, Artificial sequence
  SiRNA target sequence
tatttcttcttgacgtttgctaattct

SEQ ID NO: 223509 - DNA, 27 bp, Artificial sequence
  SiRNA target sequence
atttcttcttgacgtttgctaattctt

SEQ ID NO: 223510 - DNA, 27 bp, Artificial sequence
  SiRNA target sequence
tttcttcttgacgtttgctaattcttt

SEQ ID NO: 223511 - DNA, 27 bp, Artificial sequence
  SiRNA target sequence
ttcttcttgacgtttgctaattcttta

SEQ ID NO: 223512 - DNA, 27 bp, Artificial sequence
  SiRNA target sequence
tcttcttgacgtttgctaattctttaa

SEQ ID NO: 223513 - DNA, 27 bp, Artificial sequence
  SiRNA target sequence
cttcttgacgtttgctaattctttaac

SEQ ID NO: 223514 - DNA, 27 bp, Artificial sequence
  SiRNA target sequence
ttcttgacgtttgctaattctttaaca

SEQ ID NO: 223515 - DNA, 27 bp, Artificial sequence
  SiRNA target sequence
tcttgacgtttgctaattctttaacaa

SEQ ID NO: 223516 - DNA, 27 bp, Artificial sequence
  SiRNA target sequence
cttgacgtttgctaattctttaacaac

SEQ ID NO: 223517 - DNA, 27 bp, Artificial sequence
  SiRNA target sequence
ttgacgtttgctaattctttaacaact

SEQ ID NO: 223518 - DNA, 27 bp, Artificial sequence
  SiRNA target sequence
tgacgtttgctaattctttaacaactc

SEQ ID NO: 223519 - DNA, 27 bp, Artificial sequence
  SiRNA target sequence
gacgtttgctaattctttaacaactcc

SEQ ID NO: 223520 - DNA, 27 bp, Artificial sequence
  SiRNA target sequence
acgtttgctaattctttaacaactcca

SEQ ID NO: 223521 - DNA, 27 bp, Artificial sequence
  SiRNA target sequence
cgtttgctaattctttaacaactccag

SEQ ID NO: 223522 - DNA, 27 bp, Artificial sequence
  SiRNA target sequence
gtttgctaattctttaacaactccagg

SEQ ID NO: 223523 - DNA, 27 bp, Artificial sequence
  SiRNA target sequence
tttgctaattctttaacaactccagga

SEQ ID NO: 223524 - DNA, 27 bp, Artificial sequence
  SiRNA target sequence
ttgctaattctttaacaactccaggac

SEQ ID NO: 223525 - DNA, 27 bp, Artificial sequence
  SiRNA target sequence
tgctaattctttaacaactccaggaca

SEQ ID NO: 223526 - DNA, 27 bp, Artificial sequence
  SiRNA target sequence
gctaattctttaacaactccaggacaa

SEQ ID NO: 223527 - DNA, 27 bp, Artificial sequence
  SiRNA target sequence
ctaattctttaacaactccaggacaaa

SEQ ID NO: 223528 - DNA, 27 bp, Artificial sequence
  SiRNA target sequence
taattctttaacaactccaggacaaag

SEQ ID NO: 223529 - DNA, 27 bp, Artificial sequence
  SiRNA target sequence
aattctttaacaactccaggacaaagt

SEQ ID NO: 223530 - DNA, 27 bp, Artificial sequence
  SiRNA target sequence
attctttaacaactccaggacaaagtg

SEQ ID NO: 223531 - DNA, 27 bp, Artificial sequence
  SiRNA target sequence
ttctttaacaactccaggacaaagtgc

SEQ ID NO: 223532 - DNA, 27 bp, Artificial sequence
  SiRNA target sequence
tctttaacaactccaggacaaagtgca

SEQ ID NO: 223533 - DNA, 27 bp, Artificial sequence
  SiRNA target sequence
ctttaacaactccaggacaaagtgcaa

SEQ ID NO: 223534 - DNA, 27 bp, Artificial sequence
  SiRNA target sequence
tttaacaactccaggacaaagtgcaag

SEQ ID NO: 223535 - DNA, 27 bp, Artificial sequence
  SiRNA target sequence
ttaacaactccaggacaaagtgcaaga

SEQ ID NO: 223536 - DNA, 27 bp, Artificial sequence
  SiRNA target sequence
taacaactccaggacaaagtgcaagat

SEQ ID NO: 223537 - DNA, 27 bp, Artificial sequence
  SiRNA target sequence
aacaactccaggacaaagtgcaagatt

SEQ ID NO: 223538 - DNA, 27 bp, Artificial sequence
  SiRNA target sequence
acaactccaggacaaagtgcaagattc

SEQ ID NO: 223539 - DNA, 27 bp, Artificial sequence
  SiRNA target sequence
caactccaggacaaagtgcaagattca

SEQ ID NO: 223540 - DNA, 27 bp, Artificial sequence
  SiRNA target sequence
aactccaggacaaagtgcaagattcat

SEQ ID NO: 223541 - DNA, 27 bp, Artificial sequence
  SiRNA target sequence
actccaggacaaagtgcaagattcata

SEQ ID NO: 223542 - DNA, 27 bp, Artificial sequence
  SiRNA target sequence
ctccaggacaaagtgcaagattcatac

SEQ ID NO: 223543 - DNA, 27 bp, Artificial sequence
  SiRNA target sequence
tccaggacaaagtgcaagattcatacc

SEQ ID NO: 223544 - DNA, 27 bp, Artificial sequence
  SiRNA target sequence
ccaggacaaagtgcaagattcatacct

SEQ ID NO: 223545 - DNA, 27 bp, Artificial sequence
  SiRNA target sequence
caggacaaagtgcaagattcatacctt

SEQ ID NO: 223546 - DNA, 27 bp, Artificial sequence
  SiRNA target sequence
aggacaaagtgcaagattcataccttt

SEQ ID NO: 223547 - DNA, 27 bp, Artificial sequence
  SiRNA target sequence
ggacaaagtgcaagattcataccttta

SEQ ID NO: 223548 - DNA, 27 bp, Artificial sequence
  SiRNA target sequence
gacaaagtgcaagattcatacctttat

SEQ ID NO: 223549 - DNA, 27 bp, Artificial sequence
  SiRNA target sequence
acaaagtgcaagattcatacctttatt

SEQ ID NO: 223550 - DNA, 27 bp, Artificial sequence
  SiRNA target sequence
caaagtgcaagattcatacctttattt

SEQ ID NO: 223551 - DNA, 27 bp, Artificial sequence
  SiRNA target sequence
aaagtgcaagattcatacctttatttt

SEQ ID NO: 223552 - DNA, 27 bp, Artificial sequence
  SiRNA target sequence
aagtgcaagattcatacctttatttta

SEQ ID NO: 223553 - DNA, 27 bp, Artificial sequence
  SiRNA target sequence
agtgcaagattcatacctttattttat

SEQ ID NO: 223554 - DNA, 27 bp, Artificial sequence
  SiRNA target sequence
gtgcaagattcatacctttattttatg

SEQ ID NO: 223555 - DNA, 27 bp, Artificial sequence
  SiRNA target sequence
tgcaagattcatacctttattttatgt

SEQ ID NO: 223556 - DNA, 27 bp, Artificial sequence
  SiRNA target sequence
gcaagattcatacctttattttatgtt

SEQ ID NO: 223557 - DNA, 27 bp, Artificial sequence
  SiRNA target sequence
caagattcatacctttattttatgttt

SEQ ID NO: 223558 - DNA, 27 bp, Artificial sequence
  SiRNA target sequence
aagattcatacctttattttatgtttt

SEQ ID NO: 223559 - DNA, 27 bp, Artificial sequence
  SiRNA target sequence
agattcatacctttattttatgttttc

SEQ ID NO: 223560 - DNA, 27 bp, Artificial sequence
  SiRNA target sequence
gattcatacctttattttatgttttct

SEQ ID NO: 223561 - DNA, 27 bp, Artificial sequence
  SiRNA target sequence
attcatacctttattttatgttttctc

SEQ ID NO: 223562 - DNA, 27 bp, Artificial sequence
  SiRNA target sequence
ttcatacctttattttatgttttctcg

SEQ ID NO: 223563 - DNA, 27 bp, Artificial sequence
  SiRNA target sequence
tcatacctttattttatgttttctcga

SEQ ID NO: 223564 - DNA, 27 bp, Artificial sequence
  SiRNA target sequence
catacctttattttatgttttctcgaa

SEQ ID NO: 223565 - DNA, 27 bp, Artificial sequence
  SiRNA target sequence
atacctttattttatgttttctcgaat

SEQ ID NO: 223566 - DNA, 27 bp, Artificial sequence
  SiRNA target sequence
tacctttattttatgttttctcgaata

SEQ ID NO: 223567 - DNA, 27 bp, Artificial sequence
  SiRNA target sequence
acctttattttatgttttctcgaatat

SEQ ID NO: 223568 - DNA, 27 bp, Artificial sequence
  SiRNA target sequence
cctttattttatgttttctcgaatatt

SEQ ID NO: 223569 - DNA, 27 bp, Artificial sequence
  SiRNA target sequence
ctttattttatgttttctcgaatattt

SEQ ID NO: 223570 - DNA, 27 bp, Artificial sequence
  SiRNA target sequence
tttattttatgttttctcgaatatttc

SEQ ID NO: 223571 - DNA, 27 bp, Artificial sequence
  SiRNA target sequence
ttattttatgttttctcgaatatttct

SEQ ID NO: 223572 - DNA, 27 bp, Artificial sequence
  SiRNA target sequence
tattttatgttttctcgaatatttctc

SEQ ID NO: 223573 - DNA, 27 bp, Artificial sequence
  SiRNA target sequence
attttatgttttctcgaatatttctct

SEQ ID NO: 223574 - DNA, 27 bp, Artificial sequence
  SiRNA target sequence
ttttatgttttctcgaatatttctctt

SEQ ID NO: 223575 - DNA, 27 bp, Artificial sequence
  SiRNA target sequence
tttatgttttctcgaatatttctcttt

SEQ ID NO: 223576 - DNA, 27 bp, Artificial sequence
  SiRNA target sequence
ttatgttttctcgaatatttctctttt

SEQ ID NO: 223577 - DNA, 27 bp, Artificial sequence
  SiRNA target sequence
tatgttttctcgaatatttctcttttc

SEQ ID NO: 223578 - DNA, 27 bp, Artificial sequence
  SiRNA target sequence
atgttttctcgaatatttctcttttct

SEQ ID NO: 223579 - DNA, 27 bp, Artificial sequence
  SiRNA target sequence
tgttttctcgaatatttctcttttctt

SEQ ID NO: 223580 - DNA, 27 bp, Artificial sequence
  SiRNA target sequence
gttttctcgaatatttctcttttctta

SEQ ID NO: 223581 - DNA, 27 bp, Artificial sequence
  SiRNA target sequence
ttttctcgaatatttctcttttcttat

SEQ ID NO: 223582 - DNA, 27 bp, Artificial sequence
  SiRNA target sequence
tttctcgaatatttctcttttcttatc

SEQ ID NO: 223583 - DNA, 27 bp, Artificial sequence
  SiRNA target sequence
ttctcgaatatttctcttttcttatct

SEQ ID NO: 223584 - DNA, 27 bp, Artificial sequence
  SiRNA target sequence
tctcgaatatttctcttttcttatctt

SEQ ID NO: 223585 - DNA, 27 bp, Artificial sequence
  SiRNA target sequence
ctcgaatatttctcttttcttatcttc

SEQ ID NO: 223586 - DNA, 27 bp, Artificial sequence
  SiRNA target sequence
tcgaatatttctcttttcttatcttct

SEQ ID NO: 223587 - DNA, 27 bp, Artificial sequence
  SiRNA target sequence
cgaatatttctcttttcttatcttctc

SEQ ID NO: 223588 - DNA, 27 bp, Artificial sequence
  SiRNA target sequence
gaatatttctcttttcttatcttctca

SEQ ID NO: 223589 - DNA, 27 bp, Artificial sequence
  SiRNA target sequence
aatatttctcttttcttatcttctcaa

SEQ ID NO: 223590 - DNA, 27 bp, Artificial sequence
  SiRNA target sequence
atatttctcttttcttatcttctcaag

SEQ ID NO: 223591 - DNA, 27 bp, Artificial sequence
  SiRNA target sequence
tatttctcttttcttatcttctcaagt

SEQ ID NO: 223592 - DNA, 27 bp, Artificial sequence
  SiRNA target sequence
atttctcttttcttatcttctcaagtg

SEQ ID NO: 223593 - DNA, 27 bp, Artificial sequence
  SiRNA target sequence
tttctcttttcttatcttctcaagtga

SEQ ID NO: 223594 - DNA, 27 bp, Artificial sequence
  SiRNA target sequence
ttctcttttcttatcttctcaagtgac

SEQ ID NO: 223595 - DNA, 27 bp, Artificial sequence
  SiRNA target sequence
tctcttttcttatcttctcaagtgaca

SEQ ID NO: 223596 - DNA, 27 bp, Artificial sequence
  SiRNA target sequence
ctcttttcttatcttctcaagtgacag

SEQ ID NO: 223597 - DNA, 27 bp, Artificial sequence
  SiRNA target sequence
tcttttcttatcttctcaagtgacaga

SEQ ID NO: 223598 - DNA, 27 bp, Artificial sequence
  SiRNA target sequence
cttttcttatcttctcaagtgacagaa

SEQ ID NO: 223599 - DNA, 27 bp, Artificial sequence
  SiRNA target sequence
ttttcttatcttctcaagtgacagaac

SEQ ID NO: 223600 - DNA, 27 bp, Artificial sequence
  SiRNA target sequence
tttcttatcttctcaagtgacagaact

SEQ ID NO: 223601 - DNA, 27 bp, Artificial sequence
  SiRNA target sequence
ttcttatcttctcaagtgacagaactt

SEQ ID NO: 223602 - DNA, 27 bp, Artificial sequence
  SiRNA target sequence
tcttatcttctcaagtgacagaacttt

SEQ ID NO: 223603 - DNA, 27 bp, Artificial sequence
  SiRNA target sequence
cttatcttctcaagtgacagaactttt

SEQ ID NO: 223604 - DNA, 27 bp, Artificial sequence
  SiRNA target sequence
ttatcttctcaagtgacagaacttttt

SEQ ID NO: 223605 - DNA, 27 bp, Artificial sequence
  SiRNA target sequence
tatcttctcaagtgacagaacttttta

SEQ ID NO: 223606 - DNA, 27 bp, Artificial sequence
  SiRNA target sequence
atcttctcaagtgacagaactttttac

SEQ ID NO: 223607 - DNA, 27 bp, Artificial sequence
  SiRNA target sequence
tcttctcaagtgacagaactttttaca

SEQ ID NO: 223608 - DNA, 27 bp, Artificial sequence
  SiRNA target sequence
cttctcaagtgacagaactttttacaa

SEQ ID NO: 223609 - DNA, 27 bp, Artificial sequence
  SiRNA target sequence
ttctcaagtgacagaactttttacaag

SEQ ID NO: 223610 - DNA, 27 bp, Artificial sequence
  SiRNA target sequence
tctcaagtgacagaactttttacaaga

SEQ ID NO: 223611 - DNA, 27 bp, Artificial sequence
  SiRNA target sequence
ctcaagtgacagaactttttacaagat

SEQ ID NO: 223612 - DNA, 27 bp, Artificial sequence
  SiRNA target sequence
tcaagtgacagaactttttacaagata

SEQ ID NO: 223613 - DNA, 27 bp, Artificial sequence
  SiRNA target sequence
caagtgacagaactttttacaagatat

SEQ ID NO: 223614 - DNA, 27 bp, Artificial sequence
  SiRNA target sequence
aagtgacagaactttttacaagatata

SEQ ID NO: 223615 - DNA, 27 bp, Artificial sequence
  SiRNA target sequence
agtgacagaactttttacaagatatag

SEQ ID NO: 223616 - DNA, 27 bp, Artificial sequence
  SiRNA target sequence
gtgacagaactttttacaagatataga

SEQ ID NO: 223617 - DNA, 27 bp, Artificial sequence
  SiRNA target sequence
tgacagaactttttacaagatatagat

SEQ ID NO: 223618 - DNA, 27 bp, Artificial sequence
  SiRNA target sequence
gacagaactttttacaagatatagatc

SEQ ID NO: 223619 - DNA, 27 bp, Artificial sequence
  SiRNA target sequence
acagaactttttacaagatatagatca

SEQ ID NO: 223620 - DNA, 27 bp, Artificial sequence
  SiRNA target sequence
cagaactttttacaagatatagatcaa

SEQ ID NO: 223621 - DNA, 27 bp, Artificial sequence
  SiRNA target sequence
agaactttttacaagatatagatcaaa

SEQ ID NO: 223622 - DNA, 27 bp, Artificial sequence
  SiRNA target sequence
gaactttttacaagatatagatcaaag

SEQ ID NO: 223623 - DNA, 27 bp, Artificial sequence
  SiRNA target sequence
aactttttacaagatatagatcaaagc

SEQ ID NO: 223624 - DNA, 27 bp, Artificial sequence
  SiRNA target sequence
actttttacaagatatagatcaaagct

SEQ ID NO: 223625 - DNA, 27 bp, Artificial sequence
  SiRNA target sequence
ctttttacaagatatagatcaaagctc

SEQ ID NO: 223626 - DNA, 27 bp, Artificial sequence
  SiRNA target sequence
tttttacaagatatagatcaaagctca

SEQ ID NO: 223627 - DNA, 27 bp, Artificial sequence
  SiRNA target sequence
ttttacaagatatagatcaaagctcac

SEQ ID NO: 223628 - DNA, 27 bp, Artificial sequence
  SiRNA target sequence
tttacaagatatagatcaaagctcact

SEQ ID NO: 223629 - DNA, 27 bp, Artificial sequence
  SiRNA target sequence
ttacaagatatagatcaaagctcactt

SEQ ID NO: 223630 - DNA, 27 bp, Artificial sequence
  SiRNA target sequence
tacaagatatagatcaaagctcacttt

SEQ ID NO: 223631 - DNA, 27 bp, Artificial sequence
  SiRNA target sequence
acaagatatagatcaaagctcactttc

SEQ ID NO: 223632 - DNA, 27 bp, Artificial sequence
  SiRNA target sequence
caagatatagatcaaagctcactttct

SEQ ID NO: 223633 - DNA, 27 bp, Artificial sequence
  SiRNA target sequence
aagatatagatcaaagctcactttctc

SEQ ID NO: 223634 - DNA, 27 bp, Artificial sequence
  SiRNA target sequence
agatatagatcaaagctcactttctca

SEQ ID NO: 223635 - DNA, 27 bp, Artificial sequence
  SiRNA target sequence
gatatagatcaaagctcactttctcag

SEQ ID NO: 223636 - DNA, 27 bp, Artificial sequence
  SiRNA target sequence
atatagatcaaagctcactttctcaga

SEQ ID NO: 223637 - DNA, 27 bp, Artificial sequence
  SiRNA target sequence
tatagatcaaagctcactttctcagag

SEQ ID NO: 223638 - DNA, 27 bp, Artificial sequence
  SiRNA target sequence
atagatcaaagctcactttctcagagg

SEQ ID NO: 223639 - DNA, 27 bp, Artificial sequence
  SiRNA target sequence
tagatcaaagctcactttctcagaggc

SEQ ID NO: 223640 - DNA, 27 bp, Artificial sequence
  SiRNA target sequence
agatcaaagctcactttctcagaggcg

SEQ ID NO: 223641 - DNA, 27 bp, Artificial sequence
  SiRNA target sequence
gatcaaagctcactttctcagaggcgg

SEQ ID NO: 223642 - DNA, 27 bp, Artificial sequence
  SiRNA target sequence
atcaaagctcactttctcagaggcgga

SEQ ID NO: 223643 - DNA, 27 bp, Artificial sequence
  SiRNA target sequence
tcaaagctcactttctcagaggcggaa

SEQ ID NO: 223644 - DNA, 27 bp, Artificial sequence
  SiRNA target sequence
caaagctcactttctcagaggcggaat

SEQ ID NO: 223645 - DNA, 27 bp, Artificial sequence
  SiRNA target sequence
aaagctcactttctcagaggcggaatt

SEQ ID NO: 223646 - DNA, 27 bp, Artificial sequence
  SiRNA target sequence
aagctcactttctcagaggcggaattt

SEQ ID NO: 223647 - DNA, 27 bp, Artificial sequence
  SiRNA target sequence
agctcactttctcagaggcggaatttt

SEQ ID NO: 223648 - DNA, 27 bp, Artificial sequence
  SiRNA target sequence
gctcactttctcagaggcggaattttt

SEQ ID NO: 223649 - DNA, 27 bp, Artificial sequence
  SiRNA target sequence
ctcactttctcagaggcggaattttta

SEQ ID NO: 223650 - DNA, 27 bp, Artificial sequence
  SiRNA target sequence
tcactttctcagaggcggaatttttat

SEQ ID NO: 223651 - DNA, 27 bp, Artificial sequence
  SiRNA target sequence
cactttctcagaggcggaatttttata

SEQ ID NO: 223652 - DNA, 27 bp, Artificial sequence
  SiRNA target sequence
actttctcagaggcggaatttttatat

SEQ ID NO: 223653 - DNA, 27 bp, Artificial sequence
  SiRNA target sequence
ctttctcagaggcggaatttttatata

SEQ ID NO: 223654 - DNA, 27 bp, Artificial sequence
  SiRNA target sequence
tttctcagaggcggaatttttatataa

SEQ ID NO: 223655 - DNA, 27 bp, Artificial sequence
  SiRNA target sequence
ttctcagaggcggaatttttatataat

SEQ ID NO: 223656 - DNA, 27 bp, Artificial sequence
  SiRNA target sequence
tctcagaggcggaatttttatataatg

SEQ ID NO: 223657 - DNA, 27 bp, Artificial sequence
  SiRNA target sequence
ctcagaggcggaatttttatataatgg

SEQ ID NO: 223658 - DNA, 27 bp, Artificial sequence
  SiRNA target sequence
tcagaggcggaatttttatataatggc

SEQ ID NO: 223659 - DNA, 27 bp, Artificial sequence
  SiRNA target sequence
cagaggcggaatttttatataatggct

SEQ ID NO: 223660 - DNA, 27 bp, Artificial sequence
  SiRNA target sequence
agaggcggaatttttatataatggctt

SEQ ID NO: 223661 - DNA, 27 bp, Artificial sequence
  SiRNA target sequence
gaggcggaatttttatataatggcttt

SEQ ID NO: 223662 - DNA, 27 bp, Artificial sequence
  SiRNA target sequence
aggcggaatttttatataatggctttt

SEQ ID NO: 223663 - DNA, 27 bp, Artificial sequence
  SiRNA target sequence
ggcggaatttttatataatggcttttt

SEQ ID NO: 223664 - DNA, 27 bp, Artificial sequence
  SiRNA target sequence
gcggaatttttatataatggctttttt

SEQ ID NO: 223665 - DNA, 27 bp, Artificial sequence
  SiRNA target sequence
cggaatttttatataatggcttttttg

SEQ ID NO: 223666 - DNA, 27 bp, Artificial sequence
  SiRNA target sequence
ggaatttttatataatggcttttttgt

SEQ ID NO: 223667 - DNA, 27 bp, Artificial sequence
  SiRNA target sequence
gaatttttatataatggcttttttgta

SEQ ID NO: 223668 - DNA, 27 bp, Artificial sequence
  SiRNA target sequence
aatttttatataatggcttttttgtat

SEQ ID NO: 223669 - DNA, 27 bp, Artificial sequence
  SiRNA target sequence
atttttatataatggcttttttgtatt

SEQ ID NO: 223670 - DNA, 27 bp, Artificial sequence
  SiRNA target sequence
tttttatataatggcttttttgtattt

SEQ ID NO: 223671 - DNA, 27 bp, Artificial sequence
  SiRNA target sequence
ttttatataatggcttttttgtatttt

SEQ ID NO: 223672 - DNA, 27 bp, Artificial sequence
  SiRNA target sequence
tttatataatggcttttttgtattttc

SEQ ID NO: 223673 - DNA, 27 bp, Artificial sequence
  SiRNA target sequence
ttatataatggcttttttgtattttct

SEQ ID NO: 223674 - DNA, 27 bp, Artificial sequence
  SiRNA target sequence
tatataatggcttttttgtattttctg

SEQ ID NO: 223675 - DNA, 27 bp, Artificial sequence
  SiRNA target sequence
atataatggcttttttgtattttctgg

SEQ ID NO: 223676 - DNA, 27 bp, Artificial sequence
  SiRNA target sequence
tataatggcttttttgtattttctgga

SEQ ID NO: 223677 - DNA, 27 bp, Artificial sequence
  SiRNA target sequence
ataatggcttttttgtattttctggag

SEQ ID NO: 223678 - DNA, 27 bp, Artificial sequence
  SiRNA target sequence
taatggcttttttgtattttctggagt

SEQ ID NO: 223679 - DNA, 27 bp, Artificial sequence
  SiRNA target sequence
aatggcttttttgtattttctggagtt

SEQ ID NO: 223680 - DNA, 27 bp, Artificial sequence
  SiRNA target sequence
atggcttttttgtattttctggagttc

SEQ ID NO: 223681 - DNA, 27 bp, Artificial sequence
  SiRNA target sequence
tggcttttttgtattttctggagttct

SEQ ID NO: 223682 - DNA, 27 bp, Artificial sequence
  SiRNA target sequence
ggcttttttgtattttctggagttcta

SEQ ID NO: 223683 - DNA, 27 bp, Artificial sequence
  SiRNA target sequence
gcttttttgtattttctggagttctag

SEQ ID NO: 223684 - DNA, 27 bp, Artificial sequence
  SiRNA target sequence
cttttttgtattttctggagttctagt

SEQ ID NO: 223685 - DNA, 27 bp, Artificial sequence
  SiRNA target sequence
ttttttgtattttctggagttctagta

SEQ ID NO: 223686 - DNA, 27 bp, Artificial sequence
  SiRNA target sequence
tttttgtattttctggagttctagtaa

SEQ ID NO: 223687 - DNA, 27 bp, Artificial sequence
  SiRNA target sequence
ttttgtattttctggagttctagtaat

SEQ ID NO: 223688 - DNA, 27 bp, Artificial sequence
  SiRNA target sequence
tttgtattttctggagttctagtaata

SEQ ID NO: 223689 - DNA, 27 bp, Artificial sequence
  SiRNA target sequence
ttgtattttctggagttctagtaatag

SEQ ID NO: 223690 - DNA, 27 bp, Artificial sequence
  SiRNA target sequence
tgtattttctggagttctagtaatagt

SEQ ID NO: 223691 - DNA, 27 bp, Artificial sequence
  SiRNA target sequence
gtattttctggagttctagtaatagtt

SEQ ID NO: 223692 - DNA, 27 bp, Artificial sequence
  SiRNA target sequence
tattttctggagttctagtaatagtta

SEQ ID NO: 223693 - DNA, 27 bp, Artificial sequence
  SiRNA target sequence
attttctggagttctagtaatagttat

SEQ ID NO: 223694 - DNA, 27 bp, Artificial sequence
  SiRNA target sequence
ttttctggagttctagtaatagttata

SEQ ID NO: 223695 - DNA, 27 bp, Artificial sequence
  SiRNA target sequence
tttctggagttctagtaatagttatat

SEQ ID NO: 223696 - DNA, 27 bp, Artificial sequence
  SiRNA target sequence
ttctggagttctagtaatagttatatt

SEQ ID NO: 223697 - DNA, 27 bp, Artificial sequence
  SiRNA target sequence
tctggagttctagtaatagttatattt

SEQ ID NO: 223698 - DNA, 27 bp, Artificial sequence
  SiRNA target sequence
ctggagttctagtaatagttatatttt

SEQ ID NO: 223699 - DNA, 27 bp, Artificial sequence
  SiRNA target sequence
tggagttctagtaatagttatattttt

SEQ ID NO: 223700 - DNA, 27 bp, Artificial sequence
  SiRNA target sequence
ggagttctagtaatagttatattttta

SEQ ID NO: 223701 - DNA, 27 bp, Artificial sequence
  SiRNA target sequence
gagttctagtaatagttatatttttaa

SEQ ID NO: 223702 - DNA, 27 bp, Artificial sequence
  SiRNA target sequence
agttctagtaatagttatatttttaat

SEQ ID NO: 223703 - DNA, 27 bp, Artificial sequence
  SiRNA target sequence
gttctagtaatagttatatttttaatt

SEQ ID NO: 223704 - DNA, 27 bp, Artificial sequence
  SiRNA target sequence
ttctagtaatagttatatttttaatta

SEQ ID NO: 223705 - DNA, 27 bp, Artificial sequence
  SiRNA target sequence
tctagtaatagttatatttttaattaa

SEQ ID NO: 223706 - DNA, 27 bp, Artificial sequence
  SiRNA target sequence
ctagtaatagttatatttttaattaaa

SEQ ID NO: 223707 - DNA, 27 bp, Artificial sequence
  SiRNA target sequence
tagtaatagttatatttttaattaaaa

SEQ ID NO: 223708 - DNA, 27 bp, Artificial sequence
  SiRNA target sequence
agtaatagttatatttttaattaaaaa

SEQ ID NO: 223709 - DNA, 27 bp, Artificial sequence
  SiRNA target sequence
gtaatagttatatttttaattaaaaaa

SEQ ID NO: 223710 - DNA, 27 bp, Artificial sequence
  SiRNA target sequence
taatagttatatttttaattaaaaaat

SEQ ID NO: 223711 - DNA, 27 bp, Artificial sequence
  SiRNA target sequence
aatagttatatttttaattaaaaaata

SEQ ID NO: 223712 - DNA, 27 bp, Artificial sequence
  SiRNA target sequence
atagttatatttttaattaaaaaatat

SEQ ID NO: 223713 - DNA, 27 bp, Artificial sequence
  SiRNA target sequence
tagttatatttttaattaaaaaatatt

SEQ ID NO: 223714 - DNA, 27 bp, Artificial sequence
  SiRNA target sequence
agttatatttttaattaaaaaatattt

SEQ ID NO: 223715 - DNA, 27 bp, Artificial sequence
  SiRNA target sequence
gttatatttttaattaaaaaatatttg

SEQ ID NO: 223716 - DNA, 27 bp, Artificial sequence
  SiRNA target sequence
ttatatttttaattaaaaaatatttgg

SEQ ID NO: 223717 - DNA, 27 bp, Artificial sequence
  SiRNA target sequence
tatatttttaattaaaaaatatttgga

SEQ ID NO: 223718 - DNA, 27 bp, Artificial sequence
  SiRNA target sequence
atatttttaattaaaaaatatttggag

SEQ ID NO: 223719 - DNA, 27 bp, Artificial sequence
  SiRNA target sequence
tatttttaattaaaaaatatttggaga

SEQ ID NO: 223720 - DNA, 27 bp, Artificial sequence
  SiRNA target sequence
atttttaattaaaaaatatttggagag

SEQ ID NO: 223721 - DNA, 27 bp, Artificial sequence
  SiRNA target sequence
tttttaattaaaaaatatttggagagg

SEQ ID NO: 223722 - DNA, 27 bp, Artificial sequence
  SiRNA target sequence
ttttaattaaaaaatatttggagagga

SEQ ID NO: 223723 - DNA, 27 bp, Artificial sequence
  SiRNA target sequence
tttaattaaaaaatatttggagaggaa

SEQ ID NO: 223724 - DNA, 27 bp, Artificial sequence
  SiRNA target sequence
ttaattaaaaaatatttggagaggaat

SEQ ID NO: 223725 - DNA, 27 bp, Artificial sequence
  SiRNA target sequence
taattaaaaaatatttggagaggaatg

SEQ ID NO: 223726 - DNA, 27 bp, Artificial sequence
  SiRNA target sequence
aattaaaaaatatttggagaggaatgt

SEQ ID NO: 223727 - DNA, 27 bp, Artificial sequence
  SiRNA target sequence
attaaaaaatatttggagaggaatgtg

SEQ ID NO: 223728 - DNA, 27 bp, Artificial sequence
  SiRNA target sequence
ttaaaaaatatttggagaggaatgtga

SEQ ID NO: 223729 - DNA, 27 bp, Artificial sequence
  SiRNA target sequence
taaaaaatatttggagaggaatgtgac

SEQ ID NO: 223730 - DNA, 27 bp, Artificial sequence
  SiRNA target sequence
aaaaaatatttggagaggaatgtgact

SEQ ID NO: 223731 - DNA, 27 bp, Artificial sequence
  SiRNA target sequence
aaaaatatttggagaggaatgtgacta

SEQ ID NO: 223732 - DNA, 27 bp, Artificial sequence
  SiRNA target sequence
aaaatatttggagaggaatgtgactaa

SEQ ID NO: 223733 - DNA, 27 bp, Artificial sequence
  SiRNA target sequence
aaatatttggagaggaatgtgactaac

SEQ ID NO: 223734 - DNA, 27 bp, Artificial sequence
  SiRNA target sequence
aatatttggagaggaatgtgactaaca

SEQ ID NO: 223735 - DNA, 27 bp, Artificial sequence
  SiRNA target sequence
atatttggagaggaatgtgactaacaa

SEQ ID NO: 223736 - DNA, 27 bp, Artificial sequence
  SiRNA target sequence
tatttggagaggaatgtgactaacaaa

SEQ ID NO: 223737 - DNA, 27 bp, Artificial sequence
  SiRNA target sequence
atttggagaggaatgtgactaacaaac

SEQ ID NO: 223738 - DNA, 27 bp, Artificial sequence
  SiRNA target sequence
tttggagaggaatgtgactaacaaacc

SEQ ID NO: 223739 - DNA, 27 bp, Artificial sequence
  SiRNA target sequence
ttggagaggaatgtgactaacaaacct

SEQ ID NO: 223740 - DNA, 27 bp, Artificial sequence
  SiRNA target sequence
tggagaggaatgtgactaacaaacctt

SEQ ID NO: 223741 - DNA, 27 bp, Artificial sequence
  SiRNA target sequence
ggagaggaatgtgactaacaaaccttt

SEQ ID NO: 223742 - DNA, 27 bp, Artificial sequence
  SiRNA target sequence
gagaggaatgtgactaacaaacctttg

SEQ ID NO: 223743 - DNA, 27 bp, Artificial sequence
  SiRNA target sequence
agaggaatgtgactaacaaacctttgt

SEQ ID NO: 223744 - DNA, 27 bp, Artificial sequence
  SiRNA target sequence
gaggaatgtgactaacaaacctttgtt

SEQ ID NO: 223745 - DNA, 27 bp, Artificial sequence
  SiRNA target sequence
aggaatgtgactaacaaacctttgttt

SEQ ID NO: 223746 - DNA, 27 bp, Artificial sequence
  SiRNA target sequence
ggaatgtgactaacaaacctttgtttg

SEQ ID NO: 223747 - DNA, 27 bp, Artificial sequence
  SiRNA target sequence
gaatgtgactaacaaacctttgtttgt

SEQ ID NO: 223748 - DNA, 27 bp, Artificial sequence
  SiRNA target sequence
aatgtgactaacaaacctttgtttgtt

SEQ ID NO: 223749 - DNA, 27 bp, Artificial sequence
  SiRNA target sequence
atgtgactaacaaacctttgtttgttg

SEQ ID NO: 223750 - DNA, 27 bp, Artificial sequence
  SiRNA target sequence
tgtgactaacaaacctttgtttgttgt

SEQ ID NO: 223751 - DNA, 27 bp, Artificial sequence
  SiRNA target sequence
gtgactaacaaacctttgtttgttgta

SEQ ID NO: 223752 - DNA, 27 bp, Artificial sequence
  SiRNA target sequence
tgactaacaaacctttgtttgttgtaa

SEQ ID NO: 223753 - DNA, 27 bp, Artificial sequence
  SiRNA target sequence
gactaacaaacctttgtttgttgtaaa

SEQ ID NO: 223754 - DNA, 27 bp, Artificial sequence
  SiRNA target sequence
actaacaaacctttgtttgttgtaaaa

SEQ ID NO: 223755 - DNA, 27 bp, Artificial sequence
  SiRNA target sequence
ctaacaaacctttgtttgttgtaaaat

SEQ ID NO: 223756 - DNA, 27 bp, Artificial sequence
  SiRNA target sequence
taacaaacctttgtttgttgtaaaatc

SEQ ID NO: 223757 - DNA, 27 bp, Artificial sequence
  SiRNA target sequence
aacaaacctttgtttgttgtaaaatct

SEQ ID NO: 223758 - DNA, 27 bp, Artificial sequence
  SiRNA target sequence
acaaacctttgtttgttgtaaaatctg

SEQ ID NO: 223759 - DNA, 27 bp, Artificial sequence
  SiRNA target sequence
caaacctttgtttgttgtaaaatctgt

SEQ ID NO: 223760 - DNA, 27 bp, Artificial sequence
  SiRNA target sequence
aaacctttgtttgttgtaaaatctgtt

SEQ ID NO: 223761 - DNA, 27 bp, Artificial sequence
  SiRNA target sequence
aacctttgtttgttgtaaaatctgtta

SEQ ID NO: 223762 - DNA, 27 bp, Artificial sequence
  SiRNA target sequence
acctttgtttgttgtaaaatctgttaa

SEQ ID NO: 223763 - DNA, 27 bp, Artificial sequence
  SiRNA target sequence
cctttgtttgttgtaaaatctgttaaa

SEQ ID NO: 223764 - DNA, 27 bp, Artificial sequence
  SiRNA target sequence
ctttgtttgttgtaaaatctgttaaaa

SEQ ID NO: 223765 - DNA, 27 bp, Artificial sequence
  SiRNA target sequence
tttgtttgttgtaaaatctgttaaaaa

SEQ ID NO: 223766 - DNA, 27 bp, Artificial sequence
  SiRNA target sequence
ttgtttgttgtaaaatctgttaaaaag

SEQ ID NO: 223767 - DNA, 27 bp, Artificial sequence
  SiRNA target sequence
tgtttgttgtaaaatctgttaaaaaga

SEQ ID NO: 223768 - DNA, 27 bp, Artificial sequence
  SiRNA target sequence
gtttgttgtaaaatctgttaaaaagaa

SEQ ID NO: 223769 - DNA, 27 bp, Artificial sequence
  SiRNA target sequence
tttgttgtaaaatctgttaaaaagaag

SEQ ID NO: 223770 - DNA, 27 bp, Artificial sequence
  SiRNA target sequence
ttgttgtaaaatctgttaaaaagaagg

SEQ ID NO: 223771 - DNA, 27 bp, Artificial sequence
  SiRNA target sequence
tgttgtaaaatctgttaaaaagaaggg

SEQ ID NO: 223772 - DNA, 27 bp, Artificial sequence
  SiRNA target sequence
gttgtaaaatctgttaaaaagaaggga

SEQ ID NO: 223773 - DNA, 27 bp, Artificial sequence
  SiRNA target sequence
ttgtaaaatctgttaaaaagaagggac

SEQ ID NO: 223774 - DNA, 27 bp, Artificial sequence
  SiRNA target sequence
tgtaaaatctgttaaaaagaagggacc

SEQ ID NO: 223775 - DNA, 27 bp, Artificial sequence
  SiRNA target sequence
gtaaaatctgttaaaaagaagggacca

SEQ ID NO: 223776 - DNA, 27 bp, Artificial sequence
  SiRNA target sequence
taaaatctgttaaaaagaagggaccaa

SEQ ID NO: 223777 - DNA, 27 bp, Artificial sequence
  SiRNA target sequence
aaaatctgttaaaaagaagggaccaaa

SEQ ID NO: 223778 - DNA, 27 bp, Artificial sequence
  SiRNA target sequence
aaatctgttaaaaagaagggaccaaaa

SEQ ID NO: 223779 - DNA, 27 bp, Artificial sequence
  SiRNA target sequence
aatctgttaaaaagaagggaccaaaag

SEQ ID NO: 223780 - DNA, 27 bp, Artificial sequence
  SiRNA target sequence
atctgttaaaaagaagggaccaaaagt

SEQ ID NO: 223781 - DNA, 27 bp, Artificial sequence
  SiRNA target sequence
tctgttaaaaagaagggaccaaaagtt

SEQ ID NO: 223782 - DNA, 27 bp, Artificial sequence
  SiRNA target sequence
ctgttaaaaagaagggaccaaaagtta

SEQ ID NO: 223783 - DNA, 27 bp, Artificial sequence
  SiRNA target sequence
tgttaaaaagaagggaccaaaagttaa

SEQ ID NO: 223784 - DNA, 27 bp, Artificial sequence
  SiRNA target sequence
gttaaaaagaagggaccaaaagttaaa

SEQ ID NO: 223785 - DNA, 27 bp, Artificial sequence
  SiRNA target sequence
ttaaaaagaagggaccaaaagttaaag

SEQ ID NO: 223786 - DNA, 27 bp, Artificial sequence
  SiRNA target sequence
taaaaagaagggaccaaaagttaaagt

SEQ ID NO: 223787 - DNA, 27 bp, Artificial sequence
  SiRNA target sequence
aaaaagaagggaccaaaagttaaagta

SEQ ID NO: 223788 - DNA, 27 bp, Artificial sequence
  SiRNA target sequence
aaaagaagggaccaaaagttaaagtag

SEQ ID NO: 223789 - DNA, 27 bp, Artificial sequence
  SiRNA target sequence
aaagaagggaccaaaagttaaagtagg

SEQ ID NO: 223790 - DNA, 27 bp, Artificial sequence
  SiRNA target sequence
aagaagggaccaaaagttaaagtagga

SEQ ID NO: 223791 - DNA, 27 bp, Artificial sequence
  SiRNA target sequence
agaagggaccaaaagttaaagtaggat

SEQ ID NO: 223792 - DNA, 27 bp, Artificial sequence
  SiRNA target sequence
gaagggaccaaaagttaaagtaggatt

SEQ ID NO: 223793 - DNA, 27 bp, Artificial sequence
  SiRNA target sequence
aagggaccaaaagttaaagtaggattt

SEQ ID NO: 223794 - DNA, 27 bp, Artificial sequence
  SiRNA target sequence
agggaccaaaagttaaagtaggatttg

SEQ ID NO: 223795 - DNA, 27 bp, Artificial sequence
  SiRNA target sequence
gggaccaaaagttaaagtaggatttgc

SEQ ID NO: 223796 - DNA, 27 bp, Artificial sequence
  SiRNA target sequence
ggaccaaaagttaaagtaggatttgcg

SEQ ID NO: 223797 - DNA, 27 bp, Artificial sequence
  SiRNA target sequence
gaccaaaagttaaagtaggatttgcgg

SEQ ID NO: 223798 - DNA, 27 bp, Artificial sequence
  SiRNA target sequence
accaaaagttaaagtaggatttgcgga

SEQ ID NO: 223799 - DNA, 27 bp, Artificial sequence
  SiRNA target sequence
ccaaaagttaaagtaggatttgcggag

SEQ ID NO: 223800 - DNA, 27 bp, Artificial sequence
  SiRNA target sequence
caaaagttaaagtaggatttgcggagg

SEQ ID NO: 223801 - DNA, 27 bp, Artificial sequence
  SiRNA target sequence
aaaagttaaagtaggatttgcggaggg

SEQ ID NO: 223802 - DNA, 27 bp, Artificial sequence
  SiRNA target sequence
aaagttaaagtaggatttgcggagggc

SEQ ID NO: 223803 - DNA, 27 bp, Artificial sequence
  SiRNA target sequence
aagttaaagtaggatttgcggagggcc

SEQ ID NO: 223804 - DNA, 27 bp, Artificial sequence
  SiRNA target sequence
agttaaagtaggatttgcggagggcct

SEQ ID NO: 223805 - DNA, 27 bp, Artificial sequence
  SiRNA target sequence
gttaaagtaggatttgcggagggcctt

SEQ ID NO: 223806 - DNA, 27 bp, Artificial sequence
  SiRNA target sequence
ttaaagtaggatttgcggagggcctta

SEQ ID NO: 223807 - DNA, 27 bp, Artificial sequence
  SiRNA target sequence
taaagtaggatttgcggagggccttaa

SEQ ID NO: 223808 - DNA, 27 bp, Artificial sequence
  SiRNA target sequence
aaagtaggatttgcggagggccttaaa

SEQ ID NO: 223809 - DNA, 27 bp, Artificial sequence
  SiRNA target sequence
aagtaggatttgcggagggccttaaag

SEQ ID NO: 223810 - DNA, 27 bp, Artificial sequence
  SiRNA target sequence
agtaggatttgcggagggccttaaaga

SEQ ID NO: 223811 - DNA, 27 bp, Artificial sequence
  SiRNA target sequence
gtaggatttgcggagggccttaaagaa

SEQ ID NO: 223812 - DNA, 27 bp, Artificial sequence
  SiRNA target sequence
taggatttgcggagggccttaaagaaa

SEQ ID NO: 223813 - DNA, 27 bp, Artificial sequence
  SiRNA target sequence
aggatttgcggagggccttaaagaaat

SEQ ID NO: 223814 - DNA, 27 bp, Artificial sequence
  SiRNA target sequence
ggatttgcggagggccttaaagaaatg

SEQ ID NO: 223815 - DNA, 27 bp, Artificial sequence
  SiRNA target sequence
gatttgcggagggccttaaagaaatga

SEQ ID NO: 223816 - DNA, 27 bp, Artificial sequence
  SiRNA target sequence
atttgcggagggccttaaagaaatgat

SEQ ID NO: 223817 - DNA, 27 bp, Artificial sequence
  SiRNA target sequence
tttgcggagggccttaaagaaatgatg

SEQ ID NO: 223818 - DNA, 27 bp, Artificial sequence
  SiRNA target sequence
ttgcggagggccttaaagaaatgatgg

SEQ ID NO: 223819 - DNA, 27 bp, Artificial sequence
  SiRNA target sequence
tgcggagggccttaaagaaatgatggc

SEQ ID NO: 223820 - DNA, 27 bp, Artificial sequence
  SiRNA target sequence
gcggagggccttaaagaaatgatggca

SEQ ID NO: 223821 - DNA, 27 bp, Artificial sequence
  SiRNA target sequence
cggagggccttaaagaaatgatggcat

SEQ ID NO: 223822 - DNA, 27 bp, Artificial sequence
  SiRNA target sequence
ggagggccttaaagaaatgatggcatc

SEQ ID NO: 223823 - DNA, 27 bp, Artificial sequence
  SiRNA target sequence
gagggccttaaagaaatgatggcatca

SEQ ID NO: 223824 - DNA, 27 bp, Artificial sequence
  SiRNA target sequence
agggccttaaagaaatgatggcatcaa

SEQ ID NO: 223825 - DNA, 27 bp, Artificial sequence
  SiRNA target sequence
gggccttaaagaaatgatggcatcaaa

SEQ ID NO: 223826 - DNA, 27 bp, Artificial sequence
  SiRNA target sequence
ggccttaaagaaatgatggcatcaaag

SEQ ID NO: 223827 - DNA, 27 bp, Artificial sequence
  SiRNA target sequence
gccttaaagaaatgatggcatcaaagt

SEQ ID NO: 223828 - DNA, 27 bp, Artificial sequence
  SiRNA target sequence
ccttaaagaaatgatggcatcaaagtt

SEQ ID NO: 223829 - DNA, 27 bp, Artificial sequence
  SiRNA target sequence
cttaaagaaatgatggcatcaaagtta

SEQ ID NO: 223830 - DNA, 27 bp, Artificial sequence
  SiRNA target sequence
ttaaagaaatgatggcatcaaagttat

SEQ ID NO: 223831 - DNA, 27 bp, Artificial sequence
  SiRNA target sequence
taaagaaatgatggcatcaaagttatt

SEQ ID NO: 223832 - DNA, 27 bp, Artificial sequence
  SiRNA target sequence
aaagaaatgatggcatcaaagttatta

SEQ ID NO: 223833 - DNA, 27 bp, Artificial sequence
  SiRNA target sequence
aagaaatgatggcatcaaagttattac

SEQ ID NO: 223834 - DNA, 27 bp, Artificial sequence
  SiRNA target sequence
agaaatgatggcatcaaagttattact

SEQ ID NO: 223835 - DNA, 27 bp, Artificial sequence
  SiRNA target sequence
gaaatgatggcatcaaagttattactt

SEQ ID NO: 223836 - DNA, 27 bp, Artificial sequence
  SiRNA target sequence
aaatgatggcatcaaagttattactta

SEQ ID NO: 223837 - DNA, 27 bp, Artificial sequence
  SiRNA target sequence
aatgatggcatcaaagttattacttaa

SEQ ID NO: 223838 - DNA, 27 bp, Artificial sequence
  SiRNA target sequence
atgatggcatcaaagttattacttaac

SEQ ID NO: 223839 - DNA, 27 bp, Artificial sequence
  SiRNA target sequence
tgatggcatcaaagttattacttaaca

SEQ ID NO: 223840 - DNA, 27 bp, Artificial sequence
  SiRNA target sequence
gatggcatcaaagttattacttaacat

SEQ ID NO: 223841 - DNA, 27 bp, Artificial sequence
  SiRNA target sequence
atggcatcaaagttattacttaacatt

SEQ ID NO: 223842 - DNA, 27 bp, Artificial sequence
  SiRNA target sequence
tggcatcaaagttattacttaacattt

SEQ ID NO: 223843 - DNA, 27 bp, Artificial sequence
  SiRNA target sequence
ggcatcaaagttattacttaacatttc

SEQ ID NO: 223844 - DNA, 27 bp, Artificial sequence
  SiRNA target sequence
gcatcaaagttattacttaacatttca

SEQ ID NO: 223845 - DNA, 27 bp, Artificial sequence
  SiRNA target sequence
catcaaagttattacttaacatttcat

SEQ ID NO: 223846 - DNA, 27 bp, Artificial sequence
  SiRNA target sequence
atcaaagttattacttaacatttcatt

SEQ ID NO: 223847 - DNA, 27 bp, Artificial sequence
  SiRNA target sequence
tcaaagttattacttaacatttcatta

SEQ ID NO: 223848 - DNA, 27 bp, Artificial sequence
  SiRNA target sequence
caaagttattacttaacatttcattaa

SEQ ID NO: 223849 - DNA, 27 bp, Artificial sequence
  SiRNA target sequence
aaagttattacttaacatttcattaac

SEQ ID NO: 223850 - DNA, 27 bp, Artificial sequence
  SiRNA target sequence
aagttattacttaacatttcattaact

SEQ ID NO: 223851 - DNA, 27 bp, Artificial sequence
  SiRNA target sequence
agttattacttaacatttcattaactg

SEQ ID NO: 223852 - DNA, 27 bp, Artificial sequence
  SiRNA target sequence
gttattacttaacatttcattaactgt

SEQ ID NO: 223853 - DNA, 27 bp, Artificial sequence
  SiRNA target sequence
ttattacttaacatttcattaactgtt

SEQ ID NO: 223854 - DNA, 27 bp, Artificial sequence
  SiRNA target sequence
tattacttaacatttcattaactgtta

SEQ ID NO: 223855 - DNA, 27 bp, Artificial sequence
  SiRNA target sequence
attacttaacatttcattaactgttat

SEQ ID NO: 223856 - DNA, 27 bp, Artificial sequence
  SiRNA target sequence
ttacttaacatttcattaactgttatg

SEQ ID NO: 223857 - DNA, 27 bp, Artificial sequence
  SiRNA target sequence
tacttaacatttcattaactgttatgt

SEQ ID NO: 223858 - DNA, 27 bp, Artificial sequence
  SiRNA target sequence
acttaacatttcattaactgttatgtt

SEQ ID NO: 223859 - DNA, 27 bp, Artificial sequence
  SiRNA target sequence
cttaacatttcattaactgttatgttc

SEQ ID NO: 223860 - DNA, 27 bp, Artificial sequence
  SiRNA target sequence
ttaacatttcattaactgttatgttct

SEQ ID NO: 223861 - DNA, 27 bp, Artificial sequence
  SiRNA target sequence
taacatttcattaactgttatgttcta

SEQ ID NO: 223862 - DNA, 27 bp, Artificial sequence
  SiRNA target sequence
aacatttcattaactgttatgttctat

SEQ ID NO: 223863 - DNA, 27 bp, Artificial sequence
  SiRNA target sequence
acatttcattaactgttatgttctatg

SEQ ID NO: 223864 - DNA, 27 bp, Artificial sequence
  SiRNA target sequence
catttcattaactgttatgttctatgg

SEQ ID NO: 223865 - DNA, 27 bp, Artificial sequence
  SiRNA target sequence
atttcattaactgttatgttctatggt

SEQ ID NO: 223866 - DNA, 27 bp, Artificial sequence
  SiRNA target sequence
tttcattaactgttatgttctatggta

SEQ ID NO: 223867 - DNA, 27 bp, Artificial sequence
  SiRNA target sequence
ttcattaactgttatgttctatggtat

SEQ ID NO: 223868 - DNA, 27 bp, Artificial sequence
  SiRNA target sequence
tcattaactgttatgttctatggtata

SEQ ID NO: 223869 - DNA, 27 bp, Artificial sequence
  SiRNA target sequence
cattaactgttatgttctatggtatat

SEQ ID NO: 223870 - DNA, 27 bp, Artificial sequence
  SiRNA target sequence
attaactgttatgttctatggtatatc

SEQ ID NO: 223871 - DNA, 27 bp, Artificial sequence
  SiRNA target sequence
ttaactgttatgttctatggtatatca

SEQ ID NO: 223872 - DNA, 27 bp, Artificial sequence
  SiRNA target sequence
taactgttatgttctatggtatatcaa

SEQ ID NO: 223873 - DNA, 27 bp, Artificial sequence
  SiRNA target sequence
aactgttatgttctatggtatatcaac

SEQ ID NO: 223874 - DNA, 27 bp, Artificial sequence
  SiRNA target sequence
actgttatgttctatggtatatcaact

SEQ ID NO: 223875 - DNA, 27 bp, Artificial sequence
  SiRNA target sequence
ctgttatgttctatggtatatcaacta

SEQ ID NO: 223876 - DNA, 27 bp, Artificial sequence
  SiRNA target sequence
tgttatgttctatggtatatcaactaa

SEQ ID NO: 223877 - DNA, 27 bp, Artificial sequence
  SiRNA target sequence
gttatgttctatggtatatcaactaat

SEQ ID NO: 223878 - DNA, 27 bp, Artificial sequence
  SiRNA target sequence
ttatgttctatggtatatcaactaatt

SEQ ID NO: 223879 - DNA, 27 bp, Artificial sequence
  SiRNA target sequence
tatgttctatggtatatcaactaattt

SEQ ID NO: 223880 - DNA, 27 bp, Artificial sequence
  SiRNA target sequence
atgttctatggtatatcaactaattta

SEQ ID NO: 223881 - DNA, 27 bp, Artificial sequence
  SiRNA target sequence
tgttctatggtatatcaactaatttaa

SEQ ID NO: 223882 - DNA, 27 bp, Artificial sequence
  SiRNA target sequence
gttctatggtatatcaactaatttaat

SEQ ID NO: 223883 - DNA, 27 bp, Artificial sequence
  SiRNA target sequence
ttctatggtatatcaactaatttaata

SEQ ID NO: 223884 - DNA, 27 bp, Artificial sequence
  SiRNA target sequence
tctatggtatatcaactaatttaatag

SEQ ID NO: 223885 - DNA, 27 bp, Artificial sequence
  SiRNA target sequence
ctatggtatatcaactaatttaataga

SEQ ID NO: 223886 - DNA, 27 bp, Artificial sequence
  SiRNA target sequence
tatggtatatcaactaatttaatagaa

SEQ ID NO: 223887 - DNA, 27 bp, Artificial sequence
  SiRNA target sequence
atggtatatcaactaatttaatagaat

SEQ ID NO: 223888 - DNA, 27 bp, Artificial sequence
  SiRNA target sequence
tggtatatcaactaatttaatagaatc

SEQ ID NO: 223889 - DNA, 27 bp, Artificial sequence
  SiRNA target sequence
ggtatatcaactaatttaatagaatca

SEQ ID NO: 223890 - DNA, 27 bp, Artificial sequence
  SiRNA target sequence
gtatatcaactaatttaatagaatcaa

SEQ ID NO: 223891 - DNA, 27 bp, Artificial sequence
  SiRNA target sequence
tatatcaactaatttaatagaatcaac

SEQ ID NO: 223892 - DNA, 27 bp, Artificial sequence
  SiRNA target sequence
atatcaactaatttaatagaatcaaca

SEQ ID NO: 223893 - DNA, 27 bp, Artificial sequence
  SiRNA target sequence
tatcaactaatttaatagaatcaacat

SEQ ID NO: 223894 - DNA, 27 bp, Artificial sequence
  SiRNA target sequence
atcaactaatttaatagaatcaacatt

SEQ ID NO: 223895 - DNA, 27 bp, Artificial sequence
  SiRNA target sequence
tcaactaatttaatagaatcaacattt

SEQ ID NO: 223896 - DNA, 27 bp, Artificial sequence
  SiRNA target sequence
caactaatttaatagaatcaacattta

SEQ ID NO: 223897 - DNA, 27 bp, Artificial sequence
  SiRNA target sequence
aactaatttaatagaatcaacatttaa

SEQ ID NO: 223898 - DNA, 27 bp, Artificial sequence
  SiRNA target sequence
actaatttaatagaatcaacatttaaa

SEQ ID NO: 223899 - DNA, 27 bp, Artificial sequence
  SiRNA target sequence
ctaatttaatagaatcaacatttaaaa

SEQ ID NO: 223900 - DNA, 27 bp, Artificial sequence
  SiRNA target sequence
taatttaatagaatcaacatttaaaag

SEQ ID NO: 223901 - DNA, 27 bp, Artificial sequence
  SiRNA target sequence
aatttaatagaatcaacatttaaaagt

SEQ ID NO: 223902 - DNA, 27 bp, Artificial sequence
  SiRNA target sequence
atttaatagaatcaacatttaaaagtg

SEQ ID NO: 223903 - DNA, 27 bp, Artificial sequence
  SiRNA target sequence
tttaatagaatcaacatttaaaagtgg

SEQ ID NO: 223904 - DNA, 27 bp, Artificial sequence
  SiRNA target sequence
ttaatagaatcaacatttaaaagtgga

SEQ ID NO: 223905 - DNA, 27 bp, Artificial sequence
  SiRNA target sequence
taatagaatcaacatttaaaagtggac

SEQ ID NO: 223906 - DNA, 27 bp, Artificial sequence
  SiRNA target sequence
aatagaatcaacatttaaaagtggact

SEQ ID NO: 223907 - DNA, 27 bp, Artificial sequence
  SiRNA target sequence
atagaatcaacatttaaaagtggactt

SEQ ID NO: 223908 - DNA, 27 bp, Artificial sequence
  SiRNA target sequence
tagaatcaacatttaaaagtggacttg

SEQ ID NO: 223909 - DNA, 27 bp, Artificial sequence
  SiRNA target sequence
agaatcaacatttaaaagtggacttgt

SEQ ID NO: 223910 - DNA, 27 bp, Artificial sequence
  SiRNA target sequence
gaatcaacatttaaaagtggacttgtg

SEQ ID NO: 223911 - DNA, 27 bp, Artificial sequence
  SiRNA target sequence
aatcaacatttaaaagtggacttgtga

SEQ ID NO: 223912 - DNA, 27 bp, Artificial sequence
  SiRNA target sequence
atcaacatttaaaagtggacttgtgaa

SEQ ID NO: 223913 - DNA, 27 bp, Artificial sequence
  SiRNA target sequence
tcaacatttaaaagtggacttgtgaaa

SEQ ID NO: 223914 - DNA, 27 bp, Artificial sequence
  SiRNA target sequence
caacatttaaaagtggacttgtgaaag

SEQ ID NO: 223915 - DNA, 27 bp, Artificial sequence
  SiRNA target sequence
aacatttaaaagtggacttgtgaaagg

SEQ ID NO: 223916 - DNA, 27 bp, Artificial sequence
  SiRNA target sequence
acatttaaaagtggacttgtgaaaggt

SEQ ID NO: 223917 - DNA, 27 bp, Artificial sequence
  SiRNA target sequence
catttaaaagtggacttgtgaaaggtg

SEQ ID NO: 223918 - DNA, 27 bp, Artificial sequence
  SiRNA target sequence
atttaaaagtggacttgtgaaaggtgc

SEQ ID NO: 223919 - DNA, 27 bp, Artificial sequence
  SiRNA target sequence
tttaaaagtggacttgtgaaaggtgca

SEQ ID NO: 223920 - DNA, 27 bp, Artificial sequence
  SiRNA target sequence
ttaaaagtggacttgtgaaaggtgcag

SEQ ID NO: 223921 - DNA, 27 bp, Artificial sequence
  SiRNA target sequence
taaaagtggacttgtgaaaggtgcaga

SEQ ID NO: 223922 - DNA, 27 bp, Artificial sequence
  SiRNA target sequence
aaaagtggacttgtgaaaggtgcagaa

SEQ ID NO: 223923 - DNA, 27 bp, Artificial sequence
  SiRNA target sequence
aaagtggacttgtgaaaggtgcagaag

SEQ ID NO: 223924 - DNA, 27 bp, Artificial sequence
  SiRNA target sequence
aagtggacttgtgaaaggtgcagaaga

SEQ ID NO: 223925 - DNA, 27 bp, Artificial sequence
  SiRNA target sequence
agtggacttgtgaaaggtgcagaagaa

SEQ ID NO: 223926 - DNA, 27 bp, Artificial sequence
  SiRNA target sequence
gtggacttgtgaaaggtgcagaagaat

SEQ ID NO: 223927 - DNA, 27 bp, Artificial sequence
  SiRNA target sequence
tggacttgtgaaaggtgcagaagaatt

SEQ ID NO: 223928 - DNA, 27 bp, Artificial sequence
  SiRNA target sequence
ggacttgtgaaaggtgcagaagaatta

SEQ ID NO: 223929 - DNA, 27 bp, Artificial sequence
  SiRNA target sequence
gacttgtgaaaggtgcagaagaattaa

SEQ ID NO: 223930 - DNA, 27 bp, Artificial sequence
  SiRNA target sequence
acttgtgaaaggtgcagaagaattaaa

SEQ ID NO: 223931 - DNA, 27 bp, Artificial sequence
  SiRNA target sequence
cttgtgaaaggtgcagaagaattaaac

SEQ ID NO: 223932 - DNA, 27 bp, Artificial sequence
  SiRNA target sequence
ttgtgaaaggtgcagaagaattaaacg

SEQ ID NO: 223933 - DNA, 27 bp, Artificial sequence
  SiRNA target sequence
tgtgaaaggtgcagaagaattaaacga

SEQ ID NO: 223934 - DNA, 27 bp, Artificial sequence
  SiRNA target sequence
gtgaaaggtgcagaagaattaaacgag

SEQ ID NO: 223935 - DNA, 27 bp, Artificial sequence
  SiRNA target sequence
tgaaaggtgcagaagaattaaacgaga

SEQ ID NO: 223936 - DNA, 27 bp, Artificial sequence
  SiRNA target sequence
gaaaggtgcagaagaattaaacgagaa

SEQ ID NO: 223937 - DNA, 27 bp, Artificial sequence
  SiRNA target sequence
aaaggtgcagaagaattaaacgagaat

SEQ ID NO: 223938 - DNA, 27 bp, Artificial sequence
  SiRNA target sequence
aaggtgcagaagaattaaacgagaata

SEQ ID NO: 223939 - DNA, 27 bp, Artificial sequence
  SiRNA target sequence
aggtgcagaagaattaaacgagaatac

SEQ ID NO: 223940 - DNA, 27 bp, Artificial sequence
  SiRNA target sequence
ggtgcagaagaattaaacgagaatact

SEQ ID NO: 223941 - DNA, 27 bp, Artificial sequence
  SiRNA target sequence
gtgcagaagaattaaacgagaatacta

SEQ ID NO: 223942 - DNA, 27 bp, Artificial sequence
  SiRNA target sequence
tgcagaagaattaaacgagaatactaa

SEQ ID NO: 223943 - DNA, 27 bp, Artificial sequence
  SiRNA target sequence
gcagaagaattaaacgagaatactaaa

SEQ ID NO: 223944 - DNA, 27 bp, Artificial sequence
  SiRNA target sequence
cagaagaattaaacgagaatactaaaa

SEQ ID NO: 223945 - DNA, 27 bp, Artificial sequence
  SiRNA target sequence
agaagaattaaacgagaatactaaaag

SEQ ID NO: 223946 - DNA, 27 bp, Artificial sequence
  SiRNA target sequence
gaagaattaaacgagaatactaaaagt

SEQ ID NO: 223947 - DNA, 27 bp, Artificial sequence
  SiRNA target sequence
aagaattaaacgagaatactaaaagtt

SEQ ID NO: 223948 - DNA, 27 bp, Artificial sequence
  SiRNA target sequence
agaattaaacgagaatactaaaagtta

SEQ ID NO: 223949 - DNA, 27 bp, Artificial sequence
  SiRNA target sequence
gaattaaacgagaatactaaaagttat

SEQ ID NO: 223950 - DNA, 27 bp, Artificial sequence
  SiRNA target sequence
aattaaacgagaatactaaaagttatt

SEQ ID NO: 223951 - DNA, 27 bp, Artificial sequence
  SiRNA target sequence
attaaacgagaatactaaaagttattc

SEQ ID NO: 223952 - DNA, 27 bp, Artificial sequence
  SiRNA target sequence
ttaaacgagaatactaaaagttattct

SEQ ID NO: 223953 - DNA, 27 bp, Artificial sequence
  SiRNA target sequence
taaacgagaatactaaaagttattcta

SEQ ID NO: 223954 - DNA, 27 bp, Artificial sequence
  SiRNA target sequence
aaacgagaatactaaaagttattctat

SEQ ID NO: 223955 - DNA, 27 bp, Artificial sequence
  SiRNA target sequence
aacgagaatactaaaagttattctatg

SEQ ID NO: 223956 - DNA, 27 bp, Artificial sequence
  SiRNA target sequence
acgagaatactaaaagttattctatgg

SEQ ID NO: 223957 - DNA, 27 bp, Artificial sequence
  SiRNA target sequence
cgagaatactaaaagttattctatggg

SEQ ID NO: 223958 - DNA, 27 bp, Artificial sequence
  SiRNA target sequence
gagaatactaaaagttattctatggga

SEQ ID NO: 223959 - DNA, 27 bp, Artificial sequence
  SiRNA target sequence
agaatactaaaagttattctatgggat

SEQ ID NO: 223960 - DNA, 27 bp, Artificial sequence
  SiRNA target sequence
gaatactaaaagttattctatgggata

SEQ ID NO: 223961 - DNA, 27 bp, Artificial sequence
  SiRNA target sequence
aatactaaaagttattctatgggatat

SEQ ID NO: 223962 - DNA, 27 bp, Artificial sequence
  SiRNA target sequence
atactaaaagttattctatgggatata

SEQ ID NO: 223963 - DNA, 27 bp, Artificial sequence
  SiRNA target sequence
tactaaaagttattctatgggatataa

SEQ ID NO: 223964 - DNA, 27 bp, Artificial sequence
  SiRNA target sequence
actaaaagttattctatgggatataat

SEQ ID NO: 223965 - DNA, 27 bp, Artificial sequence
  SiRNA target sequence
ctaaaagttattctatgggatataatt

SEQ ID NO: 223966 - DNA, 27 bp, Artificial sequence
  SiRNA target sequence
taaaagttattctatgggatataattc

SEQ ID NO: 223967 - DNA, 27 bp, Artificial sequence
  SiRNA target sequence
aaaagttattctatgggatataattca

SEQ ID NO: 223968 - DNA, 27 bp, Artificial sequence
  SiRNA target sequence
aaagttattctatgggatataattcat

SEQ ID NO: 223969 - DNA, 27 bp, Artificial sequence
  SiRNA target sequence
aagttattctatgggatataattcatt

SEQ ID NO: 223970 - DNA, 27 bp, Artificial sequence
  SiRNA target sequence
agttattctatgggatataattcattt

SEQ ID NO: 223971 - DNA, 27 bp, Artificial sequence
  SiRNA target sequence
gttattctatgggatataattcatttg

SEQ ID NO: 223972 - DNA, 27 bp, Artificial sequence
  SiRNA target sequence
ttattctatgggatataattcatttga

SEQ ID NO: 223973 - DNA, 27 bp, Artificial sequence
  SiRNA target sequence
tattctatgggatataattcatttgaa

SEQ ID NO: 223974 - DNA, 27 bp, Artificial sequence
  SiRNA target sequence
attctatgggatataattcatttgaac

SEQ ID NO: 223975 - DNA, 27 bp, Artificial sequence
  SiRNA target sequence
ttctatgggatataattcatttgaaca

SEQ ID NO: 223976 - DNA, 27 bp, Artificial sequence
  SiRNA target sequence
tctatgggatataattcatttgaacaa

SEQ ID NO: 223977 - DNA, 27 bp, Artificial sequence
  SiRNA target sequence
ctatgggatataattcatttgaacaaa

SEQ ID NO: 223978 - DNA, 27 bp, Artificial sequence
  SiRNA target sequence
tatgggatataattcatttgaacaaaa

SEQ ID NO: 223979 - DNA, 27 bp, Artificial sequence
  SiRNA target sequence
atgggatataattcatttgaacaaaag

SEQ ID NO: 223980 - DNA, 27 bp, Artificial sequence
  SiRNA target sequence
tgggatataattcatttgaacaaaaga

SEQ ID NO: 223981 - DNA, 27 bp, Artificial sequence
  SiRNA target sequence
gggatataattcatttgaacaaaagat

SEQ ID NO: 223982 - DNA, 27 bp, Artificial sequence
  SiRNA target sequence
ggatataattcatttgaacaaaagata

SEQ ID NO: 223983 - DNA, 27 bp, Artificial sequence
  SiRNA target sequence
gatataattcatttgaacaaaagatag

SEQ ID NO: 223984 - DNA, 27 bp, Artificial sequence
  SiRNA target sequence
atataattcatttgaacaaaagatagc

SEQ ID NO: 223985 - DNA, 27 bp, Artificial sequence
  SiRNA target sequence
tataattcatttgaacaaaagatagca

SEQ ID NO: 223986 - DNA, 27 bp, Artificial sequence
  SiRNA target sequence
ataattcatttgaacaaaagatagcat

SEQ ID NO: 223987 - DNA, 27 bp, Artificial sequence
  SiRNA target sequence
taattcatttgaacaaaagatagcatc

SEQ ID NO: 223988 - DNA, 27 bp, Artificial sequence
  SiRNA target sequence
aattcatttgaacaaaagatagcatca

SEQ ID NO: 223989 - DNA, 27 bp, Artificial sequence
  SiRNA target sequence
attcatttgaacaaaagatagcatcaa

SEQ ID NO: 223990 - DNA, 27 bp, Artificial sequence
  SiRNA target sequence
ttcatttgaacaaaagatagcatcaat

SEQ ID NO: 223991 - DNA, 27 bp, Artificial sequence
  SiRNA target sequence
tcatttgaacaaaagatagcatcaata

SEQ ID NO: 223992 - DNA, 27 bp, Artificial sequence
  SiRNA target sequence
catttgaacaaaagatagcatcaataa

SEQ ID NO: 223993 - DNA, 27 bp, Artificial sequence
  SiRNA target sequence
atttgaacaaaagatagcatcaataac

SEQ ID NO: 223994 - DNA, 27 bp, Artificial sequence
  SiRNA target sequence
tttgaacaaaagatagcatcaataact

SEQ ID NO: 223995 - DNA, 27 bp, Artificial sequence
  SiRNA target sequence
ttgaacaaaagatagcatcaataactg

SEQ ID NO: 223996 - DNA, 27 bp, Artificial sequence
  SiRNA target sequence
tgaacaaaagatagcatcaataactgt

SEQ ID NO: 223997 - DNA, 27 bp, Artificial sequence
  SiRNA target sequence
gaacaaaagatagcatcaataactgtt

SEQ ID NO: 223998 - DNA, 27 bp, Artificial sequence
  SiRNA target sequence
aacaaaagatagcatcaataactgtta

SEQ ID NO: 223999 - DNA, 27 bp, Artificial sequence
  SiRNA target sequence
acaaaagatagcatcaataactgttat

SEQ ID NO: 224000 - DNA, 27 bp, Artificial sequence
  SiRNA target sequence
caaaagatagcatcaataactgttatt

SEQ ID NO: 224001 - DNA, 27 bp, Artificial sequence
  SiRNA target sequence
aaaagatagcatcaataactgttatta

SEQ ID NO: 224002 - DNA, 27 bp, Artificial sequence
  SiRNA target sequence
aaagatagcatcaataactgttattat

SEQ ID NO: 224003 - DNA, 27 bp, Artificial sequence
  SiRNA target sequence
aagatagcatcaataactgttattatc

SEQ ID NO: 224004 - DNA, 27 bp, Artificial sequence
  SiRNA target sequence
agatagcatcaataactgttattatcc

SEQ ID NO: 224005 - DNA, 27 bp, Artificial sequence
  SiRNA target sequence
gatagcatcaataactgttattatcct

SEQ ID NO: 224006 - DNA, 27 bp, Artificial sequence
  SiRNA target sequence
atagcatcaataactgttattatcctg

SEQ ID NO: 224007 - DNA, 27 bp, Artificial sequence
  SiRNA target sequence
tagcatcaataactgttattatcctgc

SEQ ID NO: 224008 - DNA, 27 bp, Artificial sequence
  SiRNA target sequence
agcatcaataactgttattatcctgct

SEQ ID NO: 224009 - DNA, 27 bp, Artificial sequence
  SiRNA target sequence
gcatcaataactgttattatcctgctt

SEQ ID NO: 224010 - DNA, 27 bp, Artificial sequence
  SiRNA target sequence
catcaataactgttattatcctgcttt

SEQ ID NO: 224011 - DNA, 27 bp, Artificial sequence
  SiRNA target sequence
atcaataactgttattatcctgctttt

SEQ ID NO: 224012 - DNA, 27 bp, Artificial sequence
  SiRNA target sequence
tcaataactgttattatcctgctttta

SEQ ID NO: 224013 - DNA, 27 bp, Artificial sequence
  SiRNA target sequence
caataactgttattatcctgcttttat

SEQ ID NO: 224014 - DNA, 27 bp, Artificial sequence
  SiRNA target sequence
aataactgttattatcctgcttttatc

SEQ ID NO: 224015 - DNA, 27 bp, Artificial sequence
  SiRNA target sequence
ataactgttattatcctgcttttatca

SEQ ID NO: 224016 - DNA, 27 bp, Artificial sequence
  SiRNA target sequence
taactgttattatcctgcttttatcac

SEQ ID NO: 224017 - DNA, 27 bp, Artificial sequence
  SiRNA target sequence
aactgttattatcctgcttttatcacc

SEQ ID NO: 224018 - DNA, 27 bp, Artificial sequence
  SiRNA target sequence
actgttattatcctgcttttatcacca

SEQ ID NO: 224019 - DNA, 27 bp, Artificial sequence
  SiRNA target sequence
ctgttattatcctgcttttatcaccat

SEQ ID NO: 224020 - DNA, 27 bp, Artificial sequence
  SiRNA target sequence
tgttattatcctgcttttatcaccatt

SEQ ID NO: 224021 - DNA, 27 bp, Artificial sequence
  SiRNA target sequence
gttattatcctgcttttatcaccattt

SEQ ID NO: 224022 - DNA, 27 bp, Artificial sequence
  SiRNA target sequence
ttattatcctgcttttatcaccatttc

SEQ ID NO: 224023 - DNA, 27 bp, Artificial sequence
  SiRNA target sequence
tattatcctgcttttatcaccatttcc

SEQ ID NO: 224024 - DNA, 27 bp, Artificial sequence
  SiRNA target sequence
attatcctgcttttatcaccatttcca

SEQ ID NO: 224025 - DNA, 27 bp, Artificial sequence
  SiRNA target sequence
ttatcctgcttttatcaccatttccaa

SEQ ID NO: 224026 - DNA, 27 bp, Artificial sequence
  SiRNA target sequence
tatcctgcttttatcaccatttccaaa

SEQ ID NO: 224027 - DNA, 27 bp, Artificial sequence
  SiRNA target sequence
atcctgcttttatcaccatttccaaaa

SEQ ID NO: 224028 - DNA, 27 bp, Artificial sequence
  SiRNA target sequence
tcctgcttttatcaccatttccaaaat

SEQ ID NO: 224029 - DNA, 27 bp, Artificial sequence
  SiRNA target sequence
cctgcttttatcaccatttccaaaatt

SEQ ID NO: 224030 - DNA, 27 bp, Artificial sequence
  SiRNA target sequence
ctgcttttatcaccatttccaaaatta

SEQ ID NO: 224031 - DNA, 27 bp, Artificial sequence
  SiRNA target sequence
tgcttttatcaccatttccaaaattaa

SEQ ID NO: 224032 - DNA, 27 bp, Artificial sequence
  SiRNA target sequence
gcttttatcaccatttccaaaattaat

SEQ ID NO: 224033 - DNA, 27 bp, Artificial sequence
  SiRNA target sequence
cttttatcaccatttccaaaattaata

SEQ ID NO: 224034 - DNA, 27 bp, Artificial sequence
  SiRNA target sequence
ttttatcaccatttccaaaattaatac

SEQ ID NO: 224035 - DNA, 27 bp, Artificial sequence
  SiRNA target sequence
tttatcaccatttccaaaattaataca

SEQ ID NO: 224036 - DNA, 27 bp, Artificial sequence
  SiRNA target sequence
ttatcaccatttccaaaattaatacaa

SEQ ID NO: 224037 - DNA, 27 bp, Artificial sequence
  SiRNA target sequence
tatcaccatttccaaaattaatacaaa

SEQ ID NO: 224038 - DNA, 27 bp, Artificial sequence
  SiRNA target sequence
atcaccatttccaaaattaatacaaac

SEQ ID NO: 224039 - DNA, 27 bp, Artificial sequence
  SiRNA target sequence
tcaccatttccaaaattaatacaaacc

SEQ ID NO: 224040 - DNA, 27 bp, Artificial sequence
  SiRNA target sequence
caccatttccaaaattaatacaaacca

SEQ ID NO: 224041 - DNA, 27 bp, Artificial sequence
  SiRNA target sequence
accatttccaaaattaatacaaaccaa

SEQ ID NO: 224042 - DNA, 27 bp, Artificial sequence
  SiRNA target sequence
ccatttccaaaattaatacaaaccaaa

SEQ ID NO: 224043 - DNA, 27 bp, Artificial sequence
  SiRNA target sequence
catttccaaaattaatacaaaccaaag

SEQ ID NO: 224044 - DNA, 27 bp, Artificial sequence
  SiRNA target sequence
atttccaaaattaatacaaaccaaagg

SEQ ID NO: 224045 - DNA, 27 bp, Artificial sequence
  SiRNA target sequence
tttccaaaattaatacaaaccaaagga

SEQ ID NO: 224046 - DNA, 27 bp, Artificial sequence
  SiRNA target sequence
ttccaaaattaatacaaaccaaaggat

SEQ ID NO: 224047 - DNA, 27 bp, Artificial sequence
  SiRNA target sequence
tccaaaattaatacaaaccaaaggatg

SEQ ID NO: 224048 - DNA, 27 bp, Artificial sequence
  SiRNA target sequence
ccaaaattaatacaaaccaaaggatgg

SEQ ID NO: 224049 - DNA, 27 bp, Artificial sequence
  SiRNA target sequence
caaaattaatacaaaccaaaggatgga

SEQ ID NO: 224050 - DNA, 27 bp, Artificial sequence
  SiRNA target sequence
aaaattaatacaaaccaaaggatggat

SEQ ID NO: 224051 - DNA, 27 bp, Artificial sequence
  SiRNA target sequence
aaattaatacaaaccaaaggatggata

SEQ ID NO: 224052 - DNA, 27 bp, Artificial sequence
  SiRNA target sequence
aattaatacaaaccaaaggatggatat

SEQ ID NO: 224053 - DNA, 27 bp, Artificial sequence
  SiRNA target sequence
attaatacaaaccaaaggatggatatt

SEQ ID NO: 224054 - DNA, 27 bp, Artificial sequence
  SiRNA target sequence
ttaatacaaaccaaaggatggatattt

SEQ ID NO: 224055 - DNA, 27 bp, Artificial sequence
  SiRNA target sequence
taatacaaaccaaaggatggatatttg

SEQ ID NO: 224056 - DNA, 27 bp, Artificial sequence
  SiRNA target sequence
aatacaaaccaaaggatggatatttgt

SEQ ID NO: 224057 - DNA, 27 bp, Artificial sequence
  SiRNA target sequence
atacaaaccaaaggatggatatttgtt

SEQ ID NO: 224058 - DNA, 27 bp, Artificial sequence
  SiRNA target sequence
tacaaaccaaaggatggatatttgttg

SEQ ID NO: 224059 - DNA, 27 bp, Artificial sequence
  SiRNA target sequence
acaaaccaaaggatggatatttgttgc

SEQ ID NO: 224060 - DNA, 27 bp, Artificial sequence
  SiRNA target sequence
caaaccaaaggatggatatttgttgcc

SEQ ID NO: 224061 - DNA, 27 bp, Artificial sequence
  SiRNA target sequence
aaaccaaaggatggatatttgttgcca

SEQ ID NO: 224062 - DNA, 27 bp, Artificial sequence
  SiRNA target sequence
aaccaaaggatggatatttgttgccat

SEQ ID NO: 224063 - DNA, 27 bp, Artificial sequence
  SiRNA target sequence
accaaaggatggatatttgttgccata

SEQ ID NO: 224064 - DNA, 27 bp, Artificial sequence
  SiRNA target sequence
ccaaaggatggatatttgttgccatag

SEQ ID NO: 224065 - DNA, 27 bp, Artificial sequence
  SiRNA target sequence
caaaggatggatatttgttgccatagc

SEQ ID NO: 224066 - DNA, 27 bp, Artificial sequence
  SiRNA target sequence
aaaggatggatatttgttgccatagcg

SEQ ID NO: 224067 - DNA, 27 bp, Artificial sequence
  SiRNA target sequence
aaggatggatatttgttgccatagcgt

SEQ ID NO: 224068 - DNA, 27 bp, Artificial sequence
  SiRNA target sequence
aggatggatatttgttgccatagcgtg

SEQ ID NO: 224069 - DNA, 27 bp, Artificial sequence
  SiRNA target sequence
ggatggatatttgttgccatagcgtgc

SEQ ID NO: 224070 - DNA, 27 bp, Artificial sequence
  SiRNA target sequence
gatggatatttgttgccatagcgtgcc

SEQ ID NO: 224071 - DNA, 27 bp, Artificial sequence
  SiRNA target sequence
atggatatttgttgccatagcgtgccc

SEQ ID NO: 224072 - DNA, 27 bp, Artificial sequence
  SiRNA target sequence
tggatatttgttgccatagcgtgccca

SEQ ID NO: 224073 - DNA, 27 bp, Artificial sequence
  SiRNA target sequence
ggatatttgttgccatagcgtgcccac

SEQ ID NO: 224074 - DNA, 27 bp, Artificial sequence
  SiRNA target sequence
gatatttgttgccatagcgtgcccact

SEQ ID NO: 224075 - DNA, 27 bp, Artificial sequence
  SiRNA target sequence
atatttgttgccatagcgtgcccactt

SEQ ID NO: 224076 - DNA, 27 bp, Artificial sequence
  SiRNA target sequence
tatttgttgccatagcgtgcccactta

SEQ ID NO: 224077 - DNA, 27 bp, Artificial sequence
  SiRNA target sequence
atttgttgccatagcgtgcccacttat

SEQ ID NO: 224078 - DNA, 27 bp, Artificial sequence
  SiRNA target sequence
tttgttgccatagcgtgcccacttatt

SEQ ID NO: 224079 - DNA, 27 bp, Artificial sequence
  SiRNA target sequence
ttgttgccatagcgtgcccacttatta

SEQ ID NO: 224080 - DNA, 27 bp, Artificial sequence
  SiRNA target sequence
tgttgccatagcgtgcccacttattac

SEQ ID NO: 224081 - DNA, 27 bp, Artificial sequence
  SiRNA target sequence
gttgccatagcgtgcccacttattacc

SEQ ID NO: 224082 - DNA, 27 bp, Artificial sequence
  SiRNA target sequence
ttgccatagcgtgcccacttattaccc

SEQ ID NO: 224083 - DNA, 27 bp, Artificial sequence
  SiRNA target sequence
tgccatagcgtgcccacttattaccct

SEQ ID NO: 224084 - DNA, 27 bp, Artificial sequence
  SiRNA target sequence
gccatagcgtgcccacttattaccctt

SEQ ID NO: 224085 - DNA, 27 bp, Artificial sequence
  SiRNA target sequence
ccatagcgtgcccacttattacccttt

SEQ ID NO: 224086 - DNA, 27 bp, Artificial sequence
  SiRNA target sequence
catagcgtgcccacttattaccctttt

SEQ ID NO: 224087 - DNA, 27 bp, Artificial sequence
  SiRNA target sequence
atagcgtgcccacttattacccttttt

SEQ ID NO: 224088 - DNA, 27 bp, Artificial sequence
  SiRNA target sequence
tagcgtgcccacttattaccctttttg

SEQ ID NO: 224089 - DNA, 27 bp, Artificial sequence
  SiRNA target sequence
agcgtgcccacttattaccctttttgc

SEQ ID NO: 224090 - DNA, 27 bp, Artificial sequence
  SiRNA target sequence
gcgtgcccacttattaccctttttgct

SEQ ID NO: 224091 - DNA, 27 bp, Artificial sequence
  SiRNA target sequence
cgtgcccacttattaccctttttgctg

SEQ ID NO: 224092 - DNA, 27 bp, Artificial sequence
  SiRNA target sequence
gtgcccacttattaccctttttgctgt

SEQ ID NO: 224093 - DNA, 27 bp, Artificial sequence
  SiRNA target sequence
tgcccacttattaccctttttgctgta

SEQ ID NO: 224094 - DNA, 27 bp, Artificial sequence
  SiRNA target sequence
gcccacttattaccctttttgctgtag

SEQ ID NO: 224095 - DNA, 27 bp, Artificial sequence
  SiRNA target sequence
cccacttattaccctttttgctgtagt

SEQ ID NO: 224096 - DNA, 27 bp, Artificial sequence
  SiRNA target sequence
ccacttattaccctttttgctgtagtt

SEQ ID NO: 224097 - DNA, 27 bp, Artificial sequence
  SiRNA target sequence
cacttattaccctttttgctgtagttt

SEQ ID NO: 224098 - DNA, 27 bp, Artificial sequence
  SiRNA target sequence
acttattaccctttttgctgtagtttc

SEQ ID NO: 224099 - DNA, 27 bp, Artificial sequence
  SiRNA target sequence
cttattaccctttttgctgtagtttct

SEQ ID NO: 224100 - DNA, 27 bp, Artificial sequence
  SiRNA target sequence
ttattaccctttttgctgtagtttctg

SEQ ID NO: 224101 - DNA, 27 bp, Artificial sequence
  SiRNA target sequence
tattaccctttttgctgtagtttctgt

SEQ ID NO: 224102 - DNA, 27 bp, Artificial sequence
  SiRNA target sequence
attaccctttttgctgtagtttctgtg

SEQ ID NO: 224103 - DNA, 27 bp, Artificial sequence
  SiRNA target sequence
ttaccctttttgctgtagtttctgtgt

SEQ ID NO: 224104 - DNA, 27 bp, Artificial sequence
  SiRNA target sequence
taccctttttgctgtagtttctgtgtg

SEQ ID NO: 224105 - DNA, 27 bp, Artificial sequence
  SiRNA target sequence
accctttttgctgtagtttctgtgtgt

SEQ ID NO: 224106 - DNA, 27 bp, Artificial sequence
  SiRNA target sequence
ccctttttgctgtagtttctgtgtgtg

SEQ ID NO: 224107 - DNA, 27 bp, Artificial sequence
  SiRNA target sequence
cctttttgctgtagtttctgtgtgtgg

SEQ ID NO: 224108 - DNA, 27 bp, Artificial sequence
  SiRNA target sequence
ctttttgctgtagtttctgtgtgtggt

SEQ ID NO: 224109 - DNA, 27 bp, Artificial sequence
  SiRNA target sequence
tttttgctgtagtttctgtgtgtggtc

SEQ ID NO: 224110 - DNA, 27 bp, Artificial sequence
  SiRNA target sequence
ttttgctgtagtttctgtgtgtggtct

SEQ ID NO: 224111 - DNA, 27 bp, Artificial sequence
  SiRNA target sequence
tttgctgtagtttctgtgtgtggtctt

SEQ ID NO: 224112 - DNA, 27 bp, Artificial sequence
  SiRNA target sequence
ttgctgtagtttctgtgtgtggtcttg

SEQ ID NO: 224113 - DNA, 27 bp, Artificial sequence
  SiRNA target sequence
tgctgtagtttctgtgtgtggtcttgc

SEQ ID NO: 224114 - DNA, 27 bp, Artificial sequence
  SiRNA target sequence
gctgtagtttctgtgtgtggtcttgct

SEQ ID NO: 224115 - DNA, 27 bp, Artificial sequence
  SiRNA target sequence
ctgtagtttctgtgtgtggtcttgctt

SEQ ID NO: 224116 - DNA, 27 bp, Artificial sequence
  SiRNA target sequence
tgtagtttctgtgtgtggtcttgcttt

SEQ ID NO: 224117 - DNA, 27 bp, Artificial sequence
  SiRNA target sequence
gtagtttctgtgtgtggtcttgctttt

SEQ ID NO: 224118 - DNA, 27 bp, Artificial sequence
  SiRNA target sequence
tagtttctgtgtgtggtcttgcttttt

SEQ ID NO: 224119 - DNA, 27 bp, Artificial sequence
  SiRNA target sequence
agtttctgtgtgtggtcttgcttttta

SEQ ID NO: 224120 - DNA, 27 bp, Artificial sequence
  SiRNA target sequence
gtttctgtgtgtggtcttgctttttac

SEQ ID NO: 224121 - DNA, 27 bp, Artificial sequence
  SiRNA target sequence
tttctgtgtgtggtcttgctttttaca

SEQ ID NO: 224122 - DNA, 27 bp, Artificial sequence
  SiRNA target sequence
ttctgtgtgtggtcttgctttttacaa

SEQ ID NO: 224123 - DNA, 27 bp, Artificial sequence
  SiRNA target sequence
tctgtgtgtggtcttgctttttacaat

SEQ ID NO: 224124 - DNA, 27 bp, Artificial sequence
  SiRNA target sequence
ctgtgtgtggtcttgctttttacaatt

SEQ ID NO: 224125 - DNA, 27 bp, Artificial sequence
  SiRNA target sequence
tgtgtgtggtcttgctttttacaatta

SEQ ID NO: 224126 - DNA, 27 bp, Artificial sequence
  SiRNA target sequence
gtgtgtggtcttgctttttacaattat

SEQ ID NO: 224127 - DNA, 27 bp, Artificial sequence
  SiRNA target sequence
tgtgtggtcttgctttttacaattatc

SEQ ID NO: 224128 - DNA, 27 bp, Artificial sequence
  SiRNA target sequence
gtgtggtcttgctttttacaattatcc

SEQ ID NO: 224129 - DNA, 27 bp, Artificial sequence
  SiRNA target sequence
tgtggtcttgctttttacaattatccg

SEQ ID NO: 224130 - DNA, 27 bp, Artificial sequence
  SiRNA target sequence
gtggtcttgctttttacaattatccgg

SEQ ID NO: 224131 - DNA, 27 bp, Artificial sequence
  SiRNA target sequence
tggtcttgctttttacaattatccggc

SEQ ID NO: 224132 - DNA, 27 bp, Artificial sequence
  SiRNA target sequence
ggtcttgctttttacaattatccggca

SEQ ID NO: 224133 - DNA, 27 bp, Artificial sequence
  SiRNA target sequence
gtcttgctttttacaattatccggcaa

SEQ ID NO: 224134 - DNA, 27 bp, Artificial sequence
  SiRNA target sequence
tcttgctttttacaattatccggcaac

SEQ ID NO: 224135 - DNA, 27 bp, Artificial sequence
  SiRNA target sequence
cttgctttttacaattatccggcaaca

SEQ ID NO: 224136 - DNA, 27 bp, Artificial sequence
  SiRNA target sequence
ttgctttttacaattatccggcaacaa

SEQ ID NO: 224137 - DNA, 27 bp, Artificial sequence
  SiRNA target sequence
tgctttttacaattatccggcaacaaa

SEQ ID NO: 224138 - DNA, 27 bp, Artificial sequence
  SiRNA target sequence
gctttttacaattatccggcaacaaat

SEQ ID NO: 224139 - DNA, 27 bp, Artificial sequence
  SiRNA target sequence
ctttttacaattatccggcaacaaata

SEQ ID NO: 224140 - DNA, 27 bp, Artificial sequence
  SiRNA target sequence
tttttacaattatccggcaacaaataa

SEQ ID NO: 224141 - DNA, 27 bp, Artificial sequence
  SiRNA target sequence
ttttacaattatccggcaacaaataat

SEQ ID NO: 224142 - DNA, 27 bp, Artificial sequence
  SiRNA target sequence
tttacaattatccggcaacaaataatg

SEQ ID NO: 224143 - DNA, 27 bp, Artificial sequence
  SiRNA target sequence
ttacaattatccggcaacaaataatga

SEQ ID NO: 224144 - DNA, 27 bp, Artificial sequence
  SiRNA target sequence
tacaattatccggcaacaaataatgac

SEQ ID NO: 224145 - DNA, 27 bp, Artificial sequence
  SiRNA target sequence
acaattatccggcaacaaataatgaca

SEQ ID NO: 224146 - DNA, 27 bp, Artificial sequence
  SiRNA target sequence
caattatccggcaacaaataatgacac

SEQ ID NO: 224147 - DNA, 27 bp, Artificial sequence
  SiRNA target sequence
aattatccggcaacaaataatgacaca

SEQ ID NO: 224148 - DNA, 27 bp, Artificial sequence
  SiRNA target sequence
attatccggcaacaaataatgacacaa

SEQ ID NO: 224149 - DNA, 27 bp, Artificial sequence
  SiRNA target sequence
ttatccggcaacaaataatgacacaaa

SEQ ID NO: 224150 - DNA, 27 bp, Artificial sequence
  SiRNA target sequence
tatccggcaacaaataatgacacaaat

SEQ ID NO: 224151 - DNA, 27 bp, Artificial sequence
  SiRNA target sequence
atccggcaacaaataatgacacaaatt

SEQ ID NO: 224152 - DNA, 27 bp, Artificial sequence
  SiRNA target sequence
tccggcaacaaataatgacacaaattt

SEQ ID NO: 224153 - DNA, 27 bp, Artificial sequence
  SiRNA target sequence
ccggcaacaaataatgacacaaatttt

SEQ ID NO: 224154 - DNA, 27 bp, Artificial sequence
  SiRNA target sequence
cggcaacaaataatgacacaaattttt

SEQ ID NO: 224155 - DNA, 27 bp, Artificial sequence
  SiRNA target sequence
ggcaacaaataatgacacaaatttttt

SEQ ID NO: 224156 - DNA, 27 bp, Artificial sequence
  SiRNA target sequence
gcaacaaataatgacacaaattttttt

SEQ ID NO: 224157 - DNA, 27 bp, Artificial sequence
  SiRNA target sequence
caacaaataatgacacaaatttttttc

SEQ ID NO: 224158 - DNA, 27 bp, Artificial sequence
  SiRNA target sequence
aacaaataatgacacaaatttttttct

SEQ ID NO: 224159 - DNA, 27 bp, Artificial sequence
  SiRNA target sequence
acaaataatgacacaaatttttttcta

SEQ ID NO: 224160 - DNA, 27 bp, Artificial sequence
  SiRNA target sequence
caaataatgacacaaatttttttctaa

SEQ ID NO: 224161 - DNA, 27 bp, Artificial sequence
  SiRNA target sequence
aaataatgacacaaatttttttctaaa

SEQ ID NO: 224162 - DNA, 27 bp, Artificial sequence
  SiRNA target sequence
aataatgacacaaatttttttctaaat

SEQ ID NO: 224163 - DNA, 27 bp, Artificial sequence
  SiRNA target sequence
ataatgacacaaatttttttctaaatt

SEQ ID NO: 224164 - DNA, 27 bp, Artificial sequence
  SiRNA target sequence
taatgacacaaatttttttctaaattc

SEQ ID NO: 224165 - DNA, 27 bp, Artificial sequence
  SiRNA target sequence
aatgacacaaatttttttctaaattca

SEQ ID NO: 224166 - DNA, 27 bp, Artificial sequence
  SiRNA target sequence
atgacacaaatttttttctaaattcat

SEQ ID NO: 224167 - DNA, 27 bp, Artificial sequence
  SiRNA target sequence
tgacacaaatttttttctaaattcatt

SEQ ID NO: 224168 - DNA, 27 bp, Artificial sequence
  SiRNA target sequence
gacacaaatttttttctaaattcatta

SEQ ID NO: 224169 - DNA, 27 bp, Artificial sequence
  SiRNA target sequence
acacaaatttttttctaaattcattat

SEQ ID NO: 224170 - DNA, 27 bp, Artificial sequence
  SiRNA target sequence
cacaaatttttttctaaattcattatg

SEQ ID NO: 224171 - DNA, 27 bp, Artificial sequence
  SiRNA target sequence
acaaatttttttctaaattcattatgt

SEQ ID NO: 224172 - DNA, 27 bp, Artificial sequence
  SiRNA target sequence
caaatttttttctaaattcattatgtg

SEQ ID NO: 224173 - DNA, 27 bp, Artificial sequence
  SiRNA target sequence
aaatttttttctaaattcattatgtgc

SEQ ID NO: 224174 - DNA, 27 bp, Artificial sequence
  SiRNA target sequence
aatttttttctaaattcattatgtgct

SEQ ID NO: 224175 - DNA, 27 bp, Artificial sequence
  SiRNA target sequence
atttttttctaaattcattatgtgcta

SEQ ID NO: 224176 - DNA, 27 bp, Artificial sequence
  SiRNA target sequence
tttttttctaaattcattatgtgctac

SEQ ID NO: 224177 - DNA, 27 bp, Artificial sequence
  SiRNA target sequence
ttttttctaaattcattatgtgctacg

SEQ ID NO: 224178 - DNA, 27 bp, Artificial sequence
  SiRNA target sequence
tttttctaaattcattatgtgctacgc

SEQ ID NO: 224179 - DNA, 27 bp, Artificial sequence
  SiRNA target sequence
ttttctaaattcattatgtgctacgcc

SEQ ID NO: 224180 - DNA, 27 bp, Artificial sequence
  SiRNA target sequence
tttctaaattcattatgtgctacgccc

SEQ ID NO: 224181 - DNA, 27 bp, Artificial sequence
  SiRNA target sequence
ttctaaattcattatgtgctacgcccg

SEQ ID NO: 224182 - DNA, 27 bp, Artificial sequence
  SiRNA target sequence
tctaaattcattatgtgctacgcccgg

SEQ ID NO: 224183 - DNA, 27 bp, Artificial sequence
  SiRNA target sequence
ctaaattcattatgtgctacgcccggt

SEQ ID NO: 224184 - DNA, 27 bp, Artificial sequence
  SiRNA target sequence
taaattcattatgtgctacgcccggta

SEQ ID NO: 224185 - DNA, 27 bp, Artificial sequence
  SiRNA target sequence
aaattcattatgtgctacgcccggtaa

SEQ ID NO: 224186 - DNA, 27 bp, Artificial sequence
  SiRNA target sequence
aattcattatgtgctacgcccggtaaa

SEQ ID NO: 224187 - DNA, 27 bp, Artificial sequence
  SiRNA target sequence
attcattatgtgctacgcccggtaaat

SEQ ID NO: 224188 - DNA, 27 bp, Artificial sequence
  SiRNA target sequence
ttcattatgtgctacgcccggtaaatc

SEQ ID NO: 224189 - DNA, 27 bp, Artificial sequence
  SiRNA target sequence
tcattatgtgctacgcccggtaaatcg

SEQ ID NO: 224190 - DNA, 27 bp, Artificial sequence
  SiRNA target sequence
cattatgtgctacgcccggtaaatcgt

SEQ ID NO: 224191 - DNA, 27 bp, Artificial sequence
  SiRNA target sequence
attatgtgctacgcccggtaaatcgtt

SEQ ID NO: 224192 - DNA, 27 bp, Artificial sequence
  SiRNA target sequence
ttatgtgctacgcccggtaaatcgttt

SEQ ID NO: 224193 - DNA, 27 bp, Artificial sequence
  SiRNA target sequence
tatgtgctacgcccggtaaatcgttta

SEQ ID NO: 224194 - DNA, 27 bp, Artificial sequence
  SiRNA target sequence
atgtgctacgcccggtaaatcgtttat

SEQ ID NO: 224195 - DNA, 27 bp, Artificial sequence
  SiRNA target sequence
tgtgctacgcccggtaaatcgtttata

SEQ ID NO: 224196 - DNA, 27 bp, Artificial sequence
  SiRNA target sequence
gtgctacgcccggtaaatcgtttataa

SEQ ID NO: 224197 - DNA, 27 bp, Artificial sequence
  SiRNA target sequence
tgctacgcccggtaaatcgtttataaa

SEQ ID NO: 224198 - DNA, 27 bp, Artificial sequence
  SiRNA target sequence
gctacgcccggtaaatcgtttataaaa

SEQ ID NO: 224199 - DNA, 27 bp, Artificial sequence
  SiRNA target sequence
ctacgcccggtaaatcgtttataaaat

SEQ ID NO: 224200 - DNA, 27 bp, Artificial sequence
  SiRNA target sequence
tacgcccggtaaatcgtttataaaatt

SEQ ID NO: 224201 - DNA, 27 bp, Artificial sequence
  SiRNA target sequence
acgcccggtaaatcgtttataaaatta

SEQ ID NO: 224202 - DNA, 27 bp, Artificial sequence
  SiRNA target sequence
cgcccggtaaatcgtttataaaattag

SEQ ID NO: 224203 - DNA, 27 bp, Artificial sequence
  SiRNA target sequence
gcccggtaaatcgtttataaaattaga

SEQ ID NO: 224204 - DNA, 27 bp, Artificial sequence
  SiRNA target sequence
cccggtaaatcgtttataaaattagaa

SEQ ID NO: 224205 - DNA, 27 bp, Artificial sequence
  SiRNA target sequence
ccggtaaatcgtttataaaattagaaa

SEQ ID NO: 224206 - DNA, 27 bp, Artificial sequence
  SiRNA target sequence
cggtaaatcgtttataaaattagaaaa

SEQ ID NO: 224207 - DNA, 27 bp, Artificial sequence
  SiRNA target sequence
ggtaaatcgtttataaaattagaaaat

SEQ ID NO: 224208 - DNA, 27 bp, Artificial sequence
  SiRNA target sequence
gtaaatcgtttataaaattagaaaatg

SEQ ID NO: 224209 - DNA, 27 bp, Artificial sequence
  SiRNA target sequence
taaatcgtttataaaattagaaaatgt

SEQ ID NO: 224210 - DNA, 27 bp, Artificial sequence
  SiRNA target sequence
aaatcgtttataaaattagaaaatgtt

SEQ ID NO: 224211 - DNA, 27 bp, Artificial sequence
  SiRNA target sequence
aatcgtttataaaattagaaaatgttt

SEQ ID NO: 224212 - DNA, 27 bp, Artificial sequence
  SiRNA target sequence
atcgtttataaaattagaaaatgtttt

SEQ ID NO: 224213 - DNA, 27 bp, Artificial sequence
  SiRNA target sequence
tcgtttataaaattagaaaatgtttta

SEQ ID NO: 224214 - DNA, 27 bp, Artificial sequence
  SiRNA target sequence
cgtttataaaattagaaaatgttttag

SEQ ID NO: 224215 - DNA, 27 bp, Artificial sequence
  SiRNA target sequence
gtttataaaattagaaaatgttttagg

SEQ ID NO: 224216 - DNA, 27 bp, Artificial sequence
  SiRNA target sequence
tttataaaattagaaaatgttttagga

SEQ ID NO: 224217 - DNA, 27 bp, Artificial sequence
  SiRNA target sequence
ttataaaattagaaaatgttttaggat

SEQ ID NO: 224218 - DNA, 27 bp, Artificial sequence
  SiRNA target sequence
tataaaattagaaaatgttttaggatg

SEQ ID NO: 224219 - DNA, 27 bp, Artificial sequence
  SiRNA target sequence
ataaaattagaaaatgttttaggatgt

SEQ ID NO: 224220 - DNA, 27 bp, Artificial sequence
  SiRNA target sequence
taaaattagaaaatgttttaggatgtg

SEQ ID NO: 224221 - DNA, 27 bp, Artificial sequence
  SiRNA target sequence
aaaattagaaaatgttttaggatgtgt

SEQ ID NO: 224222 - DNA, 27 bp, Artificial sequence
  SiRNA target sequence
aaattagaaaatgttttaggatgtgta

SEQ ID NO: 224223 - DNA, 27 bp, Artificial sequence
  SiRNA target sequence
aattagaaaatgttttaggatgtgtag

SEQ ID NO: 224224 - DNA, 27 bp, Artificial sequence
  SiRNA target sequence
attagaaaatgttttaggatgtgtagc

SEQ ID NO: 224225 - DNA, 27 bp, Artificial sequence
  SiRNA target sequence
ttagaaaatgttttaggatgtgtagct

SEQ ID NO: 224226 - DNA, 27 bp, Artificial sequence
  SiRNA target sequence
tagaaaatgttttaggatgtgtagctg

SEQ ID NO: 224227 - DNA, 27 bp, Artificial sequence
  SiRNA target sequence
agaaaatgttttaggatgtgtagctgt

SEQ ID NO: 224228 - DNA, 27 bp, Artificial sequence
  SiRNA target sequence
gaaaatgttttaggatgtgtagctgta

SEQ ID NO: 224229 - DNA, 27 bp, Artificial sequence
  SiRNA target sequence
aaaatgttttaggatgtgtagctgtag

SEQ ID NO: 224230 - DNA, 27 bp, Artificial sequence
  SiRNA target sequence
aaatgttttaggatgtgtagctgtagc

SEQ ID NO: 224231 - DNA, 27 bp, Artificial sequence
  SiRNA target sequence
aatgttttaggatgtgtagctgtagct

SEQ ID NO: 224232 - DNA, 27 bp, Artificial sequence
  SiRNA target sequence
atgttttaggatgtgtagctgtagctc

SEQ ID NO: 224233 - DNA, 27 bp, Artificial sequence
  SiRNA target sequence
tgttttaggatgtgtagctgtagctct

SEQ ID NO: 224234 - DNA, 27 bp, Artificial sequence
  SiRNA target sequence
gttttaggatgtgtagctgtagctctt

SEQ ID NO: 224235 - DNA, 27 bp, Artificial sequence
  SiRNA target sequence
ttttaggatgtgtagctgtagctctta

SEQ ID NO: 224236 - DNA, 27 bp, Artificial sequence
  SiRNA target sequence
tttaggatgtgtagctgtagctcttat

SEQ ID NO: 224237 - DNA, 27 bp, Artificial sequence
  SiRNA target sequence
ttaggatgtgtagctgtagctcttatg

SEQ ID NO: 224238 - DNA, 27 bp, Artificial sequence
  SiRNA target sequence
taggatgtgtagctgtagctcttatga

SEQ ID NO: 224239 - DNA, 27 bp, Artificial sequence
  SiRNA target sequence
aggatgtgtagctgtagctcttatgaa

SEQ ID NO: 224240 - DNA, 27 bp, Artificial sequence
  SiRNA target sequence
ggatgtgtagctgtagctcttatgaaa

SEQ ID NO: 224241 - DNA, 27 bp, Artificial sequence
  SiRNA target sequence
gatgtgtagctgtagctcttatgaaag

SEQ ID NO: 224242 - DNA, 27 bp, Artificial sequence
  SiRNA target sequence
atgtgtagctgtagctcttatgaaagt

SEQ ID NO: 224243 - DNA, 27 bp, Artificial sequence
  SiRNA target sequence
tgtgtagctgtagctcttatgaaagta

SEQ ID NO: 224244 - DNA, 27 bp, Artificial sequence
  SiRNA target sequence
gtgtagctgtagctcttatgaaagtag

SEQ ID NO: 224245 - DNA, 27 bp, Artificial sequence
  SiRNA target sequence
tgtagctgtagctcttatgaaagtagc

SEQ ID NO: 224246 - DNA, 27 bp, Artificial sequence
  SiRNA target sequence
gtagctgtagctcttatgaaagtagca

SEQ ID NO: 224247 - DNA, 27 bp, Artificial sequence
  SiRNA target sequence
tagctgtagctcttatgaaagtagcaa

SEQ ID NO: 224248 - DNA, 27 bp, Artificial sequence
  SiRNA target sequence
agctgtagctcttatgaaagtagcaaa

SEQ ID NO: 224249 - DNA, 27 bp, Artificial sequence
  SiRNA target sequence
gctgtagctcttatgaaagtagcaaaa

SEQ ID NO: 224250 - DNA, 27 bp, Artificial sequence
  SiRNA target sequence
ctgtagctcttatgaaagtagcaaaat

SEQ ID NO: 224251 - DNA, 27 bp, Artificial sequence
  SiRNA target sequence
tgtagctcttatgaaagtagcaaaata

SEQ ID NO: 224252 - DNA, 27 bp, Artificial sequence
  SiRNA target sequence
gtagctcttatgaaagtagcaaaatat

SEQ ID NO: 224253 - DNA, 27 bp, Artificial sequence
  SiRNA target sequence
tagctcttatgaaagtagcaaaatatg

SEQ ID NO: 224254 - DNA, 27 bp, Artificial sequence
  SiRNA target sequence
agctcttatgaaagtagcaaaatatgg

SEQ ID NO: 224255 - DNA, 27 bp, Artificial sequence
  SiRNA target sequence
gctcttatgaaagtagcaaaatatggc

SEQ ID NO: 224256 - DNA, 27 bp, Artificial sequence
  SiRNA target sequence
ctcttatgaaagtagcaaaatatggct

SEQ ID NO: 224257 - DNA, 27 bp, Artificial sequence
  SiRNA target sequence
tcttatgaaagtagcaaaatatggctc

SEQ ID NO: 224258 - DNA, 27 bp, Artificial sequence
  SiRNA target sequence
cttatgaaagtagcaaaatatggctct

SEQ ID NO: 224259 - DNA, 27 bp, Artificial sequence
  SiRNA target sequence
ttatgaaagtagcaaaatatggctctt

SEQ ID NO: 224260 - DNA, 27 bp, Artificial sequence
  SiRNA target sequence
tatgaaagtagcaaaatatggctcttt

SEQ ID NO: 224261 - DNA, 27 bp, Artificial sequence
  SiRNA target sequence
atgaaagtagcaaaatatggctctttt

SEQ ID NO: 224262 - DNA, 27 bp, Artificial sequence
  SiRNA target sequence
tgaaagtagcaaaatatggctcttttg

SEQ ID NO: 224263 - DNA, 27 bp, Artificial sequence
  SiRNA target sequence
gaaagtagcaaaatatggctcttttga

SEQ ID NO: 224264 - DNA, 27 bp, Artificial sequence
  SiRNA target sequence
aaagtagcaaaatatggctcttttgat

SEQ ID NO: 224265 - DNA, 27 bp, Artificial sequence
  SiRNA target sequence
aagtagcaaaatatggctcttttgata

SEQ ID NO: 224266 - DNA, 27 bp, Artificial sequence
  SiRNA target sequence
agtagcaaaatatggctcttttgatat

SEQ ID NO: 224267 - DNA, 27 bp, Artificial sequence
  SiRNA target sequence
gtagcaaaatatggctcttttgatatt

SEQ ID NO: 224268 - DNA, 27 bp, Artificial sequence
  SiRNA target sequence
tagcaaaatatggctcttttgatattt

SEQ ID NO: 224269 - DNA, 27 bp, Artificial sequence
  SiRNA target sequence
agcaaaatatggctcttttgatatttc

SEQ ID NO: 224270 - DNA, 27 bp, Artificial sequence
  SiRNA target sequence
gcaaaatatggctcttttgatatttcc

SEQ ID NO: 224271 - DNA, 27 bp, Artificial sequence
  SiRNA target sequence
caaaatatggctcttttgatatttcca

SEQ ID NO: 224272 - DNA, 27 bp, Artificial sequence
  SiRNA target sequence
aaaatatggctcttttgatatttccaa

SEQ ID NO: 224273 - DNA, 27 bp, Artificial sequence
  SiRNA target sequence
aaatatggctcttttgatatttccaaa

SEQ ID NO: 224274 - DNA, 27 bp, Artificial sequence
  SiRNA target sequence
aatatggctcttttgatatttccaaag

SEQ ID NO: 224275 - DNA, 27 bp, Artificial sequence
  SiRNA target sequence
atatggctcttttgatatttccaaaga

SEQ ID NO: 224276 - DNA, 27 bp, Artificial sequence
  SiRNA target sequence
tatggctcttttgatatttccaaagaa

SEQ ID NO: 224277 - DNA, 27 bp, Artificial sequence
  SiRNA target sequence
atggctcttttgatatttccaaagaag

SEQ ID NO: 224278 - DNA, 27 bp, Artificial sequence
  SiRNA target sequence
tggctcttttgatatttccaaagaagc

SEQ ID NO: 224279 - DNA, 27 bp, Artificial sequence
  SiRNA target sequence
ggctcttttgatatttccaaagaagcc

SEQ ID NO: 224280 - DNA, 27 bp, Artificial sequence
  SiRNA target sequence
gctcttttgatatttccaaagaagcca

SEQ ID NO: 224281 - DNA, 27 bp, Artificial sequence
  SiRNA target sequence
ctcttttgatatttccaaagaagccat

SEQ ID NO: 224282 - DNA, 27 bp, Artificial sequence
  SiRNA target sequence
tcttttgatatttccaaagaagccatt

SEQ ID NO: 224283 - DNA, 27 bp, Artificial sequence
  SiRNA target sequence
cttttgatatttccaaagaagccattt

SEQ ID NO: 224284 - DNA, 27 bp, Artificial sequence
  SiRNA target sequence
ttttgatatttccaaagaagccatttc

SEQ ID NO: 224285 - DNA, 27 bp, Artificial sequence
  SiRNA target sequence
tttgatatttccaaagaagccatttca

SEQ ID NO: 224286 - DNA, 27 bp, Artificial sequence
  SiRNA target sequence
ttgatatttccaaagaagccatttcaa

SEQ ID NO: 224287 - DNA, 27 bp, Artificial sequence
  SiRNA target sequence
tgatatttccaaagaagccatttcaat

SEQ ID NO: 224288 - DNA, 27 bp, Artificial sequence
  SiRNA target sequence
gatatttccaaagaagccatttcaatg

SEQ ID NO: 224289 - DNA, 27 bp, Artificial sequence
  SiRNA target sequence
atatttccaaagaagccatttcaatgc

SEQ ID NO: 224290 - DNA, 27 bp, Artificial sequence
  SiRNA target sequence
tatttccaaagaagccatttcaatgca

SEQ ID NO: 224291 - DNA, 27 bp, Artificial sequence
  SiRNA target sequence
atttccaaagaagccatttcaatgcag

SEQ ID NO: 224292 - DNA, 27 bp, Artificial sequence
  SiRNA target sequence
tttccaaagaagccatttcaatgcaga

SEQ ID NO: 224293 - DNA, 27 bp, Artificial sequence
  SiRNA target sequence
ttccaaagaagccatttcaatgcagat

SEQ ID NO: 224294 - DNA, 27 bp, Artificial sequence
  SiRNA target sequence
tccaaagaagccatttcaatgcagatt

SEQ ID NO: 224295 - DNA, 27 bp, Artificial sequence
  SiRNA target sequence
ccaaagaagccatttcaatgcagattg

SEQ ID NO: 224296 - DNA, 27 bp, Artificial sequence
  SiRNA target sequence
caaagaagccatttcaatgcagattga

SEQ ID NO: 224297 - DNA, 27 bp, Artificial sequence
  SiRNA target sequence
aaagaagccatttcaatgcagattgat

SEQ ID NO: 224298 - DNA, 27 bp, Artificial sequence
  SiRNA target sequence
aagaagccatttcaatgcagattgatt

SEQ ID NO: 224299 - DNA, 27 bp, Artificial sequence
  SiRNA target sequence
agaagccatttcaatgcagattgattc

SEQ ID NO: 224300 - DNA, 27 bp, Artificial sequence
  SiRNA target sequence
gaagccatttcaatgcagattgattcg

SEQ ID NO: 224301 - DNA, 27 bp, Artificial sequence
  SiRNA target sequence
aagccatttcaatgcagattgattcgt

SEQ ID NO: 224302 - DNA, 27 bp, Artificial sequence
  SiRNA target sequence
agccatttcaatgcagattgattcgtc

SEQ ID NO: 224303 - DNA, 27 bp, Artificial sequence
  SiRNA target sequence
gccatttcaatgcagattgattcgtca

SEQ ID NO: 224304 - DNA, 27 bp, Artificial sequence
  SiRNA target sequence
ccatttcaatgcagattgattcgtcat

SEQ ID NO: 224305 - DNA, 27 bp, Artificial sequence
  SiRNA target sequence
catttcaatgcagattgattcgtcatt

SEQ ID NO: 224306 - DNA, 27 bp, Artificial sequence
  SiRNA target sequence
atttcaatgcagattgattcgtcattg

SEQ ID NO: 224307 - DNA, 27 bp, Artificial sequence
  SiRNA target sequence
tttcaatgcagattgattcgtcattgc

SEQ ID NO: 224308 - DNA, 27 bp, Artificial sequence
  SiRNA target sequence
ttcaatgcagattgattcgtcattgcg

SEQ ID NO: 224309 - DNA, 27 bp, Artificial sequence
  SiRNA target sequence
tcaatgcagattgattcgtcattgcgt

SEQ ID NO: 224310 - DNA, 27 bp, Artificial sequence
  SiRNA target sequence
caatgcagattgattcgtcattgcgtg

SEQ ID NO: 224311 - DNA, 27 bp, Artificial sequence
  SiRNA target sequence
aatgcagattgattcgtcattgcgtgc

SEQ ID NO: 224312 - DNA, 27 bp, Artificial sequence
  SiRNA target sequence
atgcagattgattcgtcattgcgtgca

SEQ ID NO: 224313 - DNA, 27 bp, Artificial sequence
  SiRNA target sequence
tgcagattgattcgtcattgcgtgcac

SEQ ID NO: 224314 - DNA, 27 bp, Artificial sequence
  SiRNA target sequence
gcagattgattcgtcattgcgtgcacg

SEQ ID NO: 224315 - DNA, 27 bp, Artificial sequence
  SiRNA target sequence
cagattgattcgtcattgcgtgcacgt

SEQ ID NO: 224316 - DNA, 27 bp, Artificial sequence
  SiRNA target sequence
agattgattcgtcattgcgtgcacgtt

SEQ ID NO: 224317 - DNA, 27 bp, Artificial sequence
  SiRNA target sequence
gattgattcgtcattgcgtgcacgtta

SEQ ID NO: 224318 - DNA, 27 bp, Artificial sequence
  SiRNA target sequence
attgattcgtcattgcgtgcacgttat

SEQ ID NO: 224319 - DNA, 27 bp, Artificial sequence
  SiRNA target sequence
ttgattcgtcattgcgtgcacgttata

SEQ ID NO: 224320 - DNA, 27 bp, Artificial sequence
  SiRNA target sequence
tgattcgtcattgcgtgcacgttataa

SEQ ID NO: 224321 - DNA, 27 bp, Artificial sequence
  SiRNA target sequence
gattcgtcattgcgtgcacgttataaa

SEQ ID NO: 224322 - DNA, 27 bp, Artificial sequence
  SiRNA target sequence
attcgtcattgcgtgcacgttataaag

SEQ ID NO: 224323 - DNA, 27 bp, Artificial sequence
  SiRNA target sequence
ttcgtcattgcgtgcacgttataaagg

SEQ ID NO: 224324 - DNA, 27 bp, Artificial sequence
  SiRNA target sequence
tcgtcattgcgtgcacgttataaagga

SEQ ID NO: 224325 - DNA, 27 bp, Artificial sequence
  SiRNA target sequence
cgtcattgcgtgcacgttataaaggaa

SEQ ID NO: 224326 - DNA, 27 bp, Artificial sequence
  SiRNA target sequence
gtcattgcgtgcacgttataaaggaat

SEQ ID NO: 224327 - DNA, 27 bp, Artificial sequence
  SiRNA target sequence
tcattgcgtgcacgttataaaggaatt

SEQ ID NO: 224328 - DNA, 27 bp, Artificial sequence
  SiRNA target sequence
cattgcgtgcacgttataaaggaattt

SEQ ID NO: 224329 - DNA, 27 bp, Artificial sequence
  SiRNA target sequence
attgcgtgcacgttataaaggaatttt

SEQ ID NO: 224330 - DNA, 27 bp, Artificial sequence
  SiRNA target sequence
ttgcgtgcacgttataaaggaattttt

SEQ ID NO: 224331 - DNA, 27 bp, Artificial sequence
  SiRNA target sequence
tgcgtgcacgttataaaggaatttttg

SEQ ID NO: 224332 - DNA, 27 bp, Artificial sequence
  SiRNA target sequence
gcgtgcacgttataaaggaatttttga

SEQ ID NO: 224333 - DNA, 27 bp, Artificial sequence
  SiRNA target sequence
cgtgcacgttataaaggaatttttgac

SEQ ID NO: 224334 - DNA, 27 bp, Artificial sequence
  SiRNA target sequence
gtgcacgttataaaggaatttttgacg

SEQ ID NO: 224335 - DNA, 27 bp, Artificial sequence
  SiRNA target sequence
tgcacgttataaaggaatttttgacgg

SEQ ID NO: 224336 - DNA, 27 bp, Artificial sequence
  SiRNA target sequence
gcacgttataaaggaatttttgacggt

SEQ ID NO: 224337 - DNA, 27 bp, Artificial sequence
  SiRNA target sequence
cacgttataaaggaatttttgacggtg

SEQ ID NO: 224338 - DNA, 27 bp, Artificial sequence
  SiRNA target sequence
acgttataaaggaatttttgacggtgt

SEQ ID NO: 224339 - DNA, 27 bp, Artificial sequence
  SiRNA target sequence
cgttataaaggaatttttgacggtgtt

SEQ ID NO: 224340 - DNA, 27 bp, Artificial sequence
  SiRNA target sequence
gttataaaggaatttttgacggtgttt

SEQ ID NO: 224341 - DNA, 27 bp, Artificial sequence
  SiRNA target sequence
ttataaaggaatttttgacggtgtttt

SEQ ID NO: 224342 - DNA, 27 bp, Artificial sequence
  SiRNA target sequence
tataaaggaatttttgacggtgttttt

SEQ ID NO: 224343 - DNA, 27 bp, Artificial sequence
  SiRNA target sequence
ataaaggaatttttgacggtgtttttg

SEQ ID NO: 224344 - DNA, 27 bp, Artificial sequence
  SiRNA target sequence
taaaggaatttttgacggtgtttttgg

SEQ ID NO: 224345 - DNA, 27 bp, Artificial sequence
  SiRNA target sequence
aaaggaatttttgacggtgtttttggt

SEQ ID NO: 224346 - DNA, 27 bp, Artificial sequence
  SiRNA target sequence
aaggaatttttgacggtgtttttggta

SEQ ID NO: 224347 - DNA, 27 bp, Artificial sequence
  SiRNA target sequence
aggaatttttgacggtgtttttggtaa

SEQ ID NO: 224348 - DNA, 27 bp, Artificial sequence
  SiRNA target sequence
ggaatttttgacggtgtttttggtaag

SEQ ID NO: 224349 - DNA, 27 bp, Artificial sequence
  SiRNA target sequence
gaatttttgacggtgtttttggtaagt

SEQ ID NO: 224350 - DNA, 27 bp, Artificial sequence
  SiRNA target sequence
aatttttgacggtgtttttggtaagtt

SEQ ID NO: 224351 - DNA, 27 bp, Artificial sequence
  SiRNA target sequence
atttttgacggtgtttttggtaagtta

SEQ ID NO: 224352 - DNA, 27 bp, Artificial sequence
  SiRNA target sequence
tttttgacggtgtttttggtaagttag

SEQ ID NO: 224353 - DNA, 27 bp, Artificial sequence
  SiRNA target sequence
ttttgacggtgtttttggtaagttagg

SEQ ID NO: 224354 - DNA, 27 bp, Artificial sequence
  SiRNA target sequence
tttgacggtgtttttggtaagttagga

SEQ ID NO: 224355 - DNA, 27 bp, Artificial sequence
  SiRNA target sequence
ttgacggtgtttttggtaagttaggaa

SEQ ID NO: 224356 - DNA, 27 bp, Artificial sequence
  SiRNA target sequence
tgacggtgtttttggtaagttaggaaa

SEQ ID NO: 224357 - DNA, 27 bp, Artificial sequence
  SiRNA target sequence
gacggtgtttttggtaagttaggaaaa

SEQ ID NO: 224358 - DNA, 27 bp, Artificial sequence
  SiRNA target sequence
acggtgtttttggtaagttaggaaaat

SEQ ID NO: 224359 - DNA, 27 bp, Artificial sequence
  SiRNA target sequence
cggtgtttttggtaagttaggaaaatc

SEQ ID NO: 224360 - DNA, 27 bp, Artificial sequence
  SiRNA target sequence
ggtgtttttggtaagttaggaaaatct

SEQ ID NO: 224361 - DNA, 27 bp, Artificial sequence
  SiRNA target sequence
gtgtttttggtaagttaggaaaatctc

SEQ ID NO: 224362 - DNA, 27 bp, Artificial sequence
  SiRNA target sequence
tgtttttggtaagttaggaaaatctct

SEQ ID NO: 224363 - DNA, 27 bp, Artificial sequence
  SiRNA target sequence
gtttttggtaagttaggaaaatctctt

SEQ ID NO: 224364 - DNA, 27 bp, Artificial sequence
  SiRNA target sequence
tttttggtaagttaggaaaatctcttg

SEQ ID NO: 224365 - DNA, 27 bp, Artificial sequence
  SiRNA target sequence
ttttggtaagttaggaaaatctcttgg

SEQ ID NO: 224366 - DNA, 27 bp, Artificial sequence
  SiRNA target sequence
tttggtaagttaggaaaatctcttgga

SEQ ID NO: 224367 - DNA, 27 bp, Artificial sequence
  SiRNA target sequence
ttggtaagttaggaaaatctcttggat

SEQ ID NO: 224368 - DNA, 27 bp, Artificial sequence
  SiRNA target sequence
tggtaagttaggaaaatctcttggatc

SEQ ID NO: 224369 - DNA, 27 bp, Artificial sequence
  SiRNA target sequence
ggtaagttaggaaaatctcttggatcg

SEQ ID NO: 224370 - DNA, 27 bp, Artificial sequence
  SiRNA target sequence
gtaagttaggaaaatctcttggatcgt

SEQ ID NO: 224371 - DNA, 27 bp, Artificial sequence
  SiRNA target sequence
taagttaggaaaatctcttggatcgtt

SEQ ID NO: 224372 - DNA, 27 bp, Artificial sequence
  SiRNA target sequence
aagttaggaaaatctcttggatcgtta

SEQ ID NO: 224373 - DNA, 27 bp, Artificial sequence
  SiRNA target sequence
agttaggaaaatctcttggatcgttat

SEQ ID NO: 224374 - DNA, 27 bp, Artificial sequence
  SiRNA target sequence
gttaggaaaatctcttggatcgttatt

SEQ ID NO: 224375 - DNA, 27 bp, Artificial sequence
  SiRNA target sequence
ttaggaaaatctcttggatcgttattt

SEQ ID NO: 224376 - DNA, 27 bp, Artificial sequence
  SiRNA target sequence
taggaaaatctcttggatcgttatttg

SEQ ID NO: 224377 - DNA, 27 bp, Artificial sequence
  SiRNA target sequence
aggaaaatctcttggatcgttatttgt

SEQ ID NO: 224378 - DNA, 27 bp, Artificial sequence
  SiRNA target sequence
ggaaaatctcttggatcgttatttgtg

SEQ ID NO: 224379 - DNA, 27 bp, Artificial sequence
  SiRNA target sequence
gaaaatctcttggatcgttatttgtgt

SEQ ID NO: 224380 - DNA, 27 bp, Artificial sequence
  SiRNA target sequence
aaaatctcttggatcgttatttgtgtg

SEQ ID NO: 224381 - DNA, 27 bp, Artificial sequence
  SiRNA target sequence
aaatctcttggatcgttatttgtgtgg

SEQ ID NO: 224382 - DNA, 27 bp, Artificial sequence
  SiRNA target sequence
aatctcttggatcgttatttgtgtgga

SEQ ID NO: 224383 - DNA, 27 bp, Artificial sequence
  SiRNA target sequence
atctcttggatcgttatttgtgtggat

SEQ ID NO: 224384 - DNA, 27 bp, Artificial sequence
  SiRNA target sequence
tctcttggatcgttatttgtgtggatt

SEQ ID NO: 224385 - DNA, 27 bp, Artificial sequence
  SiRNA target sequence
ctcttggatcgttatttgtgtggatta

SEQ ID NO: 224386 - DNA, 27 bp, Artificial sequence
  SiRNA target sequence
tcttggatcgttatttgtgtggattat

SEQ ID NO: 224387 - DNA, 27 bp, Artificial sequence
  SiRNA target sequence
cttggatcgttatttgtgtggattatg

SEQ ID NO: 224388 - DNA, 27 bp, Artificial sequence
  SiRNA target sequence
ttggatcgttatttgtgtggattatgg

SEQ ID NO: 224389 - DNA, 27 bp, Artificial sequence
  SiRNA target sequence
tggatcgttatttgtgtggattatggg

SEQ ID NO: 224390 - DNA, 27 bp, Artificial sequence
  SiRNA target sequence
ggatcgttatttgtgtggattatggga

SEQ ID NO: 224391 - DNA, 27 bp, Artificial sequence
  SiRNA target sequence
gatcgttatttgtgtggattatgggat

SEQ ID NO: 224392 - DNA, 27 bp, Artificial sequence
  SiRNA target sequence
atcgttatttgtgtggattatgggata

SEQ ID NO: 224393 - DNA, 27 bp, Artificial sequence
  SiRNA target sequence
tcgttatttgtgtggattatgggatat

SEQ ID NO: 224394 - DNA, 27 bp, Artificial sequence
  SiRNA target sequence
cgttatttgtgtggattatgggatatg

SEQ ID NO: 224395 - DNA, 27 bp, Artificial sequence
  SiRNA target sequence
gttatttgtgtggattatgggatatgc

SEQ ID NO: 224396 - DNA, 27 bp, Artificial sequence
  SiRNA target sequence
ttatttgtgtggattatgggatatgca

SEQ ID NO: 224397 - DNA, 27 bp, Artificial sequence
  SiRNA target sequence
tatttgtgtggattatgggatatgcat

SEQ ID NO: 224398 - DNA, 27 bp, Artificial sequence
  SiRNA target sequence
atttgtgtggattatgggatatgcatt

SEQ ID NO: 224399 - DNA, 27 bp, Artificial sequence
  SiRNA target sequence
tttgtgtggattatgggatatgcattt

SEQ ID NO: 224400 - DNA, 27 bp, Artificial sequence
  SiRNA target sequence
ttgtgtggattatgggatatgcatttc

SEQ ID NO: 224401 - DNA, 27 bp, Artificial sequence
  SiRNA target sequence
tgtgtggattatgggatatgcatttca

SEQ ID NO: 224402 - DNA, 27 bp, Artificial sequence
  SiRNA target sequence
gtgtggattatgggatatgcatttcaa

SEQ ID NO: 224403 - DNA, 27 bp, Artificial sequence
  SiRNA target sequence
tgtggattatgggatatgcatttcaaa

SEQ ID NO: 224404 - DNA, 27 bp, Artificial sequence
  SiRNA target sequence
gtggattatgggatatgcatttcaaac

SEQ ID NO: 224405 - DNA, 27 bp, Artificial sequence
  SiRNA target sequence
tggattatgggatatgcatttcaaaca

SEQ ID NO: 224406 - DNA, 27 bp, Artificial sequence
  SiRNA target sequence
ggattatgggatatgcatttcaaacaa

SEQ ID NO: 224407 - DNA, 27 bp, Artificial sequence
  SiRNA target sequence
gattatgggatatgcatttcaaacaag

SEQ ID NO: 224408 - DNA, 27 bp, Artificial sequence
  SiRNA target sequence
attatgggatatgcatttcaaacaaga

SEQ ID NO: 224409 - DNA, 27 bp, Artificial sequence
  SiRNA target sequence
ttatgggatatgcatttcaaacaagag

SEQ ID NO: 224410 - DNA, 27 bp, Artificial sequence
  SiRNA target sequence
tatgggatatgcatttcaaacaagaga

SEQ ID NO: 224411 - DNA, 27 bp, Artificial sequence
  SiRNA target sequence
atgggatatgcatttcaaacaagagat

SEQ ID NO: 224412 - DNA, 27 bp, Artificial sequence
  SiRNA target sequence
tgggatatgcatttcaaacaagagatt

SEQ ID NO: 224413 - DNA, 27 bp, Artificial sequence
  SiRNA target sequence
gggatatgcatttcaaacaagagattt

SEQ ID NO: 224414 - DNA, 27 bp, Artificial sequence
  SiRNA target sequence
ggatatgcatttcaaacaagagatttt

SEQ ID NO: 224415 - DNA, 27 bp, Artificial sequence
  SiRNA target sequence
gatatgcatttcaaacaagagatttta

SEQ ID NO: 224416 - DNA, 27 bp, Artificial sequence
  SiRNA target sequence
atatgcatttcaaacaagagattttag

SEQ ID NO: 224417 - DNA, 27 bp, Artificial sequence
  SiRNA target sequence
tatgcatttcaaacaagagattttaga

SEQ ID NO: 224418 - DNA, 27 bp, Artificial sequence
  SiRNA target sequence
atgcatttcaaacaagagattttagaa

SEQ ID NO: 224419 - DNA, 27 bp, Artificial sequence
  SiRNA target sequence
tgcatttcaaacaagagattttagaaa

SEQ ID NO: 224420 - DNA, 27 bp, Artificial sequence
  SiRNA target sequence
gcatttcaaacaagagattttagaaaa

SEQ ID NO: 224421 - DNA, 27 bp, Artificial sequence
  SiRNA target sequence
catttcaaacaagagattttagaaaat

SEQ ID NO: 224422 - DNA, 27 bp, Artificial sequence
  SiRNA target sequence
atttcaaacaagagattttagaaaatt

SEQ ID NO: 224423 - DNA, 27 bp, Artificial sequence
  SiRNA target sequence
tttcaaacaagagattttagaaaatta

SEQ ID NO: 224424 - DNA, 27 bp, Artificial sequence
  SiRNA target sequence
ttcaaacaagagattttagaaaattag

SEQ ID NO: 224425 - DNA, 27 bp, Artificial sequence
  SiRNA target sequence
tcaaacaagagattttagaaaattagc

SEQ ID NO: 224426 - DNA, 27 bp, Artificial sequence
  SiRNA target sequence
caaacaagagattttagaaaattagct

SEQ ID NO: 224427 - DNA, 27 bp, Artificial sequence
  SiRNA target sequence
aaacaagagattttagaaaattagctc

SEQ ID NO: 224428 - DNA, 27 bp, Artificial sequence
  SiRNA target sequence
aacaagagattttagaaaattagctcc

SEQ ID NO: 224429 - DNA, 27 bp, Artificial sequence
  SiRNA target sequence
acaagagattttagaaaattagctccc

SEQ ID NO: 224430 - DNA, 27 bp, Artificial sequence
  SiRNA target sequence
caagagattttagaaaattagctccct

SEQ ID NO: 224431 - DNA, 27 bp, Artificial sequence
  SiRNA target sequence
aagagattttagaaaattagctccctt

SEQ ID NO: 224432 - DNA, 27 bp, Artificial sequence
  SiRNA target sequence
agagattttagaaaattagctccctta

SEQ ID NO: 224433 - DNA, 27 bp, Artificial sequence
  SiRNA target sequence
gagattttagaaaattagctcccttat

SEQ ID NO: 224434 - DNA, 27 bp, Artificial sequence
  SiRNA target sequence
agattttagaaaattagctcccttatg

SEQ ID NO: 224435 - DNA, 27 bp, Artificial sequence
  SiRNA target sequence
gattttagaaaattagctcccttatgt

SEQ ID NO: 224436 - DNA, 27 bp, Artificial sequence
  SiRNA target sequence
attttagaaaattagctcccttatgta

SEQ ID NO: 224437 - DNA, 27 bp, Artificial sequence
  SiRNA target sequence
ttttagaaaattagctcccttatgtat

SEQ ID NO: 224438 - DNA, 27 bp, Artificial sequence
  SiRNA target sequence
tttagaaaattagctcccttatgtatc

SEQ ID NO: 224439 - DNA, 27 bp, Artificial sequence
  SiRNA target sequence
ttagaaaattagctcccttatgtatca

SEQ ID NO: 224440 - DNA, 27 bp, Artificial sequence
  SiRNA target sequence
tagaaaattagctcccttatgtatcag

SEQ ID NO: 224441 - DNA, 27 bp, Artificial sequence
  SiRNA target sequence
agaaaattagctcccttatgtatcagc

SEQ ID NO: 224442 - DNA, 27 bp, Artificial sequence
  SiRNA target sequence
gaaaattagctcccttatgtatcagcg

SEQ ID NO: 224443 - DNA, 27 bp, Artificial sequence
  SiRNA target sequence
aaaattagctcccttatgtatcagcgt

SEQ ID NO: 224444 - DNA, 27 bp, Artificial sequence
  SiRNA target sequence
aaattagctcccttatgtatcagcgta

SEQ ID NO: 224445 - DNA, 27 bp, Artificial sequence
  SiRNA target sequence
aattagctcccttatgtatcagcgtaa

SEQ ID NO: 224446 - DNA, 27 bp, Artificial sequence
  SiRNA target sequence
attagctcccttatgtatcagcgtaat

SEQ ID NO: 224447 - DNA, 27 bp, Artificial sequence
  SiRNA target sequence
ttagctcccttatgtatcagcgtaatt

SEQ ID NO: 224448 - DNA, 27 bp, Artificial sequence
  SiRNA target sequence
tagctcccttatgtatcagcgtaattg

SEQ ID NO: 224449 - DNA, 27 bp, Artificial sequence
  SiRNA target sequence
agctcccttatgtatcagcgtaattgt

SEQ ID NO: 224450 - DNA, 27 bp, Artificial sequence
  SiRNA target sequence
gctcccttatgtatcagcgtaattgtc

SEQ ID NO: 224451 - DNA, 27 bp, Artificial sequence
  SiRNA target sequence
ctcccttatgtatcagcgtaattgtct

SEQ ID NO: 224452 - DNA, 27 bp, Artificial sequence
  SiRNA target sequence
tcccttatgtatcagcgtaattgtctt

SEQ ID NO: 224453 - DNA, 27 bp, Artificial sequence
  SiRNA target sequence
cccttatgtatcagcgtaattgtcttt

SEQ ID NO: 224454 - DNA, 27 bp, Artificial sequence
  SiRNA target sequence
ccttatgtatcagcgtaattgtctttt

SEQ ID NO: 224455 - DNA, 27 bp, Artificial sequence
  SiRNA target sequence
cttatgtatcagcgtaattgtcttttt

SEQ ID NO: 224456 - DNA, 27 bp, Artificial sequence
  SiRNA target sequence
ttatgtatcagcgtaattgtctttttt

SEQ ID NO: 224457 - DNA, 27 bp, Artificial sequence
  SiRNA target sequence
tatgtatcagcgtaattgtcttttttg

SEQ ID NO: 224458 - DNA, 27 bp, Artificial sequence
  SiRNA target sequence
atgtatcagcgtaattgtcttttttgt

SEQ ID NO: 224459 - DNA, 27 bp, Artificial sequence
  SiRNA target sequence
tgtatcagcgtaattgtcttttttgtt

SEQ ID NO: 224460 - DNA, 27 bp, Artificial sequence
  SiRNA target sequence
gtatcagcgtaattgtcttttttgtta

SEQ ID NO: 224461 - DNA, 27 bp, Artificial sequence
  SiRNA target sequence
tatcagcgtaattgtcttttttgttat

SEQ ID NO: 224462 - DNA, 27 bp, Artificial sequence
  SiRNA target sequence
atcagcgtaattgtcttttttgttatt

SEQ ID NO: 224463 - DNA, 27 bp, Artificial sequence
  SiRNA target sequence
tcagcgtaattgtcttttttgttatta

SEQ ID NO: 224464 - DNA, 27 bp, Artificial sequence
  SiRNA target sequence
cagcgtaattgtcttttttgttattat

SEQ ID NO: 224465 - DNA, 27 bp, Artificial sequence
  SiRNA target sequence
agcgtaattgtcttttttgttattatt

SEQ ID NO: 224466 - DNA, 27 bp, Artificial sequence
  SiRNA target sequence
gcgtaattgtcttttttgttattattt

SEQ ID NO: 224467 - DNA, 27 bp, Artificial sequence
  SiRNA target sequence
cgtaattgtcttttttgttattatttg

SEQ ID NO: 224468 - DNA, 27 bp, Artificial sequence
  SiRNA target sequence
gtaattgtcttttttgttattatttgg

SEQ ID NO: 224469 - DNA, 27 bp, Artificial sequence
  SiRNA target sequence
taattgtcttttttgttattatttgga

SEQ ID NO: 224470 - DNA, 27 bp, Artificial sequence
  SiRNA target sequence
aattgtcttttttgttattatttggat

SEQ ID NO: 224471 - DNA, 27 bp, Artificial sequence
  SiRNA target sequence
attgtcttttttgttattatttggatt

SEQ ID NO: 224472 - DNA, 27 bp, Artificial sequence
  SiRNA target sequence
ttgtcttttttgttattatttggattt

SEQ ID NO: 224473 - DNA, 27 bp, Artificial sequence
  SiRNA target sequence
tgtcttttttgttattatttggattta

SEQ ID NO: 224474 - DNA, 27 bp, Artificial sequence
  SiRNA target sequence
gtcttttttgttattatttggatttat

SEQ ID NO: 224475 - DNA, 27 bp, Artificial sequence
  SiRNA target sequence
tcttttttgttattatttggatttatt

SEQ ID NO: 224476 - DNA, 27 bp, Artificial sequence
  SiRNA target sequence
cttttttgttattatttggatttattc

SEQ ID NO: 224477 - DNA, 27 bp, Artificial sequence
  SiRNA target sequence
ttttttgttattatttggatttattca

SEQ ID NO: 224478 - DNA, 27 bp, Artificial sequence
  SiRNA target sequence
tttttgttattatttggatttattcag

SEQ ID NO: 224479 - DNA, 27 bp, Artificial sequence
  SiRNA target sequence
ttttgttattatttggatttattcagt

SEQ ID NO: 224480 - DNA, 27 bp, Artificial sequence
  SiRNA target sequence
tttgttattatttggatttattcagtt

SEQ ID NO: 224481 - DNA, 27 bp, Artificial sequence
  SiRNA target sequence
ttgttattatttggatttattcagtta

SEQ ID NO: 224482 - DNA, 27 bp, Artificial sequence
  SiRNA target sequence
tgttattatttggatttattcagttat

SEQ ID NO: 224483 - DNA, 27 bp, Artificial sequence
  SiRNA target sequence
gttattatttggatttattcagttatt

SEQ ID NO: 224484 - DNA, 27 bp, Artificial sequence
  SiRNA target sequence
ttattatttggatttattcagttattt

SEQ ID NO: 224485 - DNA, 27 bp, Artificial sequence
  SiRNA target sequence
tattatttggatttattcagttattta

SEQ ID NO: 224486 - DNA, 27 bp, Artificial sequence
  SiRNA target sequence
attatttggatttattcagttatttat

SEQ ID NO: 224487 - DNA, 27 bp, Artificial sequence
  SiRNA target sequence
ttatttggatttattcagttatttatt

SEQ ID NO: 224488 - DNA, 27 bp, Artificial sequence
  SiRNA target sequence
tatttggatttattcagttatttattt

SEQ ID NO: 224489 - DNA, 27 bp, Artificial sequence
  SiRNA target sequence
atttggatttattcagttatttattta

SEQ ID NO: 224490 - DNA, 27 bp, Artificial sequence
  SiRNA target sequence
tttggatttattcagttatttatttaa

SEQ ID NO: 224491 - DNA, 27 bp, Artificial sequence
  SiRNA target sequence
ttggatttattcagttatttatttaaa

SEQ ID NO: 224492 - DNA, 27 bp, Artificial sequence
  SiRNA target sequence
tggatttattcagttatttatttaaat

SEQ ID NO: 224493 - DNA, 27 bp, Artificial sequence
  SiRNA target sequence
ggatttattcagttatttatttaaata

SEQ ID NO: 224494 - DNA, 27 bp, Artificial sequence
  SiRNA target sequence
gatttattcagttatttatttaaataa

SEQ ID NO: 224495 - DNA, 27 bp, Artificial sequence
  SiRNA target sequence
atttattcagttatttatttaaataag

SEQ ID NO: 224496 - DNA, 27 bp, Artificial sequence
  SiRNA target sequence
tttattcagttatttatttaaataaga

SEQ ID NO: 224497 - DNA, 27 bp, Artificial sequence
  SiRNA target sequence
ttattcagttatttatttaaataagaa

SEQ ID NO: 224498 - DNA, 27 bp, Artificial sequence
  SiRNA target sequence
tattcagttatttatttaaataagaaa

SEQ ID NO: 224499 - DNA, 27 bp, Artificial sequence
  SiRNA target sequence
attcagttatttatttaaataagaaat

SEQ ID NO: 224500 - DNA, 27 bp, Artificial sequence
  SiRNA target sequence
ttcagttatttatttaaataagaaata

SEQ ID NO: 224501 - DNA, 27 bp, Artificial sequence
  SiRNA target sequence
tcagttatttatttaaataagaaatac

SEQ ID NO: 224502 - DNA, 27 bp, Artificial sequence
  SiRNA target sequence
cagttatttatttaaataagaaataca

SEQ ID NO: 224503 - DNA, 27 bp, Artificial sequence
  SiRNA target sequence
agttatttatttaaataagaaatacaa

SEQ ID NO: 224504 - DNA, 27 bp, Artificial sequence
  SiRNA target sequence
gttatttatttaaataagaaatacaaa

SEQ ID NO: 224505 - DNA, 27 bp, Artificial sequence
  SiRNA target sequence
ttatttatttaaataagaaatacaaag

SEQ ID NO: 224506 - DNA, 27 bp, Artificial sequence
  SiRNA target sequence
tatttatttaaataagaaatacaaaga

SEQ ID NO: 224507 - DNA, 27 bp, Artificial sequence
  SiRNA target sequence
atttatttaaataagaaatacaaagaa

SEQ ID NO: 224508 - DNA, 27 bp, Artificial sequence
  SiRNA target sequence
tttatttaaataagaaatacaaagaat

SEQ ID NO: 224509 - DNA, 27 bp, Artificial sequence
  SiRNA target sequence
ttatttaaataagaaatacaaagaatc

SEQ ID NO: 224510 - DNA, 27 bp, Artificial sequence
  SiRNA target sequence
tatttaaataagaaatacaaagaatca

SEQ ID NO: 224511 - DNA, 27 bp, Artificial sequence
  SiRNA target sequence
atttaaataagaaatacaaagaatcag

SEQ ID NO: 224512 - DNA, 27 bp, Artificial sequence
  SiRNA target sequence
tttaaataagaaatacaaagaatcagt

SEQ ID NO: 224513 - DNA, 27 bp, Artificial sequence
  SiRNA target sequence
ttaaataagaaatacaaagaatcagtt

SEQ ID NO: 224514 - DNA, 27 bp, Artificial sequence
  SiRNA target sequence
taaataagaaatacaaagaatcagttg

SEQ ID NO: 224515 - DNA, 27 bp, Artificial sequence
  SiRNA target sequence
aaataagaaatacaaagaatcagttgt

SEQ ID NO: 224516 - DNA, 27 bp, Artificial sequence
  SiRNA target sequence
aataagaaatacaaagaatcagttgtt

SEQ ID NO: 224517 - DNA, 27 bp, Artificial sequence
  SiRNA target sequence
ataagaaatacaaagaatcagttgtta

SEQ ID NO: 224518 - DNA, 27 bp, Artificial sequence
  SiRNA target sequence
taagaaatacaaagaatcagttgttag

SEQ ID NO: 224519 - DNA, 27 bp, Artificial sequence
  SiRNA target sequence
aagaaatacaaagaatcagttgttagt

SEQ ID NO: 224520 - DNA, 27 bp, Artificial sequence
  SiRNA target sequence
agaaatacaaagaatcagttgttagta

SEQ ID NO: 224521 - DNA, 27 bp, Artificial sequence
  SiRNA target sequence
gaaatacaaagaatcagttgttagtaa

SEQ ID NO: 224522 - DNA, 27 bp, Artificial sequence
  SiRNA target sequence
aaatacaaagaatcagttgttagtaat

SEQ ID NO: 224523 - DNA, 27 bp, Artificial sequence
  SiRNA target sequence
aatacaaagaatcagttgttagtaatt

SEQ ID NO: 224524 - DNA, 27 bp, Artificial sequence
  SiRNA target sequence
atacaaagaatcagttgttagtaattt

SEQ ID NO: 224525 - DNA, 27 bp, Artificial sequence
  SiRNA target sequence
tacaaagaatcagttgttagtaattta

SEQ ID NO: 224526 - DNA, 27 bp, Artificial sequence
  SiRNA target sequence
acaaagaatcagttgttagtaatttac

SEQ ID NO: 224527 - DNA, 27 bp, Artificial sequence
  SiRNA target sequence
caaagaatcagttgttagtaatttacc

SEQ ID NO: 224528 - DNA, 27 bp, Artificial sequence
  SiRNA target sequence
aaagaatcagttgttagtaatttaccc

SEQ ID NO: 224529 - DNA, 27 bp, Artificial sequence
  SiRNA target sequence
aagaatcagttgttagtaatttaccca

SEQ ID NO: 224530 - DNA, 27 bp, Artificial sequence
  SiRNA target sequence
agaatcagttgttagtaatttacccat

SEQ ID NO: 224531 - DNA, 27 bp, Artificial sequence
  SiRNA target sequence
gaatcagttgttagtaatttacccatc

SEQ ID NO: 224532 - DNA, 27 bp, Artificial sequence
  SiRNA target sequence
aatcagttgttagtaatttacccatcg

SEQ ID NO: 224533 - DNA, 27 bp, Artificial sequence
  SiRNA target sequence
atcagttgttagtaatttacccatcga

SEQ ID NO: 224534 - DNA, 27 bp, Artificial sequence
  SiRNA target sequence
tcagttgttagtaatttacccatcgat

SEQ ID NO: 224535 - DNA, 27 bp, Artificial sequence
  SiRNA target sequence
cagttgttagtaatttacccatcgatg

SEQ ID NO: 224536 - DNA, 27 bp, Artificial sequence
  SiRNA target sequence
agttgttagtaatttacccatcgatgt

SEQ ID NO: 224537 - DNA, 27 bp, Artificial sequence
  SiRNA target sequence
gttgttagtaatttacccatcgatgtt

SEQ ID NO: 224538 - DNA, 27 bp, Artificial sequence
  SiRNA target sequence
ttgttagtaatttacccatcgatgttg

SEQ ID NO: 224539 - DNA, 27 bp, Artificial sequence
  SiRNA target sequence
tgttagtaatttacccatcgatgttga

SEQ ID NO: 224540 - DNA, 27 bp, Artificial sequence
  SiRNA target sequence
gttagtaatttacccatcgatgttgat

SEQ ID NO: 224541 - DNA, 27 bp, Artificial sequence
  SiRNA target sequence
ttagtaatttacccatcgatgttgatt

SEQ ID NO: 224542 - DNA, 27 bp, Artificial sequence
  SiRNA target sequence
tagtaatttacccatcgatgttgattt

SEQ ID NO: 224543 - DNA, 27 bp, Artificial sequence
  SiRNA target sequence
agtaatttacccatcgatgttgatttg

SEQ ID NO: 224544 - DNA, 27 bp, Artificial sequence
  SiRNA target sequence
gtaatttacccatcgatgttgatttgt

SEQ ID NO: 224545 - DNA, 27 bp, Artificial sequence
  SiRNA target sequence
taatttacccatcgatgttgatttgtt

SEQ ID NO: 224546 - DNA, 27 bp, Artificial sequence
  SiRNA target sequence
aatttacccatcgatgttgatttgttt

SEQ ID NO: 224547 - DNA, 27 bp, Artificial sequence
  SiRNA target sequence
atttacccatcgatgttgatttgtttg

SEQ ID NO: 224548 - DNA, 27 bp, Artificial sequence
  SiRNA target sequence
tttacccatcgatgttgatttgtttgc

SEQ ID NO: 224549 - DNA, 27 bp, Artificial sequence
  SiRNA target sequence
ttacccatcgatgttgatttgtttgca

SEQ ID NO: 224550 - DNA, 27 bp, Artificial sequence
  SiRNA target sequence
tacccatcgatgttgatttgtttgcat

SEQ ID NO: 224551 - DNA, 27 bp, Artificial sequence
  SiRNA target sequence
acccatcgatgttgatttgtttgcatc

SEQ ID NO: 224552 - DNA, 27 bp, Artificial sequence
  SiRNA target sequence
cccatcgatgttgatttgtttgcatca

SEQ ID NO: 224553 - DNA, 27 bp, Artificial sequence
  SiRNA target sequence
ccatcgatgttgatttgtttgcatcaa

SEQ ID NO: 224554 - DNA, 27 bp, Artificial sequence
  SiRNA target sequence
catcgatgttgatttgtttgcatcaaa

SEQ ID NO: 224555 - DNA, 27 bp, Artificial sequence
  SiRNA target sequence
atcgatgttgatttgtttgcatcaaag

SEQ ID NO: 224556 - DNA, 27 bp, Artificial sequence
  SiRNA target sequence
tcgatgttgatttgtttgcatcaaagt

SEQ ID NO: 224557 - DNA, 27 bp, Artificial sequence
  SiRNA target sequence
cgatgttgatttgtttgcatcaaagtt

SEQ ID NO: 224558 - DNA, 27 bp, Artificial sequence
  SiRNA target sequence
gatgttgatttgtttgcatcaaagttg

SEQ ID NO: 224559 - DNA, 27 bp, Artificial sequence
  SiRNA target sequence
atgttgatttgtttgcatcaaagttgt

SEQ ID NO: 224560 - DNA, 27 bp, Artificial sequence
  SiRNA target sequence
tgttgatttgtttgcatcaaagttgtt

SEQ ID NO: 224561 - DNA, 27 bp, Artificial sequence
  SiRNA target sequence
gttgatttgtttgcatcaaagttgtta

SEQ ID NO: 224562 - DNA, 27 bp, Artificial sequence
  SiRNA target sequence
ttgatttgtttgcatcaaagttgttag

SEQ ID NO: 224563 - DNA, 27 bp, Artificial sequence
  SiRNA target sequence
tgatttgtttgcatcaaagttgttaga

SEQ ID NO: 224564 - DNA, 27 bp, Artificial sequence
  SiRNA target sequence
gatttgtttgcatcaaagttgttagat

SEQ ID NO: 224565 - DNA, 27 bp, Artificial sequence
  SiRNA target sequence
atttgtttgcatcaaagttgttagata

SEQ ID NO: 224566 - DNA, 27 bp, Artificial sequence
  SiRNA target sequence
tttgtttgcatcaaagttgttagataa

SEQ ID NO: 224567 - DNA, 27 bp, Artificial sequence
  SiRNA target sequence
ttgtttgcatcaaagttgttagataat

SEQ ID NO: 224568 - DNA, 27 bp, Artificial sequence
  SiRNA target sequence
tgtttgcatcaaagttgttagataata

SEQ ID NO: 224569 - DNA, 27 bp, Artificial sequence
  SiRNA target sequence
gtttgcatcaaagttgttagataataa

SEQ ID NO: 224570 - DNA, 27 bp, Artificial sequence
  SiRNA target sequence
tttgcatcaaagttgttagataataaa

SEQ ID NO: 224571 - DNA, 27 bp, Artificial sequence
  SiRNA target sequence
ttgcatcaaagttgttagataataaaa

SEQ ID NO: 224572 - DNA, 27 bp, Artificial sequence
  SiRNA target sequence
tgcatcaaagttgttagataataaaaa

SEQ ID NO: 224573 - DNA, 27 bp, Artificial sequence
  SiRNA target sequence
gcatcaaagttgttagataataaaaaa

SEQ ID NO: 224574 - DNA, 27 bp, Artificial sequence
  SiRNA target sequence
catcaaagttgttagataataaaaaag

SEQ ID NO: 224575 - DNA, 27 bp, Artificial sequence
  SiRNA target sequence
atcaaagttgttagataataaaaaaga

SEQ ID NO: 224576 - DNA, 27 bp, Artificial sequence
  SiRNA target sequence
tcaaagttgttagataataaaaaagaa

SEQ ID NO: 224577 - DNA, 27 bp, Artificial sequence
  SiRNA target sequence
caaagttgttagataataaaaaagaag

SEQ ID NO: 224578 - DNA, 27 bp, Artificial sequence
  SiRNA target sequence
aaagttgttagataataaaaaagaaga

SEQ ID NO: 224579 - DNA, 27 bp, Artificial sequence
  SiRNA target sequence
aagttgttagataataaaaaagaagag

SEQ ID NO: 224580 - DNA, 27 bp, Artificial sequence
  SiRNA target sequence
agttgttagataataaaaaagaagagg

SEQ ID NO: 224581 - DNA, 27 bp, Artificial sequence
  SiRNA target sequence
gttgttagataataaaaaagaagagga

SEQ ID NO: 224582 - DNA, 27 bp, Artificial sequence
  SiRNA target sequence
ttgttagataataaaaaagaagaggaa

SEQ ID NO: 224583 - DNA, 27 bp, Artificial sequence
  SiRNA target sequence
tgttagataataaaaaagaagaggaaa

SEQ ID NO: 224584 - DNA, 27 bp, Artificial sequence
  SiRNA target sequence
gttagataataaaaaagaagaggaaat

SEQ ID NO: 224585 - DNA, 27 bp, Artificial sequence
  SiRNA target sequence
ttagataataaaaaagaagaggaaatt

SEQ ID NO: 224586 - DNA, 27 bp, Artificial sequence
  SiRNA target sequence
tagataataaaaaagaagaggaaattg

SEQ ID NO: 224587 - DNA, 27 bp, Artificial sequence
  SiRNA target sequence
agataataaaaaagaagaggaaattga

SEQ ID NO: 224588 - DNA, 27 bp, Artificial sequence
  SiRNA target sequence
gataataaaaaagaagaggaaattgat

SEQ ID NO: 224589 - DNA, 27 bp, Artificial sequence
  SiRNA target sequence
ataataaaaaagaagaggaaattgatg

SEQ ID NO: 224590 - DNA, 27 bp, Artificial sequence
  SiRNA target sequence
taataaaaaagaagaggaaattgatgt

SEQ ID NO: 224591 - DNA, 27 bp, Artificial sequence
  SiRNA target sequence
aataaaaaagaagaggaaattgatgtg

SEQ ID NO: 224592 - DNA, 27 bp, Artificial sequence
  SiRNA target sequence
ataaaaaagaagaggaaattgatgtgt

SEQ ID NO: 224593 - DNA, 27 bp, Artificial sequence
  SiRNA target sequence
taaaaaagaagaggaaattgatgtgtc

SEQ ID NO: 224594 - DNA, 27 bp, Artificial sequence
  SiRNA target sequence
aaaaaagaagaggaaattgatgtgtca

SEQ ID NO: 224595 - DNA, 27 bp, Artificial sequence
  SiRNA target sequence
aaaaagaagaggaaattgatgtgtcag

SEQ ID NO: 224596 - DNA, 27 bp, Artificial sequence
  SiRNA target sequence
aaaagaagaggaaattgatgtgtcagt

SEQ ID NO: 224597 - DNA, 27 bp, Artificial sequence
  SiRNA target sequence
aaagaagaggaaattgatgtgtcagtg

SEQ ID NO: 224598 - DNA, 27 bp, Artificial sequence
  SiRNA target sequence
aagaagaggaaattgatgtgtcagtgc

SEQ ID NO: 224599 - DNA, 27 bp, Artificial sequence
  SiRNA target sequence
agaagaggaaattgatgtgtcagtgct

SEQ ID NO: 224600 - DNA, 27 bp, Artificial sequence
  SiRNA target sequence
gaagaggaaattgatgtgtcagtgctc

SEQ ID NO: 224601 - DNA, 27 bp, Artificial sequence
  SiRNA target sequence
aagaggaaattgatgtgtcagtgctcg

SEQ ID NO: 224602 - DNA, 27 bp, Artificial sequence
  SiRNA target sequence
agaggaaattgatgtgtcagtgctcgt

SEQ ID NO: 224603 - DNA, 27 bp, Artificial sequence
  SiRNA target sequence
gaggaaattgatgtgtcagtgctcgtt

SEQ ID NO: 224604 - DNA, 27 bp, Artificial sequence
  SiRNA target sequence
aggaaattgatgtgtcagtgctcgtta

SEQ ID NO: 224605 - DNA, 27 bp, Artificial sequence
  SiRNA target sequence
ggaaattgatgtgtcagtgctcgttaa

SEQ ID NO: 224606 - DNA, 27 bp, Artificial sequence
  SiRNA target sequence
gaaattgatgtgtcagtgctcgttaat

SEQ ID NO: 224607 - DNA, 27 bp, Artificial sequence
  SiRNA target sequence
aaattgatgtgtcagtgctcgttaatt

SEQ ID NO: 224608 - DNA, 27 bp, Artificial sequence
  SiRNA target sequence
aattgatgtgtcagtgctcgttaatta

SEQ ID NO: 224609 - DNA, 27 bp, Artificial sequence
  SiRNA target sequence
attgatgtgtcagtgctcgttaattaa

SEQ ID NO: 224610 - DNA, 19 bp, Artificial sequence
  SiRNA target sequence
atgtcagtagacaattcga

SEQ ID NO: 224611 - DNA, 19 bp, Artificial sequence
  SiRNA target sequence
tgtcagtagacaattcgaa

SEQ ID NO: 224612 - DNA, 19 bp, Artificial sequence
  SiRNA target sequence
gtcagtagacaattcgaaa

SEQ ID NO: 224613 - DNA, 19 bp, Artificial sequence
  SiRNA target sequence
tcagtagacaattcgaaag

SEQ ID NO: 224614 - DNA, 19 bp, Artificial sequence
  SiRNA target sequence
cagtagacaattcgaaagt

SEQ ID NO: 224615 - DNA, 19 bp, Artificial sequence
  SiRNA target sequence
agtagacaattcgaaagtt

SEQ ID NO: 224616 - DNA, 19 bp, Artificial sequence
  SiRNA target sequence
gtagacaattcgaaagttc

SEQ ID NO: 224617 - DNA, 19 bp, Artificial sequence
  SiRNA target sequence
tagacaattcgaaagttct

SEQ ID NO: 224618 - DNA, 19 bp, Artificial sequence
  SiRNA target sequence
agacaattcgaaagttcta

SEQ ID NO: 224619 - DNA, 19 bp, Artificial sequence
  SiRNA target sequence
gacaattcgaaagttctac

SEQ ID NO: 224620 - DNA, 19 bp, Artificial sequence
  SiRNA target sequence
acaattcgaaagttctaca

SEQ ID NO: 224621 - DNA, 19 bp, Artificial sequence
  SiRNA target sequence
caattcgaaagttctacaa

SEQ ID NO: 224622 - DNA, 19 bp, Artificial sequence
  SiRNA target sequence
aattcgaaagttctacaaa

SEQ ID NO: 224623 - DNA, 19 bp, Artificial sequence
  SiRNA target sequence
attcgaaagttctacaaaa

SEQ ID NO: 224624 - DNA, 19 bp, Artificial sequence
  SiRNA target sequence
ttcgaaagttctacaaaat

SEQ ID NO: 224625 - DNA, 19 bp, Artificial sequence
  SiRNA target sequence
tcgaaagttctacaaaata

SEQ ID NO: 224626 - DNA, 19 bp, Artificial sequence
  SiRNA target sequence
cgaaagttctacaaaataa

SEQ ID NO: 224627 - DNA, 19 bp, Artificial sequence
  SiRNA target sequence
gaaagttctacaaaataac

SEQ ID NO: 224628 - DNA, 19 bp, Artificial sequence
  SiRNA target sequence
aaagttctacaaaataacg

SEQ ID NO: 224629 - DNA, 19 bp, Artificial sequence
  SiRNA target sequence
aagttctacaaaataacga

SEQ ID NO: 224630 - DNA, 19 bp, Artificial sequence
  SiRNA target sequence
agttctacaaaataacgaa

SEQ ID NO: 224631 - DNA, 19 bp, Artificial sequence
  SiRNA target sequence
gttctacaaaataacgaaa

SEQ ID NO: 224632 - DNA, 19 bp, Artificial sequence
  SiRNA target sequence
ttctacaaaataacgaaaa

SEQ ID NO: 224633 - DNA, 19 bp, Artificial sequence
  SiRNA target sequence
tctacaaaataacgaaaac

SEQ ID NO: 224634 - DNA, 19 bp, Artificial sequence
  SiRNA target sequence
ctacaaaataacgaaaact

SEQ ID NO: 224635 - DNA, 19 bp, Artificial sequence
  SiRNA target sequence
tacaaaataacgaaaactc

SEQ ID NO: 224636 - DNA, 19 bp, Artificial sequence
  SiRNA target sequence
acaaaataacgaaaactct

SEQ ID NO: 224637 - DNA, 19 bp, Artificial sequence
  SiRNA target sequence
caaaataacgaaaactctg

SEQ ID NO: 224638 - DNA, 19 bp, Artificial sequence
  SiRNA target sequence
aaaataacgaaaactctgc

SEQ ID NO: 224639 - DNA, 19 bp, Artificial sequence
  SiRNA target sequence
aaataacgaaaactctgct

SEQ ID NO: 224640 - DNA, 19 bp, Artificial sequence
  SiRNA target sequence
aataacgaaaactctgctc

SEQ ID NO: 224641 - DNA, 19 bp, Artificial sequence
  SiRNA target sequence
ataacgaaaactctgctct

SEQ ID NO: 224642 - DNA, 19 bp, Artificial sequence
  SiRNA target sequence
taacgaaaactctgctctt

SEQ ID NO: 224643 - DNA, 19 bp, Artificial sequence
  SiRNA target sequence
aacgaaaactctgctcttc

SEQ ID NO: 224644 - DNA, 19 bp, Artificial sequence
  SiRNA target sequence
acgaaaactctgctcttcc

SEQ ID NO: 224645 - DNA, 19 bp, Artificial sequence
  SiRNA target sequence
cgaaaactctgctcttcct

SEQ ID NO: 224646 - DNA, 19 bp, Artificial sequence
  SiRNA target sequence
gaaaactctgctcttccta

SEQ ID NO: 224647 - DNA, 19 bp, Artificial sequence
  SiRNA target sequence
aaaactctgctcttcctac

SEQ ID NO: 224648 - DNA, 19 bp, Artificial sequence
  SiRNA target sequence
aaactctgctcttcctaca

SEQ ID NO: 224649 - DNA, 19 bp, Artificial sequence
  SiRNA target sequence
aactctgctcttcctacag

SEQ ID NO: 224650 - DNA, 19 bp, Artificial sequence
  SiRNA target sequence
actctgctcttcctacaga

SEQ ID NO: 224651 - DNA, 19 bp, Artificial sequence
  SiRNA target sequence
ctctgctcttcctacagaa

SEQ ID NO: 224652 - DNA, 19 bp, Artificial sequence
  SiRNA target sequence
tctgctcttcctacagaag

SEQ ID NO: 224653 - DNA, 19 bp, Artificial sequence
  SiRNA target sequence
ctgctcttcctacagaaga

SEQ ID NO: 224654 - DNA, 19 bp, Artificial sequence
  SiRNA target sequence
tgctcttcctacagaagat

SEQ ID NO: 224655 - DNA, 19 bp, Artificial sequence
  SiRNA target sequence
gctcttcctacagaagatg

SEQ ID NO: 224656 - DNA, 19 bp, Artificial sequence
  SiRNA target sequence
ctcttcctacagaagatga

SEQ ID NO: 224657 - DNA, 19 bp, Artificial sequence
  SiRNA target sequence
tcttcctacagaagatgaa

SEQ ID NO: 224658 - DNA, 19 bp, Artificial sequence
  SiRNA target sequence
cttcctacagaagatgaaa

SEQ ID NO: 224659 - DNA, 19 bp, Artificial sequence
  SiRNA target sequence
ttcctacagaagatgaaat

SEQ ID NO: 224660 - DNA, 19 bp, Artificial sequence
  SiRNA target sequence
tcctacagaagatgaaatt

SEQ ID NO: 224661 - DNA, 19 bp, Artificial sequence
  SiRNA target sequence
cctacagaagatgaaattg

SEQ ID NO: 224662 - DNA, 19 bp, Artificial sequence
  SiRNA target sequence
ctacagaagatgaaattga

SEQ ID NO: 224663 - DNA, 19 bp, Artificial sequence
  SiRNA target sequence
tacagaagatgaaattgag

SEQ ID NO: 224664 - DNA, 19 bp, Artificial sequence
  SiRNA target sequence
acagaagatgaaattgagt

SEQ ID NO: 224665 - DNA, 19 bp, Artificial sequence
  SiRNA target sequence
cagaagatgaaattgagta

SEQ ID NO: 224666 - DNA, 19 bp, Artificial sequence
  SiRNA target sequence
agaagatgaaattgagtat

SEQ ID NO: 224667 - DNA, 19 bp, Artificial sequence
  SiRNA target sequence
gaagatgaaattgagtatg

SEQ ID NO: 224668 - DNA, 19 bp, Artificial sequence
  SiRNA target sequence
aagatgaaattgagtatga

SEQ ID NO: 224669 - DNA, 19 bp, Artificial sequence
  SiRNA target sequence
agatgaaattgagtatgag

SEQ ID NO: 224670 - DNA, 19 bp, Artificial sequence
  SiRNA target sequence
gatgaaattgagtatgagg

SEQ ID NO: 224671 - DNA, 19 bp, Artificial sequence
  SiRNA target sequence
atgaaattgagtatgaggc

SEQ ID NO: 224672 - DNA, 19 bp, Artificial sequence
  SiRNA target sequence
tgaaattgagtatgaggcc

SEQ ID NO: 224673 - DNA, 19 bp, Artificial sequence
  SiRNA target sequence
gaaattgagtatgaggcca

SEQ ID NO: 224674 - DNA, 19 bp, Artificial sequence
  SiRNA target sequence
aaattgagtatgaggccag

SEQ ID NO: 224675 - DNA, 19 bp, Artificial sequence
  SiRNA target sequence
aattgagtatgaggccagc

SEQ ID NO: 224676 - DNA, 19 bp, Artificial sequence
  SiRNA target sequence
attgagtatgaggccagca

SEQ ID NO: 224677 - DNA, 19 bp, Artificial sequence
  SiRNA target sequence
ttgagtatgaggccagcaa

SEQ ID NO: 224678 - DNA, 19 bp, Artificial sequence
  SiRNA target sequence
tgagtatgaggccagcaat

SEQ ID NO: 224679 - DNA, 19 bp, Artificial sequence
  SiRNA target sequence
gagtatgaggccagcaatg

SEQ ID NO: 224680 - DNA, 19 bp, Artificial sequence
  SiRNA target sequence
agtatgaggccagcaatgg

SEQ ID NO: 224681 - DNA, 19 bp, Artificial sequence
  SiRNA target sequence
gtatgaggccagcaatggt

SEQ ID NO: 224682 - DNA, 19 bp, Artificial sequence
  SiRNA target sequence
tatgaggccagcaatggtt

SEQ ID NO: 224683 - DNA, 19 bp, Artificial sequence
  SiRNA target sequence
atgaggccagcaatggttc

SEQ ID NO: 224684 - DNA, 19 bp, Artificial sequence
  SiRNA target sequence
tgaggccagcaatggttct

SEQ ID NO: 224685 - DNA, 19 bp, Artificial sequence
  SiRNA target sequence
gaggccagcaatggttctg

SEQ ID NO: 224686 - DNA, 19 bp, Artificial sequence
  SiRNA target sequence
aggccagcaatggttctgg

SEQ ID NO: 224687 - DNA, 19 bp, Artificial sequence
  SiRNA target sequence
ggccagcaatggttctggt

SEQ ID NO: 224688 - DNA, 19 bp, Artificial sequence
  SiRNA target sequence
gccagcaatggttctggta

SEQ ID NO: 224689 - DNA, 19 bp, Artificial sequence
  SiRNA target sequence
ccagcaatggttctggtat

SEQ ID NO: 224690 - DNA, 19 bp, Artificial sequence
  SiRNA target sequence
cagcaatggttctggtata

SEQ ID NO: 224691 - DNA, 19 bp, Artificial sequence
  SiRNA target sequence
agcaatggttctggtatat

SEQ ID NO: 224692 - DNA, 19 bp, Artificial sequence
  SiRNA target sequence
gcaatggttctggtatata

SEQ ID NO: 224693 - DNA, 19 bp, Artificial sequence
  SiRNA target sequence
caatggttctggtatatat

SEQ ID NO: 224694 - DNA, 19 bp, Artificial sequence
  SiRNA target sequence
aatggttctggtatatatt

SEQ ID NO: 224695 - DNA, 19 bp, Artificial sequence
  SiRNA target sequence
atggttctggtatatattc

SEQ ID NO: 224696 - DNA, 19 bp, Artificial sequence
  SiRNA target sequence
tggttctggtatatattca

SEQ ID NO: 224697 - DNA, 19 bp, Artificial sequence
  SiRNA target sequence
ggttctggtatatattcac

SEQ ID NO: 224698 - DNA, 19 bp, Artificial sequence
  SiRNA target sequence
gttctggtatatattcact

SEQ ID NO: 224699 - DNA, 19 bp, Artificial sequence
  SiRNA target sequence
ttctggtatatattcactt

SEQ ID NO: 224700 - DNA, 19 bp, Artificial sequence
  SiRNA target sequence
tctggtatatattcactta

SEQ ID NO: 224701 - DNA, 19 bp, Artificial sequence
  SiRNA target sequence
ctggtatatattcacttat

SEQ ID NO: 224702 - DNA, 19 bp, Artificial sequence
  SiRNA target sequence
tggtatatattcacttatt

SEQ ID NO: 224703 - DNA, 19 bp, Artificial sequence
  SiRNA target sequence
ggtatatattcacttatta

SEQ ID NO: 224704 - DNA, 19 bp, Artificial sequence
  SiRNA target sequence
gtatatattcacttattag

SEQ ID NO: 224705 - DNA, 19 bp, Artificial sequence
  SiRNA target sequence
tatatattcacttattaga

SEQ ID NO: 224706 - DNA, 19 bp, Artificial sequence
  SiRNA target sequence
atatattcacttattagag

SEQ ID NO: 224707 - DNA, 19 bp, Artificial sequence
  SiRNA target sequence
tatattcacttattagagt

SEQ ID NO: 224708 - DNA, 19 bp, Artificial sequence
  SiRNA target sequence
atattcacttattagagta

SEQ ID NO: 224709 - DNA, 19 bp, Artificial sequence
  SiRNA target sequence
tattcacttattagagtag

SEQ ID NO: 224710 - DNA, 19 bp, Artificial sequence
  SiRNA target sequence
attcacttattagagtagc

SEQ ID NO: 224711 - DNA, 19 bp, Artificial sequence
  SiRNA target sequence
ttcacttattagagtagca

SEQ ID NO: 224712 - DNA, 19 bp, Artificial sequence
  SiRNA target sequence
tcacttattagagtagcaa

SEQ ID NO: 224713 - DNA, 19 bp, Artificial sequence
  SiRNA target sequence
cacttattagagtagcaaa

SEQ ID NO: 224714 - DNA, 19 bp, Artificial sequence
  SiRNA target sequence
acttattagagtagcaaag

SEQ ID NO: 224715 - DNA, 19 bp, Artificial sequence
  SiRNA target sequence
cttattagagtagcaaagg

SEQ ID NO: 224716 - DNA, 19 bp, Artificial sequence
  SiRNA target sequence
ttattagagtagcaaaggt

SEQ ID NO: 224717 - DNA, 19 bp, Artificial sequence
  SiRNA target sequence
tattagagtagcaaaggtt

SEQ ID NO: 224718 - DNA, 19 bp, Artificial sequence
  SiRNA target sequence
attagagtagcaaaggttg

SEQ ID NO: 224719 - DNA, 19 bp, Artificial sequence
  SiRNA target sequence
ttagagtagcaaaggttga

SEQ ID NO: 224720 - DNA, 19 bp, Artificial sequence
  SiRNA target sequence
tagagtagcaaaggttgag

SEQ ID NO: 224721 - DNA, 19 bp, Artificial sequence
  SiRNA target sequence
agagtagcaaaggttgaga

SEQ ID NO: 224722 - DNA, 19 bp, Artificial sequence
  SiRNA target sequence
gagtagcaaaggttgagag

SEQ ID NO: 224723 - DNA, 19 bp, Artificial sequence
  SiRNA target sequence
agtagcaaaggttgagaga

SEQ ID NO: 224724 - DNA, 19 bp, Artificial sequence
  SiRNA target sequence
gtagcaaaggttgagagaa

SEQ ID NO: 224725 - DNA, 19 bp, Artificial sequence
  SiRNA target sequence
tagcaaaggttgagagaaa

SEQ ID NO: 224726 - DNA, 19 bp, Artificial sequence
  SiRNA target sequence
agcaaaggttgagagaaag

SEQ ID NO: 224727 - DNA, 19 bp, Artificial sequence
  SiRNA target sequence
gcaaaggttgagagaaaga

SEQ ID NO: 224728 - DNA, 19 bp, Artificial sequence
  SiRNA target sequence
caaaggttgagagaaagat

SEQ ID NO: 224729 - DNA, 19 bp, Artificial sequence
  SiRNA target sequence
aaaggttgagagaaagatg

SEQ ID NO: 224730 - DNA, 19 bp, Artificial sequence
  SiRNA target sequence
aaggttgagagaaagatgt

SEQ ID NO: 224731 - DNA, 19 bp, Artificial sequence
  SiRNA target sequence
aggttgagagaaagatgtt

SEQ ID NO: 224732 - DNA, 19 bp, Artificial sequence
  SiRNA target sequence
ggttgagagaaagatgttt

SEQ ID NO: 224733 - DNA, 19 bp, Artificial sequence
  SiRNA target sequence
gttgagagaaagatgtttt

SEQ ID NO: 224734 - DNA, 19 bp, Artificial sequence
  SiRNA target sequence
ttgagagaaagatgttttg

SEQ ID NO: 224735 - DNA, 19 bp, Artificial sequence
  SiRNA target sequence
tgagagaaagatgttttgg

SEQ ID NO: 224736 - DNA, 19 bp, Artificial sequence
  SiRNA target sequence
gagagaaagatgttttgga

SEQ ID NO: 224737 - DNA, 19 bp, Artificial sequence
  SiRNA target sequence
agagaaagatgttttggat

SEQ ID NO: 224738 - DNA, 19 bp, Artificial sequence
  SiRNA target sequence
gagaaagatgttttggatc

SEQ ID NO: 224739 - DNA, 19 bp, Artificial sequence
  SiRNA target sequence
agaaagatgttttggatca

SEQ ID NO: 224740 - DNA, 19 bp, Artificial sequence
  SiRNA target sequence
gaaagatgttttggatcat

SEQ ID NO: 224741 - DNA, 19 bp, Artificial sequence
  SiRNA target sequence
aaagatgttttggatcatg

SEQ ID NO: 224742 - DNA, 19 bp, Artificial sequence
  SiRNA target sequence
aagatgttttggatcatgg

SEQ ID NO: 224743 - DNA, 19 bp, Artificial sequence
  SiRNA target sequence
agatgttttggatcatggc

SEQ ID NO: 224744 - DNA, 19 bp, Artificial sequence
  SiRNA target sequence
gatgttttggatcatggca

SEQ ID NO: 224745 - DNA, 19 bp, Artificial sequence
  SiRNA target sequence
atgttttggatcatggcag

SEQ ID NO: 224746 - DNA, 19 bp, Artificial sequence
  SiRNA target sequence
tgttttggatcatggcagc

SEQ ID NO: 224747 - DNA, 19 bp, Artificial sequence
  SiRNA target sequence
gttttggatcatggcagct

SEQ ID NO: 224748 - DNA, 19 bp, Artificial sequence
  SiRNA target sequence
ttttggatcatggcagcta

SEQ ID NO: 224749 - DNA, 19 bp, Artificial sequence
  SiRNA target sequence
tttggatcatggcagctat

SEQ ID NO: 224750 - DNA, 19 bp, Artificial sequence
  SiRNA target sequence
ttggatcatggcagctatg

SEQ ID NO: 224751 - DNA, 19 bp, Artificial sequence
  SiRNA target sequence
tggatcatggcagctatgt

SEQ ID NO: 224752 - DNA, 19 bp, Artificial sequence
  SiRNA target sequence
ggatcatggcagctatgtt

SEQ ID NO: 224753 - DNA, 19 bp, Artificial sequence
  SiRNA target sequence
gatcatggcagctatgttc

SEQ ID NO: 224754 - DNA, 19 bp, Artificial sequence
  SiRNA target sequence
atcatggcagctatgttct

SEQ ID NO: 224755 - DNA, 19 bp, Artificial sequence
  SiRNA target sequence
tcatggcagctatgttctt

SEQ ID NO: 224756 - DNA, 19 bp, Artificial sequence
  SiRNA target sequence
catggcagctatgttcttt

SEQ ID NO: 224757 - DNA, 19 bp, Artificial sequence
  SiRNA target sequence
atggcagctatgttcttta

SEQ ID NO: 224758 - DNA, 19 bp, Artificial sequence
  SiRNA target sequence
tggcagctatgttctttat

SEQ ID NO: 224759 - DNA, 19 bp, Artificial sequence
  SiRNA target sequence
ggcagctatgttctttatt

SEQ ID NO: 224760 - DNA, 19 bp, Artificial sequence
  SiRNA target sequence
gcagctatgttctttatta

SEQ ID NO: 224761 - DNA, 19 bp, Artificial sequence
  SiRNA target sequence
cagctatgttctttattat

SEQ ID NO: 224762 - DNA, 19 bp, Artificial sequence
  SiRNA target sequence
agctatgttctttattatc

SEQ ID NO: 224763 - DNA, 19 bp, Artificial sequence
  SiRNA target sequence
gctatgttctttattatct

SEQ ID NO: 224764 - DNA, 19 bp, Artificial sequence
  SiRNA target sequence
ctatgttctttattatctc

SEQ ID NO: 224765 - DNA, 19 bp, Artificial sequence
  SiRNA target sequence
tatgttctttattatctcc

SEQ ID NO: 224766 - DNA, 19 bp, Artificial sequence
  SiRNA target sequence
atgttctttattatctcct

SEQ ID NO: 224767 - DNA, 19 bp, Artificial sequence
  SiRNA target sequence
tgttctttattatctcctt

SEQ ID NO: 224768 - DNA, 19 bp, Artificial sequence
  SiRNA target sequence
gttctttattatctccttt

SEQ ID NO: 224769 - DNA, 19 bp, Artificial sequence
  SiRNA target sequence
ttctttattatctccttta

SEQ ID NO: 224770 - DNA, 19 bp, Artificial sequence
  SiRNA target sequence
tctttattatctcctttat

SEQ ID NO: 224771 - DNA, 19 bp, Artificial sequence
  SiRNA target sequence
ctttattatctcctttatt

SEQ ID NO: 224772 - DNA, 19 bp, Artificial sequence
  SiRNA target sequence
tttattatctcctttattt

SEQ ID NO: 224773 - DNA, 19 bp, Artificial sequence
  SiRNA target sequence
ttattatctcctttattta

SEQ ID NO: 224774 - DNA, 19 bp, Artificial sequence
  SiRNA target sequence
tattatctcctttatttat

SEQ ID NO: 224775 - DNA, 19 bp, Artificial sequence
  SiRNA target sequence
attatctcctttatttatt

SEQ ID NO: 224776 - DNA, 19 bp, Artificial sequence
  SiRNA target sequence
ttatctcctttatttattc

SEQ ID NO: 224777 - DNA, 19 bp, Artificial sequence
  SiRNA target sequence
tatctcctttatttattcg

SEQ ID NO: 224778 - DNA, 19 bp, Artificial sequence
  SiRNA target sequence
atctcctttatttattcgg

SEQ ID NO: 224779 - DNA, 19 bp, Artificial sequence
  SiRNA target sequence
tctcctttatttattcggt

SEQ ID NO: 224780 - DNA, 19 bp, Artificial sequence
  SiRNA target sequence
ctcctttatttattcggtg

SEQ ID NO: 224781 - DNA, 19 bp, Artificial sequence
  SiRNA target sequence
tcctttatttattcggtgg

SEQ ID NO: 224782 - DNA, 19 bp, Artificial sequence
  SiRNA target sequence
cctttatttattcggtggc

SEQ ID NO: 224783 - DNA, 19 bp, Artificial sequence
  SiRNA target sequence
ctttatttattcggtggct

SEQ ID NO: 224784 - DNA, 19 bp, Artificial sequence
  SiRNA target sequence
tttatttattcggtggcta

SEQ ID NO: 224785 - DNA, 19 bp, Artificial sequence
  SiRNA target sequence
ttatttattcggtggctag

SEQ ID NO: 224786 - DNA, 19 bp, Artificial sequence
  SiRNA target sequence
tatttattcggtggctaga

SEQ ID NO: 224787 - DNA, 19 bp, Artificial sequence
  SiRNA target sequence
atttattcggtggctagag

SEQ ID NO: 224788 - DNA, 19 bp, Artificial sequence
  SiRNA target sequence
tttattcggtggctagagt

SEQ ID NO: 224789 - DNA, 19 bp, Artificial sequence
  SiRNA target sequence
ttattcggtggctagagtg

SEQ ID NO: 224790 - DNA, 19 bp, Artificial sequence
  SiRNA target sequence
tattcggtggctagagtgc

SEQ ID NO: 224791 - DNA, 19 bp, Artificial sequence
  SiRNA target sequence
attcggtggctagagtgct

SEQ ID NO: 224792 - DNA, 19 bp, Artificial sequence
  SiRNA target sequence
ttcggtggctagagtgctt

SEQ ID NO: 224793 - DNA, 19 bp, Artificial sequence
  SiRNA target sequence
tcggtggctagagtgctta

SEQ ID NO: 224794 - DNA, 19 bp, Artificial sequence
  SiRNA target sequence
cggtggctagagtgcttaa

SEQ ID NO: 224795 - DNA, 19 bp, Artificial sequence
  SiRNA target sequence
ggtggctagagtgcttaaa

SEQ ID NO: 224796 - DNA, 19 bp, Artificial sequence
  SiRNA target sequence
gtggctagagtgcttaaag

SEQ ID NO: 224797 - DNA, 19 bp, Artificial sequence
  SiRNA target sequence
tggctagagtgcttaaaga

SEQ ID NO: 224798 - DNA, 19 bp, Artificial sequence
  SiRNA target sequence
ggctagagtgcttaaagat

SEQ ID NO: 224799 - DNA, 19 bp, Artificial sequence
  SiRNA target sequence
gctagagtgcttaaagatg

SEQ ID NO: 224800 - DNA, 19 bp, Artificial sequence
  SiRNA target sequence
ctagagtgcttaaagatgc

SEQ ID NO: 224801 - DNA, 19 bp, Artificial sequence
  SiRNA target sequence
tagagtgcttaaagatgcc

SEQ ID NO: 224802 - DNA, 19 bp, Artificial sequence
  SiRNA target sequence
agagtgcttaaagatgccg

SEQ ID NO: 224803 - DNA, 19 bp, Artificial sequence
  SiRNA target sequence
gagtgcttaaagatgccgc

SEQ ID NO: 224804 - DNA, 19 bp, Artificial sequence
  SiRNA target sequence
agtgcttaaagatgccgct

SEQ ID NO: 224805 - DNA, 19 bp, Artificial sequence
  SiRNA target sequence
gtgcttaaagatgccgctg

SEQ ID NO: 224806 - DNA, 19 bp, Artificial sequence
  SiRNA target sequence
tgcttaaagatgccgctgt

SEQ ID NO: 224807 - DNA, 19 bp, Artificial sequence
  SiRNA target sequence
gcttaaagatgccgctgtt

SEQ ID NO: 224808 - DNA, 19 bp, Artificial sequence
  SiRNA target sequence
cttaaagatgccgctgtta

SEQ ID NO: 224809 - DNA, 19 bp, Artificial sequence
  SiRNA target sequence
ttaaagatgccgctgttat

SEQ ID NO: 224810 - DNA, 19 bp, Artificial sequence
  SiRNA target sequence
taaagatgccgctgttatt

SEQ ID NO: 224811 - DNA, 19 bp, Artificial sequence
  SiRNA target sequence
aaagatgccgctgttattg

SEQ ID NO: 224812 - DNA, 19 bp, Artificial sequence
  SiRNA target sequence
aagatgccgctgttattgg

SEQ ID NO: 224813 - DNA, 19 bp, Artificial sequence
  SiRNA target sequence
agatgccgctgttattggt

SEQ ID NO: 224814 - DNA, 19 bp, Artificial sequence
  SiRNA target sequence
gatgccgctgttattggta

SEQ ID NO: 224815 - DNA, 19 bp, Artificial sequence
  SiRNA target sequence
atgccgctgttattggtaa

SEQ ID NO: 224816 - DNA, 19 bp, Artificial sequence
  SiRNA target sequence
tgccgctgttattggtaaa

SEQ ID NO: 224817 - DNA, 19 bp, Artificial sequence
  SiRNA target sequence
gccgctgttattggtaaac

SEQ ID NO: 224818 - DNA, 19 bp, Artificial sequence
  SiRNA target sequence
ccgctgttattggtaaaca

SEQ ID NO: 224819 - DNA, 19 bp, Artificial sequence
  SiRNA target sequence
cgctgttattggtaaacaa

SEQ ID NO: 224820 - DNA, 19 bp, Artificial sequence
  SiRNA target sequence
gctgttattggtaaacaac

SEQ ID NO: 224821 - DNA, 19 bp, Artificial sequence
  SiRNA target sequence
ctgttattggtaaacaact

SEQ ID NO: 224822 - DNA, 19 bp, Artificial sequence
  SiRNA target sequence
tgttattggtaaacaactc

SEQ ID NO: 224823 - DNA, 19 bp, Artificial sequence
  SiRNA target sequence
gttattggtaaacaactcc

SEQ ID NO: 224824 - DNA, 19 bp, Artificial sequence
  SiRNA target sequence
ttattggtaaacaactccc

SEQ ID NO: 224825 - DNA, 19 bp, Artificial sequence
  SiRNA target sequence
tattggtaaacaactccca

SEQ ID NO: 224826 - DNA, 19 bp, Artificial sequence
  SiRNA target sequence
attggtaaacaactcccag

SEQ ID NO: 224827 - DNA, 19 bp, Artificial sequence
  SiRNA target sequence
ttggtaaacaactcccagc

SEQ ID NO: 224828 - DNA, 19 bp, Artificial sequence
  SiRNA target sequence
tggtaaacaactcccagcg

SEQ ID NO: 224829 - DNA, 19 bp, Artificial sequence
  SiRNA target sequence
ggtaaacaactcccagcgt

SEQ ID NO: 224830 - DNA, 19 bp, Artificial sequence
  SiRNA target sequence
gtaaacaactcccagcgtc

SEQ ID NO: 224831 - DNA, 19 bp, Artificial sequence
  SiRNA target sequence
taaacaactcccagcgtca

SEQ ID NO: 224832 - DNA, 19 bp, Artificial sequence
  SiRNA target sequence
aaacaactcccagcgtcaa

SEQ ID NO: 224833 - DNA, 19 bp, Artificial sequence
  SiRNA target sequence
aacaactcccagcgtcaat

SEQ ID NO: 224834 - DNA, 19 bp, Artificial sequence
  SiRNA target sequence
acaactcccagcgtcaatt

SEQ ID NO: 224835 - DNA, 19 bp, Artificial sequence
  SiRNA target sequence
caactcccagcgtcaattt

SEQ ID NO: 224836 - DNA, 19 bp, Artificial sequence
  SiRNA target sequence
aactcccagcgtcaatttt

SEQ ID NO: 224837 - DNA, 19 bp, Artificial sequence
  SiRNA target sequence
actcccagcgtcaattttc

SEQ ID NO: 224838 - DNA, 19 bp, Artificial sequence
  SiRNA target sequence
ctcccagcgtcaattttct

SEQ ID NO: 224839 - DNA, 19 bp, Artificial sequence
  SiRNA target sequence
tcccagcgtcaattttctt

SEQ ID NO: 224840 - DNA, 19 bp, Artificial sequence
  SiRNA target sequence
cccagcgtcaattttcttt

SEQ ID NO: 224841 - DNA, 19 bp, Artificial sequence
  SiRNA target sequence
ccagcgtcaattttctttt

SEQ ID NO: 224842 - DNA, 19 bp, Artificial sequence
  SiRNA target sequence
cagcgtcaattttcttttt

SEQ ID NO: 224843 - DNA, 19 bp, Artificial sequence
  SiRNA target sequence
agcgtcaattttctttttg

SEQ ID NO: 224844 - DNA, 19 bp, Artificial sequence
  SiRNA target sequence
gcgtcaattttctttttga

SEQ ID NO: 224845 - DNA, 19 bp, Artificial sequence
  SiRNA target sequence
cgtcaattttctttttgaa

SEQ ID NO: 224846 - DNA, 19 bp, Artificial sequence
  SiRNA target sequence
gtcaattttctttttgaaa

SEQ ID NO: 224847 - DNA, 19 bp, Artificial sequence
  SiRNA target sequence
tcaattttctttttgaaat

SEQ ID NO: 224848 - DNA, 19 bp, Artificial sequence
  SiRNA target sequence
caattttctttttgaaatt

SEQ ID NO: 224849 - DNA, 19 bp, Artificial sequence
  SiRNA target sequence
aattttctttttgaaattt

SEQ ID NO: 224850 - DNA, 19 bp, Artificial sequence
  SiRNA target sequence
attttctttttgaaatttg

SEQ ID NO: 224851 - DNA, 19 bp, Artificial sequence
  SiRNA target sequence
ttttctttttgaaatttgt

SEQ ID NO: 224852 - DNA, 19 bp, Artificial sequence
  SiRNA target sequence
tttctttttgaaatttgtt

SEQ ID NO: 224853 - DNA, 19 bp, Artificial sequence
  SiRNA target sequence
ttctttttgaaatttgtta

SEQ ID NO: 224854 - DNA, 19 bp, Artificial sequence
  SiRNA target sequence
tctttttgaaatttgttat

SEQ ID NO: 224855 - DNA, 19 bp, Artificial sequence
  SiRNA target sequence
ctttttgaaatttgttatt

SEQ ID NO: 224856 - DNA, 19 bp, Artificial sequence
  SiRNA target sequence
tttttgaaatttgttatta

SEQ ID NO: 224857 - DNA, 19 bp, Artificial sequence
  SiRNA target sequence
ttttgaaatttgttattat

SEQ ID NO: 224858 - DNA, 19 bp, Artificial sequence
  SiRNA target sequence
tttgaaatttgttattatc

SEQ ID NO: 224859 - DNA, 19 bp, Artificial sequence
  SiRNA target sequence
ttgaaatttgttattatcc

SEQ ID NO: 224860 - DNA, 19 bp, Artificial sequence
  SiRNA target sequence
tgaaatttgttattatcct

SEQ ID NO: 224861 - DNA, 19 bp, Artificial sequence
  SiRNA target sequence
gaaatttgttattatcctt

SEQ ID NO: 224862 - DNA, 19 bp, Artificial sequence
  SiRNA target sequence
aaatttgttattatccttc

SEQ ID NO: 224863 - DNA, 19 bp, Artificial sequence
  SiRNA target sequence
aatttgttattatccttcc

SEQ ID NO: 224864 - DNA, 19 bp, Artificial sequence
  SiRNA target sequence
atttgttattatccttccg

SEQ ID NO: 224865 - DNA, 19 bp, Artificial sequence
  SiRNA target sequence
tttgttattatccttccgt

SEQ ID NO: 224866 - DNA, 19 bp, Artificial sequence
  SiRNA target sequence
ttgttattatccttccgtt

SEQ ID NO: 224867 - DNA, 19 bp, Artificial sequence
  SiRNA target sequence
tgttattatccttccgttc

SEQ ID NO: 224868 - DNA, 19 bp, Artificial sequence
  SiRNA target sequence
gttattatccttccgttct

SEQ ID NO: 224869 - DNA, 19 bp, Artificial sequence
  SiRNA target sequence
ttattatccttccgttctc

SEQ ID NO: 224870 - DNA, 19 bp, Artificial sequence
  SiRNA target sequence
tattatccttccgttctca

SEQ ID NO: 224871 - DNA, 19 bp, Artificial sequence
  SiRNA target sequence
attatccttccgttctcat

SEQ ID NO: 224872 - DNA, 19 bp, Artificial sequence
  SiRNA target sequence
ttatccttccgttctcatt

SEQ ID NO: 224873 - DNA, 19 bp, Artificial sequence
  SiRNA target sequence
tatccttccgttctcattt

SEQ ID NO: 224874 - DNA, 19 bp, Artificial sequence
  SiRNA target sequence
atccttccgttctcattta

SEQ ID NO: 224875 - DNA, 19 bp, Artificial sequence
  SiRNA target sequence
tccttccgttctcatttat

SEQ ID NO: 224876 - DNA, 19 bp, Artificial sequence
  SiRNA target sequence
ccttccgttctcatttatt

SEQ ID NO: 224877 - DNA, 19 bp, Artificial sequence
  SiRNA target sequence
cttccgttctcatttattt

SEQ ID NO: 224878 - DNA, 19 bp, Artificial sequence
  SiRNA target sequence
ttccgttctcatttatttc

SEQ ID NO: 224879 - DNA, 19 bp, Artificial sequence
  SiRNA target sequence
tccgttctcatttatttca

SEQ ID NO: 224880 - DNA, 19 bp, Artificial sequence
  SiRNA target sequence
ccgttctcatttatttcag

SEQ ID NO: 224881 - DNA, 19 bp, Artificial sequence
  SiRNA target sequence
cgttctcatttatttcagt

SEQ ID NO: 224882 - DNA, 19 bp, Artificial sequence
  SiRNA target sequence
gttctcatttatttcagta

SEQ ID NO: 224883 - DNA, 19 bp, Artificial sequence
  SiRNA target sequence
ttctcatttatttcagtag

SEQ ID NO: 224884 - DNA, 19 bp, Artificial sequence
  SiRNA target sequence
tctcatttatttcagtagg

SEQ ID NO: 224885 - DNA, 19 bp, Artificial sequence
  SiRNA target sequence
ctcatttatttcagtaggt

SEQ ID NO: 224886 - DNA, 19 bp, Artificial sequence
  SiRNA target sequence
tcatttatttcagtaggta

SEQ ID NO: 224887 - DNA, 19 bp, Artificial sequence
  SiRNA target sequence
catttatttcagtaggtat

SEQ ID NO: 224888 - DNA, 19 bp, Artificial sequence
  SiRNA target sequence
atttatttcagtaggtatt

SEQ ID NO: 224889 - DNA, 19 bp, Artificial sequence
  SiRNA target sequence
tttatttcagtaggtatta

SEQ ID NO: 224890 - DNA, 19 bp, Artificial sequence
  SiRNA target sequence
ttatttcagtaggtattat

SEQ ID NO: 224891 - DNA, 19 bp, Artificial sequence
  SiRNA target sequence
tatttcagtaggtattatt

SEQ ID NO: 224892 - DNA, 19 bp, Artificial sequence
  SiRNA target sequence
atttcagtaggtattattc

SEQ ID NO: 224893 - DNA, 19 bp, Artificial sequence
  SiRNA target sequence
tttcagtaggtattattca

SEQ ID NO: 224894 - DNA, 19 bp, Artificial sequence
  SiRNA target sequence
ttcagtaggtattattcag

SEQ ID NO: 224895 - DNA, 19 bp, Artificial sequence
  SiRNA target sequence
tcagtaggtattattcaga

SEQ ID NO: 224896 - DNA, 19 bp, Artificial sequence
  SiRNA target sequence
cagtaggtattattcagaa

SEQ ID NO: 224897 - DNA, 19 bp, Artificial sequence
  SiRNA target sequence
agtaggtattattcagaaa

SEQ ID NO: 224898 - DNA, 19 bp, Artificial sequence
  SiRNA target sequence
gtaggtattattcagaaag

SEQ ID NO: 224899 - DNA, 19 bp, Artificial sequence
  SiRNA target sequence
taggtattattcagaaagc

SEQ ID NO: 224900 - DNA, 19 bp, Artificial sequence
  SiRNA target sequence
aggtattattcagaaagct

SEQ ID NO: 224901 - DNA, 19 bp, Artificial sequence
  SiRNA target sequence
ggtattattcagaaagctt

SEQ ID NO: 224902 - DNA, 19 bp, Artificial sequence
  SiRNA target sequence
gtattattcagaaagcttt

SEQ ID NO: 224903 - DNA, 19 bp, Artificial sequence
  SiRNA target sequence
tattattcagaaagcttta

SEQ ID NO: 224904 - DNA, 19 bp, Artificial sequence
  SiRNA target sequence
attattcagaaagctttag

SEQ ID NO: 224905 - DNA, 19 bp, Artificial sequence
  SiRNA target sequence
ttattcagaaagctttaga

SEQ ID NO: 224906 - DNA, 19 bp, Artificial sequence
  SiRNA target sequence
tattcagaaagctttagat

SEQ ID NO: 224907 - DNA, 19 bp, Artificial sequence
  SiRNA target sequence
attcagaaagctttagata

SEQ ID NO: 224908 - DNA, 19 bp, Artificial sequence
  SiRNA target sequence
ttcagaaagctttagataa

SEQ ID NO: 224909 - DNA, 19 bp, Artificial sequence
  SiRNA target sequence
tcagaaagctttagataaa

SEQ ID NO: 224910 - DNA, 19 bp, Artificial sequence
  SiRNA target sequence
cagaaagctttagataaat

SEQ ID NO: 224911 - DNA, 19 bp, Artificial sequence
  SiRNA target sequence
agaaagctttagataaata

SEQ ID NO: 224912 - DNA, 19 bp, Artificial sequence
  SiRNA target sequence
gaaagctttagataaatat

SEQ ID NO: 224913 - DNA, 19 bp, Artificial sequence
  SiRNA target sequence
aaagctttagataaatatc

SEQ ID NO: 224914 - DNA, 19 bp, Artificial sequence
  SiRNA target sequence
aagctttagataaatatcc

SEQ ID NO: 224915 - DNA, 19 bp, Artificial sequence
  SiRNA target sequence
agctttagataaatatcct

SEQ ID NO: 224916 - DNA, 19 bp, Artificial sequence
  SiRNA target sequence
gctttagataaatatcctt

SEQ ID NO: 224917 - DNA, 19 bp, Artificial sequence
  SiRNA target sequence
ctttagataaatatccttt

SEQ ID NO: 224918 - DNA, 19 bp, Artificial sequence
  SiRNA target sequence
tttagataaatatcctttt

SEQ ID NO: 224919 - DNA, 19 bp, Artificial sequence
  SiRNA target sequence
ttagataaatatcctttta

SEQ ID NO: 224920 - DNA, 19 bp, Artificial sequence
  SiRNA target sequence
tagataaatatccttttac

SEQ ID NO: 224921 - DNA, 19 bp, Artificial sequence
  SiRNA target sequence
agataaatatccttttaca

SEQ ID NO: 224922 - DNA, 19 bp, Artificial sequence
  SiRNA target sequence
gataaatatccttttacaa

SEQ ID NO: 224923 - DNA, 19 bp, Artificial sequence
  SiRNA target sequence
ataaatatccttttacaaa

SEQ ID NO: 224924 - DNA, 19 bp, Artificial sequence
  SiRNA target sequence
taaatatccttttacaaaa

SEQ ID NO: 224925 - DNA, 19 bp, Artificial sequence
  SiRNA target sequence
aaatatccttttacaaaaa

SEQ ID NO: 224926 - DNA, 19 bp, Artificial sequence
  SiRNA target sequence
aatatccttttacaaaaat

SEQ ID NO: 224927 - DNA, 19 bp, Artificial sequence
  SiRNA target sequence
atatccttttacaaaaata

SEQ ID NO: 224928 - DNA, 19 bp, Artificial sequence
  SiRNA target sequence
tatccttttacaaaaatat

SEQ ID NO: 224929 - DNA, 19 bp, Artificial sequence
  SiRNA target sequence
atccttttacaaaaatatt

SEQ ID NO: 224930 - DNA, 19 bp, Artificial sequence
  SiRNA target sequence
tccttttacaaaaatattt

SEQ ID NO: 224931 - DNA, 19 bp, Artificial sequence
  SiRNA target sequence
ccttttacaaaaatatttg

SEQ ID NO: 224932 - DNA, 19 bp, Artificial sequence
  SiRNA target sequence
cttttacaaaaatatttga

SEQ ID NO: 224933 - DNA, 19 bp, Artificial sequence
  SiRNA target sequence
ttttacaaaaatatttgat

SEQ ID NO: 224934 - DNA, 19 bp, Artificial sequence
  SiRNA target sequence
tttacaaaaatatttgatg

SEQ ID NO: 224935 - DNA, 19 bp, Artificial sequence
  SiRNA target sequence
ttacaaaaatatttgatgt

SEQ ID NO: 224936 - DNA, 19 bp, Artificial sequence
  SiRNA target sequence
tacaaaaatatttgatgta

SEQ ID NO: 224937 - DNA, 19 bp, Artificial sequence
  SiRNA target sequence
acaaaaatatttgatgtaa

SEQ ID NO: 224938 - DNA, 19 bp, Artificial sequence
  SiRNA target sequence
caaaaatatttgatgtaac

SEQ ID NO: 224939 - DNA, 19 bp, Artificial sequence
  SiRNA target sequence
aaaaatatttgatgtaact

SEQ ID NO: 224940 - DNA, 19 bp, Artificial sequence
  SiRNA target sequence
aaaatatttgatgtaactt

SEQ ID NO: 224941 - DNA, 19 bp, Artificial sequence
  SiRNA target sequence
aaatatttgatgtaacttt

SEQ ID NO: 224942 - DNA, 19 bp, Artificial sequence
  SiRNA target sequence
aatatttgatgtaacttta

SEQ ID NO: 224943 - DNA, 19 bp, Artificial sequence
  SiRNA target sequence
atatttgatgtaactttaa

SEQ ID NO: 224944 - DNA, 19 bp, Artificial sequence
  SiRNA target sequence
tatttgatgtaactttaat

SEQ ID NO: 224945 - DNA, 19 bp, Artificial sequence
  SiRNA target sequence
atttgatgtaactttaata

SEQ ID NO: 224946 - DNA, 19 bp, Artificial sequence
  SiRNA target sequence
tttgatgtaactttaatag

SEQ ID NO: 224947 - DNA, 19 bp, Artificial sequence
  SiRNA target sequence
ttgatgtaactttaatagt

SEQ ID NO: 224948 - DNA, 19 bp, Artificial sequence
  SiRNA target sequence
tgatgtaactttaatagtt

SEQ ID NO: 224949 - DNA, 19 bp, Artificial sequence
  SiRNA target sequence
gatgtaactttaatagttt

SEQ ID NO: 224950 - DNA, 19 bp, Artificial sequence
  SiRNA target sequence
atgtaactttaatagtttt

SEQ ID NO: 224951 - DNA, 19 bp, Artificial sequence
  SiRNA target sequence
tgtaactttaatagttttc

SEQ ID NO: 224952 - DNA, 19 bp, Artificial sequence
  SiRNA target sequence
gtaactttaatagttttcg

SEQ ID NO: 224953 - DNA, 19 bp, Artificial sequence
  SiRNA target sequence
taactttaatagttttcgc

SEQ ID NO: 224954 - DNA, 19 bp, Artificial sequence
  SiRNA target sequence
aactttaatagttttcgct

SEQ ID NO: 224955 - DNA, 19 bp, Artificial sequence
  SiRNA target sequence
actttaatagttttcgctg

SEQ ID NO: 224956 - DNA, 19 bp, Artificial sequence
  SiRNA target sequence
ctttaatagttttcgctgt

SEQ ID NO: 224957 - DNA, 19 bp, Artificial sequence
  SiRNA target sequence
tttaatagttttcgctgtt

SEQ ID NO: 224958 - DNA, 19 bp, Artificial sequence
  SiRNA target sequence
ttaatagttttcgctgttg

SEQ ID NO: 224959 - DNA, 19 bp, Artificial sequence
  SiRNA target sequence
taatagttttcgctgttgc

SEQ ID NO: 224960 - DNA, 19 bp, Artificial sequence
  SiRNA target sequence
aatagttttcgctgttgca

SEQ ID NO: 224961 - DNA, 19 bp, Artificial sequence
  SiRNA target sequence
atagttttcgctgttgcat

SEQ ID NO: 224962 - DNA, 19 bp, Artificial sequence
  SiRNA target sequence
tagttttcgctgttgcatt

SEQ ID NO: 224963 - DNA, 19 bp, Artificial sequence
  SiRNA target sequence
agttttcgctgttgcattt

SEQ ID NO: 224964 - DNA, 19 bp, Artificial sequence
  SiRNA target sequence
gttttcgctgttgcattta

SEQ ID NO: 224965 - DNA, 19 bp, Artificial sequence
  SiRNA target sequence
ttttcgctgttgcatttac

SEQ ID NO: 224966 - DNA, 19 bp, Artificial sequence
  SiRNA target sequence
tttcgctgttgcatttact

SEQ ID NO: 224967 - DNA, 19 bp, Artificial sequence
  SiRNA target sequence
ttcgctgttgcatttacta

SEQ ID NO: 224968 - DNA, 19 bp, Artificial sequence
  SiRNA target sequence
tcgctgttgcatttactat

SEQ ID NO: 224969 - DNA, 19 bp, Artificial sequence
  SiRNA target sequence
cgctgttgcatttactata

SEQ ID NO: 224970 - DNA, 19 bp, Artificial sequence
  SiRNA target sequence
gctgttgcatttactatac

SEQ ID NO: 224971 - DNA, 19 bp, Artificial sequence
  SiRNA target sequence
ctgttgcatttactatact

SEQ ID NO: 224972 - DNA, 19 bp, Artificial sequence
  SiRNA target sequence
tgttgcatttactatactt

SEQ ID NO: 224973 - DNA, 19 bp, Artificial sequence
  SiRNA target sequence
gttgcatttactatacttg

SEQ ID NO: 224974 - DNA, 19 bp, Artificial sequence
  SiRNA target sequence
ttgcatttactatacttgg

SEQ ID NO: 224975 - DNA, 19 bp, Artificial sequence
  SiRNA target sequence
tgcatttactatacttggt

SEQ ID NO: 224976 - DNA, 19 bp, Artificial sequence
  SiRNA target sequence
gcatttactatacttggta

SEQ ID NO: 224977 - DNA, 19 bp, Artificial sequence
  SiRNA target sequence
catttactatacttggtag

SEQ ID NO: 224978 - DNA, 19 bp, Artificial sequence
  SiRNA target sequence
atttactatacttggtagt

SEQ ID NO: 224979 - DNA, 19 bp, Artificial sequence
  SiRNA target sequence
tttactatacttggtagtt

SEQ ID NO: 224980 - DNA, 19 bp, Artificial sequence
  SiRNA target sequence
ttactatacttggtagttt

SEQ ID NO: 224981 - DNA, 19 bp, Artificial sequence
  SiRNA target sequence
tactatacttggtagttta

SEQ ID NO: 224982 - DNA, 19 bp, Artificial sequence
  SiRNA target sequence
actatacttggtagtttat

SEQ ID NO: 224983 - DNA, 19 bp, Artificial sequence
  SiRNA target sequence
ctatacttggtagtttatt

SEQ ID NO: 224984 - DNA, 19 bp, Artificial sequence
  SiRNA target sequence
tatacttggtagtttatta

SEQ ID NO: 224985 - DNA, 19 bp, Artificial sequence
  SiRNA target sequence
atacttggtagtttattac

SEQ ID NO: 224986 - DNA, 19 bp, Artificial sequence
  SiRNA target sequence
tacttggtagtttattact

SEQ ID NO: 224987 - DNA, 19 bp, Artificial sequence
  SiRNA target sequence
acttggtagtttattactt

SEQ ID NO: 224988 - DNA, 19 bp, Artificial sequence
  SiRNA target sequence
cttggtagtttattacttc

SEQ ID NO: 224989 - DNA, 19 bp, Artificial sequence
  SiRNA target sequence
ttggtagtttattacttcc

SEQ ID NO: 224990 - DNA, 19 bp, Artificial sequence
  SiRNA target sequence
tggtagtttattacttccc

SEQ ID NO: 224991 - DNA, 19 bp, Artificial sequence
  SiRNA target sequence
ggtagtttattacttccct

SEQ ID NO: 224992 - DNA, 19 bp, Artificial sequence
  SiRNA target sequence
gtagtttattacttccctt

SEQ ID NO: 224993 - DNA, 19 bp, Artificial sequence
  SiRNA target sequence
tagtttattacttcccttt

SEQ ID NO: 224994 - DNA, 19 bp, Artificial sequence
  SiRNA target sequence
agtttattacttcccttta

SEQ ID NO: 224995 - DNA, 19 bp, Artificial sequence
  SiRNA target sequence
gtttattacttccctttag

SEQ ID NO: 224996 - DNA, 19 bp, Artificial sequence
  SiRNA target sequence
tttattacttccctttagt

SEQ ID NO: 224997 - DNA, 19 bp, Artificial sequence
  SiRNA target sequence
ttattacttccctttagtg

SEQ ID NO: 224998 - DNA, 19 bp, Artificial sequence
  SiRNA target sequence
tattacttccctttagtga

SEQ ID NO: 224999 - DNA, 19 bp, Artificial sequence
  SiRNA target sequence
attacttccctttagtgat

SEQ ID NO: 225000 - DNA, 19 bp, Artificial sequence
  SiRNA target sequence
ttacttccctttagtgatt

SEQ ID NO: 225001 - DNA, 19 bp, Artificial sequence
  SiRNA target sequence
tacttccctttagtgatta

SEQ ID NO: 225002 - DNA, 19 bp, Artificial sequence
  SiRNA target sequence
acttccctttagtgattat

SEQ ID NO: 225003 - DNA, 19 bp, Artificial sequence
  SiRNA target sequence
cttccctttagtgattata

SEQ ID NO: 225004 - DNA, 19 bp, Artificial sequence
  SiRNA target sequence
ttccctttagtgattatat

SEQ ID NO: 225005 - DNA, 19 bp, Artificial sequence
  SiRNA target sequence
tccctttagtgattatatt

SEQ ID NO: 225006 - DNA, 19 bp, Artificial sequence
  SiRNA target sequence
ccctttagtgattatattc

SEQ ID NO: 225007 - DNA, 19 bp, Artificial sequence
  SiRNA target sequence
cctttagtgattatattca

SEQ ID NO: 225008 - DNA, 19 bp, Artificial sequence
  SiRNA target sequence
ctttagtgattatattcag

SEQ ID NO: 225009 - DNA, 19 bp, Artificial sequence
  SiRNA target sequence
tttagtgattatattcaga

SEQ ID NO: 225010 - DNA, 19 bp, Artificial sequence
  SiRNA target sequence
ttagtgattatattcagat

SEQ ID NO: 225011 - DNA, 19 bp, Artificial sequence
  SiRNA target sequence
tagtgattatattcagatt

SEQ ID NO: 225012 - DNA, 19 bp, Artificial sequence
  SiRNA target sequence
agtgattatattcagattc

SEQ ID NO: 225013 - DNA, 19 bp, Artificial sequence
  SiRNA target sequence
gtgattatattcagattca

SEQ ID NO: 225014 - DNA, 19 bp, Artificial sequence
  SiRNA target sequence
tgattatattcagattcaa

SEQ ID NO: 225015 - DNA, 19 bp, Artificial sequence
  SiRNA target sequence
gattatattcagattcaac

SEQ ID NO: 225016 - DNA, 19 bp, Artificial sequence
  SiRNA target sequence
attatattcagattcaacc

SEQ ID NO: 225017 - DNA, 19 bp, Artificial sequence
  SiRNA target sequence
ttatattcagattcaaccg

SEQ ID NO: 225018 - DNA, 19 bp, Artificial sequence
  SiRNA target sequence
tatattcagattcaaccgt

SEQ ID NO: 225019 - DNA, 19 bp, Artificial sequence
  SiRNA target sequence
atattcagattcaaccgtt

SEQ ID NO: 225020 - DNA, 19 bp, Artificial sequence
  SiRNA target sequence
tattcagattcaaccgttt

SEQ ID NO: 225021 - DNA, 19 bp, Artificial sequence
  SiRNA target sequence
attcagattcaaccgtttt

SEQ ID NO: 225022 - DNA, 19 bp, Artificial sequence
  SiRNA target sequence
ttcagattcaaccgttttg

SEQ ID NO: 225023 - DNA, 19 bp, Artificial sequence
  SiRNA target sequence
tcagattcaaccgttttgg

SEQ ID NO: 225024 - DNA, 19 bp, Artificial sequence
  SiRNA target sequence
cagattcaaccgttttggg

SEQ ID NO: 225025 - DNA, 19 bp, Artificial sequence
  SiRNA target sequence
agattcaaccgttttgggc

SEQ ID NO: 225026 - DNA, 19 bp, Artificial sequence
  SiRNA target sequence
gattcaaccgttttgggcc

SEQ ID NO: 225027 - DNA, 19 bp, Artificial sequence
  SiRNA target sequence
attcaaccgttttgggcca

SEQ ID NO: 225028 - DNA, 19 bp, Artificial sequence
  SiRNA target sequence
ttcaaccgttttgggccaa

SEQ ID NO: 225029 - DNA, 19 bp, Artificial sequence
  SiRNA target sequence
tcaaccgttttgggccaaa

SEQ ID NO: 225030 - DNA, 19 bp, Artificial sequence
  SiRNA target sequence
caaccgttttgggccaaag

SEQ ID NO: 225031 - DNA, 19 bp, Artificial sequence
  SiRNA target sequence
aaccgttttgggccaaaga

SEQ ID NO: 225032 - DNA, 19 bp, Artificial sequence
  SiRNA target sequence
accgttttgggccaaagat

SEQ ID NO: 225033 - DNA, 19 bp, Artificial sequence
  SiRNA target sequence
ccgttttgggccaaagata

SEQ ID NO: 225034 - DNA, 19 bp, Artificial sequence
  SiRNA target sequence
cgttttgggccaaagatat

SEQ ID NO: 225035 - DNA, 19 bp, Artificial sequence
  SiRNA target sequence
gttttgggccaaagatatt

SEQ ID NO: 225036 - DNA, 19 bp, Artificial sequence
  SiRNA target sequence
ttttgggccaaagatattt

SEQ ID NO: 225037 - DNA, 19 bp, Artificial sequence
  SiRNA target sequence
tttgggccaaagatatttt

SEQ ID NO: 225038 - DNA, 19 bp, Artificial sequence
  SiRNA target sequence
ttgggccaaagatattttt

SEQ ID NO: 225039 - DNA, 19 bp, Artificial sequence
  SiRNA target sequence
tgggccaaagatatttttg

SEQ ID NO: 225040 - DNA, 19 bp, Artificial sequence
  SiRNA target sequence
gggccaaagatatttttgc

SEQ ID NO: 225041 - DNA, 19 bp, Artificial sequence
  SiRNA target sequence
ggccaaagatatttttgct

SEQ ID NO: 225042 - DNA, 19 bp, Artificial sequence
  SiRNA target sequence
gccaaagatatttttgctg

SEQ ID NO: 225043 - DNA, 19 bp, Artificial sequence
  SiRNA target sequence
ccaaagatatttttgctga

SEQ ID NO: 225044 - DNA, 19 bp, Artificial sequence
  SiRNA target sequence
caaagatatttttgctgat

SEQ ID NO: 225045 - DNA, 19 bp, Artificial sequence
  SiRNA target sequence
aaagatatttttgctgatg

SEQ ID NO: 225046 - DNA, 19 bp, Artificial sequence
  SiRNA target sequence
aagatatttttgctgatgg

SEQ ID NO: 225047 - DNA, 19 bp, Artificial sequence
  SiRNA target sequence
agatatttttgctgatgga

SEQ ID NO: 225048 - DNA, 19 bp, Artificial sequence
  SiRNA target sequence
gatatttttgctgatggaa

SEQ ID NO: 225049 - DNA, 19 bp, Artificial sequence
  SiRNA target sequence
atatttttgctgatggaaa

SEQ ID NO: 225050 - DNA, 19 bp, Artificial sequence
  SiRNA target sequence
tatttttgctgatggaaaa

SEQ ID NO: 225051 - DNA, 19 bp, Artificial sequence
  SiRNA target sequence
atttttgctgatggaaaag

SEQ ID NO: 225052 - DNA, 19 bp, Artificial sequence
  SiRNA target sequence
tttttgctgatggaaaagc

SEQ ID NO: 225053 - DNA, 19 bp, Artificial sequence
  SiRNA target sequence
ttttgctgatggaaaagct

SEQ ID NO: 225054 - DNA, 19 bp, Artificial sequence
  SiRNA target sequence
tttgctgatggaaaagctg

SEQ ID NO: 225055 - DNA, 19 bp, Artificial sequence
  SiRNA target sequence
ttgctgatggaaaagctgt

SEQ ID NO: 225056 - DNA, 19 bp, Artificial sequence
  SiRNA target sequence
tgctgatggaaaagctgtt

SEQ ID NO: 225057 - DNA, 19 bp, Artificial sequence
  SiRNA target sequence
gctgatggaaaagctgttg

SEQ ID NO: 225058 - DNA, 19 bp, Artificial sequence
  SiRNA target sequence
ctgatggaaaagctgttgc

SEQ ID NO: 225059 - DNA, 19 bp, Artificial sequence
  SiRNA target sequence
tgatggaaaagctgttgcc

SEQ ID NO: 225060 - DNA, 19 bp, Artificial sequence
  SiRNA target sequence
gatggaaaagctgttgcca

SEQ ID NO: 225061 - DNA, 19 bp, Artificial sequence
  SiRNA target sequence
atggaaaagctgttgccag

SEQ ID NO: 225062 - DNA, 19 bp, Artificial sequence
  SiRNA target sequence
tggaaaagctgttgccaga

SEQ ID NO: 225063 - DNA, 19 bp, Artificial sequence
  SiRNA target sequence
ggaaaagctgttgccagaa

SEQ ID NO: 225064 - DNA, 19 bp, Artificial sequence
  SiRNA target sequence
gaaaagctgttgccagaag

SEQ ID NO: 225065 - DNA, 19 bp, Artificial sequence
  SiRNA target sequence
aaaagctgttgccagaagt

SEQ ID NO: 225066 - DNA, 19 bp, Artificial sequence
  SiRNA target sequence
aaagctgttgccagaagta

SEQ ID NO: 225067 - DNA, 19 bp, Artificial sequence
  SiRNA target sequence
aagctgttgccagaagtac

SEQ ID NO: 225068 - DNA, 19 bp, Artificial sequence
  SiRNA target sequence
agctgttgccagaagtaca

SEQ ID NO: 225069 - DNA, 19 bp, Artificial sequence
  SiRNA target sequence
gctgttgccagaagtacag

SEQ ID NO: 225070 - DNA, 19 bp, Artificial sequence
  SiRNA target sequence
ctgttgccagaagtacaga

SEQ ID NO: 225071 - DNA, 19 bp, Artificial sequence
  SiRNA target sequence
tgttgccagaagtacagat

SEQ ID NO: 225072 - DNA, 19 bp, Artificial sequence
  SiRNA target sequence
gttgccagaagtacagatt

SEQ ID NO: 225073 - DNA, 19 bp, Artificial sequence
  SiRNA target sequence
ttgccagaagtacagattt

SEQ ID NO: 225074 - DNA, 19 bp, Artificial sequence
  SiRNA target sequence
tgccagaagtacagatttt

SEQ ID NO: 225075 - DNA, 19 bp, Artificial sequence
  SiRNA target sequence
gccagaagtacagattttt

SEQ ID NO: 225076 - DNA, 19 bp, Artificial sequence
  SiRNA target sequence
ccagaagtacagatttttt

SEQ ID NO: 225077 - DNA, 19 bp, Artificial sequence
  SiRNA target sequence
cagaagtacagatttttta

SEQ ID NO: 225078 - DNA, 19 bp, Artificial sequence
  SiRNA target sequence
agaagtacagattttttat

SEQ ID NO: 225079 - DNA, 19 bp, Artificial sequence
  SiRNA target sequence
gaagtacagattttttatt

SEQ ID NO: 225080 - DNA, 19 bp, Artificial sequence
  SiRNA target sequence
aagtacagattttttattt

SEQ ID NO: 225081 - DNA, 19 bp, Artificial sequence
  SiRNA target sequence
agtacagattttttatttt

SEQ ID NO: 225082 - DNA, 19 bp, Artificial sequence
  SiRNA target sequence
gtacagattttttattttc

SEQ ID NO: 225083 - DNA, 19 bp, Artificial sequence
  SiRNA target sequence
tacagattttttattttct

SEQ ID NO: 225084 - DNA, 19 bp, Artificial sequence
  SiRNA target sequence
acagattttttattttcta

SEQ ID NO: 225085 - DNA, 19 bp, Artificial sequence
  SiRNA target sequence
cagattttttattttctat

SEQ ID NO: 225086 - DNA, 19 bp, Artificial sequence
  SiRNA target sequence
agattttttattttctatt

SEQ ID NO: 225087 - DNA, 19 bp, Artificial sequence
  SiRNA target sequence
gattttttattttctattg

SEQ ID NO: 225088 - DNA, 19 bp, Artificial sequence
  SiRNA target sequence
attttttattttctattgc

SEQ ID NO: 225089 - DNA, 19 bp, Artificial sequence
  SiRNA target sequence
ttttttattttctattgca

SEQ ID NO: 225090 - DNA, 19 bp, Artificial sequence
  SiRNA target sequence
tttttattttctattgcac

SEQ ID NO: 225091 - DNA, 19 bp, Artificial sequence
  SiRNA target sequence
ttttattttctattgcact

SEQ ID NO: 225092 - DNA, 19 bp, Artificial sequence
  SiRNA target sequence
tttattttctattgcactt

SEQ ID NO: 225093 - DNA, 19 bp, Artificial sequence
  SiRNA target sequence
ttattttctattgcacttg

SEQ ID NO: 225094 - DNA, 19 bp, Artificial sequence
  SiRNA target sequence
tattttctattgcacttgt

SEQ ID NO: 225095 - DNA, 19 bp, Artificial sequence
  SiRNA target sequence
attttctattgcacttgtt

SEQ ID NO: 225096 - DNA, 19 bp, Artificial sequence
  SiRNA target sequence
ttttctattgcacttgttt

SEQ ID NO: 225097 - DNA, 19 bp, Artificial sequence
  SiRNA target sequence
tttctattgcacttgtttt

SEQ ID NO: 225098 - DNA, 19 bp, Artificial sequence
  SiRNA target sequence
ttctattgcacttgttttc

SEQ ID NO: 225099 - DNA, 19 bp, Artificial sequence
  SiRNA target sequence
tctattgcacttgttttca

SEQ ID NO: 225100 - DNA, 19 bp, Artificial sequence
  SiRNA target sequence
ctattgcacttgttttcaa

SEQ ID NO: 225101 - DNA, 19 bp, Artificial sequence
  SiRNA target sequence
tattgcacttgttttcaat

SEQ ID NO: 225102 - DNA, 19 bp, Artificial sequence
  SiRNA target sequence
attgcacttgttttcaatg

SEQ ID NO: 225103 - DNA, 19 bp, Artificial sequence
  SiRNA target sequence
ttgcacttgttttcaatga

SEQ ID NO: 225104 - DNA, 19 bp, Artificial sequence
  SiRNA target sequence
tgcacttgttttcaatgaa

SEQ ID NO: 225105 - DNA, 19 bp, Artificial sequence
  SiRNA target sequence
gcacttgttttcaatgaat

SEQ ID NO: 225106 - DNA, 19 bp, Artificial sequence
  SiRNA target sequence
cacttgttttcaatgaatg

SEQ ID NO: 225107 - DNA, 19 bp, Artificial sequence
  SiRNA target sequence
acttgttttcaatgaatgg

SEQ ID NO: 225108 - DNA, 19 bp, Artificial sequence
  SiRNA target sequence
cttgttttcaatgaatgga

SEQ ID NO: 225109 - DNA, 19 bp, Artificial sequence
  SiRNA target sequence
ttgttttcaatgaatggac

SEQ ID NO: 225110 - DNA, 19 bp, Artificial sequence
  SiRNA target sequence
tgttttcaatgaatggaca

SEQ ID NO: 225111 - DNA, 19 bp, Artificial sequence
  SiRNA target sequence
gttttcaatgaatggacaa

SEQ ID NO: 225112 - DNA, 19 bp, Artificial sequence
  SiRNA target sequence
ttttcaatgaatggacaag

SEQ ID NO: 225113 - DNA, 19 bp, Artificial sequence
  SiRNA target sequence
tttcaatgaatggacaagt

SEQ ID NO: 225114 - DNA, 19 bp, Artificial sequence
  SiRNA target sequence
ttcaatgaatggacaagtt

SEQ ID NO: 225115 - DNA, 19 bp, Artificial sequence
  SiRNA target sequence
tcaatgaatggacaagttc

SEQ ID NO: 225116 - DNA, 19 bp, Artificial sequence
  SiRNA target sequence
caatgaatggacaagttct

SEQ ID NO: 225117 - DNA, 19 bp, Artificial sequence
  SiRNA target sequence
aatgaatggacaagttctg

SEQ ID NO: 225118 - DNA, 19 bp, Artificial sequence
  SiRNA target sequence
atgaatggacaagttctgc

SEQ ID NO: 225119 - DNA, 19 bp, Artificial sequence
  SiRNA target sequence
tgaatggacaagttctgct

SEQ ID NO: 225120 - DNA, 19 bp, Artificial sequence
  SiRNA target sequence
gaatggacaagttctgcta

SEQ ID NO: 225121 - DNA, 19 bp, Artificial sequence
  SiRNA target sequence
aatggacaagttctgctat

SEQ ID NO: 225122 - DNA, 19 bp, Artificial sequence
  SiRNA target sequence
atggacaagttctgctatc

SEQ ID NO: 225123 - DNA, 19 bp, Artificial sequence
  SiRNA target sequence
tggacaagttctgctatct

SEQ ID NO: 225124 - DNA, 19 bp, Artificial sequence
  SiRNA target sequence
ggacaagttctgctatcta

SEQ ID NO: 225125 - DNA, 19 bp, Artificial sequence
  SiRNA target sequence
gacaagttctgctatctat

SEQ ID NO: 225126 - DNA, 19 bp, Artificial sequence
  SiRNA target sequence
acaagttctgctatctatg

SEQ ID NO: 225127 - DNA, 19 bp, Artificial sequence
  SiRNA target sequence
caagttctgctatctatgt

SEQ ID NO: 225128 - DNA, 19 bp, Artificial sequence
  SiRNA target sequence
aagttctgctatctatgtt

SEQ ID NO: 225129 - DNA, 19 bp, Artificial sequence
  SiRNA target sequence
agttctgctatctatgttt

SEQ ID NO: 225130 - DNA, 19 bp, Artificial sequence
  SiRNA target sequence
gttctgctatctatgtttt

SEQ ID NO: 225131 - DNA, 19 bp, Artificial sequence
  SiRNA target sequence
ttctgctatctatgtttta

SEQ ID NO: 225132 - DNA, 19 bp, Artificial sequence
  SiRNA target sequence
tctgctatctatgttttat

SEQ ID NO: 225133 - DNA, 19 bp, Artificial sequence
  SiRNA target sequence
ctgctatctatgttttatc

SEQ ID NO: 225134 - DNA, 19 bp, Artificial sequence
  SiRNA target sequence
tgctatctatgttttatct

SEQ ID NO: 225135 - DNA, 19 bp, Artificial sequence
  SiRNA target sequence
gctatctatgttttatctg

SEQ ID NO: 225136 - DNA, 19 bp, Artificial sequence
  SiRNA target sequence
ctatctatgttttatctga

SEQ ID NO: 225137 - DNA, 19 bp, Artificial sequence
  SiRNA target sequence
tatctatgttttatctgaa

SEQ ID NO: 225138 - DNA, 19 bp, Artificial sequence
  SiRNA target sequence
atctatgttttatctgaaa

SEQ ID NO: 225139 - DNA, 19 bp, Artificial sequence
  SiRNA target sequence
tctatgttttatctgaaat

SEQ ID NO: 225140 - DNA, 19 bp, Artificial sequence
  SiRNA target sequence
ctatgttttatctgaaatg

SEQ ID NO: 225141 - DNA, 19 bp, Artificial sequence
  SiRNA target sequence
tatgttttatctgaaatgt

SEQ ID NO: 225142 - DNA, 19 bp, Artificial sequence
  SiRNA target sequence
atgttttatctgaaatgtt

SEQ ID NO: 225143 - DNA, 19 bp, Artificial sequence
  SiRNA target sequence
tgttttatctgaaatgttt

SEQ ID NO: 225144 - DNA, 19 bp, Artificial sequence
  SiRNA target sequence
gttttatctgaaatgtttg

SEQ ID NO: 225145 - DNA, 19 bp, Artificial sequence
  SiRNA target sequence
ttttatctgaaatgtttgg

SEQ ID NO: 225146 - DNA, 19 bp, Artificial sequence
  SiRNA target sequence
tttatctgaaatgtttggt

SEQ ID NO: 225147 - DNA, 19 bp, Artificial sequence
  SiRNA target sequence
ttatctgaaatgtttggta

SEQ ID NO: 225148 - DNA, 19 bp, Artificial sequence
  SiRNA target sequence
tatctgaaatgtttggtag

SEQ ID NO: 225149 - DNA, 19 bp, Artificial sequence
  SiRNA target sequence
atctgaaatgtttggtagt

SEQ ID NO: 225150 - DNA, 19 bp, Artificial sequence
  SiRNA target sequence
tctgaaatgtttggtagtt

SEQ ID NO: 225151 - DNA, 19 bp, Artificial sequence
  SiRNA target sequence
ctgaaatgtttggtagttt

SEQ ID NO: 225152 - DNA, 19 bp, Artificial sequence
  SiRNA target sequence
tgaaatgtttggtagtttg

SEQ ID NO: 225153 - DNA, 19 bp, Artificial sequence
  SiRNA target sequence
gaaatgtttggtagtttga

SEQ ID NO: 225154 - DNA, 19 bp, Artificial sequence
  SiRNA target sequence
aaatgtttggtagtttgat

SEQ ID NO: 225155 - DNA, 19 bp, Artificial sequence
  SiRNA target sequence
aatgtttggtagtttgatt

SEQ ID NO: 225156 - DNA, 19 bp, Artificial sequence
  SiRNA target sequence
atgtttggtagtttgattc

SEQ ID NO: 225157 - DNA, 19 bp, Artificial sequence
  SiRNA target sequence
tgtttggtagtttgattct

SEQ ID NO: 225158 - DNA, 19 bp, Artificial sequence
  SiRNA target sequence
gtttggtagtttgattctt

SEQ ID NO: 225159 - DNA, 19 bp, Artificial sequence
  SiRNA target sequence
tttggtagtttgattcttt

SEQ ID NO: 225160 - DNA, 19 bp, Artificial sequence
  SiRNA target sequence
ttggtagtttgattctttc

SEQ ID NO: 225161 - DNA, 19 bp, Artificial sequence
  SiRNA target sequence
tggtagtttgattctttca

SEQ ID NO: 225162 - DNA, 19 bp, Artificial sequence
  SiRNA target sequence
ggtagtttgattctttcat

SEQ ID NO: 225163 - DNA, 19 bp, Artificial sequence
  SiRNA target sequence
gtagtttgattctttcata

SEQ ID NO: 225164 - DNA, 19 bp, Artificial sequence
  SiRNA target sequence
tagtttgattctttcatat

SEQ ID NO: 225165 - DNA, 19 bp, Artificial sequence
  SiRNA target sequence
agtttgattctttcatatt

SEQ ID NO: 225166 - DNA, 19 bp, Artificial sequence
  SiRNA target sequence
gtttgattctttcatattt

SEQ ID NO: 225167 - DNA, 19 bp, Artificial sequence
  SiRNA target sequence
tttgattctttcatattta

SEQ ID NO: 225168 - DNA, 19 bp, Artificial sequence
  SiRNA target sequence
ttgattctttcatatttat

SEQ ID NO: 225169 - DNA, 19 bp, Artificial sequence
  SiRNA target sequence
tgattctttcatatttatt

SEQ ID NO: 225170 - DNA, 19 bp, Artificial sequence
  SiRNA target sequence
gattctttcatatttattt

SEQ ID NO: 225171 - DNA, 19 bp, Artificial sequence
  SiRNA target sequence
attctttcatatttattta

SEQ ID NO: 225172 - DNA, 19 bp, Artificial sequence
  SiRNA target sequence
ttctttcatatttatttat

SEQ ID NO: 225173 - DNA, 19 bp, Artificial sequence
  SiRNA target sequence
tctttcatatttatttatg

SEQ ID NO: 225174 - DNA, 19 bp, Artificial sequence
  SiRNA target sequence
ctttcatatttatttatga

SEQ ID NO: 225175 - DNA, 19 bp, Artificial sequence
  SiRNA target sequence
tttcatatttatttatgac

SEQ ID NO: 225176 - DNA, 19 bp, Artificial sequence
  SiRNA target sequence
ttcatatttatttatgacg

SEQ ID NO: 225177 - DNA, 19 bp, Artificial sequence
  SiRNA target sequence
tcatatttatttatgacgt

SEQ ID NO: 225178 - DNA, 19 bp, Artificial sequence
  SiRNA target sequence
catatttatttatgacgtt

SEQ ID NO: 225179 - DNA, 19 bp, Artificial sequence
  SiRNA target sequence
atatttatttatgacgttt

SEQ ID NO: 225180 - DNA, 19 bp, Artificial sequence
  SiRNA target sequence
tatttatttatgacgtttg

SEQ ID NO: 225181 - DNA, 19 bp, Artificial sequence
  SiRNA target sequence
atttatttatgacgtttgc

SEQ ID NO: 225182 - DNA, 19 bp, Artificial sequence
  SiRNA target sequence
tttatttatgacgtttgct

SEQ ID NO: 225183 - DNA, 19 bp, Artificial sequence
  SiRNA target sequence
ttatttatgacgtttgcta

SEQ ID NO: 225184 - DNA, 19 bp, Artificial sequence
  SiRNA target sequence
tatttatgacgtttgctaa

SEQ ID NO: 225185 - DNA, 19 bp, Artificial sequence
  SiRNA target sequence
atttatgacgtttgctaat

SEQ ID NO: 225186 - DNA, 19 bp, Artificial sequence
  SiRNA target sequence
tttatgacgtttgctaatg

SEQ ID NO: 225187 - DNA, 19 bp, Artificial sequence
  SiRNA target sequence
ttatgacgtttgctaatgg

SEQ ID NO: 225188 - DNA, 19 bp, Artificial sequence
  SiRNA target sequence
tatgacgtttgctaatggt

SEQ ID NO: 225189 - DNA, 19 bp, Artificial sequence
  SiRNA target sequence
atgacgtttgctaatggtc

SEQ ID NO: 225190 - DNA, 19 bp, Artificial sequence
  SiRNA target sequence
tgacgtttgctaatggtct

SEQ ID NO: 225191 - DNA, 19 bp, Artificial sequence
  SiRNA target sequence
gacgtttgctaatggtctt

SEQ ID NO: 225192 - DNA, 19 bp, Artificial sequence
  SiRNA target sequence
acgtttgctaatggtcttt

SEQ ID NO: 225193 - DNA, 19 bp, Artificial sequence
  SiRNA target sequence
cgtttgctaatggtctttc

SEQ ID NO: 225194 - DNA, 19 bp, Artificial sequence
  SiRNA target sequence
gtttgctaatggtctttcg

SEQ ID NO: 225195 - DNA, 19 bp, Artificial sequence
  SiRNA target sequence
tttgctaatggtctttcga

SEQ ID NO: 225196 - DNA, 19 bp, Artificial sequence
  SiRNA target sequence
ttgctaatggtctttcgac

SEQ ID NO: 225197 - DNA, 19 bp, Artificial sequence
  SiRNA target sequence
tgctaatggtctttcgact

SEQ ID NO: 225198 - DNA, 19 bp, Artificial sequence
  SiRNA target sequence
gctaatggtctttcgactc

SEQ ID NO: 225199 - DNA, 19 bp, Artificial sequence
  SiRNA target sequence
ctaatggtctttcgactcc

SEQ ID NO: 225200 - DNA, 19 bp, Artificial sequence
  SiRNA target sequence
taatggtctttcgactcct

SEQ ID NO: 225201 - DNA, 19 bp, Artificial sequence
  SiRNA target sequence
aatggtctttcgactcctg

SEQ ID NO: 225202 - DNA, 19 bp, Artificial sequence
  SiRNA target sequence
atggtctttcgactcctgg

SEQ ID NO: 225203 - DNA, 19 bp, Artificial sequence
  SiRNA target sequence
tggtctttcgactcctgga

SEQ ID NO: 225204 - DNA, 19 bp, Artificial sequence
  SiRNA target sequence
ggtctttcgactcctggac

SEQ ID NO: 225205 - DNA, 19 bp, Artificial sequence
  SiRNA target sequence
gtctttcgactcctggaca

SEQ ID NO: 225206 - DNA, 19 bp, Artificial sequence
  SiRNA target sequence
tctttcgactcctggacag

SEQ ID NO: 225207 - DNA, 19 bp, Artificial sequence
  SiRNA target sequence
ctttcgactcctggacagt

SEQ ID NO: 225208 - DNA, 19 bp, Artificial sequence
  SiRNA target sequence
tttcgactcctggacagtc

SEQ ID NO: 225209 - DNA, 19 bp, Artificial sequence
  SiRNA target sequence
ttcgactcctggacagtcc

SEQ ID NO: 225210 - DNA, 19 bp, Artificial sequence
  SiRNA target sequence
tcgactcctggacagtccg

SEQ ID NO: 225211 - DNA, 19 bp, Artificial sequence
  SiRNA target sequence
cgactcctggacagtccgc

SEQ ID NO: 225212 - DNA, 19 bp, Artificial sequence
  SiRNA target sequence
gactcctggacagtccgct

SEQ ID NO: 225213 - DNA, 19 bp, Artificial sequence
  SiRNA target sequence
actcctggacagtccgcta

SEQ ID NO: 225214 - DNA, 19 bp, Artificial sequence
  SiRNA target sequence
ctcctggacagtccgctag

SEQ ID NO: 225215 - DNA, 19 bp, Artificial sequence
  SiRNA target sequence
tcctggacagtccgctaga

SEQ ID NO: 225216 - DNA, 19 bp, Artificial sequence
  SiRNA target sequence
cctggacagtccgctagat

SEQ ID NO: 225217 - DNA, 19 bp, Artificial sequence
  SiRNA target sequence
ctggacagtccgctagatt

SEQ ID NO: 225218 - DNA, 19 bp, Artificial sequence
  SiRNA target sequence
tggacagtccgctagattt

SEQ ID NO: 225219 - DNA, 19 bp, Artificial sequence
  SiRNA target sequence
ggacagtccgctagatttg

SEQ ID NO: 225220 - DNA, 19 bp, Artificial sequence
  SiRNA target sequence
gacagtccgctagatttgt

SEQ ID NO: 225221 - DNA, 19 bp, Artificial sequence
  SiRNA target sequence
acagtccgctagatttgtc

SEQ ID NO: 225222 - DNA, 19 bp, Artificial sequence
  SiRNA target sequence
cagtccgctagatttgtcc

SEQ ID NO: 225223 - DNA, 19 bp, Artificial sequence
  SiRNA target sequence
agtccgctagatttgtccc

SEQ ID NO: 225224 - DNA, 19 bp, Artificial sequence
  SiRNA target sequence
gtccgctagatttgtccct

SEQ ID NO: 225225 - DNA, 19 bp, Artificial sequence
  SiRNA target sequence
tccgctagatttgtccctt

SEQ ID NO: 225226 - DNA, 19 bp, Artificial sequence
  SiRNA target sequence
ccgctagatttgtcccttt

SEQ ID NO: 225227 - DNA, 19 bp, Artificial sequence
  SiRNA target sequence
cgctagatttgtcccttta

SEQ ID NO: 225228 - DNA, 19 bp, Artificial sequence
  SiRNA target sequence
gctagatttgtccctttat

SEQ ID NO: 225229 - DNA, 19 bp, Artificial sequence
  SiRNA target sequence
ctagatttgtccctttatt

SEQ ID NO: 225230 - DNA, 19 bp, Artificial sequence
  SiRNA target sequence
tagatttgtccctttattt

SEQ ID NO: 225231 - DNA, 19 bp, Artificial sequence
  SiRNA target sequence
agatttgtccctttatttt

SEQ ID NO: 225232 - DNA, 19 bp, Artificial sequence
  SiRNA target sequence
gatttgtccctttatttta

SEQ ID NO: 225233 - DNA, 19 bp, Artificial sequence
  SiRNA target sequence
atttgtccctttattttat

SEQ ID NO: 225234 - DNA, 19 bp, Artificial sequence
  SiRNA target sequence
tttgtccctttattttatg

SEQ ID NO: 225235 - DNA, 19 bp, Artificial sequence
  SiRNA target sequence
ttgtccctttattttatgt

SEQ ID NO: 225236 - DNA, 19 bp, Artificial sequence
  SiRNA target sequence
tgtccctttattttatgtt

SEQ ID NO: 225237 - DNA, 19 bp, Artificial sequence
  SiRNA target sequence
gtccctttattttatgttg

SEQ ID NO: 225238 - DNA, 19 bp, Artificial sequence
  SiRNA target sequence
tccctttattttatgttgg

SEQ ID NO: 225239 - DNA, 19 bp, Artificial sequence
  SiRNA target sequence
ccctttattttatgttgga

SEQ ID NO: 225240 - DNA, 19 bp, Artificial sequence
  SiRNA target sequence
cctttattttatgttggat

SEQ ID NO: 225241 - DNA, 19 bp, Artificial sequence
  SiRNA target sequence
ctttattttatgttggatc

SEQ ID NO: 225242 - DNA, 19 bp, Artificial sequence
  SiRNA target sequence
tttattttatgttggatct

SEQ ID NO: 225243 - DNA, 19 bp, Artificial sequence
  SiRNA target sequence
ttattttatgttggatcta

SEQ ID NO: 225244 - DNA, 19 bp, Artificial sequence
  SiRNA target sequence
tattttatgttggatctaa

SEQ ID NO: 225245 - DNA, 19 bp, Artificial sequence
  SiRNA target sequence
attttatgttggatctaat

SEQ ID NO: 225246 - DNA, 19 bp, Artificial sequence
  SiRNA target sequence
ttttatgttggatctaatt

SEQ ID NO: 225247 - DNA, 19 bp, Artificial sequence
  SiRNA target sequence
tttatgttggatctaattt

SEQ ID NO: 225248 - DNA, 19 bp, Artificial sequence
  SiRNA target sequence
ttatgttggatctaatttg

SEQ ID NO: 225249 - DNA, 19 bp, Artificial sequence
  SiRNA target sequence
tatgttggatctaatttgg

SEQ ID NO: 225250 - DNA, 19 bp, Artificial sequence
  SiRNA target sequence
atgttggatctaatttggc

SEQ ID NO: 225251 - DNA, 19 bp, Artificial sequence
  SiRNA target sequence
tgttggatctaatttggct

SEQ ID NO: 225252 - DNA, 19 bp, Artificial sequence
  SiRNA target sequence
gttggatctaatttggctt

SEQ ID NO: 225253 - DNA, 19 bp, Artificial sequence
  SiRNA target sequence
ttggatctaatttggcttt

SEQ ID NO: 225254 - DNA, 19 bp, Artificial sequence
  SiRNA target sequence
tggatctaatttggcttta

SEQ ID NO: 225255 - DNA, 19 bp, Artificial sequence
  SiRNA target sequence
ggatctaatttggctttac

SEQ ID NO: 225256 - DNA, 19 bp, Artificial sequence
  SiRNA target sequence
gatctaatttggctttact

SEQ ID NO: 225257 - DNA, 19 bp, Artificial sequence
  SiRNA target sequence
atctaatttggctttactt

SEQ ID NO: 225258 - DNA, 19 bp, Artificial sequence
  SiRNA target sequence
tctaatttggctttacttc

SEQ ID NO: 225259 - DNA, 19 bp, Artificial sequence
  SiRNA target sequence
ctaatttggctttacttct

SEQ ID NO: 225260 - DNA, 19 bp, Artificial sequence
  SiRNA target sequence
taatttggctttacttctt

SEQ ID NO: 225261 - DNA, 19 bp, Artificial sequence
  SiRNA target sequence
aatttggctttacttcttt

SEQ ID NO: 225262 - DNA, 19 bp, Artificial sequence
  SiRNA target sequence
atttggctttacttctttc

SEQ ID NO: 225263 - DNA, 19 bp, Artificial sequence
  SiRNA target sequence
tttggctttacttctttca

SEQ ID NO: 225264 - DNA, 19 bp, Artificial sequence
  SiRNA target sequence
ttggctttacttctttcag

SEQ ID NO: 225265 - DNA, 19 bp, Artificial sequence
  SiRNA target sequence
tggctttacttctttcagg

SEQ ID NO: 225266 - DNA, 19 bp, Artificial sequence
  SiRNA target sequence
ggctttacttctttcagga

SEQ ID NO: 225267 - DNA, 19 bp, Artificial sequence
  SiRNA target sequence
gctttacttctttcaggaa

SEQ ID NO: 225268 - DNA, 19 bp, Artificial sequence
  SiRNA target sequence
ctttacttctttcaggaat

SEQ ID NO: 225269 - DNA, 19 bp, Artificial sequence
  SiRNA target sequence
tttacttctttcaggaatg

SEQ ID NO: 225270 - DNA, 19 bp, Artificial sequence
  SiRNA target sequence
ttacttctttcaggaatga

SEQ ID NO: 225271 - DNA, 19 bp, Artificial sequence
  SiRNA target sequence
tacttctttcaggaatgat

SEQ ID NO: 225272 - DNA, 19 bp, Artificial sequence
  SiRNA target sequence
acttctttcaggaatgata

SEQ ID NO: 225273 - DNA, 19 bp, Artificial sequence
  SiRNA target sequence
cttctttcaggaatgataa

SEQ ID NO: 225274 - DNA, 19 bp, Artificial sequence
  SiRNA target sequence
ttctttcaggaatgataaa

SEQ ID NO: 225275 - DNA, 19 bp, Artificial sequence
  SiRNA target sequence
tctttcaggaatgataaat

SEQ ID NO: 225276 - DNA, 19 bp, Artificial sequence
  SiRNA target sequence
ctttcaggaatgataaatt

SEQ ID NO: 225277 - DNA, 19 bp, Artificial sequence
  SiRNA target sequence
tttcaggaatgataaatta

SEQ ID NO: 225278 - DNA, 19 bp, Artificial sequence
  SiRNA target sequence
ttcaggaatgataaattac

SEQ ID NO: 225279 - DNA, 19 bp, Artificial sequence
  SiRNA target sequence
tcaggaatgataaattact

SEQ ID NO: 225280 - DNA, 19 bp, Artificial sequence
  SiRNA target sequence
caggaatgataaattactt

SEQ ID NO: 225281 - DNA, 19 bp, Artificial sequence
  SiRNA target sequence
aggaatgataaattacttt

SEQ ID NO: 225282 - DNA, 19 bp, Artificial sequence
  SiRNA target sequence
ggaatgataaattactttt

SEQ ID NO: 225283 - DNA, 19 bp, Artificial sequence
  SiRNA target sequence
gaatgataaattactttta

SEQ ID NO: 225284 - DNA, 19 bp, Artificial sequence
  SiRNA target sequence
aatgataaattacttttat

SEQ ID NO: 225285 - DNA, 19 bp, Artificial sequence
  SiRNA target sequence
atgataaattacttttata

SEQ ID NO: 225286 - DNA, 19 bp, Artificial sequence
  SiRNA target sequence
tgataaattacttttatag

SEQ ID NO: 225287 - DNA, 19 bp, Artificial sequence
  SiRNA target sequence
gataaattacttttatagt

SEQ ID NO: 225288 - DNA, 19 bp, Artificial sequence
  SiRNA target sequence
ataaattacttttatagtg

SEQ ID NO: 225289 - DNA, 19 bp, Artificial sequence
  SiRNA target sequence
taaattacttttatagtgt

SEQ ID NO: 225290 - DNA, 19 bp, Artificial sequence
  SiRNA target sequence
aaattacttttatagtgta

SEQ ID NO: 225291 - DNA, 19 bp, Artificial sequence
  SiRNA target sequence
aattacttttatagtgtaa

SEQ ID NO: 225292 - DNA, 19 bp, Artificial sequence
  SiRNA target sequence
attacttttatagtgtaag

SEQ ID NO: 225293 - DNA, 19 bp, Artificial sequence
  SiRNA target sequence
ttacttttatagtgtaagt

SEQ ID NO: 225294 - DNA, 19 bp, Artificial sequence
  SiRNA target sequence
tacttttatagtgtaagta

SEQ ID NO: 225295 - DNA, 19 bp, Artificial sequence
  SiRNA target sequence
acttttatagtgtaagtaa

SEQ ID NO: 225296 - DNA, 19 bp, Artificial sequence
  SiRNA target sequence
cttttatagtgtaagtaaa

SEQ ID NO: 225297 - DNA, 19 bp, Artificial sequence
  SiRNA target sequence
ttttatagtgtaagtaaat

SEQ ID NO: 225298 - DNA, 19 bp, Artificial sequence
  SiRNA target sequence
tttatagtgtaagtaaatc

SEQ ID NO: 225299 - DNA, 19 bp, Artificial sequence
  SiRNA target sequence
ttatagtgtaagtaaatct

SEQ ID NO: 225300 - DNA, 19 bp, Artificial sequence
  SiRNA target sequence
tatagtgtaagtaaatcta

SEQ ID NO: 225301 - DNA, 19 bp, Artificial sequence
  SiRNA target sequence
atagtgtaagtaaatctaa

SEQ ID NO: 225302 - DNA, 19 bp, Artificial sequence
  SiRNA target sequence
tagtgtaagtaaatctaaa

SEQ ID NO: 225303 - DNA, 19 bp, Artificial sequence
  SiRNA target sequence
agtgtaagtaaatctaaaa

SEQ ID NO: 225304 - DNA, 19 bp, Artificial sequence
  SiRNA target sequence
gtgtaagtaaatctaaaat

SEQ ID NO: 225305 - DNA, 19 bp, Artificial sequence
  SiRNA target sequence
tgtaagtaaatctaaaatg

SEQ ID NO: 225306 - DNA, 19 bp, Artificial sequence
  SiRNA target sequence
gtaagtaaatctaaaatgt

SEQ ID NO: 225307 - DNA, 19 bp, Artificial sequence
  SiRNA target sequence
taagtaaatctaaaatgtc

SEQ ID NO: 225308 - DNA, 19 bp, Artificial sequence
  SiRNA target sequence
aagtaaatctaaaatgtcg

SEQ ID NO: 225309 - DNA, 19 bp, Artificial sequence
  SiRNA target sequence
agtaaatctaaaatgtcgt

SEQ ID NO: 225310 - DNA, 19 bp, Artificial sequence
  SiRNA target sequence
gtaaatctaaaatgtcgta

SEQ ID NO: 225311 - DNA, 19 bp, Artificial sequence
  SiRNA target sequence
taaatctaaaatgtcgtat

SEQ ID NO: 225312 - DNA, 19 bp, Artificial sequence
  SiRNA target sequence
aaatctaaaatgtcgtatg

SEQ ID NO: 225313 - DNA, 19 bp, Artificial sequence
  SiRNA target sequence
aatctaaaatgtcgtatgt

SEQ ID NO: 225314 - DNA, 19 bp, Artificial sequence
  SiRNA target sequence
atctaaaatgtcgtatgtt

SEQ ID NO: 225315 - DNA, 19 bp, Artificial sequence
  SiRNA target sequence
tctaaaatgtcgtatgttg

SEQ ID NO: 225316 - DNA, 19 bp, Artificial sequence
  SiRNA target sequence
ctaaaatgtcgtatgttgc

SEQ ID NO: 225317 - DNA, 19 bp, Artificial sequence
  SiRNA target sequence
taaaatgtcgtatgttgcg

SEQ ID NO: 225318 - DNA, 19 bp, Artificial sequence
  SiRNA target sequence
aaaatgtcgtatgttgcgg

SEQ ID NO: 225319 - DNA, 19 bp, Artificial sequence
  SiRNA target sequence
aaatgtcgtatgttgcggc

SEQ ID NO: 225320 - DNA, 19 bp, Artificial sequence
  SiRNA target sequence
aatgtcgtatgttgcggcc

SEQ ID NO: 225321 - DNA, 19 bp, Artificial sequence
  SiRNA target sequence
atgtcgtatgttgcggccg

SEQ ID NO: 225322 - DNA, 19 bp, Artificial sequence
  SiRNA target sequence
tgtcgtatgttgcggccga

SEQ ID NO: 225323 - DNA, 19 bp, Artificial sequence
  SiRNA target sequence
gtcgtatgttgcggccgaa

SEQ ID NO: 225324 - DNA, 19 bp, Artificial sequence
  SiRNA target sequence
tcgtatgttgcggccgaaa

SEQ ID NO: 225325 - DNA, 19 bp, Artificial sequence
  SiRNA target sequence
cgtatgttgcggccgaaag

SEQ ID NO: 225326 - DNA, 19 bp, Artificial sequence
  SiRNA target sequence
gtatgttgcggccgaaaga

SEQ ID NO: 225327 - DNA, 19 bp, Artificial sequence
  SiRNA target sequence
tatgttgcggccgaaagat

SEQ ID NO: 225328 - DNA, 19 bp, Artificial sequence
  SiRNA target sequence
atgttgcggccgaaagatt

SEQ ID NO: 225329 - DNA, 19 bp, Artificial sequence
  SiRNA target sequence
tgttgcggccgaaagattt

SEQ ID NO: 225330 - DNA, 19 bp, Artificial sequence
  SiRNA target sequence
gttgcggccgaaagatttt

SEQ ID NO: 225331 - DNA, 19 bp, Artificial sequence
  SiRNA target sequence
ttgcggccgaaagattttt

SEQ ID NO: 225332 - DNA, 19 bp, Artificial sequence
  SiRNA target sequence
tgcggccgaaagatttttt

SEQ ID NO: 225333 - DNA, 19 bp, Artificial sequence
  SiRNA target sequence
gcggccgaaagatttttta

SEQ ID NO: 225334 - DNA, 19 bp, Artificial sequence
  SiRNA target sequence
cggccgaaagattttttaa

SEQ ID NO: 225335 - DNA, 19 bp, Artificial sequence
  SiRNA target sequence
ggccgaaagattttttaat

SEQ ID NO: 225336 - DNA, 19 bp, Artificial sequence
  SiRNA target sequence
gccgaaagattttttaatg

SEQ ID NO: 225337 - DNA, 19 bp, Artificial sequence
  SiRNA target sequence
ccgaaagattttttaatgg

SEQ ID NO: 225338 - DNA, 19 bp, Artificial sequence
  SiRNA target sequence
cgaaagattttttaatgga

SEQ ID NO: 225339 - DNA, 19 bp, Artificial sequence
  SiRNA target sequence
gaaagattttttaatggat

SEQ ID NO: 225340 - DNA, 19 bp, Artificial sequence
  SiRNA target sequence
aaagattttttaatggatt

SEQ ID NO: 225341 - DNA, 19 bp, Artificial sequence
  SiRNA target sequence
aagattttttaatggattt

SEQ ID NO: 225342 - DNA, 19 bp, Artificial sequence
  SiRNA target sequence
agattttttaatggatttt

SEQ ID NO: 225343 - DNA, 19 bp, Artificial sequence
  SiRNA target sequence
gattttttaatggattttt

SEQ ID NO: 225344 - DNA, 19 bp, Artificial sequence
  SiRNA target sequence
attttttaatggatttttt

SEQ ID NO: 225345 - DNA, 19 bp, Artificial sequence
  SiRNA target sequence
ttttttaatggattttttt

SEQ ID NO: 225346 - DNA, 19 bp, Artificial sequence
  SiRNA target sequence
tttttaatggatttttttg

SEQ ID NO: 225347 - DNA, 19 bp, Artificial sequence
  SiRNA target sequence
ttttaatggatttttttgt

SEQ ID NO: 225348 - DNA, 19 bp, Artificial sequence
  SiRNA target sequence
tttaatggatttttttgtc

SEQ ID NO: 225349 - DNA, 19 bp, Artificial sequence
  SiRNA target sequence
ttaatggatttttttgtct

SEQ ID NO: 225350 - DNA, 19 bp, Artificial sequence
  SiRNA target sequence
taatggatttttttgtctg

SEQ ID NO: 225351 - DNA, 19 bp, Artificial sequence
  SiRNA target sequence
aatggatttttttgtctga

SEQ ID NO: 225352 - DNA, 19 bp, Artificial sequence
  SiRNA target sequence
atggatttttttgtctgag

SEQ ID NO: 225353 - DNA, 19 bp, Artificial sequence
  SiRNA target sequence
tggatttttttgtctgagt

SEQ ID NO: 225354 - DNA, 19 bp, Artificial sequence
  SiRNA target sequence
ggatttttttgtctgagtg

SEQ ID NO: 225355 - DNA, 19 bp, Artificial sequence
  SiRNA target sequence
gatttttttgtctgagtgg

SEQ ID NO: 225356 - DNA, 19 bp, Artificial sequence
  SiRNA target sequence
atttttttgtctgagtgga

SEQ ID NO: 225357 - DNA, 19 bp, Artificial sequence
  SiRNA target sequence
tttttttgtctgagtggaa

SEQ ID NO: 225358 - DNA, 19 bp, Artificial sequence
  SiRNA target sequence
ttttttgtctgagtggaat

SEQ ID NO: 225359 - DNA, 19 bp, Artificial sequence
  SiRNA target sequence
tttttgtctgagtggaatt

SEQ ID NO: 225360 - DNA, 19 bp, Artificial sequence
  SiRNA target sequence
ttttgtctgagtggaattc

SEQ ID NO: 225361 - DNA, 19 bp, Artificial sequence
  SiRNA target sequence
tttgtctgagtggaattct

SEQ ID NO: 225362 - DNA, 19 bp, Artificial sequence
  SiRNA target sequence
ttgtctgagtggaattctc

SEQ ID NO: 225363 - DNA, 19 bp, Artificial sequence
  SiRNA target sequence
tgtctgagtggaattctct

SEQ ID NO: 225364 - DNA, 19 bp, Artificial sequence
  SiRNA target sequence
gtctgagtggaattctctg

SEQ ID NO: 225365 - DNA, 19 bp, Artificial sequence
  SiRNA target sequence
tctgagtggaattctctgt

SEQ ID NO: 225366 - DNA, 19 bp, Artificial sequence
  SiRNA target sequence
ctgagtggaattctctgtg

SEQ ID NO: 225367 - DNA, 19 bp, Artificial sequence
  SiRNA target sequence
tgagtggaattctctgtgc

SEQ ID NO: 225368 - DNA, 19 bp, Artificial sequence
  SiRNA target sequence
gagtggaattctctgtgct

SEQ ID NO: 225369 - DNA, 19 bp, Artificial sequence
  SiRNA target sequence
agtggaattctctgtgctg

SEQ ID NO: 225370 - DNA, 19 bp, Artificial sequence
  SiRNA target sequence
gtggaattctctgtgctgt

SEQ ID NO: 225371 - DNA, 19 bp, Artificial sequence
  SiRNA target sequence
tggaattctctgtgctgta

SEQ ID NO: 225372 - DNA, 19 bp, Artificial sequence
  SiRNA target sequence
ggaattctctgtgctgtaa

SEQ ID NO: 225373 - DNA, 19 bp, Artificial sequence
  SiRNA target sequence
gaattctctgtgctgtaat

SEQ ID NO: 225374 - DNA, 19 bp, Artificial sequence
  SiRNA target sequence
aattctctgtgctgtaatt

SEQ ID NO: 225375 - DNA, 19 bp, Artificial sequence
  SiRNA target sequence
attctctgtgctgtaattt

SEQ ID NO: 225376 - DNA, 19 bp, Artificial sequence
  SiRNA target sequence
ttctctgtgctgtaattta

SEQ ID NO: 225377 - DNA, 19 bp, Artificial sequence
  SiRNA target sequence
tctctgtgctgtaatttat

SEQ ID NO: 225378 - DNA, 19 bp, Artificial sequence
  SiRNA target sequence
ctctgtgctgtaatttatc

SEQ ID NO: 225379 - DNA, 19 bp, Artificial sequence
  SiRNA target sequence
tctgtgctgtaatttatct

SEQ ID NO: 225380 - DNA, 19 bp, Artificial sequence
  SiRNA target sequence
ctgtgctgtaatttatctt

SEQ ID NO: 225381 - DNA, 19 bp, Artificial sequence
  SiRNA target sequence
tgtgctgtaatttatcttc

SEQ ID NO: 225382 - DNA, 19 bp, Artificial sequence
  SiRNA target sequence
gtgctgtaatttatcttct

SEQ ID NO: 225383 - DNA, 19 bp, Artificial sequence
  SiRNA target sequence
tgctgtaatttatcttcta

SEQ ID NO: 225384 - DNA, 19 bp, Artificial sequence
  SiRNA target sequence
gctgtaatttatcttctaa

SEQ ID NO: 225385 - DNA, 19 bp, Artificial sequence
  SiRNA target sequence
ctgtaatttatcttctaaa

SEQ ID NO: 225386 - DNA, 19 bp, Artificial sequence
  SiRNA target sequence
tgtaatttatcttctaaaa

SEQ ID NO: 225387 - DNA, 19 bp, Artificial sequence
  SiRNA target sequence
gtaatttatcttctaaaaa

SEQ ID NO: 225388 - DNA, 19 bp, Artificial sequence
  SiRNA target sequence
taatttatcttctaaaaaa

SEQ ID NO: 225389 - DNA, 19 bp, Artificial sequence
  SiRNA target sequence
aatttatcttctaaaaaaa

SEQ ID NO: 225390 - DNA, 19 bp, Artificial sequence
  SiRNA target sequence
atttatcttctaaaaaaat

SEQ ID NO: 225391 - DNA, 19 bp, Artificial sequence
  SiRNA target sequence
tttatcttctaaaaaaata

SEQ ID NO: 225392 - DNA, 19 bp, Artificial sequence
  SiRNA target sequence
ttatcttctaaaaaaatat

SEQ ID NO: 225393 - DNA, 19 bp, Artificial sequence
  SiRNA target sequence
tatcttctaaaaaaatatt

SEQ ID NO: 225394 - DNA, 19 bp, Artificial sequence
  SiRNA target sequence
atcttctaaaaaaatattt

SEQ ID NO: 225395 - DNA, 19 bp, Artificial sequence
  SiRNA target sequence
tcttctaaaaaaatattta

SEQ ID NO: 225396 - DNA, 19 bp, Artificial sequence
  SiRNA target sequence
cttctaaaaaaatatttag

SEQ ID NO: 225397 - DNA, 19 bp, Artificial sequence
  SiRNA target sequence
ttctaaaaaaatatttaga

SEQ ID NO: 225398 - DNA, 19 bp, Artificial sequence
  SiRNA target sequence
tctaaaaaaatatttagaa

SEQ ID NO: 225399 - DNA, 19 bp, Artificial sequence
  SiRNA target sequence
ctaaaaaaatatttagaaa

SEQ ID NO: 225400 - DNA, 19 bp, Artificial sequence
  SiRNA target sequence
taaaaaaatatttagaaaa

SEQ ID NO: 225401 - DNA, 19 bp, Artificial sequence
  SiRNA target sequence
aaaaaaatatttagaaaat

SEQ ID NO: 225402 - DNA, 19 bp, Artificial sequence
  SiRNA target sequence
aaaaaatatttagaaaata

SEQ ID NO: 225403 - DNA, 19 bp, Artificial sequence
  SiRNA target sequence
aaaaatatttagaaaataa

SEQ ID NO: 225404 - DNA, 19 bp, Artificial sequence
  SiRNA target sequence
aaaatatttagaaaataat

SEQ ID NO: 225405 - DNA, 19 bp, Artificial sequence
  SiRNA target sequence
aaatatttagaaaataatg

SEQ ID NO: 225406 - DNA, 19 bp, Artificial sequence
  SiRNA target sequence
aatatttagaaaataatgt

SEQ ID NO: 225407 - DNA, 19 bp, Artificial sequence
  SiRNA target sequence
atatttagaaaataatgtt

SEQ ID NO: 225408 - DNA, 19 bp, Artificial sequence
  SiRNA target sequence
tatttagaaaataatgtta

SEQ ID NO: 225409 - DNA, 19 bp, Artificial sequence
  SiRNA target sequence
atttagaaaataatgttac

SEQ ID NO: 225410 - DNA, 19 bp, Artificial sequence
  SiRNA target sequence
tttagaaaataatgttact

SEQ ID NO: 225411 - DNA, 19 bp, Artificial sequence
  SiRNA target sequence
ttagaaaataatgttacta

SEQ ID NO: 225412 - DNA, 19 bp, Artificial sequence
  SiRNA target sequence
tagaaaataatgttactag

SEQ ID NO: 225413 - DNA, 19 bp, Artificial sequence
  SiRNA target sequence
agaaaataatgttactagc

SEQ ID NO: 225414 - DNA, 19 bp, Artificial sequence
  SiRNA target sequence
gaaaataatgttactagca

SEQ ID NO: 225415 - DNA, 19 bp, Artificial sequence
  SiRNA target sequence
aaaataatgttactagcaa

SEQ ID NO: 225416 - DNA, 19 bp, Artificial sequence
  SiRNA target sequence
aaataatgttactagcaaa

SEQ ID NO: 225417 - DNA, 19 bp, Artificial sequence
  SiRNA target sequence
aataatgttactagcaaac

SEQ ID NO: 225418 - DNA, 19 bp, Artificial sequence
  SiRNA target sequence
ataatgttactagcaaacc

SEQ ID NO: 225419 - DNA, 19 bp, Artificial sequence
  SiRNA target sequence
taatgttactagcaaacca

SEQ ID NO: 225420 - DNA, 19 bp, Artificial sequence
  SiRNA target sequence
aatgttactagcaaaccaa

SEQ ID NO: 225421 - DNA, 19 bp, Artificial sequence
  SiRNA target sequence
atgttactagcaaaccaat

SEQ ID NO: 225422 - DNA, 19 bp, Artificial sequence
  SiRNA target sequence
tgttactagcaaaccaatg

SEQ ID NO: 225423 - DNA, 19 bp, Artificial sequence
  SiRNA target sequence
gttactagcaaaccaatgt

SEQ ID NO: 225424 - DNA, 19 bp, Artificial sequence
  SiRNA target sequence
ttactagcaaaccaatgtt

SEQ ID NO: 225425 - DNA, 19 bp, Artificial sequence
  SiRNA target sequence
tactagcaaaccaatgttt

SEQ ID NO: 225426 - DNA, 19 bp, Artificial sequence
  SiRNA target sequence
actagcaaaccaatgtttg

SEQ ID NO: 225427 - DNA, 19 bp, Artificial sequence
  SiRNA target sequence
ctagcaaaccaatgtttgt

SEQ ID NO: 225428 - DNA, 19 bp, Artificial sequence
  SiRNA target sequence
tagcaaaccaatgtttgtt

SEQ ID NO: 225429 - DNA, 19 bp, Artificial sequence
  SiRNA target sequence
agcaaaccaatgtttgtta

SEQ ID NO: 225430 - DNA, 19 bp, Artificial sequence
  SiRNA target sequence
gcaaaccaatgtttgttag

SEQ ID NO: 225431 - DNA, 19 bp, Artificial sequence
  SiRNA target sequence
caaaccaatgtttgttaga

SEQ ID NO: 225432 - DNA, 19 bp, Artificial sequence
  SiRNA target sequence
aaaccaatgtttgttagaa

SEQ ID NO: 225433 - DNA, 19 bp, Artificial sequence
  SiRNA target sequence
aaccaatgtttgttagaaa

SEQ ID NO: 225434 - DNA, 19 bp, Artificial sequence
  SiRNA target sequence
accaatgtttgttagaaag

SEQ ID NO: 225435 - DNA, 19 bp, Artificial sequence
  SiRNA target sequence
ccaatgtttgttagaaaga

SEQ ID NO: 225436 - DNA, 19 bp, Artificial sequence
  SiRNA target sequence
caatgtttgttagaaagac

SEQ ID NO: 225437 - DNA, 19 bp, Artificial sequence
  SiRNA target sequence
aatgtttgttagaaagact

SEQ ID NO: 225438 - DNA, 19 bp, Artificial sequence
  SiRNA target sequence
atgtttgttagaaagactt

SEQ ID NO: 225439 - DNA, 19 bp, Artificial sequence
  SiRNA target sequence
tgtttgttagaaagacttt

SEQ ID NO: 225440 - DNA, 19 bp, Artificial sequence
  SiRNA target sequence
gtttgttagaaagactttt

SEQ ID NO: 225441 - DNA, 19 bp, Artificial sequence
  SiRNA target sequence
tttgttagaaagactttta

SEQ ID NO: 225442 - DNA, 19 bp, Artificial sequence
  SiRNA target sequence
ttgttagaaagacttttac

SEQ ID NO: 225443 - DNA, 19 bp, Artificial sequence
  SiRNA target sequence
tgttagaaagacttttact

SEQ ID NO: 225444 - DNA, 19 bp, Artificial sequence
  SiRNA target sequence
gttagaaagacttttacta

SEQ ID NO: 225445 - DNA, 19 bp, Artificial sequence
  SiRNA target sequence
ttagaaagacttttactaa

SEQ ID NO: 225446 - DNA, 19 bp, Artificial sequence
  SiRNA target sequence
tagaaagacttttactaaa

SEQ ID NO: 225447 - DNA, 19 bp, Artificial sequence
  SiRNA target sequence
agaaagacttttactaaaa

SEQ ID NO: 225448 - DNA, 19 bp, Artificial sequence
  SiRNA target sequence
gaaagacttttactaaaaa

SEQ ID NO: 225449 - DNA, 19 bp, Artificial sequence
  SiRNA target sequence
aaagacttttactaaaaag

SEQ ID NO: 225450 - DNA, 19 bp, Artificial sequence
  SiRNA target sequence
aagacttttactaaaaaga

SEQ ID NO: 225451 - DNA, 19 bp, Artificial sequence
  SiRNA target sequence
agacttttactaaaaagaa

SEQ ID NO: 225452 - DNA, 19 bp, Artificial sequence
  SiRNA target sequence
gacttttactaaaaagaag

SEQ ID NO: 225453 - DNA, 19 bp, Artificial sequence
  SiRNA target sequence
acttttactaaaaagaaga

SEQ ID NO: 225454 - DNA, 19 bp, Artificial sequence
  SiRNA target sequence
cttttactaaaaagaagag

SEQ ID NO: 225455 - DNA, 19 bp, Artificial sequence
  SiRNA target sequence
ttttactaaaaagaagagt

SEQ ID NO: 225456 - DNA, 19 bp, Artificial sequence
  SiRNA target sequence
tttactaaaaagaagagta

SEQ ID NO: 225457 - DNA, 19 bp, Artificial sequence
  SiRNA target sequence
ttactaaaaagaagagtaa

SEQ ID NO: 225458 - DNA, 19 bp, Artificial sequence
  SiRNA target sequence
tactaaaaagaagagtaaa

SEQ ID NO: 225459 - DNA, 19 bp, Artificial sequence
  SiRNA target sequence
actaaaaagaagagtaaag

SEQ ID NO: 225460 - DNA, 19 bp, Artificial sequence
  SiRNA target sequence
ctaaaaagaagagtaaagt

SEQ ID NO: 225461 - DNA, 19 bp, Artificial sequence
  SiRNA target sequence
taaaaagaagagtaaagtg

SEQ ID NO: 225462 - DNA, 19 bp, Artificial sequence
  SiRNA target sequence
aaaaagaagagtaaagtga

SEQ ID NO: 225463 - DNA, 19 bp, Artificial sequence
  SiRNA target sequence
aaaagaagagtaaagtgaa

SEQ ID NO: 225464 - DNA, 19 bp, Artificial sequence
  SiRNA target sequence
aaagaagagtaaagtgaag

SEQ ID NO: 225465 - DNA, 19 bp, Artificial sequence
  SiRNA target sequence
aagaagagtaaagtgaagg

SEQ ID NO: 225466 - DNA, 19 bp, Artificial sequence
  SiRNA target sequence
agaagagtaaagtgaaggt

SEQ ID NO: 225467 - DNA, 19 bp, Artificial sequence
  SiRNA target sequence
gaagagtaaagtgaaggtt

SEQ ID NO: 225468 - DNA, 19 bp, Artificial sequence
  SiRNA target sequence
aagagtaaagtgaaggttg

SEQ ID NO: 225469 - DNA, 19 bp, Artificial sequence
  SiRNA target sequence
agagtaaagtgaaggttgg

SEQ ID NO: 225470 - DNA, 19 bp, Artificial sequence
  SiRNA target sequence
gagtaaagtgaaggttgga

SEQ ID NO: 225471 - DNA, 19 bp, Artificial sequence
  SiRNA target sequence
agtaaagtgaaggttggat

SEQ ID NO: 225472 - DNA, 19 bp, Artificial sequence
  SiRNA target sequence
gtaaagtgaaggttggatt

SEQ ID NO: 225473 - DNA, 19 bp, Artificial sequence
  SiRNA target sequence
taaagtgaaggttggattt

SEQ ID NO: 225474 - DNA, 19 bp, Artificial sequence
  SiRNA target sequence
aaagtgaaggttggatttg

SEQ ID NO: 225475 - DNA, 19 bp, Artificial sequence
  SiRNA target sequence
aagtgaaggttggatttgt

SEQ ID NO: 225476 - DNA, 19 bp, Artificial sequence
  SiRNA target sequence
agtgaaggttggatttgtt

SEQ ID NO: 225477 - DNA, 19 bp, Artificial sequence
  SiRNA target sequence
gtgaaggttggatttgttg

SEQ ID NO: 225478 - DNA, 19 bp, Artificial sequence
  SiRNA target sequence
tgaaggttggatttgttga

SEQ ID NO: 225479 - DNA, 19 bp, Artificial sequence
  SiRNA target sequence
gaaggttggatttgttgat

SEQ ID NO: 225480 - DNA, 19 bp, Artificial sequence
  SiRNA target sequence
aaggttggatttgttgatg

SEQ ID NO: 225481 - DNA, 19 bp, Artificial sequence
  SiRNA target sequence
aggttggatttgttgatgg

SEQ ID NO: 225482 - DNA, 19 bp, Artificial sequence
  SiRNA target sequence
ggttggatttgttgatgga

SEQ ID NO: 225483 - DNA, 19 bp, Artificial sequence
  SiRNA target sequence
gttggatttgttgatggac

SEQ ID NO: 225484 - DNA, 19 bp, Artificial sequence
  SiRNA target sequence
ttggatttgttgatggact

SEQ ID NO: 225485 - DNA, 19 bp, Artificial sequence
  SiRNA target sequence
tggatttgttgatggactt

SEQ ID NO: 225486 - DNA, 19 bp, Artificial sequence
  SiRNA target sequence
ggatttgttgatggactta

SEQ ID NO: 225487 - DNA, 19 bp, Artificial sequence
  SiRNA target sequence
gatttgttgatggacttat

SEQ ID NO: 225488 - DNA, 19 bp, Artificial sequence
  SiRNA target sequence
atttgttgatggacttatt

SEQ ID NO: 225489 - DNA, 19 bp, Artificial sequence
  SiRNA target sequence
tttgttgatggacttattg

SEQ ID NO: 225490 - DNA, 19 bp, Artificial sequence
  SiRNA target sequence
ttgttgatggacttattga

SEQ ID NO: 225491 - DNA, 19 bp, Artificial sequence
  SiRNA target sequence
tgttgatggacttattgag

SEQ ID NO: 225492 - DNA, 19 bp, Artificial sequence
  SiRNA target sequence
gttgatggacttattgaga

SEQ ID NO: 225493 - DNA, 19 bp, Artificial sequence
  SiRNA target sequence
ttgatggacttattgagat

SEQ ID NO: 225494 - DNA, 19 bp, Artificial sequence
  SiRNA target sequence
tgatggacttattgagatg

SEQ ID NO: 225495 - DNA, 19 bp, Artificial sequence
  SiRNA target sequence
gatggacttattgagatga

SEQ ID NO: 225496 - DNA, 19 bp, Artificial sequence
  SiRNA target sequence
atggacttattgagatgag

SEQ ID NO: 225497 - DNA, 19 bp, Artificial sequence
  SiRNA target sequence
tggacttattgagatgagt

SEQ ID NO: 225498 - DNA, 19 bp, Artificial sequence
  SiRNA target sequence
ggacttattgagatgagta

SEQ ID NO: 225499 - DNA, 19 bp, Artificial sequence
  SiRNA target sequence
gacttattgagatgagtaa

SEQ ID NO: 225500 - DNA, 19 bp, Artificial sequence
  SiRNA target sequence
acttattgagatgagtaaa

SEQ ID NO: 225501 - DNA, 19 bp, Artificial sequence
  SiRNA target sequence
cttattgagatgagtaaat

SEQ ID NO: 225502 - DNA, 19 bp, Artificial sequence
  SiRNA target sequence
ttattgagatgagtaaatc

SEQ ID NO: 225503 - DNA, 19 bp, Artificial sequence
  SiRNA target sequence
tattgagatgagtaaatct

SEQ ID NO: 225504 - DNA, 19 bp, Artificial sequence
  SiRNA target sequence
attgagatgagtaaatcta

SEQ ID NO: 225505 - DNA, 19 bp, Artificial sequence
  SiRNA target sequence
ttgagatgagtaaatctaa

SEQ ID NO: 225506 - DNA, 19 bp, Artificial sequence
  SiRNA target sequence
tgagatgagtaaatctaaa

SEQ ID NO: 225507 - DNA, 19 bp, Artificial sequence
  SiRNA target sequence
gagatgagtaaatctaaac

SEQ ID NO: 225508 - DNA, 19 bp, Artificial sequence
  SiRNA target sequence
agatgagtaaatctaaact

SEQ ID NO: 225509 - DNA, 19 bp, Artificial sequence
  SiRNA target sequence
gatgagtaaatctaaacta

SEQ ID NO: 225510 - DNA, 19 bp, Artificial sequence
  SiRNA target sequence
atgagtaaatctaaactac

SEQ ID NO: 225511 - DNA, 19 bp, Artificial sequence
  SiRNA target sequence
tgagtaaatctaaactact

SEQ ID NO: 225512 - DNA, 19 bp, Artificial sequence
  SiRNA target sequence
gagtaaatctaaactactg

SEQ ID NO: 225513 - DNA, 19 bp, Artificial sequence
  SiRNA target sequence
agtaaatctaaactactgt

SEQ ID NO: 225514 - DNA, 19 bp, Artificial sequence
  SiRNA target sequence
gtaaatctaaactactgtt

SEQ ID NO: 225515 - DNA, 19 bp, Artificial sequence
  SiRNA target sequence
taaatctaaactactgttg

SEQ ID NO: 225516 - DNA, 19 bp, Artificial sequence
  SiRNA target sequence
aaatctaaactactgttga

SEQ ID NO: 225517 - DNA, 19 bp, Artificial sequence
  SiRNA target sequence
aatctaaactactgttgaa

SEQ ID NO: 225518 - DNA, 19 bp, Artificial sequence
  SiRNA target sequence
atctaaactactgttgaat

SEQ ID NO: 225519 - DNA, 19 bp, Artificial sequence
  SiRNA target sequence
tctaaactactgttgaata

SEQ ID NO: 225520 - DNA, 19 bp, Artificial sequence
  SiRNA target sequence
ctaaactactgttgaatat

SEQ ID NO: 225521 - DNA, 19 bp, Artificial sequence
  SiRNA target sequence
taaactactgttgaatatg

SEQ ID NO: 225522 - DNA, 19 bp, Artificial sequence
  SiRNA target sequence
aaactactgttgaatatgt

SEQ ID NO: 225523 - DNA, 19 bp, Artificial sequence
  SiRNA target sequence
aactactgttgaatatgtc

SEQ ID NO: 225524 - DNA, 19 bp, Artificial sequence
  SiRNA target sequence
actactgttgaatatgtca

SEQ ID NO: 225525 - DNA, 19 bp, Artificial sequence
  SiRNA target sequence
ctactgttgaatatgtcat

SEQ ID NO: 225526 - DNA, 19 bp, Artificial sequence
  SiRNA target sequence
tactgttgaatatgtcatt

SEQ ID NO: 225527 - DNA, 19 bp, Artificial sequence
  SiRNA target sequence
actgttgaatatgtcatta

SEQ ID NO: 225528 - DNA, 19 bp, Artificial sequence
  SiRNA target sequence
ctgttgaatatgtcattag

SEQ ID NO: 225529 - DNA, 19 bp, Artificial sequence
  SiRNA target sequence
tgttgaatatgtcattagt

SEQ ID NO: 225530 - DNA, 19 bp, Artificial sequence
  SiRNA target sequence
gttgaatatgtcattagtc

SEQ ID NO: 225531 - DNA, 19 bp, Artificial sequence
  SiRNA target sequence
ttgaatatgtcattagtcg

SEQ ID NO: 225532 - DNA, 19 bp, Artificial sequence
  SiRNA target sequence
tgaatatgtcattagtcgt

SEQ ID NO: 225533 - DNA, 19 bp, Artificial sequence
  SiRNA target sequence
gaatatgtcattagtcgta

SEQ ID NO: 225534 - DNA, 19 bp, Artificial sequence
  SiRNA target sequence
aatatgtcattagtcgtat

SEQ ID NO: 225535 - DNA, 19 bp, Artificial sequence
  SiRNA target sequence
atatgtcattagtcgtatt

SEQ ID NO: 225536 - DNA, 19 bp, Artificial sequence
  SiRNA target sequence
tatgtcattagtcgtatta

SEQ ID NO: 225537 - DNA, 19 bp, Artificial sequence
  SiRNA target sequence
atgtcattagtcgtattat

SEQ ID NO: 225538 - DNA, 19 bp, Artificial sequence
  SiRNA target sequence
tgtcattagtcgtattatt

SEQ ID NO: 225539 - DNA, 19 bp, Artificial sequence
  SiRNA target sequence
gtcattagtcgtattattt

SEQ ID NO: 225540 - DNA, 19 bp, Artificial sequence
  SiRNA target sequence
tcattagtcgtattatttt

SEQ ID NO: 225541 - DNA, 19 bp, Artificial sequence
  SiRNA target sequence
cattagtcgtattatttta

SEQ ID NO: 225542 - DNA, 19 bp, Artificial sequence
  SiRNA target sequence
attagtcgtattattttat

SEQ ID NO: 225543 - DNA, 19 bp, Artificial sequence
  SiRNA target sequence
ttagtcgtattattttatg

SEQ ID NO: 225544 - DNA, 19 bp, Artificial sequence
  SiRNA target sequence
tagtcgtattattttatgc

SEQ ID NO: 225545 - DNA, 19 bp, Artificial sequence
  SiRNA target sequence
agtcgtattattttatgct

SEQ ID NO: 225546 - DNA, 19 bp, Artificial sequence
  SiRNA target sequence
gtcgtattattttatgctg

SEQ ID NO: 225547 - DNA, 19 bp, Artificial sequence
  SiRNA target sequence
tcgtattattttatgctgt

SEQ ID NO: 225548 - DNA, 19 bp, Artificial sequence
  SiRNA target sequence
cgtattattttatgctgtt

SEQ ID NO: 225549 - DNA, 19 bp, Artificial sequence
  SiRNA target sequence
gtattattttatgctgttt

SEQ ID NO: 225550 - DNA, 19 bp, Artificial sequence
  SiRNA target sequence
tattattttatgctgtttc

SEQ ID NO: 225551 - DNA, 19 bp, Artificial sequence
  SiRNA target sequence
attattttatgctgtttct

SEQ ID NO: 225552 - DNA, 19 bp, Artificial sequence
  SiRNA target sequence
ttattttatgctgtttcta

SEQ ID NO: 225553 - DNA, 19 bp, Artificial sequence
  SiRNA target sequence
tattttatgctgtttctac

SEQ ID NO: 225554 - DNA, 19 bp, Artificial sequence
  SiRNA target sequence
attttatgctgtttctacg

SEQ ID NO: 225555 - DNA, 19 bp, Artificial sequence
  SiRNA target sequence
ttttatgctgtttctacga

SEQ ID NO: 225556 - DNA, 19 bp, Artificial sequence
  SiRNA target sequence
tttatgctgtttctacgaa

SEQ ID NO: 225557 - DNA, 19 bp, Artificial sequence
  SiRNA target sequence
ttatgctgtttctacgaat

SEQ ID NO: 225558 - DNA, 19 bp, Artificial sequence
  SiRNA target sequence
tatgctgtttctacgaata

SEQ ID NO: 225559 - DNA, 19 bp, Artificial sequence
  SiRNA target sequence
atgctgtttctacgaatat

SEQ ID NO: 225560 - DNA, 19 bp, Artificial sequence
  SiRNA target sequence
tgctgtttctacgaatatt

SEQ ID NO: 225561 - DNA, 19 bp, Artificial sequence
  SiRNA target sequence
gctgtttctacgaatatta

SEQ ID NO: 225562 - DNA, 19 bp, Artificial sequence
  SiRNA target sequence
ctgtttctacgaatattat

SEQ ID NO: 225563 - DNA, 19 bp, Artificial sequence
  SiRNA target sequence
tgtttctacgaatattatt

SEQ ID NO: 225564 - DNA, 19 bp, Artificial sequence
  SiRNA target sequence
gtttctacgaatattattg

SEQ ID NO: 225565 - DNA, 19 bp, Artificial sequence
  SiRNA target sequence
tttctacgaatattattga

SEQ ID NO: 225566 - DNA, 19 bp, Artificial sequence
  SiRNA target sequence
ttctacgaatattattgag

SEQ ID NO: 225567 - DNA, 19 bp, Artificial sequence
  SiRNA target sequence
tctacgaatattattgagt

SEQ ID NO: 225568 - DNA, 19 bp, Artificial sequence
  SiRNA target sequence
ctacgaatattattgagtc

SEQ ID NO: 225569 - DNA, 19 bp, Artificial sequence
  SiRNA target sequence
tacgaatattattgagtca

SEQ ID NO: 225570 - DNA, 19 bp, Artificial sequence
  SiRNA target sequence
acgaatattattgagtcag

SEQ ID NO: 225571 - DNA, 19 bp, Artificial sequence
  SiRNA target sequence
cgaatattattgagtcagc

SEQ ID NO: 225572 - DNA, 19 bp, Artificial sequence
  SiRNA target sequence
gaatattattgagtcagct

SEQ ID NO: 225573 - DNA, 19 bp, Artificial sequence
  SiRNA target sequence
aatattattgagtcagctt

SEQ ID NO: 225574 - DNA, 19 bp, Artificial sequence
  SiRNA target sequence
atattattgagtcagctta

SEQ ID NO: 225575 - DNA, 19 bp, Artificial sequence
  SiRNA target sequence
tattattgagtcagcttat

SEQ ID NO: 225576 - DNA, 19 bp, Artificial sequence
  SiRNA target sequence
attattgagtcagcttata

SEQ ID NO: 225577 - DNA, 19 bp, Artificial sequence
  SiRNA target sequence
ttattgagtcagcttataa

SEQ ID NO: 225578 - DNA, 19 bp, Artificial sequence
  SiRNA target sequence
tattgagtcagcttataaa

SEQ ID NO: 225579 - DNA, 19 bp, Artificial sequence
  SiRNA target sequence
attgagtcagcttataaat

SEQ ID NO: 225580 - DNA, 19 bp, Artificial sequence
  SiRNA target sequence
ttgagtcagcttataaatc

SEQ ID NO: 225581 - DNA, 19 bp, Artificial sequence
  SiRNA target sequence
tgagtcagcttataaatct

SEQ ID NO: 225582 - DNA, 19 bp, Artificial sequence
  SiRNA target sequence
gagtcagcttataaatctg

SEQ ID NO: 225583 - DNA, 19 bp, Artificial sequence
  SiRNA target sequence
agtcagcttataaatctgc

SEQ ID NO: 225584 - DNA, 19 bp, Artificial sequence
  SiRNA target sequence
gtcagcttataaatctgct

SEQ ID NO: 225585 - DNA, 19 bp, Artificial sequence
  SiRNA target sequence
tcagcttataaatctgctt

SEQ ID NO: 225586 - DNA, 19 bp, Artificial sequence
  SiRNA target sequence
cagcttataaatctgcttt

SEQ ID NO: 225587 - DNA, 19 bp, Artificial sequence
  SiRNA target sequence
agcttataaatctgcttta

SEQ ID NO: 225588 - DNA, 19 bp, Artificial sequence
  SiRNA target sequence
gcttataaatctgctttag

SEQ ID NO: 225589 - DNA, 19 bp, Artificial sequence
  SiRNA target sequence
cttataaatctgctttagc

SEQ ID NO: 225590 - DNA, 19 bp, Artificial sequence
  SiRNA target sequence
ttataaatctgctttagct

SEQ ID NO: 225591 - DNA, 19 bp, Artificial sequence
  SiRNA target sequence
tataaatctgctttagctg

SEQ ID NO: 225592 - DNA, 19 bp, Artificial sequence
  SiRNA target sequence
ataaatctgctttagctgt

SEQ ID NO: 225593 - DNA, 19 bp, Artificial sequence
  SiRNA target sequence
taaatctgctttagctgtc

SEQ ID NO: 225594 - DNA, 19 bp, Artificial sequence
  SiRNA target sequence
aaatctgctttagctgtcg

SEQ ID NO: 225595 - DNA, 19 bp, Artificial sequence
  SiRNA target sequence
aatctgctttagctgtcgg

SEQ ID NO: 225596 - DNA, 19 bp, Artificial sequence
  SiRNA target sequence
atctgctttagctgtcggt

SEQ ID NO: 225597 - DNA, 19 bp, Artificial sequence
  SiRNA target sequence
tctgctttagctgtcggtg

SEQ ID NO: 225598 - DNA, 19 bp, Artificial sequence
  SiRNA target sequence
ctgctttagctgtcggtgc

SEQ ID NO: 225599 - DNA, 19 bp, Artificial sequence
  SiRNA target sequence
tgctttagctgtcggtgct

SEQ ID NO: 225600 - DNA, 19 bp, Artificial sequence
  SiRNA target sequence
gctttagctgtcggtgcta

SEQ ID NO: 225601 - DNA, 19 bp, Artificial sequence
  SiRNA target sequence
ctttagctgtcggtgctaa

SEQ ID NO: 225602 - DNA, 19 bp, Artificial sequence
  SiRNA target sequence
tttagctgtcggtgctaat

SEQ ID NO: 225603 - DNA, 19 bp, Artificial sequence
  SiRNA target sequence
ttagctgtcggtgctaatg

SEQ ID NO: 225604 - DNA, 19 bp, Artificial sequence
  SiRNA target sequence
tagctgtcggtgctaatga

SEQ ID NO: 225605 - DNA, 19 bp, Artificial sequence
  SiRNA target sequence
agctgtcggtgctaatgaa

SEQ ID NO: 225606 - DNA, 19 bp, Artificial sequence
  SiRNA target sequence
gctgtcggtgctaatgaaa

SEQ ID NO: 225607 - DNA, 19 bp, Artificial sequence
  SiRNA target sequence
ctgtcggtgctaatgaaac

SEQ ID NO: 225608 - DNA, 19 bp, Artificial sequence
  SiRNA target sequence
tgtcggtgctaatgaaact

SEQ ID NO: 225609 - DNA, 19 bp, Artificial sequence
  SiRNA target sequence
gtcggtgctaatgaaactg

SEQ ID NO: 225610 - DNA, 19 bp, Artificial sequence
  SiRNA target sequence
tcggtgctaatgaaactgg

SEQ ID NO: 225611 - DNA, 19 bp, Artificial sequence
  SiRNA target sequence
cggtgctaatgaaactggt

SEQ ID NO: 225612 - DNA, 19 bp, Artificial sequence
  SiRNA target sequence
ggtgctaatgaaactggtg

SEQ ID NO: 225613 - DNA, 19 bp, Artificial sequence
  SiRNA target sequence
gtgctaatgaaactggtga

SEQ ID NO: 225614 - DNA, 19 bp, Artificial sequence
  SiRNA target sequence
tgctaatgaaactggtgag

SEQ ID NO: 225615 - DNA, 19 bp, Artificial sequence
  SiRNA target sequence
gctaatgaaactggtgagg

SEQ ID NO: 225616 - DNA, 19 bp, Artificial sequence
  SiRNA target sequence
ctaatgaaactggtgaggc

SEQ ID NO: 225617 - DNA, 19 bp, Artificial sequence
  SiRNA target sequence
taatgaaactggtgaggca

SEQ ID NO: 225618 - DNA, 19 bp, Artificial sequence
  SiRNA target sequence
aatgaaactggtgaggcaa

SEQ ID NO: 225619 - DNA, 19 bp, Artificial sequence
  SiRNA target sequence
atgaaactggtgaggcaaa

SEQ ID NO: 225620 - DNA, 19 bp, Artificial sequence
  SiRNA target sequence
tgaaactggtgaggcaaaa

SEQ ID NO: 225621 - DNA, 19 bp, Artificial sequence
  SiRNA target sequence
gaaactggtgaggcaaaat

SEQ ID NO: 225622 - DNA, 19 bp, Artificial sequence
  SiRNA target sequence
aaactggtgaggcaaaatc

SEQ ID NO: 225623 - DNA, 19 bp, Artificial sequence
  SiRNA target sequence
aactggtgaggcaaaatct

SEQ ID NO: 225624 - DNA, 19 bp, Artificial sequence
  SiRNA target sequence
actggtgaggcaaaatcta

SEQ ID NO: 225625 - DNA, 19 bp, Artificial sequence
  SiRNA target sequence
ctggtgaggcaaaatctac

SEQ ID NO: 225626 - DNA, 19 bp, Artificial sequence
  SiRNA target sequence
tggtgaggcaaaatctacc

SEQ ID NO: 225627 - DNA, 19 bp, Artificial sequence
  SiRNA target sequence
ggtgaggcaaaatctacct

SEQ ID NO: 225628 - DNA, 19 bp, Artificial sequence
  SiRNA target sequence
gtgaggcaaaatctaccta

SEQ ID NO: 225629 - DNA, 19 bp, Artificial sequence
  SiRNA target sequence
tgaggcaaaatctacctat

SEQ ID NO: 225630 - DNA, 19 bp, Artificial sequence
  SiRNA target sequence
gaggcaaaatctacctatg

SEQ ID NO: 225631 - DNA, 19 bp, Artificial sequence
  SiRNA target sequence
aggcaaaatctacctatgc

SEQ ID NO: 225632 - DNA, 19 bp, Artificial sequence
  SiRNA target sequence
ggcaaaatctacctatgct

SEQ ID NO: 225633 - DNA, 19 bp, Artificial sequence
  SiRNA target sequence
gcaaaatctacctatgctt

SEQ ID NO: 225634 - DNA, 19 bp, Artificial sequence
  SiRNA target sequence
caaaatctacctatgcttc

SEQ ID NO: 225635 - DNA, 19 bp, Artificial sequence
  SiRNA target sequence
aaaatctacctatgcttca

SEQ ID NO: 225636 - DNA, 19 bp, Artificial sequence
  SiRNA target sequence
aaatctacctatgcttcaa

SEQ ID NO: 225637 - DNA, 19 bp, Artificial sequence
  SiRNA target sequence
aatctacctatgcttcaat

SEQ ID NO: 225638 - DNA, 19 bp, Artificial sequence
  SiRNA target sequence
atctacctatgcttcaatt

SEQ ID NO: 225639 - DNA, 19 bp, Artificial sequence
  SiRNA target sequence
tctacctatgcttcaattt

SEQ ID NO: 225640 - DNA, 19 bp, Artificial sequence
  SiRNA target sequence
ctacctatgcttcaattta

SEQ ID NO: 225641 - DNA, 19 bp, Artificial sequence
  SiRNA target sequence
tacctatgcttcaatttat

SEQ ID NO: 225642 - DNA, 19 bp, Artificial sequence
  SiRNA target sequence
acctatgcttcaatttata

SEQ ID NO: 225643 - DNA, 19 bp, Artificial sequence
  SiRNA target sequence
cctatgcttcaatttatac

SEQ ID NO: 225644 - DNA, 19 bp, Artificial sequence
  SiRNA target sequence
ctatgcttcaatttataca

SEQ ID NO: 225645 - DNA, 19 bp, Artificial sequence
  SiRNA target sequence
tatgcttcaatttatacat

SEQ ID NO: 225646 - DNA, 19 bp, Artificial sequence
  SiRNA target sequence
atgcttcaatttatacatc

SEQ ID NO: 225647 - DNA, 19 bp, Artificial sequence
  SiRNA target sequence
tgcttcaatttatacatca

SEQ ID NO: 225648 - DNA, 19 bp, Artificial sequence
  SiRNA target sequence
gcttcaatttatacatcaa

SEQ ID NO: 225649 - DNA, 19 bp, Artificial sequence
  SiRNA target sequence
cttcaatttatacatcaat

SEQ ID NO: 225650 - DNA, 19 bp, Artificial sequence
  SiRNA target sequence
ttcaatttatacatcaatt

SEQ ID NO: 225651 - DNA, 19 bp, Artificial sequence
  SiRNA target sequence
tcaatttatacatcaattg

SEQ ID NO: 225652 - DNA, 19 bp, Artificial sequence
  SiRNA target sequence
caatttatacatcaattga

SEQ ID NO: 225653 - DNA, 19 bp, Artificial sequence
  SiRNA target sequence
aatttatacatcaattgaa

SEQ ID NO: 225654 - DNA, 19 bp, Artificial sequence
  SiRNA target sequence
atttatacatcaattgaac

SEQ ID NO: 225655 - DNA, 19 bp, Artificial sequence
  SiRNA target sequence
tttatacatcaattgaaca

SEQ ID NO: 225656 - DNA, 19 bp, Artificial sequence
  SiRNA target sequence
ttatacatcaattgaacaa

SEQ ID NO: 225657 - DNA, 19 bp, Artificial sequence
  SiRNA target sequence
tatacatcaattgaacaat

SEQ ID NO: 225658 - DNA, 19 bp, Artificial sequence
  SiRNA target sequence
atacatcaattgaacaatc

SEQ ID NO: 225659 - DNA, 19 bp, Artificial sequence
  SiRNA target sequence
tacatcaattgaacaatct

SEQ ID NO: 225660 - DNA, 19 bp, Artificial sequence
  SiRNA target sequence
acatcaattgaacaatctg

SEQ ID NO: 225661 - DNA, 19 bp, Artificial sequence
  SiRNA target sequence
catcaattgaacaatctgg

SEQ ID NO: 225662 - DNA, 19 bp, Artificial sequence
  SiRNA target sequence
atcaattgaacaatctgga

SEQ ID NO: 225663 - DNA, 19 bp, Artificial sequence
  SiRNA target sequence
tcaattgaacaatctggag

SEQ ID NO: 225664 - DNA, 19 bp, Artificial sequence
  SiRNA target sequence
caattgaacaatctggagt

SEQ ID NO: 225665 - DNA, 19 bp, Artificial sequence
  SiRNA target sequence
aattgaacaatctggagtt

SEQ ID NO: 225666 - DNA, 19 bp, Artificial sequence
  SiRNA target sequence
attgaacaatctggagttg

SEQ ID NO: 225667 - DNA, 19 bp, Artificial sequence
  SiRNA target sequence
ttgaacaatctggagttgc

SEQ ID NO: 225668 - DNA, 19 bp, Artificial sequence
  SiRNA target sequence
tgaacaatctggagttgct

SEQ ID NO: 225669 - DNA, 19 bp, Artificial sequence
  SiRNA target sequence
gaacaatctggagttgctg

SEQ ID NO: 225670 - DNA, 19 bp, Artificial sequence
  SiRNA target sequence
aacaatctggagttgctgt

SEQ ID NO: 225671 - DNA, 19 bp, Artificial sequence
  SiRNA target sequence
acaatctggagttgctgtt

SEQ ID NO: 225672 - DNA, 19 bp, Artificial sequence
  SiRNA target sequence
caatctggagttgctgtta

SEQ ID NO: 225673 - DNA, 19 bp, Artificial sequence
  SiRNA target sequence
aatctggagttgctgttat

SEQ ID NO: 225674 - DNA, 19 bp, Artificial sequence
  SiRNA target sequence
atctggagttgctgttatt

SEQ ID NO: 225675 - DNA, 19 bp, Artificial sequence
  SiRNA target sequence
tctggagttgctgttattg

SEQ ID NO: 225676 - DNA, 19 bp, Artificial sequence
  SiRNA target sequence
ctggagttgctgttattgt

SEQ ID NO: 225677 - DNA, 19 bp, Artificial sequence
  SiRNA target sequence
tggagttgctgttattgtc

SEQ ID NO: 225678 - DNA, 19 bp, Artificial sequence
  SiRNA target sequence
ggagttgctgttattgtca

SEQ ID NO: 225679 - DNA, 19 bp, Artificial sequence
  SiRNA target sequence
gagttgctgttattgtcat

SEQ ID NO: 225680 - DNA, 19 bp, Artificial sequence
  SiRNA target sequence
agttgctgttattgtcatg

SEQ ID NO: 225681 - DNA, 19 bp, Artificial sequence
  SiRNA target sequence
gttgctgttattgtcatga

SEQ ID NO: 225682 - DNA, 19 bp, Artificial sequence
  SiRNA target sequence
ttgctgttattgtcatgat

SEQ ID NO: 225683 - DNA, 19 bp, Artificial sequence
  SiRNA target sequence
tgctgttattgtcatgatt

SEQ ID NO: 225684 - DNA, 19 bp, Artificial sequence
  SiRNA target sequence
gctgttattgtcatgattt

SEQ ID NO: 225685 - DNA, 19 bp, Artificial sequence
  SiRNA target sequence
ctgttattgtcatgatttt

SEQ ID NO: 225686 - DNA, 19 bp, Artificial sequence
  SiRNA target sequence
tgttattgtcatgattttg

SEQ ID NO: 225687 - DNA, 19 bp, Artificial sequence
  SiRNA target sequence
gttattgtcatgattttgc

SEQ ID NO: 225688 - DNA, 19 bp, Artificial sequence
  SiRNA target sequence
ttattgtcatgattttgct

SEQ ID NO: 225689 - DNA, 19 bp, Artificial sequence
  SiRNA target sequence
tattgtcatgattttgcta

SEQ ID NO: 225690 - DNA, 19 bp, Artificial sequence
  SiRNA target sequence
attgtcatgattttgctac

SEQ ID NO: 225691 - DNA, 19 bp, Artificial sequence
  SiRNA target sequence
ttgtcatgattttgctact

SEQ ID NO: 225692 - DNA, 19 bp, Artificial sequence
  SiRNA target sequence
tgtcatgattttgctactt

SEQ ID NO: 225693 - DNA, 19 bp, Artificial sequence
  SiRNA target sequence
gtcatgattttgctactta

SEQ ID NO: 225694 - DNA, 19 bp, Artificial sequence
  SiRNA target sequence
tcatgattttgctacttac

SEQ ID NO: 225695 - DNA, 19 bp, Artificial sequence
  SiRNA target sequence
catgattttgctacttacc

SEQ ID NO: 225696 - DNA, 19 bp, Artificial sequence
  SiRNA target sequence
atgattttgctacttaccc

SEQ ID NO: 225697 - DNA, 19 bp, Artificial sequence
  SiRNA target sequence
tgattttgctacttacccc

SEQ ID NO: 225698 - DNA, 19 bp, Artificial sequence
  SiRNA target sequence
gattttgctacttacccct

SEQ ID NO: 225699 - DNA, 19 bp, Artificial sequence
  SiRNA target sequence
attttgctacttacccctt

SEQ ID NO: 225700 - DNA, 19 bp, Artificial sequence
  SiRNA target sequence
ttttgctacttaccccttt

SEQ ID NO: 225701 - DNA, 19 bp, Artificial sequence
  SiRNA target sequence
tttgctacttacccctttt

SEQ ID NO: 225702 - DNA, 19 bp, Artificial sequence
  SiRNA target sequence
ttgctacttaccccttttc

SEQ ID NO: 225703 - DNA, 19 bp, Artificial sequence
  SiRNA target sequence
tgctacttaccccttttcc

SEQ ID NO: 225704 - DNA, 19 bp, Artificial sequence
  SiRNA target sequence
gctacttaccccttttcca

SEQ ID NO: 225705 - DNA, 19 bp, Artificial sequence
  SiRNA target sequence
ctacttaccccttttccaa

SEQ ID NO: 225706 - DNA, 19 bp, Artificial sequence
  SiRNA target sequence
tacttaccccttttccaag

SEQ ID NO: 225707 - DNA, 19 bp, Artificial sequence
  SiRNA target sequence
acttaccccttttccaagg

SEQ ID NO: 225708 - DNA, 19 bp, Artificial sequence
  SiRNA target sequence
cttaccccttttccaaggc

SEQ ID NO: 225709 - DNA, 19 bp, Artificial sequence
  SiRNA target sequence
ttaccccttttccaaggct

SEQ ID NO: 225710 - DNA, 19 bp, Artificial sequence
  SiRNA target sequence
taccccttttccaaggctt

SEQ ID NO: 225711 - DNA, 19 bp, Artificial sequence
  SiRNA target sequence
accccttttccaaggctta

SEQ ID NO: 225712 - DNA, 19 bp, Artificial sequence
  SiRNA target sequence
ccccttttccaaggcttat

SEQ ID NO: 225713 - DNA, 19 bp, Artificial sequence
  SiRNA target sequence
cccttttccaaggcttatt

SEQ ID NO: 225714 - DNA, 19 bp, Artificial sequence
  SiRNA target sequence
ccttttccaaggcttatta

SEQ ID NO: 225715 - DNA, 19 bp, Artificial sequence
  SiRNA target sequence
cttttccaaggcttattaa

SEQ ID NO: 225716 - DNA, 19 bp, Artificial sequence
  SiRNA target sequence
ttttccaaggcttattaaa

SEQ ID NO: 225717 - DNA, 19 bp, Artificial sequence
  SiRNA target sequence
tttccaaggcttattaaaa

SEQ ID NO: 225718 - DNA, 19 bp, Artificial sequence
  SiRNA target sequence
ttccaaggcttattaaaac

SEQ ID NO: 225719 - DNA, 19 bp, Artificial sequence
  SiRNA target sequence
tccaaggcttattaaaaca

SEQ ID NO: 225720 - DNA, 19 bp, Artificial sequence
  SiRNA target sequence
ccaaggcttattaaaacaa

SEQ ID NO: 225721 - DNA, 19 bp, Artificial sequence
  SiRNA target sequence
caaggcttattaaaacaaa

SEQ ID NO: 225722 - DNA, 19 bp, Artificial sequence
  SiRNA target sequence
aaggcttattaaaacaaaa

SEQ ID NO: 225723 - DNA, 19 bp, Artificial sequence
  SiRNA target sequence
aggcttattaaaacaaaag

SEQ ID NO: 225724 - DNA, 19 bp, Artificial sequence
  SiRNA target sequence
ggcttattaaaacaaaagg

SEQ ID NO: 225725 - DNA, 19 bp, Artificial sequence
  SiRNA target sequence
gcttattaaaacaaaagga

SEQ ID NO: 225726 - DNA, 19 bp, Artificial sequence
  SiRNA target sequence
cttattaaaacaaaaggat

SEQ ID NO: 225727 - DNA, 19 bp, Artificial sequence
  SiRNA target sequence
ttattaaaacaaaaggatg

SEQ ID NO: 225728 - DNA, 19 bp, Artificial sequence
  SiRNA target sequence
tattaaaacaaaaggatgg

SEQ ID NO: 225729 - DNA, 19 bp, Artificial sequence
  SiRNA target sequence
attaaaacaaaaggatgga

SEQ ID NO: 225730 - DNA, 19 bp, Artificial sequence
  SiRNA target sequence
ttaaaacaaaaggatggat

SEQ ID NO: 225731 - DNA, 19 bp, Artificial sequence
  SiRNA target sequence
taaaacaaaaggatggatt

SEQ ID NO: 225732 - DNA, 19 bp, Artificial sequence
  SiRNA target sequence
aaaacaaaaggatggatta

SEQ ID NO: 225733 - DNA, 19 bp, Artificial sequence
  SiRNA target sequence
aaacaaaaggatggattac

SEQ ID NO: 225734 - DNA, 19 bp, Artificial sequence
  SiRNA target sequence
aacaaaaggatggattaca

SEQ ID NO: 225735 - DNA, 19 bp, Artificial sequence
  SiRNA target sequence
acaaaaggatggattacaa

SEQ ID NO: 225736 - DNA, 19 bp, Artificial sequence
  SiRNA target sequence
caaaaggatggattacaat

SEQ ID NO: 225737 - DNA, 19 bp, Artificial sequence
  SiRNA target sequence
aaaaggatggattacaata

SEQ ID NO: 225738 - DNA, 19 bp, Artificial sequence
  SiRNA target sequence
aaaggatggattacaatag

SEQ ID NO: 225739 - DNA, 19 bp, Artificial sequence
  SiRNA target sequence
aaggatggattacaatagc

SEQ ID NO: 225740 - DNA, 19 bp, Artificial sequence
  SiRNA target sequence
aggatggattacaatagcc

SEQ ID NO: 225741 - DNA, 19 bp, Artificial sequence
  SiRNA target sequence
ggatggattacaatagcca

SEQ ID NO: 225742 - DNA, 19 bp, Artificial sequence
  SiRNA target sequence
gatggattacaatagccat

SEQ ID NO: 225743 - DNA, 19 bp, Artificial sequence
  SiRNA target sequence
atggattacaatagccatt

SEQ ID NO: 225744 - DNA, 19 bp, Artificial sequence
  SiRNA target sequence
tggattacaatagccattc

SEQ ID NO: 225745 - DNA, 19 bp, Artificial sequence
  SiRNA target sequence
ggattacaatagccattct

SEQ ID NO: 225746 - DNA, 19 bp, Artificial sequence
  SiRNA target sequence
gattacaatagccattcta

SEQ ID NO: 225747 - DNA, 19 bp, Artificial sequence
  SiRNA target sequence
attacaatagccattctat

SEQ ID NO: 225748 - DNA, 19 bp, Artificial sequence
  SiRNA target sequence
ttacaatagccattctatg

SEQ ID NO: 225749 - DNA, 19 bp, Artificial sequence
  SiRNA target sequence
tacaatagccattctatgt

SEQ ID NO: 225750 - DNA, 19 bp, Artificial sequence
  SiRNA target sequence
acaatagccattctatgtc

SEQ ID NO: 225751 - DNA, 19 bp, Artificial sequence
  SiRNA target sequence
caatagccattctatgtcc

SEQ ID NO: 225752 - DNA, 19 bp, Artificial sequence
  SiRNA target sequence
aatagccattctatgtcct

SEQ ID NO: 225753 - DNA, 19 bp, Artificial sequence
  SiRNA target sequence
atagccattctatgtccta

SEQ ID NO: 225754 - DNA, 19 bp, Artificial sequence
  SiRNA target sequence
tagccattctatgtcctat

SEQ ID NO: 225755 - DNA, 19 bp, Artificial sequence
  SiRNA target sequence
agccattctatgtcctatt

SEQ ID NO: 225756 - DNA, 19 bp, Artificial sequence
  SiRNA target sequence
gccattctatgtcctatta

SEQ ID NO: 225757 - DNA, 19 bp, Artificial sequence
  SiRNA target sequence
ccattctatgtcctattat

SEQ ID NO: 225758 - DNA, 19 bp, Artificial sequence
  SiRNA target sequence
cattctatgtcctattatt

SEQ ID NO: 225759 - DNA, 19 bp, Artificial sequence
  SiRNA target sequence
attctatgtcctattatta

SEQ ID NO: 225760 - DNA, 19 bp, Artificial sequence
  SiRNA target sequence
ttctatgtcctattattac

SEQ ID NO: 225761 - DNA, 19 bp, Artificial sequence
  SiRNA target sequence
tctatgtcctattattact

SEQ ID NO: 225762 - DNA, 19 bp, Artificial sequence
  SiRNA target sequence
ctatgtcctattattactt

SEQ ID NO: 225763 - DNA, 19 bp, Artificial sequence
  SiRNA target sequence
tatgtcctattattacttt

SEQ ID NO: 225764 - DNA, 19 bp, Artificial sequence
  SiRNA target sequence
atgtcctattattactttt

SEQ ID NO: 225765 - DNA, 19 bp, Artificial sequence
  SiRNA target sequence
tgtcctattattacttttt

SEQ ID NO: 225766 - DNA, 19 bp, Artificial sequence
  SiRNA target sequence
gtcctattattactttttt

SEQ ID NO: 225767 - DNA, 19 bp, Artificial sequence
  SiRNA target sequence
tcctattattacttttttt

SEQ ID NO: 225768 - DNA, 19 bp, Artificial sequence
  SiRNA target sequence
cctattattactttttttt

SEQ ID NO: 225769 - DNA, 19 bp, Artificial sequence
  SiRNA target sequence
ctattattacttttttttc

SEQ ID NO: 225770 - DNA, 19 bp, Artificial sequence
  SiRNA target sequence
tattattacttttttttct

SEQ ID NO: 225771 - DNA, 19 bp, Artificial sequence
  SiRNA target sequence
attattacttttttttctg

SEQ ID NO: 225772 - DNA, 19 bp, Artificial sequence
  SiRNA target sequence
ttattacttttttttctgc

SEQ ID NO: 225773 - DNA, 19 bp, Artificial sequence
  SiRNA target sequence
tattacttttttttctgct

SEQ ID NO: 225774 - DNA, 19 bp, Artificial sequence
  SiRNA target sequence
attacttttttttctgctt

SEQ ID NO: 225775 - DNA, 19 bp, Artificial sequence
  SiRNA target sequence
ttacttttttttctgcttt

SEQ ID NO: 225776 - DNA, 19 bp, Artificial sequence
  SiRNA target sequence
tacttttttttctgctttt

SEQ ID NO: 225777 - DNA, 19 bp, Artificial sequence
  SiRNA target sequence
acttttttttctgcttttg

SEQ ID NO: 225778 - DNA, 19 bp, Artificial sequence
  SiRNA target sequence
cttttttttctgcttttgg

SEQ ID NO: 225779 - DNA, 19 bp, Artificial sequence
  SiRNA target sequence
ttttttttctgcttttggt

SEQ ID NO: 225780 - DNA, 19 bp, Artificial sequence
  SiRNA target sequence
tttttttctgcttttggta

SEQ ID NO: 225781 - DNA, 19 bp, Artificial sequence
  SiRNA target sequence
ttttttctgcttttggtac

SEQ ID NO: 225782 - DNA, 19 bp, Artificial sequence
  SiRNA target sequence
tttttctgcttttggtact

SEQ ID NO: 225783 - DNA, 19 bp, Artificial sequence
  SiRNA target sequence
ttttctgcttttggtactt

SEQ ID NO: 225784 - DNA, 19 bp, Artificial sequence
  SiRNA target sequence
tttctgcttttggtacttt

SEQ ID NO: 225785 - DNA, 19 bp, Artificial sequence
  SiRNA target sequence
ttctgcttttggtactttt

SEQ ID NO: 225786 - DNA, 19 bp, Artificial sequence
  SiRNA target sequence
tctgcttttggtacttttg

SEQ ID NO: 225787 - DNA, 19 bp, Artificial sequence
  SiRNA target sequence
ctgcttttggtacttttgt

SEQ ID NO: 225788 - DNA, 19 bp, Artificial sequence
  SiRNA target sequence
tgcttttggtacttttgta

SEQ ID NO: 225789 - DNA, 19 bp, Artificial sequence
  SiRNA target sequence
gcttttggtacttttgtat

SEQ ID NO: 225790 - DNA, 19 bp, Artificial sequence
  SiRNA target sequence
cttttggtacttttgtatt

SEQ ID NO: 225791 - DNA, 19 bp, Artificial sequence
  SiRNA target sequence
ttttggtacttttgtatta

SEQ ID NO: 225792 - DNA, 19 bp, Artificial sequence
  SiRNA target sequence
tttggtacttttgtattag

SEQ ID NO: 225793 - DNA, 19 bp, Artificial sequence
  SiRNA target sequence
ttggtacttttgtattagc

SEQ ID NO: 225794 - DNA, 19 bp, Artificial sequence
  SiRNA target sequence
tggtacttttgtattagct

SEQ ID NO: 225795 - DNA, 19 bp, Artificial sequence
  SiRNA target sequence
ggtacttttgtattagctt

SEQ ID NO: 225796 - DNA, 19 bp, Artificial sequence
  SiRNA target sequence
gtacttttgtattagctta

SEQ ID NO: 225797 - DNA, 19 bp, Artificial sequence
  SiRNA target sequence
tacttttgtattagcttat

SEQ ID NO: 225798 - DNA, 19 bp, Artificial sequence
  SiRNA target sequence
acttttgtattagcttatt

SEQ ID NO: 225799 - DNA, 19 bp, Artificial sequence
  SiRNA target sequence
cttttgtattagcttattt

SEQ ID NO: 225800 - DNA, 19 bp, Artificial sequence
  SiRNA target sequence
ttttgtattagcttattta

SEQ ID NO: 225801 - DNA, 19 bp, Artificial sequence
  SiRNA target sequence
tttgtattagcttatttaa

SEQ ID NO: 225802 - DNA, 19 bp, Artificial sequence
  SiRNA target sequence
ttgtattagcttatttaaa

SEQ ID NO: 225803 - DNA, 19 bp, Artificial sequence
  SiRNA target sequence
tgtattagcttatttaaac

SEQ ID NO: 225804 - DNA, 19 bp, Artificial sequence
  SiRNA target sequence
gtattagcttatttaaact

SEQ ID NO: 225805 - DNA, 19 bp, Artificial sequence
  SiRNA target sequence
tattagcttatttaaactt

SEQ ID NO: 225806 - DNA, 19 bp, Artificial sequence
  SiRNA target sequence
attagcttatttaaacttc

SEQ ID NO: 225807 - DNA, 19 bp, Artificial sequence
  SiRNA target sequence
ttagcttatttaaacttcc

SEQ ID NO: 225808 - DNA, 19 bp, Artificial sequence
  SiRNA target sequence
tagcttatttaaacttccc

SEQ ID NO: 225809 - DNA, 19 bp, Artificial sequence
  SiRNA target sequence
agcttatttaaacttccca

SEQ ID NO: 225810 - DNA, 19 bp, Artificial sequence
  SiRNA target sequence
gcttatttaaacttcccaa

SEQ ID NO: 225811 - DNA, 19 bp, Artificial sequence
  SiRNA target sequence
cttatttaaacttcccaat

SEQ ID NO: 225812 - DNA, 19 bp, Artificial sequence
  SiRNA target sequence
ttatttaaacttcccaatt

SEQ ID NO: 225813 - DNA, 19 bp, Artificial sequence
  SiRNA target sequence
tatttaaacttcccaatta

SEQ ID NO: 225814 - DNA, 19 bp, Artificial sequence
  SiRNA target sequence
atttaaacttcccaattac

SEQ ID NO: 225815 - DNA, 19 bp, Artificial sequence
  SiRNA target sequence
tttaaacttcccaattaca

SEQ ID NO: 225816 - DNA, 19 bp, Artificial sequence
  SiRNA target sequence
ttaaacttcccaattacaa

SEQ ID NO: 225817 - DNA, 19 bp, Artificial sequence
  SiRNA target sequence
taaacttcccaattacaaa

SEQ ID NO: 225818 - DNA, 19 bp, Artificial sequence
  SiRNA target sequence
aaacttcccaattacaaac

SEQ ID NO: 225819 - DNA, 19 bp, Artificial sequence
  SiRNA target sequence
aacttcccaattacaaaca

SEQ ID NO: 225820 - DNA, 19 bp, Artificial sequence
  SiRNA target sequence
acttcccaattacaaacaa

SEQ ID NO: 225821 - DNA, 19 bp, Artificial sequence
  SiRNA target sequence
cttcccaattacaaacaaa

SEQ ID NO: 225822 - DNA, 19 bp, Artificial sequence
  SiRNA target sequence
ttcccaattacaaacaaag

SEQ ID NO: 225823 - DNA, 19 bp, Artificial sequence
  SiRNA target sequence
tcccaattacaaacaaaga

SEQ ID NO: 225824 - DNA, 19 bp, Artificial sequence
  SiRNA target sequence
cccaattacaaacaaagag

SEQ ID NO: 225825 - DNA, 19 bp, Artificial sequence
  SiRNA target sequence
ccaattacaaacaaagagg

SEQ ID NO: 225826 - DNA, 19 bp, Artificial sequence
  SiRNA target sequence
caattacaaacaaagagga

SEQ ID NO: 225827 - DNA, 19 bp, Artificial sequence
  SiRNA target sequence
aattacaaacaaagaggat

SEQ ID NO: 225828 - DNA, 19 bp, Artificial sequence
  SiRNA target sequence
attacaaacaaagaggata

SEQ ID NO: 225829 - DNA, 19 bp, Artificial sequence
  SiRNA target sequence
ttacaaacaaagaggataa

SEQ ID NO: 225830 - DNA, 19 bp, Artificial sequence
  SiRNA target sequence
tacaaacaaagaggataat

SEQ ID NO: 225831 - DNA, 19 bp, Artificial sequence
  SiRNA target sequence
acaaacaaagaggataata

SEQ ID NO: 225832 - DNA, 19 bp, Artificial sequence
  SiRNA target sequence
caaacaaagaggataatat

SEQ ID NO: 225833 - DNA, 19 bp, Artificial sequence
  SiRNA target sequence
aaacaaagaggataatata

SEQ ID NO: 225834 - DNA, 19 bp, Artificial sequence
  SiRNA target sequence
aacaaagaggataatatat

SEQ ID NO: 225835 - DNA, 19 bp, Artificial sequence
  SiRNA target sequence
acaaagaggataatatatt

SEQ ID NO: 225836 - DNA, 19 bp, Artificial sequence
  SiRNA target sequence
caaagaggataatatattt

SEQ ID NO: 225837 - DNA, 19 bp, Artificial sequence
  SiRNA target sequence
aaagaggataatatatttg

SEQ ID NO: 225838 - DNA, 19 bp, Artificial sequence
  SiRNA target sequence
aagaggataatatatttga

SEQ ID NO: 225839 - DNA, 19 bp, Artificial sequence
  SiRNA target sequence
agaggataatatatttgat

SEQ ID NO: 225840 - DNA, 19 bp, Artificial sequence
  SiRNA target sequence
gaggataatatatttgata

SEQ ID NO: 225841 - DNA, 19 bp, Artificial sequence
  SiRNA target sequence
aggataatatatttgatat

SEQ ID NO: 225842 - DNA, 19 bp, Artificial sequence
  SiRNA target sequence
ggataatatatttgatatt

SEQ ID NO: 225843 - DNA, 19 bp, Artificial sequence
  SiRNA target sequence
gataatatatttgatattt

SEQ ID NO: 225844 - DNA, 19 bp, Artificial sequence
  SiRNA target sequence
ataatatatttgatattta

SEQ ID NO: 225845 - DNA, 19 bp, Artificial sequence
  SiRNA target sequence
taatatatttgatatttac

SEQ ID NO: 225846 - DNA, 19 bp, Artificial sequence
  SiRNA target sequence
aatatatttgatatttacc

SEQ ID NO: 225847 - DNA, 19 bp, Artificial sequence
  SiRNA target sequence
atatatttgatatttaccg

SEQ ID NO: 225848 - DNA, 19 bp, Artificial sequence
  SiRNA target sequence
tatatttgatatttaccgt

SEQ ID NO: 225849 - DNA, 19 bp, Artificial sequence
  SiRNA target sequence
atatttgatatttaccgtt

SEQ ID NO: 225850 - DNA, 19 bp, Artificial sequence
  SiRNA target sequence
tatttgatatttaccgttt

SEQ ID NO: 225851 - DNA, 19 bp, Artificial sequence
  SiRNA target sequence
atttgatatttaccgttta

SEQ ID NO: 225852 - DNA, 19 bp, Artificial sequence
  SiRNA target sequence
tttgatatttaccgtttac

SEQ ID NO: 225853 - DNA, 19 bp, Artificial sequence
  SiRNA target sequence
ttgatatttaccgtttacc

SEQ ID NO: 225854 - DNA, 19 bp, Artificial sequence
  SiRNA target sequence
tgatatttaccgtttaccg

SEQ ID NO: 225855 - DNA, 19 bp, Artificial sequence
  SiRNA target sequence
gatatttaccgtttaccgt

SEQ ID NO: 225856 - DNA, 19 bp, Artificial sequence
  SiRNA target sequence
atatttaccgtttaccgtc

SEQ ID NO: 225857 - DNA, 19 bp, Artificial sequence
  SiRNA target sequence
tatttaccgtttaccgtca

SEQ ID NO: 225858 - DNA, 19 bp, Artificial sequence
  SiRNA target sequence
atttaccgtttaccgtcaa

SEQ ID NO: 225859 - DNA, 19 bp, Artificial sequence
  SiRNA target sequence
tttaccgtttaccgtcaac

SEQ ID NO: 225860 - DNA, 19 bp, Artificial sequence
  SiRNA target sequence
ttaccgtttaccgtcaact

SEQ ID NO: 225861 - DNA, 19 bp, Artificial sequence
  SiRNA target sequence
taccgtttaccgtcaactg

SEQ ID NO: 225862 - DNA, 19 bp, Artificial sequence
  SiRNA target sequence
accgtttaccgtcaactga

SEQ ID NO: 225863 - DNA, 19 bp, Artificial sequence
  SiRNA target sequence
ccgtttaccgtcaactgat

SEQ ID NO: 225864 - DNA, 19 bp, Artificial sequence
  SiRNA target sequence
cgtttaccgtcaactgatt

SEQ ID NO: 225865 - DNA, 19 bp, Artificial sequence
  SiRNA target sequence
gtttaccgtcaactgattc

SEQ ID NO: 225866 - DNA, 19 bp, Artificial sequence
  SiRNA target sequence
tttaccgtcaactgattct

SEQ ID NO: 225867 - DNA, 19 bp, Artificial sequence
  SiRNA target sequence
ttaccgtcaactgattcta

SEQ ID NO: 225868 - DNA, 19 bp, Artificial sequence
  SiRNA target sequence
taccgtcaactgattctat

SEQ ID NO: 225869 - DNA, 19 bp, Artificial sequence
  SiRNA target sequence
accgtcaactgattctata

SEQ ID NO: 225870 - DNA, 19 bp, Artificial sequence
  SiRNA target sequence
ccgtcaactgattctataa

SEQ ID NO: 225871 - DNA, 19 bp, Artificial sequence
  SiRNA target sequence
cgtcaactgattctataat

SEQ ID NO: 225872 - DNA, 19 bp, Artificial sequence
  SiRNA target sequence
gtcaactgattctataatc

SEQ ID NO: 225873 - DNA, 19 bp, Artificial sequence
  SiRNA target sequence
tcaactgattctataatca

SEQ ID NO: 225874 - DNA, 19 bp, Artificial sequence
  SiRNA target sequence
caactgattctataatcaa

SEQ ID NO: 225875 - DNA, 19 bp, Artificial sequence
  SiRNA target sequence
aactgattctataatcaaa

SEQ ID NO: 225876 - DNA, 19 bp, Artificial sequence
  SiRNA target sequence
actgattctataatcaaat

SEQ ID NO: 225877 - DNA, 19 bp, Artificial sequence
  SiRNA target sequence
ctgattctataatcaaatt

SEQ ID NO: 225878 - DNA, 19 bp, Artificial sequence
  SiRNA target sequence
tgattctataatcaaatta

SEQ ID NO: 225879 - DNA, 19 bp, Artificial sequence
  SiRNA target sequence
gattctataatcaaattag

SEQ ID NO: 225880 - DNA, 19 bp, Artificial sequence
  SiRNA target sequence
attctataatcaaattaga

SEQ ID NO: 225881 - DNA, 19 bp, Artificial sequence
  SiRNA target sequence
ttctataatcaaattagaa

SEQ ID NO: 225882 - DNA, 19 bp, Artificial sequence
  SiRNA target sequence
tctataatcaaattagaaa

SEQ ID NO: 225883 - DNA, 19 bp, Artificial sequence
  SiRNA target sequence
ctataatcaaattagaaaa

SEQ ID NO: 225884 - DNA, 19 bp, Artificial sequence
  SiRNA target sequence
tataatcaaattagaaaat

SEQ ID NO: 225885 - DNA, 19 bp, Artificial sequence
  SiRNA target sequence
ataatcaaattagaaaata

SEQ ID NO: 225886 - DNA, 19 bp, Artificial sequence
  SiRNA target sequence
taatcaaattagaaaatat

SEQ ID NO: 225887 - DNA, 19 bp, Artificial sequence
  SiRNA target sequence
aatcaaattagaaaatatt

SEQ ID NO: 225888 - DNA, 19 bp, Artificial sequence
  SiRNA target sequence
atcaaattagaaaatattg

SEQ ID NO: 225889 - DNA, 19 bp, Artificial sequence
  SiRNA target sequence
tcaaattagaaaatattgt

SEQ ID NO: 225890 - DNA, 19 bp, Artificial sequence
  SiRNA target sequence
caaattagaaaatattgtt

SEQ ID NO: 225891 - DNA, 19 bp, Artificial sequence
  SiRNA target sequence
aaattagaaaatattgttg

SEQ ID NO: 225892 - DNA, 19 bp, Artificial sequence
  SiRNA target sequence
aattagaaaatattgttgg

SEQ ID NO: 225893 - DNA, 19 bp, Artificial sequence
  SiRNA target sequence
attagaaaatattgttggt

SEQ ID NO: 225894 - DNA, 19 bp, Artificial sequence
  SiRNA target sequence
ttagaaaatattgttggtg

SEQ ID NO: 225895 - DNA, 19 bp, Artificial sequence
  SiRNA target sequence
tagaaaatattgttggtgt

SEQ ID NO: 225896 - DNA, 19 bp, Artificial sequence
  SiRNA target sequence
agaaaatattgttggtgtc

SEQ ID NO: 225897 - DNA, 19 bp, Artificial sequence
  SiRNA target sequence
gaaaatattgttggtgtca

SEQ ID NO: 225898 - DNA, 19 bp, Artificial sequence
  SiRNA target sequence
aaaatattgttggtgtcat

SEQ ID NO: 225899 - DNA, 19 bp, Artificial sequence
  SiRNA target sequence
aaatattgttggtgtcatt

SEQ ID NO: 225900 - DNA, 19 bp, Artificial sequence
  SiRNA target sequence
aatattgttggtgtcattt

SEQ ID NO: 225901 - DNA, 19 bp, Artificial sequence
  SiRNA target sequence
atattgttggtgtcatttg

SEQ ID NO: 225902 - DNA, 19 bp, Artificial sequence
  SiRNA target sequence
tattgttggtgtcatttgt

SEQ ID NO: 225903 - DNA, 19 bp, Artificial sequence
  SiRNA target sequence
attgttggtgtcatttgtg

SEQ ID NO: 225904 - DNA, 19 bp, Artificial sequence
  SiRNA target sequence
ttgttggtgtcatttgtgt

SEQ ID NO: 225905 - DNA, 19 bp, Artificial sequence
  SiRNA target sequence
tgttggtgtcatttgtgta

SEQ ID NO: 225906 - DNA, 19 bp, Artificial sequence
  SiRNA target sequence
gttggtgtcatttgtgtat

SEQ ID NO: 225907 - DNA, 19 bp, Artificial sequence
  SiRNA target sequence
ttggtgtcatttgtgtatc

SEQ ID NO: 225908 - DNA, 19 bp, Artificial sequence
  SiRNA target sequence
tggtgtcatttgtgtatct

SEQ ID NO: 225909 - DNA, 19 bp, Artificial sequence
  SiRNA target sequence
ggtgtcatttgtgtatctt

SEQ ID NO: 225910 - DNA, 19 bp, Artificial sequence
  SiRNA target sequence
gtgtcatttgtgtatcttt

SEQ ID NO: 225911 - DNA, 19 bp, Artificial sequence
  SiRNA target sequence
tgtcatttgtgtatcttta

SEQ ID NO: 225912 - DNA, 19 bp, Artificial sequence
  SiRNA target sequence
gtcatttgtgtatctttaa

SEQ ID NO: 225913 - DNA, 19 bp, Artificial sequence
  SiRNA target sequence
tcatttgtgtatctttaat

SEQ ID NO: 225914 - DNA, 19 bp, Artificial sequence
  SiRNA target sequence
catttgtgtatctttaatg

SEQ ID NO: 225915 - DNA, 19 bp, Artificial sequence
  SiRNA target sequence
atttgtgtatctttaatga

SEQ ID NO: 225916 - DNA, 19 bp, Artificial sequence
  SiRNA target sequence
tttgtgtatctttaatgaa

SEQ ID NO: 225917 - DNA, 19 bp, Artificial sequence
  SiRNA target sequence
ttgtgtatctttaatgaag

SEQ ID NO: 225918 - DNA, 19 bp, Artificial sequence
  SiRNA target sequence
tgtgtatctttaatgaaga

SEQ ID NO: 225919 - DNA, 19 bp, Artificial sequence
  SiRNA target sequence
gtgtatctttaatgaagat

SEQ ID NO: 225920 - DNA, 19 bp, Artificial sequence
  SiRNA target sequence
tgtatctttaatgaagatt

SEQ ID NO: 225921 - DNA, 19 bp, Artificial sequence
  SiRNA target sequence
gtatctttaatgaagattt

SEQ ID NO: 225922 - DNA, 19 bp, Artificial sequence
  SiRNA target sequence
tatctttaatgaagatttc

SEQ ID NO: 225923 - DNA, 19 bp, Artificial sequence
  SiRNA target sequence
atctttaatgaagatttct

SEQ ID NO: 225924 - DNA, 19 bp, Artificial sequence
  SiRNA target sequence
tctttaatgaagatttcta

SEQ ID NO: 225925 - DNA, 19 bp, Artificial sequence
  SiRNA target sequence
ctttaatgaagatttctaa

SEQ ID NO: 225926 - DNA, 19 bp, Artificial sequence
  SiRNA target sequence
tttaatgaagatttctaaa

SEQ ID NO: 225927 - DNA, 19 bp, Artificial sequence
  SiRNA target sequence
ttaatgaagatttctaaat

SEQ ID NO: 225928 - DNA, 19 bp, Artificial sequence
  SiRNA target sequence
taatgaagatttctaaata

SEQ ID NO: 225929 - DNA, 19 bp, Artificial sequence
  SiRNA target sequence
aatgaagatttctaaatat

SEQ ID NO: 225930 - DNA, 19 bp, Artificial sequence
  SiRNA target sequence
atgaagatttctaaatatg

SEQ ID NO: 225931 - DNA, 19 bp, Artificial sequence
  SiRNA target sequence
tgaagatttctaaatatgc

SEQ ID NO: 225932 - DNA, 19 bp, Artificial sequence
  SiRNA target sequence
gaagatttctaaatatgca

SEQ ID NO: 225933 - DNA, 19 bp, Artificial sequence
  SiRNA target sequence
aagatttctaaatatgcag

SEQ ID NO: 225934 - DNA, 19 bp, Artificial sequence
  SiRNA target sequence
agatttctaaatatgcagc

SEQ ID NO: 225935 - DNA, 19 bp, Artificial sequence
  SiRNA target sequence
gatttctaaatatgcagca

SEQ ID NO: 225936 - DNA, 19 bp, Artificial sequence
  SiRNA target sequence
atttctaaatatgcagcat

SEQ ID NO: 225937 - DNA, 19 bp, Artificial sequence
  SiRNA target sequence
tttctaaatatgcagcatt

SEQ ID NO: 225938 - DNA, 19 bp, Artificial sequence
  SiRNA target sequence
ttctaaatatgcagcattt

SEQ ID NO: 225939 - DNA, 19 bp, Artificial sequence
  SiRNA target sequence
tctaaatatgcagcatttg

SEQ ID NO: 225940 - DNA, 19 bp, Artificial sequence
  SiRNA target sequence
ctaaatatgcagcatttga

SEQ ID NO: 225941 - DNA, 19 bp, Artificial sequence
  SiRNA target sequence
taaatatgcagcatttgat

SEQ ID NO: 225942 - DNA, 19 bp, Artificial sequence
  SiRNA target sequence
aaatatgcagcatttgata

SEQ ID NO: 225943 - DNA, 19 bp, Artificial sequence
  SiRNA target sequence
aatatgcagcatttgatat

SEQ ID NO: 225944 - DNA, 19 bp, Artificial sequence
  SiRNA target sequence
atatgcagcatttgatatc

SEQ ID NO: 225945 - DNA, 19 bp, Artificial sequence
  SiRNA target sequence
tatgcagcatttgatatca

SEQ ID NO: 225946 - DNA, 19 bp, Artificial sequence
  SiRNA target sequence
atgcagcatttgatatcac

SEQ ID NO: 225947 - DNA, 19 bp, Artificial sequence
  SiRNA target sequence
tgcagcatttgatatcaca

SEQ ID NO: 225948 - DNA, 19 bp, Artificial sequence
  SiRNA target sequence
gcagcatttgatatcacaa

SEQ ID NO: 225949 - DNA, 19 bp, Artificial sequence
  SiRNA target sequence
cagcatttgatatcacaaa

SEQ ID NO: 225950 - DNA, 19 bp, Artificial sequence
  SiRNA target sequence
agcatttgatatcacaaaa

SEQ ID NO: 225951 - DNA, 19 bp, Artificial sequence
  SiRNA target sequence
gcatttgatatcacaaaag

SEQ ID NO: 225952 - DNA, 19 bp, Artificial sequence
  SiRNA target sequence
catttgatatcacaaaaga

SEQ ID NO: 225953 - DNA, 19 bp, Artificial sequence
  SiRNA target sequence
atttgatatcacaaaagag

SEQ ID NO: 225954 - DNA, 19 bp, Artificial sequence
  SiRNA target sequence
tttgatatcacaaaagagg

SEQ ID NO: 225955 - DNA, 19 bp, Artificial sequence
  SiRNA target sequence
ttgatatcacaaaagaggc

SEQ ID NO: 225956 - DNA, 19 bp, Artificial sequence
  SiRNA target sequence
tgatatcacaaaagaggct

SEQ ID NO: 225957 - DNA, 19 bp, Artificial sequence
  SiRNA target sequence
gatatcacaaaagaggctt

SEQ ID NO: 225958 - DNA, 19 bp, Artificial sequence
  SiRNA target sequence
atatcacaaaagaggcttt

SEQ ID NO: 225959 - DNA, 19 bp, Artificial sequence
  SiRNA target sequence
tatcacaaaagaggctttg

SEQ ID NO: 225960 - DNA, 19 bp, Artificial sequence
  SiRNA target sequence
atcacaaaagaggctttgt

SEQ ID NO: 225961 - DNA, 19 bp, Artificial sequence
  SiRNA target sequence
tcacaaaagaggctttgtc

SEQ ID NO: 225962 - DNA, 19 bp, Artificial sequence
  SiRNA target sequence
cacaaaagaggctttgtct

SEQ ID NO: 225963 - DNA, 19 bp, Artificial sequence
  SiRNA target sequence
acaaaagaggctttgtcta

SEQ ID NO: 225964 - DNA, 19 bp, Artificial sequence
  SiRNA target sequence
caaaagaggctttgtctat

SEQ ID NO: 225965 - DNA, 19 bp, Artificial sequence
  SiRNA target sequence
aaaagaggctttgtctatg

SEQ ID NO: 225966 - DNA, 19 bp, Artificial sequence
  SiRNA target sequence
aaagaggctttgtctatgc

SEQ ID NO: 225967 - DNA, 19 bp, Artificial sequence
  SiRNA target sequence
aagaggctttgtctatgca

SEQ ID NO: 225968 - DNA, 19 bp, Artificial sequence
  SiRNA target sequence
agaggctttgtctatgcag

SEQ ID NO: 225969 - DNA, 19 bp, Artificial sequence
  SiRNA target sequence
gaggctttgtctatgcaga

SEQ ID NO: 225970 - DNA, 19 bp, Artificial sequence
  SiRNA target sequence
aggctttgtctatgcagat

SEQ ID NO: 225971 - DNA, 19 bp, Artificial sequence
  SiRNA target sequence
ggctttgtctatgcagatt

SEQ ID NO: 225972 - DNA, 19 bp, Artificial sequence
  SiRNA target sequence
gctttgtctatgcagattg

SEQ ID NO: 225973 - DNA, 19 bp, Artificial sequence
  SiRNA target sequence
ctttgtctatgcagattga

SEQ ID NO: 225974 - DNA, 19 bp, Artificial sequence
  SiRNA target sequence
tttgtctatgcagattgat

SEQ ID NO: 225975 - DNA, 19 bp, Artificial sequence
  SiRNA target sequence
ttgtctatgcagattgatg

SEQ ID NO: 225976 - DNA, 19 bp, Artificial sequence
  SiRNA target sequence
tgtctatgcagattgatgg

SEQ ID NO: 225977 - DNA, 19 bp, Artificial sequence
  SiRNA target sequence
gtctatgcagattgatggt

SEQ ID NO: 225978 - DNA, 19 bp, Artificial sequence
  SiRNA target sequence
tctatgcagattgatggtt

SEQ ID NO: 225979 - DNA, 19 bp, Artificial sequence
  SiRNA target sequence
ctatgcagattgatggttc

SEQ ID NO: 225980 - DNA, 19 bp, Artificial sequence
  SiRNA target sequence
tatgcagattgatggttct

SEQ ID NO: 225981 - DNA, 19 bp, Artificial sequence
  SiRNA target sequence
atgcagattgatggttcta

SEQ ID NO: 225982 - DNA, 19 bp, Artificial sequence
  SiRNA target sequence
tgcagattgatggttctat

SEQ ID NO: 225983 - DNA, 19 bp, Artificial sequence
  SiRNA target sequence
gcagattgatggttctata

SEQ ID NO: 225984 - DNA, 19 bp, Artificial sequence
  SiRNA target sequence
cagattgatggttctataa

SEQ ID NO: 225985 - DNA, 19 bp, Artificial sequence
  SiRNA target sequence
agattgatggttctataag

SEQ ID NO: 225986 - DNA, 19 bp, Artificial sequence
  SiRNA target sequence
gattgatggttctataaga

SEQ ID NO: 225987 - DNA, 19 bp, Artificial sequence
  SiRNA target sequence
attgatggttctataagag

SEQ ID NO: 225988 - DNA, 19 bp, Artificial sequence
  SiRNA target sequence
ttgatggttctataagagc

SEQ ID NO: 225989 - DNA, 19 bp, Artificial sequence
  SiRNA target sequence
tgatggttctataagagcg

SEQ ID NO: 225990 - DNA, 19 bp, Artificial sequence
  SiRNA target sequence
gatggttctataagagcga

SEQ ID NO: 225991 - DNA, 19 bp, Artificial sequence
  SiRNA target sequence
atggttctataagagcgaa

SEQ ID NO: 225992 - DNA, 19 bp, Artificial sequence
  SiRNA target sequence
tggttctataagagcgaaa

SEQ ID NO: 225993 - DNA, 19 bp, Artificial sequence
  SiRNA target sequence
ggttctataagagcgaaat

SEQ ID NO: 225994 - DNA, 19 bp, Artificial sequence
  SiRNA target sequence
gttctataagagcgaaata

SEQ ID NO: 225995 - DNA, 19 bp, Artificial sequence
  SiRNA target sequence
ttctataagagcgaaatac

SEQ ID NO: 225996 - DNA, 19 bp, Artificial sequence
  SiRNA target sequence
tctataagagcgaaataca

SEQ ID NO: 225997 - DNA, 19 bp, Artificial sequence
  SiRNA target sequence
ctataagagcgaaatacaa

SEQ ID NO: 225998 - DNA, 19 bp, Artificial sequence
  SiRNA target sequence
tataagagcgaaatacaaa

SEQ ID NO: 225999 - DNA, 19 bp, Artificial sequence
  SiRNA target sequence
ataagagcgaaatacaaag

SEQ ID NO: 226000 - DNA, 19 bp, Artificial sequence
  SiRNA target sequence
taagagcgaaatacaaagg

SEQ ID NO: 226001 - DNA, 19 bp, Artificial sequence
  SiRNA target sequence
aagagcgaaatacaaaggt

SEQ ID NO: 226002 - DNA, 19 bp, Artificial sequence
  SiRNA target sequence
agagcgaaatacaaaggta

SEQ ID NO: 226003 - DNA, 19 bp, Artificial sequence
  SiRNA target sequence
gagcgaaatacaaaggtat

SEQ ID NO: 226004 - DNA, 19 bp, Artificial sequence
  SiRNA target sequence
agcgaaatacaaaggtatt

SEQ ID NO: 226005 - DNA, 19 bp, Artificial sequence
  SiRNA target sequence
gcgaaatacaaaggtattt

SEQ ID NO: 226006 - DNA, 19 bp, Artificial sequence
  SiRNA target sequence
cgaaatacaaaggtatttt

SEQ ID NO: 226007 - DNA, 19 bp, Artificial sequence
  SiRNA target sequence
gaaatacaaaggtattttt

SEQ ID NO: 226008 - DNA, 19 bp, Artificial sequence
  SiRNA target sequence
aaatacaaaggtatttttg

SEQ ID NO: 226009 - DNA, 19 bp, Artificial sequence
  SiRNA target sequence
aatacaaaggtatttttga

SEQ ID NO: 226010 - DNA, 19 bp, Artificial sequence
  SiRNA target sequence
atacaaaggtatttttgat

SEQ ID NO: 226011 - DNA, 19 bp, Artificial sequence
  SiRNA target sequence
tacaaaggtatttttgatg

SEQ ID NO: 226012 - DNA, 19 bp, Artificial sequence
  SiRNA target sequence
acaaaggtatttttgatgg

SEQ ID NO: 226013 - DNA, 19 bp, Artificial sequence
  SiRNA target sequence
caaaggtatttttgatggt

SEQ ID NO: 226014 - DNA, 19 bp, Artificial sequence
  SiRNA target sequence
aaaggtatttttgatggtg

SEQ ID NO: 226015 - DNA, 19 bp, Artificial sequence
  SiRNA target sequence
aaggtatttttgatggtgt

SEQ ID NO: 226016 - DNA, 19 bp, Artificial sequence
  SiRNA target sequence
aggtatttttgatggtgta

SEQ ID NO: 226017 - DNA, 19 bp, Artificial sequence
  SiRNA target sequence
ggtatttttgatggtgtat

SEQ ID NO: 226018 - DNA, 19 bp, Artificial sequence
  SiRNA target sequence
gtatttttgatggtgtatt

SEQ ID NO: 226019 - DNA, 19 bp, Artificial sequence
  SiRNA target sequence
tatttttgatggtgtattt

SEQ ID NO: 226020 - DNA, 19 bp, Artificial sequence
  SiRNA target sequence
atttttgatggtgtatttg

SEQ ID NO: 226021 - DNA, 19 bp, Artificial sequence
  SiRNA target sequence
tttttgatggtgtatttgg

SEQ ID NO: 226022 - DNA, 19 bp, Artificial sequence
  SiRNA target sequence
ttttgatggtgtatttggt

SEQ ID NO: 226023 - DNA, 19 bp, Artificial sequence
  SiRNA target sequence
tttgatggtgtatttggta

SEQ ID NO: 226024 - DNA, 19 bp, Artificial sequence
  SiRNA target sequence
ttgatggtgtatttggtaa

SEQ ID NO: 226025 - DNA, 19 bp, Artificial sequence
  SiRNA target sequence
tgatggtgtatttggtaag

SEQ ID NO: 226026 - DNA, 19 bp, Artificial sequence
  SiRNA target sequence
gatggtgtatttggtaagc

SEQ ID NO: 226027 - DNA, 19 bp, Artificial sequence
  SiRNA target sequence
atggtgtatttggtaagct

SEQ ID NO: 226028 - DNA, 19 bp, Artificial sequence
  SiRNA target sequence
tggtgtatttggtaagctg

SEQ ID NO: 226029 - DNA, 19 bp, Artificial sequence
  SiRNA target sequence
ggtgtatttggtaagctgg

SEQ ID NO: 226030 - DNA, 19 bp, Artificial sequence
  SiRNA target sequence
gtgtatttggtaagctggg

SEQ ID NO: 226031 - DNA, 19 bp, Artificial sequence
  SiRNA target sequence
tgtatttggtaagctgggg

SEQ ID NO: 226032 - DNA, 19 bp, Artificial sequence
  SiRNA target sequence
gtatttggtaagctgggga

SEQ ID NO: 226033 - DNA, 19 bp, Artificial sequence
  SiRNA target sequence
tatttggtaagctggggaa

SEQ ID NO: 226034 - DNA, 19 bp, Artificial sequence
  SiRNA target sequence
atttggtaagctggggaaa

SEQ ID NO: 226035 - DNA, 19 bp, Artificial sequence
  SiRNA target sequence
tttggtaagctggggaaat

SEQ ID NO: 226036 - DNA, 19 bp, Artificial sequence
  SiRNA target sequence
ttggtaagctggggaaatc

SEQ ID NO: 226037 - DNA, 19 bp, Artificial sequence
  SiRNA target sequence
tggtaagctggggaaatct

SEQ ID NO: 226038 - DNA, 19 bp, Artificial sequence
  SiRNA target sequence
ggtaagctggggaaatctt

SEQ ID NO: 226039 - DNA, 19 bp, Artificial sequence
  SiRNA target sequence
gtaagctggggaaatcttt

SEQ ID NO: 226040 - DNA, 19 bp, Artificial sequence
  SiRNA target sequence
taagctggggaaatctttt

SEQ ID NO: 226041 - DNA, 19 bp, Artificial sequence
  SiRNA target sequence
aagctggggaaatcttttg

SEQ ID NO: 226042 - DNA, 19 bp, Artificial sequence
  SiRNA target sequence
agctggggaaatcttttgg

SEQ ID NO: 226043 - DNA, 19 bp, Artificial sequence
  SiRNA target sequence
gctggggaaatcttttgga

SEQ ID NO: 226044 - DNA, 19 bp, Artificial sequence
  SiRNA target sequence
ctggggaaatcttttggat

SEQ ID NO: 226045 - DNA, 19 bp, Artificial sequence
  SiRNA target sequence
tggggaaatcttttggatc

SEQ ID NO: 226046 - DNA, 19 bp, Artificial sequence
  SiRNA target sequence
ggggaaatcttttggatca

SEQ ID NO: 226047 - DNA, 19 bp, Artificial sequence
  SiRNA target sequence
gggaaatcttttggatcag

SEQ ID NO: 226048 - DNA, 19 bp, Artificial sequence
  SiRNA target sequence
ggaaatcttttggatcagt

SEQ ID NO: 226049 - DNA, 19 bp, Artificial sequence
  SiRNA target sequence
gaaatcttttggatcagtt

SEQ ID NO: 226050 - DNA, 19 bp, Artificial sequence
  SiRNA target sequence
aaatcttttggatcagttt

SEQ ID NO: 226051 - DNA, 19 bp, Artificial sequence
  SiRNA target sequence
aatcttttggatcagttta

SEQ ID NO: 226052 - DNA, 19 bp, Artificial sequence
  SiRNA target sequence
atcttttggatcagtttat

SEQ ID NO: 226053 - DNA, 19 bp, Artificial sequence
  SiRNA target sequence
tcttttggatcagtttatg

SEQ ID NO: 226054 - DNA, 19 bp, Artificial sequence
  SiRNA target sequence
cttttggatcagtttatgg

SEQ ID NO: 226055 - DNA, 19 bp, Artificial sequence
  SiRNA target sequence
ttttggatcagtttatgga

SEQ ID NO: 226056 - DNA, 19 bp, Artificial sequence
  SiRNA target sequence
tttggatcagtttatggat

SEQ ID NO: 226057 - DNA, 19 bp, Artificial sequence
  SiRNA target sequence
ttggatcagtttatggatt

SEQ ID NO: 226058 - DNA, 19 bp, Artificial sequence
  SiRNA target sequence
tggatcagtttatggattt

SEQ ID NO: 226059 - DNA, 19 bp, Artificial sequence
  SiRNA target sequence
ggatcagtttatggattta

SEQ ID NO: 226060 - DNA, 19 bp, Artificial sequence
  SiRNA target sequence
gatcagtttatggatttac

SEQ ID NO: 226061 - DNA, 19 bp, Artificial sequence
  SiRNA target sequence
atcagtttatggatttaca

SEQ ID NO: 226062 - DNA, 19 bp, Artificial sequence
  SiRNA target sequence
tcagtttatggatttacaa

SEQ ID NO: 226063 - DNA, 19 bp, Artificial sequence
  SiRNA target sequence
cagtttatggatttacaat

SEQ ID NO: 226064 - DNA, 19 bp, Artificial sequence
  SiRNA target sequence
agtttatggatttacaatt

SEQ ID NO: 226065 - DNA, 19 bp, Artificial sequence
  SiRNA target sequence
gtttatggatttacaatta

SEQ ID NO: 226066 - DNA, 19 bp, Artificial sequence
  SiRNA target sequence
tttatggatttacaattac

SEQ ID NO: 226067 - DNA, 19 bp, Artificial sequence
  SiRNA target sequence
ttatggatttacaattact

SEQ ID NO: 226068 - DNA, 19 bp, Artificial sequence
  SiRNA target sequence
tatggatttacaattacta

SEQ ID NO: 226069 - DNA, 19 bp, Artificial sequence
  SiRNA target sequence
atggatttacaattactac

SEQ ID NO: 226070 - DNA, 19 bp, Artificial sequence
  SiRNA target sequence
tggatttacaattactaca

SEQ ID NO: 226071 - DNA, 19 bp, Artificial sequence
  SiRNA target sequence
ggatttacaattactacat

SEQ ID NO: 226072 - DNA, 19 bp, Artificial sequence
  SiRNA target sequence
gatttacaattactacatt

SEQ ID NO: 226073 - DNA, 19 bp, Artificial sequence
  SiRNA target sequence
atttacaattactacatta

SEQ ID NO: 226074 - DNA, 19 bp, Artificial sequence
  SiRNA target sequence
tttacaattactacattat

SEQ ID NO: 226075 - DNA, 19 bp, Artificial sequence
  SiRNA target sequence
ttacaattactacattatt

SEQ ID NO: 226076 - DNA, 19 bp, Artificial sequence
  SiRNA target sequence
tacaattactacattatta

SEQ ID NO: 226077 - DNA, 19 bp, Artificial sequence
  SiRNA target sequence
acaattactacattattag

SEQ ID NO: 226078 - DNA, 19 bp, Artificial sequence
  SiRNA target sequence
caattactacattattagg

SEQ ID NO: 226079 - DNA, 19 bp, Artificial sequence
  SiRNA target sequence
aattactacattattagga

SEQ ID NO: 226080 - DNA, 19 bp, Artificial sequence
  SiRNA target sequence
attactacattattaggaa

SEQ ID NO: 226081 - DNA, 19 bp, Artificial sequence
  SiRNA target sequence
ttactacattattaggaac

SEQ ID NO: 226082 - DNA, 19 bp, Artificial sequence
  SiRNA target sequence
tactacattattaggaaca

SEQ ID NO: 226083 - DNA, 19 bp, Artificial sequence
  SiRNA target sequence
actacattattaggaacaa

SEQ ID NO: 226084 - DNA, 19 bp, Artificial sequence
  SiRNA target sequence
ctacattattaggaacaag

SEQ ID NO: 226085 - DNA, 19 bp, Artificial sequence
  SiRNA target sequence
tacattattaggaacaaga

SEQ ID NO: 226086 - DNA, 19 bp, Artificial sequence
  SiRNA target sequence
acattattaggaacaagag

SEQ ID NO: 226087 - DNA, 19 bp, Artificial sequence
  SiRNA target sequence
cattattaggaacaagaga

SEQ ID NO: 226088 - DNA, 19 bp, Artificial sequence
  SiRNA target sequence
attattaggaacaagagat

SEQ ID NO: 226089 - DNA, 19 bp, Artificial sequence
  SiRNA target sequence
ttattaggaacaagagatg

SEQ ID NO: 226090 - DNA, 19 bp, Artificial sequence
  SiRNA target sequence
tattaggaacaagagatgt

SEQ ID NO: 226091 - DNA, 19 bp, Artificial sequence
  SiRNA target sequence
attaggaacaagagatgtt

SEQ ID NO: 226092 - DNA, 19 bp, Artificial sequence
  SiRNA target sequence
ttaggaacaagagatgttc

SEQ ID NO: 226093 - DNA, 19 bp, Artificial sequence
  SiRNA target sequence
taggaacaagagatgttcg

SEQ ID NO: 226094 - DNA, 19 bp, Artificial sequence
  SiRNA target sequence
aggaacaagagatgttcgt

SEQ ID NO: 226095 - DNA, 19 bp, Artificial sequence
  SiRNA target sequence
ggaacaagagatgttcgta

SEQ ID NO: 226096 - DNA, 19 bp, Artificial sequence
  SiRNA target sequence
gaacaagagatgttcgtag

SEQ ID NO: 226097 - DNA, 19 bp, Artificial sequence
  SiRNA target sequence
aacaagagatgttcgtaga

SEQ ID NO: 226098 - DNA, 19 bp, Artificial sequence
  SiRNA target sequence
acaagagatgttcgtagag

SEQ ID NO: 226099 - DNA, 19 bp, Artificial sequence
  SiRNA target sequence
caagagatgttcgtagagg

SEQ ID NO: 226100 - DNA, 19 bp, Artificial sequence
  SiRNA target sequence
aagagatgttcgtagaggt

SEQ ID NO: 226101 - DNA, 19 bp, Artificial sequence
  SiRNA target sequence
agagatgttcgtagaggtg

SEQ ID NO: 226102 - DNA, 19 bp, Artificial sequence
  SiRNA target sequence
gagatgttcgtagaggtgc

SEQ ID NO: 226103 - DNA, 19 bp, Artificial sequence
  SiRNA target sequence
agatgttcgtagaggtgct

SEQ ID NO: 226104 - DNA, 19 bp, Artificial sequence
  SiRNA target sequence
gatgttcgtagaggtgctc

SEQ ID NO: 226105 - DNA, 19 bp, Artificial sequence
  SiRNA target sequence
atgttcgtagaggtgctcc

SEQ ID NO: 226106 - DNA, 19 bp, Artificial sequence
  SiRNA target sequence
tgttcgtagaggtgctcct

SEQ ID NO: 226107 - DNA, 19 bp, Artificial sequence
  SiRNA target sequence
gttcgtagaggtgctccta

SEQ ID NO: 226108 - DNA, 19 bp, Artificial sequence
  SiRNA target sequence
ttcgtagaggtgctcctat

SEQ ID NO: 226109 - DNA, 19 bp, Artificial sequence
  SiRNA target sequence
tcgtagaggtgctcctata

SEQ ID NO: 226110 - DNA, 19 bp, Artificial sequence
  SiRNA target sequence
cgtagaggtgctcctatat

SEQ ID NO: 226111 - DNA, 19 bp, Artificial sequence
  SiRNA target sequence
gtagaggtgctcctatatc

SEQ ID NO: 226112 - DNA, 19 bp, Artificial sequence
  SiRNA target sequence
tagaggtgctcctatatcg

SEQ ID NO: 226113 - DNA, 19 bp, Artificial sequence
  SiRNA target sequence
agaggtgctcctatatcgc

SEQ ID NO: 226114 - DNA, 19 bp, Artificial sequence
  SiRNA target sequence
gaggtgctcctatatcgct

SEQ ID NO: 226115 - DNA, 19 bp, Artificial sequence
  SiRNA target sequence
aggtgctcctatatcgctt

SEQ ID NO: 226116 - DNA, 19 bp, Artificial sequence
  SiRNA target sequence
ggtgctcctatatcgcttt

SEQ ID NO: 226117 - DNA, 19 bp, Artificial sequence
  SiRNA target sequence
gtgctcctatatcgctttg

SEQ ID NO: 226118 - DNA, 19 bp, Artificial sequence
  SiRNA target sequence
tgctcctatatcgctttgt

SEQ ID NO: 226119 - DNA, 19 bp, Artificial sequence
  SiRNA target sequence
gctcctatatcgctttgtg

SEQ ID NO: 226120 - DNA, 19 bp, Artificial sequence
  SiRNA target sequence
ctcctatatcgctttgtgt

SEQ ID NO: 226121 - DNA, 19 bp, Artificial sequence
  SiRNA target sequence
tcctatatcgctttgtgtt

SEQ ID NO: 226122 - DNA, 19 bp, Artificial sequence
  SiRNA target sequence
cctatatcgctttgtgttc

SEQ ID NO: 226123 - DNA, 19 bp, Artificial sequence
  SiRNA target sequence
ctatatcgctttgtgttct

SEQ ID NO: 226124 - DNA, 19 bp, Artificial sequence
  SiRNA target sequence
tatatcgctttgtgttcta

SEQ ID NO: 226125 - DNA, 19 bp, Artificial sequence
  SiRNA target sequence
atatcgctttgtgttctaa

SEQ ID NO: 226126 - DNA, 19 bp, Artificial sequence
  SiRNA target sequence
tatcgctttgtgttctaat

SEQ ID NO: 226127 - DNA, 19 bp, Artificial sequence
  SiRNA target sequence
atcgctttgtgttctaata

SEQ ID NO: 226128 - DNA, 19 bp, Artificial sequence
  SiRNA target sequence
tcgctttgtgttctaatat

SEQ ID NO: 226129 - DNA, 19 bp, Artificial sequence
  SiRNA target sequence
cgctttgtgttctaatatt

SEQ ID NO: 226130 - DNA, 19 bp, Artificial sequence
  SiRNA target sequence
gctttgtgttctaatattg

SEQ ID NO: 226131 - DNA, 19 bp, Artificial sequence
  SiRNA target sequence
ctttgtgttctaatattgt

SEQ ID NO: 226132 - DNA, 19 bp, Artificial sequence
  SiRNA target sequence
tttgtgttctaatattgtt

SEQ ID NO: 226133 - DNA, 19 bp, Artificial sequence
  SiRNA target sequence
ttgtgttctaatattgttc

SEQ ID NO: 226134 - DNA, 19 bp, Artificial sequence
  SiRNA target sequence
tgtgttctaatattgttct

SEQ ID NO: 226135 - DNA, 19 bp, Artificial sequence
  SiRNA target sequence
gtgttctaatattgttctg

SEQ ID NO: 226136 - DNA, 19 bp, Artificial sequence
  SiRNA target sequence
tgttctaatattgttctgc

SEQ ID NO: 226137 - DNA, 19 bp, Artificial sequence
  SiRNA target sequence
gttctaatattgttctgcc

SEQ ID NO: 226138 - DNA, 19 bp, Artificial sequence
  SiRNA target sequence
ttctaatattgttctgcct

SEQ ID NO: 226139 - DNA, 19 bp, Artificial sequence
  SiRNA target sequence
tctaatattgttctgcctt

SEQ ID NO: 226140 - DNA, 19 bp, Artificial sequence
  SiRNA target sequence
ctaatattgttctgcctta

SEQ ID NO: 226141 - DNA, 19 bp, Artificial sequence
  SiRNA target sequence
taatattgttctgccttat

SEQ ID NO: 226142 - DNA, 19 bp, Artificial sequence
  SiRNA target sequence
aatattgttctgccttata

SEQ ID NO: 226143 - DNA, 19 bp, Artificial sequence
  SiRNA target sequence
atattgttctgccttatat

SEQ ID NO: 226144 - DNA, 19 bp, Artificial sequence
  SiRNA target sequence
tattgttctgccttatatg

SEQ ID NO: 226145 - DNA, 19 bp, Artificial sequence
  SiRNA target sequence
attgttctgccttatatgg

SEQ ID NO: 226146 - DNA, 19 bp, Artificial sequence
  SiRNA target sequence
ttgttctgccttatatggt

SEQ ID NO: 226147 - DNA, 19 bp, Artificial sequence
  SiRNA target sequence
tgttctgccttatatggtt

SEQ ID NO: 226148 - DNA, 19 bp, Artificial sequence
  SiRNA target sequence
gttctgccttatatggttt

SEQ ID NO: 226149 - DNA, 19 bp, Artificial sequence
  SiRNA target sequence
ttctgccttatatggtttt

SEQ ID NO: 226150 - DNA, 19 bp, Artificial sequence
  SiRNA target sequence
tctgccttatatggtttta

SEQ ID NO: 226151 - DNA, 19 bp, Artificial sequence
  SiRNA target sequence
ctgccttatatggttttat

SEQ ID NO: 226152 - DNA, 19 bp, Artificial sequence
  SiRNA target sequence
tgccttatatggttttatt

SEQ ID NO: 226153 - DNA, 19 bp, Artificial sequence
  SiRNA target sequence
gccttatatggttttattc

SEQ ID NO: 226154 - DNA, 19 bp, Artificial sequence
  SiRNA target sequence
ccttatatggttttattct

SEQ ID NO: 226155 - DNA, 19 bp, Artificial sequence
  SiRNA target sequence
cttatatggttttattctg

SEQ ID NO: 226156 - DNA, 19 bp, Artificial sequence
  SiRNA target sequence
ttatatggttttattctgt

SEQ ID NO: 226157 - DNA, 19 bp, Artificial sequence
  SiRNA target sequence
tatatggttttattctgtt

SEQ ID NO: 226158 - DNA, 19 bp, Artificial sequence
  SiRNA target sequence
atatggttttattctgttt

SEQ ID NO: 226159 - DNA, 19 bp, Artificial sequence
  SiRNA target sequence
tatggttttattctgtttt

SEQ ID NO: 226160 - DNA, 19 bp, Artificial sequence
  SiRNA target sequence
atggttttattctgttttc

SEQ ID NO: 226161 - DNA, 19 bp, Artificial sequence
  SiRNA target sequence
tggttttattctgttttct

SEQ ID NO: 226162 - DNA, 19 bp, Artificial sequence
  SiRNA target sequence
ggttttattctgttttcta

SEQ ID NO: 226163 - DNA, 19 bp, Artificial sequence
  SiRNA target sequence
gttttattctgttttctat

SEQ ID NO: 226164 - DNA, 19 bp, Artificial sequence
  SiRNA target sequence
ttttattctgttttctatc

SEQ ID NO: 226165 - DNA, 19 bp, Artificial sequence
  SiRNA target sequence
tttattctgttttctatct

SEQ ID NO: 226166 - DNA, 19 bp, Artificial sequence
  SiRNA target sequence
ttattctgttttctatctc

SEQ ID NO: 226167 - DNA, 19 bp, Artificial sequence
  SiRNA target sequence
tattctgttttctatctca

SEQ ID NO: 226168 - DNA, 19 bp, Artificial sequence
  SiRNA target sequence
attctgttttctatctcaa

SEQ ID NO: 226169 - DNA, 19 bp, Artificial sequence
  SiRNA target sequence
ttctgttttctatctcaat

SEQ ID NO: 226170 - DNA, 19 bp, Artificial sequence
  SiRNA target sequence
tctgttttctatctcaata

SEQ ID NO: 226171 - DNA, 19 bp, Artificial sequence
  SiRNA target sequence
ctgttttctatctcaatag

SEQ ID NO: 226172 - DNA, 19 bp, Artificial sequence
  SiRNA target sequence
tgttttctatctcaataga

SEQ ID NO: 226173 - DNA, 19 bp, Artificial sequence
  SiRNA target sequence
gttttctatctcaatagaa

SEQ ID NO: 226174 - DNA, 19 bp, Artificial sequence
  SiRNA target sequence
ttttctatctcaatagaaa

SEQ ID NO: 226175 - DNA, 19 bp, Artificial sequence
  SiRNA target sequence
tttctatctcaatagaaaa

SEQ ID NO: 226176 - DNA, 19 bp, Artificial sequence
  SiRNA target sequence
ttctatctcaatagaaaat

SEQ ID NO: 226177 - DNA, 19 bp, Artificial sequence
  SiRNA target sequence
tctatctcaatagaaaata

SEQ ID NO: 226178 - DNA, 19 bp, Artificial sequence
  SiRNA target sequence
ctatctcaatagaaaatat

SEQ ID NO: 226179 - DNA, 19 bp, Artificial sequence
  SiRNA target sequence
tatctcaatagaaaatata

SEQ ID NO: 226180 - DNA, 19 bp, Artificial sequence
  SiRNA target sequence
atctcaatagaaaatataa

SEQ ID NO: 226181 - DNA, 19 bp, Artificial sequence
  SiRNA target sequence
tctcaatagaaaatataaa

SEQ ID NO: 226182 - DNA, 19 bp, Artificial sequence
  SiRNA target sequence
ctcaatagaaaatataaag

SEQ ID NO: 226183 - DNA, 19 bp, Artificial sequence
  SiRNA target sequence
tcaatagaaaatataaaga

SEQ ID NO: 226184 - DNA, 19 bp, Artificial sequence
  SiRNA target sequence
caatagaaaatataaagaa

SEQ ID NO: 226185 - DNA, 19 bp, Artificial sequence
  SiRNA target sequence
aatagaaaatataaagaat

SEQ ID NO: 226186 - DNA, 19 bp, Artificial sequence
  SiRNA target sequence
atagaaaatataaagaatc

SEQ ID NO: 226187 - DNA, 19 bp, Artificial sequence
  SiRNA target sequence
tagaaaatataaagaatct

SEQ ID NO: 226188 - DNA, 19 bp, Artificial sequence
  SiRNA target sequence
agaaaatataaagaatctg

SEQ ID NO: 226189 - DNA, 19 bp, Artificial sequence
  SiRNA target sequence
gaaaatataaagaatctgt

SEQ ID NO: 226190 - DNA, 19 bp, Artificial sequence
  SiRNA target sequence
aaaatataaagaatctgtc

SEQ ID NO: 226191 - DNA, 19 bp, Artificial sequence
  SiRNA target sequence
aaatataaagaatctgtcg

SEQ ID NO: 226192 - DNA, 19 bp, Artificial sequence
  SiRNA target sequence
aatataaagaatctgtcga

SEQ ID NO: 226193 - DNA, 19 bp, Artificial sequence
  SiRNA target sequence
atataaagaatctgtcgag

SEQ ID NO: 226194 - DNA, 19 bp, Artificial sequence
  SiRNA target sequence
tataaagaatctgtcgaga

SEQ ID NO: 226195 - DNA, 19 bp, Artificial sequence
  SiRNA target sequence
ataaagaatctgtcgagaa

SEQ ID NO: 226196 - DNA, 19 bp, Artificial sequence
  SiRNA target sequence
taaagaatctgtcgagaat

SEQ ID NO: 226197 - DNA, 19 bp, Artificial sequence
  SiRNA target sequence
aaagaatctgtcgagaata

SEQ ID NO: 226198 - DNA, 19 bp, Artificial sequence
  SiRNA target sequence
aagaatctgtcgagaataa

SEQ ID NO: 226199 - DNA, 19 bp, Artificial sequence
  SiRNA target sequence
agaatctgtcgagaataat

SEQ ID NO: 226200 - DNA, 19 bp, Artificial sequence
  SiRNA target sequence
gaatctgtcgagaataatg

SEQ ID NO: 226201 - DNA, 19 bp, Artificial sequence
  SiRNA target sequence
aatctgtcgagaataatgc

SEQ ID NO: 226202 - DNA, 19 bp, Artificial sequence
  SiRNA target sequence
atctgtcgagaataatgca

SEQ ID NO: 226203 - DNA, 19 bp, Artificial sequence
  SiRNA target sequence
tctgtcgagaataatgcac

SEQ ID NO: 226204 - DNA, 19 bp, Artificial sequence
  SiRNA target sequence
ctgtcgagaataatgcacc

SEQ ID NO: 226205 - DNA, 19 bp, Artificial sequence
  SiRNA target sequence
tgtcgagaataatgcacca

SEQ ID NO: 226206 - DNA, 19 bp, Artificial sequence
  SiRNA target sequence
gtcgagaataatgcaccaa

SEQ ID NO: 226207 - DNA, 19 bp, Artificial sequence
  SiRNA target sequence
tcgagaataatgcaccaat

SEQ ID NO: 226208 - DNA, 19 bp, Artificial sequence
  SiRNA target sequence
cgagaataatgcaccaatt

SEQ ID NO: 226209 - DNA, 19 bp, Artificial sequence
  SiRNA target sequence
gagaataatgcaccaattg

SEQ ID NO: 226210 - DNA, 19 bp, Artificial sequence
  SiRNA target sequence
agaataatgcaccaattga

SEQ ID NO: 226211 - DNA, 19 bp, Artificial sequence
  SiRNA target sequence
gaataatgcaccaattgat

SEQ ID NO: 226212 - DNA, 19 bp, Artificial sequence
  SiRNA target sequence
aataatgcaccaattgata

SEQ ID NO: 226213 - DNA, 19 bp, Artificial sequence
  SiRNA target sequence
ataatgcaccaattgatat

SEQ ID NO: 226214 - DNA, 19 bp, Artificial sequence
  SiRNA target sequence
taatgcaccaattgatatt

SEQ ID NO: 226215 - DNA, 19 bp, Artificial sequence
  SiRNA target sequence
aatgcaccaattgatattg

SEQ ID NO: 226216 - DNA, 19 bp, Artificial sequence
  SiRNA target sequence
atgcaccaattgatattga

SEQ ID NO: 226217 - DNA, 19 bp, Artificial sequence
  SiRNA target sequence
tgcaccaattgatattgat

SEQ ID NO: 226218 - DNA, 19 bp, Artificial sequence
  SiRNA target sequence
gcaccaattgatattgatt

SEQ ID NO: 226219 - DNA, 19 bp, Artificial sequence
  SiRNA target sequence
caccaattgatattgattt

SEQ ID NO: 226220 - DNA, 19 bp, Artificial sequence
  SiRNA target sequence
accaattgatattgattta

SEQ ID NO: 226221 - DNA, 19 bp, Artificial sequence
  SiRNA target sequence
ccaattgatattgatttat

SEQ ID NO: 226222 - DNA, 19 bp, Artificial sequence
  SiRNA target sequence
caattgatattgatttatt

SEQ ID NO: 226223 - DNA, 19 bp, Artificial sequence
  SiRNA target sequence
aattgatattgatttattc

SEQ ID NO: 226224 - DNA, 19 bp, Artificial sequence
  SiRNA target sequence
attgatattgatttattca

SEQ ID NO: 226225 - DNA, 19 bp, Artificial sequence
  SiRNA target sequence
ttgatattgatttattcac

SEQ ID NO: 226226 - DNA, 19 bp, Artificial sequence
  SiRNA target sequence
tgatattgatttattcact

SEQ ID NO: 226227 - DNA, 19 bp, Artificial sequence
  SiRNA target sequence
gatattgatttattcacta

SEQ ID NO: 226228 - DNA, 19 bp, Artificial sequence
  SiRNA target sequence
atattgatttattcactag

SEQ ID NO: 226229 - DNA, 19 bp, Artificial sequence
  SiRNA target sequence
tattgatttattcactagt

SEQ ID NO: 226230 - DNA, 19 bp, Artificial sequence
  SiRNA target sequence
attgatttattcactagtt

SEQ ID NO: 226231 - DNA, 19 bp, Artificial sequence
  SiRNA target sequence
ttgatttattcactagttc

SEQ ID NO: 226232 - DNA, 19 bp, Artificial sequence
  SiRNA target sequence
tgatttattcactagttca

SEQ ID NO: 226233 - DNA, 19 bp, Artificial sequence
  SiRNA target sequence
gatttattcactagttcaa

SEQ ID NO: 226234 - DNA, 19 bp, Artificial sequence
  SiRNA target sequence
atttattcactagttcaaa

SEQ ID NO: 226235 - DNA, 19 bp, Artificial sequence
  SiRNA target sequence
tttattcactagttcaaaa

SEQ ID NO: 226236 - DNA, 19 bp, Artificial sequence
  SiRNA target sequence
ttattcactagttcaaaag

SEQ ID NO: 226237 - DNA, 19 bp, Artificial sequence
  SiRNA target sequence
tattcactagttcaaaagt

SEQ ID NO: 226238 - DNA, 19 bp, Artificial sequence
  SiRNA target sequence
attcactagttcaaaagtc

SEQ ID NO: 226239 - DNA, 19 bp, Artificial sequence
  SiRNA target sequence
ttcactagttcaaaagtca

SEQ ID NO: 226240 - DNA, 19 bp, Artificial sequence
  SiRNA target sequence
tcactagttcaaaagtcaa

SEQ ID NO: 226241 - DNA, 19 bp, Artificial sequence
  SiRNA target sequence
cactagttcaaaagtcaag

SEQ ID NO: 226242 - DNA, 19 bp, Artificial sequence
  SiRNA target sequence
actagttcaaaagtcaagg

SEQ ID NO: 226243 - DNA, 19 bp, Artificial sequence
  SiRNA target sequence
ctagttcaaaagtcaaggc

SEQ ID NO: 226244 - DNA, 19 bp, Artificial sequence
  SiRNA target sequence
tagttcaaaagtcaaggca

SEQ ID NO: 226245 - DNA, 19 bp, Artificial sequence
  SiRNA target sequence
agttcaaaagtcaaggcac

SEQ ID NO: 226246 - DNA, 19 bp, Artificial sequence
  SiRNA target sequence
gttcaaaagtcaaggcacc

SEQ ID NO: 226247 - DNA, 19 bp, Artificial sequence
  SiRNA target sequence
ttcaaaagtcaaggcacct

SEQ ID NO: 226248 - DNA, 19 bp, Artificial sequence
  SiRNA target sequence
tcaaaagtcaaggcacctt

SEQ ID NO: 226249 - DNA, 19 bp, Artificial sequence
  SiRNA target sequence
caaaagtcaaggcaccttc

SEQ ID NO: 226250 - DNA, 19 bp, Artificial sequence
  SiRNA target sequence
aaaagtcaaggcaccttct

SEQ ID NO: 226251 - DNA, 19 bp, Artificial sequence
  SiRNA target sequence
aaagtcaaggcaccttctt

SEQ ID NO: 226252 - DNA, 19 bp, Artificial sequence
  SiRNA target sequence
aagtcaaggcaccttcttc

SEQ ID NO: 226253 - DNA, 19 bp, Artificial sequence
  SiRNA target sequence
agtcaaggcaccttcttct

SEQ ID NO: 226254 - DNA, 19 bp, Artificial sequence
  SiRNA target sequence
gtcaaggcaccttcttctg

SEQ ID NO: 226255 - DNA, 19 bp, Artificial sequence
  SiRNA target sequence
tcaaggcaccttcttctga

SEQ ID NO: 226256 - DNA, 19 bp, Artificial sequence
  SiRNA target sequence
caaggcaccttcttctgaa

SEQ ID NO: 226257 - DNA, 19 bp, Artificial sequence
  SiRNA target sequence
aaggcaccttcttctgaac

SEQ ID NO: 226258 - DNA, 19 bp, Artificial sequence
  SiRNA target sequence
aggcaccttcttctgaacc

SEQ ID NO: 226259 - DNA, 19 bp, Artificial sequence
  SiRNA target sequence
ggcaccttcttctgaacct

SEQ ID NO: 226260 - DNA, 19 bp, Artificial sequence
  SiRNA target sequence
gcaccttcttctgaaccta

SEQ ID NO: 226261 - DNA, 19 bp, Artificial sequence
  SiRNA target sequence
caccttcttctgaacctac

SEQ ID NO: 226262 - DNA, 19 bp, Artificial sequence
  SiRNA target sequence
accttcttctgaacctact

SEQ ID NO: 226263 - DNA, 19 bp, Artificial sequence
  SiRNA target sequence
ccttcttctgaacctactg

SEQ ID NO: 226264 - DNA, 19 bp, Artificial sequence
  SiRNA target sequence
cttcttctgaacctactgt

SEQ ID NO: 226265 - DNA, 19 bp, Artificial sequence
  SiRNA target sequence
ttcttctgaacctactgtt

SEQ ID NO: 226266 - DNA, 19 bp, Artificial sequence
  SiRNA target sequence
tcttctgaacctactgttg

SEQ ID NO: 226267 - DNA, 19 bp, Artificial sequence
  SiRNA target sequence
cttctgaacctactgttgc

SEQ ID NO: 226268 - DNA, 19 bp, Artificial sequence
  SiRNA target sequence
ttctgaacctactgttgct

SEQ ID NO: 226269 - DNA, 19 bp, Artificial sequence
  SiRNA target sequence
tctgaacctactgttgcta

SEQ ID NO: 226270 - DNA, 19 bp, Artificial sequence
  SiRNA target sequence
ctgaacctactgttgctac

SEQ ID NO: 226271 - DNA, 19 bp, Artificial sequence
  SiRNA target sequence
tgaacctactgttgctacc

SEQ ID NO: 226272 - DNA, 19 bp, Artificial sequence
  SiRNA target sequence
gaacctactgttgctacca

SEQ ID NO: 226273 - DNA, 19 bp, Artificial sequence
  SiRNA target sequence
aacctactgttgctaccaa

SEQ ID NO: 226274 - DNA, 19 bp, Artificial sequence
  SiRNA target sequence
acctactgttgctaccaaa

SEQ ID NO: 226275 - DNA, 19 bp, Artificial sequence
  SiRNA target sequence
cctactgttgctaccaaaa

SEQ ID NO: 226276 - DNA, 19 bp, Artificial sequence
  SiRNA target sequence
ctactgttgctaccaaaag

SEQ ID NO: 226277 - DNA, 19 bp, Artificial sequence
  SiRNA target sequence
tactgttgctaccaaaagt

SEQ ID NO: 226278 - DNA, 19 bp, Artificial sequence
  SiRNA target sequence
actgttgctaccaaaagtg

SEQ ID NO: 226279 - DNA, 19 bp, Artificial sequence
  SiRNA target sequence
ctgttgctaccaaaagtgt

SEQ ID NO: 226280 - DNA, 19 bp, Artificial sequence
  SiRNA target sequence
tgttgctaccaaaagtgtt

SEQ ID NO: 226281 - DNA, 19 bp, Artificial sequence
  SiRNA target sequence
gttgctaccaaaagtgtta

SEQ ID NO: 226282 - DNA, 19 bp, Artificial sequence
  SiRNA target sequence
ttgctaccaaaagtgttac

SEQ ID NO: 226283 - DNA, 19 bp, Artificial sequence
  SiRNA target sequence
tgctaccaaaagtgttact

SEQ ID NO: 226284 - DNA, 19 bp, Artificial sequence
  SiRNA target sequence
gctaccaaaagtgttacta

SEQ ID NO: 226285 - DNA, 19 bp, Artificial sequence
  SiRNA target sequence
ctaccaaaagtgttactac

SEQ ID NO: 226286 - DNA, 19 bp, Artificial sequence
  SiRNA target sequence
taccaaaagtgttactaca

SEQ ID NO: 226287 - DNA, 19 bp, Artificial sequence
  SiRNA target sequence
accaaaagtgttactacag

SEQ ID NO: 226288 - DNA, 19 bp, Artificial sequence
  SiRNA target sequence
ccaaaagtgttactacaga

SEQ ID NO: 226289 - DNA, 19 bp, Artificial sequence
  SiRNA target sequence
caaaagtgttactacagaa

SEQ ID NO: 226290 - DNA, 19 bp, Artificial sequence
  SiRNA target sequence
aaaagtgttactacagaag

SEQ ID NO: 226291 - DNA, 19 bp, Artificial sequence
  SiRNA target sequence
aaagtgttactacagaaga

SEQ ID NO: 226292 - DNA, 19 bp, Artificial sequence
  SiRNA target sequence
aagtgttactacagaagaa

SEQ ID NO: 226293 - DNA, 19 bp, Artificial sequence
  SiRNA target sequence
agtgttactacagaagaat

SEQ ID NO: 226294 - DNA, 19 bp, Artificial sequence
  SiRNA target sequence
gtgttactacagaagaata

SEQ ID NO: 226295 - DNA, 19 bp, Artificial sequence
  SiRNA target sequence
tgttactacagaagaataa

SEQ ID NO: 226296 - DNA, 20 bp, Artificial sequence
  SiRNA target sequence
atgtcagtagacaattcgaa

SEQ ID NO: 226297 - DNA, 20 bp, Artificial sequence
  SiRNA target sequence
tgtcagtagacaattcgaaa

SEQ ID NO: 226298 - DNA, 20 bp, Artificial sequence
  SiRNA target sequence
gtcagtagacaattcgaaag

SEQ ID NO: 226299 - DNA, 20 bp, Artificial sequence
  SiRNA target sequence
tcagtagacaattcgaaagt

SEQ ID NO: 226300 - DNA, 20 bp, Artificial sequence
  SiRNA target sequence
cagtagacaattcgaaagtt

SEQ ID NO: 226301 - DNA, 20 bp, Artificial sequence
  SiRNA target sequence
agtagacaattcgaaagttc

SEQ ID NO: 226302 - DNA, 20 bp, Artificial sequence
  SiRNA target sequence
gtagacaattcgaaagttct

SEQ ID NO: 226303 - DNA, 20 bp, Artificial sequence
  SiRNA target sequence
tagacaattcgaaagttcta

SEQ ID NO: 226304 - DNA, 20 bp, Artificial sequence
  SiRNA target sequence
agacaattcgaaagttctac

SEQ ID NO: 226305 - DNA, 20 bp, Artificial sequence
  SiRNA target sequence
gacaattcgaaagttctaca

SEQ ID NO: 226306 - DNA, 20 bp, Artificial sequence
  SiRNA target sequence
acaattcgaaagttctacaa

SEQ ID NO: 226307 - DNA, 20 bp, Artificial sequence
  SiRNA target sequence
caattcgaaagttctacaaa

SEQ ID NO: 226308 - DNA, 20 bp, Artificial sequence
  SiRNA target sequence
aattcgaaagttctacaaaa

SEQ ID NO: 226309 - DNA, 20 bp, Artificial sequence
  SiRNA target sequence
attcgaaagttctacaaaat

SEQ ID NO: 226310 - DNA, 20 bp, Artificial sequence
  SiRNA target sequence
ttcgaaagttctacaaaata

SEQ ID NO: 226311 - DNA, 20 bp, Artificial sequence
  SiRNA target sequence
tcgaaagttctacaaaataa

SEQ ID NO: 226312 - DNA, 20 bp, Artificial sequence
  SiRNA target sequence
cgaaagttctacaaaataac

SEQ ID NO: 226313 - DNA, 20 bp, Artificial sequence
  SiRNA target sequence
gaaagttctacaaaataacg

SEQ ID NO: 226314 - DNA, 20 bp, Artificial sequence
  SiRNA target sequence
aaagttctacaaaataacga

SEQ ID NO: 226315 - DNA, 20 bp, Artificial sequence
  SiRNA target sequence
aagttctacaaaataacgaa

SEQ ID NO: 226316 - DNA, 20 bp, Artificial sequence
  SiRNA target sequence
agttctacaaaataacgaaa

SEQ ID NO: 226317 - DNA, 20 bp, Artificial sequence
  SiRNA target sequence
gttctacaaaataacgaaaa

SEQ ID NO: 226318 - DNA, 20 bp, Artificial sequence
  SiRNA target sequence
ttctacaaaataacgaaaac

SEQ ID NO: 226319 - DNA, 20 bp, Artificial sequence
  SiRNA target sequence
tctacaaaataacgaaaact

SEQ ID NO: 226320 - DNA, 20 bp, Artificial sequence
  SiRNA target sequence
ctacaaaataacgaaaactc

SEQ ID NO: 226321 - DNA, 20 bp, Artificial sequence
  SiRNA target sequence
tacaaaataacgaaaactct

SEQ ID NO: 226322 - DNA, 20 bp, Artificial sequence
  SiRNA target sequence
acaaaataacgaaaactctg

SEQ ID NO: 226323 - DNA, 20 bp, Artificial sequence
  SiRNA target sequence
caaaataacgaaaactctgc

SEQ ID NO: 226324 - DNA, 20 bp, Artificial sequence
  SiRNA target sequence
aaaataacgaaaactctgct

SEQ ID NO: 226325 - DNA, 20 bp, Artificial sequence
  SiRNA target sequence
aaataacgaaaactctgctc

SEQ ID NO: 226326 - DNA, 20 bp, Artificial sequence
  SiRNA target sequence
aataacgaaaactctgctct

SEQ ID NO: 226327 - DNA, 20 bp, Artificial sequence
  SiRNA target sequence
ataacgaaaactctgctctt

SEQ ID NO: 226328 - DNA, 20 bp, Artificial sequence
  SiRNA target sequence
taacgaaaactctgctcttc

SEQ ID NO: 226329 - DNA, 20 bp, Artificial sequence
  SiRNA target sequence
aacgaaaactctgctcttcc

SEQ ID NO: 226330 - DNA, 20 bp, Artificial sequence
  SiRNA target sequence
acgaaaactctgctcttcct

SEQ ID NO: 226331 - DNA, 20 bp, Artificial sequence
  SiRNA target sequence
cgaaaactctgctcttccta

SEQ ID NO: 226332 - DNA, 20 bp, Artificial sequence
  SiRNA target sequence
gaaaactctgctcttcctac

SEQ ID NO: 226333 - DNA, 20 bp, Artificial sequence
  SiRNA target sequence
aaaactctgctcttcctaca

SEQ ID NO: 226334 - DNA, 20 bp, Artificial sequence
  SiRNA target sequence
aaactctgctcttcctacag

SEQ ID NO: 226335 - DNA, 20 bp, Artificial sequence
  SiRNA target sequence
aactctgctcttcctacaga

SEQ ID NO: 226336 - DNA, 20 bp, Artificial sequence
  SiRNA target sequence
actctgctcttcctacagaa

SEQ ID NO: 226337 - DNA, 20 bp, Artificial sequence
  SiRNA target sequence
ctctgctcttcctacagaag

SEQ ID NO: 226338 - DNA, 20 bp, Artificial sequence
  SiRNA target sequence
tctgctcttcctacagaaga

SEQ ID NO: 226339 - DNA, 20 bp, Artificial sequence
  SiRNA target sequence
ctgctcttcctacagaagat

SEQ ID NO: 226340 - DNA, 20 bp, Artificial sequence
  SiRNA target sequence
tgctcttcctacagaagatg

SEQ ID NO: 226341 - DNA, 20 bp, Artificial sequence
  SiRNA target sequence
gctcttcctacagaagatga

SEQ ID NO: 226342 - DNA, 20 bp, Artificial sequence
  SiRNA target sequence
ctcttcctacagaagatgaa

SEQ ID NO: 226343 - DNA, 20 bp, Artificial sequence
  SiRNA target sequence
tcttcctacagaagatgaaa

SEQ ID NO: 226344 - DNA, 20 bp, Artificial sequence
  SiRNA target sequence
cttcctacagaagatgaaat

SEQ ID NO: 226345 - DNA, 20 bp, Artificial sequence
  SiRNA target sequence
ttcctacagaagatgaaatt

SEQ ID NO: 226346 - DNA, 20 bp, Artificial sequence
  SiRNA target sequence
tcctacagaagatgaaattg

SEQ ID NO: 226347 - DNA, 20 bp, Artificial sequence
  SiRNA target sequence
cctacagaagatgaaattga

SEQ ID NO: 226348 - DNA, 20 bp, Artificial sequence
  SiRNA target sequence
ctacagaagatgaaattgag

SEQ ID NO: 226349 - DNA, 20 bp, Artificial sequence
  SiRNA target sequence
tacagaagatgaaattgagt

SEQ ID NO: 226350 - DNA, 20 bp, Artificial sequence
  SiRNA target sequence
acagaagatgaaattgagta

SEQ ID NO: 226351 - DNA, 20 bp, Artificial sequence
  SiRNA target sequence
cagaagatgaaattgagtat

SEQ ID NO: 226352 - DNA, 20 bp, Artificial sequence
  SiRNA target sequence
agaagatgaaattgagtatg

SEQ ID NO: 226353 - DNA, 20 bp, Artificial sequence
  SiRNA target sequence
gaagatgaaattgagtatga

SEQ ID NO: 226354 - DNA, 20 bp, Artificial sequence
  SiRNA target sequence
aagatgaaattgagtatgag

SEQ ID NO: 226355 - DNA, 20 bp, Artificial sequence
  SiRNA target sequence
agatgaaattgagtatgagg

SEQ ID NO: 226356 - DNA, 20 bp, Artificial sequence
  SiRNA target sequence
gatgaaattgagtatgaggc

SEQ ID NO: 226357 - DNA, 20 bp, Artificial sequence
  SiRNA target sequence
atgaaattgagtatgaggcc

SEQ ID NO: 226358 - DNA, 20 bp, Artificial sequence
  SiRNA target sequence
tgaaattgagtatgaggcca

SEQ ID NO: 226359 - DNA, 20 bp, Artificial sequence
  SiRNA target sequence
gaaattgagtatgaggccag

SEQ ID NO: 226360 - DNA, 20 bp, Artificial sequence
  SiRNA target sequence
aaattgagtatgaggccagc

SEQ ID NO: 226361 - DNA, 20 bp, Artificial sequence
  SiRNA target sequence
aattgagtatgaggccagca

SEQ ID NO: 226362 - DNA, 20 bp, Artificial sequence
  SiRNA target sequence
attgagtatgaggccagcaa

SEQ ID NO: 226363 - DNA, 20 bp, Artificial sequence
  SiRNA target sequence
ttgagtatgaggccagcaat

SEQ ID NO: 226364 - DNA, 20 bp, Artificial sequence
  SiRNA target sequence
tgagtatgaggccagcaatg

SEQ ID NO: 226365 - DNA, 20 bp, Artificial sequence
  SiRNA target sequence
gagtatgaggccagcaatgg

SEQ ID NO: 226366 - DNA, 20 bp, Artificial sequence
  SiRNA target sequence
agtatgaggccagcaatggt

SEQ ID NO: 226367 - DNA, 20 bp, Artificial sequence
  SiRNA target sequence
gtatgaggccagcaatggtt

SEQ ID NO: 226368 - DNA, 20 bp, Artificial sequence
  SiRNA target sequence
tatgaggccagcaatggttc

SEQ ID NO: 226369 - DNA, 20 bp, Artificial sequence
  SiRNA target sequence
atgaggccagcaatggttct

SEQ ID NO: 226370 - DNA, 20 bp, Artificial sequence
  SiRNA target sequence
tgaggccagcaatggttctg

SEQ ID NO: 226371 - DNA, 20 bp, Artificial sequence
  SiRNA target sequence
gaggccagcaatggttctgg

SEQ ID NO: 226372 - DNA, 20 bp, Artificial sequence
  SiRNA target sequence
aggccagcaatggttctggt

SEQ ID NO: 226373 - DNA, 20 bp, Artificial sequence
  SiRNA target sequence
ggccagcaatggttctggta

SEQ ID NO: 226374 - DNA, 20 bp, Artificial sequence
  SiRNA target sequence
gccagcaatggttctggtat

SEQ ID NO: 226375 - DNA, 20 bp, Artificial sequence
  SiRNA target sequence
ccagcaatggttctggtata

SEQ ID NO: 226376 - DNA, 20 bp, Artificial sequence
  SiRNA target sequence
cagcaatggttctggtatat

SEQ ID NO: 226377 - DNA, 20 bp, Artificial sequence
  SiRNA target sequence
agcaatggttctggtatata

SEQ ID NO: 226378 - DNA, 20 bp, Artificial sequence
  SiRNA target sequence
gcaatggttctggtatatat

SEQ ID NO: 226379 - DNA, 20 bp, Artificial sequence
  SiRNA target sequence
caatggttctggtatatatt

SEQ ID NO: 226380 - DNA, 20 bp, Artificial sequence
  SiRNA target sequence
aatggttctggtatatattc

SEQ ID NO: 226381 - DNA, 20 bp, Artificial sequence
  SiRNA target sequence
atggttctggtatatattca

SEQ ID NO: 226382 - DNA, 20 bp, Artificial sequence
  SiRNA target sequence
tggttctggtatatattcac

SEQ ID NO: 226383 - DNA, 20 bp, Artificial sequence
  SiRNA target sequence
ggttctggtatatattcact

SEQ ID NO: 226384 - DNA, 20 bp, Artificial sequence
  SiRNA target sequence
gttctggtatatattcactt

SEQ ID NO: 226385 - DNA, 20 bp, Artificial sequence
  SiRNA target sequence
ttctggtatatattcactta

SEQ ID NO: 226386 - DNA, 20 bp, Artificial sequence
  SiRNA target sequence
tctggtatatattcacttat

SEQ ID NO: 226387 - DNA, 20 bp, Artificial sequence
  SiRNA target sequence
ctggtatatattcacttatt

SEQ ID NO: 226388 - DNA, 20 bp, Artificial sequence
  SiRNA target sequence
tggtatatattcacttatta

SEQ ID NO: 226389 - DNA, 20 bp, Artificial sequence
  SiRNA target sequence
ggtatatattcacttattag

SEQ ID NO: 226390 - DNA, 20 bp, Artificial sequence
  SiRNA target sequence
gtatatattcacttattaga

SEQ ID NO: 226391 - DNA, 20 bp, Artificial sequence
  SiRNA target sequence
tatatattcacttattagag

SEQ ID NO: 226392 - DNA, 20 bp, Artificial sequence
  SiRNA target sequence
atatattcacttattagagt

SEQ ID NO: 226393 - DNA, 20 bp, Artificial sequence
  SiRNA target sequence
tatattcacttattagagta

SEQ ID NO: 226394 - DNA, 20 bp, Artificial sequence
  SiRNA target sequence
atattcacttattagagtag

SEQ ID NO: 226395 - DNA, 20 bp, Artificial sequence
  SiRNA target sequence
tattcacttattagagtagc

SEQ ID NO: 226396 - DNA, 20 bp, Artificial sequence
  SiRNA target sequence
attcacttattagagtagca

SEQ ID NO: 226397 - DNA, 20 bp, Artificial sequence
  SiRNA target sequence
ttcacttattagagtagcaa

SEQ ID NO: 226398 - DNA, 20 bp, Artificial sequence
  SiRNA target sequence
tcacttattagagtagcaaa

SEQ ID NO: 226399 - DNA, 20 bp, Artificial sequence
  SiRNA target sequence
cacttattagagtagcaaag

SEQ ID NO: 226400 - DNA, 20 bp, Artificial sequence
  SiRNA target sequence
acttattagagtagcaaagg

SEQ ID NO: 226401 - DNA, 20 bp, Artificial sequence
  SiRNA target sequence
cttattagagtagcaaaggt

SEQ ID NO: 226402 - DNA, 20 bp, Artificial sequence
  SiRNA target sequence
ttattagagtagcaaaggtt

SEQ ID NO: 226403 - DNA, 20 bp, Artificial sequence
  SiRNA target sequence
tattagagtagcaaaggttg

SEQ ID NO: 226404 - DNA, 20 bp, Artificial sequence
  SiRNA target sequence
attagagtagcaaaggttga

SEQ ID NO: 226405 - DNA, 20 bp, Artificial sequence
  SiRNA target sequence
ttagagtagcaaaggttgag

SEQ ID NO: 226406 - DNA, 20 bp, Artificial sequence
  SiRNA target sequence
tagagtagcaaaggttgaga

SEQ ID NO: 226407 - DNA, 20 bp, Artificial sequence
  SiRNA target sequence
agagtagcaaaggttgagag

SEQ ID NO: 226408 - DNA, 20 bp, Artificial sequence
  SiRNA target sequence
gagtagcaaaggttgagaga

SEQ ID NO: 226409 - DNA, 20 bp, Artificial sequence
  SiRNA target sequence
agtagcaaaggttgagagaa

SEQ ID NO: 226410 - DNA, 20 bp, Artificial sequence
  SiRNA target sequence
gtagcaaaggttgagagaaa

SEQ ID NO: 226411 - DNA, 20 bp, Artificial sequence
  SiRNA target sequence
tagcaaaggttgagagaaag

SEQ ID NO: 226412 - DNA, 20 bp, Artificial sequence
  SiRNA target sequence
agcaaaggttgagagaaaga

SEQ ID NO: 226413 - DNA, 20 bp, Artificial sequence
  SiRNA target sequence
gcaaaggttgagagaaagat

SEQ ID NO: 226414 - DNA, 20 bp, Artificial sequence
  SiRNA target sequence
caaaggttgagagaaagatg

SEQ ID NO: 226415 - DNA, 20 bp, Artificial sequence
  SiRNA target sequence
aaaggttgagagaaagatgt

SEQ ID NO: 226416 - DNA, 20 bp, Artificial sequence
  SiRNA target sequence
aaggttgagagaaagatgtt

SEQ ID NO: 226417 - DNA, 20 bp, Artificial sequence
  SiRNA target sequence
aggttgagagaaagatgttt

SEQ ID NO: 226418 - DNA, 20 bp, Artificial sequence
  SiRNA target sequence
ggttgagagaaagatgtttt

SEQ ID NO: 226419 - DNA, 20 bp, Artificial sequence
  SiRNA target sequence
gttgagagaaagatgttttg

SEQ ID NO: 226420 - DNA, 20 bp, Artificial sequence
  SiRNA target sequence
ttgagagaaagatgttttgg

SEQ ID NO: 226421 - DNA, 20 bp, Artificial sequence
  SiRNA target sequence
tgagagaaagatgttttgga

SEQ ID NO: 226422 - DNA, 20 bp, Artificial sequence
  SiRNA target sequence
gagagaaagatgttttggat

SEQ ID NO: 226423 - DNA, 20 bp, Artificial sequence
  SiRNA target sequence
agagaaagatgttttggatc

SEQ ID NO: 226424 - DNA, 20 bp, Artificial sequence
  SiRNA target sequence
gagaaagatgttttggatca

SEQ ID NO: 226425 - DNA, 20 bp, Artificial sequence
  SiRNA target sequence
agaaagatgttttggatcat

SEQ ID NO: 226426 - DNA, 20 bp, Artificial sequence
  SiRNA target sequence
gaaagatgttttggatcatg

SEQ ID NO: 226427 - DNA, 20 bp, Artificial sequence
  SiRNA target sequence
aaagatgttttggatcatgg

SEQ ID NO: 226428 - DNA, 20 bp, Artificial sequence
  SiRNA target sequence
aagatgttttggatcatggc

SEQ ID NO: 226429 - DNA, 20 bp, Artificial sequence
  SiRNA target sequence
agatgttttggatcatggca

SEQ ID NO: 226430 - DNA, 20 bp, Artificial sequence
  SiRNA target sequence
gatgttttggatcatggcag

SEQ ID NO: 226431 - DNA, 20 bp, Artificial sequence
  SiRNA target sequence
atgttttggatcatggcagc

SEQ ID NO: 226432 - DNA, 20 bp, Artificial sequence
  SiRNA target sequence
tgttttggatcatggcagct

SEQ ID NO: 226433 - DNA, 20 bp, Artificial sequence
  SiRNA target sequence
gttttggatcatggcagcta

SEQ ID NO: 226434 - DNA, 20 bp, Artificial sequence
  SiRNA target sequence
ttttggatcatggcagctat

SEQ ID NO: 226435 - DNA, 20 bp, Artificial sequence
  SiRNA target sequence
tttggatcatggcagctatg

SEQ ID NO: 226436 - DNA, 20 bp, Artificial sequence
  SiRNA target sequence
ttggatcatggcagctatgt

SEQ ID NO: 226437 - DNA, 20 bp, Artificial sequence
  SiRNA target sequence
tggatcatggcagctatgtt

SEQ ID NO: 226438 - DNA, 20 bp, Artificial sequence
  SiRNA target sequence
ggatcatggcagctatgttc

SEQ ID NO: 226439 - DNA, 20 bp, Artificial sequence
  SiRNA target sequence
gatcatggcagctatgttct

SEQ ID NO: 226440 - DNA, 20 bp, Artificial sequence
  SiRNA target sequence
atcatggcagctatgttctt

SEQ ID NO: 226441 - DNA, 20 bp, Artificial sequence
  SiRNA target sequence
tcatggcagctatgttcttt

SEQ ID NO: 226442 - DNA, 20 bp, Artificial sequence
  SiRNA target sequence
catggcagctatgttcttta

SEQ ID NO: 226443 - DNA, 20 bp, Artificial sequence
  SiRNA target sequence
atggcagctatgttctttat

SEQ ID NO: 226444 - DNA, 20 bp, Artificial sequence
  SiRNA target sequence
tggcagctatgttctttatt

SEQ ID NO: 226445 - DNA, 20 bp, Artificial sequence
  SiRNA target sequence
ggcagctatgttctttatta

SEQ ID NO: 226446 - DNA, 20 bp, Artificial sequence
  SiRNA target sequence
gcagctatgttctttattat

SEQ ID NO: 226447 - DNA, 20 bp, Artificial sequence
  SiRNA target sequence
cagctatgttctttattatc

SEQ ID NO: 226448 - DNA, 20 bp, Artificial sequence
  SiRNA target sequence
agctatgttctttattatct

SEQ ID NO: 226449 - DNA, 20 bp, Artificial sequence
  SiRNA target sequence
gctatgttctttattatctc

SEQ ID NO: 226450 - DNA, 20 bp, Artificial sequence
  SiRNA target sequence
ctatgttctttattatctcc

SEQ ID NO: 226451 - DNA, 20 bp, Artificial sequence
  SiRNA target sequence
tatgttctttattatctcct

SEQ ID NO: 226452 - DNA, 20 bp, Artificial sequence
  SiRNA target sequence
atgttctttattatctcctt

SEQ ID NO: 226453 - DNA, 20 bp, Artificial sequence
  SiRNA target sequence
tgttctttattatctccttt

SEQ ID NO: 226454 - DNA, 20 bp, Artificial sequence
  SiRNA target sequence
gttctttattatctccttta

SEQ ID NO: 226455 - DNA, 20 bp, Artificial sequence
  SiRNA target sequence
ttctttattatctcctttat

SEQ ID NO: 226456 - DNA, 20 bp, Artificial sequence
  SiRNA target sequence
tctttattatctcctttatt

SEQ ID NO: 226457 - DNA, 20 bp, Artificial sequence
  SiRNA target sequence
ctttattatctcctttattt

SEQ ID NO: 226458 - DNA, 20 bp, Artificial sequence
  SiRNA target sequence
tttattatctcctttattta

SEQ ID NO: 226459 - DNA, 20 bp, Artificial sequence
  SiRNA target sequence
ttattatctcctttatttat

SEQ ID NO: 226460 - DNA, 20 bp, Artificial sequence
  SiRNA target sequence
tattatctcctttatttatt

SEQ ID NO: 226461 - DNA, 20 bp, Artificial sequence
  SiRNA target sequence
attatctcctttatttattc

SEQ ID NO: 226462 - DNA, 20 bp, Artificial sequence
  SiRNA target sequence
ttatctcctttatttattcg

SEQ ID NO: 226463 - DNA, 20 bp, Artificial sequence
  SiRNA target sequence
tatctcctttatttattcgg

SEQ ID NO: 226464 - DNA, 20 bp, Artificial sequence
  SiRNA target sequence
atctcctttatttattcggt

SEQ ID NO: 226465 - DNA, 20 bp, Artificial sequence
  SiRNA target sequence
tctcctttatttattcggtg

SEQ ID NO: 226466 - DNA, 20 bp, Artificial sequence
  SiRNA target sequence
ctcctttatttattcggtgg

SEQ ID NO: 226467 - DNA, 20 bp, Artificial sequence
  SiRNA target sequence
tcctttatttattcggtggc

SEQ ID NO: 226468 - DNA, 20 bp, Artificial sequence
  SiRNA target sequence
cctttatttattcggtggct

SEQ ID NO: 226469 - DNA, 20 bp, Artificial sequence
  SiRNA target sequence
ctttatttattcggtggcta

SEQ ID NO: 226470 - DNA, 20 bp, Artificial sequence
  SiRNA target sequence
tttatttattcggtggctag

SEQ ID NO: 226471 - DNA, 20 bp, Artificial sequence
  SiRNA target sequence
ttatttattcggtggctaga

SEQ ID NO: 226472 - DNA, 20 bp, Artificial sequence
  SiRNA target sequence
tatttattcggtggctagag

SEQ ID NO: 226473 - DNA, 20 bp, Artificial sequence
  SiRNA target sequence
atttattcggtggctagagt

SEQ ID NO: 226474 - DNA, 20 bp, Artificial sequence
  SiRNA target sequence
tttattcggtggctagagtg

SEQ ID NO: 226475 - DNA, 20 bp, Artificial sequence
  SiRNA target sequence
ttattcggtggctagagtgc

SEQ ID NO: 226476 - DNA, 20 bp, Artificial sequence
  SiRNA target sequence
tattcggtggctagagtgct

SEQ ID NO: 226477 - DNA, 20 bp, Artificial sequence
  SiRNA target sequence
attcggtggctagagtgctt

SEQ ID NO: 226478 - DNA, 20 bp, Artificial sequence
  SiRNA target sequence
ttcggtggctagagtgctta

SEQ ID NO: 226479 - DNA, 20 bp, Artificial sequence
  SiRNA target sequence
tcggtggctagagtgcttaa

SEQ ID NO: 226480 - DNA, 20 bp, Artificial sequence
  SiRNA target sequence
cggtggctagagtgcttaaa

SEQ ID NO: 226481 - DNA, 20 bp, Artificial sequence
  SiRNA target sequence
ggtggctagagtgcttaaag

SEQ ID NO: 226482 - DNA, 20 bp, Artificial sequence
  SiRNA target sequence
gtggctagagtgcttaaaga

SEQ ID NO: 226483 - DNA, 20 bp, Artificial sequence
  SiRNA target sequence
tggctagagtgcttaaagat

SEQ ID NO: 226484 - DNA, 20 bp, Artificial sequence
  SiRNA target sequence
ggctagagtgcttaaagatg

SEQ ID NO: 226485 - DNA, 20 bp, Artificial sequence
  SiRNA target sequence
gctagagtgcttaaagatgc

SEQ ID NO: 226486 - DNA, 20 bp, Artificial sequence
  SiRNA target sequence
ctagagtgcttaaagatgcc

SEQ ID NO: 226487 - DNA, 20 bp, Artificial sequence
  SiRNA target sequence
tagagtgcttaaagatgccg

SEQ ID NO: 226488 - DNA, 20 bp, Artificial sequence
  SiRNA target sequence
agagtgcttaaagatgccgc

SEQ ID NO: 226489 - DNA, 20 bp, Artificial sequence
  SiRNA target sequence
gagtgcttaaagatgccgct

SEQ ID NO: 226490 - DNA, 20 bp, Artificial sequence
  SiRNA target sequence
agtgcttaaagatgccgctg

SEQ ID NO: 226491 - DNA, 20 bp, Artificial sequence
  SiRNA target sequence
gtgcttaaagatgccgctgt

SEQ ID NO: 226492 - DNA, 20 bp, Artificial sequence
  SiRNA target sequence
tgcttaaagatgccgctgtt

SEQ ID NO: 226493 - DNA, 20 bp, Artificial sequence
  SiRNA target sequence
gcttaaagatgccgctgtta

SEQ ID NO: 226494 - DNA, 20 bp, Artificial sequence
  SiRNA target sequence
cttaaagatgccgctgttat

SEQ ID NO: 226495 - DNA, 20 bp, Artificial sequence
  SiRNA target sequence
ttaaagatgccgctgttatt

SEQ ID NO: 226496 - DNA, 20 bp, Artificial sequence
  SiRNA target sequence
taaagatgccgctgttattg

SEQ ID NO: 226497 - DNA, 20 bp, Artificial sequence
  SiRNA target sequence
aaagatgccgctgttattgg

SEQ ID NO: 226498 - DNA, 20 bp, Artificial sequence
  SiRNA target sequence
aagatgccgctgttattggt

SEQ ID NO: 226499 - DNA, 20 bp, Artificial sequence
  SiRNA target sequence
agatgccgctgttattggta

SEQ ID NO: 226500 - DNA, 20 bp, Artificial sequence
  SiRNA target sequence
gatgccgctgttattggtaa

SEQ ID NO: 226501 - DNA, 20 bp, Artificial sequence
  SiRNA target sequence
atgccgctgttattggtaaa

SEQ ID NO: 226502 - DNA, 20 bp, Artificial sequence
  SiRNA target sequence
tgccgctgttattggtaaac

SEQ ID NO: 226503 - DNA, 20 bp, Artificial sequence
  SiRNA target sequence
gccgctgttattggtaaaca

SEQ ID NO: 226504 - DNA, 20 bp, Artificial sequence
  SiRNA target sequence
ccgctgttattggtaaacaa

SEQ ID NO: 226505 - DNA, 20 bp, Artificial sequence
  SiRNA target sequence
cgctgttattggtaaacaac

SEQ ID NO: 226506 - DNA, 20 bp, Artificial sequence
  SiRNA target sequence
gctgttattggtaaacaact

SEQ ID NO: 226507 - DNA, 20 bp, Artificial sequence
  SiRNA target sequence
ctgttattggtaaacaactc

SEQ ID NO: 226508 - DNA, 20 bp, Artificial sequence
  SiRNA target sequence
tgttattggtaaacaactcc

SEQ ID NO: 226509 - DNA, 20 bp, Artificial sequence
  SiRNA target sequence
gttattggtaaacaactccc

SEQ ID NO: 226510 - DNA, 20 bp, Artificial sequence
  SiRNA target sequence
ttattggtaaacaactccca

SEQ ID NO: 226511 - DNA, 20 bp, Artificial sequence
  SiRNA target sequence
tattggtaaacaactcccag

SEQ ID NO: 226512 - DNA, 20 bp, Artificial sequence
  SiRNA target sequence
attggtaaacaactcccagc

SEQ ID NO: 226513 - DNA, 20 bp, Artificial sequence
  SiRNA target sequence
ttggtaaacaactcccagcg

SEQ ID NO: 226514 - DNA, 20 bp, Artificial sequence
  SiRNA target sequence
tggtaaacaactcccagcgt

SEQ ID NO: 226515 - DNA, 20 bp, Artificial sequence
  SiRNA target sequence
ggtaaacaactcccagcgtc

SEQ ID NO: 226516 - DNA, 20 bp, Artificial sequence
  SiRNA target sequence
gtaaacaactcccagcgtca

SEQ ID NO: 226517 - DNA, 20 bp, Artificial sequence
  SiRNA target sequence
taaacaactcccagcgtcaa

SEQ ID NO: 226518 - DNA, 20 bp, Artificial sequence
  SiRNA target sequence
aaacaactcccagcgtcaat

SEQ ID NO: 226519 - DNA, 20 bp, Artificial sequence
  SiRNA target sequence
aacaactcccagcgtcaatt

SEQ ID NO: 226520 - DNA, 20 bp, Artificial sequence
  SiRNA target sequence
acaactcccagcgtcaattt

SEQ ID NO: 226521 - DNA, 20 bp, Artificial sequence
  SiRNA target sequence
caactcccagcgtcaatttt

SEQ ID NO: 226522 - DNA, 20 bp, Artificial sequence
  SiRNA target sequence
aactcccagcgtcaattttc

SEQ ID NO: 226523 - DNA, 20 bp, Artificial sequence
  SiRNA target sequence
actcccagcgtcaattttct

SEQ ID NO: 226524 - DNA, 20 bp, Artificial sequence
  SiRNA target sequence
ctcccagcgtcaattttctt

SEQ ID NO: 226525 - DNA, 20 bp, Artificial sequence
  SiRNA target sequence
tcccagcgtcaattttcttt

SEQ ID NO: 226526 - DNA, 20 bp, Artificial sequence
  SiRNA target sequence
cccagcgtcaattttctttt

SEQ ID NO: 226527 - DNA, 20 bp, Artificial sequence
  SiRNA target sequence
ccagcgtcaattttcttttt

SEQ ID NO: 226528 - DNA, 20 bp, Artificial sequence
  SiRNA target sequence
cagcgtcaattttctttttg

SEQ ID NO: 226529 - DNA, 20 bp, Artificial sequence
  SiRNA target sequence
agcgtcaattttctttttga

SEQ ID NO: 226530 - DNA, 20 bp, Artificial sequence
  SiRNA target sequence
gcgtcaattttctttttgaa

SEQ ID NO: 226531 - DNA, 20 bp, Artificial sequence
  SiRNA target sequence
cgtcaattttctttttgaaa

SEQ ID NO: 226532 - DNA, 20 bp, Artificial sequence
  SiRNA target sequence
gtcaattttctttttgaaat

SEQ ID NO: 226533 - DNA, 20 bp, Artificial sequence
  SiRNA target sequence
tcaattttctttttgaaatt

SEQ ID NO: 226534 - DNA, 20 bp, Artificial sequence
  SiRNA target sequence
caattttctttttgaaattt

SEQ ID NO: 226535 - DNA, 20 bp, Artificial sequence
  SiRNA target sequence
aattttctttttgaaatttg

SEQ ID NO: 226536 - DNA, 20 bp, Artificial sequence
  SiRNA target sequence
attttctttttgaaatttgt

SEQ ID NO: 226537 - DNA, 20 bp, Artificial sequence
  SiRNA target sequence
ttttctttttgaaatttgtt

SEQ ID NO: 226538 - DNA, 20 bp, Artificial sequence
  SiRNA target sequence
tttctttttgaaatttgtta

SEQ ID NO: 226539 - DNA, 20 bp, Artificial sequence
  SiRNA target sequence
ttctttttgaaatttgttat

SEQ ID NO: 226540 - DNA, 20 bp, Artificial sequence
  SiRNA target sequence
tctttttgaaatttgttatt

SEQ ID NO: 226541 - DNA, 20 bp, Artificial sequence
  SiRNA target sequence
ctttttgaaatttgttatta

SEQ ID NO: 226542 - DNA, 20 bp, Artificial sequence
  SiRNA target sequence
tttttgaaatttgttattat

SEQ ID NO: 226543 - DNA, 20 bp, Artificial sequence
  SiRNA target sequence
ttttgaaatttgttattatc

SEQ ID NO: 226544 - DNA, 20 bp, Artificial sequence
  SiRNA target sequence
tttgaaatttgttattatcc

SEQ ID NO: 226545 - DNA, 20 bp, Artificial sequence
  SiRNA target sequence
ttgaaatttgttattatcct

SEQ ID NO: 226546 - DNA, 20 bp, Artificial sequence
  SiRNA target sequence
tgaaatttgttattatcctt

SEQ ID NO: 226547 - DNA, 20 bp, Artificial sequence
  SiRNA target sequence
gaaatttgttattatccttc

SEQ ID NO: 226548 - DNA, 20 bp, Artificial sequence
  SiRNA target sequence
aaatttgttattatccttcc

SEQ ID NO: 226549 - DNA, 20 bp, Artificial sequence
  SiRNA target sequence
aatttgttattatccttccg

SEQ ID NO: 226550 - DNA, 20 bp, Artificial sequence
  SiRNA target sequence
atttgttattatccttccgt

SEQ ID NO: 226551 - DNA, 20 bp, Artificial sequence
  SiRNA target sequence
tttgttattatccttccgtt

SEQ ID NO: 226552 - DNA, 20 bp, Artificial sequence
  SiRNA target sequence
ttgttattatccttccgttc

SEQ ID NO: 226553 - DNA, 20 bp, Artificial sequence
  SiRNA target sequence
tgttattatccttccgttct

SEQ ID NO: 226554 - DNA, 20 bp, Artificial sequence
  SiRNA target sequence
gttattatccttccgttctc

SEQ ID NO: 226555 - DNA, 20 bp, Artificial sequence
  SiRNA target sequence
ttattatccttccgttctca

SEQ ID NO: 226556 - DNA, 20 bp, Artificial sequence
  SiRNA target sequence
tattatccttccgttctcat

SEQ ID NO: 226557 - DNA, 20 bp, Artificial sequence
  SiRNA target sequence
attatccttccgttctcatt

SEQ ID NO: 226558 - DNA, 20 bp, Artificial sequence
  SiRNA target sequence
ttatccttccgttctcattt

SEQ ID NO: 226559 - DNA, 20 bp, Artificial sequence
  SiRNA target sequence
tatccttccgttctcattta

SEQ ID NO: 226560 - DNA, 20 bp, Artificial sequence
  SiRNA target sequence
atccttccgttctcatttat

SEQ ID NO: 226561 - DNA, 20 bp, Artificial sequence
  SiRNA target sequence
tccttccgttctcatttatt

SEQ ID NO: 226562 - DNA, 20 bp, Artificial sequence
  SiRNA target sequence
ccttccgttctcatttattt

SEQ ID NO: 226563 - DNA, 20 bp, Artificial sequence
  SiRNA target sequence
cttccgttctcatttatttc

SEQ ID NO: 226564 - DNA, 20 bp, Artificial sequence
  SiRNA target sequence
ttccgttctcatttatttca

SEQ ID NO: 226565 - DNA, 20 bp, Artificial sequence
  SiRNA target sequence
tccgttctcatttatttcag

SEQ ID NO: 226566 - DNA, 20 bp, Artificial sequence
  SiRNA target sequence
ccgttctcatttatttcagt

SEQ ID NO: 226567 - DNA, 20 bp, Artificial sequence
  SiRNA target sequence
cgttctcatttatttcagta

SEQ ID NO: 226568 - DNA, 20 bp, Artificial sequence
  SiRNA target sequence
gttctcatttatttcagtag

SEQ ID NO: 226569 - DNA, 20 bp, Artificial sequence
  SiRNA target sequence
ttctcatttatttcagtagg

SEQ ID NO: 226570 - DNA, 20 bp, Artificial sequence
  SiRNA target sequence
tctcatttatttcagtaggt

SEQ ID NO: 226571 - DNA, 20 bp, Artificial sequence
  SiRNA target sequence
ctcatttatttcagtaggta

SEQ ID NO: 226572 - DNA, 20 bp, Artificial sequence
  SiRNA target sequence
tcatttatttcagtaggtat

SEQ ID NO: 226573 - DNA, 20 bp, Artificial sequence
  SiRNA target sequence
catttatttcagtaggtatt

SEQ ID NO: 226574 - DNA, 20 bp, Artificial sequence
  SiRNA target sequence
atttatttcagtaggtatta

SEQ ID NO: 226575 - DNA, 20 bp, Artificial sequence
  SiRNA target sequence
tttatttcagtaggtattat

SEQ ID NO: 226576 - DNA, 20 bp, Artificial sequence
  SiRNA target sequence
ttatttcagtaggtattatt

SEQ ID NO: 226577 - DNA, 20 bp, Artificial sequence
  SiRNA target sequence
tatttcagtaggtattattc

SEQ ID NO: 226578 - DNA, 20 bp, Artificial sequence
  SiRNA target sequence
atttcagtaggtattattca

SEQ ID NO: 226579 - DNA, 20 bp, Artificial sequence
  SiRNA target sequence
tttcagtaggtattattcag

SEQ ID NO: 226580 - DNA, 20 bp, Artificial sequence
  SiRNA target sequence
ttcagtaggtattattcaga

SEQ ID NO: 226581 - DNA, 20 bp, Artificial sequence
  SiRNA target sequence
tcagtaggtattattcagaa

SEQ ID NO: 226582 - DNA, 20 bp, Artificial sequence
  SiRNA target sequence
cagtaggtattattcagaaa

SEQ ID NO: 226583 - DNA, 20 bp, Artificial sequence
  SiRNA target sequence
agtaggtattattcagaaag

SEQ ID NO: 226584 - DNA, 20 bp, Artificial sequence
  SiRNA target sequence
gtaggtattattcagaaagc

SEQ ID NO: 226585 - DNA, 20 bp, Artificial sequence
  SiRNA target sequence
taggtattattcagaaagct

SEQ ID NO: 226586 - DNA, 20 bp, Artificial sequence
  SiRNA target sequence
aggtattattcagaaagctt

SEQ ID NO: 226587 - DNA, 20 bp, Artificial sequence
  SiRNA target sequence
ggtattattcagaaagcttt

SEQ ID NO: 226588 - DNA, 20 bp, Artificial sequence
  SiRNA target sequence
gtattattcagaaagcttta

SEQ ID NO: 226589 - DNA, 20 bp, Artificial sequence
  SiRNA target sequence
tattattcagaaagctttag

SEQ ID NO: 226590 - DNA, 20 bp, Artificial sequence
  SiRNA target sequence
attattcagaaagctttaga

SEQ ID NO: 226591 - DNA, 20 bp, Artificial sequence
  SiRNA target sequence
ttattcagaaagctttagat

SEQ ID NO: 226592 - DNA, 20 bp, Artificial sequence
  SiRNA target sequence
tattcagaaagctttagata

SEQ ID NO: 226593 - DNA, 20 bp, Artificial sequence
  SiRNA target sequence
attcagaaagctttagataa

SEQ ID NO: 226594 - DNA, 20 bp, Artificial sequence
  SiRNA target sequence
ttcagaaagctttagataaa

SEQ ID NO: 226595 - DNA, 20 bp, Artificial sequence
  SiRNA target sequence
tcagaaagctttagataaat

SEQ ID NO: 226596 - DNA, 20 bp, Artificial sequence
  SiRNA target sequence
cagaaagctttagataaata

SEQ ID NO: 226597 - DNA, 20 bp, Artificial sequence
  SiRNA target sequence
agaaagctttagataaatat

SEQ ID NO: 226598 - DNA, 20 bp, Artificial sequence
  SiRNA target sequence
gaaagctttagataaatatc

SEQ ID NO: 226599 - DNA, 20 bp, Artificial sequence
  SiRNA target sequence
aaagctttagataaatatcc

SEQ ID NO: 226600 - DNA, 20 bp, Artificial sequence
  SiRNA target sequence
aagctttagataaatatcct

SEQ ID NO: 226601 - DNA, 20 bp, Artificial sequence
  SiRNA target sequence
agctttagataaatatcctt

SEQ ID NO: 226602 - DNA, 20 bp, Artificial sequence
  SiRNA target sequence
gctttagataaatatccttt

SEQ ID NO: 226603 - DNA, 20 bp, Artificial sequence
  SiRNA target sequence
ctttagataaatatcctttt

SEQ ID NO: 226604 - DNA, 20 bp, Artificial sequence
  SiRNA target sequence
tttagataaatatcctttta

SEQ ID NO: 226605 - DNA, 20 bp, Artificial sequence
  SiRNA target sequence
ttagataaatatccttttac

SEQ ID NO: 226606 - DNA, 20 bp, Artificial sequence
  SiRNA target sequence
tagataaatatccttttaca

SEQ ID NO: 226607 - DNA, 20 bp, Artificial sequence
  SiRNA target sequence
agataaatatccttttacaa

SEQ ID NO: 226608 - DNA, 20 bp, Artificial sequence
  SiRNA target sequence
gataaatatccttttacaaa

SEQ ID NO: 226609 - DNA, 20 bp, Artificial sequence
  SiRNA target sequence
ataaatatccttttacaaaa

SEQ ID NO: 226610 - DNA, 20 bp, Artificial sequence
  SiRNA target sequence
taaatatccttttacaaaaa

SEQ ID NO: 226611 - DNA, 20 bp, Artificial sequence
  SiRNA target sequence
aaatatccttttacaaaaat

SEQ ID NO: 226612 - DNA, 20 bp, Artificial sequence
  SiRNA target sequence
aatatccttttacaaaaata

SEQ ID NO: 226613 - DNA, 20 bp, Artificial sequence
  SiRNA target sequence
atatccttttacaaaaatat

SEQ ID NO: 226614 - DNA, 20 bp, Artificial sequence
  SiRNA target sequence
tatccttttacaaaaatatt

SEQ ID NO: 226615 - DNA, 20 bp, Artificial sequence
  SiRNA target sequence
atccttttacaaaaatattt

SEQ ID NO: 226616 - DNA, 20 bp, Artificial sequence
  SiRNA target sequence
tccttttacaaaaatatttg

SEQ ID NO: 226617 - DNA, 20 bp, Artificial sequence
  SiRNA target sequence
ccttttacaaaaatatttga

SEQ ID NO: 226618 - DNA, 20 bp, Artificial sequence
  SiRNA target sequence
cttttacaaaaatatttgat

SEQ ID NO: 226619 - DNA, 20 bp, Artificial sequence
  SiRNA target sequence
ttttacaaaaatatttgatg

SEQ ID NO: 226620 - DNA, 20 bp, Artificial sequence
  SiRNA target sequence
tttacaaaaatatttgatgt

SEQ ID NO: 226621 - DNA, 20 bp, Artificial sequence
  SiRNA target sequence
ttacaaaaatatttgatgta

SEQ ID NO: 226622 - DNA, 20 bp, Artificial sequence
  SiRNA target sequence
tacaaaaatatttgatgtaa

SEQ ID NO: 226623 - DNA, 20 bp, Artificial sequence
  SiRNA target sequence
acaaaaatatttgatgtaac

SEQ ID NO: 226624 - DNA, 20 bp, Artificial sequence
  SiRNA target sequence
caaaaatatttgatgtaact

SEQ ID NO: 226625 - DNA, 20 bp, Artificial sequence
  SiRNA target sequence
aaaaatatttgatgtaactt

SEQ ID NO: 226626 - DNA, 20 bp, Artificial sequence
  SiRNA target sequence
aaaatatttgatgtaacttt

SEQ ID NO: 226627 - DNA, 20 bp, Artificial sequence
  SiRNA target sequence
aaatatttgatgtaacttta

SEQ ID NO: 226628 - DNA, 20 bp, Artificial sequence
  SiRNA target sequence
aatatttgatgtaactttaa

SEQ ID NO: 226629 - DNA, 20 bp, Artificial sequence
  SiRNA target sequence
atatttgatgtaactttaat

SEQ ID NO: 226630 - DNA, 20 bp, Artificial sequence
  SiRNA target sequence
tatttgatgtaactttaata

SEQ ID NO: 226631 - DNA, 20 bp, Artificial sequence
  SiRNA target sequence
atttgatgtaactttaatag

SEQ ID NO: 226632 - DNA, 20 bp, Artificial sequence
  SiRNA target sequence
tttgatgtaactttaatagt

SEQ ID NO: 226633 - DNA, 20 bp, Artificial sequence
  SiRNA target sequence
ttgatgtaactttaatagtt

SEQ ID NO: 226634 - DNA, 20 bp, Artificial sequence
  SiRNA target sequence
tgatgtaactttaatagttt

SEQ ID NO: 226635 - DNA, 20 bp, Artificial sequence
  SiRNA target sequence
gatgtaactttaatagtttt

SEQ ID NO: 226636 - DNA, 20 bp, Artificial sequence
  SiRNA target sequence
atgtaactttaatagttttc

SEQ ID NO: 226637 - DNA, 20 bp, Artificial sequence
  SiRNA target sequence
tgtaactttaatagttttcg

SEQ ID NO: 226638 - DNA, 20 bp, Artificial sequence
  SiRNA target sequence
gtaactttaatagttttcgc

SEQ ID NO: 226639 - DNA, 20 bp, Artificial sequence
  SiRNA target sequence
taactttaatagttttcgct

SEQ ID NO: 226640 - DNA, 20 bp, Artificial sequence
  SiRNA target sequence
aactttaatagttttcgctg

SEQ ID NO: 226641 - DNA, 20 bp, Artificial sequence
  SiRNA target sequence
actttaatagttttcgctgt

SEQ ID NO: 226642 - DNA, 20 bp, Artificial sequence
  SiRNA target sequence
ctttaatagttttcgctgtt

SEQ ID NO: 226643 - DNA, 20 bp, Artificial sequence
  SiRNA target sequence
tttaatagttttcgctgttg

SEQ ID NO: 226644 - DNA, 20 bp, Artificial sequence
  SiRNA target sequence
ttaatagttttcgctgttgc

SEQ ID NO: 226645 - DNA, 20 bp, Artificial sequence
  SiRNA target sequence
taatagttttcgctgttgca

SEQ ID NO: 226646 - DNA, 20 bp, Artificial sequence
  SiRNA target sequence
aatagttttcgctgttgcat

SEQ ID NO: 226647 - DNA, 20 bp, Artificial sequence
  SiRNA target sequence
atagttttcgctgttgcatt

SEQ ID NO: 226648 - DNA, 20 bp, Artificial sequence
  SiRNA target sequence
tagttttcgctgttgcattt

SEQ ID NO: 226649 - DNA, 20 bp, Artificial sequence
  SiRNA target sequence
agttttcgctgttgcattta

SEQ ID NO: 226650 - DNA, 20 bp, Artificial sequence
  SiRNA target sequence
gttttcgctgttgcatttac

SEQ ID NO: 226651 - DNA, 20 bp, Artificial sequence
  SiRNA target sequence
ttttcgctgttgcatttact

SEQ ID NO: 226652 - DNA, 20 bp, Artificial sequence
  SiRNA target sequence
tttcgctgttgcatttacta

SEQ ID NO: 226653 - DNA, 20 bp, Artificial sequence
  SiRNA target sequence
ttcgctgttgcatttactat

SEQ ID NO: 226654 - DNA, 20 bp, Artificial sequence
  SiRNA target sequence
tcgctgttgcatttactata

SEQ ID NO: 226655 - DNA, 20 bp, Artificial sequence
  SiRNA target sequence
cgctgttgcatttactatac

SEQ ID NO: 226656 - DNA, 20 bp, Artificial sequence
  SiRNA target sequence
gctgttgcatttactatact

SEQ ID NO: 226657 - DNA, 20 bp, Artificial sequence
  SiRNA target sequence
ctgttgcatttactatactt

SEQ ID NO: 226658 - DNA, 20 bp, Artificial sequence
  SiRNA target sequence
tgttgcatttactatacttg

SEQ ID NO: 226659 - DNA, 20 bp, Artificial sequence
  SiRNA target sequence
gttgcatttactatacttgg

SEQ ID NO: 226660 - DNA, 20 bp, Artificial sequence
  SiRNA target sequence
ttgcatttactatacttggt

SEQ ID NO: 226661 - DNA, 20 bp, Artificial sequence
  SiRNA target sequence
tgcatttactatacttggta

SEQ ID NO: 226662 - DNA, 20 bp, Artificial sequence
  SiRNA target sequence
gcatttactatacttggtag

SEQ ID NO: 226663 - DNA, 20 bp, Artificial sequence
  SiRNA target sequence
catttactatacttggtagt

SEQ ID NO: 226664 - DNA, 20 bp, Artificial sequence
  SiRNA target sequence
atttactatacttggtagtt

SEQ ID NO: 226665 - DNA, 20 bp, Artificial sequence
  SiRNA target sequence
tttactatacttggtagttt

SEQ ID NO: 226666 - DNA, 20 bp, Artificial sequence
  SiRNA target sequence
ttactatacttggtagttta

SEQ ID NO: 226667 - DNA, 20 bp, Artificial sequence
  SiRNA target sequence
tactatacttggtagtttat

SEQ ID NO: 226668 - DNA, 20 bp, Artificial sequence
  SiRNA target sequence
actatacttggtagtttatt

SEQ ID NO: 226669 - DNA, 20 bp, Artificial sequence
  SiRNA target sequence
ctatacttggtagtttatta

SEQ ID NO: 226670 - DNA, 20 bp, Artificial sequence
  SiRNA target sequence
tatacttggtagtttattac

SEQ ID NO: 226671 - DNA, 20 bp, Artificial sequence
  SiRNA target sequence
atacttggtagtttattact

SEQ ID NO: 226672 - DNA, 20 bp, Artificial sequence
  SiRNA target sequence
tacttggtagtttattactt

SEQ ID NO: 226673 - DNA, 20 bp, Artificial sequence
  SiRNA target sequence
acttggtagtttattacttc

SEQ ID NO: 226674 - DNA, 20 bp, Artificial sequence
  SiRNA target sequence
cttggtagtttattacttcc

SEQ ID NO: 226675 - DNA, 20 bp, Artificial sequence
  SiRNA target sequence
ttggtagtttattacttccc

SEQ ID NO: 226676 - DNA, 20 bp, Artificial sequence
  SiRNA target sequence
tggtagtttattacttccct

SEQ ID NO: 226677 - DNA, 20 bp, Artificial sequence
  SiRNA target sequence
ggtagtttattacttccctt

SEQ ID NO: 226678 - DNA, 20 bp, Artificial sequence
  SiRNA target sequence
gtagtttattacttcccttt

SEQ ID NO: 226679 - DNA, 20 bp, Artificial sequence
  SiRNA target sequence
tagtttattacttcccttta

SEQ ID NO: 226680 - DNA, 20 bp, Artificial sequence
  SiRNA target sequence
agtttattacttccctttag

SEQ ID NO: 226681 - DNA, 20 bp, Artificial sequence
  SiRNA target sequence
gtttattacttccctttagt

SEQ ID NO: 226682 - DNA, 20 bp, Artificial sequence
  SiRNA target sequence
tttattacttccctttagtg

SEQ ID NO: 226683 - DNA, 20 bp, Artificial sequence
  SiRNA target sequence
ttattacttccctttagtga

SEQ ID NO: 226684 - DNA, 20 bp, Artificial sequence
  SiRNA target sequence
tattacttccctttagtgat

SEQ ID NO: 226685 - DNA, 20 bp, Artificial sequence
  SiRNA target sequence
attacttccctttagtgatt

SEQ ID NO: 226686 - DNA, 20 bp, Artificial sequence
  SiRNA target sequence
ttacttccctttagtgatta

SEQ ID NO: 226687 - DNA, 20 bp, Artificial sequence
  SiRNA target sequence
tacttccctttagtgattat

SEQ ID NO: 226688 - DNA, 20 bp, Artificial sequence
  SiRNA target sequence
acttccctttagtgattata

SEQ ID NO: 226689 - DNA, 20 bp, Artificial sequence
  SiRNA target sequence
cttccctttagtgattatat

SEQ ID NO: 226690 - DNA, 20 bp, Artificial sequence
  SiRNA target sequence
ttccctttagtgattatatt

SEQ ID NO: 226691 - DNA, 20 bp, Artificial sequence
  SiRNA target sequence
tccctttagtgattatattc

SEQ ID NO: 226692 - DNA, 20 bp, Artificial sequence
  SiRNA target sequence
ccctttagtgattatattca

SEQ ID NO: 226693 - DNA, 20 bp, Artificial sequence
  SiRNA target sequence
cctttagtgattatattcag

SEQ ID NO: 226694 - DNA, 20 bp, Artificial sequence
  SiRNA target sequence
ctttagtgattatattcaga

SEQ ID NO: 226695 - DNA, 20 bp, Artificial sequence
  SiRNA target sequence
tttagtgattatattcagat

SEQ ID NO: 226696 - DNA, 20 bp, Artificial sequence
  SiRNA target sequence
ttagtgattatattcagatt

SEQ ID NO: 226697 - DNA, 20 bp, Artificial sequence
  SiRNA target sequence
tagtgattatattcagattc

SEQ ID NO: 226698 - DNA, 20 bp, Artificial sequence
  SiRNA target sequence
agtgattatattcagattca

SEQ ID NO: 226699 - DNA, 20 bp, Artificial sequence
  SiRNA target sequence
gtgattatattcagattcaa

SEQ ID NO: 226700 - DNA, 20 bp, Artificial sequence
  SiRNA target sequence
tgattatattcagattcaac

SEQ ID NO: 226701 - DNA, 20 bp, Artificial sequence
  SiRNA target sequence
gattatattcagattcaacc

SEQ ID NO: 226702 - DNA, 20 bp, Artificial sequence
  SiRNA target sequence
attatattcagattcaaccg

SEQ ID NO: 226703 - DNA, 20 bp, Artificial sequence
  SiRNA target sequence
ttatattcagattcaaccgt

SEQ ID NO: 226704 - DNA, 20 bp, Artificial sequence
  SiRNA target sequence
tatattcagattcaaccgtt

SEQ ID NO: 226705 - DNA, 20 bp, Artificial sequence
  SiRNA target sequence
atattcagattcaaccgttt

SEQ ID NO: 226706 - DNA, 20 bp, Artificial sequence
  SiRNA target sequence
tattcagattcaaccgtttt

SEQ ID NO: 226707 - DNA, 20 bp, Artificial sequence
  SiRNA target sequence
attcagattcaaccgttttg

SEQ ID NO: 226708 - DNA, 20 bp, Artificial sequence
  SiRNA target sequence
ttcagattcaaccgttttgg

SEQ ID NO: 226709 - DNA, 20 bp, Artificial sequence
  SiRNA target sequence
tcagattcaaccgttttggg

SEQ ID NO: 226710 - DNA, 20 bp, Artificial sequence
  SiRNA target sequence
cagattcaaccgttttgggc

SEQ ID NO: 226711 - DNA, 20 bp, Artificial sequence
  SiRNA target sequence
agattcaaccgttttgggcc

SEQ ID NO: 226712 - DNA, 20 bp, Artificial sequence
  SiRNA target sequence
gattcaaccgttttgggcca

SEQ ID NO: 226713 - DNA, 20 bp, Artificial sequence
  SiRNA target sequence
attcaaccgttttgggccaa

SEQ ID NO: 226714 - DNA, 20 bp, Artificial sequence
  SiRNA target sequence
ttcaaccgttttgggccaaa

SEQ ID NO: 226715 - DNA, 20 bp, Artificial sequence
  SiRNA target sequence
tcaaccgttttgggccaaag

SEQ ID NO: 226716 - DNA, 20 bp, Artificial sequence
  SiRNA target sequence
caaccgttttgggccaaaga

SEQ ID NO: 226717 - DNA, 20 bp, Artificial sequence
  SiRNA target sequence
aaccgttttgggccaaagat

SEQ ID NO: 226718 - DNA, 20 bp, Artificial sequence
  SiRNA target sequence
accgttttgggccaaagata

SEQ ID NO: 226719 - DNA, 20 bp, Artificial sequence
  SiRNA target sequence
ccgttttgggccaaagatat

SEQ ID NO: 226720 - DNA, 20 bp, Artificial sequence
  SiRNA target sequence
cgttttgggccaaagatatt

SEQ ID NO: 226721 - DNA, 20 bp, Artificial sequence
  SiRNA target sequence
gttttgggccaaagatattt

SEQ ID NO: 226722 - DNA, 20 bp, Artificial sequence
  SiRNA target sequence
ttttgggccaaagatatttt

SEQ ID NO: 226723 - DNA, 20 bp, Artificial sequence
  SiRNA target sequence
tttgggccaaagatattttt

SEQ ID NO: 226724 - DNA, 20 bp, Artificial sequence
  SiRNA target sequence
ttgggccaaagatatttttg

SEQ ID NO: 226725 - DNA, 20 bp, Artificial sequence
  SiRNA target sequence
tgggccaaagatatttttgc

SEQ ID NO: 226726 - DNA, 20 bp, Artificial sequence
  SiRNA target sequence
gggccaaagatatttttgct

SEQ ID NO: 226727 - DNA, 20 bp, Artificial sequence
  SiRNA target sequence
ggccaaagatatttttgctg

SEQ ID NO: 226728 - DNA, 20 bp, Artificial sequence
  SiRNA target sequence
gccaaagatatttttgctga

SEQ ID NO: 226729 - DNA, 20 bp, Artificial sequence
  SiRNA target sequence
ccaaagatatttttgctgat

SEQ ID NO: 226730 - DNA, 20 bp, Artificial sequence
  SiRNA target sequence
caaagatatttttgctgatg

SEQ ID NO: 226731 - DNA, 20 bp, Artificial sequence
  SiRNA target sequence
aaagatatttttgctgatgg

SEQ ID NO: 226732 - DNA, 20 bp, Artificial sequence
  SiRNA target sequence
aagatatttttgctgatgga

SEQ ID NO: 226733 - DNA, 20 bp, Artificial sequence
  SiRNA target sequence
agatatttttgctgatggaa

SEQ ID NO: 226734 - DNA, 20 bp, Artificial sequence
  SiRNA target sequence
gatatttttgctgatggaaa

SEQ ID NO: 226735 - DNA, 20 bp, Artificial sequence
  SiRNA target sequence
atatttttgctgatggaaaa

SEQ ID NO: 226736 - DNA, 20 bp, Artificial sequence
  SiRNA target sequence
tatttttgctgatggaaaag

SEQ ID NO: 226737 - DNA, 20 bp, Artificial sequence
  SiRNA target sequence
atttttgctgatggaaaagc

SEQ ID NO: 226738 - DNA, 20 bp, Artificial sequence
  SiRNA target sequence
tttttgctgatggaaaagct

SEQ ID NO: 226739 - DNA, 20 bp, Artificial sequence
  SiRNA target sequence
ttttgctgatggaaaagctg

SEQ ID NO: 226740 - DNA, 20 bp, Artificial sequence
  SiRNA target sequence
tttgctgatggaaaagctgt

SEQ ID NO: 226741 - DNA, 20 bp, Artificial sequence
  SiRNA target sequence
ttgctgatggaaaagctgtt

SEQ ID NO: 226742 - DNA, 20 bp, Artificial sequence
  SiRNA target sequence
tgctgatggaaaagctgttg

SEQ ID NO: 226743 - DNA, 20 bp, Artificial sequence
  SiRNA target sequence
gctgatggaaaagctgttgc

SEQ ID NO: 226744 - DNA, 20 bp, Artificial sequence
  SiRNA target sequence
ctgatggaaaagctgttgcc

SEQ ID NO: 226745 - DNA, 20 bp, Artificial sequence
  SiRNA target sequence
tgatggaaaagctgttgcca

SEQ ID NO: 226746 - DNA, 20 bp, Artificial sequence
  SiRNA target sequence
gatggaaaagctgttgccag

SEQ ID NO: 226747 - DNA, 20 bp, Artificial sequence
  SiRNA target sequence
atggaaaagctgttgccaga

SEQ ID NO: 226748 - DNA, 20 bp, Artificial sequence
  SiRNA target sequence
tggaaaagctgttgccagaa

SEQ ID NO: 226749 - DNA, 20 bp, Artificial sequence
  SiRNA target sequence
ggaaaagctgttgccagaag

SEQ ID NO: 226750 - DNA, 20 bp, Artificial sequence
  SiRNA target sequence
gaaaagctgttgccagaagt

SEQ ID NO: 226751 - DNA, 20 bp, Artificial sequence
  SiRNA target sequence
aaaagctgttgccagaagta

SEQ ID NO: 226752 - DNA, 20 bp, Artificial sequence
  SiRNA target sequence
aaagctgttgccagaagtac

SEQ ID NO: 226753 - DNA, 20 bp, Artificial sequence
  SiRNA target sequence
aagctgttgccagaagtaca

SEQ ID NO: 226754 - DNA, 20 bp, Artificial sequence
  SiRNA target sequence
agctgttgccagaagtacag

SEQ ID NO: 226755 - DNA, 20 bp, Artificial sequence
  SiRNA target sequence
gctgttgccagaagtacaga

SEQ ID NO: 226756 - DNA, 20 bp, Artificial sequence
  SiRNA target sequence
ctgttgccagaagtacagat

SEQ ID NO: 226757 - DNA, 20 bp, Artificial sequence
  SiRNA target sequence
tgttgccagaagtacagatt

SEQ ID NO: 226758 - DNA, 20 bp, Artificial sequence
  SiRNA target sequence
gttgccagaagtacagattt

SEQ ID NO: 226759 - DNA, 20 bp, Artificial sequence
  SiRNA target sequence
ttgccagaagtacagatttt

SEQ ID NO: 226760 - DNA, 20 bp, Artificial sequence
  SiRNA target sequence
tgccagaagtacagattttt

SEQ ID NO: 226761 - DNA, 20 bp, Artificial sequence
  SiRNA target sequence
gccagaagtacagatttttt

SEQ ID NO: 226762 - DNA, 20 bp, Artificial sequence
  SiRNA target sequence
ccagaagtacagatttttta

SEQ ID NO: 226763 - DNA, 20 bp, Artificial sequence
  SiRNA target sequence
cagaagtacagattttttat

SEQ ID NO: 226764 - DNA, 20 bp, Artificial sequence
  SiRNA target sequence
agaagtacagattttttatt

SEQ ID NO: 226765 - DNA, 20 bp, Artificial sequence
  SiRNA target sequence
gaagtacagattttttattt

SEQ ID NO: 226766 - DNA, 20 bp, Artificial sequence
  SiRNA target sequence
aagtacagattttttatttt

SEQ ID NO: 226767 - DNA, 20 bp, Artificial sequence
  SiRNA target sequence
agtacagattttttattttc

SEQ ID NO: 226768 - DNA, 20 bp, Artificial sequence
  SiRNA target sequence
gtacagattttttattttct

SEQ ID NO: 226769 - DNA, 20 bp, Artificial sequence
  SiRNA target sequence
tacagattttttattttcta

SEQ ID NO: 226770 - DNA, 20 bp, Artificial sequence
  SiRNA target sequence
acagattttttattttctat

SEQ ID NO: 226771 - DNA, 20 bp, Artificial sequence
  SiRNA target sequence
cagattttttattttctatt

SEQ ID NO: 226772 - DNA, 20 bp, Artificial sequence
  SiRNA target sequence
agattttttattttctattg

SEQ ID NO: 226773 - DNA, 20 bp, Artificial sequence
  SiRNA target sequence
gattttttattttctattgc

SEQ ID NO: 226774 - DNA, 20 bp, Artificial sequence
  SiRNA target sequence
attttttattttctattgca

SEQ ID NO: 226775 - DNA, 20 bp, Artificial sequence
  SiRNA target sequence
ttttttattttctattgcac

SEQ ID NO: 226776 - DNA, 20 bp, Artificial sequence
  SiRNA target sequence
tttttattttctattgcact

SEQ ID NO: 226777 - DNA, 20 bp, Artificial sequence
  SiRNA target sequence
ttttattttctattgcactt

SEQ ID NO: 226778 - DNA, 20 bp, Artificial sequence
  SiRNA target sequence
tttattttctattgcacttg

SEQ ID NO: 226779 - DNA, 20 bp, Artificial sequence
  SiRNA target sequence
ttattttctattgcacttgt

SEQ ID NO: 226780 - DNA, 20 bp, Artificial sequence
  SiRNA target sequence
tattttctattgcacttgtt

SEQ ID NO: 226781 - DNA, 20 bp, Artificial sequence
  SiRNA target sequence
attttctattgcacttgttt

SEQ ID NO: 226782 - DNA, 20 bp, Artificial sequence
  SiRNA target sequence
ttttctattgcacttgtttt

SEQ ID NO: 226783 - DNA, 20 bp, Artificial sequence
  SiRNA target sequence
tttctattgcacttgttttc

SEQ ID NO: 226784 - DNA, 20 bp, Artificial sequence
  SiRNA target sequence
ttctattgcacttgttttca

SEQ ID NO: 226785 - DNA, 20 bp, Artificial sequence
  SiRNA target sequence
tctattgcacttgttttcaa

SEQ ID NO: 226786 - DNA, 20 bp, Artificial sequence
  SiRNA target sequence
ctattgcacttgttttcaat

SEQ ID NO: 226787 - DNA, 20 bp, Artificial sequence
  SiRNA target sequence
tattgcacttgttttcaatg

SEQ ID NO: 226788 - DNA, 20 bp, Artificial sequence
  SiRNA target sequence
attgcacttgttttcaatga

SEQ ID NO: 226789 - DNA, 20 bp, Artificial sequence
  SiRNA target sequence
ttgcacttgttttcaatgaa

SEQ ID NO: 226790 - DNA, 20 bp, Artificial sequence
  SiRNA target sequence
tgcacttgttttcaatgaat

SEQ ID NO: 226791 - DNA, 20 bp, Artificial sequence
  SiRNA target sequence
gcacttgttttcaatgaatg

SEQ ID NO: 226792 - DNA, 20 bp, Artificial sequence
  SiRNA target sequence
cacttgttttcaatgaatgg

SEQ ID NO: 226793 - DNA, 20 bp, Artificial sequence
  SiRNA target sequence
acttgttttcaatgaatgga

SEQ ID NO: 226794 - DNA, 20 bp, Artificial sequence
  SiRNA target sequence
cttgttttcaatgaatggac

SEQ ID NO: 226795 - DNA, 20 bp, Artificial sequence
  SiRNA target sequence
ttgttttcaatgaatggaca

SEQ ID NO: 226796 - DNA, 20 bp, Artificial sequence
  SiRNA target sequence
tgttttcaatgaatggacaa

SEQ ID NO: 226797 - DNA, 20 bp, Artificial sequence
  SiRNA target sequence
gttttcaatgaatggacaag

SEQ ID NO: 226798 - DNA, 20 bp, Artificial sequence
  SiRNA target sequence
ttttcaatgaatggacaagt

SEQ ID NO: 226799 - DNA, 20 bp, Artificial sequence
  SiRNA target sequence
tttcaatgaatggacaagtt

SEQ ID NO: 226800 - DNA, 20 bp, Artificial sequence
  SiRNA target sequence
ttcaatgaatggacaagttc

SEQ ID NO: 226801 - DNA, 20 bp, Artificial sequence
  SiRNA target sequence
tcaatgaatggacaagttct

SEQ ID NO: 226802 - DNA, 20 bp, Artificial sequence
  SiRNA target sequence
caatgaatggacaagttctg

SEQ ID NO: 226803 - DNA, 20 bp, Artificial sequence
  SiRNA target sequence
aatgaatggacaagttctgc

SEQ ID NO: 226804 - DNA, 20 bp, Artificial sequence
  SiRNA target sequence
atgaatggacaagttctgct

SEQ ID NO: 226805 - DNA, 20 bp, Artificial sequence
  SiRNA target sequence
tgaatggacaagttctgcta

SEQ ID NO: 226806 - DNA, 20 bp, Artificial sequence
  SiRNA target sequence
gaatggacaagttctgctat

SEQ ID NO: 226807 - DNA, 20 bp, Artificial sequence
  SiRNA target sequence
aatggacaagttctgctatc

SEQ ID NO: 226808 - DNA, 20 bp, Artificial sequence
  SiRNA target sequence
atggacaagttctgctatct

SEQ ID NO: 226809 - DNA, 20 bp, Artificial sequence
  SiRNA target sequence
tggacaagttctgctatcta

SEQ ID NO: 226810 - DNA, 20 bp, Artificial sequence
  SiRNA target sequence
ggacaagttctgctatctat

SEQ ID NO: 226811 - DNA, 20 bp, Artificial sequence
  SiRNA target sequence
gacaagttctgctatctatg

SEQ ID NO: 226812 - DNA, 20 bp, Artificial sequence
  SiRNA target sequence
acaagttctgctatctatgt

SEQ ID NO: 226813 - DNA, 20 bp, Artificial sequence
  SiRNA target sequence
caagttctgctatctatgtt

SEQ ID NO: 226814 - DNA, 20 bp, Artificial sequence
  SiRNA target sequence
aagttctgctatctatgttt

SEQ ID NO: 226815 - DNA, 20 bp, Artificial sequence
  SiRNA target sequence
agttctgctatctatgtttt

SEQ ID NO: 226816 - DNA, 20 bp, Artificial sequence
  SiRNA target sequence
gttctgctatctatgtttta

SEQ ID NO: 226817 - DNA, 20 bp, Artificial sequence
  SiRNA target sequence
ttctgctatctatgttttat

SEQ ID NO: 226818 - DNA, 20 bp, Artificial sequence
  SiRNA target sequence
tctgctatctatgttttatc

SEQ ID NO: 226819 - DNA, 20 bp, Artificial sequence
  SiRNA target sequence
ctgctatctatgttttatct

SEQ ID NO: 226820 - DNA, 20 bp, Artificial sequence
  SiRNA target sequence
tgctatctatgttttatctg

SEQ ID NO: 226821 - DNA, 20 bp, Artificial sequence
  SiRNA target sequence
gctatctatgttttatctga

SEQ ID NO: 226822 - DNA, 20 bp, Artificial sequence
  SiRNA target sequence
ctatctatgttttatctgaa

SEQ ID NO: 226823 - DNA, 20 bp, Artificial sequence
  SiRNA target sequence
tatctatgttttatctgaaa

SEQ ID NO: 226824 - DNA, 20 bp, Artificial sequence
  SiRNA target sequence
atctatgttttatctgaaat

SEQ ID NO: 226825 - DNA, 20 bp, Artificial sequence
  SiRNA target sequence
tctatgttttatctgaaatg

SEQ ID NO: 226826 - DNA, 20 bp, Artificial sequence
  SiRNA target sequence
ctatgttttatctgaaatgt

SEQ ID NO: 226827 - DNA, 20 bp, Artificial sequence
  SiRNA target sequence
tatgttttatctgaaatgtt

SEQ ID NO: 226828 - DNA, 20 bp, Artificial sequence
  SiRNA target sequence
atgttttatctgaaatgttt

SEQ ID NO: 226829 - DNA, 20 bp, Artificial sequence
  SiRNA target sequence
tgttttatctgaaatgtttg

SEQ ID NO: 226830 - DNA, 20 bp, Artificial sequence
  SiRNA target sequence
gttttatctgaaatgtttgg

SEQ ID NO: 226831 - DNA, 20 bp, Artificial sequence
  SiRNA target sequence
ttttatctgaaatgtttggt

SEQ ID NO: 226832 - DNA, 20 bp, Artificial sequence
  SiRNA target sequence
tttatctgaaatgtttggta

SEQ ID NO: 226833 - DNA, 20 bp, Artificial sequence
  SiRNA target sequence
ttatctgaaatgtttggtag

SEQ ID NO: 226834 - DNA, 20 bp, Artificial sequence
  SiRNA target sequence
tatctgaaatgtttggtagt

SEQ ID NO: 226835 - DNA, 20 bp, Artificial sequence
  SiRNA target sequence
atctgaaatgtttggtagtt

SEQ ID NO: 226836 - DNA, 20 bp, Artificial sequence
  SiRNA target sequence
tctgaaatgtttggtagttt

SEQ ID NO: 226837 - DNA, 20 bp, Artificial sequence
  SiRNA target sequence
ctgaaatgtttggtagtttg

SEQ ID NO: 226838 - DNA, 20 bp, Artificial sequence
  SiRNA target sequence
tgaaatgtttggtagtttga

SEQ ID NO: 226839 - DNA, 20 bp, Artificial sequence
  SiRNA target sequence
gaaatgtttggtagtttgat

SEQ ID NO: 226840 - DNA, 20 bp, Artificial sequence
  SiRNA target sequence
aaatgtttggtagtttgatt

SEQ ID NO: 226841 - DNA, 20 bp, Artificial sequence
  SiRNA target sequence
aatgtttggtagtttgattc

SEQ ID NO: 226842 - DNA, 20 bp, Artificial sequence
  SiRNA target sequence
atgtttggtagtttgattct

SEQ ID NO: 226843 - DNA, 20 bp, Artificial sequence
  SiRNA target sequence
tgtttggtagtttgattctt

SEQ ID NO: 226844 - DNA, 20 bp, Artificial sequence
  SiRNA target sequence
gtttggtagtttgattcttt

SEQ ID NO: 226845 - DNA, 20 bp, Artificial sequence
  SiRNA target sequence
tttggtagtttgattctttc

SEQ ID NO: 226846 - DNA, 20 bp, Artificial sequence
  SiRNA target sequence
ttggtagtttgattctttca

SEQ ID NO: 226847 - DNA, 20 bp, Artificial sequence
  SiRNA target sequence
tggtagtttgattctttcat

SEQ ID NO: 226848 - DNA, 20 bp, Artificial sequence
  SiRNA target sequence
ggtagtttgattctttcata

SEQ ID NO: 226849 - DNA, 20 bp, Artificial sequence
  SiRNA target sequence
gtagtttgattctttcatat

SEQ ID NO: 226850 - DNA, 20 bp, Artificial sequence
  SiRNA target sequence
tagtttgattctttcatatt

SEQ ID NO: 226851 - DNA, 20 bp, Artificial sequence
  SiRNA target sequence
agtttgattctttcatattt

SEQ ID NO: 226852 - DNA, 20 bp, Artificial sequence
  SiRNA target sequence
gtttgattctttcatattta

SEQ ID NO: 226853 - DNA, 20 bp, Artificial sequence
  SiRNA target sequence
tttgattctttcatatttat

SEQ ID NO: 226854 - DNA, 20 bp, Artificial sequence
  SiRNA target sequence
ttgattctttcatatttatt

SEQ ID NO: 226855 - DNA, 20 bp, Artificial sequence
  SiRNA target sequence
tgattctttcatatttattt

SEQ ID NO: 226856 - DNA, 20 bp, Artificial sequence
  SiRNA target sequence
gattctttcatatttattta

SEQ ID NO: 226857 - DNA, 20 bp, Artificial sequence
  SiRNA target sequence
attctttcatatttatttat

SEQ ID NO: 226858 - DNA, 20 bp, Artificial sequence
  SiRNA target sequence
ttctttcatatttatttatg

SEQ ID NO: 226859 - DNA, 20 bp, Artificial sequence
  SiRNA target sequence
tctttcatatttatttatga

SEQ ID NO: 226860 - DNA, 20 bp, Artificial sequence
  SiRNA target sequence
ctttcatatttatttatgac

SEQ ID NO: 226861 - DNA, 20 bp, Artificial sequence
  SiRNA target sequence
tttcatatttatttatgacg

SEQ ID NO: 226862 - DNA, 20 bp, Artificial sequence
  SiRNA target sequence
ttcatatttatttatgacgt

SEQ ID NO: 226863 - DNA, 20 bp, Artificial sequence
  SiRNA target sequence
tcatatttatttatgacgtt

SEQ ID NO: 226864 - DNA, 20 bp, Artificial sequence
  SiRNA target sequence
catatttatttatgacgttt

SEQ ID NO: 226865 - DNA, 20 bp, Artificial sequence
  SiRNA target sequence
atatttatttatgacgtttg

SEQ ID NO: 226866 - DNA, 20 bp, Artificial sequence
  SiRNA target sequence
tatttatttatgacgtttgc

SEQ ID NO: 226867 - DNA, 20 bp, Artificial sequence
  SiRNA target sequence
atttatttatgacgtttgct

SEQ ID NO: 226868 - DNA, 20 bp, Artificial sequence
  SiRNA target sequence
tttatttatgacgtttgcta

SEQ ID NO: 226869 - DNA, 20 bp, Artificial sequence
  SiRNA target sequence
ttatttatgacgtttgctaa

SEQ ID NO: 226870 - DNA, 20 bp, Artificial sequence
  SiRNA target sequence
tatttatgacgtttgctaat

SEQ ID NO: 226871 - DNA, 20 bp, Artificial sequence
  SiRNA target sequence
atttatgacgtttgctaatg

SEQ ID NO: 226872 - DNA, 20 bp, Artificial sequence
  SiRNA target sequence
tttatgacgtttgctaatgg

SEQ ID NO: 226873 - DNA, 20 bp, Artificial sequence
  SiRNA target sequence
ttatgacgtttgctaatggt

SEQ ID NO: 226874 - DNA, 20 bp, Artificial sequence
  SiRNA target sequence
tatgacgtttgctaatggtc

SEQ ID NO: 226875 - DNA, 20 bp, Artificial sequence
  SiRNA target sequence
atgacgtttgctaatggtct

SEQ ID NO: 226876 - DNA, 20 bp, Artificial sequence
  SiRNA target sequence
tgacgtttgctaatggtctt

SEQ ID NO: 226877 - DNA, 20 bp, Artificial sequence
  SiRNA target sequence
gacgtttgctaatggtcttt

SEQ ID NO: 226878 - DNA, 20 bp, Artificial sequence
  SiRNA target sequence
acgtttgctaatggtctttc

SEQ ID NO: 226879 - DNA, 20 bp, Artificial sequence
  SiRNA target sequence
cgtttgctaatggtctttcg

SEQ ID NO: 226880 - DNA, 20 bp, Artificial sequence
  SiRNA target sequence
gtttgctaatggtctttcga

SEQ ID NO: 226881 - DNA, 20 bp, Artificial sequence
  SiRNA target sequence
tttgctaatggtctttcgac

SEQ ID NO: 226882 - DNA, 20 bp, Artificial sequence
  SiRNA target sequence
ttgctaatggtctttcgact

SEQ ID NO: 226883 - DNA, 20 bp, Artificial sequence
  SiRNA target sequence
tgctaatggtctttcgactc

SEQ ID NO: 226884 - DNA, 20 bp, Artificial sequence
  SiRNA target sequence
gctaatggtctttcgactcc

SEQ ID NO: 226885 - DNA, 20 bp, Artificial sequence
  SiRNA target sequence
ctaatggtctttcgactcct

SEQ ID NO: 226886 - DNA, 20 bp, Artificial sequence
  SiRNA target sequence
taatggtctttcgactcctg

SEQ ID NO: 226887 - DNA, 20 bp, Artificial sequence
  SiRNA target sequence
aatggtctttcgactcctgg

SEQ ID NO: 226888 - DNA, 20 bp, Artificial sequence
  SiRNA target sequence
atggtctttcgactcctgga

SEQ ID NO: 226889 - DNA, 20 bp, Artificial sequence
  SiRNA target sequence
tggtctttcgactcctggac

SEQ ID NO: 226890 - DNA, 20 bp, Artificial sequence
  SiRNA target sequence
ggtctttcgactcctggaca

SEQ ID NO: 226891 - DNA, 20 bp, Artificial sequence
  SiRNA target sequence
gtctttcgactcctggacag

SEQ ID NO: 226892 - DNA, 20 bp, Artificial sequence
  SiRNA target sequence
tctttcgactcctggacagt

SEQ ID NO: 226893 - DNA, 20 bp, Artificial sequence
  SiRNA target sequence
ctttcgactcctggacagtc

SEQ ID NO: 226894 - DNA, 20 bp, Artificial sequence
  SiRNA target sequence
tttcgactcctggacagtcc

SEQ ID NO: 226895 - DNA, 20 bp, Artificial sequence
  SiRNA target sequence
ttcgactcctggacagtccg

SEQ ID NO: 226896 - DNA, 20 bp, Artificial sequence
  SiRNA target sequence
tcgactcctggacagtccgc

SEQ ID NO: 226897 - DNA, 20 bp, Artificial sequence
  SiRNA target sequence
cgactcctggacagtccgct

SEQ ID NO: 226898 - DNA, 20 bp, Artificial sequence
  SiRNA target sequence
gactcctggacagtccgcta

SEQ ID NO: 226899 - DNA, 20 bp, Artificial sequence
  SiRNA target sequence
actcctggacagtccgctag

SEQ ID NO: 226900 - DNA, 20 bp, Artificial sequence
  SiRNA target sequence
ctcctggacagtccgctaga

SEQ ID NO: 226901 - DNA, 20 bp, Artificial sequence
  SiRNA target sequence
tcctggacagtccgctagat

SEQ ID NO: 226902 - DNA, 20 bp, Artificial sequence
  SiRNA target sequence
cctggacagtccgctagatt

SEQ ID NO: 226903 - DNA, 20 bp, Artificial sequence
  SiRNA target sequence
ctggacagtccgctagattt

SEQ ID NO: 226904 - DNA, 20 bp, Artificial sequence
  SiRNA target sequence
tggacagtccgctagatttg

SEQ ID NO: 226905 - DNA, 20 bp, Artificial sequence
  SiRNA target sequence
ggacagtccgctagatttgt

SEQ ID NO: 226906 - DNA, 20 bp, Artificial sequence
  SiRNA target sequence
gacagtccgctagatttgtc

SEQ ID NO: 226907 - DNA, 20 bp, Artificial sequence
  SiRNA target sequence
acagtccgctagatttgtcc

SEQ ID NO: 226908 - DNA, 20 bp, Artificial sequence
  SiRNA target sequence
cagtccgctagatttgtccc

SEQ ID NO: 226909 - DNA, 20 bp, Artificial sequence
  SiRNA target sequence
agtccgctagatttgtccct

SEQ ID NO: 226910 - DNA, 20 bp, Artificial sequence
  SiRNA target sequence
gtccgctagatttgtccctt

SEQ ID NO: 226911 - DNA, 20 bp, Artificial sequence
  SiRNA target sequence
tccgctagatttgtcccttt

SEQ ID NO: 226912 - DNA, 20 bp, Artificial sequence
  SiRNA target sequence
ccgctagatttgtcccttta

SEQ ID NO: 226913 - DNA, 20 bp, Artificial sequence
  SiRNA target sequence
cgctagatttgtccctttat

SEQ ID NO: 226914 - DNA, 20 bp, Artificial sequence
  SiRNA target sequence
gctagatttgtccctttatt

SEQ ID NO: 226915 - DNA, 20 bp, Artificial sequence
  SiRNA target sequence
ctagatttgtccctttattt

SEQ ID NO: 226916 - DNA, 20 bp, Artificial sequence
  SiRNA target sequence
tagatttgtccctttatttt

SEQ ID NO: 226917 - DNA, 20 bp, Artificial sequence
  SiRNA target sequence
agatttgtccctttatttta

SEQ ID NO: 226918 - DNA, 20 bp, Artificial sequence
  SiRNA target sequence
gatttgtccctttattttat

SEQ ID NO: 226919 - DNA, 20 bp, Artificial sequence
  SiRNA target sequence
atttgtccctttattttatg

SEQ ID NO: 226920 - DNA, 20 bp, Artificial sequence
  SiRNA target sequence
tttgtccctttattttatgt

SEQ ID NO: 226921 - DNA, 20 bp, Artificial sequence
  SiRNA target sequence
ttgtccctttattttatgtt

SEQ ID NO: 226922 - DNA, 20 bp, Artificial sequence
  SiRNA target sequence
tgtccctttattttatgttg

SEQ ID NO: 226923 - DNA, 20 bp, Artificial sequence
  SiRNA target sequence
gtccctttattttatgttgg

SEQ ID NO: 226924 - DNA, 20 bp, Artificial sequence
  SiRNA target sequence
tccctttattttatgttgga

SEQ ID NO: 226925 - DNA, 20 bp, Artificial sequence
  SiRNA target sequence
ccctttattttatgttggat

SEQ ID NO: 226926 - DNA, 20 bp, Artificial sequence
  SiRNA target sequence
cctttattttatgttggatc

SEQ ID NO: 226927 - DNA, 20 bp, Artificial sequence
  SiRNA target sequence
ctttattttatgttggatct

SEQ ID NO: 226928 - DNA, 20 bp, Artificial sequence
  SiRNA target sequence
tttattttatgttggatcta

SEQ ID NO: 226929 - DNA, 20 bp, Artificial sequence
  SiRNA target sequence
ttattttatgttggatctaa

SEQ ID NO: 226930 - DNA, 20 bp, Artificial sequence
  SiRNA target sequence
tattttatgttggatctaat

SEQ ID NO: 226931 - DNA, 20 bp, Artificial sequence
  SiRNA target sequence
attttatgttggatctaatt

SEQ ID NO: 226932 - DNA, 20 bp, Artificial sequence
  SiRNA target sequence
ttttatgttggatctaattt

SEQ ID NO: 226933 - DNA, 20 bp, Artificial sequence
  SiRNA target sequence
tttatgttggatctaatttg

SEQ ID NO: 226934 - DNA, 20 bp, Artificial sequence
  SiRNA target sequence
ttatgttggatctaatttgg

SEQ ID NO: 226935 - DNA, 20 bp, Artificial sequence
  SiRNA target sequence
tatgttggatctaatttggc

SEQ ID NO: 226936 - DNA, 20 bp, Artificial sequence
  SiRNA target sequence
atgttggatctaatttggct

SEQ ID NO: 226937 - DNA, 20 bp, Artificial sequence
  SiRNA target sequence
tgttggatctaatttggctt

SEQ ID NO: 226938 - DNA, 20 bp, Artificial sequence
  SiRNA target sequence
gttggatctaatttggcttt

SEQ ID NO: 226939 - DNA, 20 bp, Artificial sequence
  SiRNA target sequence
ttggatctaatttggcttta

SEQ ID NO: 226940 - DNA, 20 bp, Artificial sequence
  SiRNA target sequence
tggatctaatttggctttac

SEQ ID NO: 226941 - DNA, 20 bp, Artificial sequence
  SiRNA target sequence
ggatctaatttggctttact

SEQ ID NO: 226942 - DNA, 20 bp, Artificial sequence
  SiRNA target sequence
gatctaatttggctttactt

SEQ ID NO: 226943 - DNA, 20 bp, Artificial sequence
  SiRNA target sequence
atctaatttggctttacttc

SEQ ID NO: 226944 - DNA, 20 bp, Artificial sequence
  SiRNA target sequence
tctaatttggctttacttct

SEQ ID NO: 226945 - DNA, 20 bp, Artificial sequence
  SiRNA target sequence
ctaatttggctttacttctt

SEQ ID NO: 226946 - DNA, 20 bp, Artificial sequence
  SiRNA target sequence
taatttggctttacttcttt

SEQ ID NO: 226947 - DNA, 20 bp, Artificial sequence
  SiRNA target sequence
aatttggctttacttctttc

SEQ ID NO: 226948 - DNA, 20 bp, Artificial sequence
  SiRNA target sequence
atttggctttacttctttca

SEQ ID NO: 226949 - DNA, 20 bp, Artificial sequence
  SiRNA target sequence
tttggctttacttctttcag

SEQ ID NO: 226950 - DNA, 20 bp, Artificial sequence
  SiRNA target sequence
ttggctttacttctttcagg

SEQ ID NO: 226951 - DNA, 20 bp, Artificial sequence
  SiRNA target sequence
tggctttacttctttcagga

SEQ ID NO: 226952 - DNA, 20 bp, Artificial sequence
  SiRNA target sequence
ggctttacttctttcaggaa

SEQ ID NO: 226953 - DNA, 20 bp, Artificial sequence
  SiRNA target sequence
gctttacttctttcaggaat

SEQ ID NO: 226954 - DNA, 20 bp, Artificial sequence
  SiRNA target sequence
ctttacttctttcaggaatg

SEQ ID NO: 226955 - DNA, 20 bp, Artificial sequence
  SiRNA target sequence
tttacttctttcaggaatga

SEQ ID NO: 226956 - DNA, 20 bp, Artificial sequence
  SiRNA target sequence
ttacttctttcaggaatgat

SEQ ID NO: 226957 - DNA, 20 bp, Artificial sequence
  SiRNA target sequence
tacttctttcaggaatgata

SEQ ID NO: 226958 - DNA, 20 bp, Artificial sequence
  SiRNA target sequence
acttctttcaggaatgataa

SEQ ID NO: 226959 - DNA, 20 bp, Artificial sequence
  SiRNA target sequence
cttctttcaggaatgataaa

SEQ ID NO: 226960 - DNA, 20 bp, Artificial sequence
  SiRNA target sequence
ttctttcaggaatgataaat

SEQ ID NO: 226961 - DNA, 20 bp, Artificial sequence
  SiRNA target sequence
tctttcaggaatgataaatt

SEQ ID NO: 226962 - DNA, 20 bp, Artificial sequence
  SiRNA target sequence
ctttcaggaatgataaatta

SEQ ID NO: 226963 - DNA, 20 bp, Artificial sequence
  SiRNA target sequence
tttcaggaatgataaattac

SEQ ID NO: 226964 - DNA, 20 bp, Artificial sequence
  SiRNA target sequence
ttcaggaatgataaattact

SEQ ID NO: 226965 - DNA, 20 bp, Artificial sequence
  SiRNA target sequence
tcaggaatgataaattactt

SEQ ID NO: 226966 - DNA, 20 bp, Artificial sequence
  SiRNA target sequence
caggaatgataaattacttt

SEQ ID NO: 226967 - DNA, 20 bp, Artificial sequence
  SiRNA target sequence
aggaatgataaattactttt

SEQ ID NO: 226968 - DNA, 20 bp, Artificial sequence
  SiRNA target sequence
ggaatgataaattactttta

SEQ ID NO: 226969 - DNA, 20 bp, Artificial sequence
  SiRNA target sequence
gaatgataaattacttttat

SEQ ID NO: 226970 - DNA, 20 bp, Artificial sequence
  SiRNA target sequence
aatgataaattacttttata

SEQ ID NO: 226971 - DNA, 20 bp, Artificial sequence
  SiRNA target sequence
atgataaattacttttatag

SEQ ID NO: 226972 - DNA, 20 bp, Artificial sequence
  SiRNA target sequence
tgataaattacttttatagt

SEQ ID NO: 226973 - DNA, 20 bp, Artificial sequence
  SiRNA target sequence
gataaattacttttatagtg

SEQ ID NO: 226974 - DNA, 20 bp, Artificial sequence
  SiRNA target sequence
ataaattacttttatagtgt

SEQ ID NO: 226975 - DNA, 20 bp, Artificial sequence
  SiRNA target sequence
taaattacttttatagtgta

SEQ ID NO: 226976 - DNA, 20 bp, Artificial sequence
  SiRNA target sequence
aaattacttttatagtgtaa

SEQ ID NO: 226977 - DNA, 20 bp, Artificial sequence
  SiRNA target sequence
aattacttttatagtgtaag

SEQ ID NO: 226978 - DNA, 20 bp, Artificial sequence
  SiRNA target sequence
attacttttatagtgtaagt

SEQ ID NO: 226979 - DNA, 20 bp, Artificial sequence
  SiRNA target sequence
ttacttttatagtgtaagta

SEQ ID NO: 226980 - DNA, 20 bp, Artificial sequence
  SiRNA target sequence
tacttttatagtgtaagtaa

SEQ ID NO: 226981 - DNA, 20 bp, Artificial sequence
  SiRNA target sequence
acttttatagtgtaagtaaa

SEQ ID NO: 226982 - DNA, 20 bp, Artificial sequence
  SiRNA target sequence
cttttatagtgtaagtaaat

SEQ ID NO: 226983 - DNA, 20 bp, Artificial sequence
  SiRNA target sequence
ttttatagtgtaagtaaatc

SEQ ID NO: 226984 - DNA, 20 bp, Artificial sequence
  SiRNA target sequence
tttatagtgtaagtaaatct

SEQ ID NO: 226985 - DNA, 20 bp, Artificial sequence
  SiRNA target sequence
ttatagtgtaagtaaatcta

SEQ ID NO: 226986 - DNA, 20 bp, Artificial sequence
  SiRNA target sequence
tatagtgtaagtaaatctaa

SEQ ID NO: 226987 - DNA, 20 bp, Artificial sequence
  SiRNA target sequence
atagtgtaagtaaatctaaa

SEQ ID NO: 226988 - DNA, 20 bp, Artificial sequence
  SiRNA target sequence
tagtgtaagtaaatctaaaa

SEQ ID NO: 226989 - DNA, 20 bp, Artificial sequence
  SiRNA target sequence
agtgtaagtaaatctaaaat

SEQ ID NO: 226990 - DNA, 20 bp, Artificial sequence
  SiRNA target sequence
gtgtaagtaaatctaaaatg

SEQ ID NO: 226991 - DNA, 20 bp, Artificial sequence
  SiRNA target sequence
tgtaagtaaatctaaaatgt

SEQ ID NO: 226992 - DNA, 20 bp, Artificial sequence
  SiRNA target sequence
gtaagtaaatctaaaatgtc

SEQ ID NO: 226993 - DNA, 20 bp, Artificial sequence
  SiRNA target sequence
taagtaaatctaaaatgtcg

SEQ ID NO: 226994 - DNA, 20 bp, Artificial sequence
  SiRNA target sequence
aagtaaatctaaaatgtcgt

SEQ ID NO: 226995 - DNA, 20 bp, Artificial sequence
  SiRNA target sequence
agtaaatctaaaatgtcgta

SEQ ID NO: 226996 - DNA, 20 bp, Artificial sequence
  SiRNA target sequence
gtaaatctaaaatgtcgtat

SEQ ID NO: 226997 - DNA, 20 bp, Artificial sequence
  SiRNA target sequence
taaatctaaaatgtcgtatg

SEQ ID NO: 226998 - DNA, 20 bp, Artificial sequence
  SiRNA target sequence
aaatctaaaatgtcgtatgt

SEQ ID NO: 226999 - DNA, 20 bp, Artificial sequence
  SiRNA target sequence
aatctaaaatgtcgtatgtt

SEQ ID NO: 227000 - DNA, 20 bp, Artificial sequence
  SiRNA target sequence
atctaaaatgtcgtatgttg

SEQ ID NO: 227001 - DNA, 20 bp, Artificial sequence
  SiRNA target sequence
tctaaaatgtcgtatgttgc

SEQ ID NO: 227002 - DNA, 20 bp, Artificial sequence
  SiRNA target sequence
ctaaaatgtcgtatgttgcg

SEQ ID NO: 227003 - DNA, 20 bp, Artificial sequence
  SiRNA target sequence
taaaatgtcgtatgttgcgg

SEQ ID NO: 227004 - DNA, 20 bp, Artificial sequence
  SiRNA target sequence
aaaatgtcgtatgttgcggc

SEQ ID NO: 227005 - DNA, 20 bp, Artificial sequence
  SiRNA target sequence
aaatgtcgtatgttgcggcc

SEQ ID NO: 227006 - DNA, 20 bp, Artificial sequence
  SiRNA target sequence
aatgtcgtatgttgcggccg

SEQ ID NO: 227007 - DNA, 20 bp, Artificial sequence
  SiRNA target sequence
atgtcgtatgttgcggccga

SEQ ID NO: 227008 - DNA, 20 bp, Artificial sequence
  SiRNA target sequence
tgtcgtatgttgcggccgaa

SEQ ID NO: 227009 - DNA, 20 bp, Artificial sequence
  SiRNA target sequence
gtcgtatgttgcggccgaaa

SEQ ID NO: 227010 - DNA, 20 bp, Artificial sequence
  SiRNA target sequence
tcgtatgttgcggccgaaag

SEQ ID NO: 227011 - DNA, 20 bp, Artificial sequence
  SiRNA target sequence
cgtatgttgcggccgaaaga

SEQ ID NO: 227012 - DNA, 20 bp, Artificial sequence
  SiRNA target sequence
gtatgttgcggccgaaagat

SEQ ID NO: 227013 - DNA, 20 bp, Artificial sequence
  SiRNA target sequence
tatgttgcggccgaaagatt

SEQ ID NO: 227014 - DNA, 20 bp, Artificial sequence
  SiRNA target sequence
atgttgcggccgaaagattt

SEQ ID NO: 227015 - DNA, 20 bp, Artificial sequence
  SiRNA target sequence
tgttgcggccgaaagatttt

SEQ ID NO: 227016 - DNA, 20 bp, Artificial sequence
  SiRNA target sequence
gttgcggccgaaagattttt

SEQ ID NO: 227017 - DNA, 20 bp, Artificial sequence
  SiRNA target sequence
ttgcggccgaaagatttttt

SEQ ID NO: 227018 - DNA, 20 bp, Artificial sequence
  SiRNA target sequence
tgcggccgaaagatttttta

SEQ ID NO: 227019 - DNA, 20 bp, Artificial sequence
  SiRNA target sequence
gcggccgaaagattttttaa

SEQ ID NO: 227020 - DNA, 20 bp, Artificial sequence
  SiRNA target sequence
cggccgaaagattttttaat

SEQ ID NO: 227021 - DNA, 20 bp, Artificial sequence
  SiRNA target sequence
ggccgaaagattttttaatg

SEQ ID NO: 227022 - DNA, 20 bp, Artificial sequence
  SiRNA target sequence
gccgaaagattttttaatgg

SEQ ID NO: 227023 - DNA, 20 bp, Artificial sequence
  SiRNA target sequence
ccgaaagattttttaatgga

SEQ ID NO: 227024 - DNA, 20 bp, Artificial sequence
  SiRNA target sequence
cgaaagattttttaatggat

SEQ ID NO: 227025 - DNA, 20 bp, Artificial sequence
  SiRNA target sequence
gaaagattttttaatggatt

SEQ ID NO: 227026 - DNA, 20 bp, Artificial sequence
  SiRNA target sequence
aaagattttttaatggattt

SEQ ID NO: 227027 - DNA, 20 bp, Artificial sequence
  SiRNA target sequence
aagattttttaatggatttt

SEQ ID NO: 227028 - DNA, 20 bp, Artificial sequence
  SiRNA target sequence
agattttttaatggattttt

SEQ ID NO: 227029 - DNA, 20 bp, Artificial sequence
  SiRNA target sequence
gattttttaatggatttttt

SEQ ID NO: 227030 - DNA, 20 bp, Artificial sequence
  SiRNA target sequence
attttttaatggattttttt

SEQ ID NO: 227031 - DNA, 20 bp, Artificial sequence
  SiRNA target sequence
ttttttaatggatttttttg

SEQ ID NO: 227032 - DNA, 20 bp, Artificial sequence
  SiRNA target sequence
tttttaatggatttttttgt

SEQ ID NO: 227033 - DNA, 20 bp, Artificial sequence
  SiRNA target sequence
ttttaatggatttttttgtc

SEQ ID NO: 227034 - DNA, 20 bp, Artificial sequence
  SiRNA target sequence
tttaatggatttttttgtct

SEQ ID NO: 227035 - DNA, 20 bp, Artificial sequence
  SiRNA target sequence
ttaatggatttttttgtctg

SEQ ID NO: 227036 - DNA, 20 bp, Artificial sequence
  SiRNA target sequence
taatggatttttttgtctga

SEQ ID NO: 227037 - DNA, 20 bp, Artificial sequence
  SiRNA target sequence
aatggatttttttgtctgag

SEQ ID NO: 227038 - DNA, 20 bp, Artificial sequence
  SiRNA target sequence
atggatttttttgtctgagt

SEQ ID NO: 227039 - DNA, 20 bp, Artificial sequence
  SiRNA target sequence
tggatttttttgtctgagtg

SEQ ID NO: 227040 - DNA, 20 bp, Artificial sequence
  SiRNA target sequence
ggatttttttgtctgagtgg

SEQ ID NO: 227041 - DNA, 20 bp, Artificial sequence
  SiRNA target sequence
gatttttttgtctgagtgga

SEQ ID NO: 227042 - DNA, 20 bp, Artificial sequence
  SiRNA target sequence
atttttttgtctgagtggaa

SEQ ID NO: 227043 - DNA, 20 bp, Artificial sequence
  SiRNA target sequence
tttttttgtctgagtggaat

SEQ ID NO: 227044 - DNA, 20 bp, Artificial sequence
  SiRNA target sequence
ttttttgtctgagtggaatt

SEQ ID NO: 227045 - DNA, 20 bp, Artificial sequence
  SiRNA target sequence
tttttgtctgagtggaattc

SEQ ID NO: 227046 - DNA, 20 bp, Artificial sequence
  SiRNA target sequence
ttttgtctgagtggaattct

SEQ ID NO: 227047 - DNA, 20 bp, Artificial sequence
  SiRNA target sequence
tttgtctgagtggaattctc

SEQ ID NO: 227048 - DNA, 20 bp, Artificial sequence
  SiRNA target sequence
ttgtctgagtggaattctct

SEQ ID NO: 227049 - DNA, 20 bp, Artificial sequence
  SiRNA target sequence
tgtctgagtggaattctctg

SEQ ID NO: 227050 - DNA, 20 bp, Artificial sequence
  SiRNA target sequence
gtctgagtggaattctctgt

SEQ ID NO: 227051 - DNA, 20 bp, Artificial sequence
  SiRNA target sequence
tctgagtggaattctctgtg

SEQ ID NO: 227052 - DNA, 20 bp, Artificial sequence
  SiRNA target sequence
ctgagtggaattctctgtgc

SEQ ID NO: 227053 - DNA, 20 bp, Artificial sequence
  SiRNA target sequence
tgagtggaattctctgtgct

SEQ ID NO: 227054 - DNA, 20 bp, Artificial sequence
  SiRNA target sequence
gagtggaattctctgtgctg

SEQ ID NO: 227055 - DNA, 20 bp, Artificial sequence
  SiRNA target sequence
agtggaattctctgtgctgt

SEQ ID NO: 227056 - DNA, 20 bp, Artificial sequence
  SiRNA target sequence
gtggaattctctgtgctgta

SEQ ID NO: 227057 - DNA, 20 bp, Artificial sequence
  SiRNA target sequence
tggaattctctgtgctgtaa

SEQ ID NO: 227058 - DNA, 20 bp, Artificial sequence
  SiRNA target sequence
ggaattctctgtgctgtaat

SEQ ID NO: 227059 - DNA, 20 bp, Artificial sequence
  SiRNA target sequence
gaattctctgtgctgtaatt

SEQ ID NO: 227060 - DNA, 20 bp, Artificial sequence
  SiRNA target sequence
aattctctgtgctgtaattt

SEQ ID NO: 227061 - DNA, 20 bp, Artificial sequence
  SiRNA target sequence
attctctgtgctgtaattta

SEQ ID NO: 227062 - DNA, 20 bp, Artificial sequence
  SiRNA target sequence
ttctctgtgctgtaatttat

SEQ ID NO: 227063 - DNA, 20 bp, Artificial sequence
  SiRNA target sequence
tctctgtgctgtaatttatc

SEQ ID NO: 227064 - DNA, 20 bp, Artificial sequence
  SiRNA target sequence
ctctgtgctgtaatttatct

SEQ ID NO: 227065 - DNA, 20 bp, Artificial sequence
  SiRNA target sequence
tctgtgctgtaatttatctt

SEQ ID NO: 227066 - DNA, 20 bp, Artificial sequence
  SiRNA target sequence
ctgtgctgtaatttatcttc

SEQ ID NO: 227067 - DNA, 20 bp, Artificial sequence
  SiRNA target sequence
tgtgctgtaatttatcttct

SEQ ID NO: 227068 - DNA, 20 bp, Artificial sequence
  SiRNA target sequence
gtgctgtaatttatcttcta

SEQ ID NO: 227069 - DNA, 20 bp, Artificial sequence
  SiRNA target sequence
tgctgtaatttatcttctaa

SEQ ID NO: 227070 - DNA, 20 bp, Artificial sequence
  SiRNA target sequence
gctgtaatttatcttctaaa

SEQ ID NO: 227071 - DNA, 20 bp, Artificial sequence
  SiRNA target sequence
ctgtaatttatcttctaaaa

SEQ ID NO: 227072 - DNA, 20 bp, Artificial sequence
  SiRNA target sequence
tgtaatttatcttctaaaaa

SEQ ID NO: 227073 - DNA, 20 bp, Artificial sequence
  SiRNA target sequence
gtaatttatcttctaaaaaa

SEQ ID NO: 227074 - DNA, 20 bp, Artificial sequence
  SiRNA target sequence
taatttatcttctaaaaaaa

SEQ ID NO: 227075 - DNA, 20 bp, Artificial sequence
  SiRNA target sequence
aatttatcttctaaaaaaat

SEQ ID NO: 227076 - DNA, 20 bp, Artificial sequence
  SiRNA target sequence
atttatcttctaaaaaaata

SEQ ID NO: 227077 - DNA, 20 bp, Artificial sequence
  SiRNA target sequence
tttatcttctaaaaaaatat

SEQ ID NO: 227078 - DNA, 20 bp, Artificial sequence
  SiRNA target sequence
ttatcttctaaaaaaatatt

SEQ ID NO: 227079 - DNA, 20 bp, Artificial sequence
  SiRNA target sequence
tatcttctaaaaaaatattt

SEQ ID NO: 227080 - DNA, 20 bp, Artificial sequence
  SiRNA target sequence
atcttctaaaaaaatattta

SEQ ID NO: 227081 - DNA, 20 bp, Artificial sequence
  SiRNA target sequence
tcttctaaaaaaatatttag

SEQ ID NO: 227082 - DNA, 20 bp, Artificial sequence
  SiRNA target sequence
cttctaaaaaaatatttaga

SEQ ID NO: 227083 - DNA, 20 bp, Artificial sequence
  SiRNA target sequence
ttctaaaaaaatatttagaa

SEQ ID NO: 227084 - DNA, 20 bp, Artificial sequence
  SiRNA target sequence
tctaaaaaaatatttagaaa

SEQ ID NO: 227085 - DNA, 20 bp, Artificial sequence
  SiRNA target sequence
ctaaaaaaatatttagaaaa

SEQ ID NO: 227086 - DNA, 20 bp, Artificial sequence
  SiRNA target sequence
taaaaaaatatttagaaaat

SEQ ID NO: 227087 - DNA, 20 bp, Artificial sequence
  SiRNA target sequence
aaaaaaatatttagaaaata

SEQ ID NO: 227088 - DNA, 20 bp, Artificial sequence
  SiRNA target sequence
aaaaaatatttagaaaataa

SEQ ID NO: 227089 - DNA, 20 bp, Artificial sequence
  SiRNA target sequence
aaaaatatttagaaaataat

SEQ ID NO: 227090 - DNA, 20 bp, Artificial sequence
  SiRNA target sequence
aaaatatttagaaaataatg

SEQ ID NO: 227091 - DNA, 20 bp, Artificial sequence
  SiRNA target sequence
aaatatttagaaaataatgt

SEQ ID NO: 227092 - DNA, 20 bp, Artificial sequence
  SiRNA target sequence
aatatttagaaaataatgtt

SEQ ID NO: 227093 - DNA, 20 bp, Artificial sequence
  SiRNA target sequence
atatttagaaaataatgtta

SEQ ID NO: 227094 - DNA, 20 bp, Artificial sequence
  SiRNA target sequence
tatttagaaaataatgttac

SEQ ID NO: 227095 - DNA, 20 bp, Artificial sequence
  SiRNA target sequence
atttagaaaataatgttact

SEQ ID NO: 227096 - DNA, 20 bp, Artificial sequence
  SiRNA target sequence
tttagaaaataatgttacta

SEQ ID NO: 227097 - DNA, 20 bp, Artificial sequence
  SiRNA target sequence
ttagaaaataatgttactag

SEQ ID NO: 227098 - DNA, 20 bp, Artificial sequence
  SiRNA target sequence
tagaaaataatgttactagc

SEQ ID NO: 227099 - DNA, 20 bp, Artificial sequence
  SiRNA target sequence
agaaaataatgttactagca

SEQ ID NO: 227100 - DNA, 20 bp, Artificial sequence
  SiRNA target sequence
gaaaataatgttactagcaa

SEQ ID NO: 227101 - DNA, 20 bp, Artificial sequence
  SiRNA target sequence
aaaataatgttactagcaaa

SEQ ID NO: 227102 - DNA, 20 bp, Artificial sequence
  SiRNA target sequence
aaataatgttactagcaaac

SEQ ID NO: 227103 - DNA, 20 bp, Artificial sequence
  SiRNA target sequence
aataatgttactagcaaacc

SEQ ID NO: 227104 - DNA, 20 bp, Artificial sequence
  SiRNA target sequence
ataatgttactagcaaacca

SEQ ID NO: 227105 - DNA, 20 bp, Artificial sequence
  SiRNA target sequence
taatgttactagcaaaccaa

SEQ ID NO: 227106 - DNA, 20 bp, Artificial sequence
  SiRNA target sequence
aatgttactagcaaaccaat

SEQ ID NO: 227107 - DNA, 20 bp, Artificial sequence
  SiRNA target sequence
atgttactagcaaaccaatg

SEQ ID NO: 227108 - DNA, 20 bp, Artificial sequence
  SiRNA target sequence
tgttactagcaaaccaatgt

SEQ ID NO: 227109 - DNA, 20 bp, Artificial sequence
  SiRNA target sequence
gttactagcaaaccaatgtt

SEQ ID NO: 227110 - DNA, 20 bp, Artificial sequence
  SiRNA target sequence
ttactagcaaaccaatgttt

SEQ ID NO: 227111 - DNA, 20 bp, Artificial sequence
  SiRNA target sequence
tactagcaaaccaatgtttg

SEQ ID NO: 227112 - DNA, 20 bp, Artificial sequence
  SiRNA target sequence
actagcaaaccaatgtttgt

SEQ ID NO: 227113 - DNA, 20 bp, Artificial sequence
  SiRNA target sequence
ctagcaaaccaatgtttgtt

SEQ ID NO: 227114 - DNA, 20 bp, Artificial sequence
  SiRNA target sequence
tagcaaaccaatgtttgtta

SEQ ID NO: 227115 - DNA, 20 bp, Artificial sequence
  SiRNA target sequence
agcaaaccaatgtttgttag

SEQ ID NO: 227116 - DNA, 20 bp, Artificial sequence
  SiRNA target sequence
gcaaaccaatgtttgttaga

SEQ ID NO: 227117 - DNA, 20 bp, Artificial sequence
  SiRNA target sequence
caaaccaatgtttgttagaa

SEQ ID NO: 227118 - DNA, 20 bp, Artificial sequence
  SiRNA target sequence
aaaccaatgtttgttagaaa

SEQ ID NO: 227119 - DNA, 20 bp, Artificial sequence
  SiRNA target sequence
aaccaatgtttgttagaaag

SEQ ID NO: 227120 - DNA, 20 bp, Artificial sequence
  SiRNA target sequence
accaatgtttgttagaaaga

SEQ ID NO: 227121 - DNA, 20 bp, Artificial sequence
  SiRNA target sequence
ccaatgtttgttagaaagac

SEQ ID NO: 227122 - DNA, 20 bp, Artificial sequence
  SiRNA target sequence
caatgtttgttagaaagact

SEQ ID NO: 227123 - DNA, 20 bp, Artificial sequence
  SiRNA target sequence
aatgtttgttagaaagactt

SEQ ID NO: 227124 - DNA, 20 bp, Artificial sequence
  SiRNA target sequence
atgtttgttagaaagacttt

SEQ ID NO: 227125 - DNA, 20 bp, Artificial sequence
  SiRNA target sequence
tgtttgttagaaagactttt

SEQ ID NO: 227126 - DNA, 20 bp, Artificial sequence
  SiRNA target sequence
gtttgttagaaagactttta

SEQ ID NO: 227127 - DNA, 20 bp, Artificial sequence
  SiRNA target sequence
tttgttagaaagacttttac

SEQ ID NO: 227128 - DNA, 20 bp, Artificial sequence
  SiRNA target sequence
ttgttagaaagacttttact

SEQ ID NO: 227129 - DNA, 20 bp, Artificial sequence
  SiRNA target sequence
tgttagaaagacttttacta

SEQ ID NO: 227130 - DNA, 20 bp, Artificial sequence
  SiRNA target sequence
gttagaaagacttttactaa

SEQ ID NO: 227131 - DNA, 20 bp, Artificial sequence
  SiRNA target sequence
ttagaaagacttttactaaa

SEQ ID NO: 227132 - DNA, 20 bp, Artificial sequence
  SiRNA target sequence
tagaaagacttttactaaaa

SEQ ID NO: 227133 - DNA, 20 bp, Artificial sequence
  SiRNA target sequence
agaaagacttttactaaaaa

SEQ ID NO: 227134 - DNA, 20 bp, Artificial sequence
  SiRNA target sequence
gaaagacttttactaaaaag

SEQ ID NO: 227135 - DNA, 20 bp, Artificial sequence
  SiRNA target sequence
aaagacttttactaaaaaga

SEQ ID NO: 227136 - DNA, 20 bp, Artificial sequence
  SiRNA target sequence
aagacttttactaaaaagaa

SEQ ID NO: 227137 - DNA, 20 bp, Artificial sequence
  SiRNA target sequence
agacttttactaaaaagaag

SEQ ID NO: 227138 - DNA, 20 bp, Artificial sequence
  SiRNA target sequence
gacttttactaaaaagaaga

SEQ ID NO: 227139 - DNA, 20 bp, Artificial sequence
  SiRNA target sequence
acttttactaaaaagaagag

SEQ ID NO: 227140 - DNA, 20 bp, Artificial sequence
  SiRNA target sequence
cttttactaaaaagaagagt

SEQ ID NO: 227141 - DNA, 20 bp, Artificial sequence
  SiRNA target sequence
ttttactaaaaagaagagta

SEQ ID NO: 227142 - DNA, 20 bp, Artificial sequence
  SiRNA target sequence
tttactaaaaagaagagtaa

SEQ ID NO: 227143 - DNA, 20 bp, Artificial sequence
  SiRNA target sequence
ttactaaaaagaagagtaaa

SEQ ID NO: 227144 - DNA, 20 bp, Artificial sequence
  SiRNA target sequence
tactaaaaagaagagtaaag

SEQ ID NO: 227145 - DNA, 20 bp, Artificial sequence
  SiRNA target sequence
actaaaaagaagagtaaagt

SEQ ID NO: 227146 - DNA, 20 bp, Artificial sequence
  SiRNA target sequence
ctaaaaagaagagtaaagtg

SEQ ID NO: 227147 - DNA, 20 bp, Artificial sequence
  SiRNA target sequence
taaaaagaagagtaaagtga

SEQ ID NO: 227148 - DNA, 20 bp, Artificial sequence
  SiRNA target sequence
aaaaagaagagtaaagtgaa

SEQ ID NO: 227149 - DNA, 20 bp, Artificial sequence
  SiRNA target sequence
aaaagaagagtaaagtgaag

SEQ ID NO: 227150 - DNA, 20 bp, Artificial sequence
  SiRNA target sequence
aaagaagagtaaagtgaagg

SEQ ID NO: 227151 - DNA, 20 bp, Artificial sequence
  SiRNA target sequence
aagaagagtaaagtgaaggt

SEQ ID NO: 227152 - DNA, 20 bp, Artificial sequence
  SiRNA target sequence
agaagagtaaagtgaaggtt

SEQ ID NO: 227153 - DNA, 20 bp, Artificial sequence
  SiRNA target sequence
gaagagtaaagtgaaggttg

SEQ ID NO: 227154 - DNA, 20 bp, Artificial sequence
  SiRNA target sequence
aagagtaaagtgaaggttgg

SEQ ID NO: 227155 - DNA, 20 bp, Artificial sequence
  SiRNA target sequence
agagtaaagtgaaggttgga

SEQ ID NO: 227156 - DNA, 20 bp, Artificial sequence
  SiRNA target sequence
gagtaaagtgaaggttggat

SEQ ID NO: 227157 - DNA, 20 bp, Artificial sequence
  SiRNA target sequence
agtaaagtgaaggttggatt

SEQ ID NO: 227158 - DNA, 20 bp, Artificial sequence
  SiRNA target sequence
gtaaagtgaaggttggattt

SEQ ID NO: 227159 - DNA, 20 bp, Artificial sequence
  SiRNA target sequence
taaagtgaaggttggatttg

SEQ ID NO: 227160 - DNA, 20 bp, Artificial sequence
  SiRNA target sequence
aaagtgaaggttggatttgt

SEQ ID NO: 227161 - DNA, 20 bp, Artificial sequence
  SiRNA target sequence
aagtgaaggttggatttgtt

SEQ ID NO: 227162 - DNA, 20 bp, Artificial sequence
  SiRNA target sequence
agtgaaggttggatttgttg

SEQ ID NO: 227163 - DNA, 20 bp, Artificial sequence
  SiRNA target sequence
gtgaaggttggatttgttga

SEQ ID NO: 227164 - DNA, 20 bp, Artificial sequence
  SiRNA target sequence
tgaaggttggatttgttgat

SEQ ID NO: 227165 - DNA, 20 bp, Artificial sequence
  SiRNA target sequence
gaaggttggatttgttgatg

SEQ ID NO: 227166 - DNA, 20 bp, Artificial sequence
  SiRNA target sequence
aaggttggatttgttgatgg

SEQ ID NO: 227167 - DNA, 20 bp, Artificial sequence
  SiRNA target sequence
aggttggatttgttgatgga

SEQ ID NO: 227168 - DNA, 20 bp, Artificial sequence
  SiRNA target sequence
ggttggatttgttgatggac

SEQ ID NO: 227169 - DNA, 20 bp, Artificial sequence
  SiRNA target sequence
gttggatttgttgatggact

SEQ ID NO: 227170 - DNA, 20 bp, Artificial sequence
  SiRNA target sequence
ttggatttgttgatggactt

SEQ ID NO: 227171 - DNA, 20 bp, Artificial sequence
  SiRNA target sequence
tggatttgttgatggactta

SEQ ID NO: 227172 - DNA, 20 bp, Artificial sequence
  SiRNA target sequence
ggatttgttgatggacttat

SEQ ID NO: 227173 - DNA, 20 bp, Artificial sequence
  SiRNA target sequence
gatttgttgatggacttatt

SEQ ID NO: 227174 - DNA, 20 bp, Artificial sequence
  SiRNA target sequence
atttgttgatggacttattg

SEQ ID NO: 227175 - DNA, 20 bp, Artificial sequence
  SiRNA target sequence
tttgttgatggacttattga

SEQ ID NO: 227176 - DNA, 20 bp, Artificial sequence
  SiRNA target sequence
ttgttgatggacttattgag

SEQ ID NO: 227177 - DNA, 20 bp, Artificial sequence
  SiRNA target sequence
tgttgatggacttattgaga

SEQ ID NO: 227178 - DNA, 20 bp, Artificial sequence
  SiRNA target sequence
gttgatggacttattgagat

SEQ ID NO: 227179 - DNA, 20 bp, Artificial sequence
  SiRNA target sequence
ttgatggacttattgagatg

SEQ ID NO: 227180 - DNA, 20 bp, Artificial sequence
  SiRNA target sequence
tgatggacttattgagatga

SEQ ID NO: 227181 - DNA, 20 bp, Artificial sequence
  SiRNA target sequence
gatggacttattgagatgag

SEQ ID NO: 227182 - DNA, 20 bp, Artificial sequence
  SiRNA target sequence
atggacttattgagatgagt

SEQ ID NO: 227183 - DNA, 20 bp, Artificial sequence
  SiRNA target sequence
tggacttattgagatgagta

SEQ ID NO: 227184 - DNA, 20 bp, Artificial sequence
  SiRNA target sequence
ggacttattgagatgagtaa

SEQ ID NO: 227185 - DNA, 20 bp, Artificial sequence
  SiRNA target sequence
gacttattgagatgagtaaa

SEQ ID NO: 227186 - DNA, 20 bp, Artificial sequence
  SiRNA target sequence
acttattgagatgagtaaat

SEQ ID NO: 227187 - DNA, 20 bp, Artificial sequence
  SiRNA target sequence
cttattgagatgagtaaatc

SEQ ID NO: 227188 - DNA, 20 bp, Artificial sequence
  SiRNA target sequence
ttattgagatgagtaaatct

SEQ ID NO: 227189 - DNA, 20 bp, Artificial sequence
  SiRNA target sequence
tattgagatgagtaaatcta

SEQ ID NO: 227190 - DNA, 20 bp, Artificial sequence
  SiRNA target sequence
attgagatgagtaaatctaa

SEQ ID NO: 227191 - DNA, 20 bp, Artificial sequence
  SiRNA target sequence
ttgagatgagtaaatctaaa

SEQ ID NO: 227192 - DNA, 20 bp, Artificial sequence
  SiRNA target sequence
tgagatgagtaaatctaaac

SEQ ID NO: 227193 - DNA, 20 bp, Artificial sequence
  SiRNA target sequence
gagatgagtaaatctaaact

SEQ ID NO: 227194 - DNA, 20 bp, Artificial sequence
  SiRNA target sequence
agatgagtaaatctaaacta

SEQ ID NO: 227195 - DNA, 20 bp, Artificial sequence
  SiRNA target sequence
gatgagtaaatctaaactac

SEQ ID NO: 227196 - DNA, 20 bp, Artificial sequence
  SiRNA target sequence
atgagtaaatctaaactact

SEQ ID NO: 227197 - DNA, 20 bp, Artificial sequence
  SiRNA target sequence
tgagtaaatctaaactactg

SEQ ID NO: 227198 - DNA, 20 bp, Artificial sequence
  SiRNA target sequence
gagtaaatctaaactactgt

SEQ ID NO: 227199 - DNA, 20 bp, Artificial sequence
  SiRNA target sequence
agtaaatctaaactactgtt

SEQ ID NO: 227200 - DNA, 20 bp, Artificial sequence
  SiRNA target sequence
gtaaatctaaactactgttg

SEQ ID NO: 227201 - DNA, 20 bp, Artificial sequence
  SiRNA target sequence
taaatctaaactactgttga

SEQ ID NO: 227202 - DNA, 20 bp, Artificial sequence
  SiRNA target sequence
aaatctaaactactgttgaa

SEQ ID NO: 227203 - DNA, 20 bp, Artificial sequence
  SiRNA target sequence
aatctaaactactgttgaat

SEQ ID NO: 227204 - DNA, 20 bp, Artificial sequence
  SiRNA target sequence
atctaaactactgttgaata

SEQ ID NO: 227205 - DNA, 20 bp, Artificial sequence
  SiRNA target sequence
tctaaactactgttgaatat

SEQ ID NO: 227206 - DNA, 20 bp, Artificial sequence
  SiRNA target sequence
ctaaactactgttgaatatg

SEQ ID NO: 227207 - DNA, 20 bp, Artificial sequence
  SiRNA target sequence
taaactactgttgaatatgt

SEQ ID NO: 227208 - DNA, 20 bp, Artificial sequence
  SiRNA target sequence
aaactactgttgaatatgtc

SEQ ID NO: 227209 - DNA, 20 bp, Artificial sequence
  SiRNA target sequence
aactactgttgaatatgtca

SEQ ID NO: 227210 - DNA, 20 bp, Artificial sequence
  SiRNA target sequence
actactgttgaatatgtcat

SEQ ID NO: 227211 - DNA, 20 bp, Artificial sequence
  SiRNA target sequence
ctactgttgaatatgtcatt

SEQ ID NO: 227212 - DNA, 20 bp, Artificial sequence
  SiRNA target sequence
tactgttgaatatgtcatta

SEQ ID NO: 227213 - DNA, 20 bp, Artificial sequence
  SiRNA target sequence
actgttgaatatgtcattag

SEQ ID NO: 227214 - DNA, 20 bp, Artificial sequence
  SiRNA target sequence
ctgttgaatatgtcattagt

SEQ ID NO: 227215 - DNA, 20 bp, Artificial sequence
  SiRNA target sequence
tgttgaatatgtcattagtc

SEQ ID NO: 227216 - DNA, 20 bp, Artificial sequence
  SiRNA target sequence
gttgaatatgtcattagtcg

SEQ ID NO: 227217 - DNA, 20 bp, Artificial sequence
  SiRNA target sequence
ttgaatatgtcattagtcgt

SEQ ID NO: 227218 - DNA, 20 bp, Artificial sequence
  SiRNA target sequence
tgaatatgtcattagtcgta

SEQ ID NO: 227219 - DNA, 20 bp, Artificial sequence
  SiRNA target sequence
gaatatgtcattagtcgtat

SEQ ID NO: 227220 - DNA, 20 bp, Artificial sequence
  SiRNA target sequence
aatatgtcattagtcgtatt

SEQ ID NO: 227221 - DNA, 20 bp, Artificial sequence
  SiRNA target sequence
atatgtcattagtcgtatta

SEQ ID NO: 227222 - DNA, 20 bp, Artificial sequence
  SiRNA target sequence
tatgtcattagtcgtattat

SEQ ID NO: 227223 - DNA, 20 bp, Artificial sequence
  SiRNA target sequence
atgtcattagtcgtattatt

SEQ ID NO: 227224 - DNA, 20 bp, Artificial sequence
  SiRNA target sequence
tgtcattagtcgtattattt

SEQ ID NO: 227225 - DNA, 20 bp, Artificial sequence
  SiRNA target sequence
gtcattagtcgtattatttt

SEQ ID NO: 227226 - DNA, 20 bp, Artificial sequence
  SiRNA target sequence
tcattagtcgtattatttta

SEQ ID NO: 227227 - DNA, 20 bp, Artificial sequence
  SiRNA target sequence
cattagtcgtattattttat

SEQ ID NO: 227228 - DNA, 20 bp, Artificial sequence
  SiRNA target sequence
attagtcgtattattttatg

SEQ ID NO: 227229 - DNA, 20 bp, Artificial sequence
  SiRNA target sequence
ttagtcgtattattttatgc

SEQ ID NO: 227230 - DNA, 20 bp, Artificial sequence
  SiRNA target sequence
tagtcgtattattttatgct

SEQ ID NO: 227231 - DNA, 20 bp, Artificial sequence
  SiRNA target sequence
agtcgtattattttatgctg

SEQ ID NO: 227232 - DNA, 20 bp, Artificial sequence
  SiRNA target sequence
gtcgtattattttatgctgt

SEQ ID NO: 227233 - DNA, 20 bp, Artificial sequence
  SiRNA target sequence
tcgtattattttatgctgtt

SEQ ID NO: 227234 - DNA, 20 bp, Artificial sequence
  SiRNA target sequence
cgtattattttatgctgttt

SEQ ID NO: 227235 - DNA, 20 bp, Artificial sequence
  SiRNA target sequence
gtattattttatgctgtttc

SEQ ID NO: 227236 - DNA, 20 bp, Artificial sequence
  SiRNA target sequence
tattattttatgctgtttct

SEQ ID NO: 227237 - DNA, 20 bp, Artificial sequence
  SiRNA target sequence
attattttatgctgtttcta

SEQ ID NO: 227238 - DNA, 20 bp, Artificial sequence
  SiRNA target sequence
ttattttatgctgtttctac

SEQ ID NO: 227239 - DNA, 20 bp, Artificial sequence
  SiRNA target sequence
tattttatgctgtttctacg

SEQ ID NO: 227240 - DNA, 20 bp, Artificial sequence
  SiRNA target sequence
attttatgctgtttctacga

SEQ ID NO: 227241 - DNA, 20 bp, Artificial sequence
  SiRNA target sequence
ttttatgctgtttctacgaa

SEQ ID NO: 227242 - DNA, 20 bp, Artificial sequence
  SiRNA target sequence
tttatgctgtttctacgaat

SEQ ID NO: 227243 - DNA, 20 bp, Artificial sequence
  SiRNA target sequence
ttatgctgtttctacgaata

SEQ ID NO: 227244 - DNA, 20 bp, Artificial sequence
  SiRNA target sequence
tatgctgtttctacgaatat

SEQ ID NO: 227245 - DNA, 20 bp, Artificial sequence
  SiRNA target sequence
atgctgtttctacgaatatt

SEQ ID NO: 227246 - DNA, 20 bp, Artificial sequence
  SiRNA target sequence
tgctgtttctacgaatatta

SEQ ID NO: 227247 - DNA, 20 bp, Artificial sequence
  SiRNA target sequence
gctgtttctacgaatattat

SEQ ID NO: 227248 - DNA, 20 bp, Artificial sequence
  SiRNA target sequence
ctgtttctacgaatattatt

SEQ ID NO: 227249 - DNA, 20 bp, Artificial sequence
  SiRNA target sequence
tgtttctacgaatattattg

SEQ ID NO: 227250 - DNA, 20 bp, Artificial sequence
  SiRNA target sequence
gtttctacgaatattattga

SEQ ID NO: 227251 - DNA, 20 bp, Artificial sequence
  SiRNA target sequence
tttctacgaatattattgag

SEQ ID NO: 227252 - DNA, 20 bp, Artificial sequence
  SiRNA target sequence
ttctacgaatattattgagt

SEQ ID NO: 227253 - DNA, 20 bp, Artificial sequence
  SiRNA target sequence
tctacgaatattattgagtc

SEQ ID NO: 227254 - DNA, 20 bp, Artificial sequence
  SiRNA target sequence
ctacgaatattattgagtca

SEQ ID NO: 227255 - DNA, 20 bp, Artificial sequence
  SiRNA target sequence
tacgaatattattgagtcag

SEQ ID NO: 227256 - DNA, 20 bp, Artificial sequence
  SiRNA target sequence
acgaatattattgagtcagc

SEQ ID NO: 227257 - DNA, 20 bp, Artificial sequence
  SiRNA target sequence
cgaatattattgagtcagct

SEQ ID NO: 227258 - DNA, 20 bp, Artificial sequence
  SiRNA target sequence
gaatattattgagtcagctt

SEQ ID NO: 227259 - DNA, 20 bp, Artificial sequence
  SiRNA target sequence
aatattattgagtcagctta

SEQ ID NO: 227260 - DNA, 20 bp, Artificial sequence
  SiRNA target sequence
atattattgagtcagcttat

SEQ ID NO: 227261 - DNA, 20 bp, Artificial sequence
  SiRNA target sequence
tattattgagtcagcttata

SEQ ID NO: 227262 - DNA, 20 bp, Artificial sequence
  SiRNA target sequence
attattgagtcagcttataa

SEQ ID NO: 227263 - DNA, 20 bp, Artificial sequence
  SiRNA target sequence
ttattgagtcagcttataaa

SEQ ID NO: 227264 - DNA, 20 bp, Artificial sequence
  SiRNA target sequence
tattgagtcagcttataaat

SEQ ID NO: 227265 - DNA, 20 bp, Artificial sequence
  SiRNA target sequence
attgagtcagcttataaatc

SEQ ID NO: 227266 - DNA, 20 bp, Artificial sequence
  SiRNA target sequence
ttgagtcagcttataaatct

SEQ ID NO: 227267 - DNA, 20 bp, Artificial sequence
  SiRNA target sequence
tgagtcagcttataaatctg

SEQ ID NO: 227268 - DNA, 20 bp, Artificial sequence
  SiRNA target sequence
gagtcagcttataaatctgc

SEQ ID NO: 227269 - DNA, 20 bp, Artificial sequence
  SiRNA target sequence
agtcagcttataaatctgct

SEQ ID NO: 227270 - DNA, 20 bp, Artificial sequence
  SiRNA target sequence
gtcagcttataaatctgctt

SEQ ID NO: 227271 - DNA, 20 bp, Artificial sequence
  SiRNA target sequence
tcagcttataaatctgcttt

SEQ ID NO: 227272 - DNA, 20 bp, Artificial sequence
  SiRNA target sequence
cagcttataaatctgcttta

SEQ ID NO: 227273 - DNA, 20 bp, Artificial sequence
  SiRNA target sequence
agcttataaatctgctttag

SEQ ID NO: 227274 - DNA, 20 bp, Artificial sequence
  SiRNA target sequence
gcttataaatctgctttagc

SEQ ID NO: 227275 - DNA, 20 bp, Artificial sequence
  SiRNA target sequence
cttataaatctgctttagct

SEQ ID NO: 227276 - DNA, 20 bp, Artificial sequence
  SiRNA target sequence
ttataaatctgctttagctg

SEQ ID NO: 227277 - DNA, 20 bp, Artificial sequence
  SiRNA target sequence
tataaatctgctttagctgt

SEQ ID NO: 227278 - DNA, 20 bp, Artificial sequence
  SiRNA target sequence
ataaatctgctttagctgtc

SEQ ID NO: 227279 - DNA, 20 bp, Artificial sequence
  SiRNA target sequence
taaatctgctttagctgtcg

SEQ ID NO: 227280 - DNA, 20 bp, Artificial sequence
  SiRNA target sequence
aaatctgctttagctgtcgg

SEQ ID NO: 227281 - DNA, 20 bp, Artificial sequence
  SiRNA target sequence
aatctgctttagctgtcggt

SEQ ID NO: 227282 - DNA, 20 bp, Artificial sequence
  SiRNA target sequence
atctgctttagctgtcggtg

SEQ ID NO: 227283 - DNA, 20 bp, Artificial sequence
  SiRNA target sequence
tctgctttagctgtcggtgc

SEQ ID NO: 227284 - DNA, 20 bp, Artificial sequence
  SiRNA target sequence
ctgctttagctgtcggtgct

SEQ ID NO: 227285 - DNA, 20 bp, Artificial sequence
  SiRNA target sequence
tgctttagctgtcggtgcta

SEQ ID NO: 227286 - DNA, 20 bp, Artificial sequence
  SiRNA target sequence
gctttagctgtcggtgctaa

SEQ ID NO: 227287 - DNA, 20 bp, Artificial sequence
  SiRNA target sequence
ctttagctgtcggtgctaat

SEQ ID NO: 227288 - DNA, 20 bp, Artificial sequence
  SiRNA target sequence
tttagctgtcggtgctaatg

SEQ ID NO: 227289 - DNA, 20 bp, Artificial sequence
  SiRNA target sequence
ttagctgtcggtgctaatga

SEQ ID NO: 227290 - DNA, 20 bp, Artificial sequence
  SiRNA target sequence
tagctgtcggtgctaatgaa

SEQ ID NO: 227291 - DNA, 20 bp, Artificial sequence
  SiRNA target sequence
agctgtcggtgctaatgaaa

SEQ ID NO: 227292 - DNA, 20 bp, Artificial sequence
  SiRNA target sequence
gctgtcggtgctaatgaaac

SEQ ID NO: 227293 - DNA, 20 bp, Artificial sequence
  SiRNA target sequence
ctgtcggtgctaatgaaact

SEQ ID NO: 227294 - DNA, 20 bp, Artificial sequence
  SiRNA target sequence
tgtcggtgctaatgaaactg

SEQ ID NO: 227295 - DNA, 20 bp, Artificial sequence
  SiRNA target sequence
gtcggtgctaatgaaactgg

SEQ ID NO: 227296 - DNA, 20 bp, Artificial sequence
  SiRNA target sequence
tcggtgctaatgaaactggt

SEQ ID NO: 227297 - DNA, 20 bp, Artificial sequence
  SiRNA target sequence
cggtgctaatgaaactggtg

SEQ ID NO: 227298 - DNA, 20 bp, Artificial sequence
  SiRNA target sequence
ggtgctaatgaaactggtga

SEQ ID NO: 227299 - DNA, 20 bp, Artificial sequence
  SiRNA target sequence
gtgctaatgaaactggtgag

SEQ ID NO: 227300 - DNA, 20 bp, Artificial sequence
  SiRNA target sequence
tgctaatgaaactggtgagg

SEQ ID NO: 227301 - DNA, 20 bp, Artificial sequence
  SiRNA target sequence
gctaatgaaactggtgaggc

SEQ ID NO: 227302 - DNA, 20 bp, Artificial sequence
  SiRNA target sequence
ctaatgaaactggtgaggca

SEQ ID NO: 227303 - DNA, 20 bp, Artificial sequence
  SiRNA target sequence
taatgaaactggtgaggcaa

SEQ ID NO: 227304 - DNA, 20 bp, Artificial sequence
  SiRNA target sequence
aatgaaactggtgaggcaaa

SEQ ID NO: 227305 - DNA, 20 bp, Artificial sequence
  SiRNA target sequence
atgaaactggtgaggcaaaa

SEQ ID NO: 227306 - DNA, 20 bp, Artificial sequence
  SiRNA target sequence
tgaaactggtgaggcaaaat

SEQ ID NO: 227307 - DNA, 20 bp, Artificial sequence
  SiRNA target sequence
gaaactggtgaggcaaaatc

SEQ ID NO: 227308 - DNA, 20 bp, Artificial sequence
  SiRNA target sequence
aaactggtgaggcaaaatct

SEQ ID NO: 227309 - DNA, 20 bp, Artificial sequence
  SiRNA target sequence
aactggtgaggcaaaatcta

SEQ ID NO: 227310 - DNA, 20 bp, Artificial sequence
  SiRNA target sequence
actggtgaggcaaaatctac

SEQ ID NO: 227311 - DNA, 20 bp, Artificial sequence
  SiRNA target sequence
ctggtgaggcaaaatctacc

SEQ ID NO: 227312 - DNA, 20 bp, Artificial sequence
  SiRNA target sequence
tggtgaggcaaaatctacct

SEQ ID NO: 227313 - DNA, 20 bp, Artificial sequence
  SiRNA target sequence
ggtgaggcaaaatctaccta

SEQ ID NO: 227314 - DNA, 20 bp, Artificial sequence
  SiRNA target sequence
gtgaggcaaaatctacctat

SEQ ID NO: 227315 - DNA, 20 bp, Artificial sequence
  SiRNA target sequence
tgaggcaaaatctacctatg

SEQ ID NO: 227316 - DNA, 20 bp, Artificial sequence
  SiRNA target sequence
gaggcaaaatctacctatgc

SEQ ID NO: 227317 - DNA, 20 bp, Artificial sequence
  SiRNA target sequence
aggcaaaatctacctatgct

SEQ ID NO: 227318 - DNA, 20 bp, Artificial sequence
  SiRNA target sequence
ggcaaaatctacctatgctt

SEQ ID NO: 227319 - DNA, 20 bp, Artificial sequence
  SiRNA target sequence
gcaaaatctacctatgcttc

SEQ ID NO: 227320 - DNA, 20 bp, Artificial sequence
  SiRNA target sequence
caaaatctacctatgcttca

SEQ ID NO: 227321 - DNA, 20 bp, Artificial sequence
  SiRNA target sequence
aaaatctacctatgcttcaa

SEQ ID NO: 227322 - DNA, 20 bp, Artificial sequence
  SiRNA target sequence
aaatctacctatgcttcaat

SEQ ID NO: 227323 - DNA, 20 bp, Artificial sequence
  SiRNA target sequence
aatctacctatgcttcaatt

SEQ ID NO: 227324 - DNA, 20 bp, Artificial sequence
  SiRNA target sequence
atctacctatgcttcaattt

SEQ ID NO: 227325 - DNA, 20 bp, Artificial sequence
  SiRNA target sequence
tctacctatgcttcaattta

SEQ ID NO: 227326 - DNA, 20 bp, Artificial sequence
  SiRNA target sequence
ctacctatgcttcaatttat

SEQ ID NO: 227327 - DNA, 20 bp, Artificial sequence
  SiRNA target sequence
tacctatgcttcaatttata

SEQ ID NO: 227328 - DNA, 20 bp, Artificial sequence
  SiRNA target sequence
acctatgcttcaatttatac

SEQ ID NO: 227329 - DNA, 20 bp, Artificial sequence
  SiRNA target sequence
cctatgcttcaatttataca

SEQ ID NO: 227330 - DNA, 20 bp, Artificial sequence
  SiRNA target sequence
ctatgcttcaatttatacat

SEQ ID NO: 227331 - DNA, 20 bp, Artificial sequence
  SiRNA target sequence
tatgcttcaatttatacatc

SEQ ID NO: 227332 - DNA, 20 bp, Artificial sequence
  SiRNA target sequence
atgcttcaatttatacatca

SEQ ID NO: 227333 - DNA, 20 bp, Artificial sequence
  SiRNA target sequence
tgcttcaatttatacatcaa

SEQ ID NO: 227334 - DNA, 20 bp, Artificial sequence
  SiRNA target sequence
gcttcaatttatacatcaat

SEQ ID NO: 227335 - DNA, 20 bp, Artificial sequence
  SiRNA target sequence
cttcaatttatacatcaatt

SEQ ID NO: 227336 - DNA, 20 bp, Artificial sequence
  SiRNA target sequence
ttcaatttatacatcaattg

SEQ ID NO: 227337 - DNA, 20 bp, Artificial sequence
  SiRNA target sequence
tcaatttatacatcaattga

SEQ ID NO: 227338 - DNA, 20 bp, Artificial sequence
  SiRNA target sequence
caatttatacatcaattgaa

SEQ ID NO: 227339 - DNA, 20 bp, Artificial sequence
  SiRNA target sequence
aatttatacatcaattgaac

SEQ ID NO: 227340 - DNA, 20 bp, Artificial sequence
  SiRNA target sequence
atttatacatcaattgaaca

SEQ ID NO: 227341 - DNA, 20 bp, Artificial sequence
  SiRNA target sequence
tttatacatcaattgaacaa

SEQ ID NO: 227342 - DNA, 20 bp, Artificial sequence
  SiRNA target sequence
ttatacatcaattgaacaat

SEQ ID NO: 227343 - DNA, 20 bp, Artificial sequence
  SiRNA target sequence
tatacatcaattgaacaatc

SEQ ID NO: 227344 - DNA, 20 bp, Artificial sequence
  SiRNA target sequence
atacatcaattgaacaatct

SEQ ID NO: 227345 - DNA, 20 bp, Artificial sequence
  SiRNA target sequence
tacatcaattgaacaatctg

SEQ ID NO: 227346 - DNA, 20 bp, Artificial sequence
  SiRNA target sequence
acatcaattgaacaatctgg

SEQ ID NO: 227347 - DNA, 20 bp, Artificial sequence
  SiRNA target sequence
catcaattgaacaatctgga

SEQ ID NO: 227348 - DNA, 20 bp, Artificial sequence
  SiRNA target sequence
atcaattgaacaatctggag

SEQ ID NO: 227349 - DNA, 20 bp, Artificial sequence
  SiRNA target sequence
tcaattgaacaatctggagt

SEQ ID NO: 227350 - DNA, 20 bp, Artificial sequence
  SiRNA target sequence
caattgaacaatctggagtt

SEQ ID NO: 227351 - DNA, 20 bp, Artificial sequence
  SiRNA target sequence
aattgaacaatctggagttg

SEQ ID NO: 227352 - DNA, 20 bp, Artificial sequence
  SiRNA target sequence
attgaacaatctggagttgc

SEQ ID NO: 227353 - DNA, 20 bp, Artificial sequence
  SiRNA target sequence
ttgaacaatctggagttgct

SEQ ID NO: 227354 - DNA, 20 bp, Artificial sequence
  SiRNA target sequence
tgaacaatctggagttgctg

SEQ ID NO: 227355 - DNA, 20 bp, Artificial sequence
  SiRNA target sequence
gaacaatctggagttgctgt

SEQ ID NO: 227356 - DNA, 20 bp, Artificial sequence
  SiRNA target sequence
aacaatctggagttgctgtt

SEQ ID NO: 227357 - DNA, 20 bp, Artificial sequence
  SiRNA target sequence
acaatctggagttgctgtta

SEQ ID NO: 227358 - DNA, 20 bp, Artificial sequence
  SiRNA target sequence
caatctggagttgctgttat

SEQ ID NO: 227359 - DNA, 20 bp, Artificial sequence
  SiRNA target sequence
aatctggagttgctgttatt

SEQ ID NO: 227360 - DNA, 20 bp, Artificial sequence
  SiRNA target sequence
atctggagttgctgttattg

SEQ ID NO: 227361 - DNA, 20 bp, Artificial sequence
  SiRNA target sequence
tctggagttgctgttattgt

SEQ ID NO: 227362 - DNA, 20 bp, Artificial sequence
  SiRNA target sequence
ctggagttgctgttattgtc

SEQ ID NO: 227363 - DNA, 20 bp, Artificial sequence
  SiRNA target sequence
tggagttgctgttattgtca

SEQ ID NO: 227364 - DNA, 20 bp, Artificial sequence
  SiRNA target sequence
ggagttgctgttattgtcat

SEQ ID NO: 227365 - DNA, 20 bp, Artificial sequence
  SiRNA target sequence
gagttgctgttattgtcatg

SEQ ID NO: 227366 - DNA, 20 bp, Artificial sequence
  SiRNA target sequence
agttgctgttattgtcatga

SEQ ID NO: 227367 - DNA, 20 bp, Artificial sequence
  SiRNA target sequence
gttgctgttattgtcatgat

SEQ ID NO: 227368 - DNA, 20 bp, Artificial sequence
  SiRNA target sequence
ttgctgttattgtcatgatt

SEQ ID NO: 227369 - DNA, 20 bp, Artificial sequence
  SiRNA target sequence
tgctgttattgtcatgattt

SEQ ID NO: 227370 - DNA, 20 bp, Artificial sequence
  SiRNA target sequence
gctgttattgtcatgatttt

SEQ ID NO: 227371 - DNA, 20 bp, Artificial sequence
  SiRNA target sequence
ctgttattgtcatgattttg

SEQ ID NO: 227372 - DNA, 20 bp, Artificial sequence
  SiRNA target sequence
tgttattgtcatgattttgc

SEQ ID NO: 227373 - DNA, 20 bp, Artificial sequence
  SiRNA target sequence
gttattgtcatgattttgct

SEQ ID NO: 227374 - DNA, 20 bp, Artificial sequence
  SiRNA target sequence
ttattgtcatgattttgcta

SEQ ID NO: 227375 - DNA, 20 bp, Artificial sequence
  SiRNA target sequence
tattgtcatgattttgctac

SEQ ID NO: 227376 - DNA, 20 bp, Artificial sequence
  SiRNA target sequence
attgtcatgattttgctact

SEQ ID NO: 227377 - DNA, 20 bp, Artificial sequence
  SiRNA target sequence
ttgtcatgattttgctactt

SEQ ID NO: 227378 - DNA, 20 bp, Artificial sequence
  SiRNA target sequence
tgtcatgattttgctactta

SEQ ID NO: 227379 - DNA, 20 bp, Artificial sequence
  SiRNA target sequence
gtcatgattttgctacttac

SEQ ID NO: 227380 - DNA, 20 bp, Artificial sequence
  SiRNA target sequence
tcatgattttgctacttacc

SEQ ID NO: 227381 - DNA, 20 bp, Artificial sequence
  SiRNA target sequence
catgattttgctacttaccc

SEQ ID NO: 227382 - DNA, 20 bp, Artificial sequence
  SiRNA target sequence
atgattttgctacttacccc

SEQ ID NO: 227383 - DNA, 20 bp, Artificial sequence
  SiRNA target sequence
tgattttgctacttacccct

SEQ ID NO: 227384 - DNA, 20 bp, Artificial sequence
  SiRNA target sequence
gattttgctacttacccctt

SEQ ID NO: 227385 - DNA, 20 bp, Artificial sequence
  SiRNA target sequence
attttgctacttaccccttt

SEQ ID NO: 227386 - DNA, 20 bp, Artificial sequence
  SiRNA target sequence
ttttgctacttacccctttt

SEQ ID NO: 227387 - DNA, 20 bp, Artificial sequence
  SiRNA target sequence
tttgctacttaccccttttc

SEQ ID NO: 227388 - DNA, 20 bp, Artificial sequence
  SiRNA target sequence
ttgctacttaccccttttcc

SEQ ID NO: 227389 - DNA, 20 bp, Artificial sequence
  SiRNA target sequence
tgctacttaccccttttcca

SEQ ID NO: 227390 - DNA, 20 bp, Artificial sequence
  SiRNA target sequence
gctacttaccccttttccaa

SEQ ID NO: 227391 - DNA, 20 bp, Artificial sequence
  SiRNA target sequence
ctacttaccccttttccaag

SEQ ID NO: 227392 - DNA, 20 bp, Artificial sequence
  SiRNA target sequence
tacttaccccttttccaagg

SEQ ID NO: 227393 - DNA, 20 bp, Artificial sequence
  SiRNA target sequence
acttaccccttttccaaggc

SEQ ID NO: 227394 - DNA, 20 bp, Artificial sequence
  SiRNA target sequence
cttaccccttttccaaggct

SEQ ID NO: 227395 - DNA, 20 bp, Artificial sequence
  SiRNA target sequence
ttaccccttttccaaggctt

SEQ ID NO: 227396 - DNA, 20 bp, Artificial sequence
  SiRNA target sequence
taccccttttccaaggctta

SEQ ID NO: 227397 - DNA, 20 bp, Artificial sequence
  SiRNA target sequence
accccttttccaaggcttat

SEQ ID NO: 227398 - DNA, 20 bp, Artificial sequence
  SiRNA target sequence
ccccttttccaaggcttatt

SEQ ID NO: 227399 - DNA, 20 bp, Artificial sequence
  SiRNA target sequence
cccttttccaaggcttatta

SEQ ID NO: 227400 - DNA, 20 bp, Artificial sequence
  SiRNA target sequence
ccttttccaaggcttattaa

SEQ ID NO: 227401 - DNA, 20 bp, Artificial sequence
  SiRNA target sequence
cttttccaaggcttattaaa

SEQ ID NO: 227402 - DNA, 20 bp, Artificial sequence
  SiRNA target sequence
ttttccaaggcttattaaaa

SEQ ID NO: 227403 - DNA, 20 bp, Artificial sequence
  SiRNA target sequence
tttccaaggcttattaaaac

SEQ ID NO: 227404 - DNA, 20 bp, Artificial sequence
  SiRNA target sequence
ttccaaggcttattaaaaca

SEQ ID NO: 227405 - DNA, 20 bp, Artificial sequence
  SiRNA target sequence
tccaaggcttattaaaacaa

SEQ ID NO: 227406 - DNA, 20 bp, Artificial sequence
  SiRNA target sequence
ccaaggcttattaaaacaaa

SEQ ID NO: 227407 - DNA, 20 bp, Artificial sequence
  SiRNA target sequence
caaggcttattaaaacaaaa

SEQ ID NO: 227408 - DNA, 20 bp, Artificial sequence
  SiRNA target sequence
aaggcttattaaaacaaaag

SEQ ID NO: 227409 - DNA, 20 bp, Artificial sequence
  SiRNA target sequence
aggcttattaaaacaaaagg

SEQ ID NO: 227410 - DNA, 20 bp, Artificial sequence
  SiRNA target sequence
ggcttattaaaacaaaagga

SEQ ID NO: 227411 - DNA, 20 bp, Artificial sequence
  SiRNA target sequence
gcttattaaaacaaaaggat

SEQ ID NO: 227412 - DNA, 20 bp, Artificial sequence
  SiRNA target sequence
cttattaaaacaaaaggatg

SEQ ID NO: 227413 - DNA, 20 bp, Artificial sequence
  SiRNA target sequence
ttattaaaacaaaaggatgg

SEQ ID NO: 227414 - DNA, 20 bp, Artificial sequence
  SiRNA target sequence
tattaaaacaaaaggatgga

SEQ ID NO: 227415 - DNA, 20 bp, Artificial sequence
  SiRNA target sequence
attaaaacaaaaggatggat

SEQ ID NO: 227416 - DNA, 20 bp, Artificial sequence
  SiRNA target sequence
ttaaaacaaaaggatggatt

SEQ ID NO: 227417 - DNA, 20 bp, Artificial sequence
  SiRNA target sequence
taaaacaaaaggatggatta

SEQ ID NO: 227418 - DNA, 20 bp, Artificial sequence
  SiRNA target sequence
aaaacaaaaggatggattac

SEQ ID NO: 227419 - DNA, 20 bp, Artificial sequence
  SiRNA target sequence
aaacaaaaggatggattaca

SEQ ID NO: 227420 - DNA, 20 bp, Artificial sequence
  SiRNA target sequence
aacaaaaggatggattacaa

SEQ ID NO: 227421 - DNA, 20 bp, Artificial sequence
  SiRNA target sequence
acaaaaggatggattacaat

SEQ ID NO: 227422 - DNA, 20 bp, Artificial sequence
  SiRNA target sequence
caaaaggatggattacaata

SEQ ID NO: 227423 - DNA, 20 bp, Artificial sequence
  SiRNA target sequence
aaaaggatggattacaatag

SEQ ID NO: 227424 - DNA, 20 bp, Artificial sequence
  SiRNA target sequence
aaaggatggattacaatagc

SEQ ID NO: 227425 - DNA, 20 bp, Artificial sequence
  SiRNA target sequence
aaggatggattacaatagcc

SEQ ID NO: 227426 - DNA, 20 bp, Artificial sequence
  SiRNA target sequence
aggatggattacaatagcca

SEQ ID NO: 227427 - DNA, 20 bp, Artificial sequence
  SiRNA target sequence
ggatggattacaatagccat

SEQ ID NO: 227428 - DNA, 20 bp, Artificial sequence
  SiRNA target sequence
gatggattacaatagccatt

SEQ ID NO: 227429 - DNA, 20 bp, Artificial sequence
  SiRNA target sequence
atggattacaatagccattc

SEQ ID NO: 227430 - DNA, 20 bp, Artificial sequence
  SiRNA target sequence
tggattacaatagccattct

SEQ ID NO: 227431 - DNA, 20 bp, Artificial sequence
  SiRNA target sequence
ggattacaatagccattcta

SEQ ID NO: 227432 - DNA, 20 bp, Artificial sequence
  SiRNA target sequence
gattacaatagccattctat

SEQ ID NO: 227433 - DNA, 20 bp, Artificial sequence
  SiRNA target sequence
attacaatagccattctatg

SEQ ID NO: 227434 - DNA, 20 bp, Artificial sequence
  SiRNA target sequence
ttacaatagccattctatgt

SEQ ID NO: 227435 - DNA, 20 bp, Artificial sequence
  SiRNA target sequence
tacaatagccattctatgtc

SEQ ID NO: 227436 - DNA, 20 bp, Artificial sequence
  SiRNA target sequence
acaatagccattctatgtcc

SEQ ID NO: 227437 - DNA, 20 bp, Artificial sequence
  SiRNA target sequence
caatagccattctatgtcct

SEQ ID NO: 227438 - DNA, 20 bp, Artificial sequence
  SiRNA target sequence
aatagccattctatgtccta

SEQ ID NO: 227439 - DNA, 20 bp, Artificial sequence
  SiRNA target sequence
atagccattctatgtcctat

SEQ ID NO: 227440 - DNA, 20 bp, Artificial sequence
  SiRNA target sequence
tagccattctatgtcctatt

SEQ ID NO: 227441 - DNA, 20 bp, Artificial sequence
  SiRNA target sequence
agccattctatgtcctatta

SEQ ID NO: 227442 - DNA, 20 bp, Artificial sequence
  SiRNA target sequence
gccattctatgtcctattat

SEQ ID NO: 227443 - DNA, 20 bp, Artificial sequence
  SiRNA target sequence
ccattctatgtcctattatt

SEQ ID NO: 227444 - DNA, 20 bp, Artificial sequence
  SiRNA target sequence
cattctatgtcctattatta

SEQ ID NO: 227445 - DNA, 20 bp, Artificial sequence
  SiRNA target sequence
attctatgtcctattattac

SEQ ID NO: 227446 - DNA, 20 bp, Artificial sequence
  SiRNA target sequence
ttctatgtcctattattact

SEQ ID NO: 227447 - DNA, 20 bp, Artificial sequence
  SiRNA target sequence
tctatgtcctattattactt

SEQ ID NO: 227448 - DNA, 20 bp, Artificial sequence
  SiRNA target sequence
ctatgtcctattattacttt

SEQ ID NO: 227449 - DNA, 20 bp, Artificial sequence
  SiRNA target sequence
tatgtcctattattactttt

SEQ ID NO: 227450 - DNA, 20 bp, Artificial sequence
  SiRNA target sequence
atgtcctattattacttttt

SEQ ID NO: 227451 - DNA, 20 bp, Artificial sequence
  SiRNA target sequence
tgtcctattattactttttt

SEQ ID NO: 227452 - DNA, 20 bp, Artificial sequence
  SiRNA target sequence
gtcctattattacttttttt

SEQ ID NO: 227453 - DNA, 20 bp, Artificial sequence
  SiRNA target sequence
tcctattattactttttttt

SEQ ID NO: 227454 - DNA, 20 bp, Artificial sequence
  SiRNA target sequence
cctattattacttttttttc

SEQ ID NO: 227455 - DNA, 20 bp, Artificial sequence
  SiRNA target sequence
ctattattacttttttttct

SEQ ID NO: 227456 - DNA, 20 bp, Artificial sequence
  SiRNA target sequence
tattattacttttttttctg

SEQ ID NO: 227457 - DNA, 20 bp, Artificial sequence
  SiRNA target sequence
attattacttttttttctgc

SEQ ID NO: 227458 - DNA, 20 bp, Artificial sequence
  SiRNA target sequence
ttattacttttttttctgct

SEQ ID NO: 227459 - DNA, 20 bp, Artificial sequence
  SiRNA target sequence
tattacttttttttctgctt

SEQ ID NO: 227460 - DNA, 20 bp, Artificial sequence
  SiRNA target sequence
attacttttttttctgcttt

SEQ ID NO: 227461 - DNA, 20 bp, Artificial sequence
  SiRNA target sequence
ttacttttttttctgctttt

SEQ ID NO: 227462 - DNA, 20 bp, Artificial sequence
  SiRNA target sequence
tacttttttttctgcttttg

SEQ ID NO: 227463 - DNA, 20 bp, Artificial sequence
  SiRNA target sequence
acttttttttctgcttttgg

SEQ ID NO: 227464 - DNA, 20 bp, Artificial sequence
  SiRNA target sequence
cttttttttctgcttttggt

SEQ ID NO: 227465 - DNA, 20 bp, Artificial sequence
  SiRNA target sequence
ttttttttctgcttttggta

SEQ ID NO: 227466 - DNA, 20 bp, Artificial sequence
  SiRNA target sequence
tttttttctgcttttggtac

SEQ ID NO: 227467 - DNA, 20 bp, Artificial sequence
  SiRNA target sequence
ttttttctgcttttggtact

SEQ ID NO: 227468 - DNA, 20 bp, Artificial sequence
  SiRNA target sequence
tttttctgcttttggtactt

SEQ ID NO: 227469 - DNA, 20 bp, Artificial sequence
  SiRNA target sequence
ttttctgcttttggtacttt

SEQ ID NO: 227470 - DNA, 20 bp, Artificial sequence
  SiRNA target sequence
tttctgcttttggtactttt

SEQ ID NO: 227471 - DNA, 20 bp, Artificial sequence
  SiRNA target sequence
ttctgcttttggtacttttg

SEQ ID NO: 227472 - DNA, 20 bp, Artificial sequence
  SiRNA target sequence
tctgcttttggtacttttgt

SEQ ID NO: 227473 - DNA, 20 bp, Artificial sequence
  SiRNA target sequence
ctgcttttggtacttttgta

SEQ ID NO: 227474 - DNA, 20 bp, Artificial sequence
  SiRNA target sequence
tgcttttggtacttttgtat

SEQ ID NO: 227475 - DNA, 20 bp, Artificial sequence
  SiRNA target sequence
gcttttggtacttttgtatt

SEQ ID NO: 227476 - DNA, 20 bp, Artificial sequence
  SiRNA target sequence
cttttggtacttttgtatta

SEQ ID NO: 227477 - DNA, 20 bp, Artificial sequence
  SiRNA target sequence
ttttggtacttttgtattag

SEQ ID NO: 227478 - DNA, 20 bp, Artificial sequence
  SiRNA target sequence
tttggtacttttgtattagc

SEQ ID NO: 227479 - DNA, 20 bp, Artificial sequence
  SiRNA target sequence
ttggtacttttgtattagct

SEQ ID NO: 227480 - DNA, 20 bp, Artificial sequence
  SiRNA target sequence
tggtacttttgtattagctt

SEQ ID NO: 227481 - DNA, 20 bp, Artificial sequence
  SiRNA target sequence
ggtacttttgtattagctta

SEQ ID NO: 227482 - DNA, 20 bp, Artificial sequence
  SiRNA target sequence
gtacttttgtattagcttat

SEQ ID NO: 227483 - DNA, 20 bp, Artificial sequence
  SiRNA target sequence
tacttttgtattagcttatt

SEQ ID NO: 227484 - DNA, 20 bp, Artificial sequence
  SiRNA target sequence
acttttgtattagcttattt

SEQ ID NO: 227485 - DNA, 20 bp, Artificial sequence
  SiRNA target sequence
cttttgtattagcttattta

SEQ ID NO: 227486 - DNA, 20 bp, Artificial sequence
  SiRNA target sequence
ttttgtattagcttatttaa

SEQ ID NO: 227487 - DNA, 20 bp, Artificial sequence
  SiRNA target sequence
tttgtattagcttatttaaa

SEQ ID NO: 227488 - DNA, 20 bp, Artificial sequence
  SiRNA target sequence
ttgtattagcttatttaaac

SEQ ID NO: 227489 - DNA, 20 bp, Artificial sequence
  SiRNA target sequence
tgtattagcttatttaaact

SEQ ID NO: 227490 - DNA, 20 bp, Artificial sequence
  SiRNA target sequence
gtattagcttatttaaactt

SEQ ID NO: 227491 - DNA, 20 bp, Artificial sequence
  SiRNA target sequence
tattagcttatttaaacttc

SEQ ID NO: 227492 - DNA, 20 bp, Artificial sequence
  SiRNA target sequence
attagcttatttaaacttcc

SEQ ID NO: 227493 - DNA, 20 bp, Artificial sequence
  SiRNA target sequence
ttagcttatttaaacttccc

SEQ ID NO: 227494 - DNA, 20 bp, Artificial sequence
  SiRNA target sequence
tagcttatttaaacttccca

SEQ ID NO: 227495 - DNA, 20 bp, Artificial sequence
  SiRNA target sequence
agcttatttaaacttcccaa

SEQ ID NO: 227496 - DNA, 20 bp, Artificial sequence
  SiRNA target sequence
gcttatttaaacttcccaat

SEQ ID NO: 227497 - DNA, 20 bp, Artificial sequence
  SiRNA target sequence
cttatttaaacttcccaatt

SEQ ID NO: 227498 - DNA, 20 bp, Artificial sequence
  SiRNA target sequence
ttatttaaacttcccaatta

SEQ ID NO: 227499 - DNA, 20 bp, Artificial sequence
  SiRNA target sequence
tatttaaacttcccaattac

SEQ ID NO: 227500 - DNA, 20 bp, Artificial sequence
  SiRNA target sequence
atttaaacttcccaattaca

SEQ ID NO: 227501 - DNA, 20 bp, Artificial sequence
  SiRNA target sequence
tttaaacttcccaattacaa

SEQ ID NO: 227502 - DNA, 20 bp, Artificial sequence
  SiRNA target sequence
ttaaacttcccaattacaaa

SEQ ID NO: 227503 - DNA, 20 bp, Artificial sequence
  SiRNA target sequence
taaacttcccaattacaaac

SEQ ID NO: 227504 - DNA, 20 bp, Artificial sequence
  SiRNA target sequence
aaacttcccaattacaaaca

SEQ ID NO: 227505 - DNA, 20 bp, Artificial sequence
  SiRNA target sequence
aacttcccaattacaaacaa

SEQ ID NO: 227506 - DNA, 20 bp, Artificial sequence
  SiRNA target sequence
acttcccaattacaaacaaa

SEQ ID NO: 227507 - DNA, 20 bp, Artificial sequence
  SiRNA target sequence
cttcccaattacaaacaaag

SEQ ID NO: 227508 - DNA, 20 bp, Artificial sequence
  SiRNA target sequence
ttcccaattacaaacaaaga

SEQ ID NO: 227509 - DNA, 20 bp, Artificial sequence
  SiRNA target sequence
tcccaattacaaacaaagag

SEQ ID NO: 227510 - DNA, 20 bp, Artificial sequence
  SiRNA target sequence
cccaattacaaacaaagagg

SEQ ID NO: 227511 - DNA, 20 bp, Artificial sequence
  SiRNA target sequence
ccaattacaaacaaagagga

SEQ ID NO: 227512 - DNA, 20 bp, Artificial sequence
  SiRNA target sequence
caattacaaacaaagaggat

SEQ ID NO: 227513 - DNA, 20 bp, Artificial sequence
  SiRNA target sequence
aattacaaacaaagaggata

SEQ ID NO: 227514 - DNA, 20 bp, Artificial sequence
  SiRNA target sequence
attacaaacaaagaggataa

SEQ ID NO: 227515 - DNA, 20 bp, Artificial sequence
  SiRNA target sequence
ttacaaacaaagaggataat

SEQ ID NO: 227516 - DNA, 20 bp, Artificial sequence
  SiRNA target sequence
tacaaacaaagaggataata

SEQ ID NO: 227517 - DNA, 20 bp, Artificial sequence
  SiRNA target sequence
acaaacaaagaggataatat

SEQ ID NO: 227518 - DNA, 20 bp, Artificial sequence
  SiRNA target sequence
caaacaaagaggataatata

SEQ ID NO: 227519 - DNA, 20 bp, Artificial sequence
  SiRNA target sequence
aaacaaagaggataatatat

SEQ ID NO: 227520 - DNA, 20 bp, Artificial sequence
  SiRNA target sequence
aacaaagaggataatatatt

SEQ ID NO: 227521 - DNA, 20 bp, Artificial sequence
  SiRNA target sequence
acaaagaggataatatattt

SEQ ID NO: 227522 - DNA, 20 bp, Artificial sequence
  SiRNA target sequence
caaagaggataatatatttg

SEQ ID NO: 227523 - DNA, 20 bp, Artificial sequence
  SiRNA target sequence
aaagaggataatatatttga

SEQ ID NO: 227524 - DNA, 20 bp, Artificial sequence
  SiRNA target sequence
aagaggataatatatttgat

SEQ ID NO: 227525 - DNA, 20 bp, Artificial sequence
  SiRNA target sequence
agaggataatatatttgata

SEQ ID NO: 227526 - DNA, 20 bp, Artificial sequence
  SiRNA target sequence
gaggataatatatttgatat

SEQ ID NO: 227527 - DNA, 20 bp, Artificial sequence
  SiRNA target sequence
aggataatatatttgatatt

SEQ ID NO: 227528 - DNA, 20 bp, Artificial sequence
  SiRNA target sequence
ggataatatatttgatattt

SEQ ID NO: 227529 - DNA, 20 bp, Artificial sequence
  SiRNA target sequence
gataatatatttgatattta

SEQ ID NO: 227530 - DNA, 20 bp, Artificial sequence
  SiRNA target sequence
ataatatatttgatatttac

SEQ ID NO: 227531 - DNA, 20 bp, Artificial sequence
  SiRNA target sequence
taatatatttgatatttacc

SEQ ID NO: 227532 - DNA, 20 bp, Artificial sequence
  SiRNA target sequence
aatatatttgatatttaccg

SEQ ID NO: 227533 - DNA, 20 bp, Artificial sequence
  SiRNA target sequence
atatatttgatatttaccgt

SEQ ID NO: 227534 - DNA, 20 bp, Artificial sequence
  SiRNA target sequence
tatatttgatatttaccgtt

SEQ ID NO: 227535 - DNA, 20 bp, Artificial sequence
  SiRNA target sequence
atatttgatatttaccgttt

SEQ ID NO: 227536 - DNA, 20 bp, Artificial sequence
  SiRNA target sequence
tatttgatatttaccgttta

SEQ ID NO: 227537 - DNA, 20 bp, Artificial sequence
  SiRNA target sequence
atttgatatttaccgtttac

SEQ ID NO: 227538 - DNA, 20 bp, Artificial sequence
  SiRNA target sequence
tttgatatttaccgtttacc

SEQ ID NO: 227539 - DNA, 20 bp, Artificial sequence
  SiRNA target sequence
ttgatatttaccgtttaccg

SEQ ID NO: 227540 - DNA, 20 bp, Artificial sequence
  SiRNA target sequence
tgatatttaccgtttaccgt

SEQ ID NO: 227541 - DNA, 20 bp, Artificial sequence
  SiRNA target sequence
gatatttaccgtttaccgtc

SEQ ID NO: 227542 - DNA, 20 bp, Artificial sequence
  SiRNA target sequence
atatttaccgtttaccgtca

SEQ ID NO: 227543 - DNA, 20 bp, Artificial sequence
  SiRNA target sequence
tatttaccgtttaccgtcaa

SEQ ID NO: 227544 - DNA, 20 bp, Artificial sequence
  SiRNA target sequence
atttaccgtttaccgtcaac

SEQ ID NO: 227545 - DNA, 20 bp, Artificial sequence
  SiRNA target sequence
tttaccgtttaccgtcaact

SEQ ID NO: 227546 - DNA, 20 bp, Artificial sequence
  SiRNA target sequence
ttaccgtttaccgtcaactg

SEQ ID NO: 227547 - DNA, 20 bp, Artificial sequence
  SiRNA target sequence
taccgtttaccgtcaactga

SEQ ID NO: 227548 - DNA, 20 bp, Artificial sequence
  SiRNA target sequence
accgtttaccgtcaactgat

SEQ ID NO: 227549 - DNA, 20 bp, Artificial sequence
  SiRNA target sequence
ccgtttaccgtcaactgatt

SEQ ID NO: 227550 - DNA, 20 bp, Artificial sequence
  SiRNA target sequence
cgtttaccgtcaactgattc

SEQ ID NO: 227551 - DNA, 20 bp, Artificial sequence
  SiRNA target sequence
gtttaccgtcaactgattct

SEQ ID NO: 227552 - DNA, 20 bp, Artificial sequence
  SiRNA target sequence
tttaccgtcaactgattcta

SEQ ID NO: 227553 - DNA, 20 bp, Artificial sequence
  SiRNA target sequence
ttaccgtcaactgattctat

SEQ ID NO: 227554 - DNA, 20 bp, Artificial sequence
  SiRNA target sequence
taccgtcaactgattctata

SEQ ID NO: 227555 - DNA, 20 bp, Artificial sequence
  SiRNA target sequence
accgtcaactgattctataa

SEQ ID NO: 227556 - DNA, 20 bp, Artificial sequence
  SiRNA target sequence
ccgtcaactgattctataat

SEQ ID NO: 227557 - DNA, 20 bp, Artificial sequence
  SiRNA target sequence
cgtcaactgattctataatc

SEQ ID NO: 227558 - DNA, 20 bp, Artificial sequence
  SiRNA target sequence
gtcaactgattctataatca

SEQ ID NO: 227559 - DNA, 20 bp, Artificial sequence
  SiRNA target sequence
tcaactgattctataatcaa

SEQ ID NO: 227560 - DNA, 20 bp, Artificial sequence
  SiRNA target sequence
caactgattctataatcaaa

SEQ ID NO: 227561 - DNA, 20 bp, Artificial sequence
  SiRNA target sequence
aactgattctataatcaaat

SEQ ID NO: 227562 - DNA, 20 bp, Artificial sequence
  SiRNA target sequence
actgattctataatcaaatt

SEQ ID NO: 227563 - DNA, 20 bp, Artificial sequence
  SiRNA target sequence
ctgattctataatcaaatta

SEQ ID NO: 227564 - DNA, 20 bp, Artificial sequence
  SiRNA target sequence
tgattctataatcaaattag

SEQ ID NO: 227565 - DNA, 20 bp, Artificial sequence
  SiRNA target sequence
gattctataatcaaattaga

SEQ ID NO: 227566 - DNA, 20 bp, Artificial sequence
  SiRNA target sequence
attctataatcaaattagaa

SEQ ID NO: 227567 - DNA, 20 bp, Artificial sequence
  SiRNA target sequence
ttctataatcaaattagaaa

SEQ ID NO: 227568 - DNA, 20 bp, Artificial sequence
  SiRNA target sequence
tctataatcaaattagaaaa

SEQ ID NO: 227569 - DNA, 20 bp, Artificial sequence
  SiRNA target sequence
ctataatcaaattagaaaat

SEQ ID NO: 227570 - DNA, 20 bp, Artificial sequence
  SiRNA target sequence
tataatcaaattagaaaata

SEQ ID NO: 227571 - DNA, 20 bp, Artificial sequence
  SiRNA target sequence
ataatcaaattagaaaatat

SEQ ID NO: 227572 - DNA, 20 bp, Artificial sequence
  SiRNA target sequence
taatcaaattagaaaatatt

SEQ ID NO: 227573 - DNA, 20 bp, Artificial sequence
  SiRNA target sequence
aatcaaattagaaaatattg

SEQ ID NO: 227574 - DNA, 20 bp, Artificial sequence
  SiRNA target sequence
atcaaattagaaaatattgt

SEQ ID NO: 227575 - DNA, 20 bp, Artificial sequence
  SiRNA target sequence
tcaaattagaaaatattgtt

SEQ ID NO: 227576 - DNA, 20 bp, Artificial sequence
  SiRNA target sequence
caaattagaaaatattgttg

SEQ ID NO: 227577 - DNA, 20 bp, Artificial sequence
  SiRNA target sequence
aaattagaaaatattgttgg

SEQ ID NO: 227578 - DNA, 20 bp, Artificial sequence
  SiRNA target sequence
aattagaaaatattgttggt

SEQ ID NO: 227579 - DNA, 20 bp, Artificial sequence
  SiRNA target sequence
attagaaaatattgttggtg

SEQ ID NO: 227580 - DNA, 20 bp, Artificial sequence
  SiRNA target sequence
ttagaaaatattgttggtgt

SEQ ID NO: 227581 - DNA, 20 bp, Artificial sequence
  SiRNA target sequence
tagaaaatattgttggtgtc

SEQ ID NO: 227582 - DNA, 20 bp, Artificial sequence
  SiRNA target sequence
agaaaatattgttggtgtca

SEQ ID NO: 227583 - DNA, 20 bp, Artificial sequence
  SiRNA target sequence
gaaaatattgttggtgtcat

SEQ ID NO: 227584 - DNA, 20 bp, Artificial sequence
  SiRNA target sequence
aaaatattgttggtgtcatt

SEQ ID NO: 227585 - DNA, 20 bp, Artificial sequence
  SiRNA target sequence
aaatattgttggtgtcattt

SEQ ID NO: 227586 - DNA, 20 bp, Artificial sequence
  SiRNA target sequence
aatattgttggtgtcatttg

SEQ ID NO: 227587 - DNA, 20 bp, Artificial sequence
  SiRNA target sequence
atattgttggtgtcatttgt

SEQ ID NO: 227588 - DNA, 20 bp, Artificial sequence
  SiRNA target sequence
tattgttggtgtcatttgtg

SEQ ID NO: 227589 - DNA, 20 bp, Artificial sequence
  SiRNA target sequence
attgttggtgtcatttgtgt

SEQ ID NO: 227590 - DNA, 20 bp, Artificial sequence
  SiRNA target sequence
ttgttggtgtcatttgtgta

SEQ ID NO: 227591 - DNA, 20 bp, Artificial sequence
  SiRNA target sequence
tgttggtgtcatttgtgtat

SEQ ID NO: 227592 - DNA, 20 bp, Artificial sequence
  SiRNA target sequence
gttggtgtcatttgtgtatc

SEQ ID NO: 227593 - DNA, 20 bp, Artificial sequence
  SiRNA target sequence
ttggtgtcatttgtgtatct

SEQ ID NO: 227594 - DNA, 20 bp, Artificial sequence
  SiRNA target sequence
tggtgtcatttgtgtatctt

SEQ ID NO: 227595 - DNA, 20 bp, Artificial sequence
  SiRNA target sequence
ggtgtcatttgtgtatcttt

SEQ ID NO: 227596 - DNA, 20 bp, Artificial sequence
  SiRNA target sequence
gtgtcatttgtgtatcttta

SEQ ID NO: 227597 - DNA, 20 bp, Artificial sequence
  SiRNA target sequence
tgtcatttgtgtatctttaa

SEQ ID NO: 227598 - DNA, 20 bp, Artificial sequence
  SiRNA target sequence
gtcatttgtgtatctttaat

SEQ ID NO: 227599 - DNA, 20 bp, Artificial sequence
  SiRNA target sequence
tcatttgtgtatctttaatg

SEQ ID NO: 227600 - DNA, 20 bp, Artificial sequence
  SiRNA target sequence
catttgtgtatctttaatga

SEQ ID NO: 227601 - DNA, 20 bp, Artificial sequence
  SiRNA target sequence
atttgtgtatctttaatgaa

SEQ ID NO: 227602 - DNA, 20 bp, Artificial sequence
  SiRNA target sequence
tttgtgtatctttaatgaag

SEQ ID NO: 227603 - DNA, 20 bp, Artificial sequence
  SiRNA target sequence
ttgtgtatctttaatgaaga

SEQ ID NO: 227604 - DNA, 20 bp, Artificial sequence
  SiRNA target sequence
tgtgtatctttaatgaagat

SEQ ID NO: 227605 - DNA, 20 bp, Artificial sequence
  SiRNA target sequence
gtgtatctttaatgaagatt

SEQ ID NO: 227606 - DNA, 20 bp, Artificial sequence
  SiRNA target sequence
tgtatctttaatgaagattt

SEQ ID NO: 227607 - DNA, 20 bp, Artificial sequence
  SiRNA target sequence
gtatctttaatgaagatttc

SEQ ID NO: 227608 - DNA, 20 bp, Artificial sequence
  SiRNA target sequence
tatctttaatgaagatttct

SEQ ID NO: 227609 - DNA, 20 bp, Artificial sequence
  SiRNA target sequence
atctttaatgaagatttcta

SEQ ID NO: 227610 - DNA, 20 bp, Artificial sequence
  SiRNA target sequence
tctttaatgaagatttctaa

SEQ ID NO: 227611 - DNA, 20 bp, Artificial sequence
  SiRNA target sequence
ctttaatgaagatttctaaa

SEQ ID NO: 227612 - DNA, 20 bp, Artificial sequence
  SiRNA target sequence
tttaatgaagatttctaaat

SEQ ID NO: 227613 - DNA, 20 bp, Artificial sequence
  SiRNA target sequence
ttaatgaagatttctaaata

SEQ ID NO: 227614 - DNA, 20 bp, Artificial sequence
  SiRNA target sequence
taatgaagatttctaaatat

SEQ ID NO: 227615 - DNA, 20 bp, Artificial sequence
  SiRNA target sequence
aatgaagatttctaaatatg

SEQ ID NO: 227616 - DNA, 20 bp, Artificial sequence
  SiRNA target sequence
atgaagatttctaaatatgc

SEQ ID NO: 227617 - DNA, 20 bp, Artificial sequence
  SiRNA target sequence
tgaagatttctaaatatgca

SEQ ID NO: 227618 - DNA, 20 bp, Artificial sequence
  SiRNA target sequence
gaagatttctaaatatgcag

SEQ ID NO: 227619 - DNA, 20 bp, Artificial sequence
  SiRNA target sequence
aagatttctaaatatgcagc

SEQ ID NO: 227620 - DNA, 20 bp, Artificial sequence
  SiRNA target sequence
agatttctaaatatgcagca

SEQ ID NO: 227621 - DNA, 20 bp, Artificial sequence
  SiRNA target sequence
gatttctaaatatgcagcat

SEQ ID NO: 227622 - DNA, 20 bp, Artificial sequence
  SiRNA target sequence
atttctaaatatgcagcatt

SEQ ID NO: 227623 - DNA, 20 bp, Artificial sequence
  SiRNA target sequence
tttctaaatatgcagcattt

SEQ ID NO: 227624 - DNA, 20 bp, Artificial sequence
  SiRNA target sequence
ttctaaatatgcagcatttg

SEQ ID NO: 227625 - DNA, 20 bp, Artificial sequence
  SiRNA target sequence
tctaaatatgcagcatttga

SEQ ID NO: 227626 - DNA, 20 bp, Artificial sequence
  SiRNA target sequence
ctaaatatgcagcatttgat

SEQ ID NO: 227627 - DNA, 20 bp, Artificial sequence
  SiRNA target sequence
taaatatgcagcatttgata

SEQ ID NO: 227628 - DNA, 20 bp, Artificial sequence
  SiRNA target sequence
aaatatgcagcatttgatat

SEQ ID NO: 227629 - DNA, 20 bp, Artificial sequence
  SiRNA target sequence
aatatgcagcatttgatatc

SEQ ID NO: 227630 - DNA, 20 bp, Artificial sequence
  SiRNA target sequence
atatgcagcatttgatatca

SEQ ID NO: 227631 - DNA, 20 bp, Artificial sequence
  SiRNA target sequence
tatgcagcatttgatatcac

SEQ ID NO: 227632 - DNA, 20 bp, Artificial sequence
  SiRNA target sequence
atgcagcatttgatatcaca

SEQ ID NO: 227633 - DNA, 20 bp, Artificial sequence
  SiRNA target sequence
tgcagcatttgatatcacaa

SEQ ID NO: 227634 - DNA, 20 bp, Artificial sequence
  SiRNA target sequence
gcagcatttgatatcacaaa

SEQ ID NO: 227635 - DNA, 20 bp, Artificial sequence
  SiRNA target sequence
cagcatttgatatcacaaaa

SEQ ID NO: 227636 - DNA, 20 bp, Artificial sequence
  SiRNA target sequence
agcatttgatatcacaaaag

SEQ ID NO: 227637 - DNA, 20 bp, Artificial sequence
  SiRNA target sequence
gcatttgatatcacaaaaga

SEQ ID NO: 227638 - DNA, 20 bp, Artificial sequence
  SiRNA target sequence
catttgatatcacaaaagag

SEQ ID NO: 227639 - DNA, 20 bp, Artificial sequence
  SiRNA target sequence
atttgatatcacaaaagagg

SEQ ID NO: 227640 - DNA, 20 bp, Artificial sequence
  SiRNA target sequence
tttgatatcacaaaagaggc

SEQ ID NO: 227641 - DNA, 20 bp, Artificial sequence
  SiRNA target sequence
ttgatatcacaaaagaggct

SEQ ID NO: 227642 - DNA, 20 bp, Artificial sequence
  SiRNA target sequence
tgatatcacaaaagaggctt

SEQ ID NO: 227643 - DNA, 20 bp, Artificial sequence
  SiRNA target sequence
gatatcacaaaagaggcttt

SEQ ID NO: 227644 - DNA, 20 bp, Artificial sequence
  SiRNA target sequence
atatcacaaaagaggctttg

SEQ ID NO: 227645 - DNA, 20 bp, Artificial sequence
  SiRNA target sequence
tatcacaaaagaggctttgt

SEQ ID NO: 227646 - DNA, 20 bp, Artificial sequence
  SiRNA target sequence
atcacaaaagaggctttgtc

SEQ ID NO: 227647 - DNA, 20 bp, Artificial sequence
  SiRNA target sequence
tcacaaaagaggctttgtct

SEQ ID NO: 227648 - DNA, 20 bp, Artificial sequence
  SiRNA target sequence
cacaaaagaggctttgtcta

SEQ ID NO: 227649 - DNA, 20 bp, Artificial sequence
  SiRNA target sequence
acaaaagaggctttgtctat

SEQ ID NO: 227650 - DNA, 20 bp, Artificial sequence
  SiRNA target sequence
caaaagaggctttgtctatg

SEQ ID NO: 227651 - DNA, 20 bp, Artificial sequence
  SiRNA target sequence
aaaagaggctttgtctatgc

SEQ ID NO: 227652 - DNA, 20 bp, Artificial sequence
  SiRNA target sequence
aaagaggctttgtctatgca

SEQ ID NO: 227653 - DNA, 20 bp, Artificial sequence
  SiRNA target sequence
aagaggctttgtctatgcag

SEQ ID NO: 227654 - DNA, 20 bp, Artificial sequence
  SiRNA target sequence
agaggctttgtctatgcaga

SEQ ID NO: 227655 - DNA, 20 bp, Artificial sequence
  SiRNA target sequence
gaggctttgtctatgcagat

SEQ ID NO: 227656 - DNA, 20 bp, Artificial sequence
  SiRNA target sequence
aggctttgtctatgcagatt

SEQ ID NO: 227657 - DNA, 20 bp, Artificial sequence
  SiRNA target sequence
ggctttgtctatgcagattg

SEQ ID NO: 227658 - DNA, 20 bp, Artificial sequence
  SiRNA target sequence
gctttgtctatgcagattga

SEQ ID NO: 227659 - DNA, 20 bp, Artificial sequence
  SiRNA target sequence
ctttgtctatgcagattgat

SEQ ID NO: 227660 - DNA, 20 bp, Artificial sequence
  SiRNA target sequence
tttgtctatgcagattgatg

SEQ ID NO: 227661 - DNA, 20 bp, Artificial sequence
  SiRNA target sequence
ttgtctatgcagattgatgg

SEQ ID NO: 227662 - DNA, 20 bp, Artificial sequence
  SiRNA target sequence
tgtctatgcagattgatggt

SEQ ID NO: 227663 - DNA, 20 bp, Artificial sequence
  SiRNA target sequence
gtctatgcagattgatggtt

SEQ ID NO: 227664 - DNA, 20 bp, Artificial sequence
  SiRNA target sequence
tctatgcagattgatggttc

SEQ ID NO: 227665 - DNA, 20 bp, Artificial sequence
  SiRNA target sequence
ctatgcagattgatggttct

SEQ ID NO: 227666 - DNA, 20 bp, Artificial sequence
  SiRNA target sequence
tatgcagattgatggttcta

SEQ ID NO: 227667 - DNA, 20 bp, Artificial sequence
  SiRNA target sequence
atgcagattgatggttctat

SEQ ID NO: 227668 - DNA, 20 bp, Artificial sequence
  SiRNA target sequence
tgcagattgatggttctata

SEQ ID NO: 227669 - DNA, 20 bp, Artificial sequence
  SiRNA target sequence
gcagattgatggttctataa

SEQ ID NO: 227670 - DNA, 20 bp, Artificial sequence
  SiRNA target sequence
cagattgatggttctataag

SEQ ID NO: 227671 - DNA, 20 bp, Artificial sequence
  SiRNA target sequence
agattgatggttctataaga

SEQ ID NO: 227672 - DNA, 20 bp, Artificial sequence
  SiRNA target sequence
gattgatggttctataagag

SEQ ID NO: 227673 - DNA, 20 bp, Artificial sequence
  SiRNA target sequence
attgatggttctataagagc

SEQ ID NO: 227674 - DNA, 20 bp, Artificial sequence
  SiRNA target sequence
ttgatggttctataagagcg

SEQ ID NO: 227675 - DNA, 20 bp, Artificial sequence
  SiRNA target sequence
tgatggttctataagagcga

SEQ ID NO: 227676 - DNA, 20 bp, Artificial sequence
  SiRNA target sequence
gatggttctataagagcgaa

SEQ ID NO: 227677 - DNA, 20 bp, Artificial sequence
  SiRNA target sequence
atggttctataagagcgaaa

SEQ ID NO: 227678 - DNA, 20 bp, Artificial sequence
  SiRNA target sequence
tggttctataagagcgaaat

SEQ ID NO: 227679 - DNA, 20 bp, Artificial sequence
  SiRNA target sequence
ggttctataagagcgaaata

SEQ ID NO: 227680 - DNA, 20 bp, Artificial sequence
  SiRNA target sequence
gttctataagagcgaaatac

SEQ ID NO: 227681 - DNA, 20 bp, Artificial sequence
  SiRNA target sequence
ttctataagagcgaaataca

SEQ ID NO: 227682 - DNA, 20 bp, Artificial sequence
  SiRNA target sequence
tctataagagcgaaatacaa

SEQ ID NO: 227683 - DNA, 20 bp, Artificial sequence
  SiRNA target sequence
ctataagagcgaaatacaaa

SEQ ID NO: 227684 - DNA, 20 bp, Artificial sequence
  SiRNA target sequence
tataagagcgaaatacaaag

SEQ ID NO: 227685 - DNA, 20 bp, Artificial sequence
  SiRNA target sequence
ataagagcgaaatacaaagg

SEQ ID NO: 227686 - DNA, 20 bp, Artificial sequence
  SiRNA target sequence
taagagcgaaatacaaaggt

SEQ ID NO: 227687 - DNA, 20 bp, Artificial sequence
  SiRNA target sequence
aagagcgaaatacaaaggta

SEQ ID NO: 227688 - DNA, 20 bp, Artificial sequence
  SiRNA target sequence
agagcgaaatacaaaggtat

SEQ ID NO: 227689 - DNA, 20 bp, Artificial sequence
  SiRNA target sequence
gagcgaaatacaaaggtatt

SEQ ID NO: 227690 - DNA, 20 bp, Artificial sequence
  SiRNA target sequence
agcgaaatacaaaggtattt

SEQ ID NO: 227691 - DNA, 20 bp, Artificial sequence
  SiRNA target sequence
gcgaaatacaaaggtatttt

SEQ ID NO: 227692 - DNA, 20 bp, Artificial sequence
  SiRNA target sequence
cgaaatacaaaggtattttt

SEQ ID NO: 227693 - DNA, 20 bp, Artificial sequence
  SiRNA target sequence
gaaatacaaaggtatttttg

SEQ ID NO: 227694 - DNA, 20 bp, Artificial sequence
  SiRNA target sequence
aaatacaaaggtatttttga

SEQ ID NO: 227695 - DNA, 20 bp, Artificial sequence
  SiRNA target sequence
aatacaaaggtatttttgat

SEQ ID NO: 227696 - DNA, 20 bp, Artificial sequence
  SiRNA target sequence
atacaaaggtatttttgatg

SEQ ID NO: 227697 - DNA, 20 bp, Artificial sequence
  SiRNA target sequence
tacaaaggtatttttgatgg

SEQ ID NO: 227698 - DNA, 20 bp, Artificial sequence
  SiRNA target sequence
acaaaggtatttttgatggt

SEQ ID NO: 227699 - DNA, 20 bp, Artificial sequence
  SiRNA target sequence
caaaggtatttttgatggtg

SEQ ID NO: 227700 - DNA, 20 bp, Artificial sequence
  SiRNA target sequence
aaaggtatttttgatggtgt

SEQ ID NO: 227701 - DNA, 20 bp, Artificial sequence
  SiRNA target sequence
aaggtatttttgatggtgta

SEQ ID NO: 227702 - DNA, 20 bp, Artificial sequence
  SiRNA target sequence
aggtatttttgatggtgtat

SEQ ID NO: 227703 - DNA, 20 bp, Artificial sequence
  SiRNA target sequence
ggtatttttgatggtgtatt

SEQ ID NO: 227704 - DNA, 20 bp, Artificial sequence
  SiRNA target sequence
gtatttttgatggtgtattt

SEQ ID NO: 227705 - DNA, 20 bp, Artificial sequence
  SiRNA target sequence
tatttttgatggtgtatttg

SEQ ID NO: 227706 - DNA, 20 bp, Artificial sequence
  SiRNA target sequence
atttttgatggtgtatttgg

SEQ ID NO: 227707 - DNA, 20 bp, Artificial sequence
  SiRNA target sequence
tttttgatggtgtatttggt

SEQ ID NO: 227708 - DNA, 20 bp, Artificial sequence
  SiRNA target sequence
ttttgatggtgtatttggta

SEQ ID NO: 227709 - DNA, 20 bp, Artificial sequence
  SiRNA target sequence
tttgatggtgtatttggtaa

SEQ ID NO: 227710 - DNA, 20 bp, Artificial sequence
  SiRNA target sequence
ttgatggtgtatttggtaag

SEQ ID NO: 227711 - DNA, 20 bp, Artificial sequence
  SiRNA target sequence
tgatggtgtatttggtaagc

SEQ ID NO: 227712 - DNA, 20 bp, Artificial sequence
  SiRNA target sequence
gatggtgtatttggtaagct

SEQ ID NO: 227713 - DNA, 20 bp, Artificial sequence
  SiRNA target sequence
atggtgtatttggtaagctg

SEQ ID NO: 227714 - DNA, 20 bp, Artificial sequence
  SiRNA target sequence
tggtgtatttggtaagctgg

SEQ ID NO: 227715 - DNA, 20 bp, Artificial sequence
  SiRNA target sequence
ggtgtatttggtaagctggg

SEQ ID NO: 227716 - DNA, 20 bp, Artificial sequence
  SiRNA target sequence
gtgtatttggtaagctgggg

SEQ ID NO: 227717 - DNA, 20 bp, Artificial sequence
  SiRNA target sequence
tgtatttggtaagctgggga

SEQ ID NO: 227718 - DNA, 20 bp, Artificial sequence
  SiRNA target sequence
gtatttggtaagctggggaa

SEQ ID NO: 227719 - DNA, 20 bp, Artificial sequence
  SiRNA target sequence
tatttggtaagctggggaaa

SEQ ID NO: 227720 - DNA, 20 bp, Artificial sequence
  SiRNA target sequence
atttggtaagctggggaaat

SEQ ID NO: 227721 - DNA, 20 bp, Artificial sequence
  SiRNA target sequence
tttggtaagctggggaaatc

SEQ ID NO: 227722 - DNA, 20 bp, Artificial sequence
  SiRNA target sequence
ttggtaagctggggaaatct

SEQ ID NO: 227723 - DNA, 20 bp, Artificial sequence
  SiRNA target sequence
tggtaagctggggaaatctt

SEQ ID NO: 227724 - DNA, 20 bp, Artificial sequence
  SiRNA target sequence
ggtaagctggggaaatcttt

SEQ ID NO: 227725 - DNA, 20 bp, Artificial sequence
  SiRNA target sequence
gtaagctggggaaatctttt

SEQ ID NO: 227726 - DNA, 20 bp, Artificial sequence
  SiRNA target sequence
taagctggggaaatcttttg

SEQ ID NO: 227727 - DNA, 20 bp, Artificial sequence
  SiRNA target sequence
aagctggggaaatcttttgg

SEQ ID NO: 227728 - DNA, 20 bp, Artificial sequence
  SiRNA target sequence
agctggggaaatcttttgga

SEQ ID NO: 227729 - DNA, 20 bp, Artificial sequence
  SiRNA target sequence
gctggggaaatcttttggat

SEQ ID NO: 227730 - DNA, 20 bp, Artificial sequence
  SiRNA target sequence
ctggggaaatcttttggatc

SEQ ID NO: 227731 - DNA, 20 bp, Artificial sequence
  SiRNA target sequence
tggggaaatcttttggatca

SEQ ID NO: 227732 - DNA, 20 bp, Artificial sequence
  SiRNA target sequence
ggggaaatcttttggatcag

SEQ ID NO: 227733 - DNA, 20 bp, Artificial sequence
  SiRNA target sequence
gggaaatcttttggatcagt

SEQ ID NO: 227734 - DNA, 20 bp, Artificial sequence
  SiRNA target sequence
ggaaatcttttggatcagtt

SEQ ID NO: 227735 - DNA, 20 bp, Artificial sequence
  SiRNA target sequence
gaaatcttttggatcagttt

SEQ ID NO: 227736 - DNA, 20 bp, Artificial sequence
  SiRNA target sequence
aaatcttttggatcagttta

SEQ ID NO: 227737 - DNA, 20 bp, Artificial sequence
  SiRNA target sequence
aatcttttggatcagtttat

SEQ ID NO: 227738 - DNA, 20 bp, Artificial sequence
  SiRNA target sequence
atcttttggatcagtttatg

SEQ ID NO: 227739 - DNA, 20 bp, Artificial sequence
  SiRNA target sequence
tcttttggatcagtttatgg

SEQ ID NO: 227740 - DNA, 20 bp, Artificial sequence
  SiRNA target sequence
cttttggatcagtttatgga

SEQ ID NO: 227741 - DNA, 20 bp, Artificial sequence
  SiRNA target sequence
ttttggatcagtttatggat

SEQ ID NO: 227742 - DNA, 20 bp, Artificial sequence
  SiRNA target sequence
tttggatcagtttatggatt

SEQ ID NO: 227743 - DNA, 20 bp, Artificial sequence
  SiRNA target sequence
ttggatcagtttatggattt

SEQ ID NO: 227744 - DNA, 20 bp, Artificial sequence
  SiRNA target sequence
tggatcagtttatggattta

SEQ ID NO: 227745 - DNA, 20 bp, Artificial sequence
  SiRNA target sequence
ggatcagtttatggatttac

SEQ ID NO: 227746 - DNA, 20 bp, Artificial sequence
  SiRNA target sequence
gatcagtttatggatttaca

SEQ ID NO: 227747 - DNA, 20 bp, Artificial sequence
  SiRNA target sequence
atcagtttatggatttacaa

SEQ ID NO: 227748 - DNA, 20 bp, Artificial sequence
  SiRNA target sequence
tcagtttatggatttacaat

SEQ ID NO: 227749 - DNA, 20 bp, Artificial sequence
  SiRNA target sequence
cagtttatggatttacaatt

SEQ ID NO: 227750 - DNA, 20 bp, Artificial sequence
  SiRNA target sequence
agtttatggatttacaatta

SEQ ID NO: 227751 - DNA, 20 bp, Artificial sequence
  SiRNA target sequence
gtttatggatttacaattac

SEQ ID NO: 227752 - DNA, 20 bp, Artificial sequence
  SiRNA target sequence
tttatggatttacaattact

SEQ ID NO: 227753 - DNA, 20 bp, Artificial sequence
  SiRNA target sequence
ttatggatttacaattacta

SEQ ID NO: 227754 - DNA, 20 bp, Artificial sequence
  SiRNA target sequence
tatggatttacaattactac

SEQ ID NO: 227755 - DNA, 20 bp, Artificial sequence
  SiRNA target sequence
atggatttacaattactaca

SEQ ID NO: 227756 - DNA, 20 bp, Artificial sequence
  SiRNA target sequence
tggatttacaattactacat

SEQ ID NO: 227757 - DNA, 20 bp, Artificial sequence
  SiRNA target sequence
ggatttacaattactacatt

SEQ ID NO: 227758 - DNA, 20 bp, Artificial sequence
  SiRNA target sequence
gatttacaattactacatta

SEQ ID NO: 227759 - DNA, 20 bp, Artificial sequence
  SiRNA target sequence
atttacaattactacattat

SEQ ID NO: 227760 - DNA, 20 bp, Artificial sequence
  SiRNA target sequence
tttacaattactacattatt

SEQ ID NO: 227761 - DNA, 20 bp, Artificial sequence
  SiRNA target sequence
ttacaattactacattatta

SEQ ID NO: 227762 - DNA, 20 bp, Artificial sequence
  SiRNA target sequence
tacaattactacattattag

SEQ ID NO: 227763 - DNA, 20 bp, Artificial sequence
  SiRNA target sequence
acaattactacattattagg

SEQ ID NO: 227764 - DNA, 20 bp, Artificial sequence
  SiRNA target sequence
caattactacattattagga

SEQ ID NO: 227765 - DNA, 20 bp, Artificial sequence
  SiRNA target sequence
aattactacattattaggaa

SEQ ID NO: 227766 - DNA, 20 bp, Artificial sequence
  SiRNA target sequence
attactacattattaggaac

SEQ ID NO: 227767 - DNA, 20 bp, Artificial sequence
  SiRNA target sequence
ttactacattattaggaaca

SEQ ID NO: 227768 - DNA, 20 bp, Artificial sequence
  SiRNA target sequence
tactacattattaggaacaa

SEQ ID NO: 227769 - DNA, 20 bp, Artificial sequence
  SiRNA target sequence
actacattattaggaacaag

SEQ ID NO: 227770 - DNA, 20 bp, Artificial sequence
  SiRNA target sequence
ctacattattaggaacaaga

SEQ ID NO: 227771 - DNA, 20 bp, Artificial sequence
  SiRNA target sequence
tacattattaggaacaagag

SEQ ID NO: 227772 - DNA, 20 bp, Artificial sequence
  SiRNA target sequence
acattattaggaacaagaga

SEQ ID NO: 227773 - DNA, 20 bp, Artificial sequence
  SiRNA target sequence
cattattaggaacaagagat

SEQ ID NO: 227774 - DNA, 20 bp, Artificial sequence
  SiRNA target sequence
attattaggaacaagagatg

SEQ ID NO: 227775 - DNA, 20 bp, Artificial sequence
  SiRNA target sequence
ttattaggaacaagagatgt

SEQ ID NO: 227776 - DNA, 20 bp, Artificial sequence
  SiRNA target sequence
tattaggaacaagagatgtt

SEQ ID NO: 227777 - DNA, 20 bp, Artificial sequence
  SiRNA target sequence
attaggaacaagagatgttc

SEQ ID NO: 227778 - DNA, 20 bp, Artificial sequence
  SiRNA target sequence
ttaggaacaagagatgttcg

SEQ ID NO: 227779 - DNA, 20 bp, Artificial sequence
  SiRNA target sequence
taggaacaagagatgttcgt

SEQ ID NO: 227780 - DNA, 20 bp, Artificial sequence
  SiRNA target sequence
aggaacaagagatgttcgta

SEQ ID NO: 227781 - DNA, 20 bp, Artificial sequence
  SiRNA target sequence
ggaacaagagatgttcgtag

SEQ ID NO: 227782 - DNA, 20 bp, Artificial sequence
  SiRNA target sequence
gaacaagagatgttcgtaga

SEQ ID NO: 227783 - DNA, 20 bp, Artificial sequence
  SiRNA target sequence
aacaagagatgttcgtagag

SEQ ID NO: 227784 - DNA, 20 bp, Artificial sequence
  SiRNA target sequence
acaagagatgttcgtagagg

SEQ ID NO: 227785 - DNA, 20 bp, Artificial sequence
  SiRNA target sequence
caagagatgttcgtagaggt

SEQ ID NO: 227786 - DNA, 20 bp, Artificial sequence
  SiRNA target sequence
aagagatgttcgtagaggtg

SEQ ID NO: 227787 - DNA, 20 bp, Artificial sequence
  SiRNA target sequence
agagatgttcgtagaggtgc

SEQ ID NO: 227788 - DNA, 20 bp, Artificial sequence
  SiRNA target sequence
gagatgttcgtagaggtgct

SEQ ID NO: 227789 - DNA, 20 bp, Artificial sequence
  SiRNA target sequence
agatgttcgtagaggtgctc

SEQ ID NO: 227790 - DNA, 20 bp, Artificial sequence
  SiRNA target sequence
gatgttcgtagaggtgctcc

SEQ ID NO: 227791 - DNA, 20 bp, Artificial sequence
  SiRNA target sequence
atgttcgtagaggtgctcct

SEQ ID NO: 227792 - DNA, 20 bp, Artificial sequence
  SiRNA target sequence
tgttcgtagaggtgctccta

SEQ ID NO: 227793 - DNA, 20 bp, Artificial sequence
  SiRNA target sequence
gttcgtagaggtgctcctat

SEQ ID NO: 227794 - DNA, 20 bp, Artificial sequence
  SiRNA target sequence
ttcgtagaggtgctcctata

SEQ ID NO: 227795 - DNA, 20 bp, Artificial sequence
  SiRNA target sequence
tcgtagaggtgctcctatat

SEQ ID NO: 227796 - DNA, 20 bp, Artificial sequence
  SiRNA target sequence
cgtagaggtgctcctatatc

SEQ ID NO: 227797 - DNA, 20 bp, Artificial sequence
  SiRNA target sequence
gtagaggtgctcctatatcg

SEQ ID NO: 227798 - DNA, 20 bp, Artificial sequence
  SiRNA target sequence
tagaggtgctcctatatcgc

SEQ ID NO: 227799 - DNA, 20 bp, Artificial sequence
  SiRNA target sequence
agaggtgctcctatatcgct

SEQ ID NO: 227800 - DNA, 20 bp, Artificial sequence
  SiRNA target sequence
gaggtgctcctatatcgctt

SEQ ID NO: 227801 - DNA, 20 bp, Artificial sequence
  SiRNA target sequence
aggtgctcctatatcgcttt

SEQ ID NO: 227802 - DNA, 20 bp, Artificial sequence
  SiRNA target sequence
ggtgctcctatatcgctttg

SEQ ID NO: 227803 - DNA, 20 bp, Artificial sequence
  SiRNA target sequence
gtgctcctatatcgctttgt

SEQ ID NO: 227804 - DNA, 20 bp, Artificial sequence
  SiRNA target sequence
tgctcctatatcgctttgtg

SEQ ID NO: 227805 - DNA, 20 bp, Artificial sequence
  SiRNA target sequence
gctcctatatcgctttgtgt

SEQ ID NO: 227806 - DNA, 20 bp, Artificial sequence
  SiRNA target sequence
ctcctatatcgctttgtgtt

SEQ ID NO: 227807 - DNA, 20 bp, Artificial sequence
  SiRNA target sequence
tcctatatcgctttgtgttc

SEQ ID NO: 227808 - DNA, 20 bp, Artificial sequence
  SiRNA target sequence
cctatatcgctttgtgttct

SEQ ID NO: 227809 - DNA, 20 bp, Artificial sequence
  SiRNA target sequence
ctatatcgctttgtgttcta

SEQ ID NO: 227810 - DNA, 20 bp, Artificial sequence
  SiRNA target sequence
tatatcgctttgtgttctaa

SEQ ID NO: 227811 - DNA, 20 bp, Artificial sequence
  SiRNA target sequence
atatcgctttgtgttctaat

SEQ ID NO: 227812 - DNA, 20 bp, Artificial sequence
  SiRNA target sequence
tatcgctttgtgttctaata

SEQ ID NO: 227813 - DNA, 20 bp, Artificial sequence
  SiRNA target sequence
atcgctttgtgttctaatat

SEQ ID NO: 227814 - DNA, 20 bp, Artificial sequence
  SiRNA target sequence
tcgctttgtgttctaatatt

SEQ ID NO: 227815 - DNA, 20 bp, Artificial sequence
  SiRNA target sequence
cgctttgtgttctaatattg

SEQ ID NO: 227816 - DNA, 20 bp, Artificial sequence
  SiRNA target sequence
gctttgtgttctaatattgt

SEQ ID NO: 227817 - DNA, 20 bp, Artificial sequence
  SiRNA target sequence
ctttgtgttctaatattgtt

SEQ ID NO: 227818 - DNA, 20 bp, Artificial sequence
  SiRNA target sequence
tttgtgttctaatattgttc

SEQ ID NO: 227819 - DNA, 20 bp, Artificial sequence
  SiRNA target sequence
ttgtgttctaatattgttct

SEQ ID NO: 227820 - DNA, 20 bp, Artificial sequence
  SiRNA target sequence
tgtgttctaatattgttctg

SEQ ID NO: 227821 - DNA, 20 bp, Artificial sequence
  SiRNA target sequence
gtgttctaatattgttctgc

SEQ ID NO: 227822 - DNA, 20 bp, Artificial sequence
  SiRNA target sequence
tgttctaatattgttctgcc

SEQ ID NO: 227823 - DNA, 20 bp, Artificial sequence
  SiRNA target sequence
gttctaatattgttctgcct

SEQ ID NO: 227824 - DNA, 20 bp, Artificial sequence
  SiRNA target sequence
ttctaatattgttctgcctt

SEQ ID NO: 227825 - DNA, 20 bp, Artificial sequence
  SiRNA target sequence
tctaatattgttctgcctta

SEQ ID NO: 227826 - DNA, 20 bp, Artificial sequence
  SiRNA target sequence
ctaatattgttctgccttat

SEQ ID NO: 227827 - DNA, 20 bp, Artificial sequence
  SiRNA target sequence
taatattgttctgccttata

SEQ ID NO: 227828 - DNA, 20 bp, Artificial sequence
  SiRNA target sequence
aatattgttctgccttatat

SEQ ID NO: 227829 - DNA, 20 bp, Artificial sequence
  SiRNA target sequence
atattgttctgccttatatg

SEQ ID NO: 227830 - DNA, 20 bp, Artificial sequence
  SiRNA target sequence
tattgttctgccttatatgg

SEQ ID NO: 227831 - DNA, 20 bp, Artificial sequence
  SiRNA target sequence
attgttctgccttatatggt

SEQ ID NO: 227832 - DNA, 20 bp, Artificial sequence
  SiRNA target sequence
ttgttctgccttatatggtt

SEQ ID NO: 227833 - DNA, 20 bp, Artificial sequence
  SiRNA target sequence
tgttctgccttatatggttt

SEQ ID NO: 227834 - DNA, 20 bp, Artificial sequence
  SiRNA target sequence
gttctgccttatatggtttt

SEQ ID NO: 227835 - DNA, 20 bp, Artificial sequence
  SiRNA target sequence
ttctgccttatatggtttta

SEQ ID NO: 227836 - DNA, 20 bp, Artificial sequence
  SiRNA target sequence
tctgccttatatggttttat

SEQ ID NO: 227837 - DNA, 20 bp, Artificial sequence
  SiRNA target sequence
ctgccttatatggttttatt

SEQ ID NO: 227838 - DNA, 20 bp, Artificial sequence
  SiRNA target sequence
tgccttatatggttttattc

SEQ ID NO: 227839 - DNA, 20 bp, Artificial sequence
  SiRNA target sequence
gccttatatggttttattct

SEQ ID NO: 227840 - DNA, 20 bp, Artificial sequence
  SiRNA target sequence
ccttatatggttttattctg

SEQ ID NO: 227841 - DNA, 20 bp, Artificial sequence
  SiRNA target sequence
cttatatggttttattctgt

SEQ ID NO: 227842 - DNA, 20 bp, Artificial sequence
  SiRNA target sequence
ttatatggttttattctgtt

SEQ ID NO: 227843 - DNA, 20 bp, Artificial sequence
  SiRNA target sequence
tatatggttttattctgttt

SEQ ID NO: 227844 - DNA, 20 bp, Artificial sequence
  SiRNA target sequence
atatggttttattctgtttt

SEQ ID NO: 227845 - DNA, 20 bp, Artificial sequence
  SiRNA target sequence
tatggttttattctgttttc

SEQ ID NO: 227846 - DNA, 20 bp, Artificial sequence
  SiRNA target sequence
atggttttattctgttttct

SEQ ID NO: 227847 - DNA, 20 bp, Artificial sequence
  SiRNA target sequence
tggttttattctgttttcta

SEQ ID NO: 227848 - DNA, 20 bp, Artificial sequence
  SiRNA target sequence
ggttttattctgttttctat

SEQ ID NO: 227849 - DNA, 20 bp, Artificial sequence
  SiRNA target sequence
gttttattctgttttctatc

SEQ ID NO: 227850 - DNA, 20 bp, Artificial sequence
  SiRNA target sequence
ttttattctgttttctatct

SEQ ID NO: 227851 - DNA, 20 bp, Artificial sequence
  SiRNA target sequence
tttattctgttttctatctc

SEQ ID NO: 227852 - DNA, 20 bp, Artificial sequence
  SiRNA target sequence
ttattctgttttctatctca

SEQ ID NO: 227853 - DNA, 20 bp, Artificial sequence
  SiRNA target sequence
tattctgttttctatctcaa

SEQ ID NO: 227854 - DNA, 20 bp, Artificial sequence
  SiRNA target sequence
attctgttttctatctcaat

SEQ ID NO: 227855 - DNA, 20 bp, Artificial sequence
  SiRNA target sequence
ttctgttttctatctcaata

SEQ ID NO: 227856 - DNA, 20 bp, Artificial sequence
  SiRNA target sequence
tctgttttctatctcaatag

SEQ ID NO: 227857 - DNA, 20 bp, Artificial sequence
  SiRNA target sequence
ctgttttctatctcaataga

SEQ ID NO: 227858 - DNA, 20 bp, Artificial sequence
  SiRNA target sequence
tgttttctatctcaatagaa

SEQ ID NO: 227859 - DNA, 20 bp, Artificial sequence
  SiRNA target sequence
gttttctatctcaatagaaa

SEQ ID NO: 227860 - DNA, 20 bp, Artificial sequence
  SiRNA target sequence
ttttctatctcaatagaaaa

SEQ ID NO: 227861 - DNA, 20 bp, Artificial sequence
  SiRNA target sequence
tttctatctcaatagaaaat

SEQ ID NO: 227862 - DNA, 20 bp, Artificial sequence
  SiRNA target sequence
ttctatctcaatagaaaata

SEQ ID NO: 227863 - DNA, 20 bp, Artificial sequence
  SiRNA target sequence
tctatctcaatagaaaatat

SEQ ID NO: 227864 - DNA, 20 bp, Artificial sequence
  SiRNA target sequence
ctatctcaatagaaaatata

SEQ ID NO: 227865 - DNA, 20 bp, Artificial sequence
  SiRNA target sequence
tatctcaatagaaaatataa

SEQ ID NO: 227866 - DNA, 20 bp, Artificial sequence
  SiRNA target sequence
atctcaatagaaaatataaa

SEQ ID NO: 227867 - DNA, 20 bp, Artificial sequence
  SiRNA target sequence
tctcaatagaaaatataaag

SEQ ID NO: 227868 - DNA, 20 bp, Artificial sequence
  SiRNA target sequence
ctcaatagaaaatataaaga

SEQ ID NO: 227869 - DNA, 20 bp, Artificial sequence
  SiRNA target sequence
tcaatagaaaatataaagaa

SEQ ID NO: 227870 - DNA, 20 bp, Artificial sequence
  SiRNA target sequence
caatagaaaatataaagaat

SEQ ID NO: 227871 - DNA, 20 bp, Artificial sequence
  SiRNA target sequence
aatagaaaatataaagaatc

SEQ ID NO: 227872 - DNA, 20 bp, Artificial sequence
  SiRNA target sequence
atagaaaatataaagaatct

SEQ ID NO: 227873 - DNA, 20 bp, Artificial sequence
  SiRNA target sequence
tagaaaatataaagaatctg

SEQ ID NO: 227874 - DNA, 20 bp, Artificial sequence
  SiRNA target sequence
agaaaatataaagaatctgt

SEQ ID NO: 227875 - DNA, 20 bp, Artificial sequence
  SiRNA target sequence
gaaaatataaagaatctgtc

SEQ ID NO: 227876 - DNA, 20 bp, Artificial sequence
  SiRNA target sequence
aaaatataaagaatctgtcg

SEQ ID NO: 227877 - DNA, 20 bp, Artificial sequence
  SiRNA target sequence
aaatataaagaatctgtcga

SEQ ID NO: 227878 - DNA, 20 bp, Artificial sequence
  SiRNA target sequence
aatataaagaatctgtcgag

SEQ ID NO: 227879 - DNA, 20 bp, Artificial sequence
  SiRNA target sequence
atataaagaatctgtcgaga

SEQ ID NO: 227880 - DNA, 20 bp, Artificial sequence
  SiRNA target sequence
tataaagaatctgtcgagaa

SEQ ID NO: 227881 - DNA, 20 bp, Artificial sequence
  SiRNA target sequence
ataaagaatctgtcgagaat

SEQ ID NO: 227882 - DNA, 20 bp, Artificial sequence
  SiRNA target sequence
taaagaatctgtcgagaata

SEQ ID NO: 227883 - DNA, 20 bp, Artificial sequence
  SiRNA target sequence
aaagaatctgtcgagaataa

SEQ ID NO: 227884 - DNA, 20 bp, Artificial sequence
  SiRNA target sequence
aagaatctgtcgagaataat

SEQ ID NO: 227885 - DNA, 20 bp, Artificial sequence
  SiRNA target sequence
agaatctgtcgagaataatg

SEQ ID NO: 227886 - DNA, 20 bp, Artificial sequence
  SiRNA target sequence
gaatctgtcgagaataatgc

SEQ ID NO: 227887 - DNA, 20 bp, Artificial sequence
  SiRNA target sequence
aatctgtcgagaataatgca

SEQ ID NO: 227888 - DNA, 20 bp, Artificial sequence
  SiRNA target sequence
atctgtcgagaataatgcac

SEQ ID NO: 227889 - DNA, 20 bp, Artificial sequence
  SiRNA target sequence
tctgtcgagaataatgcacc

SEQ ID NO: 227890 - DNA, 20 bp, Artificial sequence
  SiRNA target sequence
ctgtcgagaataatgcacca

SEQ ID NO: 227891 - DNA, 20 bp, Artificial sequence
  SiRNA target sequence
tgtcgagaataatgcaccaa

SEQ ID NO: 227892 - DNA, 20 bp, Artificial sequence
  SiRNA target sequence
gtcgagaataatgcaccaat

SEQ ID NO: 227893 - DNA, 20 bp, Artificial sequence
  SiRNA target sequence
tcgagaataatgcaccaatt

SEQ ID NO: 227894 - DNA, 20 bp, Artificial sequence
  SiRNA target sequence
cgagaataatgcaccaattg

SEQ ID NO: 227895 - DNA, 20 bp, Artificial sequence
  SiRNA target sequence
gagaataatgcaccaattga

SEQ ID NO: 227896 - DNA, 20 bp, Artificial sequence
  SiRNA target sequence
agaataatgcaccaattgat

SEQ ID NO: 227897 - DNA, 20 bp, Artificial sequence
  SiRNA target sequence
gaataatgcaccaattgata

SEQ ID NO: 227898 - DNA, 20 bp, Artificial sequence
  SiRNA target sequence
aataatgcaccaattgatat

SEQ ID NO: 227899 - DNA, 20 bp, Artificial sequence
  SiRNA target sequence
ataatgcaccaattgatatt

SEQ ID NO: 227900 - DNA, 20 bp, Artificial sequence
  SiRNA target sequence
taatgcaccaattgatattg

SEQ ID NO: 227901 - DNA, 20 bp, Artificial sequence
  SiRNA target sequence
aatgcaccaattgatattga

SEQ ID NO: 227902 - DNA, 20 bp, Artificial sequence
  SiRNA target sequence
atgcaccaattgatattgat

SEQ ID NO: 227903 - DNA, 20 bp, Artificial sequence
  SiRNA target sequence
tgcaccaattgatattgatt

SEQ ID NO: 227904 - DNA, 20 bp, Artificial sequence
  SiRNA target sequence
gcaccaattgatattgattt

SEQ ID NO: 227905 - DNA, 20 bp, Artificial sequence
  SiRNA target sequence
caccaattgatattgattta

SEQ ID NO: 227906 - DNA, 20 bp, Artificial sequence
  SiRNA target sequence
accaattgatattgatttat

SEQ ID NO: 227907 - DNA, 20 bp, Artificial sequence
  SiRNA target sequence
ccaattgatattgatttatt

SEQ ID NO: 227908 - DNA, 20 bp, Artificial sequence
  SiRNA target sequence
caattgatattgatttattc

SEQ ID NO: 227909 - DNA, 20 bp, Artificial sequence
  SiRNA target sequence
aattgatattgatttattca

SEQ ID NO: 227910 - DNA, 20 bp, Artificial sequence
  SiRNA target sequence
attgatattgatttattcac

SEQ ID NO: 227911 - DNA, 20 bp, Artificial sequence
  SiRNA target sequence
ttgatattgatttattcact

SEQ ID NO: 227912 - DNA, 20 bp, Artificial sequence
  SiRNA target sequence
tgatattgatttattcacta

SEQ ID NO: 227913 - DNA, 20 bp, Artificial sequence
  SiRNA target sequence
gatattgatttattcactag

SEQ ID NO: 227914 - DNA, 20 bp, Artificial sequence
  SiRNA target sequence
atattgatttattcactagt

SEQ ID NO: 227915 - DNA, 20 bp, Artificial sequence
  SiRNA target sequence
tattgatttattcactagtt

SEQ ID NO: 227916 - DNA, 20 bp, Artificial sequence
  SiRNA target sequence
attgatttattcactagttc

SEQ ID NO: 227917 - DNA, 20 bp, Artificial sequence
  SiRNA target sequence
ttgatttattcactagttca

SEQ ID NO: 227918 - DNA, 20 bp, Artificial sequence
  SiRNA target sequence
tgatttattcactagttcaa

SEQ ID NO: 227919 - DNA, 20 bp, Artificial sequence
  SiRNA target sequence
gatttattcactagttcaaa

SEQ ID NO: 227920 - DNA, 20 bp, Artificial sequence
  SiRNA target sequence
atttattcactagttcaaaa

SEQ ID NO: 227921 - DNA, 20 bp, Artificial sequence
  SiRNA target sequence
tttattcactagttcaaaag

SEQ ID NO: 227922 - DNA, 20 bp, Artificial sequence
  SiRNA target sequence
ttattcactagttcaaaagt

SEQ ID NO: 227923 - DNA, 20 bp, Artificial sequence
  SiRNA target sequence
tattcactagttcaaaagtc

SEQ ID NO: 227924 - DNA, 20 bp, Artificial sequence
  SiRNA target sequence
attcactagttcaaaagtca

SEQ ID NO: 227925 - DNA, 20 bp, Artificial sequence
  SiRNA target sequence
ttcactagttcaaaagtcaa

SEQ ID NO: 227926 - DNA, 20 bp, Artificial sequence
  SiRNA target sequence
tcactagttcaaaagtcaag

SEQ ID NO: 227927 - DNA, 20 bp, Artificial sequence
  SiRNA target sequence
cactagttcaaaagtcaagg

SEQ ID NO: 227928 - DNA, 20 bp, Artificial sequence
  SiRNA target sequence
actagttcaaaagtcaaggc

SEQ ID NO: 227929 - DNA, 20 bp, Artificial sequence
  SiRNA target sequence
ctagttcaaaagtcaaggca

SEQ ID NO: 227930 - DNA, 20 bp, Artificial sequence
  SiRNA target sequence
tagttcaaaagtcaaggcac

SEQ ID NO: 227931 - DNA, 20 bp, Artificial sequence
  SiRNA target sequence
agttcaaaagtcaaggcacc

SEQ ID NO: 227932 - DNA, 20 bp, Artificial sequence
  SiRNA target sequence
gttcaaaagtcaaggcacct

SEQ ID NO: 227933 - DNA, 20 bp, Artificial sequence
  SiRNA target sequence
ttcaaaagtcaaggcacctt

SEQ ID NO: 227934 - DNA, 20 bp, Artificial sequence
  SiRNA target sequence
tcaaaagtcaaggcaccttc

SEQ ID NO: 227935 - DNA, 20 bp, Artificial sequence
  SiRNA target sequence
caaaagtcaaggcaccttct

SEQ ID NO: 227936 - DNA, 20 bp, Artificial sequence
  SiRNA target sequence
aaaagtcaaggcaccttctt

SEQ ID NO: 227937 - DNA, 20 bp, Artificial sequence
  SiRNA target sequence
aaagtcaaggcaccttcttc

SEQ ID NO: 227938 - DNA, 20 bp, Artificial sequence
  SiRNA target sequence
aagtcaaggcaccttcttct

SEQ ID NO: 227939 - DNA, 20 bp, Artificial sequence
  SiRNA target sequence
agtcaaggcaccttcttctg

SEQ ID NO: 227940 - DNA, 20 bp, Artificial sequence
  SiRNA target sequence
gtcaaggcaccttcttctga

SEQ ID NO: 227941 - DNA, 20 bp, Artificial sequence
  SiRNA target sequence
tcaaggcaccttcttctgaa

SEQ ID NO: 227942 - DNA, 20 bp, Artificial sequence
  SiRNA target sequence
caaggcaccttcttctgaac

SEQ ID NO: 227943 - DNA, 20 bp, Artificial sequence
  SiRNA target sequence
aaggcaccttcttctgaacc

SEQ ID NO: 227944 - DNA, 20 bp, Artificial sequence
  SiRNA target sequence
aggcaccttcttctgaacct

SEQ ID NO: 227945 - DNA, 20 bp, Artificial sequence
  SiRNA target sequence
ggcaccttcttctgaaccta

SEQ ID NO: 227946 - DNA, 20 bp, Artificial sequence
  SiRNA target sequence
gcaccttcttctgaacctac

SEQ ID NO: 227947 - DNA, 20 bp, Artificial sequence
  SiRNA target sequence
caccttcttctgaacctact

SEQ ID NO: 227948 - DNA, 20 bp, Artificial sequence
  SiRNA target sequence
accttcttctgaacctactg

SEQ ID NO: 227949 - DNA, 20 bp, Artificial sequence
  SiRNA target sequence
ccttcttctgaacctactgt

SEQ ID NO: 227950 - DNA, 20 bp, Artificial sequence
  SiRNA target sequence
cttcttctgaacctactgtt

SEQ ID NO: 227951 - DNA, 20 bp, Artificial sequence
  SiRNA target sequence
ttcttctgaacctactgttg

SEQ ID NO: 227952 - DNA, 20 bp, Artificial sequence
  SiRNA target sequence
tcttctgaacctactgttgc

SEQ ID NO: 227953 - DNA, 20 bp, Artificial sequence
  SiRNA target sequence
cttctgaacctactgttgct

SEQ ID NO: 227954 - DNA, 20 bp, Artificial sequence
  SiRNA target sequence
ttctgaacctactgttgcta

SEQ ID NO: 227955 - DNA, 20 bp, Artificial sequence
  SiRNA target sequence
tctgaacctactgttgctac

SEQ ID NO: 227956 - DNA, 20 bp, Artificial sequence
  SiRNA target sequence
ctgaacctactgttgctacc

SEQ ID NO: 227957 - DNA, 20 bp, Artificial sequence
  SiRNA target sequence
tgaacctactgttgctacca

SEQ ID NO: 227958 - DNA, 20 bp, Artificial sequence
  SiRNA target sequence
gaacctactgttgctaccaa

SEQ ID NO: 227959 - DNA, 20 bp, Artificial sequence
  SiRNA target sequence
aacctactgttgctaccaaa

SEQ ID NO: 227960 - DNA, 20 bp, Artificial sequence
  SiRNA target sequence
acctactgttgctaccaaaa

SEQ ID NO: 227961 - DNA, 20 bp, Artificial sequence
  SiRNA target sequence
cctactgttgctaccaaaag

SEQ ID NO: 227962 - DNA, 20 bp, Artificial sequence
  SiRNA target sequence
ctactgttgctaccaaaagt

SEQ ID NO: 227963 - DNA, 20 bp, Artificial sequence
  SiRNA target sequence
tactgttgctaccaaaagtg

SEQ ID NO: 227964 - DNA, 20 bp, Artificial sequence
  SiRNA target sequence
actgttgctaccaaaagtgt

SEQ ID NO: 227965 - DNA, 20 bp, Artificial sequence
  SiRNA target sequence
ctgttgctaccaaaagtgtt

SEQ ID NO: 227966 - DNA, 20 bp, Artificial sequence
  SiRNA target sequence
tgttgctaccaaaagtgtta

SEQ ID NO: 227967 - DNA, 20 bp, Artificial sequence
  SiRNA target sequence
gttgctaccaaaagtgttac

SEQ ID NO: 227968 - DNA, 20 bp, Artificial sequence
  SiRNA target sequence
ttgctaccaaaagtgttact

SEQ ID NO: 227969 - DNA, 20 bp, Artificial sequence
  SiRNA target sequence
tgctaccaaaagtgttacta

SEQ ID NO: 227970 - DNA, 20 bp, Artificial sequence
  SiRNA target sequence
gctaccaaaagtgttactac

SEQ ID NO: 227971 - DNA, 20 bp, Artificial sequence
  SiRNA target sequence
ctaccaaaagtgttactaca

SEQ ID NO: 227972 - DNA, 20 bp, Artificial sequence
  SiRNA target sequence
taccaaaagtgttactacag

SEQ ID NO: 227973 - DNA, 20 bp, Artificial sequence
  SiRNA target sequence
accaaaagtgttactacaga

SEQ ID NO: 227974 - DNA, 20 bp, Artificial sequence
  SiRNA target sequence
ccaaaagtgttactacagaa

SEQ ID NO: 227975 - DNA, 20 bp, Artificial sequence
  SiRNA target sequence
caaaagtgttactacagaag

SEQ ID NO: 227976 - DNA, 20 bp, Artificial sequence
  SiRNA target sequence
aaaagtgttactacagaaga

SEQ ID NO: 227977 - DNA, 20 bp, Artificial sequence
  SiRNA target sequence
aaagtgttactacagaagaa

SEQ ID NO: 227978 - DNA, 20 bp, Artificial sequence
  SiRNA target sequence
aagtgttactacagaagaat

SEQ ID NO: 227979 - DNA, 20 bp, Artificial sequence
  SiRNA target sequence
agtgttactacagaagaata

SEQ ID NO: 227980 - DNA, 20 bp, Artificial sequence
  SiRNA target sequence
gtgttactacagaagaataa

SEQ ID NO: 227981 - DNA, 21 bp, Artificial sequence
  SiRNA target sequence
atgtcagtagacaattcgaaa

SEQ ID NO: 227982 - DNA, 21 bp, Artificial sequence
  SiRNA target sequence
tgtcagtagacaattcgaaag

SEQ ID NO: 227983 - DNA, 21 bp, Artificial sequence
  SiRNA target sequence
gtcagtagacaattcgaaagt

SEQ ID NO: 227984 - DNA, 21 bp, Artificial sequence
  SiRNA target sequence
tcagtagacaattcgaaagtt

SEQ ID NO: 227985 - DNA, 21 bp, Artificial sequence
  SiRNA target sequence
cagtagacaattcgaaagttc

SEQ ID NO: 227986 - DNA, 21 bp, Artificial sequence
  SiRNA target sequence
agtagacaattcgaaagttct

SEQ ID NO: 227987 - DNA, 21 bp, Artificial sequence
  SiRNA target sequence
gtagacaattcgaaagttcta

SEQ ID NO: 227988 - DNA, 21 bp, Artificial sequence
  SiRNA target sequence
tagacaattcgaaagttctac

SEQ ID NO: 227989 - DNA, 21 bp, Artificial sequence
  SiRNA target sequence
agacaattcgaaagttctaca

SEQ ID NO: 227990 - DNA, 21 bp, Artificial sequence
  SiRNA target sequence
gacaattcgaaagttctacaa

SEQ ID NO: 227991 - DNA, 21 bp, Artificial sequence
  SiRNA target sequence
acaattcgaaagttctacaaa

SEQ ID NO: 227992 - DNA, 21 bp, Artificial sequence
  SiRNA target sequence
caattcgaaagttctacaaaa

SEQ ID NO: 227993 - DNA, 21 bp, Artificial sequence
  SiRNA target sequence
aattcgaaagttctacaaaat

SEQ ID NO: 227994 - DNA, 21 bp, Artificial sequence
  SiRNA target sequence
attcgaaagttctacaaaata

SEQ ID NO: 227995 - DNA, 21 bp, Artificial sequence
  SiRNA target sequence
ttcgaaagttctacaaaataa

SEQ ID NO: 227996 - DNA, 21 bp, Artificial sequence
  SiRNA target sequence
tcgaaagttctacaaaataac

SEQ ID NO: 227997 - DNA, 21 bp, Artificial sequence
  SiRNA target sequence
cgaaagttctacaaaataacg

SEQ ID NO: 227998 - DNA, 21 bp, Artificial sequence
  SiRNA target sequence
gaaagttctacaaaataacga

SEQ ID NO: 227999 - DNA, 21 bp, Artificial sequence
  SiRNA target sequence
aaagttctacaaaataacgaa

SEQ ID NO: 228000 - DNA, 21 bp, Artificial sequence
  SiRNA target sequence
aagttctacaaaataacgaaa

SEQ ID NO: 228001 - DNA, 21 bp, Artificial sequence
  SiRNA target sequence
agttctacaaaataacgaaaa

SEQ ID NO: 228002 - DNA, 21 bp, Artificial sequence
  SiRNA target sequence
gttctacaaaataacgaaaac

SEQ ID NO: 228003 - DNA, 21 bp, Artificial sequence
  SiRNA target sequence
ttctacaaaataacgaaaact

SEQ ID NO: 228004 - DNA, 21 bp, Artificial sequence
  SiRNA target sequence
tctacaaaataacgaaaactc

SEQ ID NO: 228005 - DNA, 21 bp, Artificial sequence
  SiRNA target sequence
ctacaaaataacgaaaactct

SEQ ID NO: 228006 - DNA, 21 bp, Artificial sequence
  SiRNA target sequence
tacaaaataacgaaaactctg

SEQ ID NO: 228007 - DNA, 21 bp, Artificial sequence
  SiRNA target sequence
acaaaataacgaaaactctgc

SEQ ID NO: 228008 - DNA, 21 bp, Artificial sequence
  SiRNA target sequence
caaaataacgaaaactctgct

SEQ ID NO: 228009 - DNA, 21 bp, Artificial sequence
  SiRNA target sequence
aaaataacgaaaactctgctc

SEQ ID NO: 228010 - DNA, 21 bp, Artificial sequence
  SiRNA target sequence
aaataacgaaaactctgctct

SEQ ID NO: 228011 - DNA, 21 bp, Artificial sequence
  SiRNA target sequence
aataacgaaaactctgctctt

SEQ ID NO: 228012 - DNA, 21 bp, Artificial sequence
  SiRNA target sequence
ataacgaaaactctgctcttc

SEQ ID NO: 228013 - DNA, 21 bp, Artificial sequence
  SiRNA target sequence
taacgaaaactctgctcttcc

SEQ ID NO: 228014 - DNA, 21 bp, Artificial sequence
  SiRNA target sequence
aacgaaaactctgctcttcct

SEQ ID NO: 228015 - DNA, 21 bp, Artificial sequence
  SiRNA target sequence
acgaaaactctgctcttccta

SEQ ID NO: 228016 - DNA, 21 bp, Artificial sequence
  SiRNA target sequence
cgaaaactctgctcttcctac

SEQ ID NO: 228017 - DNA, 21 bp, Artificial sequence
  SiRNA target sequence
gaaaactctgctcttcctaca

SEQ ID NO: 228018 - DNA, 21 bp, Artificial sequence
  SiRNA target sequence
aaaactctgctcttcctacag

SEQ ID NO: 228019 - DNA, 21 bp, Artificial sequence
  SiRNA target sequence
aaactctgctcttcctacaga

SEQ ID NO: 228020 - DNA, 21 bp, Artificial sequence
  SiRNA target sequence
aactctgctcttcctacagaa

SEQ ID NO: 228021 - DNA, 21 bp, Artificial sequence
  SiRNA target sequence
actctgctcttcctacagaag

SEQ ID NO: 228022 - DNA, 21 bp, Artificial sequence
  SiRNA target sequence
ctctgctcttcctacagaaga

SEQ ID NO: 228023 - DNA, 21 bp, Artificial sequence
  SiRNA target sequence
tctgctcttcctacagaagat

SEQ ID NO: 228024 - DNA, 21 bp, Artificial sequence
  SiRNA target sequence
ctgctcttcctacagaagatg

SEQ ID NO: 228025 - DNA, 21 bp, Artificial sequence
  SiRNA target sequence
tgctcttcctacagaagatga

SEQ ID NO: 228026 - DNA, 21 bp, Artificial sequence
  SiRNA target sequence
gctcttcctacagaagatgaa

SEQ ID NO: 228027 - DNA, 21 bp, Artificial sequence
  SiRNA target sequence
ctcttcctacagaagatgaaa

SEQ ID NO: 228028 - DNA, 21 bp, Artificial sequence
  SiRNA target sequence
tcttcctacagaagatgaaat

SEQ ID NO: 228029 - DNA, 21 bp, Artificial sequence
  SiRNA target sequence
cttcctacagaagatgaaatt

SEQ ID NO: 228030 - DNA, 21 bp, Artificial sequence
  SiRNA target sequence
ttcctacagaagatgaaattg

SEQ ID NO: 228031 - DNA, 21 bp, Artificial sequence
  SiRNA target sequence
tcctacagaagatgaaattga

SEQ ID NO: 228032 - DNA, 21 bp, Artificial sequence
  SiRNA target sequence
cctacagaagatgaaattgag

SEQ ID NO: 228033 - DNA, 21 bp, Artificial sequence
  SiRNA target sequence
ctacagaagatgaaattgagt

SEQ ID NO: 228034 - DNA, 21 bp, Artificial sequence
  SiRNA target sequence
tacagaagatgaaattgagta

SEQ ID NO: 228035 - DNA, 21 bp, Artificial sequence
  SiRNA target sequence
acagaagatgaaattgagtat

SEQ ID NO: 228036 - DNA, 21 bp, Artificial sequence
  SiRNA target sequence
cagaagatgaaattgagtatg

SEQ ID NO: 228037 - DNA, 21 bp, Artificial sequence
  SiRNA target sequence
agaagatgaaattgagtatga

SEQ ID NO: 228038 - DNA, 21 bp, Artificial sequence
  SiRNA target sequence
gaagatgaaattgagtatgag

SEQ ID NO: 228039 - DNA, 21 bp, Artificial sequence
  SiRNA target sequence
aagatgaaattgagtatgagg

SEQ ID NO: 228040 - DNA, 21 bp, Artificial sequence
  SiRNA target sequence
agatgaaattgagtatgaggc

SEQ ID NO: 228041 - DNA, 21 bp, Artificial sequence
  SiRNA target sequence
gatgaaattgagtatgaggcc

SEQ ID NO: 228042 - DNA, 21 bp, Artificial sequence
  SiRNA target sequence
atgaaattgagtatgaggcca

SEQ ID NO: 228043 - DNA, 21 bp, Artificial sequence
  SiRNA target sequence
tgaaattgagtatgaggccag

SEQ ID NO: 228044 - DNA, 21 bp, Artificial sequence
  SiRNA target sequence
gaaattgagtatgaggccagc

SEQ ID NO: 228045 - DNA, 21 bp, Artificial sequence
  SiRNA target sequence
aaattgagtatgaggccagca

SEQ ID NO: 228046 - DNA, 21 bp, Artificial sequence
  SiRNA target sequence
aattgagtatgaggccagcaa

SEQ ID NO: 228047 - DNA, 21 bp, Artificial sequence
  SiRNA target sequence
attgagtatgaggccagcaat

SEQ ID NO: 228048 - DNA, 21 bp, Artificial sequence
  SiRNA target sequence
ttgagtatgaggccagcaatg

SEQ ID NO: 228049 - DNA, 21 bp, Artificial sequence
  SiRNA target sequence
tgagtatgaggccagcaatgg

SEQ ID NO: 228050 - DNA, 21 bp, Artificial sequence
  SiRNA target sequence
gagtatgaggccagcaatggt

SEQ ID NO: 228051 - DNA, 21 bp, Artificial sequence
  SiRNA target sequence
agtatgaggccagcaatggtt

SEQ ID NO: 228052 - DNA, 21 bp, Artificial sequence
  SiRNA target sequence
gtatgaggccagcaatggttc

SEQ ID NO: 228053 - DNA, 21 bp, Artificial sequence
  SiRNA target sequence
tatgaggccagcaatggttct

SEQ ID NO: 228054 - DNA, 21 bp, Artificial sequence
  SiRNA target sequence
atgaggccagcaatggttctg

SEQ ID NO: 228055 - DNA, 21 bp, Artificial sequence
  SiRNA target sequence
tgaggccagcaatggttctgg

SEQ ID NO: 228056 - DNA, 21 bp, Artificial sequence
  SiRNA target sequence
gaggccagcaatggttctggt

SEQ ID NO: 228057 - DNA, 21 bp, Artificial sequence
  SiRNA target sequence
aggccagcaatggttctggta

SEQ ID NO: 228058 - DNA, 21 bp, Artificial sequence
  SiRNA target sequence
ggccagcaatggttctggtat

SEQ ID NO: 228059 - DNA, 21 bp, Artificial sequence
  SiRNA target sequence
gccagcaatggttctggtata

SEQ ID NO: 228060 - DNA, 21 bp, Artificial sequence
  SiRNA target sequence
ccagcaatggttctggtatat

SEQ ID NO: 228061 - DNA, 21 bp, Artificial sequence
  SiRNA target sequence
cagcaatggttctggtatata

SEQ ID NO: 228062 - DNA, 21 bp, Artificial sequence
  SiRNA target sequence
agcaatggttctggtatatat

SEQ ID NO: 228063 - DNA, 21 bp, Artificial sequence
  SiRNA target sequence
gcaatggttctggtatatatt

SEQ ID NO: 228064 - DNA, 21 bp, Artificial sequence
  SiRNA target sequence
caatggttctggtatatattc

SEQ ID NO: 228065 - DNA, 21 bp, Artificial sequence
  SiRNA target sequence
aatggttctggtatatattca

SEQ ID NO: 228066 - DNA, 21 bp, Artificial sequence
  SiRNA target sequence
atggttctggtatatattcac

SEQ ID NO: 228067 - DNA, 21 bp, Artificial sequence
  SiRNA target sequence
tggttctggtatatattcact

SEQ ID NO: 228068 - DNA, 21 bp, Artificial sequence
  SiRNA target sequence
ggttctggtatatattcactt

SEQ ID NO: 228069 - DNA, 21 bp, Artificial sequence
  SiRNA target sequence
gttctggtatatattcactta

SEQ ID NO: 228070 - DNA, 21 bp, Artificial sequence
  SiRNA target sequence
ttctggtatatattcacttat

SEQ ID NO: 228071 - DNA, 21 bp, Artificial sequence
  SiRNA target sequence
tctggtatatattcacttatt

SEQ ID NO: 228072 - DNA, 21 bp, Artificial sequence
  SiRNA target sequence
ctggtatatattcacttatta

SEQ ID NO: 228073 - DNA, 21 bp, Artificial sequence
  SiRNA target sequence
tggtatatattcacttattag

SEQ ID NO: 228074 - DNA, 21 bp, Artificial sequence
  SiRNA target sequence
ggtatatattcacttattaga

SEQ ID NO: 228075 - DNA, 21 bp, Artificial sequence
  SiRNA target sequence
gtatatattcacttattagag

SEQ ID NO: 228076 - DNA, 21 bp, Artificial sequence
  SiRNA target sequence
tatatattcacttattagagt

SEQ ID NO: 228077 - DNA, 21 bp, Artificial sequence
  SiRNA target sequence
atatattcacttattagagta

SEQ ID NO: 228078 - DNA, 21 bp, Artificial sequence
  SiRNA target sequence
tatattcacttattagagtag

SEQ ID NO: 228079 - DNA, 21 bp, Artificial sequence
  SiRNA target sequence
atattcacttattagagtagc

SEQ ID NO: 228080 - DNA, 21 bp, Artificial sequence
  SiRNA target sequence
tattcacttattagagtagca

SEQ ID NO: 228081 - DNA, 21 bp, Artificial sequence
  SiRNA target sequence
attcacttattagagtagcaa

SEQ ID NO: 228082 - DNA, 21 bp, Artificial sequence
  SiRNA target sequence
ttcacttattagagtagcaaa

SEQ ID NO: 228083 - DNA, 21 bp, Artificial sequence
  SiRNA target sequence
tcacttattagagtagcaaag

SEQ ID NO: 228084 - DNA, 21 bp, Artificial sequence
  SiRNA target sequence
cacttattagagtagcaaagg

SEQ ID NO: 228085 - DNA, 21 bp, Artificial sequence
  SiRNA target sequence
acttattagagtagcaaaggt

SEQ ID NO: 228086 - DNA, 21 bp, Artificial sequence
  SiRNA target sequence
cttattagagtagcaaaggtt

SEQ ID NO: 228087 - DNA, 21 bp, Artificial sequence
  SiRNA target sequence
ttattagagtagcaaaggttg

SEQ ID NO: 228088 - DNA, 21 bp, Artificial sequence
  SiRNA target sequence
tattagagtagcaaaggttga

SEQ ID NO: 228089 - DNA, 21 bp, Artificial sequence
  SiRNA target sequence
attagagtagcaaaggttgag

SEQ ID NO: 228090 - DNA, 21 bp, Artificial sequence
  SiRNA target sequence
ttagagtagcaaaggttgaga

SEQ ID NO: 228091 - DNA, 21 bp, Artificial sequence
  SiRNA target sequence
tagagtagcaaaggttgagag

SEQ ID NO: 228092 - DNA, 21 bp, Artificial sequence
  SiRNA target sequence
agagtagcaaaggttgagaga

SEQ ID NO: 228093 - DNA, 21 bp, Artificial sequence
  SiRNA target sequence
gagtagcaaaggttgagagaa

SEQ ID NO: 228094 - DNA, 21 bp, Artificial sequence
  SiRNA target sequence
agtagcaaaggttgagagaaa

SEQ ID NO: 228095 - DNA, 21 bp, Artificial sequence
  SiRNA target sequence
gtagcaaaggttgagagaaag

SEQ ID NO: 228096 - DNA, 21 bp, Artificial sequence
  SiRNA target sequence
tagcaaaggttgagagaaaga

SEQ ID NO: 228097 - DNA, 21 bp, Artificial sequence
  SiRNA target sequence
agcaaaggttgagagaaagat

SEQ ID NO: 228098 - DNA, 21 bp, Artificial sequence
  SiRNA target sequence
gcaaaggttgagagaaagatg

SEQ ID NO: 228099 - DNA, 21 bp, Artificial sequence
  SiRNA target sequence
caaaggttgagagaaagatgt

SEQ ID NO: 228100 - DNA, 21 bp, Artificial sequence
  SiRNA target sequence
aaaggttgagagaaagatgtt

SEQ ID NO: 228101 - DNA, 21 bp, Artificial sequence
  SiRNA target sequence
aaggttgagagaaagatgttt

SEQ ID NO: 228102 - DNA, 21 bp, Artificial sequence
  SiRNA target sequence
aggttgagagaaagatgtttt

SEQ ID NO: 228103 - DNA, 21 bp, Artificial sequence
  SiRNA target sequence
ggttgagagaaagatgttttg

SEQ ID NO: 228104 - DNA, 21 bp, Artificial sequence
  SiRNA target sequence
gttgagagaaagatgttttgg

SEQ ID NO: 228105 - DNA, 21 bp, Artificial sequence
  SiRNA target sequence
ttgagagaaagatgttttgga

SEQ ID NO: 228106 - DNA, 21 bp, Artificial sequence
  SiRNA target sequence
tgagagaaagatgttttggat

SEQ ID NO: 228107 - DNA, 21 bp, Artificial sequence
  SiRNA target sequence
gagagaaagatgttttggatc

SEQ ID NO: 228108 - DNA, 21 bp, Artificial sequence
  SiRNA target sequence
agagaaagatgttttggatca

SEQ ID NO: 228109 - DNA, 21 bp, Artificial sequence
  SiRNA target sequence
gagaaagatgttttggatcat

SEQ ID NO: 228110 - DNA, 21 bp, Artificial sequence
  SiRNA target sequence
agaaagatgttttggatcatg

SEQ ID NO: 228111 - DNA, 21 bp, Artificial sequence
  SiRNA target sequence
gaaagatgttttggatcatgg

SEQ ID NO: 228112 - DNA, 21 bp, Artificial sequence
  SiRNA target sequence
aaagatgttttggatcatggc

SEQ ID NO: 228113 - DNA, 21 bp, Artificial sequence
  SiRNA target sequence
aagatgttttggatcatggca

SEQ ID NO: 228114 - DNA, 21 bp, Artificial sequence
  SiRNA target sequence
agatgttttggatcatggcag

SEQ ID NO: 228115 - DNA, 21 bp, Artificial sequence
  SiRNA target sequence
gatgttttggatcatggcagc

SEQ ID NO: 228116 - DNA, 21 bp, Artificial sequence
  SiRNA target sequence
atgttttggatcatggcagct

SEQ ID NO: 228117 - DNA, 21 bp, Artificial sequence
  SiRNA target sequence
tgttttggatcatggcagcta

SEQ ID NO: 228118 - DNA, 21 bp, Artificial sequence
  SiRNA target sequence
gttttggatcatggcagctat

SEQ ID NO: 228119 - DNA, 21 bp, Artificial sequence
  SiRNA target sequence
ttttggatcatggcagctatg

SEQ ID NO: 228120 - DNA, 21 bp, Artificial sequence
  SiRNA target sequence
tttggatcatggcagctatgt

SEQ ID NO: 228121 - DNA, 21 bp, Artificial sequence
  SiRNA target sequence
ttggatcatggcagctatgtt

SEQ ID NO: 228122 - DNA, 21 bp, Artificial sequence
  SiRNA target sequence
tggatcatggcagctatgttc

SEQ ID NO: 228123 - DNA, 21 bp, Artificial sequence
  SiRNA target sequence
ggatcatggcagctatgttct

SEQ ID NO: 228124 - DNA, 21 bp, Artificial sequence
  SiRNA target sequence
gatcatggcagctatgttctt

SEQ ID NO: 228125 - DNA, 21 bp, Artificial sequence
  SiRNA target sequence
atcatggcagctatgttcttt

SEQ ID NO: 228126 - DNA, 21 bp, Artificial sequence
  SiRNA target sequence
tcatggcagctatgttcttta

SEQ ID NO: 228127 - DNA, 21 bp, Artificial sequence
  SiRNA target sequence
catggcagctatgttctttat

SEQ ID NO: 228128 - DNA, 21 bp, Artificial sequence
  SiRNA target sequence
atggcagctatgttctttatt

SEQ ID NO: 228129 - DNA, 21 bp, Artificial sequence
  SiRNA target sequence
tggcagctatgttctttatta

SEQ ID NO: 228130 - DNA, 21 bp, Artificial sequence
  SiRNA target sequence
ggcagctatgttctttattat

SEQ ID NO: 228131 - DNA, 21 bp, Artificial sequence
  SiRNA target sequence
gcagctatgttctttattatc

SEQ ID NO: 228132 - DNA, 21 bp, Artificial sequence
  SiRNA target sequence
cagctatgttctttattatct

SEQ ID NO: 228133 - DNA, 21 bp, Artificial sequence
  SiRNA target sequence
agctatgttctttattatctc

SEQ ID NO: 228134 - DNA, 21 bp, Artificial sequence
  SiRNA target sequence
gctatgttctttattatctcc

SEQ ID NO: 228135 - DNA, 21 bp, Artificial sequence
  SiRNA target sequence
ctatgttctttattatctcct

SEQ ID NO: 228136 - DNA, 21 bp, Artificial sequence
  SiRNA target sequence
tatgttctttattatctcctt

SEQ ID NO: 228137 - DNA, 21 bp, Artificial sequence
  SiRNA target sequence
atgttctttattatctccttt

SEQ ID NO: 228138 - DNA, 21 bp, Artificial sequence
  SiRNA target sequence
tgttctttattatctccttta

SEQ ID NO: 228139 - DNA, 21 bp, Artificial sequence
  SiRNA target sequence
gttctttattatctcctttat

SEQ ID NO: 228140 - DNA, 21 bp, Artificial sequence
  SiRNA target sequence
ttctttattatctcctttatt

SEQ ID NO: 228141 - DNA, 21 bp, Artificial sequence
  SiRNA target sequence
tctttattatctcctttattt

SEQ ID NO: 228142 - DNA, 21 bp, Artificial sequence
  SiRNA target sequence
ctttattatctcctttattta

SEQ ID NO: 228143 - DNA, 21 bp, Artificial sequence
  SiRNA target sequence
tttattatctcctttatttat

SEQ ID NO: 228144 - DNA, 21 bp, Artificial sequence
  SiRNA target sequence
ttattatctcctttatttatt

SEQ ID NO: 228145 - DNA, 21 bp, Artificial sequence
  SiRNA target sequence
tattatctcctttatttattc

SEQ ID NO: 228146 - DNA, 21 bp, Artificial sequence
  SiRNA target sequence
attatctcctttatttattcg

SEQ ID NO: 228147 - DNA, 21 bp, Artificial sequence
  SiRNA target sequence
ttatctcctttatttattcgg

SEQ ID NO: 228148 - DNA, 21 bp, Artificial sequence
  SiRNA target sequence
tatctcctttatttattcggt

SEQ ID NO: 228149 - DNA, 21 bp, Artificial sequence
  SiRNA target sequence
atctcctttatttattcggtg

SEQ ID NO: 228150 - DNA, 21 bp, Artificial sequence
  SiRNA target sequence
tctcctttatttattcggtgg

SEQ ID NO: 228151 - DNA, 21 bp, Artificial sequence
  SiRNA target sequence
ctcctttatttattcggtggc

SEQ ID NO: 228152 - DNA, 21 bp, Artificial sequence
  SiRNA target sequence
tcctttatttattcggtggct

SEQ ID NO: 228153 - DNA, 21 bp, Artificial sequence
  SiRNA target sequence
cctttatttattcggtggcta

SEQ ID NO: 228154 - DNA, 21 bp, Artificial sequence
  SiRNA target sequence
ctttatttattcggtggctag

SEQ ID NO: 228155 - DNA, 21 bp, Artificial sequence
  SiRNA target sequence
tttatttattcggtggctaga

SEQ ID NO: 228156 - DNA, 21 bp, Artificial sequence
  SiRNA target sequence
ttatttattcggtggctagag

SEQ ID NO: 228157 - DNA, 21 bp, Artificial sequence
  SiRNA target sequence
tatttattcggtggctagagt

SEQ ID NO: 228158 - DNA, 21 bp, Artificial sequence
  SiRNA target sequence
atttattcggtggctagagtg

SEQ ID NO: 228159 - DNA, 21 bp, Artificial sequence
  SiRNA target sequence
tttattcggtggctagagtgc

SEQ ID NO: 228160 - DNA, 21 bp, Artificial sequence
  SiRNA target sequence
ttattcggtggctagagtgct

SEQ ID NO: 228161 - DNA, 21 bp, Artificial sequence
  SiRNA target sequence
tattcggtggctagagtgctt

SEQ ID NO: 228162 - DNA, 21 bp, Artificial sequence
  SiRNA target sequence
attcggtggctagagtgctta

SEQ ID NO: 228163 - DNA, 21 bp, Artificial sequence
  SiRNA target sequence
ttcggtggctagagtgcttaa

SEQ ID NO: 228164 - DNA, 21 bp, Artificial sequence
  SiRNA target sequence
tcggtggctagagtgcttaaa

SEQ ID NO: 228165 - DNA, 21 bp, Artificial sequence
  SiRNA target sequence
cggtggctagagtgcttaaag

SEQ ID NO: 228166 - DNA, 21 bp, Artificial sequence
  SiRNA target sequence
ggtggctagagtgcttaaaga

SEQ ID NO: 228167 - DNA, 21 bp, Artificial sequence
  SiRNA target sequence
gtggctagagtgcttaaagat

SEQ ID NO: 228168 - DNA, 21 bp, Artificial sequence
  SiRNA target sequence
tggctagagtgcttaaagatg

SEQ ID NO: 228169 - DNA, 21 bp, Artificial sequence
  SiRNA target sequence
ggctagagtgcttaaagatgc

SEQ ID NO: 228170 - DNA, 21 bp, Artificial sequence
  SiRNA target sequence
gctagagtgcttaaagatgcc

SEQ ID NO: 228171 - DNA, 21 bp, Artificial sequence
  SiRNA target sequence
ctagagtgcttaaagatgccg

SEQ ID NO: 228172 - DNA, 21 bp, Artificial sequence
  SiRNA target sequence
tagagtgcttaaagatgccgc

SEQ ID NO: 228173 - DNA, 21 bp, Artificial sequence
  SiRNA target sequence
agagtgcttaaagatgccgct

SEQ ID NO: 228174 - DNA, 21 bp, Artificial sequence
  SiRNA target sequence
gagtgcttaaagatgccgctg

SEQ ID NO: 228175 - DNA, 21 bp, Artificial sequence
  SiRNA target sequence
agtgcttaaagatgccgctgt

SEQ ID NO: 228176 - DNA, 21 bp, Artificial sequence
  SiRNA target sequence
gtgcttaaagatgccgctgtt

SEQ ID NO: 228177 - DNA, 21 bp, Artificial sequence
  SiRNA target sequence
tgcttaaagatgccgctgtta

SEQ ID NO: 228178 - DNA, 21 bp, Artificial sequence
  SiRNA target sequence
gcttaaagatgccgctgttat

SEQ ID NO: 228179 - DNA, 21 bp, Artificial sequence
  SiRNA target sequence
cttaaagatgccgctgttatt

SEQ ID NO: 228180 - DNA, 21 bp, Artificial sequence
  SiRNA target sequence
ttaaagatgccgctgttattg

SEQ ID NO: 228181 - DNA, 21 bp, Artificial sequence
  SiRNA target sequence
taaagatgccgctgttattgg

SEQ ID NO: 228182 - DNA, 21 bp, Artificial sequence
  SiRNA target sequence
aaagatgccgctgttattggt

SEQ ID NO: 228183 - DNA, 21 bp, Artificial sequence
  SiRNA target sequence
aagatgccgctgttattggta

SEQ ID NO: 228184 - DNA, 21 bp, Artificial sequence
  SiRNA target sequence
agatgccgctgttattggtaa

SEQ ID NO: 228185 - DNA, 21 bp, Artificial sequence
  SiRNA target sequence
gatgccgctgttattggtaaa

SEQ ID NO: 228186 - DNA, 21 bp, Artificial sequence
  SiRNA target sequence
atgccgctgttattggtaaac

SEQ ID NO: 228187 - DNA, 21 bp, Artificial sequence
  SiRNA target sequence
tgccgctgttattggtaaaca

SEQ ID NO: 228188 - DNA, 21 bp, Artificial sequence
  SiRNA target sequence
gccgctgttattggtaaacaa

SEQ ID NO: 228189 - DNA, 21 bp, Artificial sequence
  SiRNA target sequence
ccgctgttattggtaaacaac

SEQ ID NO: 228190 - DNA, 21 bp, Artificial sequence
  SiRNA target sequence
cgctgttattggtaaacaact

SEQ ID NO: 228191 - DNA, 21 bp, Artificial sequence
  SiRNA target sequence
gctgttattggtaaacaactc

SEQ ID NO: 228192 - DNA, 21 bp, Artificial sequence
  SiRNA target sequence
ctgttattggtaaacaactcc

SEQ ID NO: 228193 - DNA, 21 bp, Artificial sequence
  SiRNA target sequence
tgttattggtaaacaactccc

SEQ ID NO: 228194 - DNA, 21 bp, Artificial sequence
  SiRNA target sequence
gttattggtaaacaactccca

SEQ ID NO: 228195 - DNA, 21 bp, Artificial sequence
  SiRNA target sequence
ttattggtaaacaactcccag

SEQ ID NO: 228196 - DNA, 21 bp, Artificial sequence
  SiRNA target sequence
tattggtaaacaactcccagc

SEQ ID NO: 228197 - DNA, 21 bp, Artificial sequence
  SiRNA target sequence
attggtaaacaactcccagcg

SEQ ID NO: 228198 - DNA, 21 bp, Artificial sequence
  SiRNA target sequence
ttggtaaacaactcccagcgt

SEQ ID NO: 228199 - DNA, 21 bp, Artificial sequence
  SiRNA target sequence
tggtaaacaactcccagcgtc

SEQ ID NO: 228200 - DNA, 21 bp, Artificial sequence
  SiRNA target sequence
ggtaaacaactcccagcgtca

SEQ ID NO: 228201 - DNA, 21 bp, Artificial sequence
  SiRNA target sequence
gtaaacaactcccagcgtcaa

SEQ ID NO: 228202 - DNA, 21 bp, Artificial sequence
  SiRNA target sequence
taaacaactcccagcgtcaat

SEQ ID NO: 228203 - DNA, 21 bp, Artificial sequence
  SiRNA target sequence
aaacaactcccagcgtcaatt

SEQ ID NO: 228204 - DNA, 21 bp, Artificial sequence
  SiRNA target sequence
aacaactcccagcgtcaattt

SEQ ID NO: 228205 - DNA, 21 bp, Artificial sequence
  SiRNA target sequence
acaactcccagcgtcaatttt

SEQ ID NO: 228206 - DNA, 21 bp, Artificial sequence
  SiRNA target sequence
caactcccagcgtcaattttc

SEQ ID NO: 228207 - DNA, 21 bp, Artificial sequence
  SiRNA target sequence
aactcccagcgtcaattttct

SEQ ID NO: 228208 - DNA, 21 bp, Artificial sequence
  SiRNA target sequence
actcccagcgtcaattttctt

SEQ ID NO: 228209 - DNA, 21 bp, Artificial sequence
  SiRNA target sequence
ctcccagcgtcaattttcttt

SEQ ID NO: 228210 - DNA, 21 bp, Artificial sequence
  SiRNA target sequence
tcccagcgtcaattttctttt

SEQ ID NO: 228211 - DNA, 21 bp, Artificial sequence
  SiRNA target sequence
cccagcgtcaattttcttttt

SEQ ID NO: 228212 - DNA, 21 bp, Artificial sequence
  SiRNA target sequence
ccagcgtcaattttctttttg

SEQ ID NO: 228213 - DNA, 21 bp, Artificial sequence
  SiRNA target sequence
cagcgtcaattttctttttga

SEQ ID NO: 228214 - DNA, 21 bp, Artificial sequence
  SiRNA target sequence
agcgtcaattttctttttgaa

SEQ ID NO: 228215 - DNA, 21 bp, Artificial sequence
  SiRNA target sequence
gcgtcaattttctttttgaaa

SEQ ID NO: 228216 - DNA, 21 bp, Artificial sequence
  SiRNA target sequence
cgtcaattttctttttgaaat

SEQ ID NO: 228217 - DNA, 21 bp, Artificial sequence
  SiRNA target sequence
gtcaattttctttttgaaatt

SEQ ID NO: 228218 - DNA, 21 bp, Artificial sequence
  SiRNA target sequence
tcaattttctttttgaaattt

SEQ ID NO: 228219 - DNA, 21 bp, Artificial sequence
  SiRNA target sequence
caattttctttttgaaatttg

SEQ ID NO: 228220 - DNA, 21 bp, Artificial sequence
  SiRNA target sequence
aattttctttttgaaatttgt

SEQ ID NO: 228221 - DNA, 21 bp, Artificial sequence
  SiRNA target sequence
attttctttttgaaatttgtt

SEQ ID NO: 228222 - DNA, 21 bp, Artificial sequence
  SiRNA target sequence
ttttctttttgaaatttgtta

SEQ ID NO: 228223 - DNA, 21 bp, Artificial sequence
  SiRNA target sequence
tttctttttgaaatttgttat

SEQ ID NO: 228224 - DNA, 21 bp, Artificial sequence
  SiRNA target sequence
ttctttttgaaatttgttatt

SEQ ID NO: 228225 - DNA, 21 bp, Artificial sequence
  SiRNA target sequence
tctttttgaaatttgttatta

SEQ ID NO: 228226 - DNA, 21 bp, Artificial sequence
  SiRNA target sequence
ctttttgaaatttgttattat

SEQ ID NO: 228227 - DNA, 21 bp, Artificial sequence
  SiRNA target sequence
tttttgaaatttgttattatc

SEQ ID NO: 228228 - DNA, 21 bp, Artificial sequence
  SiRNA target sequence
ttttgaaatttgttattatcc

SEQ ID NO: 228229 - DNA, 21 bp, Artificial sequence
  SiRNA target sequence
tttgaaatttgttattatcct

SEQ ID NO: 228230 - DNA, 21 bp, Artificial sequence
  SiRNA target sequence
ttgaaatttgttattatcctt

SEQ ID NO: 228231 - DNA, 21 bp, Artificial sequence
  SiRNA target sequence
tgaaatttgttattatccttc

SEQ ID NO: 228232 - DNA, 21 bp, Artificial sequence
  SiRNA target sequence
gaaatttgttattatccttcc

SEQ ID NO: 228233 - DNA, 21 bp, Artificial sequence
  SiRNA target sequence
aaatttgttattatccttccg

SEQ ID NO: 228234 - DNA, 21 bp, Artificial sequence
  SiRNA target sequence
aatttgttattatccttccgt

SEQ ID NO: 228235 - DNA, 21 bp, Artificial sequence
  SiRNA target sequence
atttgttattatccttccgtt

SEQ ID NO: 228236 - DNA, 21 bp, Artificial sequence
  SiRNA target sequence
tttgttattatccttccgttc

SEQ ID NO: 228237 - DNA, 21 bp, Artificial sequence
  SiRNA target sequence
ttgttattatccttccgttct

SEQ ID NO: 228238 - DNA, 21 bp, Artificial sequence
  SiRNA target sequence
tgttattatccttccgttctc

SEQ ID NO: 228239 - DNA, 21 bp, Artificial sequence
  SiRNA target sequence
gttattatccttccgttctca

SEQ ID NO: 228240 - DNA, 21 bp, Artificial sequence
  SiRNA target sequence
ttattatccttccgttctcat

SEQ ID NO: 228241 - DNA, 21 bp, Artificial sequence
  SiRNA target sequence
tattatccttccgttctcatt

SEQ ID NO: 228242 - DNA, 21 bp, Artificial sequence
  SiRNA target sequence
attatccttccgttctcattt

SEQ ID NO: 228243 - DNA, 21 bp, Artificial sequence
  SiRNA target sequence
ttatccttccgttctcattta

SEQ ID NO: 228244 - DNA, 21 bp, Artificial sequence
  SiRNA target sequence
tatccttccgttctcatttat

SEQ ID NO: 228245 - DNA, 21 bp, Artificial sequence
  SiRNA target sequence
atccttccgttctcatttatt

SEQ ID NO: 228246 - DNA, 21 bp, Artificial sequence
  SiRNA target sequence
tccttccgttctcatttattt

SEQ ID NO: 228247 - DNA, 21 bp, Artificial sequence
  SiRNA target sequence
ccttccgttctcatttatttc

SEQ ID NO: 228248 - DNA, 21 bp, Artificial sequence
  SiRNA target sequence
cttccgttctcatttatttca

SEQ ID NO: 228249 - DNA, 21 bp, Artificial sequence
  SiRNA target sequence
ttccgttctcatttatttcag

SEQ ID NO: 228250 - DNA, 21 bp, Artificial sequence
  SiRNA target sequence
tccgttctcatttatttcagt

SEQ ID NO: 228251 - DNA, 21 bp, Artificial sequence
  SiRNA target sequence
ccgttctcatttatttcagta

SEQ ID NO: 228252 - DNA, 21 bp, Artificial sequence
  SiRNA target sequence
cgttctcatttatttcagtag

SEQ ID NO: 228253 - DNA, 21 bp, Artificial sequence
  SiRNA target sequence
gttctcatttatttcagtagg

SEQ ID NO: 228254 - DNA, 21 bp, Artificial sequence
  SiRNA target sequence
ttctcatttatttcagtaggt

SEQ ID NO: 228255 - DNA, 21 bp, Artificial sequence
  SiRNA target sequence
tctcatttatttcagtaggta

SEQ ID NO: 228256 - DNA, 21 bp, Artificial sequence
  SiRNA target sequence
ctcatttatttcagtaggtat

SEQ ID NO: 228257 - DNA, 21 bp, Artificial sequence
  SiRNA target sequence
tcatttatttcagtaggtatt

SEQ ID NO: 228258 - DNA, 21 bp, Artificial sequence
  SiRNA target sequence
catttatttcagtaggtatta

SEQ ID NO: 228259 - DNA, 21 bp, Artificial sequence
  SiRNA target sequence
atttatttcagtaggtattat

SEQ ID NO: 228260 - DNA, 21 bp, Artificial sequence
  SiRNA target sequence
tttatttcagtaggtattatt

SEQ ID NO: 228261 - DNA, 21 bp, Artificial sequence
  SiRNA target sequence
ttatttcagtaggtattattc

SEQ ID NO: 228262 - DNA, 21 bp, Artificial sequence
  SiRNA target sequence
tatttcagtaggtattattca

SEQ ID NO: 228263 - DNA, 21 bp, Artificial sequence
  SiRNA target sequence
atttcagtaggtattattcag

SEQ ID NO: 228264 - DNA, 21 bp, Artificial sequence
  SiRNA target sequence
tttcagtaggtattattcaga

SEQ ID NO: 228265 - DNA, 21 bp, Artificial sequence
  SiRNA target sequence
ttcagtaggtattattcagaa

SEQ ID NO: 228266 - DNA, 21 bp, Artificial sequence
  SiRNA target sequence
tcagtaggtattattcagaaa

SEQ ID NO: 228267 - DNA, 21 bp, Artificial sequence
  SiRNA target sequence
cagtaggtattattcagaaag

SEQ ID NO: 228268 - DNA, 21 bp, Artificial sequence
  SiRNA target sequence
agtaggtattattcagaaagc

SEQ ID NO: 228269 - DNA, 21 bp, Artificial sequence
  SiRNA target sequence
gtaggtattattcagaaagct

SEQ ID NO: 228270 - DNA, 21 bp, Artificial sequence
  SiRNA target sequence
taggtattattcagaaagctt

SEQ ID NO: 228271 - DNA, 21 bp, Artificial sequence
  SiRNA target sequence
aggtattattcagaaagcttt

SEQ ID NO: 228272 - DNA, 21 bp, Artificial sequence
  SiRNA target sequence
ggtattattcagaaagcttta

SEQ ID NO: 228273 - DNA, 21 bp, Artificial sequence
  SiRNA target sequence
gtattattcagaaagctttag

SEQ ID NO: 228274 - DNA, 21 bp, Artificial sequence
  SiRNA target sequence
tattattcagaaagctttaga

SEQ ID NO: 228275 - DNA, 21 bp, Artificial sequence
  SiRNA target sequence
attattcagaaagctttagat

SEQ ID NO: 228276 - DNA, 21 bp, Artificial sequence
  SiRNA target sequence
ttattcagaaagctttagata

SEQ ID NO: 228277 - DNA, 21 bp, Artificial sequence
  SiRNA target sequence
tattcagaaagctttagataa

SEQ ID NO: 228278 - DNA, 21 bp, Artificial sequence
  SiRNA target sequence
attcagaaagctttagataaa

SEQ ID NO: 228279 - DNA, 21 bp, Artificial sequence
  SiRNA target sequence
ttcagaaagctttagataaat

SEQ ID NO: 228280 - DNA, 21 bp, Artificial sequence
  SiRNA target sequence
tcagaaagctttagataaata

SEQ ID NO: 228281 - DNA, 21 bp, Artificial sequence
  SiRNA target sequence
cagaaagctttagataaatat

SEQ ID NO: 228282 - DNA, 21 bp, Artificial sequence
  SiRNA target sequence
agaaagctttagataaatatc

SEQ ID NO: 228283 - DNA, 21 bp, Artificial sequence
  SiRNA target sequence
gaaagctttagataaatatcc

SEQ ID NO: 228284 - DNA, 21 bp, Artificial sequence
  SiRNA target sequence
aaagctttagataaatatcct

SEQ ID NO: 228285 - DNA, 21 bp, Artificial sequence
  SiRNA target sequence
aagctttagataaatatcctt

SEQ ID NO: 228286 - DNA, 21 bp, Artificial sequence
  SiRNA target sequence
agctttagataaatatccttt

SEQ ID NO: 228287 - DNA, 21 bp, Artificial sequence
  SiRNA target sequence
gctttagataaatatcctttt

SEQ ID NO: 228288 - DNA, 21 bp, Artificial sequence
  SiRNA target sequence
ctttagataaatatcctttta

SEQ ID NO: 228289 - DNA, 21 bp, Artificial sequence
  SiRNA target sequence
tttagataaatatccttttac

SEQ ID NO: 228290 - DNA, 21 bp, Artificial sequence
  SiRNA target sequence
ttagataaatatccttttaca

SEQ ID NO: 228291 - DNA, 21 bp, Artificial sequence
  SiRNA target sequence
tagataaatatccttttacaa

SEQ ID NO: 228292 - DNA, 21 bp, Artificial sequence
  SiRNA target sequence
agataaatatccttttacaaa

SEQ ID NO: 228293 - DNA, 21 bp, Artificial sequence
  SiRNA target sequence
gataaatatccttttacaaaa

SEQ ID NO: 228294 - DNA, 21 bp, Artificial sequence
  SiRNA target sequence
ataaatatccttttacaaaaa

SEQ ID NO: 228295 - DNA, 21 bp, Artificial sequence
  SiRNA target sequence
taaatatccttttacaaaaat

SEQ ID NO: 228296 - DNA, 21 bp, Artificial sequence
  SiRNA target sequence
aaatatccttttacaaaaata

SEQ ID NO: 228297 - DNA, 21 bp, Artificial sequence
  SiRNA target sequence
aatatccttttacaaaaatat

SEQ ID NO: 228298 - DNA, 21 bp, Artificial sequence
  SiRNA target sequence
atatccttttacaaaaatatt

SEQ ID NO: 228299 - DNA, 21 bp, Artificial sequence
  SiRNA target sequence
tatccttttacaaaaatattt

SEQ ID NO: 228300 - DNA, 21 bp, Artificial sequence
  SiRNA target sequence
atccttttacaaaaatatttg

SEQ ID NO: 228301 - DNA, 21 bp, Artificial sequence
  SiRNA target sequence
tccttttacaaaaatatttga

SEQ ID NO: 228302 - DNA, 21 bp, Artificial sequence
  SiRNA target sequence
ccttttacaaaaatatttgat

SEQ ID NO: 228303 - DNA, 21 bp, Artificial sequence
  SiRNA target sequence
cttttacaaaaatatttgatg

SEQ ID NO: 228304 - DNA, 21 bp, Artificial sequence
  SiRNA target sequence
ttttacaaaaatatttgatgt

SEQ ID NO: 228305 - DNA, 21 bp, Artificial sequence
  SiRNA target sequence
tttacaaaaatatttgatgta

SEQ ID NO: 228306 - DNA, 21 bp, Artificial sequence
  SiRNA target sequence
ttacaaaaatatttgatgtaa

SEQ ID NO: 228307 - DNA, 21 bp, Artificial sequence
  SiRNA target sequence
tacaaaaatatttgatgtaac

SEQ ID NO: 228308 - DNA, 21 bp, Artificial sequence
  SiRNA target sequence
acaaaaatatttgatgtaact

SEQ ID NO: 228309 - DNA, 21 bp, Artificial sequence
  SiRNA target sequence
caaaaatatttgatgtaactt

SEQ ID NO: 228310 - DNA, 21 bp, Artificial sequence
  SiRNA target sequence
aaaaatatttgatgtaacttt

SEQ ID NO: 228311 - DNA, 21 bp, Artificial sequence
  SiRNA target sequence
aaaatatttgatgtaacttta

SEQ ID NO: 228312 - DNA, 21 bp, Artificial sequence
  SiRNA target sequence
aaatatttgatgtaactttaa

SEQ ID NO: 228313 - DNA, 21 bp, Artificial sequence
  SiRNA target sequence
aatatttgatgtaactttaat

SEQ ID NO: 228314 - DNA, 21 bp, Artificial sequence
  SiRNA target sequence
atatttgatgtaactttaata

SEQ ID NO: 228315 - DNA, 21 bp, Artificial sequence
  SiRNA target sequence
tatttgatgtaactttaatag

SEQ ID NO: 228316 - DNA, 21 bp, Artificial sequence
  SiRNA target sequence
atttgatgtaactttaatagt

SEQ ID NO: 228317 - DNA, 21 bp, Artificial sequence
  SiRNA target sequence
tttgatgtaactttaatagtt

SEQ ID NO: 228318 - DNA, 21 bp, Artificial sequence
  SiRNA target sequence
ttgatgtaactttaatagttt

SEQ ID NO: 228319 - DNA, 21 bp, Artificial sequence
  SiRNA target sequence
tgatgtaactttaatagtttt

SEQ ID NO: 228320 - DNA, 21 bp, Artificial sequence
  SiRNA target sequence
gatgtaactttaatagttttc

SEQ ID NO: 228321 - DNA, 21 bp, Artificial sequence
  SiRNA target sequence
atgtaactttaatagttttcg

SEQ ID NO: 228322 - DNA, 21 bp, Artificial sequence
  SiRNA target sequence
tgtaactttaatagttttcgc

SEQ ID NO: 228323 - DNA, 21 bp, Artificial sequence
  SiRNA target sequence
gtaactttaatagttttcgct

SEQ ID NO: 228324 - DNA, 21 bp, Artificial sequence
  SiRNA target sequence
taactttaatagttttcgctg

SEQ ID NO: 228325 - DNA, 21 bp, Artificial sequence
  SiRNA target sequence
aactttaatagttttcgctgt

SEQ ID NO: 228326 - DNA, 21 bp, Artificial sequence
  SiRNA target sequence
actttaatagttttcgctgtt

SEQ ID NO: 228327 - DNA, 21 bp, Artificial sequence
  SiRNA target sequence
ctttaatagttttcgctgttg

SEQ ID NO: 228328 - DNA, 21 bp, Artificial sequence
  SiRNA target sequence
tttaatagttttcgctgttgc

SEQ ID NO: 228329 - DNA, 21 bp, Artificial sequence
  SiRNA target sequence
ttaatagttttcgctgttgca

SEQ ID NO: 228330 - DNA, 21 bp, Artificial sequence
  SiRNA target sequence
taatagttttcgctgttgcat

SEQ ID NO: 228331 - DNA, 21 bp, Artificial sequence
  SiRNA target sequence
aatagttttcgctgttgcatt

SEQ ID NO: 228332 - DNA, 21 bp, Artificial sequence
  SiRNA target sequence
atagttttcgctgttgcattt

SEQ ID NO: 228333 - DNA, 21 bp, Artificial sequence
  SiRNA target sequence
tagttttcgctgttgcattta

SEQ ID NO: 228334 - DNA, 21 bp, Artificial sequence
  SiRNA target sequence
agttttcgctgttgcatttac

SEQ ID NO: 228335 - DNA, 21 bp, Artificial sequence
  SiRNA target sequence
gttttcgctgttgcatttact

SEQ ID NO: 228336 - DNA, 21 bp, Artificial sequence
  SiRNA target sequence
ttttcgctgttgcatttacta

SEQ ID NO: 228337 - DNA, 21 bp, Artificial sequence
  SiRNA target sequence
tttcgctgttgcatttactat

SEQ ID NO: 228338 - DNA, 21 bp, Artificial sequence
  SiRNA target sequence
ttcgctgttgcatttactata

SEQ ID NO: 228339 - DNA, 21 bp, Artificial sequence
  SiRNA target sequence
tcgctgttgcatttactatac

SEQ ID NO: 228340 - DNA, 21 bp, Artificial sequence
  SiRNA target sequence
cgctgttgcatttactatact

SEQ ID NO: 228341 - DNA, 21 bp, Artificial sequence
  SiRNA target sequence
gctgttgcatttactatactt

SEQ ID NO: 228342 - DNA, 21 bp, Artificial sequence
  SiRNA target sequence
ctgttgcatttactatacttg

SEQ ID NO: 228343 - DNA, 21 bp, Artificial sequence
  SiRNA target sequence
tgttgcatttactatacttgg

SEQ ID NO: 228344 - DNA, 21 bp, Artificial sequence
  SiRNA target sequence
gttgcatttactatacttggt

SEQ ID NO: 228345 - DNA, 21 bp, Artificial sequence
  SiRNA target sequence
ttgcatttactatacttggta

SEQ ID NO: 228346 - DNA, 21 bp, Artificial sequence
  SiRNA target sequence
tgcatttactatacttggtag

SEQ ID NO: 228347 - DNA, 21 bp, Artificial sequence
  SiRNA target sequence
gcatttactatacttggtagt

SEQ ID NO: 228348 - DNA, 21 bp, Artificial sequence
  SiRNA target sequence
catttactatacttggtagtt

SEQ ID NO: 228349 - DNA, 21 bp, Artificial sequence
  SiRNA target sequence
atttactatacttggtagttt

SEQ ID NO: 228350 - DNA, 21 bp, Artificial sequence
  SiRNA target sequence
tttactatacttggtagttta

SEQ ID NO: 228351 - DNA, 21 bp, Artificial sequence
  SiRNA target sequence
ttactatacttggtagtttat

SEQ ID NO: 228352 - DNA, 21 bp, Artificial sequence
  SiRNA target sequence
tactatacttggtagtttatt

SEQ ID NO: 228353 - DNA, 21 bp, Artificial sequence
  SiRNA target sequence
actatacttggtagtttatta

SEQ ID NO: 228354 - DNA, 21 bp, Artificial sequence
  SiRNA target sequence
ctatacttggtagtttattac

SEQ ID NO: 228355 - DNA, 21 bp, Artificial sequence
  SiRNA target sequence
tatacttggtagtttattact

SEQ ID NO: 228356 - DNA, 21 bp, Artificial sequence
  SiRNA target sequence
atacttggtagtttattactt

SEQ ID NO: 228357 - DNA, 21 bp, Artificial sequence
  SiRNA target sequence
tacttggtagtttattacttc

SEQ ID NO: 228358 - DNA, 21 bp, Artificial sequence
  SiRNA target sequence
acttggtagtttattacttcc

SEQ ID NO: 228359 - DNA, 21 bp, Artificial sequence
  SiRNA target sequence
cttggtagtttattacttccc

SEQ ID NO: 228360 - DNA, 21 bp, Artificial sequence
  SiRNA target sequence
ttggtagtttattacttccct

SEQ ID NO: 228361 - DNA, 21 bp, Artificial sequence
  SiRNA target sequence
tggtagtttattacttccctt

SEQ ID NO: 228362 - DNA, 21 bp, Artificial sequence
  SiRNA target sequence
ggtagtttattacttcccttt

SEQ ID NO: 228363 - DNA, 21 bp, Artificial sequence
  SiRNA target sequence
gtagtttattacttcccttta

SEQ ID NO: 228364 - DNA, 21 bp, Artificial sequence
  SiRNA target sequence
tagtttattacttccctttag

SEQ ID NO: 228365 - DNA, 21 bp, Artificial sequence
  SiRNA target sequence
agtttattacttccctttagt

SEQ ID NO: 228366 - DNA, 21 bp, Artificial sequence
  SiRNA target sequence
gtttattacttccctttagtg

SEQ ID NO: 228367 - DNA, 21 bp, Artificial sequence
  SiRNA target sequence
tttattacttccctttagtga

SEQ ID NO: 228368 - DNA, 21 bp, Artificial sequence
  SiRNA target sequence
ttattacttccctttagtgat

SEQ ID NO: 228369 - DNA, 21 bp, Artificial sequence
  SiRNA target sequence
tattacttccctttagtgatt

SEQ ID NO: 228370 - DNA, 21 bp, Artificial sequence
  SiRNA target sequence
attacttccctttagtgatta

SEQ ID NO: 228371 - DNA, 21 bp, Artificial sequence
  SiRNA target sequence
ttacttccctttagtgattat

SEQ ID NO: 228372 - DNA, 21 bp, Artificial sequence
  SiRNA target sequence
tacttccctttagtgattata

SEQ ID NO: 228373 - DNA, 21 bp, Artificial sequence
  SiRNA target sequence
acttccctttagtgattatat

SEQ ID NO: 228374 - DNA, 21 bp, Artificial sequence
  SiRNA target sequence
cttccctttagtgattatatt

SEQ ID NO: 228375 - DNA, 21 bp, Artificial sequence
  SiRNA target sequence
ttccctttagtgattatattc

SEQ ID NO: 228376 - DNA, 21 bp, Artificial sequence
  SiRNA target sequence
tccctttagtgattatattca

SEQ ID NO: 228377 - DNA, 21 bp, Artificial sequence
  SiRNA target sequence
ccctttagtgattatattcag

SEQ ID NO: 228378 - DNA, 21 bp, Artificial sequence
  SiRNA target sequence
cctttagtgattatattcaga

SEQ ID NO: 228379 - DNA, 21 bp, Artificial sequence
  SiRNA target sequence
ctttagtgattatattcagat

SEQ ID NO: 228380 - DNA, 21 bp, Artificial sequence
  SiRNA target sequence
tttagtgattatattcagatt

SEQ ID NO: 228381 - DNA, 21 bp, Artificial sequence
  SiRNA target sequence
ttagtgattatattcagattc

SEQ ID NO: 228382 - DNA, 21 bp, Artificial sequence
  SiRNA target sequence
tagtgattatattcagattca

SEQ ID NO: 228383 - DNA, 21 bp, Artificial sequence
  SiRNA target sequence
agtgattatattcagattcaa

SEQ ID NO: 228384 - DNA, 21 bp, Artificial sequence
  SiRNA target sequence
gtgattatattcagattcaac

SEQ ID NO: 228385 - DNA, 21 bp, Artificial sequence
  SiRNA target sequence
tgattatattcagattcaacc

SEQ ID NO: 228386 - DNA, 21 bp, Artificial sequence
  SiRNA target sequence
gattatattcagattcaaccg

SEQ ID NO: 228387 - DNA, 21 bp, Artificial sequence
  SiRNA target sequence
attatattcagattcaaccgt

SEQ ID NO: 228388 - DNA, 21 bp, Artificial sequence
  SiRNA target sequence
ttatattcagattcaaccgtt

SEQ ID NO: 228389 - DNA, 21 bp, Artificial sequence
  SiRNA target sequence
tatattcagattcaaccgttt

SEQ ID NO: 228390 - DNA, 21 bp, Artificial sequence
  SiRNA target sequence
atattcagattcaaccgtttt

SEQ ID NO: 228391 - DNA, 21 bp, Artificial sequence
  SiRNA target sequence
tattcagattcaaccgttttg

SEQ ID NO: 228392 - DNA, 21 bp, Artificial sequence
  SiRNA target sequence
attcagattcaaccgttttgg

SEQ ID NO: 228393 - DNA, 21 bp, Artificial sequence
  SiRNA target sequence
ttcagattcaaccgttttggg

SEQ ID NO: 228394 - DNA, 21 bp, Artificial sequence
  SiRNA target sequence
tcagattcaaccgttttgggc

SEQ ID NO: 228395 - DNA, 21 bp, Artificial sequence
  SiRNA target sequence
cagattcaaccgttttgggcc

SEQ ID NO: 228396 - DNA, 21 bp, Artificial sequence
  SiRNA target sequence
agattcaaccgttttgggcca

SEQ ID NO: 228397 - DNA, 21 bp, Artificial sequence
  SiRNA target sequence
gattcaaccgttttgggccaa

SEQ ID NO: 228398 - DNA, 21 bp, Artificial sequence
  SiRNA target sequence
attcaaccgttttgggccaaa

SEQ ID NO: 228399 - DNA, 21 bp, Artificial sequence
  SiRNA target sequence
ttcaaccgttttgggccaaag

SEQ ID NO: 228400 - DNA, 21 bp, Artificial sequence
  SiRNA target sequence
tcaaccgttttgggccaaaga

SEQ ID NO: 228401 - DNA, 21 bp, Artificial sequence
  SiRNA target sequence
caaccgttttgggccaaagat

SEQ ID NO: 228402 - DNA, 21 bp, Artificial sequence
  SiRNA target sequence
aaccgttttgggccaaagata

SEQ ID NO: 228403 - DNA, 21 bp, Artificial sequence
  SiRNA target sequence
accgttttgggccaaagatat

SEQ ID NO: 228404 - DNA, 21 bp, Artificial sequence
  SiRNA target sequence
ccgttttgggccaaagatatt

SEQ ID NO: 228405 - DNA, 21 bp, Artificial sequence
  SiRNA target sequence
cgttttgggccaaagatattt

SEQ ID NO: 228406 - DNA, 21 bp, Artificial sequence
  SiRNA target sequence
gttttgggccaaagatatttt

SEQ ID NO: 228407 - DNA, 21 bp, Artificial sequence
  SiRNA target sequence
ttttgggccaaagatattttt

SEQ ID NO: 228408 - DNA, 21 bp, Artificial sequence
  SiRNA target sequence
tttgggccaaagatatttttg

SEQ ID NO: 228409 - DNA, 21 bp, Artificial sequence
  SiRNA target sequence
ttgggccaaagatatttttgc

SEQ ID NO: 228410 - DNA, 21 bp, Artificial sequence
  SiRNA target sequence
tgggccaaagatatttttgct

SEQ ID NO: 228411 - DNA, 21 bp, Artificial sequence
  SiRNA target sequence
gggccaaagatatttttgctg

SEQ ID NO: 228412 - DNA, 21 bp, Artificial sequence
  SiRNA target sequence
ggccaaagatatttttgctga

SEQ ID NO: 228413 - DNA, 21 bp, Artificial sequence
  SiRNA target sequence
gccaaagatatttttgctgat

SEQ ID NO: 228414 - DNA, 21 bp, Artificial sequence
  SiRNA target sequence
ccaaagatatttttgctgatg

SEQ ID NO: 228415 - DNA, 21 bp, Artificial sequence
  SiRNA target sequence
caaagatatttttgctgatgg

SEQ ID NO: 228416 - DNA, 21 bp, Artificial sequence
  SiRNA target sequence
aaagatatttttgctgatgga

SEQ ID NO: 228417 - DNA, 21 bp, Artificial sequence
  SiRNA target sequence
aagatatttttgctgatggaa

SEQ ID NO: 228418 - DNA, 21 bp, Artificial sequence
  SiRNA target sequence
agatatttttgctgatggaaa

SEQ ID NO: 228419 - DNA, 21 bp, Artificial sequence
  SiRNA target sequence
gatatttttgctgatggaaaa

SEQ ID NO: 228420 - DNA, 21 bp, Artificial sequence
  SiRNA target sequence
atatttttgctgatggaaaag

SEQ ID NO: 228421 - DNA, 21 bp, Artificial sequence
  SiRNA target sequence
tatttttgctgatggaaaagc

SEQ ID NO: 228422 - DNA, 21 bp, Artificial sequence
  SiRNA target sequence
atttttgctgatggaaaagct

SEQ ID NO: 228423 - DNA, 21 bp, Artificial sequence
  SiRNA target sequence
tttttgctgatggaaaagctg

SEQ ID NO: 228424 - DNA, 21 bp, Artificial sequence
  SiRNA target sequence
ttttgctgatggaaaagctgt

SEQ ID NO: 228425 - DNA, 21 bp, Artificial sequence
  SiRNA target sequence
tttgctgatggaaaagctgtt

SEQ ID NO: 228426 - DNA, 21 bp, Artificial sequence
  SiRNA target sequence
ttgctgatggaaaagctgttg

SEQ ID NO: 228427 - DNA, 21 bp, Artificial sequence
  SiRNA target sequence
tgctgatggaaaagctgttgc

SEQ ID NO: 228428 - DNA, 21 bp, Artificial sequence
  SiRNA target sequence
gctgatggaaaagctgttgcc

SEQ ID NO: 228429 - DNA, 21 bp, Artificial sequence
  SiRNA target sequence
ctgatggaaaagctgttgcca

SEQ ID NO: 228430 - DNA, 21 bp, Artificial sequence
  SiRNA target sequence
tgatggaaaagctgttgccag

SEQ ID NO: 228431 - DNA, 21 bp, Artificial sequence
  SiRNA target sequence
gatggaaaagctgttgccaga

SEQ ID NO: 228432 - DNA, 21 bp, Artificial sequence
  SiRNA target sequence
atggaaaagctgttgccagaa

SEQ ID NO: 228433 - DNA, 21 bp, Artificial sequence
  SiRNA target sequence
tggaaaagctgttgccagaag

SEQ ID NO: 228434 - DNA, 21 bp, Artificial sequence
  SiRNA target sequence
ggaaaagctgttgccagaagt

SEQ ID NO: 228435 - DNA, 21 bp, Artificial sequence
  SiRNA target sequence
gaaaagctgttgccagaagta

SEQ ID NO: 228436 - DNA, 21 bp, Artificial sequence
  SiRNA target sequence
aaaagctgttgccagaagtac

SEQ ID NO: 228437 - DNA, 21 bp, Artificial sequence
  SiRNA target sequence
aaagctgttgccagaagtaca

SEQ ID NO: 228438 - DNA, 21 bp, Artificial sequence
  SiRNA target sequence
aagctgttgccagaagtacag

SEQ ID NO: 228439 - DNA, 21 bp, Artificial sequence
  SiRNA target sequence
agctgttgccagaagtacaga

SEQ ID NO: 228440 - DNA, 21 bp, Artificial sequence
  SiRNA target sequence
gctgttgccagaagtacagat

SEQ ID NO: 228441 - DNA, 21 bp, Artificial sequence
  SiRNA target sequence
ctgttgccagaagtacagatt

SEQ ID NO: 228442 - DNA, 21 bp, Artificial sequence
  SiRNA target sequence
tgttgccagaagtacagattt

SEQ ID NO: 228443 - DNA, 21 bp, Artificial sequence
  SiRNA target sequence
gttgccagaagtacagatttt

SEQ ID NO: 228444 - DNA, 21 bp, Artificial sequence
  SiRNA target sequence
ttgccagaagtacagattttt

SEQ ID NO: 228445 - DNA, 21 bp, Artificial sequence
  SiRNA target sequence
tgccagaagtacagatttttt

SEQ ID NO: 228446 - DNA, 21 bp, Artificial sequence
  SiRNA target sequence
gccagaagtacagatttttta

SEQ ID NO: 228447 - DNA, 21 bp, Artificial sequence
  SiRNA target sequence
ccagaagtacagattttttat

SEQ ID NO: 228448 - DNA, 21 bp, Artificial sequence
  SiRNA target sequence
cagaagtacagattttttatt

SEQ ID NO: 228449 - DNA, 21 bp, Artificial sequence
  SiRNA target sequence
agaagtacagattttttattt

SEQ ID NO: 228450 - DNA, 21 bp, Artificial sequence
  SiRNA target sequence
gaagtacagattttttatttt

SEQ ID NO: 228451 - DNA, 21 bp, Artificial sequence
  SiRNA target sequence
aagtacagattttttattttc

SEQ ID NO: 228452 - DNA, 21 bp, Artificial sequence
  SiRNA target sequence
agtacagattttttattttct

SEQ ID NO: 228453 - DNA, 21 bp, Artificial sequence
  SiRNA target sequence
gtacagattttttattttcta

SEQ ID NO: 228454 - DNA, 21 bp, Artificial sequence
  SiRNA target sequence
tacagattttttattttctat

SEQ ID NO: 228455 - DNA, 21 bp, Artificial sequence
  SiRNA target sequence
acagattttttattttctatt

SEQ ID NO: 228456 - DNA, 21 bp, Artificial sequence
  SiRNA target sequence
cagattttttattttctattg

SEQ ID NO: 228457 - DNA, 21 bp, Artificial sequence
  SiRNA target sequence
agattttttattttctattgc

SEQ ID NO: 228458 - DNA, 21 bp, Artificial sequence
  SiRNA target sequence
gattttttattttctattgca

SEQ ID NO: 228459 - DNA, 21 bp, Artificial sequence
  SiRNA target sequence
attttttattttctattgcac

SEQ ID NO: 228460 - DNA, 21 bp, Artificial sequence
  SiRNA target sequence
ttttttattttctattgcact

SEQ ID NO: 228461 - DNA, 21 bp, Artificial sequence
  SiRNA target sequence
tttttattttctattgcactt

SEQ ID NO: 228462 - DNA, 21 bp, Artificial sequence
  SiRNA target sequence
ttttattttctattgcacttg

SEQ ID NO: 228463 - DNA, 21 bp, Artificial sequence
  SiRNA target sequence
tttattttctattgcacttgt

SEQ ID NO: 228464 - DNA, 21 bp, Artificial sequence
  SiRNA target sequence
ttattttctattgcacttgtt

SEQ ID NO: 228465 - DNA, 21 bp, Artificial sequence
  SiRNA target sequence
tattttctattgcacttgttt

SEQ ID NO: 228466 - DNA, 21 bp, Artificial sequence
  SiRNA target sequence
attttctattgcacttgtttt

SEQ ID NO: 228467 - DNA, 21 bp, Artificial sequence
  SiRNA target sequence
ttttctattgcacttgttttc

SEQ ID NO: 228468 - DNA, 21 bp, Artificial sequence
  SiRNA target sequence
tttctattgcacttgttttca

SEQ ID NO: 228469 - DNA, 21 bp, Artificial sequence
  SiRNA target sequence
ttctattgcacttgttttcaa

SEQ ID NO: 228470 - DNA, 21 bp, Artificial sequence
  SiRNA target sequence
tctattgcacttgttttcaat

SEQ ID NO: 228471 - DNA, 21 bp, Artificial sequence
  SiRNA target sequence
ctattgcacttgttttcaatg

SEQ ID NO: 228472 - DNA, 21 bp, Artificial sequence
  SiRNA target sequence
tattgcacttgttttcaatga

SEQ ID NO: 228473 - DNA, 21 bp, Artificial sequence
  SiRNA target sequence
attgcacttgttttcaatgaa

SEQ ID NO: 228474 - DNA, 21 bp, Artificial sequence
  SiRNA target sequence
ttgcacttgttttcaatgaat

SEQ ID NO: 228475 - DNA, 21 bp, Artificial sequence
  SiRNA target sequence
tgcacttgttttcaatgaatg

SEQ ID NO: 228476 - DNA, 21 bp, Artificial sequence
  SiRNA target sequence
gcacttgttttcaatgaatgg

SEQ ID NO: 228477 - DNA, 21 bp, Artificial sequence
  SiRNA target sequence
cacttgttttcaatgaatgga

SEQ ID NO: 228478 - DNA, 21 bp, Artificial sequence
  SiRNA target sequence
acttgttttcaatgaatggac

SEQ ID NO: 228479 - DNA, 21 bp, Artificial sequence
  SiRNA target sequence
cttgttttcaatgaatggaca

SEQ ID NO: 228480 - DNA, 21 bp, Artificial sequence
  SiRNA target sequence
ttgttttcaatgaatggacaa

SEQ ID NO: 228481 - DNA, 21 bp, Artificial sequence
  SiRNA target sequence
tgttttcaatgaatggacaag

SEQ ID NO: 228482 - DNA, 21 bp, Artificial sequence
  SiRNA target sequence
gttttcaatgaatggacaagt

SEQ ID NO: 228483 - DNA, 21 bp, Artificial sequence
  SiRNA target sequence
ttttcaatgaatggacaagtt

SEQ ID NO: 228484 - DNA, 21 bp, Artificial sequence
  SiRNA target sequence
tttcaatgaatggacaagttc

SEQ ID NO: 228485 - DNA, 21 bp, Artificial sequence
  SiRNA target sequence
ttcaatgaatggacaagttct

SEQ ID NO: 228486 - DNA, 21 bp, Artificial sequence
  SiRNA target sequence
tcaatgaatggacaagttctg

SEQ ID NO: 228487 - DNA, 21 bp, Artificial sequence
  SiRNA target sequence
caatgaatggacaagttctgc

SEQ ID NO: 228488 - DNA, 21 bp, Artificial sequence
  SiRNA target sequence
aatgaatggacaagttctgct

SEQ ID NO: 228489 - DNA, 21 bp, Artificial sequence
  SiRNA target sequence
atgaatggacaagttctgcta

SEQ ID NO: 228490 - DNA, 21 bp, Artificial sequence
  SiRNA target sequence
tgaatggacaagttctgctat

SEQ ID NO: 228491 - DNA, 21 bp, Artificial sequence
  SiRNA target sequence
gaatggacaagttctgctatc

SEQ ID NO: 228492 - DNA, 21 bp, Artificial sequence
  SiRNA target sequence
aatggacaagttctgctatct

SEQ ID NO: 228493 - DNA, 21 bp, Artificial sequence
  SiRNA target sequence
atggacaagttctgctatcta

SEQ ID NO: 228494 - DNA, 21 bp, Artificial sequence
  SiRNA target sequence
tggacaagttctgctatctat

SEQ ID NO: 228495 - DNA, 21 bp, Artificial sequence
  SiRNA target sequence
ggacaagttctgctatctatg

SEQ ID NO: 228496 - DNA, 21 bp, Artificial sequence
  SiRNA target sequence
gacaagttctgctatctatgt

SEQ ID NO: 228497 - DNA, 21 bp, Artificial sequence
  SiRNA target sequence
acaagttctgctatctatgtt

SEQ ID NO: 228498 - DNA, 21 bp, Artificial sequence
  SiRNA target sequence
caagttctgctatctatgttt

SEQ ID NO: 228499 - DNA, 21 bp, Artificial sequence
  SiRNA target sequence
aagttctgctatctatgtttt

SEQ ID NO: 228500 - DNA, 21 bp, Artificial sequence
  SiRNA target sequence
agttctgctatctatgtttta

SEQ ID NO: 228501 - DNA, 21 bp, Artificial sequence
  SiRNA target sequence
gttctgctatctatgttttat

SEQ ID NO: 228502 - DNA, 21 bp, Artificial sequence
  SiRNA target sequence
ttctgctatctatgttttatc

SEQ ID NO: 228503 - DNA, 21 bp, Artificial sequence
  SiRNA target sequence
tctgctatctatgttttatct

SEQ ID NO: 228504 - DNA, 21 bp, Artificial sequence
  SiRNA target sequence
ctgctatctatgttttatctg

SEQ ID NO: 228505 - DNA, 21 bp, Artificial sequence
  SiRNA target sequence
tgctatctatgttttatctga

SEQ ID NO: 228506 - DNA, 21 bp, Artificial sequence
  SiRNA target sequence
gctatctatgttttatctgaa

SEQ ID NO: 228507 - DNA, 21 bp, Artificial sequence
  SiRNA target sequence
ctatctatgttttatctgaaa

SEQ ID NO: 228508 - DNA, 21 bp, Artificial sequence
  SiRNA target sequence
tatctatgttttatctgaaat

SEQ ID NO: 228509 - DNA, 21 bp, Artificial sequence
  SiRNA target sequence
atctatgttttatctgaaatg

SEQ ID NO: 228510 - DNA, 21 bp, Artificial sequence
  SiRNA target sequence
tctatgttttatctgaaatgt

SEQ ID NO: 228511 - DNA, 21 bp, Artificial sequence
  SiRNA target sequence
ctatgttttatctgaaatgtt

SEQ ID NO: 228512 - DNA, 21 bp, Artificial sequence
  SiRNA target sequence
tatgttttatctgaaatgttt

SEQ ID NO: 228513 - DNA, 21 bp, Artificial sequence
  SiRNA target sequence
atgttttatctgaaatgtttg

SEQ ID NO: 228514 - DNA, 21 bp, Artificial sequence
  SiRNA target sequence
tgttttatctgaaatgtttgg

SEQ ID NO: 228515 - DNA, 21 bp, Artificial sequence
  SiRNA target sequence
gttttatctgaaatgtttggt

SEQ ID NO: 228516 - DNA, 21 bp, Artificial sequence
  SiRNA target sequence
ttttatctgaaatgtttggta

SEQ ID NO: 228517 - DNA, 21 bp, Artificial sequence
  SiRNA target sequence
tttatctgaaatgtttggtag

SEQ ID NO: 228518 - DNA, 21 bp, Artificial sequence
  SiRNA target sequence
ttatctgaaatgtttggtagt

SEQ ID NO: 228519 - DNA, 21 bp, Artificial sequence
  SiRNA target sequence
tatctgaaatgtttggtagtt

SEQ ID NO: 228520 - DNA, 21 bp, Artificial sequence
  SiRNA target sequence
atctgaaatgtttggtagttt

SEQ ID NO: 228521 - DNA, 21 bp, Artificial sequence
  SiRNA target sequence
tctgaaatgtttggtagtttg

SEQ ID NO: 228522 - DNA, 21 bp, Artificial sequence
  SiRNA target sequence
ctgaaatgtttggtagtttga

SEQ ID NO: 228523 - DNA, 21 bp, Artificial sequence
  SiRNA target sequence
tgaaatgtttggtagtttgat

SEQ ID NO: 228524 - DNA, 21 bp, Artificial sequence
  SiRNA target sequence
gaaatgtttggtagtttgatt

SEQ ID NO: 228525 - DNA, 21 bp, Artificial sequence
  SiRNA target sequence
aaatgtttggtagtttgattc

SEQ ID NO: 228526 - DNA, 21 bp, Artificial sequence
  SiRNA target sequence
aatgtttggtagtttgattct

SEQ ID NO: 228527 - DNA, 21 bp, Artificial sequence
  SiRNA target sequence
atgtttggtagtttgattctt

SEQ ID NO: 228528 - DNA, 21 bp, Artificial sequence
  SiRNA target sequence
tgtttggtagtttgattcttt

SEQ ID NO: 228529 - DNA, 21 bp, Artificial sequence
  SiRNA target sequence
gtttggtagtttgattctttc

SEQ ID NO: 228530 - DNA, 21 bp, Artificial sequence
  SiRNA target sequence
tttggtagtttgattctttca

SEQ ID NO: 228531 - DNA, 21 bp, Artificial sequence
  SiRNA target sequence
ttggtagtttgattctttcat

SEQ ID NO: 228532 - DNA, 21 bp, Artificial sequence
  SiRNA target sequence
tggtagtttgattctttcata

SEQ ID NO: 228533 - DNA, 21 bp, Artificial sequence
  SiRNA target sequence
ggtagtttgattctttcatat

SEQ ID NO: 228534 - DNA, 21 bp, Artificial sequence
  SiRNA target sequence
gtagtttgattctttcatatt

SEQ ID NO: 228535 - DNA, 21 bp, Artificial sequence
  SiRNA target sequence
tagtttgattctttcatattt

SEQ ID NO: 228536 - DNA, 21 bp, Artificial sequence
  SiRNA target sequence
agtttgattctttcatattta

SEQ ID NO: 228537 - DNA, 21 bp, Artificial sequence
  SiRNA target sequence
gtttgattctttcatatttat

SEQ ID NO: 228538 - DNA, 21 bp, Artificial sequence
  SiRNA target sequence
tttgattctttcatatttatt

SEQ ID NO: 228539 - DNA, 21 bp, Artificial sequence
  SiRNA target sequence
ttgattctttcatatttattt

SEQ ID NO: 228540 - DNA, 21 bp, Artificial sequence
  SiRNA target sequence
tgattctttcatatttattta

SEQ ID NO: 228541 - DNA, 21 bp, Artificial sequence
  SiRNA target sequence
gattctttcatatttatttat

SEQ ID NO: 228542 - DNA, 21 bp, Artificial sequence
  SiRNA target sequence
attctttcatatttatttatg

SEQ ID NO: 228543 - DNA, 21 bp, Artificial sequence
  SiRNA target sequence
ttctttcatatttatttatga

SEQ ID NO: 228544 - DNA, 21 bp, Artificial sequence
  SiRNA target sequence
tctttcatatttatttatgac

SEQ ID NO: 228545 - DNA, 21 bp, Artificial sequence
  SiRNA target sequence
ctttcatatttatttatgacg

SEQ ID NO: 228546 - DNA, 21 bp, Artificial sequence
  SiRNA target sequence
tttcatatttatttatgacgt

SEQ ID NO: 228547 - DNA, 21 bp, Artificial sequence
  SiRNA target sequence
ttcatatttatttatgacgtt

SEQ ID NO: 228548 - DNA, 21 bp, Artificial sequence
  SiRNA target sequence
tcatatttatttatgacgttt

SEQ ID NO: 228549 - DNA, 21 bp, Artificial sequence
  SiRNA target sequence
catatttatttatgacgtttg

SEQ ID NO: 228550 - DNA, 21 bp, Artificial sequence
  SiRNA target sequence
atatttatttatgacgtttgc

SEQ ID NO: 228551 - DNA, 21 bp, Artificial sequence
  SiRNA target sequence
tatttatttatgacgtttgct

SEQ ID NO: 228552 - DNA, 21 bp, Artificial sequence
  SiRNA target sequence
atttatttatgacgtttgcta

SEQ ID NO: 228553 - DNA, 21 bp, Artificial sequence
  SiRNA target sequence
tttatttatgacgtttgctaa

SEQ ID NO: 228554 - DNA, 21 bp, Artificial sequence
  SiRNA target sequence
ttatttatgacgtttgctaat

SEQ ID NO: 228555 - DNA, 21 bp, Artificial sequence
  SiRNA target sequence
tatttatgacgtttgctaatg

SEQ ID NO: 228556 - DNA, 21 bp, Artificial sequence
  SiRNA target sequence
atttatgacgtttgctaatgg

SEQ ID NO: 228557 - DNA, 21 bp, Artificial sequence
  SiRNA target sequence
tttatgacgtttgctaatggt

SEQ ID NO: 228558 - DNA, 21 bp, Artificial sequence
  SiRNA target sequence
ttatgacgtttgctaatggtc

SEQ ID NO: 228559 - DNA, 21 bp, Artificial sequence
  SiRNA target sequence
tatgacgtttgctaatggtct

SEQ ID NO: 228560 - DNA, 21 bp, Artificial sequence
  SiRNA target sequence
atgacgtttgctaatggtctt

SEQ ID NO: 228561 - DNA, 21 bp, Artificial sequence
  SiRNA target sequence
tgacgtttgctaatggtcttt

SEQ ID NO: 228562 - DNA, 21 bp, Artificial sequence
  SiRNA target sequence
gacgtttgctaatggtctttc

SEQ ID NO: 228563 - DNA, 21 bp, Artificial sequence
  SiRNA target sequence
acgtttgctaatggtctttcg

SEQ ID NO: 228564 - DNA, 21 bp, Artificial sequence
  SiRNA target sequence
cgtttgctaatggtctttcga

SEQ ID NO: 228565 - DNA, 21 bp, Artificial sequence
  SiRNA target sequence
gtttgctaatggtctttcgac

SEQ ID NO: 228566 - DNA, 21 bp, Artificial sequence
  SiRNA target sequence
tttgctaatggtctttcgact

SEQ ID NO: 228567 - DNA, 21 bp, Artificial sequence
  SiRNA target sequence
ttgctaatggtctttcgactc

SEQ ID NO: 228568 - DNA, 21 bp, Artificial sequence
  SiRNA target sequence
tgctaatggtctttcgactcc

SEQ ID NO: 228569 - DNA, 21 bp, Artificial sequence
  SiRNA target sequence
gctaatggtctttcgactcct

SEQ ID NO: 228570 - DNA, 21 bp, Artificial sequence
  SiRNA target sequence
ctaatggtctttcgactcctg

SEQ ID NO: 228571 - DNA, 21 bp, Artificial sequence
  SiRNA target sequence
taatggtctttcgactcctgg

SEQ ID NO: 228572 - DNA, 21 bp, Artificial sequence
  SiRNA target sequence
aatggtctttcgactcctgga

SEQ ID NO: 228573 - DNA, 21 bp, Artificial sequence
  SiRNA target sequence
atggtctttcgactcctggac

SEQ ID NO: 228574 - DNA, 21 bp, Artificial sequence
  SiRNA target sequence
tggtctttcgactcctggaca

SEQ ID NO: 228575 - DNA, 21 bp, Artificial sequence
  SiRNA target sequence
ggtctttcgactcctggacag

SEQ ID NO: 228576 - DNA, 21 bp, Artificial sequence
  SiRNA target sequence
gtctttcgactcctggacagt

SEQ ID NO: 228577 - DNA, 21 bp, Artificial sequence
  SiRNA target sequence
tctttcgactcctggacagtc

SEQ ID NO: 228578 - DNA, 21 bp, Artificial sequence
  SiRNA target sequence
ctttcgactcctggacagtcc

SEQ ID NO: 228579 - DNA, 21 bp, Artificial sequence
  SiRNA target sequence
tttcgactcctggacagtccg

SEQ ID NO: 228580 - DNA, 21 bp, Artificial sequence
  SiRNA target sequence
ttcgactcctggacagtccgc

SEQ ID NO: 228581 - DNA, 21 bp, Artificial sequence
  SiRNA target sequence
tcgactcctggacagtccgct

SEQ ID NO: 228582 - DNA, 21 bp, Artificial sequence
  SiRNA target sequence
cgactcctggacagtccgcta

SEQ ID NO: 228583 - DNA, 21 bp, Artificial sequence
  SiRNA target sequence
gactcctggacagtccgctag

SEQ ID NO: 228584 - DNA, 21 bp, Artificial sequence
  SiRNA target sequence
actcctggacagtccgctaga

SEQ ID NO: 228585 - DNA, 21 bp, Artificial sequence
  SiRNA target sequence
ctcctggacagtccgctagat

SEQ ID NO: 228586 - DNA, 21 bp, Artificial sequence
  SiRNA target sequence
tcctggacagtccgctagatt

SEQ ID NO: 228587 - DNA, 21 bp, Artificial sequence
  SiRNA target sequence
cctggacagtccgctagattt

SEQ ID NO: 228588 - DNA, 21 bp, Artificial sequence
  SiRNA target sequence
ctggacagtccgctagatttg

SEQ ID NO: 228589 - DNA, 21 bp, Artificial sequence
  SiRNA target sequence
tggacagtccgctagatttgt

SEQ ID NO: 228590 - DNA, 21 bp, Artificial sequence
  SiRNA target sequence
ggacagtccgctagatttgtc

SEQ ID NO: 228591 - DNA, 21 bp, Artificial sequence
  SiRNA target sequence
gacagtccgctagatttgtcc

SEQ ID NO: 228592 - DNA, 21 bp, Artificial sequence
  SiRNA target sequence
acagtccgctagatttgtccc

SEQ ID NO: 228593 - DNA, 21 bp, Artificial sequence
  SiRNA target sequence
cagtccgctagatttgtccct

SEQ ID NO: 228594 - DNA, 21 bp, Artificial sequence
  SiRNA target sequence
agtccgctagatttgtccctt

SEQ ID NO: 228595 - DNA, 21 bp, Artificial sequence
  SiRNA target sequence
gtccgctagatttgtcccttt

SEQ ID NO: 228596 - DNA, 21 bp, Artificial sequence
  SiRNA target sequence
tccgctagatttgtcccttta

SEQ ID NO: 228597 - DNA, 21 bp, Artificial sequence
  SiRNA target sequence
ccgctagatttgtccctttat

SEQ ID NO: 228598 - DNA, 21 bp, Artificial sequence
  SiRNA target sequence
cgctagatttgtccctttatt

SEQ ID NO: 228599 - DNA, 21 bp, Artificial sequence
  SiRNA target sequence
gctagatttgtccctttattt

SEQ ID NO: 228600 - DNA, 21 bp, Artificial sequence
  SiRNA target sequence
ctagatttgtccctttatttt

SEQ ID NO: 228601 - DNA, 21 bp, Artificial sequence
  SiRNA target sequence
tagatttgtccctttatttta

SEQ ID NO: 228602 - DNA, 21 bp, Artificial sequence
  SiRNA target sequence
agatttgtccctttattttat

SEQ ID NO: 228603 - DNA, 21 bp, Artificial sequence
  SiRNA target sequence
gatttgtccctttattttatg

SEQ ID NO: 228604 - DNA, 21 bp, Artificial sequence
  SiRNA target sequence
atttgtccctttattttatgt

SEQ ID NO: 228605 - DNA, 21 bp, Artificial sequence
  SiRNA target sequence
tttgtccctttattttatgtt

SEQ ID NO: 228606 - DNA, 21 bp, Artificial sequence
  SiRNA target sequence
ttgtccctttattttatgttg

SEQ ID NO: 228607 - DNA, 21 bp, Artificial sequence
  SiRNA target sequence
tgtccctttattttatgttgg

SEQ ID NO: 228608 - DNA, 21 bp, Artificial sequence
  SiRNA target sequence
gtccctttattttatgttgga

SEQ ID NO: 228609 - DNA, 21 bp, Artificial sequence
  SiRNA target sequence
tccctttattttatgttggat

SEQ ID NO: 228610 - DNA, 21 bp, Artificial sequence
  SiRNA target sequence
ccctttattttatgttggatc

SEQ ID NO: 228611 - DNA, 21 bp, Artificial sequence
  SiRNA target sequence
cctttattttatgttggatct

SEQ ID NO: 228612 - DNA, 21 bp, Artificial sequence
  SiRNA target sequence
ctttattttatgttggatcta

SEQ ID NO: 228613 - DNA, 21 bp, Artificial sequence
  SiRNA target sequence
tttattttatgttggatctaa

SEQ ID NO: 228614 - DNA, 21 bp, Artificial sequence
  SiRNA target sequence
ttattttatgttggatctaat

SEQ ID NO: 228615 - DNA, 21 bp, Artificial sequence
  SiRNA target sequence
tattttatgttggatctaatt

SEQ ID NO: 228616 - DNA, 21 bp, Artificial sequence
  SiRNA target sequence
attttatgttggatctaattt

SEQ ID NO: 228617 - DNA, 21 bp, Artificial sequence
  SiRNA target sequence
ttttatgttggatctaatttg

SEQ ID NO: 228618 - DNA, 21 bp, Artificial sequence
  SiRNA target sequence
tttatgttggatctaatttgg

SEQ ID NO: 228619 - DNA, 21 bp, Artificial sequence
  SiRNA target sequence
ttatgttggatctaatttggc

SEQ ID NO: 228620 - DNA, 21 bp, Artificial sequence
  SiRNA target sequence
tatgttggatctaatttggct

SEQ ID NO: 228621 - DNA, 21 bp, Artificial sequence
  SiRNA target sequence
atgttggatctaatttggctt

SEQ ID NO: 228622 - DNA, 21 bp, Artificial sequence
  SiRNA target sequence
tgttggatctaatttggcttt

SEQ ID NO: 228623 - DNA, 21 bp, Artificial sequence
  SiRNA target sequence
gttggatctaatttggcttta

SEQ ID NO: 228624 - DNA, 21 bp, Artificial sequence
  SiRNA target sequence
ttggatctaatttggctttac

SEQ ID NO: 228625 - DNA, 21 bp, Artificial sequence
  SiRNA target sequence
tggatctaatttggctttact

SEQ ID NO: 228626 - DNA, 21 bp, Artificial sequence
  SiRNA target sequence
ggatctaatttggctttactt

SEQ ID NO: 228627 - DNA, 21 bp, Artificial sequence
  SiRNA target sequence
gatctaatttggctttacttc

SEQ ID NO: 228628 - DNA, 21 bp, Artificial sequence
  SiRNA target sequence
atctaatttggctttacttct

SEQ ID NO: 228629 - DNA, 21 bp, Artificial sequence
  SiRNA target sequence
tctaatttggctttacttctt

SEQ ID NO: 228630 - DNA, 21 bp, Artificial sequence
  SiRNA target sequence
ctaatttggctttacttcttt

SEQ ID NO: 228631 - DNA, 21 bp, Artificial sequence
  SiRNA target sequence
taatttggctttacttctttc

SEQ ID NO: 228632 - DNA, 21 bp, Artificial sequence
  SiRNA target sequence
aatttggctttacttctttca

SEQ ID NO: 228633 - DNA, 21 bp, Artificial sequence
  SiRNA target sequence
atttggctttacttctttcag

SEQ ID NO: 228634 - DNA, 21 bp, Artificial sequence
  SiRNA target sequence
tttggctttacttctttcagg

SEQ ID NO: 228635 - DNA, 21 bp, Artificial sequence
  SiRNA target sequence
ttggctttacttctttcagga

SEQ ID NO: 228636 - DNA, 21 bp, Artificial sequence
  SiRNA target sequence
tggctttacttctttcaggaa

SEQ ID NO: 228637 - DNA, 21 bp, Artificial sequence
  SiRNA target sequence
ggctttacttctttcaggaat

SEQ ID NO: 228638 - DNA, 21 bp, Artificial sequence
  SiRNA target sequence
gctttacttctttcaggaatg

SEQ ID NO: 228639 - DNA, 21 bp, Artificial sequence
  SiRNA target sequence
ctttacttctttcaggaatga

SEQ ID NO: 228640 - DNA, 21 bp, Artificial sequence
  SiRNA target sequence
tttacttctttcaggaatgat

SEQ ID NO: 228641 - DNA, 21 bp, Artificial sequence
  SiRNA target sequence
ttacttctttcaggaatgata

SEQ ID NO: 228642 - DNA, 21 bp, Artificial sequence
  SiRNA target sequence
tacttctttcaggaatgataa

SEQ ID NO: 228643 - DNA, 21 bp, Artificial sequence
  SiRNA target sequence
acttctttcaggaatgataaa

SEQ ID NO: 228644 - DNA, 21 bp, Artificial sequence
  SiRNA target sequence
cttctttcaggaatgataaat

SEQ ID NO: 228645 - DNA, 21 bp, Artificial sequence
  SiRNA target sequence
ttctttcaggaatgataaatt

SEQ ID NO: 228646 - DNA, 21 bp, Artificial sequence
  SiRNA target sequence
tctttcaggaatgataaatta

SEQ ID NO: 228647 - DNA, 21 bp, Artificial sequence
  SiRNA target sequence
ctttcaggaatgataaattac

SEQ ID NO: 228648 - DNA, 21 bp, Artificial sequence
  SiRNA target sequence
tttcaggaatgataaattact

SEQ ID NO: 228649 - DNA, 21 bp, Artificial sequence
  SiRNA target sequence
ttcaggaatgataaattactt

SEQ ID NO: 228650 - DNA, 21 bp, Artificial sequence
  SiRNA target sequence
tcaggaatgataaattacttt

SEQ ID NO: 228651 - DNA, 21 bp, Artificial sequence
  SiRNA target sequence
caggaatgataaattactttt

SEQ ID NO: 228652 - DNA, 21 bp, Artificial sequence
  SiRNA target sequence
aggaatgataaattactttta

SEQ ID NO: 228653 - DNA, 21 bp, Artificial sequence
  SiRNA target sequence
ggaatgataaattacttttat

SEQ ID NO: 228654 - DNA, 21 bp, Artificial sequence
  SiRNA target sequence
gaatgataaattacttttata

SEQ ID NO: 228655 - DNA, 21 bp, Artificial sequence
  SiRNA target sequence
aatgataaattacttttatag

SEQ ID NO: 228656 - DNA, 21 bp, Artificial sequence
  SiRNA target sequence
atgataaattacttttatagt

SEQ ID NO: 228657 - DNA, 21 bp, Artificial sequence
  SiRNA target sequence
tgataaattacttttatagtg

SEQ ID NO: 228658 - DNA, 21 bp, Artificial sequence
  SiRNA target sequence
gataaattacttttatagtgt

SEQ ID NO: 228659 - DNA, 21 bp, Artificial sequence
  SiRNA target sequence
ataaattacttttatagtgta

SEQ ID NO: 228660 - DNA, 21 bp, Artificial sequence
  SiRNA target sequence
taaattacttttatagtgtaa

SEQ ID NO: 228661 - DNA, 21 bp, Artificial sequence
  SiRNA target sequence
aaattacttttatagtgtaag

SEQ ID NO: 228662 - DNA, 21 bp, Artificial sequence
  SiRNA target sequence
aattacttttatagtgtaagt

SEQ ID NO: 228663 - DNA, 21 bp, Artificial sequence
  SiRNA target sequence
attacttttatagtgtaagta

SEQ ID NO: 228664 - DNA, 21 bp, Artificial sequence
  SiRNA target sequence
ttacttttatagtgtaagtaa

SEQ ID NO: 228665 - DNA, 21 bp, Artificial sequence
  SiRNA target sequence
tacttttatagtgtaagtaaa

SEQ ID NO: 228666 - DNA, 21 bp, Artificial sequence
  SiRNA target sequence
acttttatagtgtaagtaaat

SEQ ID NO: 228667 - DNA, 21 bp, Artificial sequence
  SiRNA target sequence
cttttatagtgtaagtaaatc

SEQ ID NO: 228668 - DNA, 21 bp, Artificial sequence
  SiRNA target sequence
ttttatagtgtaagtaaatct

SEQ ID NO: 228669 - DNA, 21 bp, Artificial sequence
  SiRNA target sequence
tttatagtgtaagtaaatcta

SEQ ID NO: 228670 - DNA, 21 bp, Artificial sequence
  SiRNA target sequence
ttatagtgtaagtaaatctaa

SEQ ID NO: 228671 - DNA, 21 bp, Artificial sequence
  SiRNA target sequence
tatagtgtaagtaaatctaaa

SEQ ID NO: 228672 - DNA, 21 bp, Artificial sequence
  SiRNA target sequence
atagtgtaagtaaatctaaaa

SEQ ID NO: 228673 - DNA, 21 bp, Artificial sequence
  SiRNA target sequence
tagtgtaagtaaatctaaaat

SEQ ID NO: 228674 - DNA, 21 bp, Artificial sequence
  SiRNA target sequence
agtgtaagtaaatctaaaatg

SEQ ID NO: 228675 - DNA, 21 bp, Artificial sequence
  SiRNA target sequence
gtgtaagtaaatctaaaatgt

SEQ ID NO: 228676 - DNA, 21 bp, Artificial sequence
  SiRNA target sequence
tgtaagtaaatctaaaatgtc

SEQ ID NO: 228677 - DNA, 21 bp, Artificial sequence
  SiRNA target sequence
gtaagtaaatctaaaatgtcg

SEQ ID NO: 228678 - DNA, 21 bp, Artificial sequence
  SiRNA target sequence
taagtaaatctaaaatgtcgt

SEQ ID NO: 228679 - DNA, 21 bp, Artificial sequence
  SiRNA target sequence
aagtaaatctaaaatgtcgta

SEQ ID NO: 228680 - DNA, 21 bp, Artificial sequence
  SiRNA target sequence
agtaaatctaaaatgtcgtat

SEQ ID NO: 228681 - DNA, 21 bp, Artificial sequence
  SiRNA target sequence
gtaaatctaaaatgtcgtatg

SEQ ID NO: 228682 - DNA, 21 bp, Artificial sequence
  SiRNA target sequence
taaatctaaaatgtcgtatgt

SEQ ID NO: 228683 - DNA, 21 bp, Artificial sequence
  SiRNA target sequence
aaatctaaaatgtcgtatgtt

SEQ ID NO: 228684 - DNA, 21 bp, Artificial sequence
  SiRNA target sequence
aatctaaaatgtcgtatgttg

SEQ ID NO: 228685 - DNA, 21 bp, Artificial sequence
  SiRNA target sequence
atctaaaatgtcgtatgttgc

SEQ ID NO: 228686 - DNA, 21 bp, Artificial sequence
  SiRNA target sequence
tctaaaatgtcgtatgttgcg

SEQ ID NO: 228687 - DNA, 21 bp, Artificial sequence
  SiRNA target sequence
ctaaaatgtcgtatgttgcgg

SEQ ID NO: 228688 - DNA, 21 bp, Artificial sequence
  SiRNA target sequence
taaaatgtcgtatgttgcggc

SEQ ID NO: 228689 - DNA, 21 bp, Artificial sequence
  SiRNA target sequence
aaaatgtcgtatgttgcggcc

SEQ ID NO: 228690 - DNA, 21 bp, Artificial sequence
  SiRNA target sequence
aaatgtcgtatgttgcggccg

SEQ ID NO: 228691 - DNA, 21 bp, Artificial sequence
  SiRNA target sequence
aatgtcgtatgttgcggccga

SEQ ID NO: 228692 - DNA, 21 bp, Artificial sequence
  SiRNA target sequence
atgtcgtatgttgcggccgaa

SEQ ID NO: 228693 - DNA, 21 bp, Artificial sequence
  SiRNA target sequence
tgtcgtatgttgcggccgaaa

SEQ ID NO: 228694 - DNA, 21 bp, Artificial sequence
  SiRNA target sequence
gtcgtatgttgcggccgaaag

SEQ ID NO: 228695 - DNA, 21 bp, Artificial sequence
  SiRNA target sequence
tcgtatgttgcggccgaaaga

SEQ ID NO: 228696 - DNA, 21 bp, Artificial sequence
  SiRNA target sequence
cgtatgttgcggccgaaagat

SEQ ID NO: 228697 - DNA, 21 bp, Artificial sequence
  SiRNA target sequence
gtatgttgcggccgaaagatt

SEQ ID NO: 228698 - DNA, 21 bp, Artificial sequence
  SiRNA target sequence
tatgttgcggccgaaagattt

SEQ ID NO: 228699 - DNA, 21 bp, Artificial sequence
  SiRNA target sequence
atgttgcggccgaaagatttt

SEQ ID NO: 228700 - DNA, 21 bp, Artificial sequence
  SiRNA target sequence
tgttgcggccgaaagattttt

SEQ ID NO: 228701 - DNA, 21 bp, Artificial sequence
  SiRNA target sequence
gttgcggccgaaagatttttt

SEQ ID NO: 228702 - DNA, 21 bp, Artificial sequence
  SiRNA target sequence
ttgcggccgaaagatttttta

SEQ ID NO: 228703 - DNA, 21 bp, Artificial sequence
  SiRNA target sequence
tgcggccgaaagattttttaa

SEQ ID NO: 228704 - DNA, 21 bp, Artificial sequence
  SiRNA target sequence
gcggccgaaagattttttaat

SEQ ID NO: 228705 - DNA, 21 bp, Artificial sequence
  SiRNA target sequence
cggccgaaagattttttaatg

SEQ ID NO: 228706 - DNA, 21 bp, Artificial sequence
  SiRNA target sequence
ggccgaaagattttttaatgg

SEQ ID NO: 228707 - DNA, 21 bp, Artificial sequence
  SiRNA target sequence
gccgaaagattttttaatgga

SEQ ID NO: 228708 - DNA, 21 bp, Artificial sequence
  SiRNA target sequence
ccgaaagattttttaatggat

SEQ ID NO: 228709 - DNA, 21 bp, Artificial sequence
  SiRNA target sequence
cgaaagattttttaatggatt

SEQ ID NO: 228710 - DNA, 21 bp, Artificial sequence
  SiRNA target sequence
gaaagattttttaatggattt

SEQ ID NO: 228711 - DNA, 21 bp, Artificial sequence
  SiRNA target sequence
aaagattttttaatggatttt

SEQ ID NO: 228712 - DNA, 21 bp, Artificial sequence
  SiRNA target sequence
aagattttttaatggattttt

SEQ ID NO: 228713 - DNA, 21 bp, Artificial sequence
  SiRNA target sequence
agattttttaatggatttttt

SEQ ID NO: 228714 - DNA, 21 bp, Artificial sequence
  SiRNA target sequence
gattttttaatggattttttt

SEQ ID NO: 228715 - DNA, 21 bp, Artificial sequence
  SiRNA target sequence
attttttaatggatttttttg

SEQ ID NO: 228716 - DNA, 21 bp, Artificial sequence
  SiRNA target sequence
ttttttaatggatttttttgt

SEQ ID NO: 228717 - DNA, 21 bp, Artificial sequence
  SiRNA target sequence
tttttaatggatttttttgtc

SEQ ID NO: 228718 - DNA, 21 bp, Artificial sequence
  SiRNA target sequence
ttttaatggatttttttgtct

SEQ ID NO: 228719 - DNA, 21 bp, Artificial sequence
  SiRNA target sequence
tttaatggatttttttgtctg

SEQ ID NO: 228720 - DNA, 21 bp, Artificial sequence
  SiRNA target sequence
ttaatggatttttttgtctga

SEQ ID NO: 228721 - DNA, 21 bp, Artificial sequence
  SiRNA target sequence
taatggatttttttgtctgag

SEQ ID NO: 228722 - DNA, 21 bp, Artificial sequence
  SiRNA target sequence
aatggatttttttgtctgagt

SEQ ID NO: 228723 - DNA, 21 bp, Artificial sequence
  SiRNA target sequence
atggatttttttgtctgagtg

SEQ ID NO: 228724 - DNA, 21 bp, Artificial sequence
  SiRNA target sequence
tggatttttttgtctgagtgg

SEQ ID NO: 228725 - DNA, 21 bp, Artificial sequence
  SiRNA target sequence
ggatttttttgtctgagtgga

SEQ ID NO: 228726 - DNA, 21 bp, Artificial sequence
  SiRNA target sequence
gatttttttgtctgagtggaa

SEQ ID NO: 228727 - DNA, 21 bp, Artificial sequence
  SiRNA target sequence
atttttttgtctgagtggaat

SEQ ID NO: 228728 - DNA, 21 bp, Artificial sequence
  SiRNA target sequence
tttttttgtctgagtggaatt

SEQ ID NO: 228729 - DNA, 21 bp, Artificial sequence
  SiRNA target sequence
ttttttgtctgagtggaattc

SEQ ID NO: 228730 - DNA, 21 bp, Artificial sequence
  SiRNA target sequence
tttttgtctgagtggaattct

SEQ ID NO: 228731 - DNA, 21 bp, Artificial sequence
  SiRNA target sequence
ttttgtctgagtggaattctc

SEQ ID NO: 228732 - DNA, 21 bp, Artificial sequence
  SiRNA target sequence
tttgtctgagtggaattctct

SEQ ID NO: 228733 - DNA, 21 bp, Artificial sequence
  SiRNA target sequence
ttgtctgagtggaattctctg

SEQ ID NO: 228734 - DNA, 21 bp, Artificial sequence
  SiRNA target sequence
tgtctgagtggaattctctgt

SEQ ID NO: 228735 - DNA, 21 bp, Artificial sequence
  SiRNA target sequence
gtctgagtggaattctctgtg

SEQ ID NO: 228736 - DNA, 21 bp, Artificial sequence
  SiRNA target sequence
tctgagtggaattctctgtgc

SEQ ID NO: 228737 - DNA, 21 bp, Artificial sequence
  SiRNA target sequence
ctgagtggaattctctgtgct

SEQ ID NO: 228738 - DNA, 21 bp, Artificial sequence
  SiRNA target sequence
tgagtggaattctctgtgctg

SEQ ID NO: 228739 - DNA, 21 bp, Artificial sequence
  SiRNA target sequence
gagtggaattctctgtgctgt

SEQ ID NO: 228740 - DNA, 21 bp, Artificial sequence
  SiRNA target sequence
agtggaattctctgtgctgta

SEQ ID NO: 228741 - DNA, 21 bp, Artificial sequence
  SiRNA target sequence
gtggaattctctgtgctgtaa

SEQ ID NO: 228742 - DNA, 21 bp, Artificial sequence
  SiRNA target sequence
tggaattctctgtgctgtaat

SEQ ID NO: 228743 - DNA, 21 bp, Artificial sequence
  SiRNA target sequence
ggaattctctgtgctgtaatt

SEQ ID NO: 228744 - DNA, 21 bp, Artificial sequence
  SiRNA target sequence
gaattctctgtgctgtaattt

SEQ ID NO: 228745 - DNA, 21 bp, Artificial sequence
  SiRNA target sequence
aattctctgtgctgtaattta

SEQ ID NO: 228746 - DNA, 21 bp, Artificial sequence
  SiRNA target sequence
attctctgtgctgtaatttat

SEQ ID NO: 228747 - DNA, 21 bp, Artificial sequence
  SiRNA target sequence
ttctctgtgctgtaatttatc

SEQ ID NO: 228748 - DNA, 21 bp, Artificial sequence
  SiRNA target sequence
tctctgtgctgtaatttatct

SEQ ID NO: 228749 - DNA, 21 bp, Artificial sequence
  SiRNA target sequence
ctctgtgctgtaatttatctt

SEQ ID NO: 228750 - DNA, 21 bp, Artificial sequence
  SiRNA target sequence
tctgtgctgtaatttatcttc

SEQ ID NO: 228751 - DNA, 21 bp, Artificial sequence
  SiRNA target sequence
ctgtgctgtaatttatcttct

SEQ ID NO: 228752 - DNA, 21 bp, Artificial sequence
  SiRNA target sequence
tgtgctgtaatttatcttcta

SEQ ID NO: 228753 - DNA, 21 bp, Artificial sequence
  SiRNA target sequence
gtgctgtaatttatcttctaa

SEQ ID NO: 228754 - DNA, 21 bp, Artificial sequence
  SiRNA target sequence
tgctgtaatttatcttctaaa

SEQ ID NO: 228755 - DNA, 21 bp, Artificial sequence
  SiRNA target sequence
gctgtaatttatcttctaaaa

SEQ ID NO: 228756 - DNA, 21 bp, Artificial sequence
  SiRNA target sequence
ctgtaatttatcttctaaaaa

SEQ ID NO: 228757 - DNA, 21 bp, Artificial sequence
  SiRNA target sequence
tgtaatttatcttctaaaaaa

SEQ ID NO: 228758 - DNA, 21 bp, Artificial sequence
  SiRNA target sequence
gtaatttatcttctaaaaaaa

SEQ ID NO: 228759 - DNA, 21 bp, Artificial sequence
  SiRNA target sequence
taatttatcttctaaaaaaat

SEQ ID NO: 228760 - DNA, 21 bp, Artificial sequence
  SiRNA target sequence
aatttatcttctaaaaaaata

SEQ ID NO: 228761 - DNA, 21 bp, Artificial sequence
  SiRNA target sequence
atttatcttctaaaaaaatat

SEQ ID NO: 228762 - DNA, 21 bp, Artificial sequence
  SiRNA target sequence
tttatcttctaaaaaaatatt

SEQ ID NO: 228763 - DNA, 21 bp, Artificial sequence
  SiRNA target sequence
ttatcttctaaaaaaatattt

SEQ ID NO: 228764 - DNA, 21 bp, Artificial sequence
  SiRNA target sequence
tatcttctaaaaaaatattta

SEQ ID NO: 228765 - DNA, 21 bp, Artificial sequence
  SiRNA target sequence
atcttctaaaaaaatatttag

SEQ ID NO: 228766 - DNA, 21 bp, Artificial sequence
  SiRNA target sequence
tcttctaaaaaaatatttaga

SEQ ID NO: 228767 - DNA, 21 bp, Artificial sequence
  SiRNA target sequence
cttctaaaaaaatatttagaa

SEQ ID NO: 228768 - DNA, 21 bp, Artificial sequence
  SiRNA target sequence
ttctaaaaaaatatttagaaa

SEQ ID NO: 228769 - DNA, 21 bp, Artificial sequence
  SiRNA target sequence
tctaaaaaaatatttagaaaa

SEQ ID NO: 228770 - DNA, 21 bp, Artificial sequence
  SiRNA target sequence
ctaaaaaaatatttagaaaat

SEQ ID NO: 228771 - DNA, 21 bp, Artificial sequence
  SiRNA target sequence
taaaaaaatatttagaaaata

SEQ ID NO: 228772 - DNA, 21 bp, Artificial sequence
  SiRNA target sequence
aaaaaaatatttagaaaataa

SEQ ID NO: 228773 - DNA, 21 bp, Artificial sequence
  SiRNA target sequence
aaaaaatatttagaaaataat

SEQ ID NO: 228774 - DNA, 21 bp, Artificial sequence
  SiRNA target sequence
aaaaatatttagaaaataatg

SEQ ID NO: 228775 - DNA, 21 bp, Artificial sequence
  SiRNA target sequence
aaaatatttagaaaataatgt

SEQ ID NO: 228776 - DNA, 21 bp, Artificial sequence
  SiRNA target sequence
aaatatttagaaaataatgtt

SEQ ID NO: 228777 - DNA, 21 bp, Artificial sequence
  SiRNA target sequence
aatatttagaaaataatgtta

SEQ ID NO: 228778 - DNA, 21 bp, Artificial sequence
  SiRNA target sequence
atatttagaaaataatgttac

SEQ ID NO: 228779 - DNA, 21 bp, Artificial sequence
  SiRNA target sequence
tatttagaaaataatgttact

SEQ ID NO: 228780 - DNA, 21 bp, Artificial sequence
  SiRNA target sequence
atttagaaaataatgttacta

SEQ ID NO: 228781 - DNA, 21 bp, Artificial sequence
  SiRNA target sequence
tttagaaaataatgttactag

SEQ ID NO: 228782 - DNA, 21 bp, Artificial sequence
  SiRNA target sequence
ttagaaaataatgttactagc

SEQ ID NO: 228783 - DNA, 21 bp, Artificial sequence
  SiRNA target sequence
tagaaaataatgttactagca

SEQ ID NO: 228784 - DNA, 21 bp, Artificial sequence
  SiRNA target sequence
agaaaataatgttactagcaa

SEQ ID NO: 228785 - DNA, 21 bp, Artificial sequence
  SiRNA target sequence
gaaaataatgttactagcaaa

SEQ ID NO: 228786 - DNA, 21 bp, Artificial sequence
  SiRNA target sequence
aaaataatgttactagcaaac

SEQ ID NO: 228787 - DNA, 21 bp, Artificial sequence
  SiRNA target sequence
aaataatgttactagcaaacc

SEQ ID NO: 228788 - DNA, 21 bp, Artificial sequence
  SiRNA target sequence
aataatgttactagcaaacca

SEQ ID NO: 228789 - DNA, 21 bp, Artificial sequence
  SiRNA target sequence
ataatgttactagcaaaccaa

SEQ ID NO: 228790 - DNA, 21 bp, Artificial sequence
  SiRNA target sequence
taatgttactagcaaaccaat

SEQ ID NO: 228791 - DNA, 21 bp, Artificial sequence
  SiRNA target sequence
aatgttactagcaaaccaatg

SEQ ID NO: 228792 - DNA, 21 bp, Artificial sequence
  SiRNA target sequence
atgttactagcaaaccaatgt

SEQ ID NO: 228793 - DNA, 21 bp, Artificial sequence
  SiRNA target sequence
tgttactagcaaaccaatgtt

SEQ ID NO: 228794 - DNA, 21 bp, Artificial sequence
  SiRNA target sequence
gttactagcaaaccaatgttt

SEQ ID NO: 228795 - DNA, 21 bp, Artificial sequence
  SiRNA target sequence
ttactagcaaaccaatgtttg

SEQ ID NO: 228796 - DNA, 21 bp, Artificial sequence
  SiRNA target sequence
tactagcaaaccaatgtttgt

SEQ ID NO: 228797 - DNA, 21 bp, Artificial sequence
  SiRNA target sequence
actagcaaaccaatgtttgtt

SEQ ID NO: 228798 - DNA, 21 bp, Artificial sequence
  SiRNA target sequence
ctagcaaaccaatgtttgtta

SEQ ID NO: 228799 - DNA, 21 bp, Artificial sequence
  SiRNA target sequence
tagcaaaccaatgtttgttag

SEQ ID NO: 228800 - DNA, 21 bp, Artificial sequence
  SiRNA target sequence
agcaaaccaatgtttgttaga

SEQ ID NO: 228801 - DNA, 21 bp, Artificial sequence
  SiRNA target sequence
gcaaaccaatgtttgttagaa

SEQ ID NO: 228802 - DNA, 21 bp, Artificial sequence
  SiRNA target sequence
caaaccaatgtttgttagaaa

SEQ ID NO: 228803 - DNA, 21 bp, Artificial sequence
  SiRNA target sequence
aaaccaatgtttgttagaaag

SEQ ID NO: 228804 - DNA, 21 bp, Artificial sequence
  SiRNA target sequence
aaccaatgtttgttagaaaga

SEQ ID NO: 228805 - DNA, 21 bp, Artificial sequence
  SiRNA target sequence
accaatgtttgttagaaagac

SEQ ID NO: 228806 - DNA, 21 bp, Artificial sequence
  SiRNA target sequence
ccaatgtttgttagaaagact

SEQ ID NO: 228807 - DNA, 21 bp, Artificial sequence
  SiRNA target sequence
caatgtttgttagaaagactt

SEQ ID NO: 228808 - DNA, 21 bp, Artificial sequence
  SiRNA target sequence
aatgtttgttagaaagacttt

SEQ ID NO: 228809 - DNA, 21 bp, Artificial sequence
  SiRNA target sequence
atgtttgttagaaagactttt

SEQ ID NO: 228810 - DNA, 21 bp, Artificial sequence
  SiRNA target sequence
tgtttgttagaaagactttta

SEQ ID NO: 228811 - DNA, 21 bp, Artificial sequence
  SiRNA target sequence
gtttgttagaaagacttttac

SEQ ID NO: 228812 - DNA, 21 bp, Artificial sequence
  SiRNA target sequence
tttgttagaaagacttttact

SEQ ID NO: 228813 - DNA, 21 bp, Artificial sequence
  SiRNA target sequence
ttgttagaaagacttttacta

SEQ ID NO: 228814 - DNA, 21 bp, Artificial sequence
  SiRNA target sequence
tgttagaaagacttttactaa

SEQ ID NO: 228815 - DNA, 21 bp, Artificial sequence
  SiRNA target sequence
gttagaaagacttttactaaa

SEQ ID NO: 228816 - DNA, 21 bp, Artificial sequence
  SiRNA target sequence
ttagaaagacttttactaaaa

SEQ ID NO: 228817 - DNA, 21 bp, Artificial sequence
  SiRNA target sequence
tagaaagacttttactaaaaa

SEQ ID NO: 228818 - DNA, 21 bp, Artificial sequence
  SiRNA target sequence
agaaagacttttactaaaaag

SEQ ID NO: 228819 - DNA, 21 bp, Artificial sequence
  SiRNA target sequence
gaaagacttttactaaaaaga

SEQ ID NO: 228820 - DNA, 21 bp, Artificial sequence
  SiRNA target sequence
aaagacttttactaaaaagaa

SEQ ID NO: 228821 - DNA, 21 bp, Artificial sequence
  SiRNA target sequence
aagacttttactaaaaagaag

SEQ ID NO: 228822 - DNA, 21 bp, Artificial sequence
  SiRNA target sequence
agacttttactaaaaagaaga

SEQ ID NO: 228823 - DNA, 21 bp, Artificial sequence
  SiRNA target sequence
gacttttactaaaaagaagag

SEQ ID NO: 228824 - DNA, 21 bp, Artificial sequence
  SiRNA target sequence
acttttactaaaaagaagagt

SEQ ID NO: 228825 - DNA, 21 bp, Artificial sequence
  SiRNA target sequence
cttttactaaaaagaagagta

SEQ ID NO: 228826 - DNA, 21 bp, Artificial sequence
  SiRNA target sequence
ttttactaaaaagaagagtaa

SEQ ID NO: 228827 - DNA, 21 bp, Artificial sequence
  SiRNA target sequence
tttactaaaaagaagagtaaa

SEQ ID NO: 228828 - DNA, 21 bp, Artificial sequence
  SiRNA target sequence
ttactaaaaagaagagtaaag

SEQ ID NO: 228829 - DNA, 21 bp, Artificial sequence
  SiRNA target sequence
tactaaaaagaagagtaaagt

SEQ ID NO: 228830 - DNA, 21 bp, Artificial sequence
  SiRNA target sequence
actaaaaagaagagtaaagtg

SEQ ID NO: 228831 - DNA, 21 bp, Artificial sequence
  SiRNA target sequence
ctaaaaagaagagtaaagtga

SEQ ID NO: 228832 - DNA, 21 bp, Artificial sequence
  SiRNA target sequence
taaaaagaagagtaaagtgaa

SEQ ID NO: 228833 - DNA, 21 bp, Artificial sequence
  SiRNA target sequence
aaaaagaagagtaaagtgaag

SEQ ID NO: 228834 - DNA, 21 bp, Artificial sequence
  SiRNA target sequence
aaaagaagagtaaagtgaagg

SEQ ID NO: 228835 - DNA, 21 bp, Artificial sequence
  SiRNA target sequence
aaagaagagtaaagtgaaggt

SEQ ID NO: 228836 - DNA, 21 bp, Artificial sequence
  SiRNA target sequence
aagaagagtaaagtgaaggtt

SEQ ID NO: 228837 - DNA, 21 bp, Artificial sequence
  SiRNA target sequence
agaagagtaaagtgaaggttg

SEQ ID NO: 228838 - DNA, 21 bp, Artificial sequence
  SiRNA target sequence
gaagagtaaagtgaaggttgg

SEQ ID NO: 228839 - DNA, 21 bp, Artificial sequence
  SiRNA target sequence
aagagtaaagtgaaggttgga

SEQ ID NO: 228840 - DNA, 21 bp, Artificial sequence
  SiRNA target sequence
agagtaaagtgaaggttggat

SEQ ID NO: 228841 - DNA, 21 bp, Artificial sequence
  SiRNA target sequence
gagtaaagtgaaggttggatt

SEQ ID NO: 228842 - DNA, 21 bp, Artificial sequence
  SiRNA target sequence
agtaaagtgaaggttggattt

SEQ ID NO: 228843 - DNA, 21 bp, Artificial sequence
  SiRNA target sequence
gtaaagtgaaggttggatttg

SEQ ID NO: 228844 - DNA, 21 bp, Artificial sequence
  SiRNA target sequence
taaagtgaaggttggatttgt

SEQ ID NO: 228845 - DNA, 21 bp, Artificial sequence
  SiRNA target sequence
aaagtgaaggttggatttgtt

SEQ ID NO: 228846 - DNA, 21 bp, Artificial sequence
  SiRNA target sequence
aagtgaaggttggatttgttg

SEQ ID NO: 228847 - DNA, 21 bp, Artificial sequence
  SiRNA target sequence
agtgaaggttggatttgttga

SEQ ID NO: 228848 - DNA, 21 bp, Artificial sequence
  SiRNA target sequence
gtgaaggttggatttgttgat

SEQ ID NO: 228849 - DNA, 21 bp, Artificial sequence
  SiRNA target sequence
tgaaggttggatttgttgatg

SEQ ID NO: 228850 - DNA, 21 bp, Artificial sequence
  SiRNA target sequence
gaaggttggatttgttgatgg

SEQ ID NO: 228851 - DNA, 21 bp, Artificial sequence
  SiRNA target sequence
aaggttggatttgttgatgga

SEQ ID NO: 228852 - DNA, 21 bp, Artificial sequence
  SiRNA target sequence
aggttggatttgttgatggac

SEQ ID NO: 228853 - DNA, 21 bp, Artificial sequence
  SiRNA target sequence
ggttggatttgttgatggact

SEQ ID NO: 228854 - DNA, 21 bp, Artificial sequence
  SiRNA target sequence
gttggatttgttgatggactt

SEQ ID NO: 228855 - DNA, 21 bp, Artificial sequence
  SiRNA target sequence
ttggatttgttgatggactta

SEQ ID NO: 228856 - DNA, 21 bp, Artificial sequence
  SiRNA target sequence
tggatttgttgatggacttat

SEQ ID NO: 228857 - DNA, 21 bp, Artificial sequence
  SiRNA target sequence
ggatttgttgatggacttatt

SEQ ID NO: 228858 - DNA, 21 bp, Artificial sequence
  SiRNA target sequence
gatttgttgatggacttattg

SEQ ID NO: 228859 - DNA, 21 bp, Artificial sequence
  SiRNA target sequence
atttgttgatggacttattga

SEQ ID NO: 228860 - DNA, 21 bp, Artificial sequence
  SiRNA target sequence
tttgttgatggacttattgag

SEQ ID NO: 228861 - DNA, 21 bp, Artificial sequence
  SiRNA target sequence
ttgttgatggacttattgaga

SEQ ID NO: 228862 - DNA, 21 bp, Artificial sequence
  SiRNA target sequence
tgttgatggacttattgagat

SEQ ID NO: 228863 - DNA, 21 bp, Artificial sequence
  SiRNA target sequence
gttgatggacttattgagatg

SEQ ID NO: 228864 - DNA, 21 bp, Artificial sequence
  SiRNA target sequence
ttgatggacttattgagatga

SEQ ID NO: 228865 - DNA, 21 bp, Artificial sequence
  SiRNA target sequence
tgatggacttattgagatgag

SEQ ID NO: 228866 - DNA, 21 bp, Artificial sequence
  SiRNA target sequence
gatggacttattgagatgagt

SEQ ID NO: 228867 - DNA, 21 bp, Artificial sequence
  SiRNA target sequence
atggacttattgagatgagta

SEQ ID NO: 228868 - DNA, 21 bp, Artificial sequence
  SiRNA target sequence
tggacttattgagatgagtaa

SEQ ID NO: 228869 - DNA, 21 bp, Artificial sequence
  SiRNA target sequence
ggacttattgagatgagtaaa

SEQ ID NO: 228870 - DNA, 21 bp, Artificial sequence
  SiRNA target sequence
gacttattgagatgagtaaat

SEQ ID NO: 228871 - DNA, 21 bp, Artificial sequence
  SiRNA target sequence
acttattgagatgagtaaatc

SEQ ID NO: 228872 - DNA, 21 bp, Artificial sequence
  SiRNA target sequence
cttattgagatgagtaaatct

SEQ ID NO: 228873 - DNA, 21 bp, Artificial sequence
  SiRNA target sequence
ttattgagatgagtaaatcta

SEQ ID NO: 228874 - DNA, 21 bp, Artificial sequence
  SiRNA target sequence
tattgagatgagtaaatctaa

SEQ ID NO: 228875 - DNA, 21 bp, Artificial sequence
  SiRNA target sequence
attgagatgagtaaatctaaa

SEQ ID NO: 228876 - DNA, 21 bp, Artificial sequence
  SiRNA target sequence
ttgagatgagtaaatctaaac

SEQ ID NO: 228877 - DNA, 21 bp, Artificial sequence
  SiRNA target sequence
tgagatgagtaaatctaaact

SEQ ID NO: 228878 - DNA, 21 bp, Artificial sequence
  SiRNA target sequence
gagatgagtaaatctaaacta

SEQ ID NO: 228879 - DNA, 21 bp, Artificial sequence
  SiRNA target sequence
agatgagtaaatctaaactac

SEQ ID NO: 228880 - DNA, 21 bp, Artificial sequence
  SiRNA target sequence
gatgagtaaatctaaactact

SEQ ID NO: 228881 - DNA, 21 bp, Artificial sequence
  SiRNA target sequence
atgagtaaatctaaactactg

SEQ ID NO: 228882 - DNA, 21 bp, Artificial sequence
  SiRNA target sequence
tgagtaaatctaaactactgt

SEQ ID NO: 228883 - DNA, 21 bp, Artificial sequence
  SiRNA target sequence
gagtaaatctaaactactgtt

SEQ ID NO: 228884 - DNA, 21 bp, Artificial sequence
  SiRNA target sequence
agtaaatctaaactactgttg

SEQ ID NO: 228885 - DNA, 21 bp, Artificial sequence
  SiRNA target sequence
gtaaatctaaactactgttga

SEQ ID NO: 228886 - DNA, 21 bp, Artificial sequence
  SiRNA target sequence
taaatctaaactactgttgaa

SEQ ID NO: 228887 - DNA, 21 bp, Artificial sequence
  SiRNA target sequence
aaatctaaactactgttgaat

SEQ ID NO: 228888 - DNA, 21 bp, Artificial sequence
  SiRNA target sequence
aatctaaactactgttgaata

SEQ ID NO: 228889 - DNA, 21 bp, Artificial sequence
  SiRNA target sequence
atctaaactactgttgaatat

SEQ ID NO: 228890 - DNA, 21 bp, Artificial sequence
  SiRNA target sequence
tctaaactactgttgaatatg

SEQ ID NO: 228891 - DNA, 21 bp, Artificial sequence
  SiRNA target sequence
ctaaactactgttgaatatgt

SEQ ID NO: 228892 - DNA, 21 bp, Artificial sequence
  SiRNA target sequence
taaactactgttgaatatgtc

SEQ ID NO: 228893 - DNA, 21 bp, Artificial sequence
  SiRNA target sequence
aaactactgttgaatatgtca

SEQ ID NO: 228894 - DNA, 21 bp, Artificial sequence
  SiRNA target sequence
aactactgttgaatatgtcat

SEQ ID NO: 228895 - DNA, 21 bp, Artificial sequence
  SiRNA target sequence
actactgttgaatatgtcatt

SEQ ID NO: 228896 - DNA, 21 bp, Artificial sequence
  SiRNA target sequence
ctactgttgaatatgtcatta

SEQ ID NO: 228897 - DNA, 21 bp, Artificial sequence
  SiRNA target sequence
tactgttgaatatgtcattag

SEQ ID NO: 228898 - DNA, 21 bp, Artificial sequence
  SiRNA target sequence
actgttgaatatgtcattagt

SEQ ID NO: 228899 - DNA, 21 bp, Artificial sequence
  SiRNA target sequence
ctgttgaatatgtcattagtc

SEQ ID NO: 228900 - DNA, 21 bp, Artificial sequence
  SiRNA target sequence
tgttgaatatgtcattagtcg

SEQ ID NO: 228901 - DNA, 21 bp, Artificial sequence
  SiRNA target sequence
gttgaatatgtcattagtcgt

SEQ ID NO: 228902 - DNA, 21 bp, Artificial sequence
  SiRNA target sequence
ttgaatatgtcattagtcgta

SEQ ID NO: 228903 - DNA, 21 bp, Artificial sequence
  SiRNA target sequence
tgaatatgtcattagtcgtat

SEQ ID NO: 228904 - DNA, 21 bp, Artificial sequence
  SiRNA target sequence
gaatatgtcattagtcgtatt

SEQ ID NO: 228905 - DNA, 21 bp, Artificial sequence
  SiRNA target sequence
aatatgtcattagtcgtatta

SEQ ID NO: 228906 - DNA, 21 bp, Artificial sequence
  SiRNA target sequence
atatgtcattagtcgtattat

SEQ ID NO: 228907 - DNA, 21 bp, Artificial sequence
  SiRNA target sequence
tatgtcattagtcgtattatt

SEQ ID NO: 228908 - DNA, 21 bp, Artificial sequence
  SiRNA target sequence
atgtcattagtcgtattattt

SEQ ID NO: 228909 - DNA, 21 bp, Artificial sequence
  SiRNA target sequence
tgtcattagtcgtattatttt

SEQ ID NO: 228910 - DNA, 21 bp, Artificial sequence
  SiRNA target sequence
gtcattagtcgtattatttta

SEQ ID NO: 228911 - DNA, 21 bp, Artificial sequence
  SiRNA target sequence
tcattagtcgtattattttat

SEQ ID NO: 228912 - DNA, 21 bp, Artificial sequence
  SiRNA target sequence
cattagtcgtattattttatg

SEQ ID NO: 228913 - DNA, 21 bp, Artificial sequence
  SiRNA target sequence
attagtcgtattattttatgc

SEQ ID NO: 228914 - DNA, 21 bp, Artificial sequence
  SiRNA target sequence
ttagtcgtattattttatgct

SEQ ID NO: 228915 - DNA, 21 bp, Artificial sequence
  SiRNA target sequence
tagtcgtattattttatgctg

SEQ ID NO: 228916 - DNA, 21 bp, Artificial sequence
  SiRNA target sequence
agtcgtattattttatgctgt

SEQ ID NO: 228917 - DNA, 21 bp, Artificial sequence
  SiRNA target sequence
gtcgtattattttatgctgtt

SEQ ID NO: 228918 - DNA, 21 bp, Artificial sequence
  SiRNA target sequence
tcgtattattttatgctgttt

SEQ ID NO: 228919 - DNA, 21 bp, Artificial sequence
  SiRNA target sequence
cgtattattttatgctgtttc

SEQ ID NO: 228920 - DNA, 21 bp, Artificial sequence
  SiRNA target sequence
gtattattttatgctgtttct

SEQ ID NO: 228921 - DNA, 21 bp, Artificial sequence
  SiRNA target sequence
tattattttatgctgtttcta

SEQ ID NO: 228922 - DNA, 21 bp, Artificial sequence
  SiRNA target sequence
attattttatgctgtttctac

SEQ ID NO: 228923 - DNA, 21 bp, Artificial sequence
  SiRNA target sequence
ttattttatgctgtttctacg

SEQ ID NO: 228924 - DNA, 21 bp, Artificial sequence
  SiRNA target sequence
tattttatgctgtttctacga

SEQ ID NO: 228925 - DNA, 21 bp, Artificial sequence
  SiRNA target sequence
attttatgctgtttctacgaa

SEQ ID NO: 228926 - DNA, 21 bp, Artificial sequence
  SiRNA target sequence
ttttatgctgtttctacgaat

SEQ ID NO: 228927 - DNA, 21 bp, Artificial sequence
  SiRNA target sequence
tttatgctgtttctacgaata

SEQ ID NO: 228928 - DNA, 21 bp, Artificial sequence
  SiRNA target sequence
ttatgctgtttctacgaatat

SEQ ID NO: 228929 - DNA, 21 bp, Artificial sequence
  SiRNA target sequence
tatgctgtttctacgaatatt

SEQ ID NO: 228930 - DNA, 21 bp, Artificial sequence
  SiRNA target sequence
atgctgtttctacgaatatta

SEQ ID NO: 228931 - DNA, 21 bp, Artificial sequence
  SiRNA target sequence
tgctgtttctacgaatattat

SEQ ID NO: 228932 - DNA, 21 bp, Artificial sequence
  SiRNA target sequence
gctgtttctacgaatattatt

SEQ ID NO: 228933 - DNA, 21 bp, Artificial sequence
  SiRNA target sequence
ctgtttctacgaatattattg

SEQ ID NO: 228934 - DNA, 21 bp, Artificial sequence
  SiRNA target sequence
tgtttctacgaatattattga

SEQ ID NO: 228935 - DNA, 21 bp, Artificial sequence
  SiRNA target sequence
gtttctacgaatattattgag

SEQ ID NO: 228936 - DNA, 21 bp, Artificial sequence
  SiRNA target sequence
tttctacgaatattattgagt

SEQ ID NO: 228937 - DNA, 21 bp, Artificial sequence
  SiRNA target sequence
ttctacgaatattattgagtc

SEQ ID NO: 228938 - DNA, 21 bp, Artificial sequence
  SiRNA target sequence
tctacgaatattattgagtca

SEQ ID NO: 228939 - DNA, 21 bp, Artificial sequence
  SiRNA target sequence
ctacgaatattattgagtcag

SEQ ID NO: 228940 - DNA, 21 bp, Artificial sequence
  SiRNA target sequence
tacgaatattattgagtcagc

SEQ ID NO: 228941 - DNA, 21 bp, Artificial sequence
  SiRNA target sequence
acgaatattattgagtcagct

SEQ ID NO: 228942 - DNA, 21 bp, Artificial sequence
  SiRNA target sequence
cgaatattattgagtcagctt

SEQ ID NO: 228943 - DNA, 21 bp, Artificial sequence
  SiRNA target sequence
gaatattattgagtcagctta

SEQ ID NO: 228944 - DNA, 21 bp, Artificial sequence
  SiRNA target sequence
aatattattgagtcagcttat

SEQ ID NO: 228945 - DNA, 21 bp, Artificial sequence
  SiRNA target sequence
atattattgagtcagcttata

SEQ ID NO: 228946 - DNA, 21 bp, Artificial sequence
  SiRNA target sequence
tattattgagtcagcttataa

SEQ ID NO: 228947 - DNA, 21 bp, Artificial sequence
  SiRNA target sequence
attattgagtcagcttataaa

SEQ ID NO: 228948 - DNA, 21 bp, Artificial sequence
  SiRNA target sequence
ttattgagtcagcttataaat

SEQ ID NO: 228949 - DNA, 21 bp, Artificial sequence
  SiRNA target sequence
tattgagtcagcttataaatc

SEQ ID NO: 228950 - DNA, 21 bp, Artificial sequence
  SiRNA target sequence
attgagtcagcttataaatct

SEQ ID NO: 228951 - DNA, 21 bp, Artificial sequence
  SiRNA target sequence
ttgagtcagcttataaatctg

SEQ ID NO: 228952 - DNA, 21 bp, Artificial sequence
  SiRNA target sequence
tgagtcagcttataaatctgc

SEQ ID NO: 228953 - DNA, 21 bp, Artificial sequence
  SiRNA target sequence
gagtcagcttataaatctgct

SEQ ID NO: 228954 - DNA, 21 bp, Artificial sequence
  SiRNA target sequence
agtcagcttataaatctgctt

SEQ ID NO: 228955 - DNA, 21 bp, Artificial sequence
  SiRNA target sequence
gtcagcttataaatctgcttt

SEQ ID NO: 228956 - DNA, 21 bp, Artificial sequence
  SiRNA target sequence
tcagcttataaatctgcttta

SEQ ID NO: 228957 - DNA, 21 bp, Artificial sequence
  SiRNA target sequence
cagcttataaatctgctttag

SEQ ID NO: 228958 - DNA, 21 bp, Artificial sequence
  SiRNA target sequence
agcttataaatctgctttagc

SEQ ID NO: 228959 - DNA, 21 bp, Artificial sequence
  SiRNA target sequence
gcttataaatctgctttagct

SEQ ID NO: 228960 - DNA, 21 bp, Artificial sequence
  SiRNA target sequence
cttataaatctgctttagctg

SEQ ID NO: 228961 - DNA, 21 bp, Artificial sequence
  SiRNA target sequence
ttataaatctgctttagctgt

SEQ ID NO: 228962 - DNA, 21 bp, Artificial sequence
  SiRNA target sequence
tataaatctgctttagctgtc

SEQ ID NO: 228963 - DNA, 21 bp, Artificial sequence
  SiRNA target sequence
ataaatctgctttagctgtcg

SEQ ID NO: 228964 - DNA, 21 bp, Artificial sequence
  SiRNA target sequence
taaatctgctttagctgtcgg

SEQ ID NO: 228965 - DNA, 21 bp, Artificial sequence
  SiRNA target sequence
aaatctgctttagctgtcggt

SEQ ID NO: 228966 - DNA, 21 bp, Artificial sequence
  SiRNA target sequence
aatctgctttagctgtcggtg

SEQ ID NO: 228967 - DNA, 21 bp, Artificial sequence
  SiRNA target sequence
atctgctttagctgtcggtgc

SEQ ID NO: 228968 - DNA, 21 bp, Artificial sequence
  SiRNA target sequence
tctgctttagctgtcggtgct

SEQ ID NO: 228969 - DNA, 21 bp, Artificial sequence
  SiRNA target sequence
ctgctttagctgtcggtgcta

SEQ ID NO: 228970 - DNA, 21 bp, Artificial sequence
  SiRNA target sequence
tgctttagctgtcggtgctaa

SEQ ID NO: 228971 - DNA, 21 bp, Artificial sequence
  SiRNA target sequence
gctttagctgtcggtgctaat

SEQ ID NO: 228972 - DNA, 21 bp, Artificial sequence
  SiRNA target sequence
ctttagctgtcggtgctaatg

SEQ ID NO: 228973 - DNA, 21 bp, Artificial sequence
  SiRNA target sequence
tttagctgtcggtgctaatga

SEQ ID NO: 228974 - DNA, 21 bp, Artificial sequence
  SiRNA target sequence
ttagctgtcggtgctaatgaa

SEQ ID NO: 228975 - DNA, 21 bp, Artificial sequence
  SiRNA target sequence
tagctgtcggtgctaatgaaa

SEQ ID NO: 228976 - DNA, 21 bp, Artificial sequence
  SiRNA target sequence
agctgtcggtgctaatgaaac

SEQ ID NO: 228977 - DNA, 21 bp, Artificial sequence
  SiRNA target sequence
gctgtcggtgctaatgaaact

SEQ ID NO: 228978 - DNA, 21 bp, Artificial sequence
  SiRNA target sequence
ctgtcggtgctaatgaaactg

SEQ ID NO: 228979 - DNA, 21 bp, Artificial sequence
  SiRNA target sequence
tgtcggtgctaatgaaactgg

SEQ ID NO: 228980 - DNA, 21 bp, Artificial sequence
  SiRNA target sequence
gtcggtgctaatgaaactggt

SEQ ID NO: 228981 - DNA, 21 bp, Artificial sequence
  SiRNA target sequence
tcggtgctaatgaaactggtg

SEQ ID NO: 228982 - DNA, 21 bp, Artificial sequence
  SiRNA target sequence
cggtgctaatgaaactggtga

SEQ ID NO: 228983 - DNA, 21 bp, Artificial sequence
  SiRNA target sequence
ggtgctaatgaaactggtgag

SEQ ID NO: 228984 - DNA, 21 bp, Artificial sequence
  SiRNA target sequence
gtgctaatgaaactggtgagg

SEQ ID NO: 228985 - DNA, 21 bp, Artificial sequence
  SiRNA target sequence
tgctaatgaaactggtgaggc

SEQ ID NO: 228986 - DNA, 21 bp, Artificial sequence
  SiRNA target sequence
gctaatgaaactggtgaggca

SEQ ID NO: 228987 - DNA, 21 bp, Artificial sequence
  SiRNA target sequence
ctaatgaaactggtgaggcaa

SEQ ID NO: 228988 - DNA, 21 bp, Artificial sequence
  SiRNA target sequence
taatgaaactggtgaggcaaa

SEQ ID NO: 228989 - DNA, 21 bp, Artificial sequence
  SiRNA target sequence
aatgaaactggtgaggcaaaa

SEQ ID NO: 228990 - DNA, 21 bp, Artificial sequence
  SiRNA target sequence
atgaaactggtgaggcaaaat

SEQ ID NO: 228991 - DNA, 21 bp, Artificial sequence
  SiRNA target sequence
tgaaactggtgaggcaaaatc

SEQ ID NO: 228992 - DNA, 21 bp, Artificial sequence
  SiRNA target sequence
gaaactggtgaggcaaaatct

SEQ ID NO: 228993 - DNA, 21 bp, Artificial sequence
  SiRNA target sequence
aaactggtgaggcaaaatcta

SEQ ID NO: 228994 - DNA, 21 bp, Artificial sequence
  SiRNA target sequence
aactggtgaggcaaaatctac

SEQ ID NO: 228995 - DNA, 21 bp, Artificial sequence
  SiRNA target sequence
actggtgaggcaaaatctacc

SEQ ID NO: 228996 - DNA, 21 bp, Artificial sequence
  SiRNA target sequence
ctggtgaggcaaaatctacct

SEQ ID NO: 228997 - DNA, 21 bp, Artificial sequence
  SiRNA target sequence
tggtgaggcaaaatctaccta

SEQ ID NO: 228998 - DNA, 21 bp, Artificial sequence
  SiRNA target sequence
ggtgaggcaaaatctacctat

SEQ ID NO: 228999 - DNA, 21 bp, Artificial sequence
  SiRNA target sequence
gtgaggcaaaatctacctatg

SEQ ID NO: 229000 - DNA, 21 bp, Artificial sequence
  SiRNA target sequence
tgaggcaaaatctacctatgc

SEQ ID NO: 229001 - DNA, 21 bp, Artificial sequence
  SiRNA target sequence
gaggcaaaatctacctatgct

SEQ ID NO: 229002 - DNA, 21 bp, Artificial sequence
  SiRNA target sequence
aggcaaaatctacctatgctt

SEQ ID NO: 229003 - DNA, 21 bp, Artificial sequence
  SiRNA target sequence
ggcaaaatctacctatgcttc

SEQ ID NO: 229004 - DNA, 21 bp, Artificial sequence
  SiRNA target sequence
gcaaaatctacctatgcttca

SEQ ID NO: 229005 - DNA, 21 bp, Artificial sequence
  SiRNA target sequence
caaaatctacctatgcttcaa

SEQ ID NO: 229006 - DNA, 21 bp, Artificial sequence
  SiRNA target sequence
aaaatctacctatgcttcaat

SEQ ID NO: 229007 - DNA, 21 bp, Artificial sequence
  SiRNA target sequence
aaatctacctatgcttcaatt

SEQ ID NO: 229008 - DNA, 21 bp, Artificial sequence
  SiRNA target sequence
aatctacctatgcttcaattt

SEQ ID NO: 229009 - DNA, 21 bp, Artificial sequence
  SiRNA target sequence
atctacctatgcttcaattta

SEQ ID NO: 229010 - DNA, 21 bp, Artificial sequence
  SiRNA target sequence
tctacctatgcttcaatttat

SEQ ID NO: 229011 - DNA, 21 bp, Artificial sequence
  SiRNA target sequence
ctacctatgcttcaatttata

SEQ ID NO: 229012 - DNA, 21 bp, Artificial sequence
  SiRNA target sequence
tacctatgcttcaatttatac

SEQ ID NO: 229013 - DNA, 21 bp, Artificial sequence
  SiRNA target sequence
acctatgcttcaatttataca

SEQ ID NO: 229014 - DNA, 21 bp, Artificial sequence
  SiRNA target sequence
cctatgcttcaatttatacat

SEQ ID NO: 229015 - DNA, 21 bp, Artificial sequence
  SiRNA target sequence
ctatgcttcaatttatacatc

SEQ ID NO: 229016 - DNA, 21 bp, Artificial sequence
  SiRNA target sequence
tatgcttcaatttatacatca

SEQ ID NO: 229017 - DNA, 21 bp, Artificial sequence
  SiRNA target sequence
atgcttcaatttatacatcaa

SEQ ID NO: 229018 - DNA, 21 bp, Artificial sequence
  SiRNA target sequence
tgcttcaatttatacatcaat

SEQ ID NO: 229019 - DNA, 21 bp, Artificial sequence
  SiRNA target sequence
gcttcaatttatacatcaatt

SEQ ID NO: 229020 - DNA, 21 bp, Artificial sequence
  SiRNA target sequence
cttcaatttatacatcaattg

SEQ ID NO: 229021 - DNA, 21 bp, Artificial sequence
  SiRNA target sequence
ttcaatttatacatcaattga

SEQ ID NO: 229022 - DNA, 21 bp, Artificial sequence
  SiRNA target sequence
tcaatttatacatcaattgaa

SEQ ID NO: 229023 - DNA, 21 bp, Artificial sequence
  SiRNA target sequence
caatttatacatcaattgaac

SEQ ID NO: 229024 - DNA, 21 bp, Artificial sequence
  SiRNA target sequence
aatttatacatcaattgaaca

SEQ ID NO: 229025 - DNA, 21 bp, Artificial sequence
  SiRNA target sequence
atttatacatcaattgaacaa

SEQ ID NO: 229026 - DNA, 21 bp, Artificial sequence
  SiRNA target sequence
tttatacatcaattgaacaat

SEQ ID NO: 229027 - DNA, 21 bp, Artificial sequence
  SiRNA target sequence
ttatacatcaattgaacaatc

SEQ ID NO: 229028 - DNA, 21 bp, Artificial sequence
  SiRNA target sequence
tatacatcaattgaacaatct

SEQ ID NO: 229029 - DNA, 21 bp, Artificial sequence
  SiRNA target sequence
atacatcaattgaacaatctg

SEQ ID NO: 229030 - DNA, 21 bp, Artificial sequence
  SiRNA target sequence
tacatcaattgaacaatctgg

SEQ ID NO: 229031 - DNA, 21 bp, Artificial sequence
  SiRNA target sequence
acatcaattgaacaatctgga

SEQ ID NO: 229032 - DNA, 21 bp, Artificial sequence
  SiRNA target sequence
catcaattgaacaatctggag

SEQ ID NO: 229033 - DNA, 21 bp, Artificial sequence
  SiRNA target sequence
atcaattgaacaatctggagt

SEQ ID NO: 229034 - DNA, 21 bp, Artificial sequence
  SiRNA target sequence
tcaattgaacaatctggagtt

SEQ ID NO: 229035 - DNA, 21 bp, Artificial sequence
  SiRNA target sequence
caattgaacaatctggagttg

SEQ ID NO: 229036 - DNA, 21 bp, Artificial sequence
  SiRNA target sequence
aattgaacaatctggagttgc

SEQ ID NO: 229037 - DNA, 21 bp, Artificial sequence
  SiRNA target sequence
attgaacaatctggagttgct

SEQ ID NO: 229038 - DNA, 21 bp, Artificial sequence
  SiRNA target sequence
ttgaacaatctggagttgctg

SEQ ID NO: 229039 - DNA, 21 bp, Artificial sequence
  SiRNA target sequence
tgaacaatctggagttgctgt

SEQ ID NO: 229040 - DNA, 21 bp, Artificial sequence
  SiRNA target sequence
gaacaatctggagttgctgtt

SEQ ID NO: 229041 - DNA, 21 bp, Artificial sequence
  SiRNA target sequence
aacaatctggagttgctgtta

SEQ ID NO: 229042 - DNA, 21 bp, Artificial sequence
  SiRNA target sequence
acaatctggagttgctgttat

SEQ ID NO: 229043 - DNA, 21 bp, Artificial sequence
  SiRNA target sequence
caatctggagttgctgttatt

SEQ ID NO: 229044 - DNA, 21 bp, Artificial sequence
  SiRNA target sequence
aatctggagttgctgttattg

SEQ ID NO: 229045 - DNA, 21 bp, Artificial sequence
  SiRNA target sequence
atctggagttgctgttattgt

SEQ ID NO: 229046 - DNA, 21 bp, Artificial sequence
  SiRNA target sequence
tctggagttgctgttattgtc

SEQ ID NO: 229047 - DNA, 21 bp, Artificial sequence
  SiRNA target sequence
ctggagttgctgttattgtca

SEQ ID NO: 229048 - DNA, 21 bp, Artificial sequence
  SiRNA target sequence
tggagttgctgttattgtcat

SEQ ID NO: 229049 - DNA, 21 bp, Artificial sequence
  SiRNA target sequence
ggagttgctgttattgtcatg

SEQ ID NO: 229050 - DNA, 21 bp, Artificial sequence
  SiRNA target sequence
gagttgctgttattgtcatga

SEQ ID NO: 229051 - DNA, 21 bp, Artificial sequence
  SiRNA target sequence
agttgctgttattgtcatgat

SEQ ID NO: 229052 - DNA, 21 bp, Artificial sequence
  SiRNA target sequence
gttgctgttattgtcatgatt

SEQ ID NO: 229053 - DNA, 21 bp, Artificial sequence
  SiRNA target sequence
ttgctgttattgtcatgattt

SEQ ID NO: 229054 - DNA, 21 bp, Artificial sequence
  SiRNA target sequence
tgctgttattgtcatgatttt

SEQ ID NO: 229055 - DNA, 21 bp, Artificial sequence
  SiRNA target sequence
gctgttattgtcatgattttg

SEQ ID NO: 229056 - DNA, 21 bp, Artificial sequence
  SiRNA target sequence
ctgttattgtcatgattttgc

SEQ ID NO: 229057 - DNA, 21 bp, Artificial sequence
  SiRNA target sequence
tgttattgtcatgattttgct

SEQ ID NO: 229058 - DNA, 21 bp, Artificial sequence
  SiRNA target sequence
gttattgtcatgattttgcta

SEQ ID NO: 229059 - DNA, 21 bp, Artificial sequence
  SiRNA target sequence
ttattgtcatgattttgctac

SEQ ID NO: 229060 - DNA, 21 bp, Artificial sequence
  SiRNA target sequence
tattgtcatgattttgctact

SEQ ID NO: 229061 - DNA, 21 bp, Artificial sequence
  SiRNA target sequence
attgtcatgattttgctactt

SEQ ID NO: 229062 - DNA, 21 bp, Artificial sequence
  SiRNA target sequence
ttgtcatgattttgctactta

SEQ ID NO: 229063 - DNA, 21 bp, Artificial sequence
  SiRNA target sequence
tgtcatgattttgctacttac

SEQ ID NO: 229064 - DNA, 21 bp, Artificial sequence
  SiRNA target sequence
gtcatgattttgctacttacc

SEQ ID NO: 229065 - DNA, 21 bp, Artificial sequence
  SiRNA target sequence
tcatgattttgctacttaccc

SEQ ID NO: 229066 - DNA, 21 bp, Artificial sequence
  SiRNA target sequence
catgattttgctacttacccc

SEQ ID NO: 229067 - DNA, 21 bp, Artificial sequence
  SiRNA target sequence
atgattttgctacttacccct

SEQ ID NO: 229068 - DNA, 21 bp, Artificial sequence
  SiRNA target sequence
tgattttgctacttacccctt

SEQ ID NO: 229069 - DNA, 21 bp, Artificial sequence
  SiRNA target sequence
gattttgctacttaccccttt

SEQ ID NO: 229070 - DNA, 21 bp, Artificial sequence
  SiRNA target sequence
attttgctacttacccctttt

SEQ ID NO: 229071 - DNA, 21 bp, Artificial sequence
  SiRNA target sequence
ttttgctacttaccccttttc

SEQ ID NO: 229072 - DNA, 21 bp, Artificial sequence
  SiRNA target sequence
tttgctacttaccccttttcc

SEQ ID NO: 229073 - DNA, 21 bp, Artificial sequence
  SiRNA target sequence
ttgctacttaccccttttcca

SEQ ID NO: 229074 - DNA, 21 bp, Artificial sequence
  SiRNA target sequence
tgctacttaccccttttccaa

SEQ ID NO: 229075 - DNA, 21 bp, Artificial sequence
  SiRNA target sequence
gctacttaccccttttccaag

SEQ ID NO: 229076 - DNA, 21 bp, Artificial sequence
  SiRNA target sequence
ctacttaccccttttccaagg

SEQ ID NO: 229077 - DNA, 21 bp, Artificial sequence
  SiRNA target sequence
tacttaccccttttccaaggc

SEQ ID NO: 229078 - DNA, 21 bp, Artificial sequence
  SiRNA target sequence
acttaccccttttccaaggct

SEQ ID NO: 229079 - DNA, 21 bp, Artificial sequence
  SiRNA target sequence
cttaccccttttccaaggctt

SEQ ID NO: 229080 - DNA, 21 bp, Artificial sequence
  SiRNA target sequence
ttaccccttttccaaggctta

SEQ ID NO: 229081 - DNA, 21 bp, Artificial sequence
  SiRNA target sequence
taccccttttccaaggcttat

SEQ ID NO: 229082 - DNA, 21 bp, Artificial sequence
  SiRNA target sequence
accccttttccaaggcttatt

SEQ ID NO: 229083 - DNA, 21 bp, Artificial sequence
  SiRNA target sequence
ccccttttccaaggcttatta

SEQ ID NO: 229084 - DNA, 21 bp, Artificial sequence
  SiRNA target sequence
cccttttccaaggcttattaa

SEQ ID NO: 229085 - DNA, 21 bp, Artificial sequence
  SiRNA target sequence
ccttttccaaggcttattaaa

SEQ ID NO: 229086 - DNA, 21 bp, Artificial sequence
  SiRNA target sequence
cttttccaaggcttattaaaa

SEQ ID NO: 229087 - DNA, 21 bp, Artificial sequence
  SiRNA target sequence
ttttccaaggcttattaaaac

SEQ ID NO: 229088 - DNA, 21 bp, Artificial sequence
  SiRNA target sequence
tttccaaggcttattaaaaca

SEQ ID NO: 229089 - DNA, 21 bp, Artificial sequence
  SiRNA target sequence
ttccaaggcttattaaaacaa

SEQ ID NO: 229090 - DNA, 21 bp, Artificial sequence
  SiRNA target sequence
tccaaggcttattaaaacaaa

SEQ ID NO: 229091 - DNA, 21 bp, Artificial sequence
  SiRNA target sequence
ccaaggcttattaaaacaaaa

SEQ ID NO: 229092 - DNA, 21 bp, Artificial sequence
  SiRNA target sequence
caaggcttattaaaacaaaag

SEQ ID NO: 229093 - DNA, 21 bp, Artificial sequence
  SiRNA target sequence
aaggcttattaaaacaaaagg

SEQ ID NO: 229094 - DNA, 21 bp, Artificial sequence
  SiRNA target sequence
aggcttattaaaacaaaagga

SEQ ID NO: 229095 - DNA, 21 bp, Artificial sequence
  SiRNA target sequence
ggcttattaaaacaaaaggat

SEQ ID NO: 229096 - DNA, 21 bp, Artificial sequence
  SiRNA target sequence
gcttattaaaacaaaaggatg

SEQ ID NO: 229097 - DNA, 21 bp, Artificial sequence
  SiRNA target sequence
cttattaaaacaaaaggatgg

SEQ ID NO: 229098 - DNA, 21 bp, Artificial sequence
  SiRNA target sequence
ttattaaaacaaaaggatgga

SEQ ID NO: 229099 - DNA, 21 bp, Artificial sequence
  SiRNA target sequence
tattaaaacaaaaggatggat

SEQ ID NO: 229100 - DNA, 21 bp, Artificial sequence
  SiRNA target sequence
attaaaacaaaaggatggatt

SEQ ID NO: 229101 - DNA, 21 bp, Artificial sequence
  SiRNA target sequence
ttaaaacaaaaggatggatta

SEQ ID NO: 229102 - DNA, 21 bp, Artificial sequence
  SiRNA target sequence
taaaacaaaaggatggattac

SEQ ID NO: 229103 - DNA, 21 bp, Artificial sequence
  SiRNA target sequence
aaaacaaaaggatggattaca

SEQ ID NO: 229104 - DNA, 21 bp, Artificial sequence
  SiRNA target sequence
aaacaaaaggatggattacaa

SEQ ID NO: 229105 - DNA, 21 bp, Artificial sequence
  SiRNA target sequence
aacaaaaggatggattacaat

SEQ ID NO: 229106 - DNA, 21 bp, Artificial sequence
  SiRNA target sequence
acaaaaggatggattacaata

SEQ ID NO: 229107 - DNA, 21 bp, Artificial sequence
  SiRNA target sequence
caaaaggatggattacaatag

SEQ ID NO: 229108 - DNA, 21 bp, Artificial sequence
  SiRNA target sequence
aaaaggatggattacaatagc

SEQ ID NO: 229109 - DNA, 21 bp, Artificial sequence
  SiRNA target sequence
aaaggatggattacaatagcc

SEQ ID NO: 229110 - DNA, 21 bp, Artificial sequence
  SiRNA target sequence
aaggatggattacaatagcca

SEQ ID NO: 229111 - DNA, 21 bp, Artificial sequence
  SiRNA target sequence
aggatggattacaatagccat

SEQ ID NO: 229112 - DNA, 21 bp, Artificial sequence
  SiRNA target sequence
ggatggattacaatagccatt

SEQ ID NO: 229113 - DNA, 21 bp, Artificial sequence
  SiRNA target sequence
gatggattacaatagccattc

SEQ ID NO: 229114 - DNA, 21 bp, Artificial sequence
  SiRNA target sequence
atggattacaatagccattct

SEQ ID NO: 229115 - DNA, 21 bp, Artificial sequence
  SiRNA target sequence
tggattacaatagccattcta

SEQ ID NO: 229116 - DNA, 21 bp, Artificial sequence
  SiRNA target sequence
ggattacaatagccattctat

SEQ ID NO: 229117 - DNA, 21 bp, Artificial sequence
  SiRNA target sequence
gattacaatagccattctatg

SEQ ID NO: 229118 - DNA, 21 bp, Artificial sequence
  SiRNA target sequence
attacaatagccattctatgt

SEQ ID NO: 229119 - DNA, 21 bp, Artificial sequence
  SiRNA target sequence
ttacaatagccattctatgtc

SEQ ID NO: 229120 - DNA, 21 bp, Artificial sequence
  SiRNA target sequence
tacaatagccattctatgtcc

SEQ ID NO: 229121 - DNA, 21 bp, Artificial sequence
  SiRNA target sequence
acaatagccattctatgtcct

SEQ ID NO: 229122 - DNA, 21 bp, Artificial sequence
  SiRNA target sequence
caatagccattctatgtccta

SEQ ID NO: 229123 - DNA, 21 bp, Artificial sequence
  SiRNA target sequence
aatagccattctatgtcctat

SEQ ID NO: 229124 - DNA, 21 bp, Artificial sequence
  SiRNA target sequence
atagccattctatgtcctatt

SEQ ID NO: 229125 - DNA, 21 bp, Artificial sequence
  SiRNA target sequence
tagccattctatgtcctatta

SEQ ID NO: 229126 - DNA, 21 bp, Artificial sequence
  SiRNA target sequence
agccattctatgtcctattat

SEQ ID NO: 229127 - DNA, 21 bp, Artificial sequence
  SiRNA target sequence
gccattctatgtcctattatt

SEQ ID NO: 229128 - DNA, 21 bp, Artificial sequence
  SiRNA target sequence
ccattctatgtcctattatta

SEQ ID NO: 229129 - DNA, 21 bp, Artificial sequence
  SiRNA target sequence
cattctatgtcctattattac

SEQ ID NO: 229130 - DNA, 21 bp, Artificial sequence
  SiRNA target sequence
attctatgtcctattattact

SEQ ID NO: 229131 - DNA, 21 bp, Artificial sequence
  SiRNA target sequence
ttctatgtcctattattactt

SEQ ID NO: 229132 - DNA, 21 bp, Artificial sequence
  SiRNA target sequence
tctatgtcctattattacttt

SEQ ID NO: 229133 - DNA, 21 bp, Artificial sequence
  SiRNA target sequence
ctatgtcctattattactttt

SEQ ID NO: 229134 - DNA, 21 bp, Artificial sequence
  SiRNA target sequence
tatgtcctattattacttttt

SEQ ID NO: 229135 - DNA, 21 bp, Artificial sequence
  SiRNA target sequence
atgtcctattattactttttt

SEQ ID NO: 229136 - DNA, 21 bp, Artificial sequence
  SiRNA target sequence
tgtcctattattacttttttt

SEQ ID NO: 229137 - DNA, 21 bp, Artificial sequence
  SiRNA target sequence
gtcctattattactttttttt

SEQ ID NO: 229138 - DNA, 21 bp, Artificial sequence
  SiRNA target sequence
tcctattattacttttttttc

SEQ ID NO: 229139 - DNA, 21 bp, Artificial sequence
  SiRNA target sequence
cctattattacttttttttct

SEQ ID NO: 229140 - DNA, 21 bp, Artificial sequence
  SiRNA target sequence
ctattattacttttttttctg

SEQ ID NO: 229141 - DNA, 21 bp, Artificial sequence
  SiRNA target sequence
tattattacttttttttctgc

SEQ ID NO: 229142 - DNA, 21 bp, Artificial sequence
  SiRNA target sequence
attattacttttttttctgct

SEQ ID NO: 229143 - DNA, 21 bp, Artificial sequence
  SiRNA target sequence
ttattacttttttttctgctt

SEQ ID NO: 229144 - DNA, 21 bp, Artificial sequence
  SiRNA target sequence
tattacttttttttctgcttt

SEQ ID NO: 229145 - DNA, 21 bp, Artificial sequence
  SiRNA target sequence
attacttttttttctgctttt

SEQ ID NO: 229146 - DNA, 21 bp, Artificial sequence
  SiRNA target sequence
ttacttttttttctgcttttg

SEQ ID NO: 229147 - DNA, 21 bp, Artificial sequence
  SiRNA target sequence
tacttttttttctgcttttgg

SEQ ID NO: 229148 - DNA, 21 bp, Artificial sequence
  SiRNA target sequence
acttttttttctgcttttggt

SEQ ID NO: 229149 - DNA, 21 bp, Artificial sequence
  SiRNA target sequence
cttttttttctgcttttggta

SEQ ID NO: 229150 - DNA, 21 bp, Artificial sequence
  SiRNA target sequence
ttttttttctgcttttggtac

SEQ ID NO: 229151 - DNA, 21 bp, Artificial sequence
  SiRNA target sequence
tttttttctgcttttggtact

SEQ ID NO: 229152 - DNA, 21 bp, Artificial sequence
  SiRNA target sequence
ttttttctgcttttggtactt

SEQ ID NO: 229153 - DNA, 21 bp, Artificial sequence
  SiRNA target sequence
tttttctgcttttggtacttt

SEQ ID NO: 229154 - DNA, 21 bp, Artificial sequence
  SiRNA target sequence
ttttctgcttttggtactttt

SEQ ID NO: 229155 - DNA, 21 bp, Artificial sequence
  SiRNA target sequence
tttctgcttttggtacttttg

SEQ ID NO: 229156 - DNA, 21 bp, Artificial sequence
  SiRNA target sequence
ttctgcttttggtacttttgt

SEQ ID NO: 229157 - DNA, 21 bp, Artificial sequence
  SiRNA target sequence
tctgcttttggtacttttgta

SEQ ID NO: 229158 - DNA, 21 bp, Artificial sequence
  SiRNA target sequence
ctgcttttggtacttttgtat

SEQ ID NO: 229159 - DNA, 21 bp, Artificial sequence
  SiRNA target sequence
tgcttttggtacttttgtatt

SEQ ID NO: 229160 - DNA, 21 bp, Artificial sequence
  SiRNA target sequence
gcttttggtacttttgtatta

SEQ ID NO: 229161 - DNA, 21 bp, Artificial sequence
  SiRNA target sequence
cttttggtacttttgtattag

SEQ ID NO: 229162 - DNA, 21 bp, Artificial sequence
  SiRNA target sequence
ttttggtacttttgtattagc

SEQ ID NO: 229163 - DNA, 21 bp, Artificial sequence
  SiRNA target sequence
tttggtacttttgtattagct

SEQ ID NO: 229164 - DNA, 21 bp, Artificial sequence
  SiRNA target sequence
ttggtacttttgtattagctt

SEQ ID NO: 229165 - DNA, 21 bp, Artificial sequence
  SiRNA target sequence
tggtacttttgtattagctta

SEQ ID NO: 229166 - DNA, 21 bp, Artificial sequence
  SiRNA target sequence
ggtacttttgtattagcttat

SEQ ID NO: 229167 - DNA, 21 bp, Artificial sequence
  SiRNA target sequence
gtacttttgtattagcttatt

SEQ ID NO: 229168 - DNA, 21 bp, Artificial sequence
  SiRNA target sequence
tacttttgtattagcttattt

SEQ ID NO: 229169 - DNA, 21 bp, Artificial sequence
  SiRNA target sequence
acttttgtattagcttattta

SEQ ID NO: 229170 - DNA, 21 bp, Artificial sequence
  SiRNA target sequence
cttttgtattagcttatttaa

SEQ ID NO: 229171 - DNA, 21 bp, Artificial sequence
  SiRNA target sequence
ttttgtattagcttatttaaa

SEQ ID NO: 229172 - DNA, 21 bp, Artificial sequence
  SiRNA target sequence
tttgtattagcttatttaaac

SEQ ID NO: 229173 - DNA, 21 bp, Artificial sequence
  SiRNA target sequence
ttgtattagcttatttaaact

SEQ ID NO: 229174 - DNA, 21 bp, Artificial sequence
  SiRNA target sequence
tgtattagcttatttaaactt

SEQ ID NO: 229175 - DNA, 21 bp, Artificial sequence
  SiRNA target sequence
gtattagcttatttaaacttc

SEQ ID NO: 229176 - DNA, 21 bp, Artificial sequence
  SiRNA target sequence
tattagcttatttaaacttcc

SEQ ID NO: 229177 - DNA, 21 bp, Artificial sequence
  SiRNA target sequence
attagcttatttaaacttccc

SEQ ID NO: 229178 - DNA, 21 bp, Artificial sequence
  SiRNA target sequence
ttagcttatttaaacttccca

SEQ ID NO: 229179 - DNA, 21 bp, Artificial sequence
  SiRNA target sequence
tagcttatttaaacttcccaa

SEQ ID NO: 229180 - DNA, 21 bp, Artificial sequence
  SiRNA target sequence
agcttatttaaacttcccaat

SEQ ID NO: 229181 - DNA, 21 bp, Artificial sequence
  SiRNA target sequence
gcttatttaaacttcccaatt

SEQ ID NO: 229182 - DNA, 21 bp, Artificial sequence
  SiRNA target sequence
cttatttaaacttcccaatta

SEQ ID NO: 229183 - DNA, 21 bp, Artificial sequence
  SiRNA target sequence
ttatttaaacttcccaattac

SEQ ID NO: 229184 - DNA, 21 bp, Artificial sequence
  SiRNA target sequence
tatttaaacttcccaattaca

SEQ ID NO: 229185 - DNA, 21 bp, Artificial sequence
  SiRNA target sequence
atttaaacttcccaattacaa
